United States Patent Application Publication US 2024/0301379 A1 - sequence listing, part 11

SEQ ID NO: 20585 - protein, 1397 aa, unidentified
  REGION 1..1397: note = Cas Enzyme sequence
MWNPKKGDYENSLFEPCSVISYGNQLRYFYYKQIDFFCQEWRGTKMNKKYYLGLDIGTNSVGWAVTDENYNLYKYAGKRMWGIRLFEAADTAAERRMKRSNRRRLSRKKQRIDLLQELFSEEIVKKDLTFFIRLNESRLHFEDKSTGEKYPLFVDKEYTDIDYHKQYPTMYHLRKELIENPEPHDIRLVYLACHHILKNRGHFLINGSISDVKNLSFVCGEMIKEFNSVSEYEISLTDIRELERILSDKKTAKSVKAKQVAQLFECTPAEDKEQQKCAKAIITNLSKLIVGLKGNISKMFHQPLEEISTKSFKFTEAKYEDEIMPAIEENYPDYATVIDRIKGVYDWSVLVEILDGEDYLSFAKVKAYEKHGKNLHILKNIMKKYCKDEVYQAFFNGINEKNGYGNYIGAIRKNGYTYKMDRCKSEEDFYKGLQKILSTIVPDQEDEELLEKLKAEVENQTLLPLARSKENGTIPNQVHLQELMKILDNAKEYLDFLKKEDEYGTIAEKIISIAKFRIPYYVGPLSRRHKEEGSNSWMIRKEEGRIYPWNFGDKVDVEQSNKEFIERMTNKCTYLIGEDVLPKNSLLYSKYMVLNELNNLKIRGNKISVELKQRIYKDLFCTMAKVTGKRILEYLKMEDPEIVQEDISGFDIDFKSALTSYLDFKKQVVGDEIEKDHYKEIIEEIIKWKTIYDDDSKMMRRMIEREYPEIFDKEQIKKICQLKYSGWGNFSDRFLNDVRGADKETGESYTIIEALWKTNYNLMQLLSKQFSFKEEIDQINAEKAGDVGKINYENTVKDLIVSPSNKRAIWQTIQIAEEIKKVMKCEPERIFIEMARGGEKEKKRTVSRKTRLQELYAGCKDDTRNWMKEIGDREEREFNSRKLYLYYTQMGKCMYTGDEIDVDALMKGNSNWDIDHIYPQSRIKDDSLDNMVLVRKDVNNKKRNKILSPKIREDMKGYWTMLCQKGLISKRKYDRLTRTTDFTDEELSGFIERQLVETRQSSKAVAELLNRLYKDSEVVYVKAGLVSDFRHDNDLLKSRRVNDYHHAKDAFLNIVVGNVYHARFTSNPRKWIKDNRDSNYSIRRVFNYDVKQGDKIVWHGSENGGHSIDQIKKIMSRNDILYTEYTYCEKGQLFNETLAKKGNEKAIALKKNLDPVKYGGYTTPKTSAFAFVEFDGKKKERKNHIVEIPVYVVNIAKREPDAVKKYLEERKGYSNVVIKKYPIKKNSLIKMDGYLARLRGGDDNRIEIKNAVQLILNKNIYEIIRKTEKYIEHNQQYEVNSEFDGFTEEDLYKVYKELCLKLKNSIYKKRPVQQLKILEQGVEKFKSLESLKDKAKIINELLVMFRCDATTEMNLKAIGGASSAGRMRVYKNTLASKQLKLIYQSITGLFETEEELI

SEQ ID NO: 20586 - protein, 1352 aa, unidentified
  REGION 1..1352: note = Cas Enzyme sequence
MNKKYYLGLDIGTNSVGWAVTDENYNLYKYAGKRMWGIRLFEAADTAAERRMKRSNRRRLSRKKQRIDLLQELFSEEIVKKDLTFFIRLNESRLHFEDKSTGEKYPLFVDKEYTDIDYHKQYPTMYHLRKELIENPEPHDIRLVYLACHHILKNRGHFLINGSISDVKNLSFVCGEMIKEFNSVSEYEISLTDIRELERILSDKKTAKSVKAKQVAQLFECTPAEDKEQQKCAKAIITNLSKLIVGLKGNISKMFHQPLEEISTKSFKFTEAKYEDEIMPAIEENYPDYATVIDRIKGVYDWSVLVEILDGEDYLSFAKVKAYEKHGKNLHILKNIMKKYCKDEVYQAFFNGINEKNGYGNYIGAIRKNGYTYKMDRCKSEEDFYKGLQKILSTIVPDQEDEELLEKLKAEVENQTLLPLARSKENGTIPNQVHLQELMKILDNAKEYLDFLKKEDEYGTIAEKIISIAKFRIPYYVGPLSRRHKEEGSNSWMIRKEEGRIYPWNFGDKVDVEQSNKEFIERMTNKCTYLIGEDVLPKNSLLYSKYMVLNELNNLKIRGNKISVELKQRIYKDLFCTMAKVTGKRILEYLKMEDPEIVQEDISGFDIDFKSALTSYLDFKKQVVGDEIEKDHYKEIIEEIIKWKTIYDDDSKMMRRMIEREYPEIFDKEQIKKICQLKYSGWGNFSDRFLNDVRGADKETGESYTIIEALWKTNYNLMQLLSKQFSFKEEIDQINAEKAGDVGKINYENTVKDLIVSPSNKRAIWQTIQIAEEIKKVMKCEPERIFIEMARGGEKEKKRTVSRKTRLQELYAGCKDDTRNWMKEIGDREEREFNSRKLYLYYTQMGKCMYTGDEIDVDALMKGNSNWDIDHIYPQSRIKDDSLDNMVLVRKDVNNKKRNKILSPKIREDMKGYWTMLCQKGLISKRKYDRLTRTTDFTDEELSGFIERQLVETRQSSKAVAELLNRLYKDSEVVYVKAGLVSDFRHDNDLLKSRRVNDYHHAKDAFLNIVVGNVYHARFTSNPRKWIKDNRDSNYSIRRVFNYDVKQGDKIVWHGSENGGHSIDQIKKIMSRNDILYTEYTYCEKGQLFNETLAKKGNEKAIALKKNLDPVKYGGYTTPKTSAFAFVEFDGKKKERKNHIVEIPVYVVNIAKREPDAVKKYLEERKGYSNVVIKKYPIKKNSLIKMDGYLARLRGGDDNRIEIKNAVQLILNKNIYEIIRKTEKYIEHNQQYEVNSEFDGFTEEDLYKVYKELCLKLKNSIYKKRPVQQLKILEQGVEKFKSLESLKDKAKIINELLVMFRCDATTEMNLKAIGGASSAGRMRVYKNTLASKQLKLIYQSITGLFETEEELI

SEQ ID NO: 20587 - protein, 1397 aa, unidentified
  REGION 1..1397: note = Cas Enzyme sequence
MWNPKKGDYENSLFEPCSVISYGNQLRYFYYKQIDFFCQEWRGTKMNKKYYLGLDIGTNSVGWAVTDENYNLYKYAGKRMWGIRLFEAADTAAERRTKRSNRRRLSRKKQRIDLLQELFSKEIAKKDPTFFIRLNESGLHLEDKSTGEKYPLFVDKEYTDIDYHKQYPTMYHLRKELIENPEPHDIRLVYLACHHILKNRGHFLINGSISDVKNLSFVCGEMIKEFNSVSEYEISLTDIRELERILSDKKTAKSVKAKQVAQLFECTPAEDKEQQKCAKAIITNLSKLIVGLKGDISKMFHQPLEEISTKSFKFTEAKYEDEIMPAIEENYPDYASVIDRIKGVYDWSVLVEILDGEDYLSFAKVKAYEKHGKNLHILKNVMKKYCKDEVYQAFFNGINEKNGYGNYIGAIRKNGHTYKMDRCKSEEDFYKGLQKILSMIVPDQEDEELLEKLKTEVENQTLLPLARSKENGTIPNQVHLQELMKILDNAKGYLDFLKKEDEYGTIAEKIISIAKFRIPYYVGPLSRRHKGEGSNSWMIRKEEGRIYPWNFGDKVDVEQSNKEFIERMTNKCTYLIGEDVLPKNSLLYSKYMVLNELNNLKIRGNKISVELKQRIYKDLFCTMAKVTGKRILEYLKMEDPEIVQEDISGFDIDFKSALTSYLDFKKQVVGNEIEKDHYKEIIEEIIKWKTIYDDDSKMMRRMIEREYPEVFDKEQIKKICQLKYSGWGNFSDRFLNGVRGADKETGESYTIIEALWKTNYNLMQLLSKQFSFKEEIDQINAEKAGDVGKINYENTVKDLIVSPSNKRAIWQTIQIAEEIKKVMKCEPERIFIEMARGGEKEKKRTASRKTRLQELYAGCKDDTRNWMKEIGDREEREFNSRKLYLYYTQMGKCMYTGDEIDVDALMKGNSNWDIDHIYPQSRIKDDSLDNMVLVRKDVNNKKRNKILSPKIREDMKGYWTMLCQKGLISKRKYDRLTRTTDFTDEELSGFIERQLVETRQSSKAVAELLNRLYKDSEVVYVKAGLVSDFRHDNDLLKSRRVNDYHHAKDAFLNIVVGNVYHARFTSNPRKWMKDNRDSNYSIRRVFNYDVKQGDKIVWHGSENGGHSIDQIKKIMSRNDILYTEYTYCEKGQLFNETLAKKGNEKAIALKKNLDPVKYGGYTTPKTSAFAFVEFDGKKKERKNHIVEIPVYVVNIAKREPDAVKKYLEERKGYSNVVIKKYPIKKNSLIKMDGYLARLRGANETDIILKNAVQLILNKDLYEIVRKIEKYLEYNSQYQADAKFEGFTMKDLNMIYEELYLKLKESIFQKRPAQQMKTLEKGKEAFISIDNLGEKAKVINEIITMFRCDATTVANLKAINGSQNAGSMKVKKNTLTSKSLKVVHQSITGLFETEEELV

SEQ ID NO: 20588 - protein, 1352 aa, unidentified
  REGION 1..1352: note = Cas Enzyme sequence
MNKKYYLGLDIGTNSVGWAVTDENYNLFKYAGKRMWGIRLFEAADTAAERRTKRSNRRRLSRKKQRIDLLQELFSKEIAKKDPTFFIRLNESGLHLEDKSTGEKYPLFVDKEYTDIDYHKEYPTMYHLRKELIENPEPHDIRLVYLACHHILKNRGHFLINGSISDVKNLSFVCVEMIKEFNSVSEYEISLTDIRELERILSDKKTAKSVKAKQVAQLFECTPAEDKEQQKCAKAIITNLSKLIVGLKGDISKMFHQPLEEISTKSFKFTEAKYEDEIMPAIEENYPDYASVIDRIKGVYDWSVLVEILDGEDYLSFAKVKAYEKHGKNLHILKNIMKKYCKDEVYQAFFNGINEKNGYGNYIGAIRKNGHTYKMDRCKSEEDFYKGLQKILSMIVPDQEDEKLLEKLKTEVENQTLLPLARSKENGTIPNQVHLQELMKILDNAKGYLDFLKKEDEYGTIAEKIISIAKFRIPYYVGPLSRRHKGEGSNSWMIRKEEGRIYPWNFGDKVDVEQSNKEFIERMTNKCTYLIGEDVLPKNSLLYSKYMVLNELNNLKIRGNKISVELKQRIYKDLFCTMAKVTGKRILEYLKMEDPEIVQEDISGFDIDFKSALTSYLDFKKQVVGNEIEKDHYKEIIEEIIKWKTIYDDDSKMMRRMIEREYPEVFDKEQIKKICQLKYSGWGNFSDRFLNGVRGADKETGESYTIIEALWKTNYNLMQLLSKQFSFKEEIDQINAEKAGDVGKINYENTVKDLIVSPSNKRAIWQTIQITEEIKKVMKCEPERIFIEMARGGEKEKKRTVSRKTRLQELYAGCKDDTRNWMKEIGDREEREFNSRKLYLYYTQMGKCMYTGDEIDVDALMKGNSNWDIDHIYPQSRIKDDSLDNMVLVRKDVNNKKRNKILSPKIREDMKGYWTMLCQKGLISKRKYDRLTRTTDFTDEELSGFIERQLVETRQSSKAVAELLNRLYKDSEVVYVKAGLVSDFRHDNDLLKSRRVNDYHHAKDAFLNIVVGNVYHARFTSNPRKWIKDNRDSNYSIRRVFNYDVKQGDKIVWHGSENGGHSIDQIKKIMSRNDILYTEYTYCEKGQLFNETLAKKGNEKAIALKKNLDPVKYGGYTTPKTSAFAFVEFDGKKKERKNHIVEIPVYVVNIAKREPDAVIKYLEERKGYANVVVKKYPIKKNSLIKIDGYLARLRGANEKNVRLKNSIQLVLNGKAYETVRRIEKYLEYNVRYEVNSKFEGFTDEDLNNVYDELYLKLKESVYNKRPAQQLSTLEKGREKFRTIEKLSEKAKLINDMLVMFRCDATMVANLKLIGGSISAGNMEVNKNTLTSKSLKLVHQSITGLFETEEELV

SEQ ID NO: 20589 - protein, 1397 aa, unidentified
  REGION 1..1397: note = Cas Enzyme sequence
MWNPKKGDYENSLFEPCSVISYGNQLRYFYYKKIDFFCQEWRGTKMNKKYYLGLDIGTNSVGWAVTDENYNLYKYAGKRMWGIRLFEAADTAAERRMKRSNRRRLSRKKQRIDLLQELFSKEIAKKDPTFFIRLNESGLHLEDKSTGEKYPLFVDKEYTDIDYHKEYPTMYHLRKELIENPEPHDIRLVYLACHHILKNRGHFLINGSISDVKNLSFVCGEMIKEFNSVSEYEISLTDIRELERILSDKKTAKSVKAKQVAQLFECTSAEDKEQQKCAKAIITNLSKLIVGLKGDISKMFHQPLEEISTKSFKFTEAKYEDEIMPAIEENYPDYASVIDRIKGVYDWSVLVEILDGEDYLSFAKVKAYEKHGKNLHILKNIMKKYCKDEVYQAFFNGINEKNGYGNYIGAIRKNGHTYKMDRCKSEEDFYKGLQKILSTIVPDQEDEELLEKLKAEVENQTLLPLARSKENGTIPNQVHLQELMKILDNAKEYLDFLKKEDEYGTIAEKIISIAKFRIPYYVGPLSRRHKEEGSNSWMIRKEEGRIYPWNFGDKVDVEQSNKEFIERMTNKCTYLIGEDVLPKNSLLYSKYMVLNELNNLKIRGNKISVELKQRIYKDLFCTMAKVTGKRILEYLKMEDPEIVQEDISGFDIDFKSALTSYLDFKKQVVGNEIEKDHYKEIIEEIIKWKTIYDDDSKMMRRMIEREYPEVFDKEQIKKICQLKYSGWGNFSDRFLNGVRGADKETGESYTIIEALWKTNYNLMQLLSKQFSFKEEIDQINAEKAGDVGKINYKNTVKDLIVSPSNKRAIWQTIQIAEEIKKVMKCEPERIFIEMARGGEKEKKRTVSRKTRLQELYAGCKDDTRNWMKEIGDREEREFNSRKLYLYYTQMGKCMYTGDEIDVDALMKGNSNWDIDHIYPQSRIKDDSLDNMVLVRKDVNNKKRNKILSPKIREDMKQYWKMLYQKELISKKKYDRLTRTTDFTDEELSGFIERQLVETRQSSKAVAELLKRLYKDSEVVYVKAGLVSDFRHDNNLLKSRRVNDYHHAKDAFLNIVVGNVYHVRFTSNPRKWIKENRDSNYSIRRVFNYDVKQGDKIVWHGSENGGHSIDHIKKTMSRNDILYTEYTYCEKGQLFNETLAKKGNEKAIALKKNLDPVKYGGYTTPKTSAFAFIEFDGKKKERKNHIVEIPVYVVNIAKREPDAVKKYLEERKGYSNVVIKKYPIKKNSLIKMDGYLARLRGGDDNRIEIKNAVQLILNKNIYEIIRKTEKYIEHNQQYEVNSEFDGFTEEDLYKVYKELCLKLKNSIYKKRPVQQLKILEQGVEKFKSLESLKDKAKIINELLVMFRCDATTEMNLKAIGGASSAGRMRVYKNTLASKQLKLIYQSITGLFETEEELI

SEQ ID NO: 20590 - protein, 1356 aa, unidentified
  REGION 1..1356: note = Cas Enzyme sequence
MEVGNYYLGIDAGTDSVGWAVTDNQYNVIRKKGKSLWGIRLFDGANTAQERRTFRALRRRNERKKQRINLLQELFCKEICKLDPNFFIRLRDSSLWSEDKEEKQIYSLFNDKNFNDRNYHNNYKTIYHLRADLIKNKEKHDARLVYLAIHHIMKNRGHFLFNGNIESVTSFENTFNEFKNCLLDELEINLECPSISEFENILKDRTFKGTQKCKKLKELCSIPSSDKKLDNIFKLISGLKADLSIIFEDESFKENEHNKISFADSNYEETREVLNSEIQEKTLIIDIFNIIYNWVILSDILSGGEYNGRLYLSIAKVNTYNKHSKDLKILKSVIKKYFPQKYTDIFASNKENNYCSYIGMYKSGGKKYSVKKCSDKPEEFYKTIKNIINKNTAEEISNDKDVQYILSEIENNSFLPLQINKNNGVIPYQANKIELESILKNAENYLPFLKEIDTECNKTTSEKIIDLFEFRIPYYVGPLNTSKGENAWMIRKEDGTIRPWNFEQKVDIDKTAAEFITRMTNQCTYLNNETVLPKYSLLYSEYTVLNEINNIRINGEKISVELKQDIFNSLFKNNKQVTCKKLLSHLNSNGYNLKKDDLSGFDGNFKSSLSSYIDLKNYIFGDNIDKLQIYNLAEKIILWITLYGDDSKLLKRVLQKNCSEQLNPEQIKKITKLKFKGWGRLSKAFLSELRGADRETGETMTIIKGLRNTQNNLMQLLSQNYTFTEECEKINSGYFINPNEISYDSIVKNIVASPSIKRSVWQTIQIVEEIQKVMGSKPRKIFVEMARGEEEKVRTTSRKQKLLDLYKNISDECAKGMYDEIYSKDESDFKNIRLYLYYTQMGCCMYSGNHIDLSQLSNTNIWDRDHIYPQSKTKDDSLDNLVLVYKSINSEKSDDIISPTIQNNMRTFWKLLFDRKFISEKKYHRLTRTTPLTDEELAGFINRQLVETRQSTKVMASIFKRIYPNTEIIYVKAKNVSDFRHRKDCENGVKVRELNDYHHAKDAYLNIVVGNVYSSKFTNNPLMWLKNNRNVKYSLNRMYDFNLTVNNENIWVVGNEGTQKTVNKYLGKNDILYTRYAMTNKGELFGQNPLKATGDKSKQTTLVPLKKGKEVWKYGGYNSITPSYFMLVESKDKKGNYIRTIETMPLYREKEFSKNEEFLLNYCKEVHKLKEPKIILKCIKKNSLLIVDGFPMHLKGSTGLQLKLQGAVQLILESDMVIYLKKLMKFVNENNINKNKLEVTPYMKLSAEENIKLYDIFIQKLTTGIYSKRPANPVEKLINARDIFIELTVKEQCIVLSEILHLFQCKPLTSANLVSINLKKTVGIIQIAKNITAKNVKLVHQSPTGIYEYTVDLNKI

SEQ ID NO: 20591 - protein, 1365 aa, unidentified
  REGION 1..1365: note = Cas Enzyme sequence
MNINDYYVGLDIGTNSVGWAVTDTQYNILRKKGKSMWGVRLFEEAKTAAERRTARTNRRRLQRRKQRIDFLQDIFREEISKVDDKFFDRLKDGSFYPEDKKEKQNNTVFNDANYNDIDYHNEFKTIYHLRKALIMGEKKYDIRLVYLAIHHIMKNRGHFLFDSNITNVTSFDTTFNTFKTCMIDEFEFDLDEVDKDEFERILKDKSLSKTKKREQLLSICNIDKSDKKQIIEVIKLIIGLKCKISTIFDSPEFEDIEHNDICFAGSTYEETRLALEDEIQEKIGVIDICQKVYNWTVLSEILDGGEYNGQSFISIAKIKKYEKHGDDLRKLKLLVRKYCEKKDYDDFFSLNNDNNYCAYVGKWTKNITEGKKCGQEVLYKSINALLKKMPSDDEDVKKIKADMENKTFLPKQVSKDNGVIPYQINEIELKRILENAEKYLPFLNQVDDSCGLTNSEKIIKIFEFRIPYYVGPLNTAVGENCWMVKRDGQEGRRITPWNFNDIVDTDKSAEKFIVRMTNKCKFLQNEDVLPKYSLLYSEYTVRNELNNIKLKGNSLPDDLRNGIYNDLFKKERSISKKRIVEYIKSLGNEITKEDITGVDDKLTTSLKSYIEMKKIFGDEIDSYSIRDMIEEIIRYLTIYGDDKKMLQNVIETKYGNSITEEQLKQILSLKLQGWGHLSKKLLTELEGTNKETGEITTIINELRNTSNNFMQVVASNNYTFSESIELENAGYKLQGEITYEKLVKDIVASPAIKRAIWQTVQIVEEIKRVMGKTPAKIFIEMARGAEEKKRKASRKNKLIELYKEIDKEAKTDWVKELEKIPDSRLKSIKLFLYYTQMGKCMYTGKKIDLSQLENATIWDRDHIYPQSKVKDDSLDNLVLVDRRENAKKSDGMITPEIQAKMYNTWKYLKNKGLISEKKFNRLTRKEPFTDDELAGFINRQLVETRQSTKVIATLLKRIYDGTKIVYVKAGVTSDFKNHKDSRTGKRDYIEDVKVRSLNDYHHAKDAYLNIVVGNVYNAKFTDNPYNWIKEKNKDKDHKYSLNRMFDFDLSNGENVIWKSGKDGTLKTINAMLNKNDILYTRYSYCDKGLLFNQQLKKAPHNEEKARIMIPVKAGMDTNKYGGYGSVRTSYFMLVESEDKKGKLIRTIESVPIYLKELFQEDNQKLADYCISIYGLKKPRILLPVIKIGSLISVNGFPMSLNGRSDSRLILQVAVQLCVSNTEAEYIKRLEKYESDNQTRTDKKIELKIDEYRGITNSQNEQIYDLFIRKLKTGIYSRRPANPVKKLEESKTKFVDLSLEKQSLLLMQLLNLFKCKPLGANAEAIGEGNNMGKIKINKNITLFKEIKLINQSPTGLYENVIDLLKV

SEQ ID NO: 20592 - protein, 1381 aa, unidentified
  REGION 1..1381: note = Cas Enzyme sequence
MRRYVNSEEKKMKNANKVTGKYYLGFDIGTNSVGWAVTDENYNLCKFKKKSMWGIRLFEDAKTAEERRGQRASRRRLQRRKQRIDLLQEIFAEEINKVDETFFIRLNESRLHLDDKTVSEKHPLFIGSEYSEKEYYREYPTIFHLRKELMESSEPHDIRLVYLAIHHILKNRGHFLIDGELSKANSFDAAFYQMKEVLCNELDLEIDGENTTEVERTLRDRNISKSDKVKLLAALLAMNQNETESKETKKKIENICKLLAGNKGDISKIFGQTPEGVEKTSFSFGEADYDESIRPNLEESIPDQCFVIDSIKALYDWNVLADILNGQTYLSCAKVNQYETHKNNLKELKLLVNRYCSREEYKRFFKSAVEKANYSNYIGSAKQGNKIIDVKRCAEEDFYKELKILLSKIEPEEADRELYERIKREAEEGSLLPLQRNKDNSVVPNQMHKAELALILENAGSYLGFLNEKDEDGLSPAEKIIELFSFRIPYYVGPLSDRHKDRGSNAWIVRKAEGRILPWNFDEKVDREKSNEAFIERMTNKCTYLLGKDVVAKNSLIYSHFMVLNELNNLSVCGNKISVQVKQDIYRELFQRHTKVSKKMLLQYCREKMMNKDLEEEDLSGFDGDFKAKLSSYLDFEKKVFGAKMEEDRIRKITEDIIRWKTIYGDDGKMLQAVVEKEYPGELDSDQLKAVKQFRYSGWGNFSEEFLNGIVGTEKPTGQMFTIIEALWQTNCNLMQLLSKNFTFMEEIEKHNRELAGQITDISYDKLVKDLYISPANKRAVWQTVRIAEEVKKIMGCEPAKIFVEMARGGEKEKKRTISRKKKLLELYAACKKDARDWNREIEDRDEREFNSDKLYLYYTQMGRCMYSGERIDLHELMSANSKWDIDHIYPQSKVKDDSLDNRVLSLKKINNEKGNKPLSRDIQQSQQKWWTELLQLEFITKKKYDRLMHRGELSEEELSGFINRQLVETRQSTKAAAELLGRMYNNSKVVYVKAPLVSQFRKDDLNILKSRLANDYHHAKDAYLNIAVGNVYNEKFTDNPLRWIEKHAGENYSINRVFDYDIVAGDGAPVWAAPLRDEKNKLRKNEVGEKYGGTIDVIRKTVKRNDVLYTEHTYCGKGELFNATIAKKDGGAEIPLKAGLQTGKYGGYKSPNTSYFAAIEFDGKKGERVKNIMEVPVYIANILLHDIDAYIRYCETVKGLKNVKILRPCIKKNALISVDGYPMRIRGANEKNILLKNNLQPIFGRHEETVRRIEKYVEKNQEFEVDEKFDGLNEANLTDLYDDITEKLCGPYVERPSNQGEYLMENREKFLNISLKEKAKLLAQMIKLVRCDTETKADLRSIGASKNAGVISVNKNTLGGKRLILINQSVTGLFENRIEL

SEQ ID NO: 20593 - protein, 1372 aa, unidentified
  REGION 1..1372: note = Cas Enzyme sequence
MLKEEYILTKEYYLGLDVGTNSVGWAVTDSQYNLCKFKKKDMWGIRLFESANTAKDRRLQRGNRRRLERKKQRIDLLQEIFSPEICKIDPTFFIRLNESRLHLEDKSNDFKYPLFIEKDYSDIEYYKEFPTIFHLRKHLIESEEKQDIRLIYLALHNIIKTRGHFLIDGDLQSAKQLIPILDTFLLSLQEEQNLSVSLSENQKDEYEEILKNRSIAKSEKVKKLKNLFEISDELEKEEKKAQSAVIENFCKFIVGNKGDVCKFLRVSKEELEIDSFSFSEGKYEDDIVKNLEEKVPEKVYLFEQMKAMYDWNILVDILETEEYISFAKVKQYEKHKTNLRLLRDIILKYCTKDEYNRMFNDEKEAGSYTAYVGKLKKNNKKYWIEKKRNPEEFYKSLGKLLDKIEPLKEDLEVLTMMIEECKNHTLLPIQKNKDNGVIPHQVHEVELKKILENAKKYYSFLTETDKDGYSVVQKIESIFRFRIPYYVGPLSTRHQEKGSNVWMVRKPGREDRIYPWNMEEIIDFEKSNENFITRMTNKCTYLIGEDVLPKHSLLYSKYMVLNELNNVKVRGKKLPTSLKQKVFEDLFENKSKVTGKNLLEYLQIQDKDIQIDDLSGFDKDFKTSLKSYLDFKKQIFGEEIEKESIQNMIEDIIKWITIYGNDKEMLKRVIRANYSNQLTEEQMKKITGFQYSGWGNFSKMFLKGISGSDVSTGETFDIITAMWETDNNLMQILSKKFTFMDNVEDFNSGKVGKIDKITYDSTVKEMFLSPENKRAVWQTIQVAEEIKKVMGCEPKKIFIEMARGGEKVKKRTKSRKAQLLELYAACEEDCRELIKEIEDREERDFNSMKLFLYYTQMGRCMYTGKCIDLDELLHSNSKWDRDHIYPQSKIKDDSIDNLVLTDKKVNEEKEDKLLSEDIQKKMHSFWLSLLNKKLITKSKYDRLTRKGDFTDEELSGFIARQLVETRQSTKAIADLFKQIYSSEVVYVKSSLVSDFRKKPLNYLKSRRVNDYHHAKDAYLNIVVGNVYNKKFTSNPIQWIKKNRDTNYSLNKVFEHDVVINGEVIWEKCTYHEDTNTYDGGTLDRIRKIVERDNILYTEYAYCEKGELFNATIQNKNGNSTVSLKKGLDVKKYGGYFSANTSYFSLIEFEDKKGDRARHIIGVPIYIANMLEHSPSAFLEYCEQKGYQNVRILVEKIKKNSLLIINGYPLRIRGEDEKNNTFKRVIQLKLDQENYELVRNIEKFLEKYVEKKGNYPIDENRDHITHEKVNQLYEVLISKMKKFNKKGMADLSDKIESSKNLFIESDKLICKVKLLNEILNLLRCDINTKADLSSIKLSVNAGSFSVNKNTIGKSKIVLVNQSVTGLYENRREL

SEQ ID NO: 20594 - protein, 1292 aa, unidentified
  REGION 1..1292: note = Cas Enzyme sequence
ITRNARRRLARRKERIKLLQELFAEEICKKDEAFFQRLNDSKYYPDDKNENQTNTLFNDKDYNDKKYHEDYKTVYHLRKAFIEDKEITDARLLYLAIAHILKHRGHFLFEGEGMQECSEFGAVYEKFKEAIENELDISFNECDIIELSDIIKEKTTINDKKAKLMAVLNVDKKDNQKKELVILLSGGKAKIAPIFEIEDNSDLKELGVESFSLSDGYDMNIDNLSNVLQEKIYVIECAKAVYDWGVLADLLKGEKYISYAKEKSFEKHKKDLKALKSVVKKYIPELYNEIFRSNTTEANYVAYAKSYKDREGKTIREQKYVTQNDFCAYLSKKLKGISDDTNPELKKVMEDISKFDFLPLQHEKDNCVIPYQLHLAELKAILENAGKRFAFLNERDEQGISVSEKILKLMTFRIPYYVGPLNDAHKDSGNCWIVKKNAGKILPWNFEEMVDVEKSAEEFILRMTNKCTYIVNADVLPKNSILYSKFMALNELNNVKYDGDKLSVEVKQKVFEECFLNNKKVKAKQLLYCLVNNGYIAKEEAQIEKLSGFDVDFKASMATYIDFKNMLGDDYREQYVEEAIKAATIFGDDKKILKKRLGKIGNGYFTTEHINRISRMKLSGWGALSKEFLTEIREIDYSSGEYISDNIIEALYNTQDNLMQLLSDSRGYKKTIDLRNGDINGKKTFTYDSLVKDLYASPAVKRGIWQALVIVKEIEKITGRKPEKVFVEVEREHKPDNGRTVSRKNALLELYKNCKKEAPEMFARLEKEEDSNLRSDKLFLWYTQLGRCMYTGKKISLEDLMNNNLWDIDHIYPQSKIKDDSINNRVLVDKHSNEIKSDNYPIKKEVRDANKRHWDLLLDKKLIEPKKYDKLTRTTPFTDEELAGFIKRQLVETSQSSKAVAEALKMLYGDCVVYVKAVNVADFKRDNNLLKDRNINDYHHAKDAYINIVVGNVYDMKFTRNPVNFFKNPNREPYNMRKMFDYDVKRNGEVAWIAGEEGSITTVRNTYNKNNILFTRFSYENTGALFDINPMKKGKGQLPLKMSDVHMQNIDRYGGYNNVYSAYFCLVEHTYKKNRISTIEYVPVYLSKAIKRDKRVLFDYLENTLKLEDIRVLVPKIKLDTLFCINGFYMHISGRTGDRIIFKNAMQLTLDNDMYAYMKMIHKYEEFKMNNKSEIGPDVYNVEITKEKNVKLFGILVSKMIATFAHGYGSSGKKMDANKFDTLSLKEQCAMLKHIVSALKCNAVCEDLSIAGGNKTTGKILVNKKITDLEQISIINQSPTGLFREIVDLKKL

SEQ ID NO: 20595 - protein, 1372 aa, unidentified
  REGION 1..1372: note = Cas Enzyme sequence
MKNANKVTGKYYLGFDIGTNSVGWAVTDENYNLCKFKKKSMWGIRLFEDAKTAEERRGQRASRRRLQRRKQRIDLLQEIFAEEINKVDETFFIRLNESRLHLDDKTVSEKHPLFIGSEYSEKEYYREYPTIFHLRKELMESSEPHDIRLVYLAIHHILKNRGHFLIDGELSKANSFDAAFYQMKEVLCNELDLEIDGENTTEVERTLRDRNISKSDKVKLLAALLAMNQNETESKETKKKIENICKLLAGNKGDISKIFGQTPEGVEKTSFSFGEADYDESIRPNLEESIPDQCFVIDSIKALYDWNVLADILNGQTYLSCAKVNQYETHKNNLKELKLLVNKYCSREEYKRFFKSAVEKANYSNYIGSAKQGNKIIDVNRCAEEDFYKELKRLIGKIEPEESDRELYERIKREAEEGTMLPLQRNKDNSVVPNQVHKAELALILENAGSYIGFLNEKDEDGLSPAEKIIELFSFRIPYYVGPLSDRHKDRGSNSWIVRKAEGRILPWNFDEKVDREKSNEAFIERMTNKCTYLLGKDVVAKNSLIYSRFMVLNELNNLSVCGNKISVQVKQDIYRELFQRHTKVSKKMLLQYCREKMMNKDLEEEDLSGFDGDFKAKLSSYLDFEKKVFGAKIEEDRIRKITEDIIRWKTIYGDDGKMLQAVVEKEYPGELDSDQLKAIKQFRYSGWGNFSEAFLNGIVGTEKSTGQMFTIIEALWETNCNLMQLLSKNFTFMEEIKKHNRELAGQITDISYDKLVKDLYISPANKRAVWQTVRIAEEVKKIMGCEPAKIFVEMARGGEKEKKRTTSRKKKLLDLYAACKKDARDWNREIEDRDEREFNSDKLYLYYTQMGRCMYSGEHIDLHELMSANSKWDIDHIYPQSKVKDDSLDNRVLSLKKINNEKGNKPLSRDIQQSQQKWWTELLRLRFITKKKYDRLMHRGELSEEELSGFISRQLVETRQSTKAAAELLGRMYNNSKVVYVKASLVSQFRKDDLNILKSRLANDYHHAKDAYLNIVVGNVYNEKFTDNPLIWIEKHAGENYSINRVFDYDIVAGDGAPVWVAPLRDEKNKLRKNEEGEKYGGTIDVIRKTVKRNDVLYTEHTYCGKAKLFDEILAKKGSGAEVPLKKGLSTEKYGGYKSSKTSYFAVIEFDGKKGKRVKNIMEVPIYIANILPHDPDAYIRYCENINGLKNVKILRPCIKKNALISVDGYPMRICNCNSGKKNIGLKNNLQPLFGRHEETVRRIEKYVDKNQGFEVDEKFDGLNEANLTALYDDITEKLCGPYVERPSNQGEYLMENREKFLNISLKEKAKLLAQMIKLVRCDNETKADLTSIGASKSAGVISVNKNTLGGKRLILINQSVTGLFENRIEL

SEQ ID NO: 20596 - protein, 1346 aa, unidentified
  REGION 1..1346: note = Cas Enzyme sequence
MKKQFDDYFIGLDIGTSSVGWAVTDKNYNLLKFNGKAMWGIRLFEEGSSAAERRITRNARRRLARRKERIKLLQELFAEEICKKDEAFFQRLNDSKYYPDDKNENQTNTLFNDKDYNDKKYHEDYKTVYHLRKAFIEDKEITDARLLYLAIAHILKHRGHFLFEGEGMQECSEFGAVYEKFKEAIENELDISFNECDIIELSDIIKEKTTINDKKAKLMAVLNVDKKDNQKKELVILLSGGKAKIAPIFEIEDNSDLKELGVESFSLSDGYDMNIDNLSNVLQEKIYVIECAKAVYDWGVLADLLKGEKYISYAKEKSFEKHKKDLKALKSVVKKYIPELYNEIFRSNTTEANYVAYAKSYKDREGKTIREQKYVTQNDFCAYLSKKLKGISDDTNPELKKVMEDISKFDFLPLQHEKDNCVIPYQLHLAELKAILENAGKRFAFLNERDEQGISVSEKILKLMTFRIPYYVGPLNDAHKDSGNCWIVKKNAGKILPWNFEEMVDVEKSAEEFILRMTNKCTYIVNADVLPKNSILYSKFMALNELNNVKYDGDKLSVEVKQKVFEECFLNNKKVKAKQLLYCLVNNGYIAKEEAQIEKLSGFDVDFKASMATYIDFKNMLGDDYREQYVEEAIKAATIFGDDKKILKKRLGKIGNGYFTTEHINRISRMKLSGWGALSKEFLTEIREIDYSSGEYISDNIIEALYNTQDNLMQLLSDSRGYKKTIDLRNGDINGKKTFTYDSLVKDLYASPAVKRGIWQALVIVKEIEKITGRKPEKVFVEVEREHKPDNGRTVSRKNALLELYKNCKKEAPEMFARLEKEEDSNLRSDKLFLWYTQLGRCMYTGKKISLEDLMNNNLWDIDHIYPQSKIKDDSINNRVLVDKHSNEIKSDNYPIKKEVRDANKRHWDLLLDKKLIEPKKYDKLTRTTPFTDEELAGFIKRQLVETSQSSKAVAEALKMLYGDCVVYVKAVNVADFKRDNNLLKDRNINDYHHAKDAYINIVVGNVYDMKFTRNPVNFFKNPNREPYNMRKMFDYDVKRNGEVAWIAGEEGSITTVRNTYNKNNILFTRFSYENTGALFDINPMKKGKGQLPLKMSDVHMQNIDRYGGYNNVYSAYFCLVEHTYKKNRISTIEYVPVYLSKAIKRDKRVLFDYLENTLKLEDIRVLVPKIKLDTLFCINGFYMHISGRTGDRIIFKNAMQLTLDNDMYAYMKMIHKYEEFKMNNKSEIGPDVYNVEITKEKNVKLFGILVSKMIATFAHGYGSSGKKMDANKFDTLSLKEQCAMLKHIVSALKCNAVCEDLSIAGGNKTTGKILVNKKITDLEQISIINQSPTGLFREIVDLKKL

SEQ ID NO: 20597 - protein, 1311 aa, unidentified
  REGION 1..1311: note = Cas Enzyme sequence
KAMWGIRLFEEGSSAAERRITRNARRRLARRKERIKLLQELFAEEICKKDEAFFQRLNDSKYYPDDKNENQTNTLFNDKDYNDKKYHEDYKTVYHLRKAFIEDKEITDARLLYLAIAHILKHRGHFLFEGEGMQECSEFGAVYEKFKEAIENELDISFNECDIIELSDIIKEKTTINDKKAKLMAVLNVDKKDNQKKELVILLSGGKAKIAPIFEIEDNSDLKELGVESFSLSDGYDMNIDNLSNVLQEKIYVIECAKAVYDWGVLADLLKGEKYISYAKEKSFEKHKKDLKALKSVVKKYIPELYNEIFRSNTTEANYVAYAKSYKDREGKTIREQKYVTQNDFCAYLSKKLKGISDDTNPELKKVMEDISKFDFLPLQHEKDNCVIPYQLHLAELKAILENAGKRFAFLNERDEQGISVSEKILKLMTFRIPYYVGPLNDAHKDSGNCWIVKKNAGKILPWNFEEMVDVEKSAEEFILRMTNKCTYIVNADVLPKNSILYSKFMALNELNNVKYDGDKLSVEVKQKVFEECFLNNKKVKAKQLLYCLVNNGYIAKEEAQIEKLSGFDVDFKASMATYIDFKNMLGDDYREQYVEEAIKAATIFGDDKKILKKRLGKIGNGYFTTEHINRISRMKLSGWGALSKEFLTEIREIDYSSGEYISDNIIEALYNTQDNLMQLLSDSRGYKKTIDLRNGDINGKKTFTYDSLVKDLYASPAVKRGIWQALVIVKEIEKITGRKPEKVFVEVEREHKPDNGRTVSRKNALLELYKNCKKEAPEMFARLEKEEDSNLRSDKLFLWYTQLGRCMYTGKKISLEDLMNNNLWDIDHIYPQSKIKDDSINNRVLVDKHSNEIKSDNYPIKKEVRDANKRHWDLLLDKKLIEPKKYDKLTRTTPFTDEELAGFIKRQLVETSQSSKAVAEALKMLYGDCVVYVKAVNVADFKRDNNLLKDRNINDYHHAKDAYINIVVGNVYDMKFTRNPVNFFKNPNREPYNMRKMFDYDVKRNGEVAWIAGEEGSITTVRNTYNKNNILFTRFSYENTGALFDINPMKKGKGQLPLKMSDVHMQNIDRYGGYNNVYSAYFCLVEHTYKKNRISTIEYVPVYLSKAIKRDKRVLFDYLENTLKLEDIRVLVPKIKLDTLFCINGFYMHISGRTGDRIIFKNAMQLTLDNDMYAYMKMIHKYEEFKMNNKSEIGPDVYNVEITKEKNVKLFGILVSKMIATFAHGYGSSGKKMDANKFDTLSLKEQCAMLKHIVSALKCNAVCEDLSIAGGNKTTGKILVNKKITDLEQISIINQSPTGLFREIVDLKKL

SEQ ID NO: 20598 - protein, 1371 aa, unidentified
  REGION 1..1371: note = Cas Enzyme sequence
MKNANKMTGKYYLGFDIGTNSVGWAVTDENYNLCKFKKKAMWGIRLFEDAKTAEERRGQRASRRRLQRRKQRIDLLQEIFAEEINKVDETFFIRLNESRLHLDDKTVLEKHPLFIGSEYSEKEYYREYPTIFHLRKELMESSEPHDIRLVYLAIHHILKSRGHFLIDGELSKANSFDAAFYQMKEALRNELDLEIDGENMAEVERVLRDRNISKSDKVKLLAALLAMNQNETESKETKKKIENICKLLVGNKGDISKIFGQTPEGVEKTSFSFGEADYDESIRPNLEESSPDQCFAIDSIKALYDWNVLADILNGQTYLSCAKVNQYETHKNNLKELKLLVNKYCSREEYKRFFKSASEKANYSNYIGSAKKGNKIIDVKRCAEEDFYKELKILLSKIEPEESDREFYERIKREAEEGTMLPLQRNKDNSVVPNQVHKAELALILENAGSYLGFLNEKDEDGLSPAEKIIELFSFRIPYYVGPLSDRHKDRGSNAWIVRKAEGRILLWNFDEKVDREKSNEAFIERMTNKCTYLLGKDVVAKNSLIYSRFMVLNELNKLSVCGKKISVQVKQDIYRELFQKHTKVSKKMLLQYCQEKMMNKDLEEDLSGFDGDFKAKLSSYLDFEKKVFGAKMEEDRIRKITEDIIRWKTIYGDDGKMLQAVVEKEYPGELDSDQLKAIKQFRYSGWGNFSEEFLNGIVGTEKSTGQMFTIIEALWQTNCNLMQLLSKNFTFMEEIEKHNRELAGQITDVSYDKLVKDLYISPANKRAVWQTVRIAEEVKKIMGCEPAKIFVEMARGGEKEKKRTISRKKKLLDLYAACKKDARDWNREIEDRDEREFNSDKLYLYYTQMGRCMYSGERIDLHELMSANSKWDIDHIYPQSKVKDDSLDNRVLSLKKINNEKGNKPLSREIQQSQQKWWADLLRRGFITKKKYDRLMHRGELSKEELSGFISRQLVETRQSTKAAAELLGRMYNNSKVVYVKAPLVSQFRKDDLNILKSRLANDYHHAKDAYLNIVVGNVYNEKFTDNPLRWIEKHAGENYSINRVFDYDIVARDGAPVWVAPLRDEKNKLRKNEAGEKYGGTIDVIRKTVKRNDVLYTEHTYCGKAKLFDEILAKKGSGAEVPLKKGLSTEKYGGYKSSKTSYFAVIEFDGKKGKRVKNIMEVPIYIANILPHDPDAYIRYCENINGLKNVKILRPCIKKNALISVDGYPMRICNCNSGKKNIGLKNNLQPLFGRHEETVRRIEKYVDKNQGFEVDERFDGLNEANLTALYDDITEKLCGPYVERPSNQGEYLMENREKFLNISLKEKAKLLAQMIKLVRCDNETKADLTSIGGSKSAGVISVNKNTLGGKRLILINQSVTGLFENRIEL

SEQ ID NO: 20599 - protein, 1372 aa, unidentified
  REGION 1..1372: note = Cas Enzyme sequence
MKNANKMTGKYYLGFDIGTNSVGWAVTDENYNLCKFKKKAMWGIRLFEDAKTAEERRGQRASRRRLQRRKQRIDLLQEIFAEEINKVDETFFIRLNESRLHLDDKTVLEKHPLFIGSEYSEKEYYREYPTIFHLRKELMESSEPHDIRLVYLAIHHILKSRGHFLIDGELSKANSFDAAFYQMKEALRNELDLEIDGENMAEVERVLRDRNISKSDKVKLLAALLAMNQNETESKETKKKIENICKLLVGNKGDISKIFGQTPEGVEKTSFSFGEADYDESIRPNLEESSPDQCFAIDSIKALYDWNVLADILNGQTYLSCAKVNQYETHKNNLKELKLLVNKYCSREEYKRFFKSASEKANYSNYIGSAKKGNKIIDVKRCAEEDFYKELKILLSKIEPEESDREFYERIKREAEEGTMLPLQRNKDNSVVPNQVHKAELALILENAGSYLGFLNEKDEDGLSPAEKIIELFSFRIPYYVGPLSDRHKDRGSNAWIVRKAEGRILLWNFDEKVDREKSNEAFIERMTNKCTYLLGKDVVAKNSLIYSRFMVLNELNKLSVCGKKISVQVKQDIYRELFQKHTKVSKKMLLQYCQEKMMNKDLEEEDLSGFDGDFKAKLSSYLDFEKKVFGAKMEEDRIRKITEDIIRWKTIYGDDGKMLQAVVEKEYPGELDSDQLKAIKQFRYSGWGKFSEEFLNGIVGTEKSTGQMFTIIEALWQTNCNLMQLLSKNFTFMEEIEKHNRELAGQITDVSYDKLVKDLYISPANKRAVWQTVRIAEEVKKIMGCEPAKIFVEMARGGENENNRTISRKKKMLDLYAACKKDARDWNREIEDRDEREFNSDKLYLYYTQMGRCMYSGERIDLHELMSANSKWDIDHIYPQSKVKDDSLDNRVLSLKKINNEKGNKPLSREIQQSQQKWWADLLRRGFITKKKYDRLMHRGELSKEELSGFISRQLVETRQSTKAAAELLGRMYNNSKVVYVKAPLVSQFRKDDLNILKSRLANDYHHAKDAYLNIVVGNVYNEKFTDNPLRWIEKHAGENYSINRVFDYDIVARDGAPVWVAPLRDEKNKLRKNEAGEKYGGTIDVIRKTVKRNDVLYTEHTYCGKAKLFDEILAKKGSGAEVPLKKGLSTEKYGGYKSSKTSYFAVIEFDGKKGKRVKNIMEVPIYIANILPHDPDAYIRYCENINGLKNVKILRPCIKKNALISVDGYPMRICNCNSGKKNIGLKNNLQPLFGRHEETVRRIEKYVDKNQGFEVDERFDGLNEANLTALYDDITEKLCGPYVERPSNQGEYLMENREKFLNISLKEKAKLLAQMIKLVRCDNETKADLTSIGGSKSAGVISVNKNTLGGKRLILINQSVTGLFENRIEL

SEQ ID NO: 20600 - protein, 954 aa, unidentified
  REGION 1..954: note = Cas Enzyme sequence
TDMVERLEARTFLPKQKDGDNRVIPQQLYRQEMAAILAKAEKYIPMLSKPDADGMTVTQKLLSIFDFRIPYYVGPLVRHPQGTAWIERKQGRILPWNFEEMVDLDASEQGFIKKMTNDCTYLPGQKVLPVNSLLYGKFTVLNELNNLKVDGVSIPVKVKQELYESLFMQKPRVTVKQIRDHLLTHGYMTVGSELTGIDTTFKAGLKSYHVFRNLLESGVLNEAEVESIIEHAAYTEDKSRMRHWLKQTFPQIPEGDVAYILKQDLKQFGRLSPMLLAGLYGSAKNSDGEAFTIIEALWNTNENLMQLLSDRYTFSEQIREYTKEYYAEHPASLTRRLEDMYISGPVKRPIFRTLDIISDVVKATGKAPEKIFIEMARGGTEDQKGKRTKSRKDQLLDLYKLIKTEDARIFEKELKNMGETADNRLQERKLFLYYLQMGKCAYTGEPIDVNKLGSGDYNLDHIYPQSYVKDDSLFNNLVLVKSEANGIKGDSYPVPEQFRNTMYQTWQYWKDKGLMTDEKFSRLTRKVPFSDHEKQGFINRQLVETRQSTKAIATLLKERFPDTAIVYVKAGMVSEFRQEFDLPKSRTVNDLHHAKDAYLNVVVGNVYHERFSDRWFRIDEHYNVQLKKIFDRAQRHGSTIYWNGEADIAKVKKTAGKNAIHMTRYAFLRKGGLFDQQPVRKAKGLVSLKHGMATEKYGGYNKPSVCGYVLAKYTAEGKTEIMFVPVDLRMKDQATQNIEALATYTIHEIGKITNQEPEKVELLLDGRMLKINTAIMADGVRMALAGKDSGGANVLLSPVMALTLSKKWEAYIKALESFDKKRTVNRNIVLNQDHDGISAPDNLELYRLLIQKMKAWPFCNYPGNQVEVIETGEKIFTKAAIADQVTCLLNILQLMGPGSGGIDLSVCGGKKSVGSKRRSAKLSNWKKYYKEVRIVDVSASGLYEKISENLLEML

SEQ ID NO: 20601 - protein, 1361 aa, unidentified
  REGION 1..1361: note = Cas Enzyme sequence
MARENIYYFGLDIGTDSVGYAVTDENYTLKKFKGEPMWGATLFEAANTAAERRGYRTARRRLDRKQQRVSLLNELFAEEIGKTDPHFFIRRRESALYGEDPQFGVKLFDGEGITDKEYHKKYPTIHHLILELMNSSEPHDVRLVYMACAWLVANRGHFLFDVPEDRVAEVLDFNEIYRDFCEYLTEQGCALPWSTQIKAETILEIMQMETGVKKKTEEFKAKLFGGGKPSKEITEETPFSAEAVVNLLAGRKVKPAELFGNMAYAEVDSVSLTMNDEEFVRIVAELDEDGELLRKLRAMSDCAQLKKAMKDADCISEGKVAIYEQHKADLKTLKYLVKKYCSDKYNEFFRAAVKDNYVFYTRHMKSLPEEQQKEVKSIAGKDAFSDFTAKRMKAITVEEKDKRLYDDMMERLEARTFLPKQKDGDNRVIPQQLYHYELAELLNRAKGYCSLLNETDADGISVAQKILSIFEFKIPYFVGPLRKNDETKNAWIVRKAEGKILPWNFEQMVDLDASEKGFIERMTNRCTYLPDEEVLPVNSLLYSRFMVLNELNNLKVNDRRISVEAKQKLFRELFEDSLRVTPKKIRDYLLQHGYMEKTDVLSGLDETIKSGLKPYHIFKRLLSSGVLTEADAEEIIKHAAYSEDKPRMRRWLKERYPQLKEEDAAYILRQNLKEFGRLSERFLTGIYGTERNSDGEAYSIIEMLWNTNENLMQLLSDRYTFSEQITHISEEYYADCPRSLNDRLSEMYISNAVKRPIFRTADIVQEVVKVMGAPPAKIFVEMARGGTPEQKGKRTQTRKNQLLELYKKIKSEDTRRLTEKLEEMGMMADNRLQSDRLFLYYLQLGRCAYTGQPIDLEHLTDGTYNLDHIYPQCYVKDDSITNNLVLVKSELNGRKSDSYPLPEDIRGTMSSFWKQLKETGLMTEEKYRRLTRQTPFTDDEKRGFINRQLVETRQSTKAVTTLLQERFRDTEVVYVKAGMVSEFRQDFDLLKCRTVNDLHHAKDAYLNIVVGNVYHERFTKNWFSLDSSYNVQVKKIFQKQQRHGETCYWNGEEDIARIKKTMAKNAVHLTRYAFCRKGGLFDRQPVKKGENLIPLKNGMPTEKYGGYNKPTASFFVLARYEAKGKREVMIVPVNLIDADRFIKDAEFAATYTAEMIERITGKAPEKTELLLNGRPLKVNTVFSLDGTLVTLSGKSSGGSRVLLSALDTLILGRESEIYVKAMESFLKKRETNPALLPDQKHDKLSKEENLILYDRLINKLRSYPYCNLPGNQAETLEKGREKFIQAEVADQINCLVGLMNLLNAKGNTCDLSLIGGAPKAGTVILSSSLSNWKKKYHDVRIIDRSAAGLFESTSENLLELL

SEQ ID NO: 20602 - protein, 1156 aa, unidentified
  REGION 1..1156: note = Cas Enzyme sequence
MQAQVGITQRKAKFKAEVYGGKSPSKKPEKEFPFSRDAIVSLLSGGKVSPAELFGNEAYKGLDSVALSLDEENFERILSELGDDAELLRNMQAMYDCALLNITLQGKRSISEAKVAVYEQHKEDLRFLKYFIRKYCRQNYSKVFRSAAKDNYVAYSGNVKSCKEANKVARTNKNAFCDFVKKLVKDIRPEKEDLAKYENMMERLSLYTFLPKQKDSDNRVIPHQLYEVELDQILANASMYLTMLGNADANGITNADKIRAIFRFRVPYYVGPLNPKSPYAWLERKPEKIYPWNFEKIVDLDKSEQNFIRRMTNTCTYLPGEAVLPYCSLLYSRYMVLNEINNLKINQHAISVPLKQKIYQALFENSGKKVTKKAIAGYLRSQGLMTSSDEISGVDDTLKANLKPYHSFRHMLSAGTLSEEQVEDIILHAAYSEDKSRMDRWLENHYPVLSEQNRTYILRLNLKGFGRLSGRFLTGIVCTQGNDSGEAMSIIDALWQTNNNLMQLLSSSYTFQNQIREFAADYYSEPSHKKTLSQRLDDMYVSNTVKRQIIRSLDICSDVVKAMKNAPERIFVEMARGTVEDQKGKRTKSRKQQLLDLYNQVRCEDAPELLANLEAMGDEADNRLQSDKLFLYYLQLGKCAYTGQPIELEQLASKAYDIDHIYPQSKVQDDSILNNKVLCLSTANGEKGDLFPIRLEIQKKMQPFWSYLKNAGLMNEEKYSRLTRTFHFTADELHQFINSQLVETRQSTKVVTQLLQERYPETEIVYVKACLVSRFRQEFGMLKCRSVNDLHHAKDAYLNIVVGNVYHEKFTRINIEESYSLNLKPLFENSNLTVWKGKSSLAKVRKVICKNAVHVTCYAFCRKGGLFDQQPKKAQEGLVPLKKSLPHDLKRELPTEKYGGYNKPAASFYLLSAYSVGNKKDIMFVPVELRYAARVLSDTEFAIWYTFREISKINGNKPVSDVRILLNGRPLKINTVLLLDGMPVTIRGKTNKGAQIIVASQLPLILPDQAEQYIKRLESFSTKKKANDKLRLNEKYDHISREQNVELYTLLSQKLKHSIFAKCPGSIARTVEDGYEKFSQLDPEDQIGCLMGIVSWFGSQSNGIDLTLIGGKAATGTKLINAKFSNLAKNIRDLRIVDTSASGLYVSRSENLLGLL

SEQ ID NO: 20603 - protein, 1348 aa, unidentified
  REGION 1..1348: note = Cas Enzyme sequence
MEGIMGAKNSETNGSKNVGNFFVGLDIGTNSVGWAVTNDQYEVLRSKNHRMWGSRLFEEGNTAAERRGHRGSRRRLNRRNDRLMILEDLFAEEISKVDKAFYQRLHESQYRQEHKNTSGQFFLFNDKCFTDKDYHIDYPTVYHLRAALMKDPAKDIRLLFLALHHIIKYRGNFLHEGESLKTTGGVTEVLQQVLACNEFSGVREHIDNNMLVTLLSEKGVTRSDIAKKISELVTEQQYKKQAKAFASLVLGLKANLDELFNEPEYKELDAEIRSVEFSGTEYWEERDKYEPYLGESLFALDGCKTLYDSLLLSNIKPDGKYLSAAKVETFEAHHDQLEMLKDVLKKKKSLYNLVLRDDVKDLKNYITYIGKSKINKRCSREDFYKFLKQTIKDVPDSEDKSEIIKLMDLDLFLPLLRVRENGVIPYQIHKEELEKILAVSGKKYSFLNQRDALGFTVKEKVLKLLTFRIPYYVGPLNPAHKENGFAWVVRKAQGKVYPWNFEDKVDISASATAFIENLTNKCTYLIGEDVLPKYSLAYSKFSLLNELNNLRYDGKPLSYETKQDFIKDCFEKEHRKMTEKRIKEFLKHLGGTDGKGALTGLDVDIKSDLKSYRDMVRILGDGFDETVAERIIRYVTLFGEAKKVLLSTLETEFGDDLSDTQKKQILKLQYRDWGRLSATFLKGIKGIAGDNPECSILECMEQQPLNLMEVLSSHNTYLAAIEEFNKERTEPTDVVDYKLVDDLYISPAVKRSVWQTLRILDEITKLRDSVPKKVFVEVARTNKAEKKKTTSRKDRLLQLYNSIKDDGRNWSQEIKAQDAGKFNSKKLFLYYTQQGRCMYSGQSIELNDLFSTKYDIDHIYPRSVTKDNSWDNLVLVKAELNREKKDIYPIEIDTQDKQRAFWKQLLDQGFISERKYERLVRTTPLTADELADFVNRQLVETNQSVKAVTNLLKRLYPDTTICYVKAENVSEFRQDRKFVKLRSLNEHHHAKDAYLNIVVGNVYHEKFTNNPRNFIKNARSDKKRPYSLNHMFEKLLQVGSKAIWNPDTDNRTVERMMHNNDVQVTRMLVEQKGALYDATVCKATVAKPESYAPLKSSDSALSDVKKYGGFTKIKNAYYSIFRFYKKNSKEFETHIVPIPVMRVAGLNSEADYVEYAETIMNKGKFDRASLVYKKLCINVLVRVNGQLYYLGGRTDNNICIDSALSLVLDFETVKKIKNIDKYITRVADNGNYEPNSESVNSNLNMEVYKALIEKMKQPIFSSLKTNRSADLEKEETITAFKKLSLLDQCKMLLEALNLLTHKKTTYGLRPIGVVASRSKMSMNITGLSEFTIITQSVTGLQEKEIRII

SEQ ID NO: 20604 - protein, 1378 aa, unidentified
  REGION 1..1378: note = Cas Enzyme sequence
VDNKKIFLGLDIGTNSVGWAVTDDEYRLRKFKNDLMWGVHLFDEAQQSADRRAFRTARRRLDRRKQRIALLQEFFAPEIIKKDPTFFIRLKESALLPQDREHRNSSIFFNDDNYTDKEYFSQFPTIHHLITELMKNDNPHDVRLVYLACSYILAHRGHFLFEVEKDDIESIKKFAPIYAEFIDTLNNICDSIPFDDNISELEEILRLRCTVSEKEKRLTALWFAGKKPSRDLCEGLRFDLLIKLLSGGKTKLEELFINDEYKDLEVSSVCAASADFGDILDSLAGVVTPEQFSLLSAVKKLNDWSLLVNILKNSDSISHSKIKEYEAHKKDLEMLKGICRKYLNKTEYNSIFRDKEEKNKSYNSYINSPKNCSQEDFCKFVRTFIDKIKCEENDKQTLEYLKQKCADKTLCPKQVNTNNRVIPYQLYYHELKCILDNACIYLDFLNERDKYGTVADKILSIMEFRIPYYVGPLVNHSDNPNAWMIRKSEGIIRPWNFDEMVDLDKSEVEFIKRMTCRCTYLAGEDVLAKNSLLYCKYTVLNEINNITVDGKKISVAAKQKIYNEQFMKKRRVTVKMIGNLLHSCGEMTSEQKLGGIDLTIRSSLKSYHDFKSMLERKVLCESDVEKIIERITVTTDITRLKSWLKQEYPSISAEDVKYISKLNYKDYGRLSRRLLENVYETDTNTGEVVNEGNIITRLWETNDNLMQLLSSKYKYMERIKALNKEYYSDPKHSLTISDRLKEMYVPTAVRRSINRTLDVVNEIKSIAGKDPDKIFIEMARENDMTKKGVRTKSRREQIKTLFEDAKKLSDMSAEIAHLEEKLSETDDGKLRSEKYYLYFTQLGRCMYTGHPIDFEKLGGDTYYNIDHIFPQAKIKDDSLENKVLVESEANGTKSDTYPIDKDIRDKMRGFWKSLHEKKLIGDKKLQRLIRSTPFSEDELAGFISRQLVETRQSTKAAAELLKELCPESEIVYVKAELASDFRHETDMLKCREINDLHHAKDAYLNIVMGNVYNAKFTKDPLNFIRSGEHYSLKMFKKNADGKTSGLLTHKVERNGTTVWDPAKSFDTVRKMMSKNSVRYVRYTYKRKGGLFNQMPESKKPGLIQRKKGLKTEKYGGYNNASVSTFGIIKCKNDIVIIPIEIMKEYKFFSDNIFAKQYALEKLENIYPQKKYQSLTCEDIIVPCIHYQDGSKRLPILKINSLLEVNGFRINLCSKDSGGKYMIVSGAESLICSYQDEKYIKSVCSYAAKTIDEKSLQYNGISYERNLDIYDLICQKCANGHFSKWKKFRDTSIVLNKKRDIFISLSLNEQICALKEIVNILKSGRSVYCDLSAIEESKQSCISKLGAVLTSIKSVSDIRIIDQSPTGLYEKKSVNLLEL

SEQ ID NO: 20605 - protein, 1394 aa, unidentified
  REGION 1..1394: note = Cas Enzyme sequence
VANEKILLGLDIGSNSVGWAVTDEKYNLKKFKNNLMWGVHLFDEAQQSAERRSFRTTRRRLDRRQQRINLLQELFKKEILKVDKGFFLRLKESALLPEDSENRKNNIFFDDENYGDKEYFNEYPTIHHLIVELMNSDSSHDIRLVYYACAYILTHRGHFLLPVDKDSIDNITDFKPIYNVFYSSLTELTEAPAFDANADIMADVLKKRISSTEKDRELKERLFSGKVPKSDEDTIRYDQLTKVISGGTVKLSDLFLKEDYKELDKNSVCVKNADFSDVIDMLTGQIDKLHLALLINIKAMYDWSLLVDIINEDTIKYEKEGYEKTISLCKVAKYDRHKIDLKELKYFARTYLSKSNYNEIFRIAGDKANYASYVYNRQNVIDRKVDSKFSHNDPSHDRKSQVAFCKFLKSYITKITPSDNDKDRFEELKKKCEDGELCPKQVTTDNRVIPYQLYYAELKKILKNACKYLPFLNEKDEYGTIAEKVLKIMEFRIPYYAGPLVSSEKSKNAWLVRKAEGKIYPWNFHNIIDEDASENEFIRRMTCKCTYLAGEDVLPKYSLLYSKFMVLNEINNIKVNGEPISVELKQRLYENKFVDSKAKVTKKRLKEYFTATGKYSEEVEVTGVDDTIKSSLRSYHDFKVLIESGVLKEYDVEKIIERITVTTDVKRLKKWLNDNYSNLSSDDIKFITKLKYNDYGRLSRVLLEEILPIDAKTGEIPEDKNIITKLWETNDNLMQLLSSTHGYTNAIEQYNNDYYDQHNDEKSISQRLKNMYIPTAVRRSITRTLDIITELKTILKKAPDKIFIEMSRGEGDTPKGSRTKSRRDQITEHLEKSNDDNIDELMTNLRKSDDDKLRSEKVFLYFMQLGKCAYTEKAINFEDLDDNSKWNIDHIWPQAKIKDDSLDNKVLVDSVVNGEKKDNMLNPEIRKKMSGFWHVLYKKNMMSEKKYQRLMRNTPFTEEELSGFIARQLVETRQSTKAVATILKEIFPESEIVYVKAGIVSEFRQEMDMLKCREINDLHHAKDAYLNIVMGNVYNTKFTKDPLNFVKSGERYSMKLFKKNQDGEENGLLAGIVQRGDTIAWDPKSSFDIVRKMMSKNSIRYVRYTYKRKGGLFNQMPERKKEGLVPRKNGLDTEKYGGYNNKTASFFSIVKVDKEIVIIPIDLIDSHLFMIDESRAKEIAFAALQEFYPSKKLLSLTADKIVFPLKRKIIKINTMIEIDGYRVNICSKDSKGKYISVSSAVPLIFDNNQNLYIKKLESFKKKHDSDKNYKVNNYSGITESANIELYDHITEKCLNPPFNKWAKFEEAGKILKEGKSKFVVQDITTQVLSLLKLLTLLKTGRSANCDLSFAGGVANFNTVRFNSTLDLKKNNSVYIIDQSPTGLFEKKSVNLLKL

SEQ ID NO: 20606 - protein, 1357 aa, unidentified
  REGION 1..1357: note = Cas Enzyme sequence
MENRKYYLGLDIGTDSVGYAVTDENYKPLKFKGEPMLGTHVFDARGDDSPTATRRGFRTARRRLDRRQQRVALIQDIFAKEISKVDKRFFIRIRESGLHREDVSDIGDLNVFFNDPTFKDKDYYKKYPTIHHLIDELMNSEEQHDVRLVYIACAWLVAHRGHFLSEVDMDNIDEVTSFEPVYKDLEKYLAENEMPMWDFSISGVDEILKKKKGLTAKKAEIYNKLGCSKKTGYAPMLDLLCGGKAKLSALFANEEYDELEKASIELAMDDETLAEVYAQLGDDAELIRKLKAVYDWSVLTDILAGEKTISKAKIAIYDRHKDDLKELKRIVRKYLPEKYDYVFKKAIKGNYASYVANYKTHNFNEDQLVPDKFKVKKEEFRDFLKKNIFSKLIPDQEDVAIIEAIKERIERCEFLPKQVDGNNRVIPYQLYGYELKTLLKSAAAYLPFLEEKDSDGLTATDKILSVFKFRVPYYVGPLNSSSQNAWLIRRAEGKILPWNFDSKIDLEASENEFIRRMTNKCTYLPDEDVLPKYSMLYCKFNVLNEINNITVNGIKISAELKQGIYESLFLTRQKVTVKAIKEYLWSNGVDKTAVVSGLDESIKSSLKPQLEFRRLLESKTLTEKDVEEIIERSTCTENKKRLKKWIKESFSQLSAEDVDYLASRRYTDFGRLSRKLLEDILVTEYKTGEVNTVIGWMWNTNRNFMQLMSTDFDLAVHIENYTRDLFTEHPLTLAERLDSMYLSGAVKRPVMRTLDIVSDVIKAMKGQKPAKVFVEMARGGSEDQKGKRTQSRKQQIIDFYKIVKDESVKKLNKELEELGESADNKLQSDALFLYFMQLGKCMYTGEEIDIHKLKSGNYNIEHIYPRSLVKDDSLLNNRILVNSKVNEAKGDIYPVPTNIKERMQHFWTMLHENKMLTDEKYKRLVRTTPFTDEEKWSFINRQLVETRQSTKAVATLLKERFGEDCEIVYVKAGLVSEFRHEVLNMHKTRAINDLHHAKDAYLNIVVGNVYHTRFTEEWFFSDNRGAYNVKAPQLFGHPVKKANWKGGESIAFVRKVMSKNAIHYTRYAFCRKGGLFNQMPLKAAEGLVPRKAGLETAKYGGYGSTTASFYVLAEFTTAKGKDAMFVPIELMVDKKFRADKAFAENYVKEQIKKIEGKEILSSKILLNGRIIKINTILELDGLRFCIAGKNSGGAMILLRLMTPNILSVEWENYVKSMEVLSEKLKKNANYIVDVPYDKVTKEQNGLLYDLLCKKIVEQPFNTVPGLPIDVIQNGSEMFNALSIKEQCECLIQLLSVLKTGRAGSCDLKSIGGSGMAATLRKGAKVSSYKKQYNDFRIVDVSVSGLFESKTDNLLNLL

SEQ ID NO: 20607 - protein, 1390 aa, unidentified
  REGION 1..1390: note = Cas Enzyme sequence
MFAENFSEKSKNGYYLGVDIGTDSVGYAVTDRDYSLCRFKGEPMTGVALFDKADQCADRRAHRTSRRRYARRQMRVNLIQDLFCVEMAKVDPNFFIQMNESRLWQCDKKPETLVGCEWLDREYNRRFPTVHHLIMELINEENSNTDVRHLYLAVAWLVAHRGHFLSDISCDKIRELYDIKPLYSAFIGWFGENGYSAPWECDADALMAAMSRRCGVRAKEAELKKLIYGGKKPVEDESCPLYQEAIIKLLAGGSIEIKKTLKWEEYKGVEGSICLDDAEKLEAVLAELGDDGEVIRLMSQVYDCAALSKMLSGHTYISEAKIEQYETHKADLRELKRLAKKYCSDDEYKNFFVSETGTYSAYSAYFKCSEKRKGKKITREDFYKGVKKLIAKIKERIGEGDDADLVIANGVLSRIDAGTYMPKQVNPENRLIPYQLYYAELDVILSNAEKRFAFLSGRDSDGLSVSDKIRSVFTFRIPYFVGPLEKSPGNKFAWIERKAEGRILPWNFDEKVDLDASEDGFIKRMTNKCTYLPGENVLPKQSLLYCKFTILDEINNINIDGVPISVELKQQIFHELFEKEKKVTKKKLIDFLVSVKAISKGEEVRISGLGAEIKSSYKPYIDFRRLLAAGTLTAEDVDCIIERITCTEDSARLKKWLLKWSKENGKNLSDDDIKYISQRKYDDFGRLSGKLLNGIEAACTETGEVGTVMHFMWNTNDNLMQIIKGQKYRFEDRISEISKEYFSEHPTTLVERLDELGISNAVKRPVMRTLDIIADVVKAKKCPPEKIFVEMTRGEDKRIDSDKLNRGKRLREFYSKLDSEDAAKPRKELDALGDEADRKLQREALFLYFCQMGKCAYCGAPLDISAIGTNEYNVDHIWPRAYIKDDSILNNKVLVHSEENGRKTDTYPIESKIRSEMRGFWENLRNAKLINEEKFRRLTREHAFSADERLGFINRQIVETGQSAKVVTNLLTDLYPKAEIVFVKAGNVSEFRHEYGEICNYALFGRTLTDAEKKSKCLVKSRTASDIHHAHDAYLNIVVGNLFHEKFTKRYYLDTLNDYSPKMHILFGRKCVIDGNVIWNPEKHLPTVDRTMANVHIHLTKYQTKQKGGFFDQQPKSAGSSDSLVPLKKGLDTAKYGGYNKPTISFYVLVRYRIRKKYELTIVPVELLVANKYLSEQGYPAKHVREKLPVNAEDISFPLENRIIKVNTVFSLDGFEACVSGTSNRGSTILMRSLMTPRYTAEQIAYIKNLDNISEKRKKNPQYVIDETFSGISREKNVALFADLVNMMNGSVYSKQPGAKLGISADDQKKFEGLTIDMQYECLKNMILYLKTNRSDDCNMSAMGGKPQSGAVYLSANISNWKKNYSDVRIIDRSSSGLFEHRTGNLLNLI

SEQ ID NO: 20608 - protein, 1390 aa, unidentified
  REGION 1..1390: note = Cas Enzyme sequence
MFAENFSEKSKNGYYLGVDIGTDSVGYAVTDRDYSLCRFKGEPMTGVALFDKADQCADRRAHRTSRRRYARRQMRVNLIQDLFCVEMAKVDPNFFIQMNESRLWQCDKKPETLVGCEWLDREYNRRFPTVHHLIMELINEENSNTDVRHLYLAVAWLVAHRGHFLSDISCDKIRELYDIKPLYSAFIGWFGENGYSAPWECDADALMAAMSRRCGVRAKEAELKKLIYGGKKPVEDESCPLYQEAIIKLLAGGSIEIKKTLKWEEYKGVEGSICLDDAEKLEAVLAELGDDGEVIRLMSQVYDCAALSKMLSGHTYISEAKIEQYETHKADLRELKRLAKKYCSDDEYKNFFVSETGTYSAYSAYFKCSEKRKGKKITREDFYKGVKKLIAKIKERIGEGDDADLVIANGVLSRIDAGTYMPKQVNPENRLIPYQLYYAELDVILSNAEKRFAFLSGRDSDGLSVSDKIRSVFTFRIPYFVGPLEKSPGNKFAWIERKAEGRILPWNFDEKVDLDASEDGFIKRMTNKCTYLPGENVLPKQSLLYCKFTILDEINNINIDGVPISVELKQQIFHELFEKEKKVTKKKLIDFLVSVKAISKGEEVRISGLGAEIKSSYKPYIDFRRLLAAGTLTAEDVDCIIERITCTEDSARLKKWLLKWSKENGKNLSDDDIKYISQRKYDDFGRLSGKLLNGIEAACTETGEVGTVMHFMWNTNDNLMQIIKGQKYRFEDRISEISKEYFSEHPTTLVERLDELGISNAVKRPVMRTLDIIADIVKAKKCPPEKIFVEMTRGEDKRIDSDKLNRGKRLRELYSKLDLEDAVRPRKELDALGDEADRKLQREALFLYFCQMAKCAYCGKPLDIPTIGTNEYNVDHIWPRAYIKDDSILNNKVLVHSEENGRKTDTYPIESKIRSEMRGFWENLRNAKLINEEKFRRLTREHAFSTDERLGFINRQIVETGQSAKVVTDLLKKLYPKAEIVFVKAGNVSEFRHEYGEICNYALFDRTLTDAEKKSKCLVKSRTASDIHHAHDAYLNIVVGNLFHEKFTNRYYLDTLNDYSPKMHILFGRKCVIDGNVIWNPEKHLPTVDRTMANVHIHLTKYQTKQKGGFFDQQPQSAGSSDSLVPLKKGLDTAKYGGYNKPTISFYVLVRYRIRKKYELTIVPVELLVANKYLSEQGYPAKHVREKLPVNAEDISFPFGNRIIKVNTVFSLDGFEACVSGTSNRGSTILMRSLMTPRYTAEQIAYIKNLDNISEKRKKNPQYVIDETFSGISREKNVALFADLVNMMNGSVYSKQPGAKLGISADDQKKFEGLTIDMQYECLKNMILYLKTNRSNDCNMSAMGGKPQSGAVYLSANISNWKKNYSDVRIIDRSSSGLFEHRTGNLLNLI

SEQ ID NO: 20609 - protein, 1390 aa, unidentified
  REGION 1..1390: note = Cas Enzyme sequence
MFAENFSEKSKSGYYLGVDIGTDSVGYAVTDRDYSLCRFKGEPMTGVALFDKADQCADRRAHRTSRRRYARRQMRVNLIQDLFCVEMAKVDPNFFIQMNESRLWQCDKKPETLVGCEWLDREYNRRFPTVHHLIMELINEENSNTDVRHLYLAVAWLVAHRGHFLSDISCDKIRELYDIKPLYSAFIGWFGENGYSAPWECDADALMAAMSRRCGVRAKEAELKKLIYGGKKPVEDESCPLYQEAIIKLLAGGSIEIKKTLKWEEYKGIEGSICLDDAEKLEAVLAELGDDGEVIRLMSQVYDCAALSKMLSGHTYISEAKIEQYETHKADLRELKRLAKKYCSDDEYTNFFVSETGTYSAYSAYFKCSEKRKGKKITREDFYKGVKKLIAKIKERIGEGDDTDLVIANGVLGRIDAGTYMPKQVNPENRLIPYQLYYAELDVILSNAEKRFAFLSGRDSDGLSVSDKIRSVFTFRIPYFVGPLEKVPGNKFAWIERKAEGRILPWNFDEMVDLDASEDGFIKRMTNKCTYLPGENVLPKQSLLYCKFTILDEINNINIDGVPISVELKQQIFHELFEKEKKVTKKKLIDFLVSVKAISKGEEMRISGLGAEIKSSYKPYIDFRRLLAAGTLTAEDVDCIIERITCTEDTARLKKWLLKWSKENGKDLSDDDIKYISHRKYDDFGRLSGKLLNGIEAACTETGEVGTVMHFMWNTNDNLMQIIKGQKYRFEDRISEISKEYFSEHPTTLVERLDELGISNAVKRPVMRTLDIIADIVKAKKCPPEKIFVEMTRGEDKRIDSDKLNRGKRLRELYSKLDLEDAVRPRKELDDLGDEADRKLQREALFLYFCQMAKCAYCGKPLDIPTIGTNEYNVDHIWPRAYIKDDSILNNKVLVHSEENGRKTDTYPIESKIRSEMRGFWENLRNAKLINEEKFRRLTREHAFSADERLGFINRQIVETGQSAKVVTNLLTDLYPKTEIVFVKAGNVSEFRHEYGEICNYALFGRTLTDAEKKSKCLVKSRTASDIHHAHDAYLNIVVGNLFHEKFTKRYYLDTLNDYSPKMHILFGRKCVIDGNVIWNPEKHLPTVDRTMANVHIHLTKYQTKQKGGFFHQQPKSAGSSDSLVPLKKGLDTAKYGGYNKPTISFYVLVRYRIRKKYELTIVPVELLVANKYLSEQGYPAKHVREKLPVNAEDISFPLENRIIKVNTVFSLDGFEACVSGTSNRGSTILMRSLMTPRYTAEQIAYIKNLDNISEKRKKNPQYVIDETFSGISREKNVALFADLVNMMNGSVYSKQPGAKLGISADDQKKFEGLTIDMQYECLKNMILYLKTNRSDDCNMSAMGGKPQSGAVYLSANISNWKKNYSDVRIIDRSSSGLFEHRTGNLLNLI

SEQ ID NO: 20610 - protein, 1390 aa, unidentified
  REGION 1..1390: note = Cas Enzyme sequence
MFAENFSEKSKNGYYLGVDIGTDSVGYAVTDRDYSLCRFKGEPMTGVTLFDKADQCADRRAHRTSRRRYARRQMRVNLIQDLFCLEMAKVDPNFFIQMNESRLWQCDKKPETLVGCEWLDREYNRRFPTVHHLIMELINEENSNTDVRHLYLAVAWLVAHRGHFLSDISCDKIRELYDIKPLYSAFIGWFGENGYSAPWECDADALMAAMSRRCGVRAKEAELKKLIYGGKKPVEDENCPLYQEAIIKLLAGGSIEIKKTLKWEEYKGVEGSICLDDAEKLEAVLAELGDDGEVIRLMSQVYDCAALSKMLSGHTYISEAKIEQYETHKADLRELKRLAKKYCSDDEYKNFFVSETGTYSAYSAYFKCSEKRKGKKITREDFYKGVKKLIAKIKERIGEGDDADLVIANGVLGRIDAGTYMPKQVNPENRLIPYQLYYAELDVILSNAEKRFAFLSERDSDGLSVSDKIRSVFTFRIPYFVGPLEKVPGNKFAWIERKAEGRILPWNFDEKVDLDASEDGFIKRMTNKCTYLPGENVLPKQSLLYCKFAILDEINNINIDGVPISVELKQQIFHELFEKEKKVTKKKLIDFLVSVKAISKGEEVRISGIGAEIKSSYKPYIDFRRLLAAGTLTAEDVDCIIERITCTEDSARLKKWLLKWSKENGKDLSDDDIKYISQRKYDDFGRLSGKLLNGIEAACAETGEVGTVMHFMWNTNDNLMQIIKGQKYRFEDRISEISKEYFSEHPTTLVERLDELGISNAVKRPVMRTLDIIADIVKAKKCPPEKIFVEMTRGEDKRIDSDKLNRGKRLREFYSKLDSEDAVRPRKELDDLGDEADRKLQREALFLYFCQMGKCAYCGKPLDISAIGTNEYNVDHIWPRAYIKDDSILNNKVLVHSEENGRKTDTYPIESKIRSEMRGFWENLRNAKLINEEKFRRLTREHAFSADERLGFINRQIVETGQSAKVVTDLLKKLYPKTEIVFVKAGNVSEFRHEYGEICNYALFGRTLTDAEKKSKCLVKSRTASDIHHAHDAYLNIVVGNLFHEKFTNRYYLDTLNDYSPKMHILFGRKCVIDGNVIWNPEKHLPTVDRTMANVHIHLTKYQTKQKGLLFDQQPLRAGSSDSLVPLKKNLDTAKYGGYNSPKISFCVLVRYRIRKKYELTIVPVELLVANKYLSEQGYPAKHVREKLPVNAEDISFPLENRIIKVNTVFSLDGFEACVSGTSNRGSTILMRSLMTPRYTAEQIAYIKNLDNISEKRKKNPQYVIDETFSGISREKNVALFADLVNMMNGSVYSKQPGAKLGISADDQKKFEGLTIDMQYECLKNMILYLKTNRSDDCNMNAMGGKSQIGAVRLSANISNWKKNCSDVRIIDRSSSGLFEHRTGNLLNLI

SEQ ID NO: 20611 - protein, 1196 aa, unidentified
  REGION 1..1196: note = Cas Enzyme sequence
MGIPWECDADALMAAMSRRCGVRAKEAELKKLIYGGKKSVEDERCPLYQEAIIKLLAGGSIEIKKTLKWEEYKGVEGSICLDDAEKLEAVLAELGDDGEVIRLMSQVYDCAALSKMLSGHTYISEAKIEQYETHKADLRELKRLAKKYCSDDEYKNFFVSETGTYSAYSAYFKCSEKRKGQKITREDFYKGVKKLVAKIKERIGEGDDTDLVIANGVLGRIDAGTYMPKQVNPENRLIPYQLYYAELDVILSNAEKRFAFLSERDSDGLSVSDKIRSVFTFRIPYFVGPLEKSPGNKFAWIERKAEGRILPWNFDEKVDLDASEDGFIKRMTNKCTYLPGENVLPKQSLLYCKFTILDEINNINIDGVPISVELKQQIFHELFEKEKKVTKKKLIDFLVSVKAISKGEEVRISGIGAEIKSSYKPYIDFRRLLAAGTLTAEDVDCIIERITCTEDTARLKKWLLKWSKENGKDLSDDDIKYISQRKYDDFGRLSGKLLNGIEAACTETGEVGTVMHFMWNTNDNLMQIIKGQKYRFEDRISEISKEYFSEHPTTLVERLDALGISNAVKRPVMRTLDIIADIVKAKKCPPEKIFVEMTRGEDKRIDSDKLNRGKRLRELYSKLDLEDAARPRKELDALGDEADRKLQREALFLYFCQMAKCAYCGKPLDISAIGTNEYNVDHIWPRAYIKDDSILNNKVLVHSEENGRKTDTYPIESKIRSEMRGFWENLRNAKLINEEKFRRLTREHAFSTDERLGFINRQIVETGQSAKVVTNLLTDLYPKTKIVFVKAGNVSEFRHEYGEICNYALFGRTLTDSEKKSKCLVKSRTASDIHHAHDAYLNIVVGNLFHEKFTNRYYLDTLNDYSPKMHILFGRKCVIDGNVIWNPEKHLPTVDRTMANVHIHLTKYQTKQKGGFFHQQPESAGSSDSLVPLKKGLDTAKYGGYNSPTISFYVLVRYRIGKKYKLTIVPVELLVANKYLSEQGYPAKHVREKLPVNAEDISFPLENRIIKVNTVFSLDGFEACVSGTSDGGSRILMRSLMTPRYTAEQIAYIKNLDNISEKRKKNPQYVIDETFSGISREKNVALFADLVNMMNGSVYSKQPGAKLGISADDQKKFEGLTIDMQYECLKNMILYLKTNRSGACNMNAMGGDQTSGTMRLSTNISNWKKYYSDVRIIDRSSSGLFEHRTGNLLNLI

SEQ ID NO: 20612 - protein, 1390 aa, unidentified
  REGION 1..1390: note = Cas Enzyme sequence
MFAENISEKSKNGYYLGVDIGTDSVGYAVTDRDYSLCRFKGEPMTGVTLFDKADQCADRRAHRTSRRRYARRQMRVNLIQDLFCVEMAKVDPNFFIQMNESRLWQCDKKPETLVGCEWLDREYNRRFPTVHHLIMELINEENSNTDVRHLYLAVAWLVAHRGHFLSDISCDKIRELYDIKPLYSAFIGWFGENGYSAPWECDADALMAAMSRRCGVRAKEAELKKLIYGGKKPVEDESCPLYQEAIIKLLAGGSIEIKKTLKWEEYKGIEGSICLDDAEKLEAALAELGDDGEVIRLMSQVYDCAALSKMLSGHTYISEAKIEQYETHKADLRELKRLAKKYCSDDEYKNFFVSETGTYSAYSAYFKCSEKRKGKKITREDFYKGVKKLIAKIKEQIGEGDDTDLVIANGVLSRIDAGTYMPKQVNPENRLIPYQLYYAELDVVLSNAEKRFAFLSERDSDGLSVSDKIRSVFTFRIPYFVGPLEKSPGNKFAWIERKAEGRILPWNFDEKVDLDASEDGFIKRMTNKCTYLPGENVLPKQSLLYCKFTILDEINNINIDGVPISVELKQQIFHELFEKEKKVTKKKLIDFLVSVKAISKGEEVRISGLGAEIKSSYKPYIDFRRLLAAGTLTAEDVDCIIERITCTEDTARLKKWLLKWSKESGKNLSDDDIKYISQRKYDDFGRLSGKLLNGIEAACAETGEVGTVMHFMWNTNDNLMQIIRGQKYRFEDRISEISKEYFSEHPTTLVERLDELGISNAVKRPVMRTLDIIADIVKAKKCPPEKIFVEMTRGEDKRIDSDKLNRGKRLREFYSKLDSEDAVRPRKELDALGDEADRKLQREALFLYFCQMGKCAYCGAPLDISAIGTNEYNVDHIWPRAYIKDDSILNNKVLVHSEENGRKTDTYPIESKIRSEMRGFWEKLRNAKLINEEKFRRLTREHAFSTDERLGFINRQIVETGQSAKVVTDLLKKLYPKTEIVFVKAGNVSEFRHEYGEICNYALFDRTLTDAEKKSKCLVKSRTASDIHHAHDAYLNIVVGNLFHEKFTKRYYLDALNDYSPKMHILFGRKCVIDGNVIWNPEKHLPTVDRTMANVHIHLTKYQTKQKGGFFHQQPESAGSSDSLVPLKKGLDTAKYGGYNSPTISFYVLVRYRIGKKYKLTIVPVELLVANKYLSEQGYPAKHVREKLPVNAEDISFPLENRIIKVNTVFSLDGFEACVSGTSSGGSQIHMRSLMTPRYTAEQIAYIKNLDNISEKRKKNPQYVIDETFSGISREKNVALFADLVNMMNGSVYSKQPGAKLGISADDKKKFEGLTIDMQYECLKNMILYLKTNRSGACNMNAMGGNPTSGAVYLSTNISNWKKYYSDVRIIDRSSSGLFEHRTGNLLNLI

SEQ ID NO: 20613 - protein, 1390 aa, unidentified
  REGION 1..1390: note = Cas Enzyme sequence
MFAENFSGKSKNGYYLGVDIGTDSVGYAVTDRDYSLCRFKGEPMTGVTLFDKADQCADRRVHRTSRRRYARRQMRVNLIQDLFCVEMAKVDPNFFIQMNESRLWQCDKKPETLVGCEWLDREYNRRFPTVHHLIMELINEENSNTDVRHLYLAVAWLVAHRGHFLSDISCDKIRELYDIKPLYSAFIGWFGENGYSAPWECDADALMAAMSRRCGVRAKEAELKKLIYGGKKPVEDENCPLYQEAIIKLLAGGSIEIKKTLKWEEYNGVEGSICLDDAEKLEAVLAELGDDGEVIRLMSQVYDCAALSKMLSGHTYISEAKIEQYETHKADLRELKRLAKKYCSDDEYKNFFVSETGTYSAYSAYFKSSEKRKGKKITREDFYKGVKKLIAKIKERIGEGDDTDLVIANGVLSRIDAGTYMPKQVNPENRLIPYQLYYAELDVILSNAEKRFAFLSGRDSDGLSVSDKIRSVFTFRIPYFVGPLEKSPGNKFAWIERKAEGRILPWNFDEKVDLDASEDGFIKRMTNKCTYLPGENVLPKQSLLYCKFTILDEINNINIDGVPISVELKQQIFHELFEKEKKVTKKKLIDFLVSVKAISKGEEVRISGLGAEIKSSYKPYIDFRRLLAAGTLTAEDVDCIIERITCTEDTARLKKWLLKWSKENGKKLSDDDIKYISQRKYDDFGRLSGKLLNGIEAACTETGEVGTVMHFMWNTNDNLMQIIKGQKYRFEDRISEISKEYFSEHPTTLVERQDELGISNAVKRPVMRTLDIIADIVKAKKCQPEKIFVEMTRGEDKRIDSDKLNRGKRLREFYSKLDSEDAAKPRKELDDLGDEADRKLQREALFLYFCQMGKCAYCGKPLDISAIGTNEYNVDHIWPRAYIKDDSILNNKVLVHSEENGRKTDTYPIESKIRSEMRGFWENLRNAKLINEEKFRRLTREHAFSTDERLGFINRQIVETGQSAKVVTDLLKKLYPKTEIVFVKAGNVSEFRHEYGEICNYALFDRTLTDAEKKSKCLVKSRTASDIHHAHDAYLNIVVGNLFHEKFTKRYYLDALNDYSPKMHILFGRKCVIDGNVIWNPEKHLPTVDRTMANVHIHLTKYQTKQKGGFFDQQPQSAGSSDSLVPLKKNLDTAKYGGYNKPTISFYVLVRYRIGKKYELTIVPVELLVANKYLSEQGYPAKHMKAKLPVNAEDISFPFGNRIIKVNAVFSLDGFEACVSGTSNGGSTILMRSLMTPRYTAEQIAYIKNLDNISEKRKKNPQYVIDETFSGISREKNVALFADLVNMMNGSVYSKQPGAKLGISADDQKKFEGLTIDMQYECLKNMILYLKTNRSGACNMNAMGGKPQSGAVYLSANISNWKKNYSDVRIIDRSSSGLFEHRTGNLLNLI

SEQ ID NO: 20614 - protein, 1390 aa, unidentified
  REGION 1..1390: note = Cas Enzyme sequence
MFAENISEKSKNGYYLGVDIGTDSVGYAVTDRDYSLCRFKGEPMTGVALFDKADQCADRRAHRTSRRRYARRQMRVNLIQDLFCVEMAKVDPNFFIQMNESRLWQCDKKPETLVGCEWLDREYNRRFPTVHHLIMELINEENSNTDVRHLYLAVAWLVAHRGHFLSDISCDKIRELYDIKPLYSAFIGWFGENGYSAPWECDADALMAAMSRRCGVRAKEAELKKLIYGGKKPVEDESCPLYQEAIIKLLAGGSIEIKKTLKWEEYKGVEGSICLDDVEKLEAALAELGDDGEVIRLMSQVYDCAALSKMLSGHTYISEAKIEQYETHKADLRELKRLAKNYCSDDEYKNFFVSETGTYSAYSAYFKCSEKRKGKKITREDFYKGVKKLIAKIKEQIGEGDDTDLVIANGVLGRIDAGTYMPKQVNPENRLIPYQLYYAELDVILSNAEKRFAFLSGRDSDGLSVSDKIRSVFTFRIPYFVGPLEKVPGNKFAWIERKAEGRILPWNFDEKVDLDASEDGFIKRMTNKCTYLPGENVLPKQSLLYCKFTILDEINNINIDGVPISVELKQQIFHELFEKEKKVTKKKLIDFLVSVTAISKGEEVRISGLGAEIKSSYKPYIDFRRLLAAGTLTAEDVDCIIERITCTEDTARLKKWLLKWSKENGKNLSDDDIKYISQRKYDDFGRLSGKLLTGIEAACAETGEVGTVMHFMWNTNDNLMQIIRGQKYRFEDRISEISKEYFSEHPTTLVERLDELGISNAVKRPVMRTLDIIADIVKAKKCPPEKIFVEMTRGEDKRIDSDKLNRGKRLRELYSKLDLEDAARPRKELDALGDEADRKLQREALFLYFCQMAKCAYCGKPLDIPTIGTNEYNVDHIWPRAYIKDDSILNNKVLVHSEENGRKTDTYPIESKIRSEMRGFWENLRNAKLINEEKFRRLTREHAFSADERLGFINRQIVETGQSAKVVTELLKDRYPETEIVFVKAGNVSEFRHEYGEICNYALFGRTLTDAEKKSKCLVKSRTASDIHHAHDAYLNIVVGNLFHEKFTNRYYLDTLNDYSPKMHILFGRKCVIDGNVIWNPEKHLPTVDRTMANVHIHLTKYQTKQKGLLFDQQPKSAGSSDSLVPLKKGLDTAKYGGYNSPTISFYVLVRYRIGKKYKLTIVPVELLVANKYLSEQGYPAKHVREKLPVNAEDISFPLENRIIKVNTVFSLDGFEACVSGTSSGGSQIHMRSLMTPRYTAEQIAYIKNLDNISEKRKKNPQYVIDETFSGISREKNVALFADLVNMMNGSVYSKQPGAKLGISADDKKKFEGLTIDMQYECLKNMILYLKTNRSGACNMNAMGGNPTSGAVYLSTNISNWKKYYSDVRIIDRSSSGLFEHRTGNLLNLI

SEQ ID NO: 20615 - protein, 1378 aa, unidentified
  REGION 1..1378: note = Cas Enzyme sequence
VVDEKIFWGFDIGTDSVGWAVSNSEYKLKKYKNNLMWGVHLFDEAKQSAERRLFRTARRRLDRRKQRIILLKEFFVRAVCEKDENFFRRLKESALLPEDAEHRTNNIFFDDTDYTDKDYFEEYPTIHHLICELMESKEPHDVRLVYLACVYLLAHRGHFLLPVSEDDISKVTEFEPLYESFYKALEEKLDEEPPFDRSADDFAEILKSHKTVSAKNKDFDKLLFGGKVKTYDNENISYSALIKLLSGSTEKLSKFFENEEYTDLEKDSVCVRNADFGDTLEMLEGQIDELDFALLKSVKSLYDWSLLVDILEGKSLISEAKKDKYDEHGYDLDALKYLFREYLTKDDYNEMFKEVSGKQNYASYVYNAPSDKTRDCKYKKCSQEDFCKFTKKFLSKIKPNEKDKPCLDKLLEKCEQNSLCPKQVTTDNRVIPYQLYYVELKKILENACGYLPFLNERDEYGTVADKILSIMKFRVPYYVGPLVDSKKSPNAWLVRKLDGKITPWNFTDMVNEDDSEKAFIRRMTCKCTYVVGQDVLPKYSLLYSKFSVLNEINNIKLNGEPISVQAKQEIYTELFERNKSRVSKKKIRDCLISHGYATDSDEVTGIDDIAKSVLRSYHDFKKMLSNGILTEQQVEEIIEHITVTTDNIRLKKWLKTQFPMLADEDVKYITKLKYKDYGRLSRCFLEDVLPVDTKTGEAESDKNIIMMLWETNENIMQLLSSKYRYSENIEHMNRQYYALPENHKSMSERLKDMYVPTAVRRAVTRTFDIVKELKKIQGRDPDKIFIEMARGTGETPKGKRTNSRKDQILEHWHGLDNKDINDLKKSGIWEHLDTIDDAKLRSDKYFLYFMQLGRCMYTEKTIPFEEVENEHKWNIDHIWPQAKIKDDSLDNKVLVSSNENGKKSDSYPISDDIRHSMAGLWHSLYKKGLISEKKYQRLTRSTPFTDDELSGFIARQLVETRQSTKAVATLLKEQFPNTEIVYVKAGLVSDFRQEMGMLKCREVNDLHHAKDAYLNIVLGNVYNTRFTKDPLNFVKNNEKYSIKIFQKNSDGKKTGVMTRKVERGGEVAWDPETSFAIVRKMMSKNSIRYVRYAYMRKGGLFNQMPERKKAGLVERKSGLDTGKYGGYNNTTASHFAVVKCREKSVVVVPVETMFCNRFATDIEFAKAYVAQQLAEILSQEFSSENITFPFGQRIIKVNTMFEVDGFRCNLAQKSNKGKQLVLISACSLVLDKDTYAYMKKISSFIAKKKVNKSLVINSYTGITVEDNISAFDVLVEKMQSSPFKVFFHKIGTKVANGRDKFISLSVDEQTTALFYILMLLKTGRSTGCDLTLINESGQAGVLTLNSDFSKIKDKKTIYIIDQSPTGLIERKSLNLLDL

SEQ ID NO: 20616 - protein, 1256 aa, unidentified
  REGION 1..1256: note = Cas Enzyme sequence
  REGION 1133..1142: note = misc_feature - Xaa can be any naturally occurring amino acid
  REGION 1229..1232: note = misc_feature - Xaa can be any naturally occurring amino acid
VVDEKIFWGLDIGTDSVGWAVTNSEYKLKKYKNNLMWGVHLFDEAKQSAERRSFRTARRRLDRRKQRIILLQEFFVRAVCEKDENFFRRLKESALLPEDAEHRTNNIFFDDPDYTDKDYFEEYPTIHHLICELMESKEPHDVRLVYLACVYLLAHRGHFLLPVSEDDISKVTEFEPLYESFYKALEEKLDDEPPFDRSADDFAEILKSHKTVSAKNKDFDKLLFGGKVKTYDNENISYSALIKLLSGGTEKLSKFFANEEYTDLEKDSVCVRNADFGDTLEMLEGQIDELDFALLKSVKSLYDWSLLVDILEGKSLISEAKKDKYDEHGYDLDALKYLFREYLTKDDYNEMFKEVSGKQNYASYVYNASSDKTRDSKYKKCSQKDFCKFTKKFLSKIKPNEKDKPCLDKLLEKCEQNSLCPKQVTTDNRVIPYQLYYVELKKILENACGYLPFLNERDEYGTVADKILSIMKFRVPYYVGPLVDSKKSPNAWLVRKLDGKITPWNFTDMVNEDESENAFIRRMTCKCTYVAGQDVLPKYSLLYSKFSVLNEINNIKLNGEPISVQTKQEIYTELFERNKSRVSKKKIRDCLISHGYAADSDEVTGIDDIAKSALRSYHDFKKMLSNGILTEQQVEEIIEHITVTTDNIRLKKWLKTQFPMLADEDVKYITKLKYKDYGRLSRCFLEDVLPVDTKTGEAESDKNIITMLWETNENIMQLLSSKYRYSENIEHMNRQYYALPENHKSMSERLKDMYVPTAVRRAVTRTFDIVKELKKIQGRDPDKIFIEMARGTGETPKGKRTNSRKDQILEHWHGLDNKDINDLKKSGIWEHLDTIDDAKLRSDKYFLYFMQLGRCMYTEKPIPFEEVENEHKWNIDHIWPQAKIKDDSLDNKVLVSSNENGKKSDSYPISDDIRHSMAGLWHSLYKKGLISEKKYQRLTRSTPFTDDELSGFIARQLVETRQSTKAVATLLKEQFPNTEIVYVKAGLVSDFRQEMGMLKCREVNDLHHAKDAYLNIVLGNVYNTRFTKDPLNFVKNNEKYSIKIFQKNSDGKKTGVITRKVERGGEVAWDPETSFAIVRKMMSKNSIRYVRYAYMRKSGQNGGFFDQNPLRKGKGMVSIKHNLSIEKYGGYDXXXXXXXXXXKDFGVILLAVELLSANKFLKNISEAKEYAADKLSKELNVKIVPNDVAFPLNNRYNVVKINAVLELDGYRVMIAAKQNSSIKFVSNEXXXXIDSFFTTYGLCQKNNEVYRKKKTR

SEQ ID NO: 20617 - protein, 1382 aa, unidentified
  REGION 1..1382: note = Cas Enzyme sequence
VVDEKIFWGLDIGTDSVGWAVTNSEYKLKKYKNNLMWGVHLFDEAKQSAERRSFRTARRRLDRRKQRIILLQEFFVRAVCEKDENFFRRLKESALLPEDAEHRTNNIFFDDPDYTDKDYFEEYPTIHHLICELMESKEPHDVRLVYLACAYLLAHRGHFLLPVSEDDISKVTEFEPLYESFYKALEEKLDEEPPFDRSADNFAEILKSHKTVSAKNKDFDKLLFGGKVKTYDNENISYSALIKLLSGGTEKLSKFFANEEYTDLEKDSVCVRNADFGDTLEMLEGQIDELDFALLKSVKSLYDWSLLVDILEGKSLISEAKKDKYDEHGHDLDALKYLLREYLTKDDYNEMFKEVSGKQNYASYVYNAPSDKPRDSKYQKCSQEDFCKFTKKFLSKIKPNEKDKPCLDKLLEKCEQNSLCPKQVTTDNRVIPYQLYYVELKKILENACGYLPFLNERDEYGTVADKILSIMKFRVPYYVGPLVDSKKSPNAWLVRKLDGKITPWNFADMVNEDESEKAFIRRMTCKCTYVAGQDVLPKYSLLYSKFSVLNEINNIKLNGEPISVQAKQEIYTELFERNKSRVSKKKIRDCLISHGYAADSDEVTGIDDIAKSALRSYHDFKIMLSNGILTEQQVEEIIEHITVTTDNIRLKKWLKTQFPTLADEDVKYITKLKYKDYGRLSRCFLEDVLPVDTKTGEAESDKNIITMLWETNENIMQLLTSKYRYSENIEHKNRQYYALPENHKSMSERLKDMYVPTAVRRAVTRTFDIVKELKKIQGRDPDKIFIEMARGTGETPKGKRTSSRKEQIFECWNGLDKESINELERSGLREHLDKIDDGKLRSEKYFLYFMQLGRCMYTGKPIPFEEIENEHQWNIDHIWPQAKIKDDSLDNKVLVSSNENGKKSDSYPISDDIRRSMAGLWHSLYKKGLISEKKYQRLTRSTPFTDDELSGFIARQLVETRQSTKAVATLLKEQFPNTDIVYVKAGLASDFRQKMGMVKCREVNDLHHAKDAYLNIVMGNVYDVKFTKDPLNFVKKNRDYSLKIYQKNSAGIESGVLTKIVERNGEIAWNPDTSFDIVRKMMAKNSIRYVRYAYMRKSGQNGGFFDQNPLRKGKGMVSIKHNLSIEKYGGYDNATISFFSLVSIKDFGVILLAVELLSANKFLKNISEAKEYAADKLSKEFNVKIVPNDIAFPLNNRYNVVKINSVLELDGYRVMIAAKQNSSIKFVSNESLILSSQHMAYVKKITKFIEKRKQDKVCMINAFSGISSEDNIELYDVLVSKCNIKPFNIMYENLGIKLSDNRDNFIKKSVENQVLILSEMVRLFKTGRKTGVNLEEVGGRKNSGVKTLNTCLYKVKDYSNIFLVDQSPTGLIERKSPNLLDL

SEQ ID NO: 20618 - protein, 1378 aa, unidentified
  REGION 1..1378: note = Cas Enzyme sequence
VVDEKIFWGFDIGTDSVGWAVSNSEYKLKKYKNNLMWGVYLFDEAKQSAERRLFRTARRRLDRRKQRIILLQEFFVRAVCEKDENFFRRLKESALLPEDAEHRTNNIFFDDPDYTDKDYFEEYPTIHHLICELMESKEPHDVRLVYLACVYLLAHRGHFLLPVSEDDISKVTEFEPLYESFYKALEEKLDEEPPFDRSADDFAEILKSHKTVSAKNKDFDKLLFGGKVKTYDNENISYSALIKLLSGGTEKLSKFFANEEYTDLEKDSVCVRNADFGDTLEMLEGQIDELDFALLKSVKSLYDWSLLVDILEGKSLISEAKKDKYDEHGYDLDALKYLFREYLTKDDYNEMFKEVSGKQNYASYVYNAPSDKTRDSKYKKCNQEDFCKFTKKFLSKIKPNEKDKPCLDKLLEKCEQNSLCPKQVTTDNRVIPYQLYYVELKKILGNACDYLPFLNERDEYGTVADKILSIMKFRVPYYVGPLVDRKKSPNAWLVRKLDGKITPWNFTDMVNEDESENAFIRRMTCKCTYVAGQDVLPKYSLLYSKFSVLNEINNIKLNGEPISVQAKQEIYTELFERNKSRVSKKKIRDCLISHGYATDSDEVTGIDDIAKSVLRSYHDFKKMLSNGILTEQQVEEIIEHITVTTDNIRLKKWLKTQFPMLADEDVKYITKLKYKDYGRLSRCFLEDVLPVDTKTGEAESDKNIIMMLWETNENIMQLLSSKYRYSENIEHMNRQYYALPENHKSMSERLKDMYVPTAVRRAVTRTFDIVKELKKIQGRDPDKIFIEMARGTGETPKGKRTNSRKDQILEHWHGLDNKDINDLKKSGIWEHLDTIDDAKLRSDKYFLYFMQLGRCMYTEKPIPFEEVENEHKWNIDHIWPQAKIKDDSLDNKVLVSSNENGKKSDSYPISDDIRHSMAGLWHSLYKKGLISEKKYQRLTRSTPFTDDELSGFIARQLVETRQSTKAVATLLKEQFPNTEIVYVKAGLVSDFRQEMGMLKCREVNDLHHAKDAYLNIVLGNVYNTRFTKDPLNFVKNNEKYSIKIFQKNSDGKKTGVMTRKVERGGEVAWDPETSFAIVRKMMSKNSIRYVRYAYMRKGGLFNQMPERKKAGLVERKSGLDTGKYGGYNNTTASHFAVVKCREKSVVVVPVETMFCNRFATDIEFAKAYVAQQLAEILSQEFSSENITFPFGQRIIKVNTMFEVDGFRCNLAQKSNKGKQLVLISACSLVLDKDTYAYMKKISSFIAKKKVNKSLVINSYTGITVEDNISAFDVLVEKMQSSPFKVFFHKIGTKVANGRDKFISLSVDEQTTALFYILMLLKTGRSTGCDLTLINESGQAGVLTLNSDFSKIKDKKTIYIIDQSPTGLIERKSLNLLDL

SEQ ID NO: 20619 - protein, 1061 aa, unidentified
  REGION 1..1061: note = Cas Enzyme sequence
VVDEKIFWGLDIGTDSVGWAVTNSEYKLKKYKNNLMWGVHLFDEAKQSAERRSFRTARRRLDRRKQRIILLQEFFVRAVCEKDENFFRRLKESALLPEDAEHRTNNIFFDDPDYTDKDYFEEYPTIHHLICELMESKEPHDVRLVYLACVYLLAHRGHFLLPVSEDDISKVTEFEPLYESFYKALEEKLDDEPPFDRSADDFAEILKSHKTVSAKNKDFDKLLFGGKVKTYDNENISYSALIKLLSGGTEKLSKFFANEEYTDLEKDSVCVRNADFGDTLEMLEGQIDELDFALLKSVKSLYDWSLLVDILEGKSLISEAKKDKYDEHGYDLDALKYLFREYLTKDDYNEMFKEVSGKQNYASYVYNASSDKTRDSKYKKCSQKDFCKFTKKFLSKIKPNEKDKPCLDKLLEKCEQNSLCPKQVTTDNRVIPYQLYYVELKKILENACGYLPFLNERDEYGTVADKILSIMKFRVPYYVGPLVDSKKSPNAWLVRKLDGKITPWNFTDMVNEDESENAFIRRMTCKCTYVAGQDVLPKYSLLYSKFSVLNEINNIKLNGEPISVQTKQEIYTELFERNKSRVSKKKIRDCLISHGYAADSDEVTGIDDIAKSALRSYHDFKKMLSNGILTEQQVEEIIEHITVTTDNIRLKKWLKTQFPMLADEDVKYITKLKYKDYGRLSRCFLEDVLPVDTKTGEAESDKNIITMLWETNENIMQLLSSKYRYSENIEHMNRQYYALPENHKSMSERLKDMYVPTAVRRAVTRTFDIVKELKKIQGRDPDKIFIEMARGTGETPKGKRTNSRKDQILEHWHGLDNKDINDLKKSGIWEHLDTIDDAKLRSDKYFLYFMQLGRCMYTEKPIPFEEVENEHKWNIDHIWPQAKIKDDSLDNKVLVSSNENGKKSDSYPISDDIRHSMAGLWHSLYKKGLISEKKYQRLTRSTPFTDDELSGFIARQLVETRQSTKAVATLLKEQFPNTEIVYVKAGLVSDFRQEMGMLKCREVNDLHHAKDAYLNIVLGNVYNTRFTKDPLNFVKNNEKYSIKIFQKNSDGKKTGVITRKE

SEQ ID NO: 20620 - protein, 1378 aa, unidentified
  REGION 1..1378: note = Cas Enzyme sequence
VVDKKIFWGFDIGTDSVGWAVSNSEYKLKKYKNNLMWGVHLFDEAKQSAERRLFRTARRRLDRRKQRIILLKEFFVRAVCEKDENFFRRLKESALLPEDAEHRTNNIFFDDTDYTDKDYFEEYPTIHHLICELMESKEPHDVRLVYLACVYLLAHRGHFLLPVSEDDISKVTEFEPLYESFYKALEEKLDEEPPFDRSADDFAEILKSHKTVSAKNKDFDKLLFGGKVKTYDNENISYSALIKLLSGGTEKLSKFFENEEYTDLEKDSVCVRNADFGDTLEMLEGQIDELDFALLKSVKSLYDWSLLVDILEGKSLISEAKKDKYDEHGYDLDALKYLFREYLTKDDYNEMFKEVSGKQNYASYVYNAPSDKTRDCKYKKCSQEDFCKFTKKFLSKIKPNEKDKPCLDKLLEKCEQNSLCPKQVTTDNRVIPYQLYYVELKKILENACGYLPFLNERDEYGTVADKILSIMKFRVPYYVGPLVDSKKSPNAWLVRKLDGKITPWNFTDMVNEDDSEKAFIRRMTCKCTYVVGQDVLPKYSLLYSKFSVLNEINNIKLNGEPISVQAKQEIYTELFERNKSRVSKKKIRDCLISHGYATDSDEVTGIDDIAKSVLRSYHDFKKMLSNGILTEQQVEEIIEHITVTTDNIRLKKWLKTQFPMLADEDVKYITKLKYKDYGRLSRCFLEDVLPVDTKTGEAESDKNIIMMLWETNENIMQLLSSKYRYSENIEHMNRQYYALPENHKSMSERLKDMYVPTAVRRAVTRTFDIVKELKKIQGRDPDKIFIEMARGTGETPKGKRTNSRKDQILEHWHGLDNKDINDLKKSGIWEHLDTIDDAKLRSDKYFLYFMQLGRCMYTEKPIPFEEVENEHKWNIDHIWPQAKIKDDSLDNKVLVSSNENGKKSDSYPISDDIRHSMAGLWHSLYKKGLISEKKYQRLTRSTPFTDDELSGFIARQLVETRQSTKAVATLLKEQFPNTEIVYVKAGLVSDFRQEMGMLKCREVNDLHHAKDAYLNIVLGNVYNTRFTKDPLNFVKNNEKYSIKIFQKNSDGKKTGVMTRKVERGGEVAWDPETSFAIVRKMMSKNSIRYVRYAYMRKGGLFNQMPERKKAGLVERKSGLDTGKYGGYNNTTASHFAVVKCREKSVVVVPVETMFCNRFATDIEFAKAYVAQQLAEILSQEFSSENITFPFGQRIIKVNTMFEVDGFRCNLAQKSNKGKQLVLISACSLVLDKDTYAYMKKISSFIAKKKVNKSLVINSYTGITVEDNISAFDVLVEKMQSSPFKVFFHKIGTKVANGRDKFISLSVDEQTTALFYILMLLKTGRSTGCDLTLINESGQAGVLTLNSDFSKIKDKKTIYIIDQSPTGLIERKSLNLLDL

SEQ ID NO: 20621 - protein, 1342 aa, unidentified
  REGION 1..1342: note = Cas Enzyme sequence
MSIQSVKKDYFLGVDMGTGSVGWALAYMDYSVVKYKNKLLWGSHLFDTAQTAVEARLNRSTRRRYARSAERVKLLQELFAEEIARVDFGFFQRMEESRLWQDDKTENQKNTLFNDVGYDDGIYHSEYKTIYHLRKALIDGGKSFDVRLVYLALHHLIKHRGHFLFGDRVLGDVRNFDTAFKAVSSVVYEVLGAELKVDDISKVGEVIKNRRDGLTKREDALKALFGVQKGDKRMQELIKLMVGSTADLKKLFMLEELENKSVKLSDNNVEDVLLNVSEELDEDYYAVVDAVKMMYDWGTLENILSGHNYICEGKIEAYEKHKSDLERLKRVVKRYFSADYNKIFRTENEAANYCSYTGVSKLPLKNGKKCTQADFCVFLKKLLVKNAACETDEDYLYIVEELEKGTFMPKQTTSQNSTIPYQVNKMELCKILENAEEYLPFLAERDENGLTVSDKIKKLFEFRIPYYIGPLNDTHQNKRVNGSCWIVKKQGKVYPWNFDAMVDTDESAERFISKMTNKCSYLLGEDVLPDKSVIYSKFKVLNELNNLTINGERSPELKQELFNELFLKQKKVRLKDIESYLRGRGYEVNAIAGISGEIKNNMSSYITFKEIIGDKADNITMCEDIIRAITLFGAEPKMLKRRIEKHYGDVLTADEIKRLCRLKYKDWGRLSYKLLCGITDEKTGTCIINAMQELGLNLQELLSSRYSYMSQIDELNNIGESVGIREEIELSALSPAVKRIAIRTLDVTGEAVKLMGYPPKKIFVEMARDVDGKNEKKTKPSRKDKLSELYKNIDDRVLAEEWKAKLDNETNDSLRRDKLFLYYSQLGKCMYSGEKIDFEQLNNDNIYDIDHIYPQSVTKDDSLENRVLVRRELNENKGDTYPISSDIRRKNYAHWKLLHDKKLIGDKKFARLTRDEELTDEELAGFIERQIVETRQSTKYVATLFKRLYPDSEVVYVKAGHVSDFRHDMDIVKVRDINDLHHAQDAYLNIVVGNVYNVKFTHDVLRYIKNNRGKRDYNLKKLFKYYTVTDRSTGEIVWKSGEGGTIADVKKQLESFNIQCTRFAVTGKGKLFDVQPIPKHKCGEGVQIPLKENDSRLSDVTRYGGYNKVKIAYFFCVEHTEKKKRIRTIEVMPIYLADRVGEDGLLDYCIDSLGLIEPKIIVKKIKLYSLVKINGYFYYLSGKQNDRFLMYNAVQLCVDKQSSEYIKKLVKTRKILSEDKEYDVAEQKINYDENMALYDLFVEKQKSGIYSKRINNALKIMENGRVRFAELSLSNQCIQLVNLLGLFTGGACNGVNTELIGGQSKGNKITTSKVISNNIEFKLIYQSPTGIYQTVIDLLGES

SEQ ID NO: 20622 - protein, 933 aa, unidentified
  REGION 1..933: note = Cas Enzyme sequence
  SITE 123: note = misc_feature - Xaa can be any naturally occurring amino acid
  SITE 588: note = misc_feature - Xaa can be any naturally occurring amino acid
  SITE 683: note = misc_feature - Xaa can be any naturally occurring amino acid
LTFRIPYYVGPLSDINNLNSKEGGFSWVVRKTNETVLPWNLDKVIDLDKTAEQFILNMTNKCSYLLGEDVIPKQSLLYEEYNMLNHLNVIKVNEKFLSKDEKDELIENVAKKRVTVTQKAINXYFARRLKKDVTISGFDIDAKFSLSSYHKLNRIFPGRINNEPQNARLIRNLERVILLGTIYSSPTDFAKRVTTNKQFREFFTEEELKKLSRLRFSGWGNFSRLLLAGYDSTSKKERLNQSLTYKDEKTGNELSIIEIMREEPLNFNQALFDEKYNFNEIIKRFNDNKDETLDVDELIDSYYLSPAVKRSIKRTIKIVDEVIQVNEGIVPDKIFVEVTRENEAKTKGKGRTISRLNKLRDIYKKAIKDADEFRELAKELENENLDDSYLSPKKVYLYYLQNGKCAYSGEPLDLLSSDIDIDHIVPRCLVKDDSFDNLVLVKKEENNKKGDHYPIRTDVIRRQKPFWKQLKKLGLMSNAKYEKLTRTRELTAEDFQGFINRQLVITNQANKAVAEILKKLYGNATIVYSKASNVTNFRNQFNITKCREINNVHHAHDAYLNVVVGNYFHTLFGSRYYFSKDNDEEPWXPKTAFKYTVKGCWDKDRSLVTVMKMLKRQDVLFTRMPEIRSGEFYDQTASKAAENLLPIKESGPLTNTARYGGYSGKNAAYFTIIEHTNKKNKRXRIFISMPIIINQKIKQGQTTFKEYLKNDLKLVKPKVIYPLIPFNTVIKRGKSLQFLSGYQGEFSKVYLRNMIEPYFDNFTYEYLTLIYKYFEQKSLKGKKKKKDETSEVIISEDQENQEEVQQIKEIQVIFSKDEERLRFINFKKNKKVFEKLIEKIKKPIYEKSHTVRRIKIINNKNEFYKLSLERQTEIIISLHKLLKTGVPGRNDIDLAEFGVKTGELTASYKIEDMSIVKQSITGLYQKEIIIKQV

SEQ ID NO: 20623 - protein, 1408 aa, unidentified
  REGION 1..1408: note = Cas Enzyme sequence
MDKKFYLGLDIGTASVGWALTDENYELVHLRGKSAWGVHLFEEAKTAEKRRLFRSARRRKARTKRRINLLQELFSEEIAKIDPLFFIRLNNSTFFADDKDTALLGKKDTLFSDRNFTDKDFHKLYKTIYHLQKELIDDKNTKFDIRFIYLALHHLIKYRGHFYLEESLNMDEFGIHQIKEGFEKLQVFFEDKEEIKNLFNKANRDGFYSIVEKVRGVNNTKKALKDLFATKNKIVNNTLEFIASGSSTVGRLFPFLEFGEEDEKKKINFGDEEFENQYYEIEGMVGEENIILIDAAKQLYDYIIIARLMDGEKFIAHSMVKKYNKHRDDLKRLKKIIKKACGQEEYNAFFKDNVKTVNNKPKRVTDNYPAYIGMTKIKGVKQSVKKITKADEINKFYNRIKKLISNVHTPEADKIREEIEKGVFLPKITSVDNAKIPNQFFEYQVSKILDNAAKHYPFLNKVDGELSIKDKILKILTFRIPYYVGPLSDINNLNSKEGGFSWVVRKTNETVLPWNLDKVIDLDKTAEQFILNMTNKCSYLLGEDVIPKQSLLYEEYNMLNHLNVIKVNEKFLSKDEKDELIENVAKKRVTVTQKAINNYFARRLKKDVTISGFDIDAKFSLSSYHKLNRIFPGRINNEPQNARLIRNLERVILLGTIYSSPTDFAKRVTTNKQFREFFTEEELKKLSRLRFSGWGNFSRLLLAGYDSTSKKERLNQSLTYKDEKTGNELSIIEIMREEPLNFNQALFDEKYNFNEIIKRFNDNKDETLDVDELIDSYYLSPAVKRSIKRTIKIVDEVIQVNEGIVPDKIFVEVTRENEAKTKGKGRTISRLNKLRDIYKKAIKDADEFRELAKELENENLDDSYLSPKKVYLYYLQNGKCAYSGEPLDLLSSDIDIDHIVPRCLVKDDSFDNLVLVKKEENNKKGDHYPIRTDVIRRQKPFWKQLKKLGLMSNAKYEKLTRTRELTAEDFQGFINRQLVITNQANKAVAEILKKLYGNATIVYSKASNVTNFRNQFNITKCREINNVHHAHDAYLNVVVGNYFHTLFGSRYYFSKDNDEEPWNPKTAFKYTVKGCWDKDRSLVTVMKMLKRQDVLFTRMPEIRSGEFYDQTASKAAENLLPIKESGPLTNTARYGGYSGKNAAYFTIIEHTNKKNKRERIFISMPIIINQKIKQGQTTFKEYLKNDLKLVKPKVIYPLIPFNTVIKRGKSLQFLSGYQGEFSQVYLRNMIEPYFDNFTYEYLTLIYKYFEQKSLKGKKKKKDETSEVIISEDQENQEEVQQIKEIQVIFSKDEERLRFINFKKNKKVFEKLIEKIKKPIYEKSHTVRQIKIINNKNEFYKLSLERQTEIIISLHKLLKTGVPGRNDIDLAEFGVKTGELTASYKIEDMSIVKQSITGLYQKEIIIKQV

SEQ ID NO: 20624 - protein, 1332 aa, unidentified
  REGION 1..1332: note = Cas Enzyme sequence
MKKMKENGNDQRQGNYYIGLDVGTNSVGWAVTDENYQVKKFHGNAMWGVRLFEKAQPAADRRISRVARRRLARKKQRLMLLEFLFAEEIHKVDPNFFQRLHESDRWEEDKTTRCPYSIFHDAGFTDIDYHRNYPTVYHLRSELLQSTQPHDVRLVFLAIHHIIKTRGHFLYETGEDGDAILTVEQAFDQLNQYLQDEYDQMLEPKDRDAFLAILQNTSMGLSAKKKALHGACGSVDEISGLKLGELIDLLAGAKIKPNELFNDQTLKELTSINLKNGLDELEQCRDVLGDRFALLEFSKSLFDAARLSQIRKGYTYISQAKVAQYQENGSDLRKLKQYIRARIPKKYHLIFSEKKKGLDNYAAYSQYKLTQQDYHCDQEKFCKFLLGEQVELPEPDESEREMCEIYRKIKDGVFLPKLRSSENGVIPYQLNRQELVQILKQASRYLPFLNDVDSDGFSVSEKIIKTFEFRVPYYVGPVSDRAGHHWAVRFQGKENEKIYPWNFEQVVDLERSAAGFMEKLVGRCTYTGEPVLPKDSLLYSEFMLLNEVNLIKINGKSLPVDVKKQLVQDLFYHSSKKVTKKGIVHYLTSKGLMTQSDELTGVDDRIKSTLRSYHDFKDILKRTGDRDMVENIIRSILVFGNDLTMLRRWLKNNTHDLTEEEIRRICNLRSKYKEWGRLSRTFLTEIYSPDESGEAKTIMDYLRDTNCNLMQLLSNQYQFADQAKAHFDALMGNGQTLSQRLDDLYVAPAVRRSIRQTLRIVDEIVDIEHSVPKKIFIEMARDNAQEVKKSRTESRKDKLIALYRACHEDSGELFQQLEQEEDSHLRSDKLFLYYTQFGKCMYSGEPIDLESLMRGELFDIDHIFPQSKVKDNSLDNRVVVINTLNREKGNIYPIQGEIRRKMQPFWAMLKSKGMISEKKYDRLAKLTEEELFSFVARQLVETRQSTKALATILQEIYGEPVRLVYSKAGNVSDFRQQFDLVKCRDVNDLHHAKDAYLNIVVGNVYDTKFTEQFFHNIKKERYSLKKIFEFDTPGAWDKTESIKTVKKYMAKNNVLVTWMPHEVTGALFDLQLVSAGKGQLSKKQGMEISKYGGYNKLTGAYFCVVEHTDKKKKRVRTIEPVFLYQKATYERDPIAYCKNVLGLCDPIMIVPKVHIDALVEVNGSRLLVTSRSSNQIILKHTYQLTIGAEMEQYIKAISKYHERCLAKKEELPITKFDGVSEEKNLELYRLFADKCDTGAYQSCFSVFSTIGTELRKYESKFVGMSMWEQIKILLEALKAFRCNAVYGNFEPLSGKKTRGRVEMNKKISALSSAYLINQSVTGLYEHKIDLLK

SEQ ID NO: 20625 - protein, 1357 aa, unidentified
  REGION 1..1357: note = Cas Enzyme sequence
MKNTEKYYLGLDIGTDSVGYAVTDNQYTLKKFHGEPAWGVTIFDAASQAAERRMYRVNRRRLDRRQQRVTLLQELFAVEIGKIDPRFFIRQKGSALYPEDKEERYSLFNDADYSDNSYHRDYPTIHHLIDELMYSDKPHDARLVYLACAWLVAHRGHFLSQIDSNSVSAVTDFATVYNSLHDYLTGNEYAIPWKENDLAAIAAAMRQESGVNRKAKALAQACFGDIKAPKTATEEFPYSCEEIFKALAGGKVSAAKLFDKSEYAEIDSFSLDMDEEGMEKLIADLGDDGEMIECLKSIFDWPLLARALEDGNNQTCATISKAKIAVYEQHQKDLALLKRIIRKYRSDQYRSLFRDDAQAGNYVAYSYHGIGEKTKRANQEVFCKYVAGVIKGITPDEEDRAEFDDMVARVEKRRFMPKQKTGDNRVIPYQLYYYELDCLLKRAESYLPFLSKKDEAGLSVSDKIRSIFTFRIPYFVGPLGKNGNEINHWAVRVKPGRILPWNIGDMIDQDASEEMFIRRMTNTCTYLPGENVLPKDSLCYHRFTVLNEINNIKVNNIPISVEQKQRIYNDVFMGRAKVRRKHIQDYMISNGMMGKGDTLGGIDTEIKSNLRPQHDFKKLLAAGVLNEADVERIIERRTYSEETERFVQWLRREYPSLSEENVRYISRLKYRDFGRLSNRFLMAFEGENCVTGEITTIMQALWETNDNLMELLSDKYTFSAKIETEREQYYQGHPRKVSERLEEMYLPVAVRRPVMRALEITRDVVKAFGKPERIFVEMARGGTPDQKGRRTLTRKSQLLALYAQCRDEDVKDMRQRLEAMGDEADTRLQSEKLFLYYLQLGRCMYTGKAIDLNSLFVDKRYDVDHIYPQSLVKDDSILNNKVLVVSEENHRKGNGMVPTDVQRNMLVQWEHLKKCGLVNEEKFKRLTRTVPFSSIERAGFINRQLTETSQAAKAVTALLHELYPESKVVYVKAKLAADFRQEFDRIKSRDYNDLHHAKDAYLNIVVGNVYHEKYTSRWFSVDQNYTLNTRVIFSRPVICGDVTFWDGTPMLEKVKAVLLKNTAHMTRYAFMRQGGFFDQQPVRKGAGLVPLKKGLDTEKYGGYNKPAVSFFVLVRYTTGKKKDVMFVPVELMDAKRYLVDSVFREDYVRSMIDRIRNKKIDAVEFPLGGRILKINTVLSLDGYRVCLAGKSDGGERIGLSGQTPFIADYETERYIKRLRSLSDKLKNNPKYVYRPEADKVNAEENVRLYDRYIDKLQNSLYRKHPANPLLSLIEGRGVFIELSPLEQMTALLNIHVFFGRSTQGIDLKNIKGMAKAAVPRMSSTLSNWNKKYSDVCIIDQSASGLWETQSQNLLDLL

SEQ ID NO: 20626 - protein, 1375 aa, unidentified
  REGION 1..1375: note = Cas Enzyme sequence
MEKDKKTYYLGLDLGTNSVGWAVTDENYNLLRFRKKDMWGIRLFDDANTAAERRSFRAARRRLSRKKNRIKLLQELFSEEISKVDPTFFIKLNESKLHIEDKTVKQRHPMFCDENYTDVDYYKQYPTIFHLRKELIESKEPHDARLVYLALHHILKNRGHFLIPGALNDAKSFSVAFNNMLQTVKENLELDFEVLGENYAEFESILKDKLIRKSEKEKQLFNLIIYSSEGKSKDEKGEIERSIKHIIKLMIGLKGDISKISGFDVTDFDKTSFAFTDSSFEDITYPELEEKLQGKISVIDSIKAVYDWMVLVDILADEEYLSQAKVKAFEQHKDNLYTLRGFVMKYLKGEEYKKFFNDFSKDTKVYSNYIGTVKKNGKKYTANRCSEEDFYKEVKKLLEKITPSEEDRGTYDYLYSEVERKTLLPLQRSKNNSVIPKQVHEAELIVILNNAGNYLDFLQKADESGITTAEKIHKIFDFRVPYYVGPLSKKHVDQGANAWIERKKEGKIYPWNFEEMVNLEKSNERFIRRMTNKCTYLLGEDVVPKQSILYSKFMVLNELNNLKIKSQPVTEELKQRIYQELFECKSNVKSKDILLFLRQELCMPELQLSDLSGFDVETNFKANLKPLLDMRKLFGCQSLSYEQTCIAEDIIKFLTIYGKDKKMVKNTISALYPGKLTKEQLKGIDKLSYSGWGNFSEKFLNGITGMDRESGQTFTIIQALWETNNNLMQLLSKDFTFTEEREKFNAEVCGNITDFSYDNLIKDLYVSPANKRVIWQAVQIAREIEGIMGCAPAKIFVEMARGPEEKKRTVSRKARLLELYKACGTDLKSWADEIEGIEESKFNNIKLYLYYTQMGKCLYTGEHIDLEQLLAGNSRWDRDHIYPQSKIKDDSLDNLVLVNKVENSKKDNELLSSEVQAKMHPYWKDLLDKGLISKKKYDRLTRKGDFTDEELAGFIARQLVETRQSSKAAAELLGRIYPASETKIVYVKAGLVSQFRKNDLGILKSRRVNDYHHAKDAYLNIVVGNVYDTKFTSNPARWMRENRDTNYSLNQVFNYDVIDRHGVIVWEAPVKDEKNKLRLQNGLSHGGSIDTVRKTIRQNNIIYTEIAYCENGQLFDATIYKKGDPSIKILTKKSLNANKYGGYKSPGTSYFAMIEFDARKGERARQIVGVPIYIANMLSYNSEAFKEYCESVKELRNVKVLHPMIKKNSLLIADGFPMRIRGENDADIMLKSNMQLRVCEKEEELIRKIEKLLSKDSEAINDRYIKIDENELIYLYDELTAKLEIVYAKRPANKSADLQDRRELFVKLSLINKAKVINEILTMLRCDNKTDSDLRLIGGGSNAGKISKNKNTICKSNLILVNQSVTGLYENRITL

SEQ ID NO: 20627 - protein, 1477 aa, unidentified
  REGION 1..1477: note = Cas Enzyme sequence
MENEKKYYLGLDIGTNSVGWAVSDDYYNLIRKKRKHLWGARLFEEANGSDSRRANRNNRRRIARRRYRINILREIFQEEINKVDPNFYRRLDFSYAFKEDLPSDLNTNYLFEDEKLLEEYHKNYSTIYHLRKELIVNKDKKFDIRFIYLAISHMIKYRGNFLSDAGIDENVLKINLKEIFDSIDENIKEIARLNSDEDEDEEINNTKLFNYNEEGKTETLNEIFIKYEKKSEMLDKFYEFFDPSLKKDKLTNSILKLINGYSCTLKDIFSYRKEEWENNEELAKKKIDFSSNDIEDTLNELASILTSEEFSIIFEAKKLYDYKVLKQIMKDSDSINESMIGIYDKHKYQLKELKRLTKEYLGKEEYKKYFSSKVTKDYKNTYGAVVGRGIINNKFEKFKKKSGDSLKAFKGLLENLNKSIETSSNLNKEKDLKIVNSLLEDYNNQKLFITQNNKSNGVIPYQLNALELKKIIENQGKYYPFLLEKGKDYPNPNKEEYKLISLLKFKIPYYIGPISNRTLSNDSNVNHWAKFVNKKEKHSKVYPWNFFDIVDDKKSGEAFIESLKNNCTYILDEPTMPKYSLIFQVYKVLSKLNNVLINGEKIDKDLKEKIIVNLYLKKKSVTYKDLRKYLIKEKNIANEDDLEISLKNTKDEEKISNYFDKATTLSSFIDFIDIFSDEKFYLDKEKFKKAEDAIKIVTIFEDKKTRLNSLKELFGNNIDENLENKLKKLNYKDWSSLSNKFLNGIKSNYVNYETGEVIQHTILDIMKEEPLSLNEIYETKKENGTYLYSFKETVNKLNEDYLKNNLDIDPIDNMWGSQSMKRATRQTIRITDELLKILNRGHFDKIFIETTREKGESKQTVAKDKRINDYLEAASKLNFDISELKEELKDQKANISKKKIYLYFTQLGRDLYTGEKIDINDLDKYDVDHIIPQAKLKDDSFTNLVLTLKSINNKKQDTYPLTNIINDKGREWIKKLHSIKDKNNAPFFMSKDKYDRLMRNNPLTLEEEAGFINRQLVMTNQSCKAVCDILKQRYKESEIVYSKAGNVSDFRNYFNLVKCRNINDFHHANDAYLNIVVGDIYNQKFTNLATKAIIEKYVENKESLKYDAKNIFTKDIKARSGDRLIWEKPTNLDKKDNGALLTGGTIDKVRKTLSYNDPMVTKMLMTQSGAQGFFNKISLVSTKFSEKAAMPLKLKEDSILSNTKYGGYNDLIASYFLLIECEDKKGNTINQFVPVLDIYRRHFKTDEEYLVNQGYKNAKLLVSSKLLINTVLEIKFGNSNVYTRFLVAGRTGENIILRLINEPHYNLKAASYIKDIITFLGLNLDKTKKPNLDIYKDLGPNEEIKVGGKDKEKIFNLTKNLELYDYMVSKYNCNLYNCLPTWATSMEKFKDNDVRNNFLSLNVLEQLKFLILMINFISANQPGFKFEVNQEKLDKKKSITNSIGTMHINSKLDAEKNHYRIVRESITGFYRKILFEK

SEQ ID NO: 20628 - protein, 964 aa, unidentified
  REGION 1..964: note = Cas Enzyme sequence
YIKNKVNNMTFLPKQRISSNGVIPYQLHYFELSQILNNASNHYDFLRENDNTGINTIQKISKLMEFRIPYYIGPLNPAHKNDKSKFTWIERLEKGKVLPWNFEQKIDIDNTAEGFIKKMTRKCSYLKGKDVLPKNSLLYSEYSVLNELNNLHVNGQPLEKNLKQKIFNQLFKKKKKVTQKNIKDFLISESIFKKGDQIDLSGIDGDFKNSLSSFISFSRIFQDIDNDYELQKEIEKIIFILTIFENRDMAIKRISKEYSNITKDQLKEIKKLNFIGWGKLSREFLEDLVYNVDSTGQPITIMYLMRNENKNLQEALYDVRYNLIKKVNEVNKGFLSEDNNYEGLMKDVYVSPGIKRSLWQALKIVDEVKKIIKQPIDRFFVEVARGGGKKGDRKLSRKLQISSLYKNAKVDKKEIEEMAKKLNLETDNNLRSDKLFYYYMQLGKCMYTNNPIDIDKLNTNAYDIDHIIPRAYLKDDSLNNRVLVERNANALKGDRYPISSDVQDKMKDFWKKLLSVKLITNEKYQRLTRSNDLTDEEKGEFINRQLVFTNQAVKALNEILIKDNPESKIIYSKASNVSIFRQDFGLLKSREINDFHHAHDAYLNIVVGNTYYTKFGTNAIYFFKNQKDKESFVNTNKLFYRNTPSAWNSDGSSKKTVLKMLDLKDILVTKMVTEKKFDFYDETIYPKKDGDKLFPLKTKDTRYLDTNKYGGYKSLKIAYFMIVKHDKGKKSIITIEGMPVIHDYKIKNNELSIQEVLVDYLGLVNPIVLVSKIKAGTLIKLDKAYANLAGKAKNDIITHNANQLYLSQDLTQYFRLIEKYIATQYKKEEIESYALDTYEVSVSKKESEPNPTIDKIKNLKLYDELLYKFQCGLYDGLTMQKLKEELADVRASFKEINVLQQAYSLYELIKIMHCNASTGNLSMFMEKASNKGSNTISKNITDKNITIYDESITGFYRKVRWQNQ

SEQ ID NO: 20629 - protein, 1013 aa, unidentified
  REGION 1..1013: note = Cas Enzyme sequence
EIMANDKNFLRRLGDNDLYLVDRNVEGKYSLFNDTDFNDIAYYKQYPTIYHLREKLMMEGTDDIRLLYLAIHHIIKYRGHFLLAGEVSTNEVGGVKQLEELINKLNSKLDENNDENKNNDNTCFFDKFATTALSDVKDLICGTGDITKNMLNQITIGKKYISKRDKKNKLNELFGVSSSKTSKKIIDIVMGGKVNLTELFGKEYYEKEEVKGFTMAEEWESIEDLQLIKDNILHIDIIDTIKQIYDWVTLNEMLKGKQSLSSAMVEIYETHKQDLHDLKEFIKDYAPNDYERVFGEIKNEKGKIDNSICNYSCYIGGGRYNGDKIGANGRYGSTCTQEDFYKFIKKIIESVTVEEATALRDDLLERIANKDFMPKIVSKNNSTIPFQLNMMELDGILDKARQNPKFTFLNDVDNGWTIADKIKSLLSFRVPYYVGPVKEYEDNDNNKRYAWAVRKESGRITPWNIDDKIDKKQSNEIFIRRMTNRCTYLKLADTLPKNSILFSKFMCLNEINSMKINGDAISCKEKKAIFDNVFCKKNPTIKNIKKYLIENFGYEKGIVLSGIDNEIKSSMKTYIIYKNKLGNKVDADPNMIERIIFLSTIHEDSQMLEKSIREEFGDKLTEDEIKAIKGFKFNGWGSLSAEFLTGYKNNGIKLMFDGEMLDIIDIMYEYNLNLQQIIFNEKCNFSEALEAYNLEHNIVEDSNVSYNKDIADYPCSPSVKKCVWQSFKLVKDIVKQTKIVPDVVFIESCRENNDFKKNQRTSKRRDMIVAIYDEARKKINELQRDKKAEFSIQELEGLSEDIDYCQKTLDNYSDSELKKENLYLYFMQLGKDMYTGKAIDLNQVLFGNMYDHDHIIPQAVIKDDSFTNLVLVAKKENAEKSRTYPLESQFRQTTLWKKLYKIGLLSNEKYSRLIRQTPITDEEQEKFINRQLVETSQTVVLLRDLLNRYFASKNVEVVLTKAGNVSMFRKEFDLTKSREVNDFHHAWDAYLNIIVGNILNKEFNHNWFIRQDN

SEQ ID NO: 20630 - protein, 1363 aa, unidentified
  REGION 1..1363: note = Cas Enzyme sequence
MNEKKLYMGLDLGTNSCGWSVTDENYHIIRKGGKSLHGVRLFDEAKTAAERRMKRSSRRRNDRKKWRIDLLQDLFMKEISKIDPLFFIRLNNSFFHYEDKAPSLGKYTIFNDKLYTDIKYYEMFPTIYHLRQYLKECNSKPDIRLLYLACHHIVKYRGNFLMEGHAIESNNSESTFYIETFNNLINRLNDFIGEDDYYDMLITQEDLDFILTLSVKQVRGLKFYNEVNKKLNPRNIKSNQYLLKLISGLTVKFKDIFDDEELSDIEEPKVCFSSSDFEEKILSKLDQLVGEGSEFIDEAKKLYDWLILRRLLGNSSSISEAMVNIYNKHKKDLKILKKVIKNNFDKEVYSQVFRNPNIKNNYVNYVKTNLSNNAKQYVAGTKREDFIKYVKKLINDLEKTKEVKYITSEIENDNFLPKQKSSSNSIIPYQLHQSELEKILDNAEKYYDFLKYKEDGNTSIKNKIIAIHRFRIPYYVGPLNDYHRDDPESGFAWVNRIEDGAVTPWNFEEKIDVEKSAEHFINRMTNKCVYLKGKDVLPKHSLLYSEFRVLNELNNLRINGERINNNLKKEIFEKIFKTKKKVTQKMIINFLFSEGLIDNKNQALLSGIDGDFKNSLNSYIDFSNIFNKIDNHNIDMIEKIIFYITVFEDSKFVVSKIKKEYGLDEKTIKRIKQLSYNGWGSMSKEFLQSEVFYVDDNGIPYSIISVMREESKNLQEVLYDERYKFNKIVESKNFGINEVLTKSNYDNALEEMNVSPSVKRAIIQGLKIVDEVQNILKKPIDKFFVEFTRGKKKTGRTKSRRDKILSYYKQAKIDSQILKEMIERLNRTEDQQLRSDRLFFYFMQLGRCAYTNKPINLDDIFSNTYDIDHIIPQSFLKDDSLNNRVLVFGNANKEKGNSYPVPQKFRSIMLPVWKHLKDNGLLSSEKYTRLTRNTSLSEDELGAFINRQLVFTNQSVKVLAEILAKQNPKSRVIYSKASNVSEFRQKFDILKSREINDLHHAEDAYLNIVVGNVFNSKFGYDAIRFLKTHNHELITTNTKKIYDKDIANAWISDGSTLKTVKKMVFRNDKLFTRMSTKKTGSLFNDTIYPKSKDLYPVKETKDTPLIDTSKYGGVSGLNNAYFSIVKSFDKKGREIITLEAIPIIFANRVDDKKLTLKQVLETYHNLKQPSVLIEKILINSLIDVDGSRVFITGKSDSSILIQNATQVYAEYQITKYFRAITKYKQNKNLYIIKPDMDELVLSIREGEVEDIRLTKTENLRIYDFILDSIKKPFFANQSIGNYVGKLSDSRDNFAELDIGEQALTLLEMVSLIRCNASKSNLQSIAEKSKFLGKNTINKKITNTNFKIIDQSITGFFEKIRWSN

SEQ ID NO: 20631 - protein, 1416 aa, unidentified
  REGION 1..1416: note = Cas Enzyme sequence
MEHKMKQRQEYYIGLDCGTSSVGWAVTDEKYDLLKTKRKVKKNDKTKSKQCTLWGVRLFDEAETAATRRIARSTRRRNARAKERLKLLRLLFRDEIAKVDPEFYNRLRESFYYEEDKNLVSKSKNTLFNDPDFTDKDYYNLYPTIWHLRQAIIKADDNVHFDIRLYFLAIQHILAHRGHFLLEGDIGKGQASFQPIFDVFYDACEDYYRLNNSAASSVERIIEDKSKSKIDKKKELKEILFIEDDGDEEALKGQTELAGLLIGSKVSLTKIFGIESDEDFKYSFAEGVFEDKIPDIEMAIGAENMDLIRAAKQVYDYAILHNLLNGREYISDAMVANYDQHKKDLSALKLAFKPLPESYNKLFKEKIYDASKTPNKDFPIYQAYIGKARSAKGKPALVGQDIFNAQLVNLMESRGITGELLDRAQKGELLPKQRGQAKGTIPQQLHHNELKIILNKLTQDYPSFGVENQSESEKYNTLAKKIASIHSFCIPYYCGPIVKQKYDEQGKLIPGGKSQFSWADEEITELVRPWNFDRLVNKDQRATNFIRRMTNECTYLLGENVLPKSSLLYQEYMLLNELNNLRINGQRIDNELKKTIFEQGYLAGELNGNITIHSLERWLKNGFIRPDDELSGASETKYLPKLQTYQDFRKILGEDFEKKYSNKQLERVIEAITILGDEKQMLTRRIRSELNCSEEVAKKLAKRSYKDWGKFSAKFLNGITVNNQTILDWLWDDNKNLMELLGQEVGFGKVVEEYNNLSGKKPEAGAKIHYSNIQDLYCSPAVKRSVWQTVKIVDELAKSQKHAPTKIFIEVTRDEDMKAKGKYTLARKKDLEAKLKSIKSEEAQEILNELSTKEDRELQSKKLFLYFSQMGKCAYSGEPINLDEINNSSLYDIDHIYPRSKTKDDSITRNLVLVKAELDREKTNIYPISGEIRGKMSRTWQLWYRFGLITKEKYERLTRATELTTDELGGFIARQIIETSQTVKAIRNLLQSAYPDTKVISVKAGQVSDFRHLFANGIKFRNSDQYKVQPRPEFIKVRELNDFHHAKDAYLNIVVGNVMSSTFTDDPYSWIKKREGKEYSVRPELLFRASEEYQKSDGRITHYPEVQNWDFANSINLVSSTMARNDILWTRMNYVESSEISDLQIVPHSDKTDGILPIKRDSRLAQINKYGGYNSIKGAFFALIECNNKKGELERRIVSIPQIYKDKVDQFVKNKYQGGKVILSPIKYKSKLKINGFPVHLAGKSSSGLVLYNGLQLLLEPDEQRYLKRVLKAISKRQQIRGGRQKDQSKDGISRENNSMIMEAICRKLALFNAMPGFGEKANTIRACAGDFSKLALDQQTDAICNMVKILRCNAETGNISSFVPKASFLGKGTMPEDITQRYENIFLISQSPAGLYEEQIDLKTIHPQNLKKKAD

SEQ ID NO: 20632 - protein, 1338 aa, unidentified
  REGION 1..1338: note = Cas Enzyme sequence
DEKDPGFLQRLDDSFFYPEDKRTEQKYSLFNDPDFNDVDFHKRFPSIYHLRNHLIKNDSEQDVRFVYLALLHIMKNRGHFLYPGGEYNPDQQYDACYASFAEACNTLFGDACFPEVETELKEVLTKTDIPRSTKQKQILGIFESSGYDLPNKQMSELTKLLAGLKCNFQKLFDDEELEDADTKDCELTKDYDAARPNVEESIGAERIELIDSAYALFNWMRLSAILGEHDLLSEAKVAVYEKHKRDLRRLKNVVKSLIALDQEAIRASAKSENDFNKPHIYARIFNISQDNLTNYVAYAGHYGKRGRKKKLAYRNRNQADFLKLLKNELKPYNEIPQVKELINEIEKGDFMPLIVGTDNGTIPRQIVGAELKIILQNASTYLDFLDKETCNKIQQIFEFRIPYYVGPLNPAHRFDKDNGRYAWVVRKEHGKVYPWNIQEKVDLEKSAEVFIERMTRNCSELTGEKALPKQSLLYAEFMMLNIVNAINIKGVRLDNKTRQGLIEDLFRNSNAPKRVTRKRVRDWLKSEGYEFKDADLGGFDLDIPVHLTALHDYRKLTTTNTDIDMNDMENIVRIITLFPDDSAMIRRRLKADYGDSMTEEDLKFLSSRRYKDWGRLSEKLLAGIKGVSDKDYNKTIIEMMREEPLLLMELLSNNYSFSDQIKEINRATSPQSLDISHSILDDYMASPAVKRMIWQTLLVYKDIEKIMGGPPEKIFVEVTRGDLNPKQRTQSRKRQLEELYKSCKEDADDWNIELRKLLENEEETVLDSKHLFLYYLQQGRCAYSDETIDIKDLSTNRYDIDHIYPRSLTKDDSIHNNLVLVKAELNRAKGDRPSVPREYQEKAGKLWTRLLHQGFMSREKYNRLSRVTPLTDSELAGFINRQLVETSQTIKIVTDILERVLGDQTRLVYVKSNHVRDFRYRDFRCSDNEPDKEDLEFVKCREINDIHHAKDAYLNIVVGNVLDEKFTKDPKQFLANAQVDKYGNRYNLARLYDFDLSYRKKDLGLAWKAGKDGTIATVKKVMARNDVLYTEQSVIRTGELFDQQIIKASKVSSSEGKMPIKGSAPGREPKDDNPYLNITRYGAYNKVSVAHYALVEVEIGGRIERIIEPVPLALRMQIRNQLDQGETILTDYFKSALSTKHVRIIIQELPFNSVLEIDGYRCRIRGKTGNAYRYESHIQAYFSPETEKQIAQVINCTRLTTIDKYNNKSMSEEDKSKIDELCRNRLAGIDLARLSKEVLNRLRTGPWNKATQLHRLAEKLEDRLSLFDAQITYENCYAFSQLLSTMSCHAQLFDLRCFGLSKSEGIRQFNKKLNNTGTYFLITQSPSGFYENAIDLWG

SEQ ID NO: 20633 - protein, 1433 aa, unidentified; identical to SEQ ID NO: 19991
  REGION 1..1433: note = Cas Enzyme sequence

SEQ ID NO: 20634 - protein, 1310 aa, unidentified
  REGION 1..1310: note = Cas Enzyme sequence
LFNDPDFNDVDFHKRFPSIYHLRNHLIKNDSEQDVRFVYLALLHIMKNRGHFLYPGGEYNPDQQYDACYASFAEACNTLFGDACFPEVETELKEVLTKTDIPRSTKQKQILGIFESSGYDLPNKQMSELTKLLAGLKCNFQKLFDDEELEDADTKDCELTKDYDAARPNVEESIGAERIELIDSAYALFNWMRLSAILGEHDLLSEAKVAVYEKHKRDLRRLKNVVKSLIALDQEAIRASAKSENDFNKPHIYARIFNISQDNLTNYVAYAGHYGKRGRKKKLAYRNRNQADFLKLLKNELKPYNEIPQVKELINEIEKGDFMPLIVGTDNGTIPRQIVGAELKIILQNASTYLDFLDKETCNKIQQIFEFRIPYYVGPLNPAHRFDKDNGRYAWVVRKEHGKVYPWNIQEKVDLEKSAEVFIERMTRNCSELTGEKALPKQSLLYAEFMMLNIVNAINIKGVRLDNKTRQGLIEDLFRNSNAPKRVTRKRVRDWLKSEGYEFKDADLGGFDLDIPVHLTALHDYRKLTTTNTDIDMNDMENIVRIITLFPDDSAMIRRRLKADYGDSMTEEDLKFLSSRRYKDWGRLSEKLLAGIKGVSDKDYNKTIIEMMREEPLLLMELLSNNYSFSDQIKEINRATSPQSLDISHSILDDYMASPAVKRMIWQTLLVYKDIEKIMGGPPEKIFVEVTRGDLNPKQRTQSRKRQLEELYKSCKEDADDWNIELRKLLENEEETVLDSKHLFLYYLQQGRCAYSDETIDIKDLSTNRYDIDHIYPRSLTKDDSIHNNLVLVKAELNRAKGDRPSVPREYQEKAGKLWTRLLHQGFMSREKYNRLSRVTPLTDSELAGFINRQLVETSQTIKIVTDILERVLGDQTRLVYVKSNHVRDFRYRDFRCSDNEPDKEDLEFVKCREINDIHHAKDAYLNIVVGNVLDEKFTKDPKQFLANAQVDKYGNRYNLARLYDFDLSYRKKDLGLAWKAGKDGTIATVKKVMARNDVLYTEQSVIRTGELFDQQIIKASKVSSSEGKMPIKGSAPGREPKDDNPYLNITRYGAYNKVSVAHYALVEVEIGGRIERIIEPVPLALRMQIRNQLDQGETILTDYFKSALSTKHVRIIIQELPFNSVLEIDGYRCRIRGKTGNAYRYESHIQAYFSPETEKQIAQVINCTRLTTIDKYNNKSMSEEDKSKIDELCRNRLAGIDLARLSKEVLNRLRTGPWNKATQLHRLAEKLEDRLSLFDAQITYENCYAFSQLLSTMSCHAQLFDLRCFGLSKSEGIRQFNKKLNNTGTYFLITQSPSGFYENAIDLWG

SEQ ID NO: 20635 - protein, 1353 aa, unidentified
  REGION 1..1353: note = Cas Enzyme sequence
MGGQACQEVEREKGVVKMPYSGDYLIGLDMGTSSVGWAVTDMEYHILKQKGKALWGIRLFDAAQTAAGRRVFRTNRRRNERKKQRIQWLQQLFDAEIAKADPAFFQRLKESKFTEEEKQGVEGKYTLFSEETLTDQTYYETYPTIYHLRKALLEETGPFDVRLVYLALHHIIKNRGHFLLETNVSEERESFPQAFHTLQEYLQEQYELDLTLPNAEAFAQHLKERKRSITAKKKILKEDAGLTKADGMQNAIVDLLAGAKVKLAVLFQDDTLKNAEPGSLSLDMEWDEEALVPVLGEKMELLLAIKAVYDWAILDDILNGQEYLSQAKVQSYEKHKQDLALLKQTVKTELPEQYAEVFHTEREKLDNYAAYSGTGSYHCTYEAFRKYLNNLFKRSRGSQAVETILTELEQGTFLPKQRSKPNSVIPNQVHRKELVDILARAAAYLPFLTEKDQDGISVSQKILAIFDFRIPYYVGPLNPTSPHAWVKRSDAPILPWTFEQVVNLEESAEGFITRMTAKCTYLKEDVLPKDSLLYSEFMVLNELNNLRINGKRVSPELKQQIYRDLFLQKKTVKRKQLEDYLKREGILQRGDEISGIDGDFKASLRSYQDFAAILRKTQDTEMVEDIIRRIVLFGEDRKLLKSYVQRTYGEVLSPEDIQYVCQKRYAGWGRLSQEFLTKLYHVDDKTGEAIPILEMMRRTNCNLMELLSSRYQYLDQIQAYNQEHYGATTQSVKEMVEASYAPPSIKRAILQTVAIVEELVKIMGHPPKRIFVEMARGEEEKKRTVSRKATLEELYKSCKKEAPELLGQLEGCSDQMLRRDKLYLYYTQMGKCMYSGEPIDLERLDTDYDIDHIYPQSKVKDDSLDNRVLVKRELNAAKADEYPIVAEIRDKMRPFWTYLKGKGLISSRKYDRLTRATTFLDEELAGFISRQLVETRQSSKIVAEILGKQYGKPTEIVYVKAGTVADFRQKADRNEKGEQVSYDFVKCREVNDYHHAKDAYLNIVVGNVYHLKFTKDPLHFIKSEAGETYSLKRVFDYRVVRDGETAWLPGEEGSISTVRKTIRKNNILFTQLAYKATGGFYDQTIQKKGGGQAPIKSGDPRMRIERFGGYNKLTGAYFCLVEHGTEKKRIRSLEAVYLMYERMYQAKPEEYCKSILGLTEPKVLLKCIKIGSLLSYDGFLMHICGRSGIQIIYHNANELIVSPEMQGYIKAVGKFLKRMRESAEKPKVTSYDKVNEQDNLKLYDVYCEKLQAHYGKMHTTPKQVIQENRDRFEGLDLYQQLETLGQVLNLFTCNALPANLSAIGGSKKTGILLTTKNLPVGKAHTMKLIHQSVTGVFEQEIDLLGEDLTPHRR

SEQ ID NO: 20636 - protein, 1347 aa, unidentified
  REGION 1..1347: note = Cas Enzyme sequence
MIKQKYFLGLDIGTDSVGWAVADTEYHILKKNGKALWGVRLFDGAQTAAGRRGYRVARRRIERRKQRLVWLQDQFAAEVAKKDPAFFQRLQESKFLEEDKRSNQPLGRYTLFADSTYCDRDYYRDYPTIYHLRKSLMEQPGPFDVRLVYLALHHIMKYRGHFLYSDLEMDSVSLEAGIERLNRVLEQEFEYKLELSDMGALKEALITRKGGKTWKKKRLAELFLVEKRENPMGFALIELLAGSSVSLDALFGKETATEDFKKISLEDDFEELEPKLEIALGDRIEVILAAKGIHDWALLETMRDGERYISCAKVKAYQKHENDLKSLKTIVRQLNDRDMYREIFHTAREKLNNYPAYSGKGASGHRCGYDDFRKYLTGKLKPHKDSHASIPGILAELEQGTFLPLQTTKDNGVIPHQLHEEELVKILKNAAAYLPFLTQVDESGLTKAEQIHRMFCFRIPYYVGPLDSRSEHSWVVRGNDKVYPWNFEQVIDLEACRRNFIERMTRKCSYIGEPVLPQNSLLYSRFQVLNELNNLKVNGEGISVAQKQAIYRDLCQSGKKVSLSKLRNYLNLDKNDEITGIDGDLKGTLSPWKHYAWLIKQPGGYEIAEDIIRQITLFGDDRKLLTNWLHKTYGNKLTQEEEKLALRFKCSGWGRLSRVFLTEIYHGEPSTGEAKSIMDMLWETNCNLMELLSSRFNFAGAVQAYREAHLNQQMSLQDYLDESYASPGIKRAIHQVMEIVNELEGILKCPPKRIFVEVAREHGEKGKRTVSRKNELLALYQKCGEECDELFQQLSEEPEGNLRRDKLYLYYTQKGRCMYSGEPINLGELDSGYDIDHIYPQSKTKDDSIQNRVLVKRELNAVKSDNYPIATDIRMKMRPFWTELERAGLISKEKYHRLTRSTEFSVEEQAGFISRQLVETRQSSKIVAELLKQRFGSKTEIVYVKAGNVSSFRQDQRLTKDGQQKQAGQCKKNEQTVQDPLFVKCREVNDFHHAKDAYLNIVVGNVYHIKFTRNPANFLKEENAKFSLNRMFDFDVSRGNDTAWKAGPEGSIATVRHTMRKNNILFTRRSAEATGGLFEQTIVSKGKGQAPVKASDTRMSIEKFGGYNKLTGAYFILVEHTVKKKRVRSLETVLLMYKARYETAPEAYCREILGLQEPKVLVPRIKINALVSYDGCQMHISGRSDSRISYKNANQLVLSVEWQQYIKFAAKYLDRCHSAGRDLDITTFDNIAADSNMQLYMLLLEKLENRRYRVMYKTLSQTLRKQSERFQKLSEPNQCRVLLQILNLFSNSATNANLSLLEASSQSGQIRFSKNISKLNGHSFKLIHQSVTGFFEQEVDLLGELSS

SEQ ID NO: 20637 - protein, 1342 aa, unidentified
  REGION 1..1342: note = Cas Enzyme sequence
MRYFMGLDMGTSSVGWAVTDEHYQLLRRKGKDMWGIREFEEAATAVERRTHRVSRRRRQRQVARIGLLQEYFHDAIHQVDPNFYQRLKNSKYHEEDKDEIVRGSNGIFNDVEYTDKEYFKEFPTIFHLRQELIKSKEPHDVRLVYLALLNMFKHRGHFLNATLSADGESRKIKDIYTDFVDKVAEQLGVSFATDIRYEELENYLSSNDLSRKRKGELIAELLHVTRKDKQQYALIECMLGLDKSVKLMFGDTLPENFDKTIKVNFSDIAFEEKATEISEAIGEEKYDLILIMKEIYDAVILNRIMNGYTYLSDARVAEYEKHKSDLACLKHYIKEYGTQQQFDFLFRGTEKGSYSAYVHSVNSHEKQRRNMAGNKKEDLYSALKKMLKDMPENEEKTYIMMQIELDNFLPKQLTASNGVIPNQIHLKEMKKILANAENYLPFLKEKDESGYTVSERIQKLFAFQIPYYIGPTTEKSAEFGGNGWVVRKEEGKVLPWNIDQKIDMKKTSEEFISRMVRRCTYMNDEQVLPKESLEYESFCVLNELNNIKVYGEKLPVDIKQDIYRTLCEKGKRITKKSLMQYLVGRGVIKAEDEEQLTGLMDGLNNTLKSFAKFKAIFGDAIYEDSCKKMVEQIIFWCTVYGDSKHFLKEQLLEKYGEVLTDAQIKRILGIKFRDWGNLSKKFLELQGCSKETGEVNSLIRMLWETNDNLMELLAQDSYTFKKELENMQESAYKVLTELQPEDLDHMYFSAPVKRMIWQTILIIKEVTKVMGCQPERLFIEMTREHGQKNDIKDSRAKKFYELYSKIKDEDKDWRKVIEDADKDGRIRSKKMYLYLTQMGRCMYTGRPIDLDQLFNNNLYDIDHIYPRHYVKDDNLENNMVLVEKQSNARKRDNYPFELDNYEKQVNWWKELHRKNLINDEKLKRLTSKDEFTDEQKAGFIARQLVETSQGTKGVATILQEALPDTTLVYAKAKNVSDFRNDYDLLKSRIVNDFHHAHDAYLNIVIGNVYYVKFTKNFMKFIQSREAYNLGRMFERDVKRGEETAWVAQSGNGQTATMETIKRTMARNTPLLTRMSYEVTGELTKQTLYSTKQVKEGTYIPLKSSDEKMHDITKYGGFTSVKGAYFILVEHDDKKGKRIRTIESVPIMWKGRIEKNPAELERYCVEVLKLHNPEIKIRKILYKSLIRENGYYMYISSNEEGRLCMMNAVSLCLKQDWINYIHKLEKLNFENISREKNIKLYQILCDKHKNTIYINRPNSLGKLFDECKENFFDLTLNDQVTVLLEMLKTTQNSLATANFSILNKGKNIGKMRMNKKISNEKDILLINQSVTGLYEQKVNLLTV

SEQ ID NO: 20638 - protein, 1342 aa, unidentified
  REGION 1..1342: note = Cas Enzyme sequence
MRYFMGLDMGTSSVGWAVTDEHYQLLRRKGKDMWGIREFEEAATAVERRTHRVSRRRRQRQVARIGLLQEYFHDAIHQVDPNFYQRLKNSKYHEEDKDEIVRESNGIFNDAEYTDKEYFKEFPTIFHLRQELIKSKEPHDVRLVYLALVNMFKHRGHFLNATLSADGESRKIKDIYTDFVDKAAEQLGVSFATDIRYEELENYLSSNDLSRKRKGELIAELLHVTRKDKQQYALIECMLGLDKSVKLMFGDTLPEDFDKTIKVNFSDIAFEEKATEISEAIGEEKYDLILIMKEIYDAAILNRIMNGYTYLSDARVAEYEKHKSDLACLKHYIKEYGTQQQFDFLFRGTEKGSYSAYVHSVNSHEKQRRNMAGNKKEDLYSALKKMLKDMPENEEKTCIMMQIELDNFLPKQLTASNGVIPNQIHLKEMKKILANAENYLPFLKEKDESGYTISERIQKLFAFQIPYYIGPTTEKSAEFGGNGWVVRKEEGKVLPWNIDQKIDMKKTSEKFISRMVRRCTYMNDEQVLPKESLEYESFCVLNELNNIKVYGEKLPVDIKQDIYRTLCEKGKRVTKKSLMQYLVGRGVIKAEDEEQLTGLMDGLNNTLKSFAKFKAIFGDAIYEDSCKKMVEQIIFWCTVYGDSKHFLKEQLLEKYGEVLTDAQIKRILGIKFRDWGNLSKKFLELQGCSKETGKVNSLIRMLWETNDNLMELLAQDSYTFKEELENMQESTYKVLTELQPEDLDHMYFSAPVKRMIWQTILIIKEVTKVMGCQPERLFIEMTREHGQKNDIKDSRAKKFYELYSKIKDEDKDWRKVIEDADKDGRIRSKKMYLYLTQMGRCMYTGRPIDLDQLFNNNLYDIDHIYPRHYVKDDNLENNMVLVEKQSNAHKSDVYPLESGIYEKQVNWWRELHRKNLINDEKLKRLTGRNPFTDEQKAGFIARQLVETSQGTKGVATILQEALPDTTLVYAKARNVSEFRSDNDLLKSRIVNDFHHAHDAYLNIVIGNVYYVKFTKNPINFIREHGTYNLGKMFAKDVKRGDDIGWVAQSGNGQTATMETIKRTMARNTPLLTRMSYEVTGGLANQTLYSASKAKEGTYIPLKSSDERMQDVTKYGGFTSVSTAYFMLVEHDGKKGKRIRTIESVPIMWKERIEKNPAELERYCLEVLKLSNPDIRVRKILIQSLIKRNGYYMQITGKTGNQLYVRNTVSLCLKQEWVNYIKKLEKGNDENITKDKNLVLYDILVDKHNNTIYSQRPNPVGEKLVKRREEFINLNLNDQVTVLLEILKLTQIALGGANLKLIGEAEKTGVMLISKDITTLDEMLLINQSVTGLYEQKVNLLTV

SEQ ID NO: 20639 - protein, 1377 aa, unidentified
  REGION 1..1377: note = Cas Enzyme sequence
MELIMNIKNIKNGYYLGLDMGTNSVGWAVTDKEYRVLRAKGKDLWGIREFDEAETSVNRRTQRISRRRRQRETARIGLLKEYFYDAIMSVDPNFYQRLDNSKYYLEDKDENVRDKNGIFNDPDFTDKDYFKKYPTIFHLRKALIEDDNEAHDVRLVYLAILNMFKHRGHFLDKSGQLENSEGSLADLYMELSDCVDECNIPENASCNVVLPKLEDENAFAAAITNRDISRKERYNELLNILHINKSQKQLLEIVKGICGLKMNLVTIFGDEIKSEEDSKIDLSFSDNNAEETLAELADKLDDDEMNVILCTKKLYSEAVLHAILKGDKYLSYARVRDYEKHKLDLRILKDLLKRTSMEDYNRMFRSEEAGSYSAYVNSCNSSTVKGNIYGGPKRRGIDGRKPEDFYAFTKKIIKNYPDSEEKKYILSEIEREQFLPKKLTASNGVIPNQVHAKELKVILSNAESNLQFLKEKDDSGLTISERIIKLFSFTIPYYIGPVSKDISRGIGTGWAVRKDSGRVLPWNLSDKIDIGETRKGFIERLIRRCTYLNDEKVLPKASLLYESFCVLNEINNIKVAGTKISVETKQALYRELYQKGKKVSRKDIERYLICCGIIKEGEQDLISGIDIQINNCLSSFGKMSAVFGENIHEDKYQKIAEDIIILCTIYGDEKTELKKILSNKYCSENNPELNVLDEKKVKRITGFKFKDWGRVSYEFLTLHGADKSTGELRSIIRTMWETNDNLMELLSDRYTFKEEIELRTNSAAKSLSEFSIEDLDGMYFSAPVKRMIWQTLRIIKELEHVMGEAPEKIFVEMAKRPDEIKKRTDSRAKGFTELYKNIKDEDKDWIKFIEKADKDGSIRSKKMYLYLTQMGRCMYTGKEIELSEVMTDKYDIDHIYPRHFVKDDNIANNLVLVEKTKNAHKSDAYPIEESIRKNMHDLWKILLDRKLITKEKYLRLTSASPFTEEQLAGFIARQLVETRQGTKGVADILREVMPEKTSIIFSKASNVSDFRHENNLLKSRIANDMHHAHDAYLNIVVGNVYNTKFTNDPRRFVKDYESDKLTNNYHLSKMFNYDVMRNGYCAWRAGENRTISTVKNMLAKPSPMLTRMSFEGHGQIADQTLYGKAKAIKSPDLYIPLKESDERLCDVKKYGGFSSASTAYFVLAEYTKKKKTVRSIEAIPIYIKEKADKDKTVIESYISKRTGGENIRVADIKIKIQSLIKLNGYYLYLTGKTGDRLILRNAVQLIFDQDTINYIKKLEKEYDNELNSEDNIRLYDTLINKHKTNIMTKRPNPVLDKLTEGGEKFINLDLDNQKKVLKEILKLSAVGGNGADLSLIGASPNTGVMLTNKNISANKEFMLIERSVTGLYEKETDILRI

SEQ ID NO: 20640 - protein, 1062 aa, unidentified
  REGION 1..1062: note = Cas Enzyme sequence
LNVRDVNNNLEDFFMNSDKKVDYYIGLDMGTGALGCAVTDTQYRLIKVKGKDFWFVREYETAQPQLKRRNHRISKRKLQRHQVRIGLIRSYFADDVLKHDPLFYIRQDNSKYYFEDKDSRLITKDSLFADSDYRDKDYHKEYPTIFHLRQAFLRNEDISEERYSRLLYLVIVNMFEHRGHFLLNTESDDISPDMVKDAGENFINYIYNSLEDMPDVISYKEVINDLTKKGISRSSKKDKIIGLLGIEKTNKEQVELVKCLCGMDADASVMFGVKTGEKIKVSFQQMSFEDEKQKLEDAIGADNLAVIEDMKRLYDYSQLEYILKGCEYLSDARVKMYEKHNEDLRLLKDVYRYNLSREKYNIMFRSSEKGTYSAYCNSLNSKDSLAENKKYRRNMKEREQEELYKRIKKDLKDVENDDVKKILREIDLEQFLPKQITGANGAIPNQVHRKELKKILENAEKHVSFLTEKDESGYTVSERILMLFSQNIPYYIGPVGSGSKTGWAEIKEKGQILPWNIEQKIDIEKTSERFITNLIRECTYLSGEKVLPKQSLLYEKYCVLNEINNIQINGKRIEPELKQDIYNEIFTGSRLGKKVTKKNLCEYLVNRGLISDESQISGIDIELNAYLPSYGKMYAVLGERLREEAIRETAEEIIYYGTIYGEARHMFRKKVDQYVVNGIITEAQARRIYGYKFKDWARLSQNMLYLNGLDKRTNETLSLIRAMWEYNWNFMELINSEEFTFKEALEEKKQILEKTINEFQFEDLDEFYYSASVKRMIWQTVLSLKEIIQIMGHDPKRIFIEMTRTDEEKGEKGRKASREKRLLKLYENIEDSRPWETEIKNASESGKLNSKKMYLYYLQKGMDVYTGEEIDIEELFTDNRYDIDHIYPRSLTNDNNLENNLVLVSKKINENEKKNIYPVPEKIRKNPKVRKCWLTLHKMGLMNDEKYNRLISNEQLKEEQLAGFISRQLVETAQGAKGIADLLKSMMNLDTEIVYVKARNVSDFRRDYELVKSRLVNEHHHAKDAYLNIVVGNVYYTKFTRNPLNFIKNEGRRNNKEYGYNL

SEQ ID NO: 20641 - protein, 1381 aa, unidentified
  REGION 1..1381: note = Cas Enzyme sequence
MSIYFGGFFMNSDKREDYYVGLDMGTGSLGGAVTDTQYHLLKVKGKDFWFVREYETAKSQLDRRTHRIAKRRLQRHKARIGLIRSYFAEDVLKRDPLFYIRQDNSKYYQEDKDVRLTTKDSIFADPGYGDKEYHDDKEYPTIFHLRQALLRDQIKDEERYSRFLYLAIINMFEHRGHFLLNTESSDLNADMIKDVGELVMNAICGVSEYGSVTYKEIIEILEDKNISRTAKKDQIASKIDIKKSEKAQMERIKCLCGMEADARVMFEIEADEKIKIAFQQAAFEDEKEEIEVAIGEDRYLIIENMKQLYDYSQLQSVLNGFDYLSDARVQMYEKHKEDLHLLKKVYRKNLDREMYDRMFRSGEEGSYCAYSNSTNSVDSLAEAKKYRRNMKKRSQKDLYDRIKKDLKEVHDADADAIRKEMELERFLPKQITGANGIIPNQVHRKELKKILENAEHHLDFLKEKDESGYTVSERILMLFSSNIPYYVGPVGNGSKTGWAKIQESGQVLPWNMEQKIDIEQTSEHFITNLIRECTYLSGEKVLPKQSLLYESYCVLNEINNLRIHGKRIVSELKQDIYREVFQGSRLGKKVTKKNICTYLINRGLITEESEVSGIDKEINAYLPSYGKMYGVFGERLREEAVQEIAEKIIYYGTIYGDAKPMFRKKLNQYVSGGWMTESEAKRISGYKFKDWARLSRSMLCLSGCDKSTGEKISLIRAMWEYNLNFMELIYSEDFTFQKELEERRKALGKNLQEFQFEDLDEYYYSAPVKRMIWQAVQSLKEITQIMGHNPKRIFIEMTRTEEEKGEQGRKNSREKRLLKLYESIRDERNWTAEIKNANASGKLNSKKMYLYYLQMGRDVYTGEPIDIEDLFDDSRFDIDHIYPRSLTNDNNIENNLVLVSKTINQNEKKNDYPVPEKVRTNKKVRDLWHTLHKMGFMNDEKYNRLTSTERLSEDQLAGFIARQLVETAQGAKGIAELMKAMLPGTDIVYAKARNVSDFRKEYKMLKSRLVNDYHHAQDAYLNIIVGNVYFMKFTRNPMNFVKTEARRDGRNYDYNLYKMYSKDIIRNGEKAWIATSEQGPGTIRLVKEMMGRNTPIITRQAFEQRGELFNLQPIGKYSAKKDNYVPLKINDEKMQDVSKYGGYTSLNPSYFIFIEHGPEKKRKKCFEVIHSYYAAQIKTEKDLIDFLLQKGYKNPRVINARIKKNALIKYNGYFLYIIGMDARKNIEFSNATAMCLKNKYIQYVCKLEKMNKAILLSEKQKTNLHWDEKITCESNLELYRELTEKHLHSIYQRHPRSIGKCLADGEGAFKLLDIEEQVKIICDIVQYTSFQRGVFSLKVLGGPKEVGRIRISGNMTEAKECKLVNYSITGMYKTEMDLLKK

SEQ ID NO: 20642 - protein, 1182 aa, unidentified
  REGION 1..1182: note = Cas Enzyme sequence
  REGION 3..5: note = misc_feature - Xaa can be any naturally occurring amino acid
MLXXXGVSEYGSVTYKEIIEILEDKNISRTAKKDQIASKIDIKKSEKAQMERIKCLCGMEADARVMFEIEADEKIKIAFQQAAFEDEKEEIEVAIGEDRYLIIENMKQLYDYSQLQSVLNGFDYLSDARVQMYEKHKEDLHLLKKVYRKNLDREMYDRMFRSGEEGSYCAYSNSTNSVDSLAEAKKYRRNMKKRSQKDLYDRIKKDLKEVHDADADAIRKEMELERFLPKQITGANGIIPNQVHRKELKKILENAEHHLDFLKEKDESGYTVSERILMLFSSNIPYYVGPVGSGSKTGWAKIQESGQVLPWNMEQKIDIEQTSERFITNLIRECTYLSGEKVLPKQSLLYESYCVLNEINNLRIHGKRIVPELKQDIYREVFQGSRLGKKVTKKNICTYLINRGLITEESEVSGIDKEINAYLPSYGKMYGVFGERLREEAVQEIAEKIIYYGTIYGDAKPMFRKKLNQYVSGGWMTESEAKRISGYKFKDWARLSRSMLCLSGCDKSTGEKISLIRAMWEYNLNFMELIYSEDFTFQKELEERRKALGKNLQEFQFEDLDEYYYSAPVKRMIWQAVQSLKEITQIMGHNPKRIFIEMTRTEEEKGEQGRKNSREKRLLKLYESIRDERNWTAEIKNANASGKLNSKKMYLYYLQMGRDVYTGEPIDIEDLFDDSRFDIDHIYPRSLTNDNNIENNLVLVSKTINQNEKKNDYPVPEKVRTNKKVRDLWHTLHKMGFMNDEKYNRLTSTERLSEDQLAGFIARQLVETAQGAKGIAELMKAMLPGTDIVYAKARNVSDFRKEYKMLKSRLVNDYHHAQDAYLNIIVGNVYFMKFTRNPMNFVKTEARRDGRNYDYNLYKMYSKDIIRNGEKAWIATSEQGPGTIRLVKEMMGRNTPIITRQAFEQRGELFNLQPVGKYSAKKDNYVPLKINDEKMQDVSKYGGYTSLNPSYFIFIEHGPEKKRKKCFEVIHSYYAAQIKTEKDLIDFLLQKGYKNPRVINARIKKNALIKYNGYFLYIIGMDARKNIEFSNATAMCLKNKYIQYVCKLEKMNKAILLSEKQKTNLHWDEKITCESNLELYRELTEKHLHSIYQRHPRSIGKCLADGEGAFKRLDIEEQVKIICDIVQYTSFQRGVFSLKVLGGPKEVGRIRISGNMTEAKECKLVNYSITGMYKTEMDLLKK

SEQ ID NO: 20643 - protein, 1372 aa, unidentified
  REGION 1..1372: note = Cas Enzyme sequence
MNSDKREDYYVGLDMGTGSLGGAVTDTQYHLLKVKGKDFWFVREYETAKSQLDRRTHRIAKRRLQRHKARIGLIRSYFAEDVLKRDPLFYIRQDNSKYYQEDKDVRLTTKDSIFADPGYGDKEYHDDKEYPTIFHLRQALLRDQIKDEERYSRFLYLAIINMFEHRGHFLLNTESSDLNADMIKDVGELVMNAICGVSEYGSVTYKEIIEILEDKNISRTAKKDQIASKIDIKKSEKAQMERIKCLCGMEADARVMFEIEADEKIKIAFQQAAFEDEKEEIEVAIGEDRYLIIENMKQLYDYSQLQSVLNGFDYLSDARVQMYEKHKEDLHLLKKVYRKNLDREMYDRMFRSGEEGSYCAYSNSTNSVDSLAEAKKYRRNMKKRSQKDLYDRIKKDLKEVHDADADAIRKEMELERFLPKQITGANGIIPNQVHRKELKKILENAEHHLDFLKEKDESGYTVSERILMLFSSNIPYYVGPVGNGSKTGWAKIQESGQVLPWNMEQKIDIEQTSEHFITNLIRECTYLSGEKVLPKQSLLYESYCVLNEINNLRIHGKRIVSELKQDIYREVFQGSRLGKKVTKKNICTYLINRGLITEESEVSGIDKEINAYLPSYGKMYGVFGERLREEAVQEIAEKIIYYGTIYGDAKPMFRKKLNQYVSGGWMTESEAKRISGYKFKDWARLSRSMLCLSGCDKSTGEKISLIRAMWEYNLNFMELIYSEDFTFQKELEERRKALGKNLQEFQFEDLDEYYYSAPVKRMIWQAVQSLKEITQIMGHNPKRIFIEMTRTEEEKGEQGRKNSREKRLLKLYESIRDERNWTAEIKNANASGKLNSKKMYLYYLQMGRDVYTGEPIDIEDLFDDSRFDIDHIYPRSLTNDNNIENNLVLVSKTINQNEKKNDYPVPEKVRTNKKVRDLWHTLHKMGFMNDEKYNRLTSTERLSEDQLAGFIARQLVETAQGAKGIAELMKAMLPGTDIVYAKARNVSDFRKEYKMLKSRLVNDYHHAQDAYLNIIVGNVYFMKFTRNPMNFVKTEARRDGRNYDYNLYKMYSKDIIRNGEKAWIATSEQGPGTIRLVKEMMGRNTPIITRQAFEQRGELFNLQPIGKYSAKKDNYVPLKINDEKMQDVSKYGGYTSLNPSYFIFIEHGPEKKRKKCFEVIHSYYAAQIKTEKDLIDFLLQKGYKNPRVINARIKKNALIKYNGYFLYIIGMDARKNIEFSNATAMCLKNKYIQYVCKLEKMNKAILLSEKQKTNLHWDEKITCESNLELYRELTEKHLHSIYQRHPRSIGKCLADGEGAFKLLDIEEQVKIICDIVQYTSFQRGVFSLKVLGGPKEVGRIRISGNMTEAKECKLVNYSITGMYKTEMDLLKK

SEQ ID NO: 20644 - protein, 1297 aa, unidentified
  REGION 1..1297: note = Cas Enzyme sequence
MSIYFGGFFMNSDKREDYYVGLDMGTGSLGGAVTDTQYHLLKVKGKDFWFVREYESAKSQLDRRTHRIAKRRLQRHKARIGLIRSYFAEDVLKRDPLFYIRQDNSKYYQEDKDVRLTTKDSIFADSGYGDKEYHDDKEYPTIFHLRQALLRDQIKDEERYSRFLYLAIINMFEHRGHFLLNTESSDLNADMIKDVGELVMNAICGVSEYGSVTYKEIIEILEDKNISRTAKKDQIASKIDIKKSEKAQMERIKCLCGMEADARVMFEIEADEKIKIAFQQAAFEDEKEEIEAVIGEDRYLIIENMKQLYDYSQLQSVLNGFDYLSDARVQMYEKHKEDLHLLKKVYRKNLDREIYDRMFRSGEEGSYCAYSNSTNSVDSLAGAKKYRRNMKKRSQKDLYDRIKKDLKEVHDADADAIRKEMELERFLPKQITGANGIIPNQVHRKELKKILENAEHHLDFLKEKDESGYTVSERILMLFSSNIPYYVGPVGSGSKTGWAKIQESGQVLPWNMEQKIDIEQTSECFITNLIRECTYLSGEKVLPKQSLLYESYCVLNEINNLRIHGKRIVPELKQDIYREVFQGSRLGKKVTKKNICAYLINRGLITEESEVSGIDKEINAYLPSYGKMYGVFGERLREEAVQEIAEKTIYYGTIYGDAKSMFRKKLNQYVSEGWMTESQAKRISGYKFKNWARLSRSMLCLSGCDKSTGEKISLIRAMWEYNLNFMELIYSEDFTFQKELEERRKALGKTLQEFQFEDLNEYYYSAPVKRMIWQAVQALKEITQIMGHNPKRIFIEMTRTEEEKGEQGRKNSREKRLLKLYESIRDERNWAAEIKNANASGKLNSKKLYLYYLQMGRDVYTGEPIDIEDLFDDSRYDIDHIYPRSLTNDNNIENNLVLVSKTINQNEKKNDYPVPEKVRTNIKVRDLWYKLHKKGFMNDEKYNRLTSTERLSEDQLAGFIARQLVETAQGAKGIAELMKAMLPGTDIVYAKARNVSDFRKEYKMLKSRLVNDYHHAQDAYLNIVVGNVYFMKFTRNPMNFVKKEARRDGRNYDYNLYKMYSKDIIRNGEKAWIATSEQGPGTIRLVKETMERNTPIITRQAFEQRGELFNLQPVGKYSAKKDNYVPLKINDEKMQDVSKYGGYTSLNPSYFIFIEHGSEKKRKKCFEVIHSYYAAQIKTEKDLIDFLLQKGYKNPRVINARIKKNALIKYNGYFLYIIGMDARKNIEFSNATAMCLKNKYIQYVCKLEKMNKAILLSEKQKKIYTGMKESPVKVIWNCTENLQKNICIPSIKDIQEA

SEQ ID NO: 20645 - protein, 1375 aa, unidentified
  REGION 1..1375: note = Cas Enzyme sequence
MHTDKKADYYVGLDMGTGSLGGAVIDSQYHLMKVKGKDFWFVREYESAQPQLKRRTHRISRRKLQRHQVRIRLLRSYFAEDVLRHDPLFYIRQDNSKYYREDKDSRLRTKDSLFADPGYGDKEYYKEYPTIFHLQQALLKDEVASEERYSRLLYLALIHLFEHRGHFLLNTDSGDLNADMVKDAGETVMNYICESTEEANGDVSYKQIIEKLADKEISRSTKKDKIASLLGIKRSDKKQMELVKCLCGMDADARVMFQMEADEKIKVAFQQASFEEEKGEIEAAVGEEYFFIIESMKQLYDYSQLQAVLKGFDYLSDARVAMYNKHKEDLRLLKKVYKRDLGQEAYDRMFRSSEKGSYSAYCNSLNSTDSLAAEQKYRRNMKNVKERGKGDLHDRIKKDLKNLANEETTVILKEIELEQFLPKQMTGANGVIPNQVHQKEMKKILENAEKHLDFLKETDDSGYTVSERILMLFSRNIPYYVGPVGNGSKTGWAVRREQGQVLPWNMEQKIDMNATSERFITNLIRECTYLSGEKVLPKQSLLYEAYCVLNEINNLRINGKRIVPEVKQDIYKELFQGVRLGKKVTRKTLCSYLMNRGILKDESELSGIDKEANAYLSSYGKMYAVFGERMREEAIQKAVEEIIYYGTIYGDSKLMFRKKLDQYISSGILTESQAKRISGYKFKDWARISKSMLCLSGRDNRTGEILSLIRAMWEYNLNFMELLHSEEFTFKEELEKRKQTIQKTLSDFQFEDLDEYYYSVLVKRMIWQTVQALKEITQIMGHYPKRIFIEMTRTDEEKGEQGRKNSREKRLLKLYENIKDGRNWETEIKNASASGKLNSKKLYLYYLQMGKDAYTGNDIDIEDLFKDNRYDIDHIYPRSLTNDNNMENNLVLVSKKINEEDKQNDSLVPKKVRENPKVRELWAVLHKMGFMNDEKYNRLTSNEKLTDDQLAGFIERQLVETAQGAKGIADLLKSLMPGTEIVYVKARNVSDFRKEYKMLKSRLINDYHHAQDAYLNIVVGNVYFTKFTRNPLNYVKKEARRDGKNYNYNLYKMYGKDVVRNGEIAWVASKNQEPGTIRLVKEVMEKNTPMITRQTFEQKGELFNLQPVGKYSAKAENYVPLKAKDEKLQDVTKYGGYTSLKPSYFVFFEHGSEKKRKKCFEVVHSYYASQIKNKADLTKFLEEKGYKNPRVIAEKIKKNALIKYNGYFLYIVGMDARKNVEFSNAMAMCLKYPYVQYICKLERLRAAMLLPEKQKMSLRWDEKITGEKNLELYQELTTKHLHAIYANHPKCIGTCLENGESSFKLLGIEQQVMLLCDIVAYTSFQKGTFSLQAIGGPKDVGRIRISGNMTDATELKLIHYSITGMYKKEEDLLHM

SEQ ID NO: 20646 - protein, 1375 aa, unidentified
  REGION 1..1375: note = Cas Enzyme sequence
MHTDKKADYYVGLDMGTGSLGGAVTDPQYHLMKVKGKDFWFVREYESAQPQLKRRTHRISRRKLQRHQVRIRLLRSYFAEDVLRHDPLFYIRQDNSKYYREDKDSRLRTKDSLFADPGYGDKEYYKEYPTIFHLQQALLKDEVASEERYSRLLYLALIHLFEHRGHFLLNTDSGDLNADMVKDAGETVMNYICESTEEANGDVSYKQIIEKMADKEISRSTKKDKIASLLGIKRSDKKQMELVKCLCGMDADARVMFQLEADEKIKVAFQQASFEEEKEEIEAAVGEEYFFIIESMKQLYDYSQLQAVLKGFDYLSDARVAMYNKHKEDLRLLKKVYKRDLGQEAYDRMFRSSEKGSYSAYCNSLNSTDSLAAEQKYRRNMKNVKERGKGDLHDRIKKDLKNLANEETTVILKEIELEQFLPKQMTGANGVIPNQVHQKEMKKILENAEKHLDFLKETDDSGYTVSERILMLFSRNIPYYVGPVGNGSKTGWAVRREQGQVLPWNMEQKIDMNATSERFITNLIRECTYLSGEKVLPKQSLLYEAYCVLNEINNLRINGKRIVPEVKQDIYKELFQGVRLGKKVTRKTLCSYLMNRGILKDESELSGIDKEANAYLSSYGKMYAVFGERMREEAIQKAVEEIIYYGTIYGDSKLMFRKKLDQYISSGILTESQAKRISGYKFKDWARISKSMLCLSGRDNRTGEILSLIRAMWEYNLNFMELLHSEEFTFKEELEKRKQTIQKTLSDFQFEDLDEYYYSVLVKRMIWQTVQALKEITQIMGHYPKRIFIEMTRTDEEKGEQGRKNSREKRLLKLYENIKDGRNWETEIKNASASGKLNSKKLYLYYLQMGKDAYTGNDIDIEDLFKDNRYDIDHIYPRSLTNDNNMENNLVLVSKKINEEDKQNDSLVPKKVRENPKVRELWAVLHKMGFMNDEKYNRLTSNEKLTDDQLAGFIERQLVETAQGAKGIADLLKSLMPGTEIVYVKARNVSDFRKEYKMLKSRLINDYHHAQDAYLNIVVGNVYFTKFTRNPLNYVKKEARRDGKNYNYNLYKMYGKDVVRNGEIAWVASKNQEPGTIRLVKEVMEKNTPMITRQTFEQKGELFNLQPVGKYSAKAENYVPLKAKDEKLQDVTKYGGYTSLKPSYFVFFEHGSEKKRKKCFEVVHSYYASQIKNKADLTKFLEEKGYKNPRVIAEKIKKNALIKYNGYFLYIVGMDARKNVEFSNAMAMCLKYPYVQYICKLERLRAAMLLPEKQKMSLRWDEKITGEKNLELYQELTTKHLHAIYANHPKCIGTCLENGESSFKLLGIEQQVMLLCDIVAYTSFQKGTFSLQAIGGPKDVGRIRISGNMTDATELKLIHYSITGMYKKEEDLLHM

SEQ ID NO: 20647 - protein, 1371 aa, unidentified
  REGION 1..1371: note = Cas Enzyme sequence
MNSDRKADYYVGLDMGTGSLGVAVTDPQYHLLKVKGKDFWFVREYETAHPQLERRTHRISKRRLQRHQVRIGLIRSYFADDVLEHDPLFYIRQDNSKYYREDKDSRLLTKDSLFAEPNYGDKEYYKEYPTVFHLRQALLKDEISSEERYSRLLYLAIINMFEYRGHFLLNTDSGDVNFEMVKDAGETVMNYLYDSMEESTAKISYTEVIEILADKGISRSTKKDKISSLLGIKKSNKEQTELVKCLCGMEADARVLFRIEAEEKIKIAFQQASFEDEKEEIEVAVGEDNYAIIEYMKQLYDYSQLQSVLKGFEYLSDARVEMYDKHKEDLILLKKVYKNNLSQEKYNIMFRSSEDGTYSAYCNSLNAENSLAATKKYRRNMKKRGKEDLYARIKKDLKGVEDAEAEKILKEIELEAFLPKQITGANGVIPNQVHRKELKKILENAENHLPFLKEKDSSGYTVSERILMLFSKNIPYYVGPVGKGSQNGWAEIREEGQILPWNMEQKLDMEKTSERFITNLVRECTYLSGEKVLPKQSLLYERYCVLNEINNLQINGKRIVPELKQDIYQDIFMGSRLGKKVTKKVLSSYLLNRGLISDESEISGIDREIHAYLGSYGKMYAVFGEKLREEAIRNAAEEMIYYGTIYGDSKSMFRKKLKQYISSGIITDVQAKRIAGYKFKDWARLSKNLLCLNGCDKHTGEIISLIRAMWEYNLNFMELINSEEFTFRDELEGRKRVLEKSLHEFQFEDLKDYYYSAPVKRMIWQTVLALQEITQIMRHNPKRIFIEMTRTEEEKGEPGRKASREKRLLKLYENIRESRDWTSEIKNAGASGSLNSKKLYLYYLQMGKDAYTGEEIDIEELFTDNRYDIDHIYPRSLTNDNNIDNNLVLVSKKINQDEKKNDYPLPEKVRSNPKVWELWSSLHKRGFMNDEKYNRLTASTPLTDEQLAGFIARQLVETAQGTKGIADLFKAMMPEAEIVYVKARNVSGFRKQSFLKSRLVNEHHHAKDAYLNIVVGNVYYTKFTRNPMNFIKNEVQRSSNKYNYNLSKMFENDVVRNGEIAWSVQKNHKPGTMQVVSEVMCKNTPLITRQAFEQKGELFNIQPVGKYSAKAGNYVPLKVKDTKLQNVEKYGGYTSLKPAYFTFIEHGSEKKRKRCFEVVQSYYASQIKKESDLIEFLEKNGYKNPRVIAGKTKKNSLIKYNGYLLYVIGMDARKNIEFSNATPMCLENKYIQYVSKLEKAYNEIILSERKKTEPRLSEKVTIENNLKLYRELTDKHVNSIYRNHPRSIGDILEKGEDKFESLDLVHQIKILYNLVLYTSFNRGTFSLTDIGGPKEVGRIRISGNMTEAKELKLIHYSVTGLYKKEIDLLNQ

SEQ ID NO: 20648 - protein, 1371 aa, unidentified
  REGION 1..1371: note = Cas Enzyme sequence
MNSDRKADYYVGLDMGTGSLGVAVTDPQYHLLKVKGKDFWFVREYETAHPQLERRTHRISKRRLQRHQVRIGLIRSYFADDVLEHDPLFYIRQNNSKYYREDKDSRLLTKDSLFAEPNYGDKEYYKEYPTVFHLRQALLKDEISSEERYSRLLYLAIINMFEYRGHFLLNTDSGDVNFEMVKDAGETVMNYLYDSMEESTAKISYTEVIEILADKGISRSTKKDKISSLLGIKKSNKEQTELVKCLCGMEADARVLFRIEAEEKIKIAFQQASFEDEKEEIEVAVGEDNYAIIEYMKQLYDYSQLQSVLKGFEYLSDARVEMYDKHKEDLILLKKVYKNNLSQEKYNIMFRSSEDGTYSAYCNSLNAENSLAATKKYRRNMKKRGKEDLYARIKKDLKGVEDAEAEKILKEIELEAFLPKQITGANGVIPNQVHRKELKKILENAENHLPFLKEKDSSGYTVSERILMLFSKNIPYYVGPVGKGSQNGWAEIREEGQILPWNMEQKLDMEKTSERFITNLVRECTYLSGEKVLPKQSLLYERYCVLNEINNLQINGKRIVPELKQDIYQDIFMGSRLGKKVTKKVLSSYLLNRGLISDESEISGIDREIHAYLGSYGKMYAVFGEKLREEAIRNAAEEMIYYGTIYSDSKSMFRKKLKQYISSGIITDVQAKRIAGYKFKDWARLSKNLLCLNGCDKHTGEIISLIRAMWEYNLNFMELINSEEFTFRDELEGRKRVLEKSLHEFQFEDLKDYYYSAPVKRMIWQTVLALQEITQIMRHNPKRIFIEMTRTEEEKGEPGRKASREKRLLKLYENIRESRDWTSEIKNAGASGSLNSKKLYLYYLQMGKDAYTGEEIDIEELFTDNRYDIDHIYPRSLTNDNNIDNNLVLVSKKINQDEKKNDYPLPEKVRSNPKVWELWSSLHKRGFMNDEKYNRLTASTPLTDEQLAGFIARQLVETAQGTKGIADLFKAMMPEAEIVYVKARNVSDFRKQSFLKSRLVNEHHHAKDAYLNIVVGNVYYTKFTRNPMNFIKNEVQRSSNKYNYNLSKMFENDVVRNGEIAWSVQKNHKPGTMQVVSEVMCKNTPLITRQAFEQKGELFNIQPVGKYSAKAGNYVPLKVKDTKLQNVEKYGGYTSLKPAYFIFIEHGPEKKRKRCFEVVQSYYASQIKKESDLIEFLEKNGYKNPRVIAGKIKKNSLIKYNGYLLYVIGMDARKNIEFSNATPMCLENKYIQYVSKLEKAYNEIILSERKKTEPRLSEKVTIENNLKLYRELTDKHVNSIYRNHPRSIGDILEKGEDKFESLDLVHQIKILYNLVLYTSFNRGTFSLTDIGGPKEVGRIRISGNMTEAKELKLIHYSVTGLYKKEIDLLNQ

SEQ ID NO: 20649 - protein, 1371 aa, unidentified
  REGION 1..1371: note = Cas Enzyme sequence
MNSDRKADYYVGLDMGTGSLGVAVTDPQYHLLKVKGKDFWFVREYETAHPQLERRTHRISKRRLQRHQVRIGLIRSYFADDVLEHDPLFYIRQDNSKYYREDKDSRLLTKDSLFAEPNYGDKEYYKEYPTVFHLRQALLKDEISSEERYSRLLYLAIINMFEYRGHFLLNTDSGDVNFEMVKDAGETVMNYLYDSMEESTAKISYTEVIEILADKGISRSTKKDKISSLLGIKKSNKEQTELVKCLCGMEADARVLFRIEAEEKIKIAFQQASFEDEKEEIEVAVGEDNYAIIEYMKQLYDYSQLQSVLKGFEYLSDARVEMYDKHKEDLILLKKVYKNNLSQEKYNIMFRSSEDGTYSAYCNSLNAENSLAATKKYRRNMKKRGKEDLYARIKKDLKGVEDAEAEKILKEIELEAFLPKQITGANGVIPNQVHRKELKKILENAENHLPFLKEKDSSGYTVSERILMLFSKNIPYYVGPVGKGSQNGWAEIREEGQILPWNMEQKLDMEKTSERFITNLVRECTYLSGEKVLPKQSLLYERYCVLNEINNLQINGKRIVPELKQDIYQDIFMGSRLGKKVTKKVLSSYLLNRGLISDESEISGIDREIHAYLGSYGKMYAVFGEKLREEAIRNVAEEMIYYGTIFGDSKSMFRKKLKQYISSGIITDVQAKRIAGYKFKDWARLSKNLLCLNGCDKHTGEIISLIRAMWEYNLNFMELINSEEFTFRDELEGRKRVLEKSLHEFQFEDLKDYYYSAPVKRMIWQTVLALQEITQIMRHNPKRIFIEMTRTEEEKGEPGRKASREKRLLKLYENIRESRDWTSEIKNAGASGSLNSKKLYLYYLQMGKDAYTGEEIDIEELFTDNRYDIDHIYPRSLTNDNNIDNNLVLVSKKINQDEKKNDYPLSEKVRSNPKVWEFWSSLHKRGFMNDEKYNRLTASTPLTDEQLAGFIARQLVETAQGTKGIADLFKAMMPEAEIVYVKARNVSDFRKQSFLKSRLVNEHHHAKDAYLNIVVGNVYYTKFTRNPMNFIKNEVQRSSNKYNYNLSKMFENDVVRNGEIAWSVQKNHKPGTMQVVSEVMCKNTPLITRQAFEQKGELFNIQPVGKYSAKAGNYVPLKVKDTKLQNVEKYGGYTSLKPAYFIFIEHGPEKKRKRCFEVVQSYYASQIKKESDLIEFLEKNGYKNPRVIAGKIKKNSLIKYNGYLLYVIGMDARKNIEFSNATPMCLENKYIQYVSKLEKAYNEIILSERKKTEPRLSEKVTIENNLKLYRELTDKHVNSIYRNHPRSIGDILEKGEDKFESLDLVHQIKILYNLVLYTSFNRGTFSLTDIGGPKEVGRIRISGNMTEAKELKLIHYSVTGLYKKEIDLLNQ

SEQ ID NO: 20650 - protein, 1297 aa, unidentified
  REGION 1..1297: note = Cas Enzyme sequence
MSIYYGGFFMNSDKREDYYVGLDMGTGSLGGAVTDTQYHLLKVKGKDFWFVREYESAKSQLDRRTHRIAKRRLQRHKARIGLIRSYFAEDVLKRDPLFYIRQDNSKYYQEDKDVRLTTKDSIFADSGYGDKEYHDDKEYPTIFHLRQALLRDQIKDEERYSRFLYLAIINMFEHRGHFLLNTESSDLNADMIKDVGELVMNAICGVSEYGSVTYKEIIEILEDKNISRTAKKDQIASKIDIKKSEKAQMERIKCLCGMEADARVMFEIEADEKIKIAFQQAAFEDEKEEIEVAIGEDRYLIIENMKQLYDYSQLQSVLNGFDYLSDARVQMYEKHKEDLHLLKKVYRKNLDREMYDRMFRSGEEGSYCAYSNSTNSVDSLAGAKKYRRNMKKRSQKDLYDRIKKDLKEVHDADADAIRKEMELECFLPKQITGANGIIPNQVHRKELKKILENAEHHLDFLKEKDESGYTVSERILMLFSSNIPYYVGPVGSGSKTGWAKIQESGQVLPWNMEQKIDIEQTSECFITNLIRECTYLSGEKVLPKQSLLYESYCVLNEINNLSIHGKRIVPELKQDIYREVFQGSRLGKKVTKKNICAYLINRGLITEESEVSGIDKEINAYLSSYGKMYGVFGERLREEAVQEIAEKTIYYGTIYGDAKSMFRKKLNQYVSEGWMTESQAKRISGYKFKNWARLSRSMLCLSGCDKSTGEKISLIRAMWEYNLNFMELIYSEDFTFQKELEERRKALGKTLQEFQFEDLNEYYYSAPVKRMIWQAVQALKEITQIMGHNPKRIFIEMTRTEEEKGEQGRKNSREKRLLKLYESVRDERNWAAEIKNANASGELNSKKMYLYYLQMGRDVYTGEPIDIEDLFDDSRYDIDHIYPRSLTNDNNIENNLVLVSKTINQNEKKNDYPVPEKVRTNIKVRDLWYKLHKKGFMNDEKYNRLTSTERLSEDQLAGFIARQLVETAQGAKGIAELMKAMLPGTDIVYAKARNVSDFRKEYKMQKSRLVNDYHHAQDAYLNIIVGNVYFMKFTRNPMNFVKKEARRDGRNYDYNLYKMYSKDIIRNGEKAWIATSEQGPGTIRLVKETMERNTPIITRQAFEQRGELFNLQPVGKYSAKKDNYVPLKINDEKMQDVSKYGGYTSLNPSYFIFIEHGSEKKRKKCFEVIHSYYAAQIKTEKDLIDFLLQKGYKNPRVINARIKKNALIKYNGYFLYIIGMDARKNIEFSNATAMCLKNKYIQYVCKLEKMNKAILLSEKQKKIYTGMKESPVKVIWNCTENLQKNICIPSIKDIQEA

SEQ ID NO: 20651 - protein, 1372 aa, unidentified
  REGION 1..1372: note = Cas Enzyme sequence
MNSDKRKDYYVGLDMGTGSLGGAVTDTQYHLLKVKGKDFWFVREYETAKPQLDRRTHRIAKRRLQRHKARIGLIRSYFAEDVLKHDPLFYIRQDNSKYYQEDKDARLTTKDSLFADPGYGDKEYHDDKEYPTIFHLRQALLRDQIKDEERYSRFLYLAIINMFEHRGHFLLNTESSDLNADMIKDVGELVMNAICGVSEYGSVTYKEIIEILEDKNISRTAKKDQIASKVDIKKSEKAQMERIKCLCGMEADARVMFELEADEKIKIAFQQAAFENEKEEIEVAIGEDRYLIIENMKQLYDYSQLQSVLNGFDYLSDARVQMYEKHKEDLHLLKKVYRKNLDREMYDRMFRSGEEGSYCAYSNSTNSVDSLAEAKKYRRNMKKRSQKDLYDRIKKDLKEVHDADADAIRKEMELERFLPKQITGANGIIPNQVHRKELKKILENAEHHLDFLKEKDESGYTVSERILMLFSSNIPYYVGPVGSGSKTGWAKIQESGQVLPWNMEQKIDMEQTSERFITNLIRECTYLSGEKVLPKQSLLYESYCVLNEINNLRIRGKRIVPELKQDIYREVFQSSRMGKKVTKKNLCTYLINRGLITEESEVSGIDKEINAYLPSYGKMYGVFGERLREEAVQEIAEKIIYYGTIYGDAKSMFRKKLNQYVSDGWLTEPQAKRISGYKFKDWARISRSMLCLSGCDKSTGEKISLIRAMWEYNLNFMELIYSEDFTFQKELEERRKALGKTLQEFQFEDLDEYYYSAPVKRMIWQAVQALKEITQIMGHNPKRIFIEMTRTEEEKGEQGRKNSREKRLLKLYESIRDERNWAAEIKNANASRKLNSKKMYLYYLQMGRDVYTGEPIDIEDLFDDSRYDIDHIYPRSLTNDNNIENNLVLVSKTINQNEKKNDYPVPEKVRTNKKVRDLWHTLHKMGFMNDEKYNRLTSTEHLTDDQLAGFIARQLVETAQGAKGIAELMKAMLPGTDIVYAKARNVSDFRKEYKMLKSRLVNDYHHAQDAYLNIVVGNVYFTKFTRNPVNFVKKEARRDGRNYDYNLYKMYSKDIIRNGEIAWIATSEQGPGTIRLVKETMGRNTPVITRQAFEQQGELFNLQPVGKYSAKKDNYVPLKINDEKVQDVSKYGGYTSLNPSYFIFIEHGPEKKRKKCFEVIQSYYSARIKTEKDLIDFLVQKGYKNPRVINAGIKKNALIKYNGYFLYIIGMDARKNIEFSNATAMCLKNNYIQYVCKLEKMNKAILLSEKQKTNLHWDERITCESNLELYRELTEKHLHSIYQKHPKSIGKCLAEGEGAFKLLDIEQQVKILCDIVQYTSFQRGVFSLKVLGGPKEVGRIRISGNMTEAKECKLINYSITGMYKTEMDLLKK

SEQ ID NO: 20652 - protein, 1372 aa, unidentified
  REGION 1..1372: note = Cas Enzyme sequence
MNSDKREDYYVGLDMGTGSLGGAVTDTQYHLLKVKGKDFWFVREYETAKSQLDRRTHRIAKRRLQRHKARIGLIRSYFAEDVLKHDPLFYIRQDNSKYYQEDKDARLTTKDSLFADPGYGDKEYHDDKEYPTIFHLRQALLRDQIKDEERYSRFLYLAIINMFEHRGHFLLNTESSDLNADMIKDVGELVMNAICGVSEYGSVTYKEIIEILEDKNISRTAKKDQIASKVDIKKSEKAQMERIKCLCGMEADARVMFELEADEKIKIAFQQAAFEDEKEEIEVAIGEDRYLIIENMKQLYDYSQLQSVLNGFDYLSDARVQMYEKHKEDLHLLKKVYRKNLDREMYDRMFRSGEEGSYCAYSNSTNSVDSLAEAKKYRRNMKKRSQKDLYDRIKKDLKEVHDADADAIRKEMELERFLPKQITGANGIIPNQVHRKELKKILENAEHHLDFLKEKDESGYTVSERILMLFSSNIPYYVGPVGSGSKTGWAKIQESGQVLPWNMEQKIDMEQTSERFITNLIRECTYLSGEKVLPKQSLLYESYCVLNEINNLRIRGKRIVPELKQDIYREVFQSSRMGKKVTKKNLCTYLINRGLITEESEVSGIDKEINAYLPSYGKMYGVFGERLREEAVQEIAEKIIYYGTIYGDAKSMFRKKLNQYVSDGWLTEPQAKRISGYKFKDWARISRSMLCLSGCDKSTGEKISLIRAMWEYNLNFMELIYSEDFTFQKELEERRKALGKTLQEFQFEDLDEYYYSAPVKRMIWQAVQALKEITQIMGHNPKRIFIEMTRTEEEKGEQGRKNSREKRLLKLYESIRDERNWAAEIKNANASGKLNSKKMYLYYLQMGRDVYTGEPIDIEDLFDDSRYDIDHIYPRSLTNDNNIENNLVLVSKTINQNEKKNDYPVPEKVRTNKKVRDLWHTLHKMGFMNDEKYNRLTSTEHLTDDQLAGFIARQLVETAQGAKGIAELMKAMLPGTDIVYAKARNVSDFRKEYKMLKSRLVNDYHHAQDAYLNIVVGNVYFTKFTRNPVNFVKKEARRDGRNYDYNLYKMYSKDIIRNGEIAWIATSEQGPGTIRLVKETMGRNTPVITRQAFEQQGELFNLQPVGKYSAKKDNYVPLKINDEKVQDVSKYGGYTSLNPSYFIFIEHGPEKKRKKCFEVIQSYYSARIKTEKDLIDFLVQKGYKNPRVINAGIKKNALIKYNGYFLYIIGMDARKNIEFSNATAMCLKNNYIQYVCKLEKMNKAILLSEKQKTNLHWDERITCESNLELYRELTEKHLHSIYQKHPKSIGKCLAEGEGAFKLLDIEQQVKILCDIVQYTSFQRGVFSLKVLGGPKEVGRIRISGNMTEAKECKLINYSITGMYKTEMDLLKK

SEQ ID NO: 20653 - protein, 1374 aa, unidentified
  REGION 1..1374: note = Cas Enzyme sequence
FFMNSDKREDYYVGLDMGTGSLGGAVTDTQYHLLKVKGKDFWFVREYETAKSQLDRRTHRIAKRRLQRHKARIGLIRSYFAEDVLKHDPLFYIRQDNSKYYQEDKDARLTTKDSLFADPGYGDKEYHDDKEYPTIFHLRQALLRDQIKDEERYSRFLYLAIINMFEHRGHFLLNTESSDLNADMIKDVGELVMNAICGVSEYGSVTYKEIIEILEDKNISRTAKKDQIASKVDIKKSEKAQMERIKCLCGMEADARVMFELEADEKIKIAFQQAAFEDEKEEIEVAIGEDRYLIIENMKQLYDYSQLQSVLNGFDYLSDARVQMYEKHKEDLHLLKKVYRKNLDREMYDRMFRSGEEGSYCAYSNSTNSVDSLAEAKKYRRNMKKRSQKDLYDRIKKDLKEVHDADADAIRKEMELERFLPKQITGANGIIPNQVHRKELKKILENAEHHLDFLKEKDESGYTVSERILMLFSSNIPYYVGPVGSGSKTGWAKIQESGQVLPWNMEQKIDMEQTSERFITNLIRECTYLSGEKVLPKQSLLYESYCVLNEINNLRIRGKRIVPELKQDIYREVFQSSRMGKKVTKKNLCTYLINRGLITEESEVSGIDKEINAYLPSYGKMYGVFGERLREEAVQEIAEKIIYYGTIYGDAKSMFRKKLNQYVSDGWLTEPQAKRISGYKFKDWARISRSMLCLSGCDKSTGEKISLIRAMWEYNLNFMELIYSEDFTFQKELEERRKALGKTLQEFQFEDLDEYYYSAPVKRMIWQAVQALKEITQIMGHNPKRIFIEMTRTEEEKGEQGRKNSREKRLLKLYESIRDERNWAAEIKNANASGKLNSKKMYLYYLQMGRDVYTGEPIDIEDLFDDSRYDIDHIYPRSLTNDNNIENNLVLVSKTINQNEKKNDYPVPEKVRTNKKVRDLWHTLHKMGFMNDEKYNRLTSTEHLTDDQLAGFIARQLVETAQGAKGIAELMKAMLPGTDIVYAKARNVSDFRKEYKMLKSRLVNDYHHAQDAYLNIVVGNVYFTKFTRNPVNFVKKEARRDGRNYDYNLYKMYSKDIIRNGEIAWIATSEQGPGTIRLVKETMGRNTPVITRQAFEQQGELFNLQPVGKYSAKKDNYVPLKINDEKVQDVSKYGGYTSLNPSYFIFIEHGPEKKRKKCFEVIQSYYSARIKTEKDLIDFLVQKGYKNPRVINAGIKKNALIKYNGYFLYIIGMDARKNIEFSNATAMCLKNNYIQYVCKLEKMNKAILLSEKQKTNLHWDEEITCESNLELYRELTEKHLHSIYQKHPKSIGKCLAEGEGAFKLLDIEQQVKILCDIVQYTSFQRGVFSLKVLGGPKEVGRIRISGNMTEAKECKLINYSITGMYKTEMDLLKK

SEQ ID NO: 20654 - protein, 1364 aa, unidentified
  REGION 1..1364: note = Cas Enzyme sequence
MNSDKRKDYYVGLDMGTGSLGGAVTDTQYHLLKVKGKDFWFVREYETAKSQLDRRTHRIAKRRLQRHKARIGLIRSYFAEDVLKHDPLFYIRQDNSKYYQEDKDARLTTKDSLFADPGYGDKEYHDDKEYPTIFHLRQALLRDQIKDEERYSRFLYLAIINMFEHRGHFLLNTESSDLNADMIKDVGELVMNAICGVSEYGSVTYKEIIEILEDKNISRTAKKDQIASKVDIKKSEKAQMERIKCLCGMEADARVMFELEADEKIKIAFQQAAFEDEKEEIEVAIGEDRYLIIENMKQLYDYSQLQSVLNGFDYLSDARVQMYEKHKEDLHLLKKVYRKNLDREMYDRMFRSGEEGSYCAYSNSTNSVDSLAEAKKYRRNMKKRSQKDLKEVHDAYADAIRKEMELERFLPKQITGANGIIPNQVHRKELKKILENAEHHLDFLKEKDESGYTVSERILMLFSSNIPYYVGPVGSGSKTGWAKIQESGQVLPWNMEQKIDMEQTSERFITNLIRECTYLSGEKVLPKQSLLYESYCVLNEINNLRIHGKRIVPELKQDIYREVFQGARLGKKVTKKNICTYLINRGLITEESEVSGIDKEINAYLPSYGKMYGVFGERLREEAVQEIAEKIIYYGTIYGDAKAMFRKKLNQYVSDGWMTESQAKRVSGYKFKDWARLSRSMLCLSGCDKSTGEKISLIRAMWEHNLNFMELIYSEDFTFQKELEERRKALGKTLQEFQFEDLDEYYYSAPVKRMIWQAVQALKEITQIMGHNPKRIFIEMTRTEEEKGEQGRKNSREKRLLKLYESIRDERNWAAEIKNANASGKLNSKKMYLYYLQMGRDVYTGEPIDIEDLFDDSRYDIDHIYPRSLTNDNNIENNLVLVSKTINQNEKKNDYPVPEKVRTNKKVRDLWHTLHKMGFMNDEKYNRLTSTEHLTDDQLAGFIARQLVETAQGAKGIAELMKAMLPGTDIVYAKARNVSDFRKEYKMLKSRLVNDYHHAQDAYLNIVVGNVYFTKFTRNPVNFVKKEARRDGRNYDYNLYKMYSKDIIRNGEIAWIATSEQGPGTIRLVKETMGRNTPVITRQAFEQQGELFNLQPVGKYSAKKDNYVPLKINDEKVQDVSKYGGYTSLNPSYFIFIEHGPEKKRKKCFEVIQSYYSARIKTEKDLIDFLVQKGYKNPKVINAGIKKNALIKYNGYFLYIIGMDARKNIEFSNATAMCLKNNYIQYVCKLEKMNKAILLSEKQKTNLHWDERITCESNLELYRELTEKHLHSIYQKHPKSIGNCLAEGEGAFKLLDIEQQVKILCDIVQYTSFQRGVFSLKVLGGPKEVGRIRISGNVTEAKECKLINYSITGMYKTEMDLLKK

SEQ ID NO: 20655 - protein, 1372 aa, unidentified
  REGION 1..1372: note = Cas Enzyme sequence
MNSDKRKDYYVGLDMGTGSLGGAVTDTQYHLLKVKEKDFWFVREYETAKSQLDRRTHRIAKRRLQRHKARIGLIRSYFAEDVLKHDPLFYIRQDNSKYYQEDKDARLTTKDSLFADPGYGDKEYHDDKEYPTIFHLRQALLRDQIKDEERYSRFLYLAIINMFEHRGHFLLNTESSDLNADMIKDVGELVMNAICGVSEYGSVTYKEIIEILEDKNISRTAKKDQIASKVDIKKSEKAQMERIKCLCGMEADARVMFELEADEKIKIAFQQAAFEDEKEEIEVAIGEDRYLIIENMKQLYDYSQLQSVLNGFDYLSDARVQMYEKHKEDLHLLKKVYRKNLDREMYDRMFRSGEEGSYCAYSNSTNSVDSLAEAKKYRRNMKKRSQKDLYDRIKKDLKEVHDADADAIRKEMELERFLPKQITGANGIIPNQVHRKELKKILENAEHHLDFLKEKDESGYTVSERILMLFSSNIPYYVGPVGSGSKTGWAKIQESGQVLPWNMEQKIDMEQTSERFITNLIRECTYLSGEKVLPKQSLLYESYCVLNEINNLRIHGKRIVPELKQDIYREVFQGARLGKKVTKKNICTYLINRGLITEESEVSGIDKEINAYLPSYGKMYGVFGERLREEAVQEIAEKIIYYGTIYGDAKAMFRKKLNQYVSDGWMTESQAKRVSGYKFKDWARLSRSMLCLSGCDKSTGEKISLIRAMWEHNLNFMELIYSEDFTFQKELEERRKALGKTLQEFQFEDLDEYYYSAPVKRMIWQAVQALKEITQIMGHNPKRIFIEMTRTEEEKGEQGRKNSREKRLLKLYESIRDERNWAAEIKNANASGKLNSKKMYLYYLQMGRDVYTGEPIDIEDLFDDSRYDIDHIYPRSLTNDNNIENNLVLVSKTINQNEKKNDYPVPEKVRTNKKVRDLWHTLHKMGFMNDEKYNRLTSTEHLTDDQLAGFIARQLVETAQGAKGIAELMKAMLPGTDIVYAKARNVSDFRKEYKMLKSRLVNDYHHAQDAYLNIVVGNVYFTKFTRNPVNFVKKEARRDGRNYDYNLYKMYSKDIIRNGEIAWIATSEQGPGTIRLVKETMGRNTPVITRQAFEQQGELFNLQPVGKYSAKKDNYVPLKINDEKVQDVSKYGGYTSLNPSYFIFIEHGPEKKRKKCFEVIQSYYSARIKTEKDLIDFLVQKGYKNPKVINAGIKKNALIKYNGYFLYIIGMDARKNIEFSNATAMCLKNNYIQYVCKLEKMNKAILLSEKQKTNLHWDERITCESNLELYRELTEKHLHSIYQKHPKSIGNCLAEGEGAFKLLDIEQQVKILCDIVQYTSFQRGVFSLKVLGGPKEVGRIRISGNVTEAKECKLINYSITGMYKTEMDLLKK

SEQ ID NO: 20656 - protein, 1372 aa, unidentified
  REGION 1..1372: note = Cas Enzyme sequence
MNSDKREDYYVGLDMGTGSLGGAVTDTQYHLLKVKGKDFWFVREYESAKSQLDRRTHRIAKRRLQRHKARIGLIRSYFAEDVLKRDPLFYIRQDNSKYYQEDKDVRLTTKDSIFADSGYGDKEYHDDKEYPTIFHLRQALLRDQIKDEERYSRFLYLAIINMFEHRGHFLLNTESSDLNADMIKDVGELVMNAICGVSEYGSVTYKEIIEILEDKNISRTAKKDQIASKIDIKKSEKAQMERIKCLCGMEADARVMFEIEADEKIKIAFQQAAFEDEKEEIEVAIGEDRYLIIENMKQLYDYSQLQSVLNGFDYLSDARVQMYEKHKEDLHLLKKVYRKNLDREMYDRMFRSGEEGSYCAYSNSTNSVDSLAGAKKYRRNMKKRSQKDLYDRIKKDLKEVHDADADAIRKEMELECFLPKQITGANGIIPNQVHRKELKKILENAEHHLDFLKEKDESGYTVSERILMLFSSNIPYYVGPVGSGSKTGWAKIQESGQVLPWNMEQKIDIEQTSECFITNLIRECTYLSGEKVLPKQSLLYESYCVLNEINNLSIHGKRIVPELKQDIYREVFQGSRLGKKVTKKNICAYLINRGLITEESEVSGIDKEINAYLSSYGKMYGVFGERLREEAVQEIAEKTIYYGTIYGDAKSMFRKKLNQYVSEGWMTESQAKRISGYKFKNWARLSRSMLCLSGCDKSTGEKISLIRAMWEYNLNFMELIYSEDFTFQKELEERRKALGKTLQEFQFEDLNEYYYSAPVKRMIWQAVQALKEITQIMGHNPKRIFIEMTRTEEEKGEQGRKNSREKRLLKLYESVRDERNWAAEIKNANASGELNSKKMYLYYLQMGRDVYTGEPIDIEDLFDDSRYDIDHIYPRSLTNDNNIENNLVLVSKTINQNEKKNDYPVPEKVRTNIKVRDLWYKLHKKGFMNDEKYNRLTSTERLSEDQLAGFIARQLVETAQGAKGIAELMKTMLPGTDIVYAKARNVSDFRKEYKMQKSRLVNDYHHAQDAYLNIIVGNVYFMKFTRNPMNFVKKEARRDGRNYDYNLYKMYSKDIIRNGEKAWIATSEQGPGTIRLVKEMMERNTPIITRQAFEQRGELFNLQPVGKYSAKKDNYVPLKINDEKMQDVSKYGGYTSLNPSYFIFIEHGSEKKRKKCFEVIHSYYAAQIKTEKDLIDFLLQKGYKNPRVINARIKKNALIKYNGYFLYIIGMDARKNIEFSNATAMCLKNKYIQYVCKLEKMNKAILLSEKQKKNLHWDERITCESNLELYRELTEKHLHSIYQRHPRSIGKCLADGEGAFKLLDIEEQVKLICDIVQYTSFQRGLFSLQVLGGPKEVGRIRISGDMTEAKECKLVNYSITGMYKTEMDLLKK

SEQ ID NO: 20657 - protein, 1372 aa, unidentified
  REGION 1..1372: note = Cas Enzyme sequence
MNSDKREDYYVGLDMGTGSLGGAVTDTQYHLLKVKGKDFWFVREYETAKSQLDRRTHRIAKRRLQRHKARIGLIRSYFAEDILKHDPLFYIRQDNSKYYQEDKDARLTTKDSLFADPGYGDKEYHDVKEYPTIFHLRQALLRDQIKDEERYSRFLYLAIINMFEHRGHFLLNTESSDLNAYMIKDVGELVMNAICGVSEYGSVTYKEIIEILEDKNISRTAKKDQIASKIDIKKSEKAQMERIKCLCGMEADARVMFEIEADEKIKIAFQQAAFEDEKEEIEAAIGEERYLIIENMKQLYDYSQLQSVLNGFDYLSDARVQMYEKHKEDLHLLKKVYRKNLDREMYNRMFRSGEEGSYCAYSNSTNSVDSLAEAKKYRRNMKKRSQKDLYDRIKKDLKEVHDADVDAIRKEMELERFLPKQITGANGIIPNQVHRKELKKILENAEHHLDFLKEKDESGYTVSERILMLFSSNIPYYVGPVGSGSKTGWAKIKESGQVLPWNMEQKIDIEQTSERFITNLIRECTYLSGEKVLPKQSLLYESYCVLNEINNLRIHGKRIVPELKQDIYKEVFQGSRLGKKVTKKNICTYLINRGLITEESEVSGIDKEINAYLPSYGKMYSVFGERLRKEAVQEIAEKIIYYGTIYGDAKSMFRKKLNQYVSDGWMTEYQVKRISGYKFKDWARLSRSMLCLSGCDKSTGEKISLIRAMWEYNLNFMELIYSEDFTFQKELEERRKALGKTLQEFQFEDLDEYYYSAPVKRMIWQAVQALKEITQIMGHNPKRIFIEMTRTEEEKGEQGRKNSREKRLLKLYESIRDERNWAAEIKNANASGKLNSKKLYLYYLQMGRDVYTGEPIDIEDLFDDSRYDIDHIYPRSLTNDNNIENNLVLVSKTINQNEKKNDYPVPEKVRTNKKIRDLWHTLHKMGFMNDEKYNRLTSTERLSEEQLAGFIARQLVETAQGAKGIAELMKAMLPGTDIVYAKARNVSDFRKEYKMLKSRLVNDYHHAQDAYLNIVVGNVYFTKFTRNPMNFIKKEARRDGRNYDYNLYKMYSKDIIRNGEKAWIATSEQGPGTIRLVKETMGKNTPIITRQTFEQRGELFNLQPVGKYSAKKDNYVPLKINDEKMQDVSKYGGYTSLNPSYFIFIEHGLEKKRKKCFEVIHSYYAAQIKTEKDLIDFLLQKGYKNPRVINARIKKNALIKYNGYFLYIIGMDARKNIEFSNATAMCLKNKYIQYVCKLEKMNKAILLSEKQKTNLHWDEKITCKSNLELYRELTEKHLHSIYQRHPRSIGKCLADGEEAFKLLDIEEQVKIICDIVQYTSFQRGVFSLKVLGGPKEVGRIRISGNMTEAKECKLVNYSITGMYKTEMDLLKK

SEQ ID NO: 20658 - protein, 1340 aa, unidentified
  REGION 1..1340: note = Cas Enzyme sequence
MNSDKREDYYVGLDMGTGSLGGAVTDTQYHLLKVKGKDFWFVREYETAKSQLDRRTHRIAKRRLQRHKARIGLIRSYFAEDILKHDPLFYIRQDNSKYYQEDKDARLTTKDSLFADPGYGDKEYHDVKEYPTIFHLRQALLRDQIKDEERYSRFLYLAIINMFEHRGHFLLNTESSDLNAYMIKDVGELVMNAICGVSEYGSVTYEEIIEILEDKNISRTAKKDQIASKIDIKKSEKAQMERIKCLCGMEADARVMFEIEADEKIKIAFQQAAFEDEKEEIEVAIGEERYLIIENMKQLYDYSQLQSVLNGFDYLSDARVQMYEKHKEDLHLLKKVYRKNLDREMYNRMFRSGEEGSYCAYSNSTNSVDSLAEAKKYRRNMKKRSQKDLYDRIKKDLKEVHDADVDAIRKEMELERFLPKQITGANGIIPNQVHRKELKKILENAEHHLDFLKEKDESGYTVSERILMLFSSNIPYYVGPVGSGSKTGWAKIKESGQVLPWNMEQKIDIEQTSERFITNLIRECTYLSGEKVLPKQSLLYESYCVLNEINNLRIHGKRIVPELKQDIYKEVFQGSRLGKKVTKKNICTYLINRGLITEESEVSGIDKEINAYLPSYGKMYSVFGERLRKEAVQEIAEKIIYYGTIYGDAKSMFRKKLNQYVSGGWMTEYQVKRISGYKFKDWARLSRSMLCLSGCDKSTGEKISLIRAMWEYNLNFMELIYSEDFTFQKELEERRKALGKTLQEFQFEDLDEYYYSAPVKRMIWQAVQALKEITQIMGHNPKRIFIEMTRTEEEKGEQGRKNSREKRLLKLYESIRDERNWAAEIKNANASGKLNSKKLYLYYLQMGRDVYTGEPIDIEDLFDDSRYDIDHIYPRSLTNDNNIENNLVLVSKTINQNEKKNDYPVPEKVRTNKKIRDLWHTLHKMGFMNDEKYNRLTSTERLSEEQLAGFIARQLVETAQGAKGIAELMKAMLPGTDIVYAKARNVSDFRKEYKMLKSRLVNDYHHAQDAYLNIVVGNVYFTKFTRNPMNFIKKEARRDGRNYDYNLYKMYSKDIIRNGEKAWIATSEQGPGTIRLVKETMGKNTPIITRQTFEQRGELFNLQPVGKYSAKKDNYVPLKINDEKMQDVSKYGGYTSLNPSYFIFIEHGLEKKRKKCFEVIHSYYAAQIKTEKDLIDFLLQKGYKNPRVINARIKKNALIKYNGYFLYIIGMDARKNIEFSNATAMCLKNKYIQYVCKLEKMNKAILLSEKQKTNLHWDEKITCKSNLELYRELTEKHLHSIYQRHPRSIGKCLADGEEAFKLLDIEEQVKIICDIVQYTSFQRGVFSLKVLGGPKEVGRI

SEQ ID NO: 20659 - protein, 1372 aa, unidentified
  REGION 1..1372: note = Cas Enzyme sequence
MNSDKREDYYVGLDMGTGSLGGAVTDTQYHLLKVKGKDFWFVREYETAKSQLDRRTHRIAKRRLQRHKARIGLIRSYFAEDILKHDPLFYIRQDNSKYYQEDKDARLTTKDSLFADPGYGDKEYHDVKEYPTIFHLRQALLRDQIKDEERYSRFLYLAIINMFEHRGHFLLNTESSDLNAYMIKDVGELVMNAICGVSEYGSVTYKEIIEILEDKNISRTAKKDQIASKIDIKKSEKAQMERIKCLCGMEADARVMFEIEADEKIKIAFQQAAFEDEKEEIEVAIGEERYLIIENMKQLYDYSQLQSVLNGFDYLSDARVQMYEKHKEDLHLLKKVYRKNLDREMYNRMFRSGEEGSYCAYSNSTNSVDSLAEAKKYRRNMKKRSQKDLYDRIKKDLKEVHDADVDAIRKEMELERFLPKQITGANGIIPNQVHRKELKKILENAEHHLDFLKEKDESGYTVSERILMLFSSNIPYYVGPVGSGSKTGWAKIKESGQVLPWNMEQKIDIEQTSERFITNLIRECTYLSGEKVLPKQSLLYESYCVLNEINNLRIHGKRIVPELKQDIYKEVFQGSRLGKKVTKKNICTYLINRGLITEESEVSGIDKEINAYLPSYGKMYSVFGERLRKEAVQEIAEKIIYYGTIYGDAKAMFRKKLNQYVSDGWMTEYQVKRISGYKFKDWARLSRSMLCLSGCDKSTGEKISLIRAMWEYNLNFMELIYSEDFTFQKELEERRKALGKTLQEFQFEDLDEYYYSAPVKRMIWQAVQALKEITQIMGHNPKRIFIEMTRTEEEKGEQGRKNSREKRLLKLYESIRDERNWAAEIKNANASGKLNSKKLYLYYLQMGRDVYTGEPIDIEDLFDDSRYDIDHIYPRSLTNDNNIENNLVLVSKTINQNEKKNDYPVPEKVRTNKKIRDLWHTLHKMGFMNDEKYNRLTSTERLSEEQLAGFIARQLVETAQGAKGIAELMKAMLPGTDIVYAKARNVSDFRKEYKMLKSRLVNDYHHAQDAYLNIVVGNVYFTKFTRNPMNFIKKEARRDGRNYDYNLYKMYSKDIIRNGEKAWIATSEQGPGTIRLVKETMGKNTPIITRQTFEQRGELFNLQPVGKYSAKKDNYVPLKINDEKMQDVSKYGGYTSLNPSYFIFIEHGLEKKRKKCFEVIHSYYAAQIKTEKDLIDFLLQKGYKNPRVINARIKKNALIKYNGYFLYIIGMDARKNIEFSNATAMCLKNKYIQYVCKLEKMNKAILLSEKQKTNLHWDEKITCKSNLELYRELTEKHLHSIYQRHPRSIGKCLADGEEAFKLLDIEEQVKIICDIVQYTSFQRGVFSLKVLGGPKEVGRIRISGNMTEAKECKLVNYSITGMYKTEMDLLKK

SEQ ID NO: 20660 - protein, 905 aa, unidentified
  REGION 1..905: note = Cas Enzyme sequence
MLFSSNIPYYVGPVGSGSKTGWAKIKESGQVLPWNMEQKIDIEQTSERFITNLIRECTYLSGEKVLPKQSLLYESYCVLNEINNLRIHGKRIVPELKQDIYKEVFQGSRLGKKVTKKNICTYLINRGLITEESEVSGIDKEINAYLPSYGKMYSVFGERLRKEAVQEIAEKIIYYGTIYGDAKAMFRKKLNQYVSDGWMTEYQVKRISGYKFKDWARLSRSMLCLSGCDKSTGEKISLIRAMWEYNLNFMELIYSEDFTFQKELEERRKALGKTLQEFQFEDLDEYYYSAPVKRMIWQAVQALKEITQIMGHNPKRIFIEMTRTEEEKGEQGRKNSREKRLLKLYESIRDERNWAAEIKNANASGKLNSKKLYLYYLQMGRDVYTGEPIDIEDLFDDSRYDIDHIYPRSLTNDNNIENNLVLVSKTINQNEKKNDYPVPEKVRTNKKIRDLWHTLHKMGFMNDEKYNRLTSTERLSEEQLAGFIARQLVETAQGAKGIAELMKAMLPGTDIVYAKARNVSDFRKEYKMLKSRLVNDYHHAQDAYLNIVVGNVYFTKFTRNPMNFIKKEARRDGRNYDYNLYKMYSKDIIRNGEKAWIATSEQGPGTIRLVKETMGKNTPIITRQTFEQRGELFNLQPVGKYSAKKDNYVPLKINDEKMQDVSKYGGYTSLNPSYFIFIEHGLEKKRKKCFEVIHSYYAAQIKTEKDLIDFLLQKGYKNPRVINARIKKNALIKYNGYFLYIIGMDARKNIEFSNATAMCLKNKYIQYVCKLEKMNKAILLSEKQKTNLHWDEKITCKSNLELYRELTEKHLHSIYQRHPRSIGKCLADGEEAFKLLDIEEQVKIICDIVQYTSFQRGVFSLKVLGGPKEVGRIRISGNMTEAKECKLVNYSITGMYKTEMDLLKK

SEQ ID NO: 20661 - protein, 1372 aa, unidentified
  REGION 1..1372: note = Cas Enzyme sequence
MNSDKREDYYVGLDMGTGSLGGAVTDTQYHLLKVKGKDFWFVREYETAKSQLDRRTHRIAKRRLQRHKARIGLIRSYFAEDILKHDPLFYIRQDNSKYYQEDKDARLTTKDSLFADPGYGDKEYHDVKEYPTIFHLRQALLRDQIKDEERYSRFLYLAIINMFEHRGHFLLNTESSDLNAYMIKDVGELVMNAICGVSEYGSVTYEEIIEILEDKNISRTAKKDQIASKIDIKKSEKAQMERIKCLCGMEADARVMFEIEADEKIKIAFQQAAFEDEKEEIEVAIGEERYLIIENMKQLYDYSQLQSVLNGFDYLSDARVQMYEKHKEDLHLLKKVYRKNLDREMYNRMFRSGEEESYCAYSNSTNSVDSLAEAKKYRRNMKKRSQKDLYDRIKKDLKEVHDADVDAIRKEMELERFLPKQITGANGIIPNQVHRKELKKILENAEHHLDFLKEKDESGYTVSERILMLFSSNIPYYVGPVGSGSKTGWAKIKESGQVLPWNMEQKIDIEQTSERFITNLIRECTYLSGEKVLPKQSLLYESYCVLNEINNLRIHGKRIVPELKQDIYKEVFQGSRLGKKVTKKNICTYLINRGLITEESEVSGIDKEINAYLPSYGKMYGVFGERLREEAVQEIAEKIIYYGTIYGDAKSMFRKKLNQYVSDGWMTEYQVKRISGYKFKDWARLSRSMLCLSGCDKSTGEEISLIRAMWEYNLNFMELIYSEDFTFQKELEERRKALGKTLQEFQFEDLDEYYYSAPVKRMIWQAVQALKEITQIMGHNPKRIFIEMTRTEEEKGEQGRKNSREKRLLKLYESIRDERNWAAEIKNANASGKLNSKKLYLYYLQMGRDVYTGEPIDIEDLFDDSRYDIDHIYPRSLTNDNNIENNLVLVSKTINQNEKKNDYPVPEKVRTNKKIRDLWHTLHKMGFMNDEKYNRLTSTERLSEEQLAGFIARQLVETAQGAKGIAELMKAMLPGTDIVYAKARNVSDFRKEYKMLKSRLVNDYHHAQDAYLNIVVGNVYFTKFTRNPMNFIKKEARRDGRNYDYNLYKMYSKDIIRNGEKAWIATSEQGPGTIRLVKETMGKNTPIITRQTFEQRGELFNLQPVGKYSAKKDNYVPLKINDEKMQDVSKYGGYTSLNPSYFIFIEHGLEKKRKKCFEVIHSYYAAQIKTEKDLIDFLLQKGYKNPRVINARIKKNALIKYNGYFLYIIGMDARKNIEFSNATAMCLKNKYIQYVCKLEKMNKAILLSEKQKTNLHWDEKITCKSNLELYRELTEKHLHSIYQRHPRSIGKCLADGEEAFKLLDIEEQVKIICDIVQYTSFQRGVFSLKVLGGPKEVGRIRISGNMTEAKECKLVNYSITGMYKTEMDLLKK

SEQ ID NO: 20662 - protein, 1357 aa, unidentified
  REGION 1..1357: note = Cas Enzyme sequence
MKKFYLGMDIGTESVGMACTDENYNLLRAKGKDLWAVRLFDEAKDASERRIKRTARRRLQRRRQRVEFLQGIFAPFMEDELFFIRLNNSGFFEEDKDERLSSQFSLFNEKDYTDIDFYREYPTIFHLRQRLCCGERADLRHYYLALHHIIKYRGHFLFEGEDVNGIRDIKKLFENYNNAVEEIEMDDLYLLVEKAEEFRSLAMERKGLNDKKKAIVKLFNATSPQLKEMLALLIGAKAKMSVIFGEEYEEKYKDEKISFKEIDDDAFEQKSEIFEEEQFAILKRAREIYNFIVLEKVLEGKGTISEAMVALYDKHAEDLKLLKKLVKQNYSKETYYKIFRSLKESANYVNYVGYNKNKGKKINASKKCKKDEFYAFLKKNLTEIQGEGAEILNYVKAEIENGTFLPKILNADNGLFPHQINGMELDLILQNLAKNYPEFADKDDSGFTACEKIKKTFLFKIPYYIGPLNTAHENGGRGNSWMRRKEGKIERITPWDFDEIVDKAASNEQFIRRMTNKCTYLHNQDVLPKGSMYYQAFNTLNQINKIKLDTVPISVELKQELFHNLFLKNKKISVKQIREYLVLSGRCTLAEAKELSIGGFDTEIGLNATMSSYRLFADKFGAMVDENPEIFENIILWHTLNTDKGIVENLIKQKYGTIPQIKENIKWLKGLTSFKEFGRLSKKLLDGIIGGIDPATGEAYTVLNRLYNTNYNFMQIMEVYEFAKAVEEENSGLKEEITYEDVASLYVSPMVRRGIWQSLIMADEYVKAVGKAPDKIFIEVTRRDEEKKRTISRKNSLLALYDQIGEDCANIDELVKELNCDEITDSKLRQERLYLYFLQLGRCAYTGERIELNQLATDLYDVDHIVPQSITKDDGIDNKVLVKRVKNAQKTDIYPLPLGFTNQQSFWKLLKIKGLMSENKYAKLTRVEPLTEDDFREFTNRQLVVTNQTVKAVAELLKAKYGAFGTKIVYSKAIHVDEFKQKNEIIKCRETNDLHHARDAYLNVVVGNVYDTKFTSAMDYYYRKADDSWREYNLKTLFYRPIEGAWAGSEDINRIKKIVAKTSMSVTRYAVTNHGAFYNETVYKKDDNATYPRKGKAPYDQTEKYGGFKSPATAYFAIVKSKDKKNNVIKTIEAIPVMVDYAVKNNQNAIIEYLHGMGLIEPEIIVPKIKIKSLVSINGYKVWLAGMTGKQILIHNAQQWFTNSNTDLYVKQLIKLIERDRAGRLSILEKEQEQIPLMSNRFNDNLYATKESNLQLYDAIIKTLNKNIYQGLSSVKSFALKIGEKRDLFIALTTFNQIKVLLQIIRFMKCNAECADLTLLEDGATCGKLLIGKNITDVEFAIIHQSACGLTERVQKI

SEQ ID NO: 20663 - protein, 1355 aa, unidentified
  REGION 1..1355: note = Cas Enzyme sequence
MKKFYLGMDIGTDSVGIAGTDENYNLLRARGKDLWAVRLFDEAKDASARRMKRTARRRLQRRKQRIEWLQELFAPYIEDKCFFLRLNNSGFEKEDKHESLQSQYSLFADAGYTDREFYKKYPTIFHLRRALAERASEEKTDLRLYYLALHHIVKYRGHFLFEGDSISDIRDIKKLFEEFNAVAEDIFPEGDIRLPLEKAEAFRALALSAKGIRDKKKTGEELFETNSPALAELVGLLLGAKAKIGVIFGEEYGEYKEEKLSFKEILDEDFEAKQELYGDNYPLLEAARSIYNYFVFEKILDGNHCISAAMVAVYERHRRDLRLLKNFVKTQFSKEIYYKIFRSEKEAANYCNYISYTKTEKKKIFVKKCKYGDFCKFLKKTLTENRDCVKDKKTLDDILFKIENGDFLPKILNADNGLFPHQINGAELDKILANLCKEYPCFAEKEADGFSVAEKIRKIFLFKIPYYVGPLNNYHEENGNSWVVRKSGKITPWNFEDMVDTASSNEKFIRRMTNKCSYLYGKDVLPKCSMYYQAFDVLNQLNKIKFNEQPISVEMKQELFHSLFLRHRKVTKKLIKEYLTATGKYTSAEAKELSVSGFDGELKANMGAYITLKNCLGDYVDEHPETCENIILWHTLNTDKTIVERQILSHYGDVPVIKEKIKALKGITSFKEFGRLSKELLCELIGGEDPVTREVYTILNRLYHTNFNFNELLFSDTYRFNSAIEAMNAGKDGDVGYDDVKELYVSPMVRRGIWQALTMADEYVQAVGRVPDKIFIEVTRQGDEKKKPTVSRKNQLLENYKGLGQDCRNIDELLTELNDKTDSQLRQERLYLYFKQLGRCAYTGQLIRLEELNGDLYDVDHIMPRSITKDDSLENKVLVRREKNAQKSDEYPLPAGFTDQQRFWKLLRDKGLMSEKKYALLTRTKPLTEDDFRDFINRQLVVTNQTVKAVAELLKRKYGEKGTRIVYSKAKNVDGFKNQYDIVKCRETNDLHHARDAYLNIVVGNVYDTKFTSAYDYYYRKGDAWREYNLKTLFERPVKDAWIGREGIAFVKDVLRKPSMLITRYAYINKGEFYNETIYGKDDKGISAPRKSIEPYNKTEKYGGYKSLTTAYFSVVESKDKKGKLIKTVEAIPVLADYQSKGDREAVLAYLSRMGLREPKLLLPKIKIKSLVSVNGFKVWLAGVTGNRLIIHNAQQWFTDEKTDLYIKNLGKLVEWERTGKIAEEEKARETFSMIKNRKEEVSLLIDRSQNVALYREIVAKLQTKLYRGLSAARSFAEKLSAKEEIFVSLSVLEQAKVLLQIARFMKCNAEAADLSLLKDGAACGILLIGKNITDVDFAVIHQSPCGINTYIQRV

SEQ ID NO: 20664 - protein, 1362 aa, unidentified
  REGION 1..1362: note = Cas Enzyme sequence
MSKVIDFDKANNKSKSRDIRKNTEYFIGLDIGTSSVGWAVTNTKYKVIKFNGKKMWGSRLFAEASTAEERRVHRTNRRRLQRRVDRINLLEEIFSEEMSKVDPEFFIRLKESKFHLEDKVIDEKNIIFKEKEDGDKKFYEKYPTIYHLRHALIEGCDDIDIRELYMAVHHIIKYRGHFLFKGDISDSGSSINDKIVEIIDFMSSVADMKRLEYNDNLINEIRNIVSNRDKTINDKKKDLNKVFGGNDYKAYKSIFSLAVGASVKPYDIFLEEEYKDLDDVKSMSFKNTEYEEVRDTYEQAFEDRIILIDAAKSLYDMIVLLSIKPEGKGLSENKVDIYNKHHEDLEILKEVLRKDKDLYNRVLRDDKKDGTNYVNYIKKSKYGKGCSREDFYKLVKKALGELESNEKIEYILSEIELERFLSLQRLKENSVIPYQIHRDELKKILANASSKFEFLNKESEGYSNIEKIIKLMEFRIPYYVGPLNNHHSVDNKEKQGFSWVVRKGPGRVKPWNFDQLVDKEASAEKFIKNLTNKCTYLIGEDVLPKESLLYSEYCLLNELNNIMYDGKKLSLEVKNDLIEKVYKKEKKKLTKKGIKDFLKHNNYADGKGEVTGIDIDIKSDLKSYRDMVKIFGAGFNHKMAEDIIRWVTLFGESKELLLSKVKNSYGNMVDAKQLKMITKLRYKDWGKFSGEFLTEIRSDILIDQSTGQGQSIIEAMRTRDHVLMELLRNEYDFSKKVEDINREKQKNISEISHDLLDDLYCSPAVKRSLWQTICIVEEIKKIMGHEPKKIFVEVTRTNKAEKKRTDSRKKRLLELYKNIQDDARSWIDEIEKTEDSKFNSKKLYLYYTQMGKCMYTGNSIDIESLFTDMYDIDHIFPRSKTKDNSFENLVLVTRKANEDKGDIYPVDSSIQNGRISLWRSLHEKKLIGDKKFERLTRNYGFTDEELSRFIARQLVETSQASKAAAEMLNMINEGSEIVYVKAENVSEFRHDNEFIKVREVNDHHHAKDAYLNIVVGNVYNEKFTKNPYNFIKDGGRKYSLNKVFDFAFSKGGRTIWDPAVSMDTVNRMMRSNDVRVTKKVIEQKGALYDATIYKASIAKEESYFPLKLGDERLRNVTKYGGYTSIKIAYYTIVSYDEIGGKKRESFVRIVPIPIYVSESAHKFDEIENYAYNYVINKSKKSIENFKLIYKRLYLNSVIELNGFKYYVGGKTNEKIYIDSAIDLILDKDNTKCLTKIVKFYKSDFKKMDEEYVNFDNNMKLFDYLVSKKSTLYYINKKSNKLDEFRKENTLNKFRELLLEDQCIVLLEILNTLTDKKTTYDLKKIDISVSRSTVGMKLNENMRLKVINQSITGLFENVIDILG

SEQ ID NO: 20665 - protein, 1360 aa, unidentified
  REGION 1..1360: note = Cas Enzyme sequence
MKEINEYYLGLDMGEGSLGWAVTTPDYHVVKKAGKALWGVRLFESAKTAKERRVFRTGRRRIERRNRRIDFLQELFSEAVCEKDPGFYQRLNDSRLWEEDKTERQINSLFNDVDFTDKSYHKKFPTIYHLRQKLMEDSCEFDVRLVYLAIHHILKHRGHFLLENFEIREDGAVGFEEAMADLGNVLGQFLDRSLPVENNDACKEILKNRKLNKLEKLEQLGKLYDAGGDKSIKEIFRLIVGGTAHLAVIFCDETLKNTERGKISFEDAQYEEYKNDVQTILDDRFDVVAACETLHNWAILAELMGNYKYISDAKVAIFNEHRKDLTVLKRLLKRDSNVYTKMFRMAGKNSYSAYVGLCKIHGKKVPIEKACTQGDFAGEIKKIIKNFPDSEDKKYILDKIERNELLPKAVSKQNGVIPYQLHLVELNKILSNAERYLPFLKKEDEYGTVSDKIRKLFTFRIPYYVGPLNGHSPFAWAVRKDENGHIYPWNFERKIDIEASAEEFIRRMTNKCTYLVKKDVLPKNSLLYTEFMVLNELNNVRIGSAQEKLPPGMKARVWERLFLKDKKITAKKMCSYLIREEHISKEEAAQISGIERDFKASLAPWIDMRKILGDNFTVSDSEKIIKDITLFGADKKMLRRRLKARFGYLEDCQVKELVRLPYQGWGRLSKEFLTQILPKAERDSTVLVDQETGEVMNIITALKKTDHNLMELLSGKFGYSAALSEVNTTSVSVCDKAISYKNIQDMRISPAVKRPLWQTLRVIKEIIHIMGKAPSRIFIEMARAEDEKKWKTVSRKDRLLDLYKKCKDEIRNWSADIKKLGEEIKELSDGQLRSDKLYLYYTQMGRSMYTGKPICLGSLMAGADYDIDHIYPRSATGDDSLDNRVLVERTENAKKGDHYPLSIEIQGGRAVFWKVLLDKGFISKEKYRRLTRKTLLTDDEKAGFIGRQLVETRQSTKAIAEILKKAFPETKIIYTKARNVSRFRQYAEFVKVRDMNDYHHAKDAYLNIVVGNAFYTKFTSNPIHFLSERNAVYSLNERTFYQFPIQRGSTMAWEPGDSGTMAVVRKWMDKNNILYTRMPFEEKGGLFDQNILKKGKGQVSLRARGALSDIQKYGGYNNATASYFMLVKAEKNGKIIYLLETVPLHLSGRLESIEDKINFCRELWHRDRKDYKNPVICIPKIYKQSLFEVDGFREHISAKTGNQFVMRNAEQLCLNAESAQIIKNVLKFNQRKQVQKELKVTVHDKITEENLINIFETFISKIQTSIYRNKFEASVGLMIKGKGTFIELSMEDKCKCIGEILHLFQCNPVLSDLQLIGGKKASGRIYMGKRFDGNKKVFLVLQSVTGFFEKKILLAPYEKK

SEQ ID NO: 20666 - protein, 1363 aa, unidentified
  REGION 1..1363: note = Cas Enzyme sequence
MSIMKEINEYYLGLDMGEGSLGWAVTTPDYHVVKKAGKALWGVRLFESAKTAKERRVFRTGRRRIERRNRRIDFLQELFSEAVCEKDPGFYQRLNDSRLWEEDKTERQINSLFNDVDFTDKSYHKKFPTIYHLRQKLMEDSCEFDVRLVYLAIHHILKHRGHFLLENFEIREDGAVGFEEAMADLGNVLGQFLDRSLPVENNDACKEILKNRKLNKLEKLEQLGKLYDAGGDKSIKEIFRLIVGGTAHLAVIFCDETLKNTERGKISFEDAQYEEYKNDVQTILDDRFDVVAACETLHNWAILAELMGNYKYISDAKVAIFNEHRKDLTVLKRLLKRDSNVYTKMFRMAGKNSYSAYVGLCKIHGKKVPIEKACTQGDFAGEIKKIIKNFPDSEDKKYILDKIERNELLPKAVSKQNGVIPYQLHLVELNKILSNAERYLPFLKKEDEYGTVSDKIRKLFTFRIPYYVGPLNGHSPFAWAVRKDENGHIYPWNFERKIDIEASAEEFIRRMTNKCTYLVKKDVLPKNSLLYTEFMVLNELNNVRIGSAQEKLPPGMKARVWERLFLKDKKITAKKMCSYLIREEHISKEEAAQISGIERDFKASLAPWIDMRKILGDNFTVSDSEKIIKDITLFGADKKMLRRRLKARFGYLEDCQVKELVRLPYQGWGRLSKEFLTQILPKAERDSTVLVDQETGEVMNIITALKKTDHNLMELLSGKFGYSAALSEVNTTSVSVCDKAISYKNIQDMRISPAVKRPLWQTLRVIKEIIHIMGKAPSRIFIEMARAEDEKKWKTVSRKDRLLDLYKKCKDEIRNWSADIKKLGEEIKELSDGQLRSDKLYLYYTQMGRSMYTGKPICLGSLMAGADYDIDHIYPRSATGDDSLDNRVLVERTENAKKGDHYPLSIEIQGGRAVFWKVLLDKGFISKEKYRRLTRKTLLTDDEKAGFIGRQLVETRQSTKAIAEILKKAFPETKIIYTKARNVSRFRQYAEFVKVRDMNDYHHAKDAYLNIVVGNAFYTKFTSNPIHFLSERNAVYSLNERTFYQFPIQRGSTMAWEPGDSGTMAVVRKWMDKNNILYTRMPFEEKGGLFDQNILKKGKGQVSLRARGALSDIQKYGGYNNATASYFMLVKAEKNGKTIYLLETVPLHLSGRLESIEDKINFCRELWHRDRKDYKNPVICIPKIYKQSLFEVDGFREHISAKTGNQFVMRNAEQLCLNAESAQIIKNVLKFNQRKQVQKELKVTVHDKITEENLINIFETFISKIQTSIYRNKFEASVGLMIKGKGTFIELSMEDKCKCIGEILHLFQCNPVLSDLQLIGGKKASGRIYMGKRFDGNKKVFLVLQSVTGFFEKKILLAPYEKK

SEQ ID NO: 20667 - protein, 1363 aa, unidentified
  REGION 1..1363: note = Cas Enzyme sequence
MSIMKEINEYYLGLDMGEGSLGWAVTTPDYHVVKKAGKALWGVRLFESAKTAKERRVFRTGRRRIERRNRRIDFLQELFSEAVCEKDPGFYQRLNDSRLWEEDKTERQINSLFNDVDFTDKSYHKKFPTIYHLRQKLMEDSCEFDVRLVYLAIHHILKHRGHFLLENFEIREDGAVGFEEAMADLGNVLGQFLDRSLPVENNDACKEILKNRKLNKLEKLEQLGKLYDAGGDKSIKEIFRLIVGGTAHLAVIFCDETLKNTERGKISFEDAQYEEYKNDVQTILDDRFDVVAACETLHNWAILAELMGNYKYISDAKVAIFNEHRKDLTVLKRLLKRDSNVYTKMFRMAGKNSYSAYVGLCKIHGKKVPIEKACTQGDFAGEIKKIIKNFPDSEDKKYILDKIERNELLPKAVSKQNGVIPYQLHLVELNKILSNAERYLPFLKKEDEYGTVSDKIRKLFTFRIPYYVGPLNGHSPFAWAVRKDENGHIYPWNFERKIDIEASAEEFIRRMTNKCTYLVKKDVLPKNSLLYTEFMVLNELNNVRIGSAQEKLPPGMKARVWERLFLKDKKITAKKMCSYLIREEHISKEEAAQISGIERDFKASLAPWIDMRKILGDNFTVSDSEKIIKDITLFGADKKMLRRRLKARFGYLEDCQVKELVRLPYQGWGRLSKEFLTQILPKAERDSTVLVDQETGEVMNIITALKKTDHNLMELLSGKFGYSAALSEVNTTSVSVCDKAISYKNIQDMRISPAVKRPLWQTLRVIKEIIHIMGKAPSRIFIEMARAEDEKKWKTVSRKDRLLDLYKKCKDEIRNWSADIKKLGEEIKELSDGQLRSDKLYLYYTQMGRSMYTGKPICLGSLMAGADYDIDHIYPRSATGDDSLDNRVLVERTENAKKGDHYPLSIEIQGGRAVFWKVLLDKGFISKEKYRRLTRKTLLTDDEKAGFIGRQLVETRQSTKAIAEILKKAFPETKIIYTKARNVSRFRQYAEFVKVRDMNDYHHAKDAYLNIVVGNAFYTKFTSNPIHFLSERNAVYSLNERTFYQFPIQRGSTMAWEPGDSGTMAVVRKWMDKNNILYTRMPFEEKGGLFDQNILKKGKGQVSLRARGALSDIQKYGGYNNATASYFMLVKAEKNGKIIYLLETVPLHLSGRLESIEDKINFCRELWHRDRKDYKNPVICIPKIYKQSLFEVDGFREHISAKTGNQFVMRNAEQLCLNAESAQIIKNVLKFNQRKQVQKELKVTVHDKITEENLINIFETFISKIQTSIYRNKFEASVGLMIKGKGTFIELSMEDKCKCIGEILHLFQCNPVLSDLQLIGGKKASGRIYMGKRFDGNKKVFLVLQSVTGFFEKKILLAPYEKK

SEQ ID NO: 20668 - protein, 1363 aa, unidentified
  REGION 1..1363: note = Cas Enzyme sequence
MSIMKEINEYYLGLDMGEGSLGWAVTTPDYHVVKKAGKALWGVRLFELAKTAKERRVFRTGRRRIERRNQRIDFLQELFSEAVCEKDPGFYQRLNDSRLWEEDKTERQINSLFNDVDFTDKSYHKKFPTIYHLRQKLMDDSCEFDVRLVYLAIHHILKHRGHFLLENFEIREDGAVGFEEAMADLGNVLGQFLDRSLPVENNDACKEILKNRKLNKLEKLEQLGKLYDAGGDKSIKEIFRLIVGGTAHLAVIFCDETLKNTGRGKISFEDAQYEEYKNDVQTILDDRFDVVAACETLHNWAILAELMGNYKYISDAKVAIFNEHRKDLTVLKRLLKRDSNVYTKMFRMAGKNSYSAYVGLCKIHGKKVPIEKACTQGDFAGEIKKIIKNFPDSEDKKYILDKIERNELLPKAVSKQNGVIPYQLHLVELNKILSNAERYLPFLKKEDEYGTVSDKIRKLFTFRIPYYVGPLNGHSPFAWAVRKDGNGHIYPWNFERKIDIEASAEEFIRRMTNKCTYFVKKDVLPKNSLLYTEFMVLNELNNVRIGSAQEKLPPGMKARVWERLFLKDKKITAKKMCSYLIREEHISKEEAAQISGIERDFKASLAPWIDMRKILGDNFTVSDSEKIIKDITLFGADKKMLRRRLKARFGYLEDCQVKELVRLPYQGWGRLSKEFLTQILPKAERDSTVLVDQETGEVMNIITALKKTDHNLMELLSGKFGYSAALSEVNTTSVSVCDKAISYKNIQDMRISPAVKRPLWQTLRVIKEIIHIMGKAPSRIFIEMARAEDEKKWKTVSRKDRLLDLYKKCKDEIRNWSADIKKLGEEIKELSDGQLRSDKLYLYYTQMGRSMYTGKPICLGSLMAGADYDIDHIYPRSATGDDSLDNRVLVERTENAKKGDHYPLSIEIQGGRAVFWKVLLDKGFISKEKYRRLTRKTLLTDDEKAGFIGRQLVETRQSTKAIAEILKKAFPETKIIYTKARNVSRFRQYAEFVKVRDMNDYHHAKDAYLNIVVGNAFYTKFTSNPIHFLSEKNAVYSLNERTFYQFPIQRGSTMAWEPGDSGTMAVVRKWMDKNNILYTRMPFEEKGGLFDQNILKKGKGQVSLRARGALSDIQKYGGYNNATASYFMLVKAEKNGKTIYLLETVPLHLSGRLESIEDKINFCRELWHRDRKDYKNPVICIPKIYKQSLFEVDGFREHISAKTGNQFVMRNAEQLCLNAESAQIIKNVLKFNQRKQVQKELKITVHDKITEENLINIFETFISKIQTSIYRNKFEASVGLMIKGKGTFIELSMEDKCKCIGEILHLFQCNPVLSDLQLIGGKKASGRIYMGKRFDGNKKVFLVLQSVTGFFEKKILLAPYEKK

SEQ ID NO: 20669 - protein, 1360 aa, unidentified
  REGION 1..1360: note = Cas Enzyme sequence
MKEINEYYLGLDMGEGSLGWAVTTPDYHVVKKAGKALWGVRLFESAKTAKERRVFRTGRRRIERRNRRIDFLQELFSEAVCEKDPGFYQRLNDSRLWEEDKTERQINSLFNDVDFTDKSYHKKFPTIYHLRQKLMEDSCEFDVRLVYLAIHHILKHRGHFLLENFEIREDGAVGFEEAMADLGNVLGQFLDRSLPVENNDACKEILKNRKLNKLEKLEQLGKLYDAGGDKSIKEIFRLIVGGTAHLAVIFCDETLKNTERGKISFEDAQYEEYKNDVQTILDDRFDVVAACETLHNWAILAELMGNYKYISDAKVAIFNEHRKDLTVLKRLLKRDSNVYTKMFRMAGKNSYSAYVGLCKIHGKKVPIEKACTQGDFAGEIKKIIKNFPDSEDKKYILDKIERNELLPKAVSKQNGVIPYQLHLVELNKILSNAERYLPFLKKEDEYGTVSDKIRKLFTFRIPYYVGPLNGHSPFAWAVRKDENGHIYPWNFERKIDIEASAEEFIRRMTNKCTYLVKKDVLPKNSLLYTEFMVLNELNNVRIGSAQEKLPPGMKARVWERLFLKDKKITAKKMCSYLIREEHISKEEAAQISGIERDFKASLAPWIDMRKILGDNFTVSDSEKIIKDITLFGADKKMLRRRLKARFGYLEDCQVKELVRLPYQGWGRLSKEFLTQILPKAERDSTVLVDQETGEVMNIITALKKTDHNLMELLSGKFGYSAALSEVNTTSVSVCDKAISYKNIQDMRISPAVKRPLWQTLRVIKEIIHIMGKAPSRIFIEMARAEDEKKWKTVSRKDRLLDLYKKCKDEIRNWSADIKKLGEEIKELSDGQLRSDKLYLYYTQMGRSMYTGKPICLGSLMAGADYDIDHIYPRSATGDDSLDNRVLVERTENAKKGDHYPLSIEIQGGRAVFWKVLLDKGFISKEKYRRLTRKTLLTDDEKAGFIGRQLVETRQSTKAIAEILKKAFPETKIIYTKARNVSRFRQYAEFVKVRDMNDYHHAKDAYLNIVVGNAFYTKFTSNPIHFLSERNAVYSLNERTFYQFPIQRGSTMAWEPGDSGTMAVVRKWMDKNNILYTRMPFEEKGGLFDQNILKKGKGQVSLRARGALSDIQKYGGYNNATASYFMLVKAEKNGKTIYLLETVPLHLSGRLESIEDKINFCRELWHRDRKDYKNPVICIPKIYKQSLFEVDGFREHISAKTGNQFVMRNAEQLCLNAESAQIIKNVLKFNQRKQVQKELKVTVHDKITEENLINIFETFISKIQTSIYRNKFEASVGLMIKGKGTFIELSMEDKCKCIGEILHLFQCNPVLSDLQLIGGKKASGRIYMGKRFDGNKKVFLVLQSVTGFFEKKILLAPYEKK

SEQ ID NO: 20670 - protein, 1360 aa, unidentified
  REGION 1..1360: note = Cas Enzyme sequence
MKEINEYYLGLDMGEGSLGWAVTTPDYHVVKKAGKALWGVRLFESAKTAKERRVFRTGRRRIERRNRRIDFLQELFSEAVCEKDPGFYQRLNDSRLWEEDKTERQINSLFNDVDFTDKSYHKKFPTIYHLRQKLMEDSCEFDVRLVYLAIHHILKHRGHFLLENFEIREDGAVGFEEAMADLGNVLGQFLDRSLPEENNDACKEILKNRKLNKLEKLEQLGKLYDAGGDKSIKEIFRLIVGGTAHLAVIFCDETLKNTERGKISFEDAQYEEYKNDVQTILDDRFDVVAACETLHNWAILAELMGNYKYISDAKVAIFNEHRKDLTVLKRLLKRDSNVYTKMFRMAGKNSYSAYVGLCKIHGKKVPIEKACTQGDFAGEIKKIIKNFPDSEDKKYILDKIERNELLPKAVSKQNGVIPYQLHLVELNKILSNAERYLPFLKKEDEYGTVSDKIRKLFTFRIPYYVGPLNGHSSFAWAVRKDENGHIYPWNFERKIDIEASAEEFIRRMTNKCTYLVKKDVLPKNSLLYTEFMVLNELNNVRIGSAQEKLPPGMKVRVWERLFLKDKKITAKKMCSYLIREEHISKEEAAQISGIERDFKASLAPWIDMRKILGDNFTVSDSEKIIKDITLFGADKKMLRRRLKARFGYLEDCQVKELVRLPYQGWGRLSKEFLTQILPKAERDSTVLVDQETGEVMNIITALKKTDHNLMELLSGKFGYSAALSEVNTTSVSVCDKAISYKNIQDMHISPAVKRPLWQTLRVIKEIIHIMGKAPSRIFIEMARAEDEKKWKTVSRKDRLLDLYKKCKDEIRNWSADIKKLGEEIEELSDGQLRSDKLYLYYTQMGRSMYTGKPICLGSLMAGADYDIDHIYPRSATGDDSLDNRVLVERTENAKKGDHYPLSIEIQGGRAVFWKVLLDKGFISKEKYRRLTRKTLLTDDEKAGFIGRQLVETRQSTKAIAEILKKAFPETKIIYTKARNVSRFRQYAEFVKVRDMNDYHHAKDAYLNIVVGNAFYTKFTSNPIHFLSERNAVYSLNERTFYQFPIQRGSTMAWEPGDSGTMAVVRKWMDKNNILYTRMPFEEKGGLFDQNILKKGKGQVSLRACGALSDIQKYGGYNNATASYFMLVKAEKNGKTIYLLETVPLHLSGRLESIEDKINFCRELWHRDRKDYKNPVICIPKIYKQSLFEVDGFREHISAKTGNQFVMRNAEQLCLNAESAQIIKNVLKFNQRKQVQKELKITVHDKITEENLINIFETFISKIQTSIYRNKFEASVGLMIKGKGTFIELSMEDKCKCIGEILHLFQCNPVLSDLQLIGGKKASGRIYMGKRFDGNKKVFLVLQSVTGFFEKKILLAPYEKK

SEQ ID NO: 20671 - protein, 1360 aa, unidentified
  REGION 1..1360: note = Cas Enzyme sequence
MKEINEYYLGLDMGEGSLGWAVTTPDYHVVKKAGKALWGVRLFELAKTAKERRVFRTGRRRIERRNQRIDFLQELFSEAVCEKDPGFYQRLNDSRLWEEDKTERQINSLFNDVDFTDKSYHKKFPTIYHLRQKLMDDSCEFDVRLVYLAIHHILKHRGHFLLENFEIREDGAVGFEEAMADLGNVLGQFLDRSLPVENNDACKEILKNRKLNKLEKLEQLGKLYDAGGDKSIKEIFRLIVGGTAHLAVIFCDETLKNTERGKISFEDAQYEEYKNDVQTILDDRFDVVAACETLHNWAILAELMGNYKYISDAKVAIFNEHRKDLTVLKRLLKRDSNVYTKMFRMAGKNSYSAYVGLCKIHGKKVPIEKACTQGDFAGEIKKIIKNFPDSEDKKYILDKIERNELLPKAVSKQNGVIPYQLHLVELNKILSNAERYLPFLKKEDEYGTVSDKIRKLFTFRIPYYVGPLNGHSPFAWAVRKDGNGHIYPWNFERKIDIEASAEEFIRRMTNKCTYFVKKDVLPKNSLLYTEFMVLNELNNVRIGSAQEKLPPGMKARVWERLFLKDKKITAKKMCSYLIREEHISKEEAAQISGIERDFKASLAPWIDMRKILGDNFTVSDSEKIIKDITLFGADKKMLRRRLKARFGYLEDCQVKELVRLPYQGWGRLSKEFLTQILPKAERDSTVLVDQETGEVMNIITALKKTDHNLMELLSGKFGYSAALSEVNTTSVSVCDKAISYKNIQDMRISPAVKRPLWQTLRVIKEIIHIMGKAPSRIFIEMARAEDEKKWKTVSRKDRLLDLYKKCKDEIRNWSADIKKLGEEIKELSDGQLRSDKLYLYYTQMGCSMYTGKPICLGSLMAGADYDIDHIYPRSATGDDSLDNRVLVERTENAKKGDHYPLSIEIQGGRAVFWKVLLDKGFISKEKYRRLTRKTLLTDDEKAGFIGRQLVETRQSTKAIAEILKKAFPETKIIYTKARNVSRFRQYAEFVKVRDMNDYHHAKDAYLNIVVGNAFYTKFTSNPIHFLSEKNAVYSLNERTFYQFPIQRGSTMAWEPGDSGTMAVVRKWMDKNNILYTRMPFEEKGGLFDQNILKKGKGQVSLRARGALSDIQKYGGYNNATASYFMLVKAEKNGKTIYLLETVPLHLSGRLESIEDKINFCRELWHRDRKDYKNPVICIPKIYKQSLFEVDGFREHISAKTGNQFVMRNAEQLCLNAESAQIIKNVLKFNQRKQVQKELKITVHDKITEENLINIFETFISKIQTSIYRNKFEASVGLMIKGKGTFIELSMEDKCKCIGEILHLFQCNPVLSDLQLIGGKKASGRIYMGKRFDGNKKVFLVLQSVTGFFEKKILLAPYEKK

SEQ ID NO: 20672 - protein, 990 aa, unidentified
  REGION 1..990: note = Cas Enzyme sequence
MYTRGFCRGNKKIIKNFPDSEDKKYILDKIERNELLPKAVSKQNGVIPYQLHLVELNKILSNAERYLPFLKKEDEYGTVSDKIRKLFTFRIPYYVGPLNGHSSFAWAVRKDENGHIYPWNFERKIDIEASAEEFIRRMTNKCTYLVKKDVLPKNSLLYTEFMVLNELNNVRIGSAQEKLPPGMKVRVWERLFLKDKKITAKKMCSYLIREEHISKEEAAQISGIERDFKASLAPWIDMRKILGDNFTVSDSEKIIKDITLFGADKKMLRRRLKARFGYLEDCQVKELVRLPYQGWGRLSKEFLTQILPKAERDSTVLVDQETGEVMNIITALKKTDHNLMELLSGKFGYSAALSEVNTTSVSVCDKAISYKNIQDMHISPAVKRPLWQTLRVIKEIIHIMGKAPSRIFIEMARAEDEKKWKTVSRKDRLLDLYKKCKDEIRNWSADIKKLGEEIEELSDGQLRSDKLYLYYTQMGRSMYTGKPICLGSLMAGADYDIDHIYPRSATGDDSLDNRVLVERTENAKKGDHYPLSIEIQGGRAVFWKVLLDKGFISKEKYRRLTRKTLLTDDEKAGFIGRQLVETRQSTKAIAEILKKAFPETKIIYTKARNVSRFRQYAEFVKVRDMNDYHHAKDAYLNIVVGNAFYTKFTSNPIHFLSERNAVYSLNERTFYQFPIQRGSTMAWEPGDSGTMAVVRKWMDKNNILYTRMPFEEKGGLFDQNILKKGKGQVSLRARGALSDIQKYGGYNNATASYFMLVKAEKNGKTIYLLETVPLHLSGRLESIEDKINFCRELWHRDRKDYKNPVICIPKIYKQSLFEVDGFREHISAKTGNQFVMRNAEQLCLNAESAQIIKNVLKFNQRKQVQKELKITVHDKITEENLINIFETFISKIQTSIYRNKFEASVGLMIKGKGTFIELSMEDKCKCIGEILHLFQCNPVLSDLQLIGGKKASGRIYMGKRFDGNKKVFLVLQSVTGFFEKKILLAPYEKK

SEQ ID NO: 20673 - protein, 1379 aa, unidentified
  REGION 1..1379: note = Cas Enzyme sequence
MQKLKNCDYYIGLDMGDASVGWAVTDTNYNILKFNGKALWGIRLFDSANTAASTRVFRSGRRRIDRTTWRLKMLQELFAEEIAKVDPGFFMRLEDSRLHLDDKRDKAVYNLFVDKNYTDKDFYQQYPTMYHLRYALATQAGPFDVRLLYLAVQHIAKHRGHFLFDNLDASKVNDFNAVFSEVENYVRDEMGIEDWSCQNIDELAKVLCDVNLGRTTKQKAMQSLLPAQTKQQKAIIQLFSGGKAKLAELFVDEELDECEKKSVSFQDDDLNEFEPVLTAALGERYEGLLRFKAIYDWSLLAKILHLDTSKKDEDEQHLLSECKVQVYEDHKRDLAVLKSMLKGKPLYNKIFRQDGDISYEKYAKGIKGRNQIDFCKDLKKQLEGIAEYKKIMQEITNIDDAKTEEERLLFRITNGFAFPKQTTKDNGIIPIQVHLAELKCILDNAEGYLPFLGETDNNGLSVREKIEQIVKFRIPYYVGPLAGTRMSREQGRCWVVRKHEKIYPWNFTEIVNLEESAEKFITNMTAKCTYLVGEDVLPKESLLYSEFMVRNAINNITVDGERLPVDVLEKIFKQLFLAKTSKVTKKTLERFFRQENISFQNIGGIDDKINASMKSYNDFRRIFGEDYIQLHRDEIENIIRWITLFCDEKKMLVTKIKNTYPQISDDEIKAIKKLKYKDWGRLSATLLNSSTIAYEDKAFGELVTIISALRHTNKNFMELLSSYCSYDFIGKIKEFNGSRQSSNGKLTYKDVEELYVSPSVKRSIWQTLTILEEIKKIMGCEPKRIFIEMARSKEESKRTDSRLKKLQDLYKKCREENIDFMPRKDEFNALKTQLTSQKEENLHSDKLYLYYTQMGRCMYTGERIELASLYDNNLYDIDHIYPRSKTKDDSLSNRVLVKKEVNAAKTDIYPLDAAIRTKMHSFWKLLYDKGFIDERKYERLTRSTQLRDEELAGFISRQLVETRQSTKAVATILKTAYKHSEIVYVKAGNVSDFRQKFEFVKCRDVNDLHHAKDAYLNIVVGNCYHVKFTDKPLYFIKKNQDNRSYSLKPEIFYKFSIKRDSEIAWVGGKDGTITTVTKTMHKNNILFTRQPVEGKGELFKQQPLKAKSGQLPLKAGLSVEKYGGYDSLTTAYFALVKSEGKKGAVQLSIEGIPLVYAKQGEKAVQNYLTDVLQLYEPEIKIPKIKKYSLFKINGFPMHISGRQLKQLQFYVASQLCIDEYSIAYLKKAFKYENNLAVNDEIIADKNADEEKKQKARKRLDFYEKTWGIGKENNMRIYDILLAKSANNLYKKRPASQSATLEKRRENFKGLFVSKQIHVLKEILNLFKCLSATADLQLLGAGKNVGKVTWNTNISNVKQCILINQSPTGIFEQEVDLMKL

SEQ ID NO: 20674 - protein, 1099 aa, unidentified
  REGION 1..1099: note = Cas Enzyme sequence
MQKLKNCDYYIGLDMGDASVGWAVTDTNYNILKFNGKALWGIRLFDSANTAASTRVFRSGRRRIDRTTWRLKMLQELFADEIAKVDPGFFMRLEDSRLQLDDKREKAVYNLFVDKSYTDKEFYQQYPTMYHLRYALATQKGPFDVRLLYLAVQHIAKHRGHFLFDNLDASKVNDFNAVFSEVENYVRDEMGIEDWSCQNIDELAKVLCDVNLGRTTKQKAMQSLLPAQTKQQKAIIQLFSGSKAKLAELFGDEELDECEKKSVSFQDDDLDELEPVLTAALGERYEGLLRFKAIYDWSLLAKILHLDAGKKDEGEQHLLSECKVQVYEEHKRDLAVLKSMLKGKPLYNKIFRQDGDISYEKYAKGIKGRNQLDFCKALKKQLEGFTEYKKIMQAITSIDDAKTDEERLLFRIANGFAFPKQTTKDNGIIPIQVHLAELKCILDNAEGYLPFLGETDNNGLSVREKIEQIVKFRIPYYVGPLVGTRMSREQGRCWVVRKNEKIYPWNFTEIVNLEDSAENFITNMTAKCTYLFGEDVLPKESLLYSEFMVRNAINNITVDGERLPVDVLEKIFKQLFLAKTSKVTKKTLERFFRQENISFQNIGGIDDKINASMKSYNDFRRIFGEDYIQLHRDEIENIIRWITLFCDEKKMLVTKIKNTYPQISDDKIKAIKKLKYKDWGRLSATLLNSSAIAYEDKAFGELVTIISALRHTNKNFMELLSNYCSYDFIGKIKDFNGSRQSSNGKLTYKDVEDLYVSPSVKRSIWQTLTILEEIKKIMGHEPKRIFIEMARSKEESKRTDSRLKKLQDLYKQCREENIDFMPQTDELNAFKFQLSSKKEDDLRSDKLYFYYTQMGRCMYTGERIELTSLYDNNLYDIDHIYPRSKTKDDSLSNRVLVKKQVNAAKTDIYPLDAAIRTKMHSFWKLLYDKGFIDERKYERLTRSTQLRDEELAGFISRQLVETRKSTKAVAAILKTAYQNSEVVYVKAGNVSDFRKQFKFVKCRDVNDLHHAKDAYLNIVVGNCYHVKFTVNPLNFITKNQDNRRYSLKPEIFYKFSIKRDSEIAWIGGEDGTIMTVTKTMHKNNILFTRQPVEGKGELF

SEQ ID NO: 20675 - protein, 1379 aa, unidentified
  REGION 1..1379: note = Cas Enzyme sequence
MQKLKNCDYYIGLDMGDASVGWAVTDTNYNILKFNGKALWGIRLFDSANTAASTRVFRSGRRRIDRTTWRLKMLQELFAEEIAKVDPGFFMRLEDSRLHLDDKRDKAVYNLFVDKNYTDKDFYQQYPTMYHLRYALATQAGPFDVRLLYLAVQHIAKHRGHFLFDNLDASKVNDFNAVFSEVENYVRDEMGIEDWSCQNIDELAKVLCDVNLGRTTKQKAMQSLLPAQTKQQKAIIQLFSGGKAKLAELFVDEELDECEKKSVSFQDDDLNEFEPVLTAALGERYEGLLRFKAIYDWSLLAKILHLDTSKKDEGEQHLLSECKVQVYEDHKRDLAVLKSMLKGKPLYNKIFRQDGDISYEKYAKGIKGRNQIDFCKDLKKQLEGIAEYKKIMQEITSIDDAKTEEERLLFRITNGFAFPKQTTKDNGIIPIQVHLAELKCILDNAEGYLPFLGETDNNGLSVREKIEQIVKFRIPYYVGPLAGTRMSREQGRCWVVRKNEKIYPWNFTEIVNLEESAEKFITNMTAKCTYLVGEDVLPKESLLYSEFMVRNAINNITVDGERLPVDVLEKIFKQLFLAKTSKVTKKTLERFFRQENISFQNIGGIDDKINASMKSYNDFRRIFGEDYIQLHRDEIENIIRWITLFCDEKKMLVTKIKNTYPQIADDQIKAIKKLKYKDWGRLSGTLLNSSAIAYEDKAFGELVTIISALRHTNKNFMELLSSYCSYDFIGKIKEFNGSRQSSNGKLTYKDVEDLYVSPSVKRSIWQTLTILEEIKKIMGCEPKRIFIEMARSKEESKRTDSRLKKLQDLYKKCREENIDFMPRKDEFNALKTQLSSKKEEDLRSDKLYLYYTQMGLCMYTGERIELASLYDNNLYDIDHIYPRSKTKDDSLSNRVLVKKQVNAAKTDTYPLDAAIRTKMHSFWKLLYDKGFIDERKYERLTRSTQLRDEELAGFISRQLVETRQSTKAVAAILKTAYQNSEVVYVKAGNVSDFRQQFKFVKCRDVNDLHHAKDAYLNIVVGNCYHVKFTANPLNFITKNQDNRRYSLKPEIFYKFSIKRDGEIAWLGGEDGTMATVARTMHKNNILFTRQPLEGKGELFKQNPLKAKSGQLPLKAGLSVEKYGGYDSLTTAYFALVKSEGKKGSMQLSIEGIPLVYAKQGEKAVQDYLTEVVQLCKPEIKIPKIKKYSLFKINGFPMHISGRQGKQLIFYVAGQLCINEDSIAYLKKAFKYESDLAVNEEILADENGDEVRKQKARNRLAFYDNTWGISLEANMQLYDMLLAKSANNLYKNRPASQTSTLKEQREQFSILPLSKQIHVIKEILKLFKCASATADFKLLEKGSTCGKIQVSTNIKKCKQCILINQSPTGVFEQEVDLMKL

SEQ ID NO: 20676 - protein, 1379 aa, unidentified
  REGION 1..1379: note = Cas Enzyme sequence
MQKLKNCDYYIGLDMGDASVGWAVTDTNYNILKFNGKALWGIRLFDSANTAASTRVFRSGRRRIDRTTWRLKMLQELFAEKIAKVDPGFFMRLEDSRLHLDDKRDKAVYNLFVDKNYTDKDFYQQYPTMYHLRYALATQAGPFDVRLLYLAVQHIAKHRGHFLFDNLDASKVNDFNAVFSEVENYVRDEMGIEDWSCQNIDELAKVLCDVNLGRTTKQKAMQSLLPAQTKQQKAIIQLFSGGKAKLAELFVDEELDECEKKSVSFQDDDLNEFEPVLTAALGERYEGLLRFKAIYDWSLLAKILHLDTSKKDEDEQHLLSECKVQVYEDHKRDLAVLKSMLKGKPLYNKIFRQDGDISYEKYAKGIKGRNQIDFCKDLKKQLEGIAEYKKIMQEITSIDDAKTEEERVLFRITNGFAFPKQTTKDNGIIPIQVHLAELKCILDNAEGYLPFLGETDNNGLSVREKIEQIVKFRIPYYVGPLAGTRMSREQGRYWVVRKNEKIYPWNFTEIVNLEESAEKFITNMTAKCTYLVGEDVLPKESLLYSEFMVRNAINNITVDGERLPVDVLEKIFKQLFLAKTSKVTKKTLERFFRQENISFQNIGGIDDKINASMKSYNDFRRIFGEDYIQLHRDEIENIIRWITLFCDEKKMLVTKIKNTYPQISDDEIKAIKKLKYKDWGRLSATLLNSSAIAYEDKAFGELVTIISALRHTNKNFMELLSSYCSYDFIGKIKEFNGSRQSSNGKLAYKDVEELYVSPSVKRSIWQTLTILEEIKKIMGCEPKRIFIEMARSKEESKRTDSRLKKLQDLYKKCREENIDFMPRKDEFNVLKTQLSSKNEEDLRSDKLYLYYTQMGRCMYTGEIIELASLYDNNLYDIDHIYPRSKTKDDSLSNRVLVKKQVNAAKTDIYPLDAAIRTKMHSFWKLLYDKGFIDERKYERLTRSTQLRDEELAGFISRQLVETRQSTKAVAAILKTAYQNSEVVYVKAGNVSDFRQQFKFVKCREVNDLHHAKDAYLNIVVGNCYHVKFTANPLNFITKNQDNRRYSLKPEIFYKFSIKRDGEIAWLGGEDGTMATVARTMHKNNILFTRQAVEGKGELFDQQPLKAKGGQLPLKAGLSIEKYGGYNSLTTAYFAVVKSEGKKGAVQLSIEAIPLVYAKQGEIAVQKYLTEVVQLCKPEIMLPKIKKYSLFKINGFPMHISGRTGNRMLFYGAGQLCLDEADVDYLKKALKYENDIAENELVIADKNSDDIQKQQAQKNLDYYNQKWRIGRKVNMHIYDMLLAKSGNNLYKNRPASQTTDLQEQREFFEKLSLANQIHVIGEVLKLFKCASASANLKLLDKGNACGVIKVSNNILKFKQCVLINQSPTGVFEQEVDLMKL

SEQ ID NO: 20677 - protein, 1379 aa, unidentified
  REGION 1..1379: note = Cas Enzyme sequence
MQKLKNCDYYIGLDMGDASVGWAVTDTNYNILKFNCKALWGIRLFDSANTAASTRVFRSGRRRIDRTTWRLKMLQELFAEEIAMVDPGFFMRLEDSRLHLDDKRDKAVYNLFVDKNYTDKIFYQQYPTMYHLRYALASQPGPFDVRLLYLAVQHIAKHRGHFLFDNLDASKVSDFNAVFSEVENYVRDEMGIEDWSCQNIDELAKVLCDVNLGRTTKQKAMQSLLPAHSKQQKAIIQLFSGGKAKLAELFFDEELDECEKKSVSFQDDDLDELEPVLTAALGERYEGLLRFKAIYDWSLLAKILHLDTSKKDEGEQHLLSECKVQVYEAHKRDLAVLKSMLKGKPLYNKIFRQDGDISYEKYAKGIKGRNQLDFCKDLKKQLDGIAEYKKIMQEITSIDDAKTEEERLLFRVANGLAFPKQTTKDNGIIPIQVHLAELKCILDNAERYLPFLGETDNNGISVREKIEQIVKFRIPYYVGPLAGTRMSKEQGRCWVVRKNEKIYPWNFTEVVNLEESAEKFITNMTAKCTYLVGEDVLPKESLLYSEFMVRNAINNITVDGERLPVDVLEKIFKQLFLAKTSKVTKKTLERFFRQENISFQNIGGIDDKINASMKSYNDFRRIFGEDYIQLHRDEIENIIRWITLFCDEKKMLVTKIKNTYPQISDDEIKAIKKLKYKDWGRLSATLLNSSTIAYEDKAFGELVTIISALRHTNKNFMELLSNYCSYDFIGKIKDFNGSRQTSNGKLTYKDVEELYVSPSVKRSIWQTLTILEEIKKIMGHEPKRIFIEMARSKEESKRTDSRLKKLQDLYKQCREENIDFMPCKDELNALKIQLSSKKEDDLRSDKLYLYYTQMGRCMYTGERIELASLYDDNLYDIDHIYPRSKTKDDSLSNRVLVKKEINAAKTDIYPLDAAIRTKMHSFWKLLYDKGFIDERKYERLTRSTQLRDEELAGFISRQLVETRQSTKAVATILKTAYQNSEIIYVKAGNVSDFRQQFKFIKCREVNDLHHAKDAYLNIVVGNCYHVKFTANPLKFITKNQDNRRYSLKPEIFYKFSIKRDSEIAWIGGEDGTLTTVTKTMHKNNILFTRQPVEGKGELFKQQPLKAKSGQLPLKAGLSVEKYGGYDSLTTAYFALVKSEGKKGAVQLSIEGIPLVYAKQGEKAVQNYLTDVVQLCKPEIKIPKIKKYSLFKINGFPMHISGRQLKQLQFYVASQLCIDEYSIAYLKKAFKYENNLAVNDEIIADKNADEEKKQKARKRLDFYEKTWGIGKENNMRIYDILLAKSANNLYKKRPASQSATLEKRRENFKGLFVSKQIHVLKEILNLFKCLSATADLQLLGAGKNVGKVTWNTNISNVKQCILINQSPTGIFEQEVDLMKL

SEQ ID NO: 20678 - protein, 1379 aa, unidentified
  REGION 1..1379: note = Cas Enzyme sequence
MQKLKNCDYYIGLDMGDASVGWAVTDTNYNILKFNGKALWGIRLFDSANTAASTRVFRSGRRRIDRTTWRLKMLQELFAEEIAKVDPGFFMRLEDSRLHLDDKRDKAVYNLFVDKNYTDKDFYQQYPTMYHLRYALATQAGPFDVRLLYLAVQHIAKHRGHFLFDNLDASKVNDFNAVFSEVENYVRDEMGIEDWSCQNIDELAKVLCDVNLGRTTKQKAMQSLLPAQTKQQKAIIQLFSGGKAKLAELFVDEELDECEKKSVSFQDDDLNEFEPVLTAALGERYEGLLRFKAIYDWSLLAKILHLDTSKKDEDEQHLLSECKVQVYEDHKRDLAVLKSMLKGKPLYNKIFRQDGDISYEKYAKGIKGRNQIDFCKDLKKQLEGIAEYKKIMQEITNIDDAKTEEERLLFRITNGFAFPKQTTKDNGIIPIQVHLAELKCILDNAEGYLPFLGETDNNGLSVREKIEQIVKFRIPYYVGPLAGTRMSREQGRCWVVRKHEKIYPWKFTEIVNLEESAEKFITNMTAKCTYLVGEDVLPKESLLYSEFMVRNAINNITVDGERLPVDVLEKIFKQLFLAKTSKVTKKTLERFFRQENISFQNIGGIDDKINASMKSYNDFRRIFGEDYIQLHRDEIENIIRWITLFCDEKKMLVTKIKNTYPQISDDEIKAIKKLKYKDWGRLSATLLNSSTIAYEDKAFGELVTIISALRHTNKNFMELLSSYCYYDFIGKIKEFNGSRQSSNGKLTYKDVEELYVSPSVKRSIWQTLTILEEIKKIMGCEPKRIFIEMARSKEESKRTDSRLKKLQDLYKKRREENIDFMPRKDEFNALKTQLSSKKEENLRSDKLYLYYTQMGRCMYTGERIELASLHDNNLYDIDHIYPRSKTKDDSLSNRVLVKKQVNAAKTDTYPLDAAIRTKMHSFWKLLYDKGFIDERKYERLTRSTQLRDEELAGFISRQLVETRQSTKAVAAILKTAYQNSEVVYVKAGNVSDFRQQFKFVKCREVNDLHHAKDAYLNIVVGNCYHVKFTANPLNFITKNQDNRRYSLKPEIFYKFSIKRDGEIAWLGGEDGTMATVARTMHKNNILFTRQAVEGKGELFDQQPLKAKGGQLPLKAGLSIEKYGGYNSLTTAYFAVVKSEGKKGAVQLSIEAIPLVYAKQGEIAVQKYLTEVVQLCKPEIMLPKIKKYSLFKINGFPMHISGRTGKQLIFYGAGQLCIADDVADYLKKALMYETNIAEKEKTLADQNADDIQKQKAQKGLDFYEQKRGISGAVNVQLYDMFIAKSANNLYKNRPVSQTITLKEKREHFVKLTVSKQIHIIKEILNLFKCASASADFKLIDKGTSCGTLKISNNINKLKECILINQSPTGVFEQEVDLMKL

SEQ ID NO: 20679 - protein, 1014 aa, unidentified
  REGION 1..1014: note = Cas Enzyme sequence
IKGRNQIDFCKDLKKQLEGIAEYKKIMQEITNIDDAKTEEERLLFRITNGFAFPKQTTKDNGIIPIQVHLAELKCILDNAEGYLPFLGETDNNGLSVREKIEQIVKFRIPYYVGPLAGTRMSREQGRCWVVRKHEKIYPWNFTEIVNLEESAEKFITNMTAKCTYLVGEDVLPKESLLYSEFMVRNAINNITVDGERLPVDVLEKIFKQLFLAKTSKVTKKTLERFFRQENISFQNIGGIDDKINASMKSYNDFRRIFGEDYIQLHRDEIENIIRWITLFCDEKKMLVTKIKNTYPQISDDEIKAIKKLKYKDWGRLSATLLNSSTIAYEDKAFGELVTIISALRHTNKNFMELLSSYCSYDFIGKIKEFNGSRQSSNGKLTYKDVEELYVSPSVKRSIWQTLTILEEIKKIMGCEPKRIFIEMARSKEESKRTDSRLKKLQDLYKKCREENIDFMPRKDEFNALKTQLTSQKEENLHSDKLYLYYTQMGRCMYTGGRIELASLYDTNLYDIDHIYPRSKTKDDSLSNRVLVKKEVNAAKTDIYPLDAAIRTKMHSFWKLLYDKGFIDERKYERLTRSTQLRDEELAGFISRQLVETRQSTKAVATILKTAYKHSEIVYVKAGNVSDFRQKFEFVKCRDVNDLHHAKDAYLNIVVGNCYHVKFTDKPLYFIKKNQDNRSYSLKPEIFYKFSIKRDSEIAWVGGKDGTITTVTKTMHKNNILFTRQPVEGKGELFKQQPLKAKSGQLPLKAGLSVEKYGGYDSLTTAYFALVKSEGKKGAVQLSIEGIPLVYAKQGEKAVQNYLTDVLQLYEPEIKIPKIKKYSLFKINGFPMHISGRQLKQLQFYVASQLCIDEYSIAYLKKAFKYENNLAVNDEIIADKNADEEKKQKARKRLDFYEKTWGIGKENNMRIYDILLAKSANNLYKKRPASQSATLEKRRENFKGLFVSKQIHVLKEILNLFKCLSATADLQLLGAGKNVGKVTWNTNISNVKQCILINQSPTGIFEQEVDLMKL

SEQ ID NO: 20680 - protein, 1379 aa, unidentified
  REGION 1..1379: note = Cas Enzyme sequence
MQKSKNCDYYIGLDMGDASVGWAVTDTNYNILKFNGKALWGIRLFDSANTAASTRVFRSGRRRIDRTTWRLKMLQELFAEEIAKVDPGFFMRLEDSRLHLDDKRDKAVYNLFVDKNYTDKDFYQQYPTMYHLRYALATQAVPFDVRLLYLAVQHIAKHRGHFLFDNLDASKVNDFNAVFSEVENYVRDEMGIEDWSCQNIDELAKVLCDVNLGRTTKQKAMQSLLPAQTKQQKAIIQLFSGGKAKLAELFVDEELDECEKNSVSFQDDDLNEFEPVLTAALGERYEGLLRFKAIYDWSLLAKILHLDTSKKDEDEQHLLSECKVQVYEDHKRDLAVLKSMLKGKPLYNKIFRQDGDISYEKYAKGIKGRNQIDFCKDLKKQLEGIAEYKKIMQEITNIDDAKTEEERLLFRITNGFAFSKQTTKDNGIIPIQVHLAELKCILDNAEGYLPFLGETDNNGLSVREKIEQIVKFRIPYYVGPLAGTRMSREQGRCWVVRKNEKIYPWNFTEIVNLEESAEKFITNMTAKCTYLVGEDVLPKESLLYSEFMVRNAINNITVDGERLPVDVLEKIFKQLFLAKTSKVTKKTLERFFRQENISFQNIGGIDDKINASMKSYNDFRRIFGEDYIQLHRDEIENIIRWITLFCDEKKMLVTKIKNTYPQISDDEIKAIKKLKYKDWGRLSATLLNSRAIGYEDKAVGEIITIISALRHTNKNLMELLSNYCPYDFIGKIKDFNGSRQSSNGKLTYKDVEELYVSPSVKRSIWQTLTILEEIKKIMGCEPKRIFIEMARSKEESKRTDSRLKKLQDLYKKCREENIDFMPRKDEFNALKTQLSSKKEDDLRIDKLYLYYTQMGRCMYTGERIELASLYDNNLYDIDHIYPRSKTKDDSLSNRVLVKKQVNAAKTDTYPLDAAIRIKMHSFWKLLYDKGFIDERKYERLTRSTQLRDEELAGFISRQLVETRQSTKAVATILKTAYKHSEVVYVKAGNVSDFRQQFKFVKCREVNDLHHAKDAYLNIVVGNCYYVKFTANPLNFIKKNQDSRSYSLKPEIFYKFNIKRDDDIAWLGGEDGTMATVARTMHKNNILFTRQPLEGKGELFKQNPLKAKSGQLPLKAGLSVEKYGGYDSLTTAYFALVKSEGKKGSVQLSIEGIPLVYAKQGEKAVQDYLTEVVQLCKPEIKIPKIKKYSLFKINGFPMHISGRTGKQLVFYGAGQLCIADDVADYLKKALKYETDIAEKEKTLADQNADDIQKQKAQKGLDFYEQKWGISGAVNVQLYDMFIAKSANNLYKNRPASQTITLKEKREHFVKLTLSKQIHIIKEILNLFKCASASADFKLIDKGTSCGTLKISNNITKLKECILINQSPTGVFEQEVDLMKL

SEQ ID NO: 20681 - protein, 1257 aa, unidentified
  REGION 1..1257: note = Cas Enzyme sequence
QELFAEEIAKVDPGFFMPLEDSRLHLDDKRDKAVYNLFVDKNYTDKDFYQQYPTMYHLRYALATQAGPFDVRLLYLAVQHIAKHRGHFLFDNLDASKVNDFNAVFSEVENYVRDEMGIEDWSCQNIDELAKVLCDVNLGRTTKQKAMQSLLPAQTKQQKAIIQLFSGGKAKLAELFVDEELDECEKKSVSFQDDDLNEFEPVLTAALGERYEGLLRFKAIYDWSLLAKILHLDTSKKDEDEQHLLSECKVQVYEDHKRDLAVLKSMLKGKPLYNKIFRQDGDISYEKYAKGIKGRNQIDFCKDLKKQLEGIAEYKKIMQEITNIDDAKTEEERLLFRITNGFAFPKQTTKDNGIIPIQVHLAELKCILDNAEGYLPFLGETDNNGLSVREKIEQIVKFRIPYYVGPLAGTRMSREQGRCWVVRKHEKIYPWNFTEIVNLEESAEKFITNMTAKCTYLVGEDVLPKESLLYSEFMVRNAINNITVDGERLPVDVLEKIFKQLFLAKTSKVTKKTLERFFRQENISFQNIGGIDDKINASMKSYNDFRRIFGEDYIQLHRDEIENIIRWITLFCDEKKMLVTKIKNTYPQISDDEIKAIKKLKYKDWGRLSATLLNSSTIAYEDKAFGELVTIISALRHTNKNFMELLSSYCYYDFIGKIKEFNGSRQSSNGKLTYKDVEELYVSPSVKRSIWQTLTILEKIKKIMGCEPKRIFIEMARSKEESKRTDSRLKKLQDLYKKCREENIDFMPRKDEFNALKTQLSSKKEENLRSDKLYLYYTQMGRCMYTGERIELASLYDNNLYDIDHIYPRSKTKDDSLSNRVLVKKQVNAAKTDTYPLDAAIRTKMHSFWKLLYDKGFIDERKYERLTRSTQLRDEELAGFISRQLVETRQSTKAVAAILKTAYQNSEVVYVKAGNVSDFRQQFKFVKCRELNDLHHAKDAYLNIVVGNCYHVKFTANPLNFITKNQDNRRYSLKPEIFYKFSIKRDGEIAWLGGEDGTMATVARTMHKNNILFTRQAVEGKGELFDQQPLKAKGGQLPLKAGLSIEKYGGYNSLTTAYFAVVKSEGKKGAVQLSIEAIPLVYAKQGEIAVQKYLTEVVQLCKPEIMLPKIKKYSLFKINGFPMHISGRTGNRMLFYGAGQLCLDEADVDYLKKALKYENDIAENELVIADKNSDDIQKQQAQKNLDYYNQKWRIGRKVNMHIYDMLLAKSGNNLYKNRPASQTTDLQEQREFFEKLSLANQIHVIGEVLKLFKCASA

SEQ ID NO: 20682 - protein, 1228 aa, unidentified
  REGION 1..1228: note = Cas Enzyme sequence
MQKLKNCDYYIGLDMGDASVGWAVTDTNYNILKFNGKALWGIRLFDSANTAASTRVFRSGRRRIDRTTWRLKMLQELFAEKIAKVDPGFFMRLEDSRLHLDDKRDKAVYNLFVDKNYTDKDFYQQYPTMYHLRYALATQAGPFDVRLLYLAVQHIAKHRGHFLFDNLDASKVNNFNAVFSEVENYVRDEMGIEDWSCQNIDELAKVLCDVNLGRTTKQKAMQSLLPAQTKQQKAIIQLFSGGKAKLAELFVDEELDECEKKSVSFQDDDLNEFEPVLTAALGERYEGLLRFKAIYDWSLLAKILHLDTSKKDEGEQHLLSECKVQVYEDHKRDLAVLKSMLKGKPLYNKIFRQDGDISYEKYAKGIKGRNQIDFCKNLKKQLEGIAEYKKIMQEITSIDDAKTEEERLLFRITNGFAFPKQTTKDNGIIPIQVHLAELKCILDNAEGYLPFLGETDNNGLSVREKIEQIVKFRIPYYVGPLAGTRMSREQGRCWVVRKNEKIYPWNFTEIVNLEESAEKFITNMTAKCTYLVGEDVLPKESLLYSEFMVRNAINNITVDGERLPVDVLEKIFKQLFLAKTSKVTKKTLERFFRQENISFQNIGGIDDKINASMKSYNDFRRIFGEDYIQLHRDEIENIIRWITLFCDEKKMLVTKIKNTYPQISDDEIKAIKKLKYKDWGRLSATLLNSSTIAYEDKAFGELVTIISALRHTNKNFMELLSSYCSYDFIGKIKEFNGRRQSSNGKLTYKEVEDLYVSPSVKRSIWQTLTILEEIKKIMGCEPKRIFIEMARSKEESKRTDSRLKKLQDLYKKCREENIDFMPRKDEFNALKTQLSSKKEEDLRSDKLYLYYTQMGRCMYTGERIELASLYDNNLYDIDHIYPRSKTKDDSLSNRVLVKKQVNAAKTDIYPLDAAIRTKMHSFWKLLYDKGFIDERKYERLTRSTQLRDEELAGFISRQLVETRQSTKAVAAILKTAYQNSEVVYVKAGNVSDFRQQFKFVKCREVNDLHHAKDAYLNIVVGNCYHVKFTANPLNFITKNQDNRRYSLKPEIFYKFSIKRDGEIAWLGGEDGTMATVARTMHKNNILFTRQAVEGKGELFDQQPLKAKGGQLPLKAGLSIEKYGGYNSLTTAYFAVVKSEGKKGAVQLSIEAIPLVYAKQGEIAVQKYLTEVVQLCKPEIMLPKIKKYSLFKINGFPMHISGRTGNRMLFYGAGQLCLDEADVDYLKRL

SEQ ID NO: 20683 - protein, 1379 aa, unidentified
  REGION 1..1379: note = Cas Enzyme sequence
MQKLKNCDYYIGLDMGDASVGWAVTDTNYNILKFNGKALWGIRLFDSANTAASTRVFRSGRRRIDRTTWRLKMLQELFAEEIAKVDPGFFMRLEDSRLQLDDKREKAVYNLFVDKSYTDKEFYQQYPTMYHLRYALATQKGPFDVRLLYLAVQHIAKHRGHFLFDNLDASKVNDFNAVFSEVENYVRDEMGIEDWSCQNIDELAKVLCDVNLGRTTKQKAMQSLLPAQTKQQKAIIQLFSGGKAKLAELFVDEELDECEKKSVSFQDDDLNEFEPVLTAALGERYEGLLRFKAIYDWSLLAKILHLDTSKKDEDEQHLLSECKVQVYEDHKRDLAVLKSMLKGKPLCNKIFRQDGDISYEKYAKGIKGRNQIDFCKDLKKQLEGIAEYKKIMQEITSIDDAKTEEERLLFRITNGFAFPKQTTKDNGIIPIQVHLAELKCILDNAEGYLPFLGETDNNGLSVREKIEQIVKFRIPYYVGPLAGTRMSREQGRCWVVRKHEKIYPWNFTEIVNLEESAEKFITNMTAKCTYLVGEDVLPKESLLYSEFMVRNAINNITVDGERLPVDVLEKIFKQLFLAKTSKVTKKTLERFFRQENISFQNIGGIDDKINASMKSYNDFRRIFGEDYIQLHRDEIENIIRWITLFCDEKKMLVTKIKNTYPQISDDEIKAIKKLKYKDWGRLSATLLNSSTIAYEDKAFGELVTIISALRHTNKNFMELLSSYCYYDFIGKIKEFNGSRQSSNGKPTYKDVEELYVSPSVKRSIWQTLTILEEIKKIMGCEPKRIFIEMARSKEESKRTDSRLKKLQDLYKKCREENIDFMPRKDEFNALKTQLSSKKEENLRSDKLYLYYTQMGRCMYTGERIELASLYDNNLYDIDHIYPRSKTKDDSLSNRVLVKKQVNAAKTDTYPLDAAIRTKMHSFWKLLYDKGFIDERKYERLTRSTQLRDEELAGFISRQLVETRQSTKAVAAILKTAYQNSEVVYVKAGNVSDFRQQFKFVKCREVNDLHHAKDAYLNIVVGNCYHVKFTANPLNFITKNQDNRRYSLKPEIFYKFSIKRDGEIAWLGGEDGTMATVARTMHKNNILFTRQAVEGKGELFDQQPLKAKGGQLPLKAGLSIEKYGGYNSLTTAYFAVVKSEGKKGAVQLSIEAIPLVYAKQGEIAVQKYLTEVVQLCKPEIMLPKIKKYSLFKINGFPMHISGRTGNRMLFYGAGQLCLDEADVDYLKKALKYENDIAENELVIADKNSDDIQKQQAQKNLDYYNQKWRIGRKVNMHIYDMLLAKSGNNLYKNRPASQTTDLQEQREFFEKLSLANQIHVIGEVLKLFKCASASANLKLLDKGNACGVIKVSNNILKFKQCVLINQSPTGVFEQEVDLMKL

SEQ ID NO: 20684 - protein, 1351 aa, unidentified
  REGION 1..1351: note = Cas Enzyme sequence
MKKFLNDYYLGLDIGTDSIGWAVTDKEYNLEKINGKILWGVRLFDPANTAAERRTFRSARRRLKRRNWRISLLQELLAEEISKIDLGFYQRLKDSKYYIEDKSEFQKNTLFNDVNFVDQDLHKKYPTIYHLRKALIDNSQEAFDIRLLYLAIHNILKHRGHFLFEGQSMNSVTDFSSIYYNLKQIINDELEIDFNCSDLEMMETILKDKSKGMTKKKIELLKLFNLEDKIKEKQVKELVNIILGGKADLSIIFADDTLKEFEVKSVSFSDSNYEDNKLKLEAQLEDRITVIEKLKEVYDWSVLSTILQNQNYLSYAKVLSYEKHKKDLKKLQSVIKKYKPEVYKNIFSNSNNEKSYCAYIMKNNTNGKKSNEIKRCNQEDFCKEIIKVLSDINFTGDKELEELKIDAESISLLPLQISSKNGVIPYQLHGAELEKILENAKHKFAFLNDIDETGISIKEKITKIFEFRIPYYVGPLNNYHNKNEDGFSWVIKKDNAKILPWNFEEIVDLEKSAEEFIKGMTNKCTYLVDEDVLPKDSLLYSEFMVLNELNNLKINQEKIDAELKKKIYADLFLKYKKVTGKKLRDYLLKENVIDKNDYISGFDLDFKSSLRSKIEIINAIGSKADNLELCESIILYITLYGEDKKLLKSRLSKLNPSLDEKEINEIVKLKFSGWGRLSKTFLTEISHIDKATGEYQSIMTNLRETNNNMMQLLSRDFDYLDSINEFNKNFEAGTIISYETVDDLYVSPSVKKMIWQSLCVVNEIHKVMGKHPKKLFIEMARGEEDKKRTVSRKNTLIDFYKLCGEEGKIWIKNIENATDNDLRRDRLYLYYTQLGKCMYSGKAISLKDLFNANIYDVDHIFPQSKVKDDGLDNRVLVLKEVNSLKSDSYPLSNEIRSSNSARWSYLKDKGLINLKKYERLIRSVPFTDNELTDFIARQLVETRQTSKAAAEILKKVFPESDIVYVKARNVSEFRQDRDLVKVRDVNDFHHAYDAYLNIVVGNVYFVKFTSNPINFINDKSKPKYNLGRMFDFDVKRGEETAWIHGEKGTISKVKKTIQKNNVLFTRYATESKGGISDQNIVKKKDGLLPIKGSDKKLADTTKYGGFNSIKGAYFFLVEHSVIKGKNNNRIRTIEFVPIHLKAKIESSEDGLQKYAIENLGLIEPVIKLKKIKINALFEIDGFKMHLSARSGDQLKFKGANQLYVAKTEADYIRKCINLTTKLKERRIKAQEYIVTRFDQISADMNMQLFDMFIFKLGKSPFSIKLSTQAETLKSKRLNFSNLIEAEQAVVISEIIHLFQCNIVTANLKIIGGAESAGLVATSKIISNFKSVKLVNQSVTGIFENEIDLLNI

SEQ ID NO: 20685 - protein, 1342 aa, unidentified
  REGION 1..1342: note = Cas Enzyme sequence
MSTKGNFVEYYLGLDIGTESVGWAVTDRDYEVLRFKGKAMWGVHLFEGGKTAEDRRMHRTARRRLERRKWRLKLLRGLFEEEISKVDPLFFERLDESNFVSEDRKHKQHNSLFNDPSFDDKSLFNKYPTIYHLRKDMMMTKDKPDIRLIYLTCHHIIKYRGHFLYENISNGEIPEFDSLLRKVTDVLNDVCGTEVSTDNVSEQIKEVILSNRLGVREKMAKLKGLIVSGDGSKGVEEFINLISGGTCKLKEIFDPEGDNDDLKDKKLKFSDTDWEAERPELEDKIFDGIYLLDLAKQLYDWATLKKLLGKHTLISLAKIDEFDQHDMDLALLKKVVRKHLDKNSYTEIFKDRTLENNYAAYSGKNTKIKKCTQNEFCKFLRKRLEKEFTSPAFESGEYLGMKNRISDDTFMPKQTSKENGLLPNILHLRELNDILINCSKWYPFLEAKDESGYTVLEKIEQLCKFRVPYYIGPLSPNAKHKWMVRKGEGRILPWNFDDLVDKDKSSEGFVENLIGTCTYLPFEKVLPKNSILYSRFTLYNEINSISIGDERIKANLKKDIIKHFLEGPDGPKDITKKALKGYLKSVGLFHDEDEIKGIDEVVQSNLKSEYYLKTVLKEKYKDSLAEEIIRSIVVFGDDRKRLKSKLYSDYSETLAKDEIDRLSTLQFKGWGKLSKKFLIGIRAPVDGIEMNILTAMEQTSLNLNEILYRYGFKKQIDAIRDETLGTSSGKIKYDLVKDLHVSPSVRRGIWRALCIVDDILKVTGHPPAKIFIETTREKRDNNRTVSRKTKLTELYKACKEEDWLNKINGETDGKLRGKKLYSYYCQHGQCMYCGTKIDPQDLADANKCDMDHIIPKSKKADDSIHNNLVLVCKTCNSNKNDIYPIRAEIQQKMGLTWKRLLDCEFITKEKYERLTRQKPLTDDDLSGFIARQLVDTGWSVKVVADTLRRIFGDESEIVYVKGRTVSDFRSNKGFIKCRSVNDHHHAKDAYLNIVVGNVHHVKFTSDPLKFVRSGEKYTLNIEKMFNYDVKRNNEHAWTAGEAGSIAIVNKHMKRNNILFTRFAYKASGKLYDLNPLKKEDPLKGGDRYPLKTRGKDMDVSKYGGYKNVYGSYFAVVEHVVKKKAVRTIQPVPVMLRRNKIGEKELLEYYLQKGLNEPKIVFDSILTDALIEIDGFKLHISGRSGDRILYKCGEQLILKDKAYDYCKKLYNHHERSKEAKEPLPAEDYRLTAEDNLDIYNELIKKFKGKYSMIPDGLAEKLSDKRELFEGLTTEKQAAVLNEVLHAFQCKSAEVNLKKIEGFGGSSAAGRIDLMNDLNKFKSVKLINQSPSGLFENEINLKTI

SEQ ID NO: 20686 - protein, 1352 aa, unidentified
  REGION 1..1352: note = Cas Enzyme sequence
MIDWRYMNMSMKGNFGEYYLGLDIGTESVGWAVTDKDYEVLRFKGKAMWGVHLFEGGKTAEDRRMHRTARRRLERRKWRLKLLRSLFEEEIVKVDPLFFERLDESNFVSEDRKHKQHNSLFNDPSFDDKNLFNKYPTIYHLRKDMMITKDKPDIRLVYLACHHIIKYRGHFLFENISNGEIPEFDSLLRRVADVLNDVCGTEVSTDNVSEEIKEVILNNRLVVKEKKAKLKNLIVSDDSSKGVEEFINLISGGTCKLKEIFDPEGDNDDLKDRKLKFSDVDWEAERPELEDKLFDGIYLLDLAKQLCDWATLKKLLGEHTLISLAKIDEFDQHDKDLALLKKVVRKHLDKNSYAEIFKDKTLENNYAAYSGKNTKTKKCTQNEFCKFLRKKFEKEFTNPLFESEEYCGMKSRILDDTFMPKQTSKENGLLPNILHLKELNDILTNCSKWYPFLETEDESGYAVSEKVEQLCKFKVPYYIGPLSPNAKHKWMVRKKEGRILPWNFDDLVDKDKSSEGFMENLIGTCTYLPFEKVLPKNSILYSRFTLYNEINSISINDERIKTSLKRDIVKHFLEDSDGPKEITKKTLKGYLRSLGFFHDEDEIKGIDEVVQSNLNSEYHLKTILKGKYKGPLAEDIIRSIVVFGDDRKRLKSKLYSDYSETLAKDEIERLSTLQFKGWGKLSEKFLTGIRAPVDGIEMNILTAMEQTSLNLNEILYRYGFKKQIDVIRDEALGTSSGKIKYDLVKDLRVSPSVRRGIWRALCIVDDILKVTGHPPTKIFIETTREKRDNNRTVSRKTKLTELYKACKEEDWLNKIEGETDGGLRGKKLYSYYCQHGQCMYCGTKIDPQDLADVNKCDMDHIIPKSKKADDSIHNNLVLVCKICNSNKNDIYPIHAEIQQKMGLTWKRLLDCEFITKEKYERLTRQKPLTDDDLSGFIARQLVDTGWSAKVVADTLRRIFGDESEIVYMKGRTVSDFRKLKGFIKCRSVNDHHHAKDAYLNIVVGNVHHVKFTSDPLKFVRSGEKYTLNIEKLFNHDVKRNNEHAWTAGETGSMAIVNKHMRRNNILFTRFAYKVGGKLYDLNPLKKVDPLKGEKDRYPLKTRGKEMDVSKYGGYKNLYGSYFAVVEHTVKKKTVRTIQPVPVMLSQNKSGEKELLEYYLRKGLNEPKIVFDTILTDAMIEIDGFKLHISGRSSDRILYKCGEQLILKDKTYDYCKKLYNHHERSKDAKEALPAEDYRLTAEDNLETYDELIKKFKGKKYSMIPDGLAEKLSEKKEIFKSLTVEKQADVLNEVLHAFQCKSVVVNLKKIEGFGGSSAAGRIDLMNDLNKFKSVKLINQSPSGLFENEIDLKAI

SEQ ID NO: 20687 - protein, 1322 aa, unidentified
  REGION 1..1322: note = Cas Enzyme sequence
MKNTNKDYYLGLDIGTDSVGWAVTDKEYNILEFRRKPMWGIHLFEGGSTAQKTRVYRTSRRRLKRRAERIALLRDIFSEEIGKVDPGFFERLDESDLHLEDRVTSQKNSLFDDPEFNDKDLHKKFPTIYHLRSHLMHSGRKEDIRLIYLAAHHIIKFRGHFLYKGIGDGEIPSFEIVLNSLIDNLRDEYGMELEVSDRDLVKALLSDFSIGIREKSRELSSCLNAESENEKALVDFISGKKTNMKKLFDDEALDKMSFSLRDSGFEDQLRENEGVLGPERVHTLELSRQIFEWARLSSILKDSDSISEAKIKDYDQHREDLRMLKRAVKKYAPDKYSEVFKSKEHTGNYCSYVYVCGKGLPDKKCSAEEFQKYLKKILDDSGVRDDEEFKTLIQRLDAGILCPKQRTGENSVIPYSVHRKELIGILNNAAEHYPSLSRKGEDGFSSIDKILMLEEFRIPYYVGPLDDRSSRSWLIRNSFEAITPWNFNEIVDEDETSERFIGNLTSMCTYLGGEKVLPKNSLLYSRFMLYNEINNLRVGGEKIPAALKNKMVSELFANRATASKVTLKELKAFLKGEGVLTDADEISGIDDGIKSTLRSEILIRKIIGDKISDREMAEEIVRILTVFGDERRRSKAKLKKEFSDKLTEKEIEKLSSLRFDGWGRLSEKFLTGLRQEVNGRSMSIIEILEDTNYNLQEILSKYSFNEIIDSYNEVLTSGPRSISYDILKDSYLSPAVKRGVWRALSVVKDILKAVGRPPKKIFVETTREEREKKRTESRKDALMYLYKSCKETEWEKRLDSVEESSLRNRSLYLYYTQLGKCMYCGKNIDIGELNTDLADRDHIYPQSKTKDDSIRNNLVLVCRGCNQAKGDRYPLPQEWVSRMHAFWTMLKDKGYISSEKYRRLTRRGELTEEEFGAFINRQLVETSQSAKAVITVLKNAFKDSDIVYVKGSNVSDFRSSYNFIKCRSVNDYHHAKDAYLNIVVGNVLDTKFTKNPSYVLKNREQYNIGRMYDRNVSRFGVDAWVAGDRGSIATVRKYMRRNNILFTRYATKSKGALFKETVHRKKEGLFERKKGLETEKYGGYSDISTSYLTLLEYDKGKKRIRSLEIVPTYFANTRPKEEDIIRFFSETRGLANVRVVMPKVRMKSLFEYKGFRFHVTGSLSGGRFWISSAIQLLLPENLYAYCKSIENNEKDSQRRSEKPLQNYGFSSEMNIELFKCFMDKAAKPPYDVKLSKLSKNLEEGFEKFKALELGPQVKVLQQILDIYSCDRKTGDLSVLGGARNAGGFTMNGVLSEADGEQVTMICQSPSGLFEKRVPMNEK

SEQ ID NO: 20688 - protein, 1369 aa, unidentified
  REGION 1..1369: note = Cas Enzyme sequence
MNNNYYLGLDLGTNSVGWAVTDDHYNIIKFHGKHMWGMRLFEEAETAKDRRLHRQARRRRQRLVERINLLEELFDKEISKVDQGFFARKKESDLHFEDKTTKSEYALFNDKSYTDRDYYKQYPTIFHLIMDLIENDKKRDIRLVYLACHYLIKHRGHFIFDGKNFTVDNSFENLLDKLITYLKDNDDITLSFPKDQLINIFKNSNLNSTEKSDQLKPFFGRTNLEKGIIKLLSGGKQDLSNMFRDETLKNSNYKNLKFSDNRFDDERDGYAADLGDRIDLLILLKQIYDASILESMMSQARVSIDGHKYISSAKVCAYEKHKSDLKRLKSLIKKYLPSEYNNIFRKITEKDNYVAYSKSNITNNKREKALKYVKYVDFTKYLTKKLKTIKTQDAEDDKEIFEIKGELEKQSFLPKQRTLDNSIIPYQLHLMELKKILDNQSKYYDFLLAKDDQEGITVKDKIISLLTFRLPYYIGPVNPAVHGKFAWVKRLANGKVTPWNYKEKIDIDASHEEFIKTKLSKCSFLIGCDVLPKNSLLYQKYMVLSELNTIKFNGVNISEKLKDDIYQNLFKNIQKVTKKRLQNYIKEHENIIGDVIVTGIDNAFKQGLVSYLKFKKIIGDKVDDDRYQKVLEKIIRDITLYDECAGKKIKKEYKDSDLFTEDELNKIVKLTFNDWGRLSAELLDQLEGEDTVSGETGKIIEFMQKHNYNLMQLMSKKFTFKSKIDEINKSYYQHDKFNYKSMIDSLYVSPATKRILWQSLKVVHEISKIMKHDPEKIFIEMARSKEDHPKRKLSRKADLKQVYKDSKKQIISIIGKDKYQDLSNELDNKDDRDLRWDNLYLYYTQLGRSMYSLKPIDISELMNKNLYDQDHIFPKSKKYDDSIENRVLVEKELNVKKSDIYPISDANIIPQKIKGQVESFWKMLYDHKLIGDKKYARLIRSKAFTDDELAGFIARQLVETRQATKETADLLKRLCPKSRIVYAKAQNASIFRQKFDIPKSRTINDLHHAQDAYLNIVVGNIFDTKFTQDPRNFIKNTKDSRNYNLEKIYDYNVERNNYVAWIAPDSKTNGTIANVKCNLSTKDFRVTRPSFYKKGALFNQNLSRKGSNLAPIKEHSPKSNPLKYGGYSGKNNSFFVVVAGKDNKGKDIVKLIPVNTLIYNKMLHCDYKAKQELLTSYVANNFAINNFRIVKYDIKMYSLVKIDGAYYYLVGGTDERIEVKNAMQLLLSKDSIKAVKILEKESKDQFANIKNYKDIDIKLGRTFNEVVSKYTNSVFGKSMLISDKYRKDIFKSVEKSILEFNHLDTIGKADNLLKFVTLMRPSGSAHALKMVGLIERIRKSNVISNFNEFKLINQSVTGLFENEEDLLKL

SEQ ID NO: 20689 - protein, 1400 aa, unidentified
  REGION 1..1400: note = Cas Enzyme sequence
MQEIKNYFLGLDIGTNSVGYAATDENYRLLSKRGKDLWGVELFDTAETAQERRTARGARRLRGREKVRISLLQELFAKEIAKVDDKFFIRLKASALWEDDKEASGIFSRNSLFFENSLTDKDFFKKYPTIYHLRQKLTTEPAEDVRFLYLAIANMMKHRGNFLFDSFSTNNDGDNLATLFKNLKNTISQKDDDGLAMLEFSVGEEQSKTLDALDELIAKKPFKTSALVEEFKNIFGEMNSNQKALLSAICGGTVNAKTIFSSKTNELNLTAKLDSFNVDDATFDTFLVELEGENEAASAIIAQAKAIYDHIIFKRLMGGHNFVCDALVEKFELHKTQLKNFKTVIKKYYKDKYKEVFKENRNGLNNYAKYIDGTNRDASKKEMANKCTRADFYKYIKSVLNQNPEAQNLPEVAEILSSIDENNFLPKLRTSANSVIPYQVNSAELNAILNKSKEKFTFLNETDEDGLSVAGKIISIFEFRIPYFVGPLSKNGSKNAWIERRTDEKIMPWNIEKVVDFDKSEQEFIKRMQNNCTYLRGESCLPKNSLLYSEYMVLNELNNIRINKTYPLSPSLKEKIIEVMKTVGVPKLKDIKTMVYGEGKIKPEDEVVITGVDGKLNSNLNIYKNFNAILDGEIEKYREEVEDIILHASYTSDKTRLYDWLKKTYGKTFSEAQIKAMKGLKIEGFGKFSRKLLDGIIGVDTKTGESHTIIEWLRCTNLNFMEIINAFDFGDAFANPSVVGAITYDDVSGLYCSPSVKRGVWQAIKIIREMQKIVGGAPRKIFVEVTRADDEAKKGKAPDSRKDRMIKVYNSIKKAFDDSVNDLKTQLTQEENLNSDKLYLYYTQLGKCAYTGKTIDVNMLFSNAYDIDHIIPRSKVKDDSLDNKVLVLRDVNIDKTNRVLTPEIQANMKPFWQLLNSYNLISNEKLARLLRTREYSEDEQKDFAASQLVSTNQSAKAVIELIKAFMPETAVVYSKAKLVTEFRNGEFKFENGADLKDLSGGAELKMALIKNRELNNFHHAKDAYLNIVVGNVFDEKYSKRFYLRNSGKVNYNVCNAFTKEIAGVFNQNLHLPIIKEVMLSNTPHVSFLAREETGAFYKETRWGSEKHQKDFKNVDEIRAYASQFKRGEWDASAIALKGESDPLSQTIKYGSYADATYAYFAIADLKGKKKTERKFVGIPYIFAKDIKTEADLTEVIKKLEKVDDVKVLVLKVKKGTIIKVGSGRFKIAGAAGPSIKLHNFNEIYLEPKLNGYFKLLSKTLKIMGEKKPLRVEGESVVVNINRFGEKAMLTKPENLVLYKALVGHMRKAIYKETNLNSVAKLLKENTATFEGLTIENQIVALQGVLNILTGKNGGDIRLVGGSANSGVLSIGKTISGKKPLSLVFESPTGYFVKEVSLNGV

SEQ ID NO: 20690 - protein, 1393 aa, unidentified
  REGION 1..1393: note = Cas Enzyme sequence
MEKFLQNYFLGLDIGTTSCGFAVTDENYNVVRAKGKKLWGVRLFEEAETASSRRLKRSSRRRLERRKLKLAWLNEIFAKEIAKVDKDFYDRIKYSPLFVEDKKAQNKDLGKYSLFDCEIEGKKYTDRDFYKDYKSIYHLRKELLSTPAKDIRFLYLAIHSIIKRRGHFLYEGDFADNASVLESVNDLVTYVNTLPLDASISLEELSEQNEKKLLKIVADGFKKKDAKNFLYGALQATTKQAKALTDSLVNGIFEGKKIFGKEVEKLDFSAEDIQDKMLALENVEEDELILIEKAKNLYSLFQMKKVLGNCNYVCESMVEIITTHERQLKEFKSFIKKYYPTKYHEIFRAENTKVVNYAHYINQTKYNGGKKVLGLELPSTEKRTKDNFYKYIKGILNTKIENETQEYLALRNEFLELIENDNFLPKPRSKNNSVLPNKLYEKELMQILKVNEQKYEFLKEIDAEFGITTSQKICQILTFRVPYFVGPITDKTNKNAWAIKLSNQALKPWNIEQIIDYSQAEEEFIKRMVKKCTYMPKYNAMPKKSLLYSEFCVLNELNNLTINGNLITVKEKQFIYDYGFKKHKKVTLSILRQLLISNGFYTETDLAKDSFGGIDKGFANSLSTYVSLCEKFGQEFVNEHKQDFEKVIFYSTISSDKDRFVKKLKKEFTIFTDDQIKFLKSITCTDWGRISKEFLTTTFIDKSTGELTSVIQELYNKNYNLQQIINSQNYTLEERLQQDTTADLETLTYEAVEELYCSPAVKRGVWQAVKIIKEIVATMGKMPSKIFVEVTRSDEQKGDAGRKKSRKDTLTEIYAECLKDSSKELTKELNQLIDQLNNKNDANLRSEMLYLYFLQQGKCMYTGEPIAIADLFNNNLYDVDHIVPQSVLKDDSIDNKVLVKKQTNLEKSDRYPLPSNWIAKQKDFWAMLNKYKFISDKKYQKLIRRTELSSQELGDFIARQLVETNQSCKAVIEFLKAVVDNPRDVVYSKAGRVSDFRHKYDILKCRDVNDYHHAKDAYLNVVVGNVLFNRFTNNPRHFYADKSKNKNAGLTKHVLKLFDTTVKEFFGDKVVWDKQVHLPIVKETCLKNDCLISYMSYCNYNTAFYKETIHKSLLHNKKSEAKISLKGEDNALSNFEKYGGYNNFSSAYFMVVKSDKRGKIITTIETVTAYLYKKYNGDSNKILEHIAKEQGLVNAQIVLDRINIKSTIKIGKGEYLLAGKSSDMYILHNFNEWKTSKEINDYVRIIAKYNDFVKNKKDKLLTILDDQIIVSDKSERGTTQLILNKDENLWLYENIANQLNKEMYKETSLVGVLDIVENGQEKFKNLSVLEQVEVLKQLLIALTVGPTTISTKLIGGDANTGKIRISKNITGKNIKLIMRSVTGLYEKTINLGD

SEQ ID NO: 20691 - protein, 1437 aa, unidentified
  REGION 1..1437: note = Cas Enzyme sequence
MESNGKYFVGLDIGTNSVGWAATDKQYKLLRGGYRKKLMWGSHLFMPASDCKERRLFRCARRRLNRRKYRIDLLNSLFVKEIAKVDDTFFQRLHDSSLHLDDKKVKTKYPYFGNKESEKKFHKDYPTIWKLRLELIKNNPSAFDDIRKVYLAIHHIMKYRGNFLIEGDYKTDDIKKFDIALAADLNKAFCETVPFDEDGNIRIDLVNPIELEKVFINKKKVYKKDLKKALTDNVLNQDKVYKDIVKELTLALVGSDFNMCKLLNIESEENKKINLSKYDEERDSWQEIAEDAIAVIDSLHKIYSWRQVYLLLQGKSTLSQSFVEIYEQHKEDTHLLLKVCRDIDSEIKPSKSFYQLMFKDEYDSSSKSNTKKDLLNNYRNMSKHRGGVKPTEVQKFIKKVILDNEECKIFCASNPNSLLSKNLNTLAERINEEDSTFLFYPSIKSTSAIPNQLHYLELEQILDNAVKYPHLEFLENEITKIKNLFKFRVPYYVGPTPKVKNSKNPQFTWSIRKPGHENEEITPWNFYDVIDIEKTRNEFIGRMVRKCSYLPSENCLPKSSLLYEEYVALDTINNISLDGKSLDKELKKEIYALALSQGKITYKNIKDYLGERNIKESMSGIDNDTSISLKNNKIALSIFPDIFSDTKNSHNHYEIIEDIINLLTVFGDDLRDALKSIENKYSSELTSEQLKLVSAIKTESYGRLSRILLTSIHPTDLENGEVDMSRSIIQEMRDTNSHFMKIISSPEYSYAIKLFKDNHSSIEKMKIESMLDSFPSITRRAIKQSLEIVKEIKHIKKDDPEKIFIEVTREDDLEKKNKKTKSRFESYQTLLDELNQDKNKTEKLQAFRKKTNLDIDSNNLFKEAKKSDENGSINGERVYLYLKQLGIDLYTGKKIDFEKLISADGNTVYDVDHVIPQSLTKDDSFDNKVLTERDINQKVKGDIYPLPLALRKADNIVIWKFLRSKNLMSDKLFNSLMRVTPLSEDEIGEFENRQLNVVNVVTNAIRDIFHELYPETIVVFSKASNISDFRQEYNYLKCRELNDLHHAHDAYLNIVVGNVLDEKYTKDLPTIIRNKYEDLKNKLISKSLNETKNSESTSFKLINCFRAKALSNQHGELYWDRSYHDLIKRNLLSATPIVTIKTEVNHGAYYNQKMVKKGKGFLPIKKQLADTTKYGGYSGIAPAQFILCQTIDRKGKIGKRLFSVPVIYNQYINWKELKNVNLVDDPRFVKFTDCSKYTKIELISTIPLYTILRFSNLKLALSGWDGIRQLSTWKLDNYVIKNQEQIEYLRALVKNKSKIDSEIKKIGNDVPFDFSYSLQRKNQKGQLVEFKINREQNISLVKEFFSGNEKSFKSEYFLDKDNTFEEAIHKFSELSFSAQFEILQSILKAISKTSYGDLESLGLWKTAGLIRLNINLSNCKYIEFTSPTGLYFKRTKL

SEQ ID NO: 20692 - protein, 1329 aa, unidentified
  REGION 1..1329: note = Cas Enzyme sequence
MAKVKDTYQIGLDLGVASIGWSVVDDNNKLIRKRGQNLWGVRLFDEANTAAERRGFRRQRRTISKRIWRLSLLKNELKSFVIKEDPGFFDRFSKSQIKPEKYMLFDGKYNDATYMREFPTIFHLRVALQSEKKCREYIKRGIYYRLLFLACHDILKTRGNFLSSSSLGGSTGNSKDSINQLINNLVTVIHEIDENSELDYNFIRKALADHLSSKEKINARKSDKNTTFLKAVLGYKFDLNNIVYFSDEKLNFDFNIETWDEQLTNDESIDGILLELFEIYKNIKLNVLIGEHKSLSYAKVTIYEKHKKDLFTLKKDIKKVDNNLNSNHYDDLFLTDGKKVSYTSYVGKLLIDKQKIKIKKETSREDLVKKLVAIRKEYQDKTNDLKLLSYIEEEDFLIIPTNKDNRLIPYQLHFNELEVILNQFINIANSKEAIEHAKNIKILLKFKVPYYAGPLSNHASDEMSNYWLIKKENHKNSKITPFNFDEVVNKRETNKAFIGKMLRKCTYLTNEICIQQETTLYQTYIFYNTINKVKVNDINLTKEQKQILFNNSKSGKTLTKSRIISMLGLPKNSDLTGFSKTDEDKPLQISLSAIKKFEKIFPEYKNNPFYMSFYDDVVNSISLIDSDELDVRREQIQDIIDSYKTIIISNQQVNELASVKSSKWGNLSSKFLNEVLFDDGEGELRTMLETLKDSNLNMMEILYKGDNQLTLDRLNNNDFNLSDSNGLHEYLKTRYISPQAKRTITQANLIIDEIIKIMNGVKPTKISIEFTREKEIYKKETQSRFKQLSEIYKNLESENIQVINELGNLQKNKEEDKLKSKKIYLYFMQLGKDLYSGKSIDFDLLMSNSKFYDIDHIFPQSRIKDDSLDNLVLTSSVINGEKNNIYPLPKEVQDNNKDLWAYLVNKKLISQKKYERLTRITPLSDYELEDFVNRQKTTLDWINLEIANIFNIKYNETNDKNFIIYSKSRHVSAFRNTFNLLKFRELNDFHHAHDAYLNIVLGKAIQKNLYINSDGKFRTYNYERILENTLEDQIKYIQDIFKHNDILVTKKTKINSQGAFWDQNIVSAKEPGKNDGYAPIKNFLEVDKYGGYNGVKTAFFTILDINGKKVIEAIPTVDCSNFYDEEMFNNQKFEHYIASNYSNATIIIPIIPIGQKVLLEGVPLRIAGKSKNSIIYHNSSQLVLDKNTQEYLRQLFSIQRRFKGKKIEENIWLSAGLTKEMNINAFEIILMKVNRLAETHKLYSKHTIDKINGSGDTLDEFKGYSFIDQIETLIMIITKLLKPNSSNQGRLFGTTYGDMPRNKILTSKGISVVKESVTGFYTKIINIDV

SEQ ID NO: 20693 - protein, 1329 aa, unidentified
  REGION 1..1329: note = Cas Enzyme sequence
MAKVKDTYQIGLDLGVASIGWSVVDDNNKLIRKRGQNLWGVRLFDEANTAAERRGFRRQRRTISKRIWRLSLLKNELKSFVIKEDPGFFDRFSKSQIKPEKYMLFDGKYNDATYMREFPTIFHLRVALQSEKKCREYIKRGIYYRLLFLACHDILKTRGNFLSSSSLGGSTGNSKDSINQLINNLVTVIHEIDENSELDYNFIRKALADHLSSKEKINARKSDKNTTFLKAVLGYKFDLNNIVYFSDEKLNFDFNIETWDEQLTNDESIDGILLELFEIYKNIKLNVLIGEHKSLSYAKVAIYEKHKKDLFTLKKDIKKVDNNLNSNHYDDLFLTDGKKVSYTSYVGKLLIDKQKIKIKKETSREDLVKKLVAIRKEYQDKTNDLKLLSYIEEEDFLIIPTNKDNRLIPYQLHFNELEVILNQFINIANSKEAIEHAKNIKILLKFKVPYYAGPLSNHASDEMSNYWLIKKENHKNSKITPFNFDEVVNKRETNKAFIGKMLRKCTYLTNEICIQQETTLYQTYIFYNTINKVKVNDINLTKEQKQILFSNSKSGKTLTKSRIISMLGLPKNSDLTGFSKTDEDKPLQISLSAIKKFEKIFPEYKNNPFYMSFYDDVVNSISLIDSDELDVRREQIQDIIDSYKTIIISNQQVDELASVKSSKWGNLSSKFLNEVLFDDGEGELRTMLETLKDSNLNMMEILYKGDNQLTLDRLNNNDFNLSDSNGLHEYLKTRYISPQAKRTITQANLIIDEIIKIMNGVKPTKISIEFTREKEIYKKETQSRFKQLSEIYKNLESENIQVINELGNLQKNKEEDKLKSKKIYLYFMQLGKDLYSGKSIDFDLLMSNSKFYDIDHIFPQSRIKDDSLDNLVLTSSVINGEKNNIYPLPKEVQDNNKDLWAYLVNKKLISQKKYERLTRITPLSDYELEDFVNRQKTTLDWINLEIANIFNIKYNETNDKNFIIYSKSRHVSAFRNTFNLLKFRELNDFHHAHDAYLNIVLGKAIQKNLYINSEGKFRTYNYERILENTLEDQIKYIQDIFKHNDILVTKKTKINSQGAFWDQNIVSAKEPGKNDGYAPIKNFLEVDKYGGYNGVKTAFFTILDINGKKVIEAIPTVDCSNFYDEEMFNNQKFEHYIASNYSNATIIVPIIPIGQKVLLEGVPLRIAGKSKNNIIYHNSSQLVLDKKTQEYIRKIFSIQRRFKGKKIEENIWLSAGLTKEMNINAFEIILMKVNRLAETHKLYSKHTIDKINGSGDTLDEFKGYSFIDQIETLIMIITKLLKPNSSNQGRLFGTTYGDMPRNKILTSKGISVVKESVTGFYNKIINIDV

SEQ ID NO: 20694 - protein, 1329 aa, unidentified
  REGION 1..1329: note = Cas Enzyme sequence
MAKVKDTYQIGLDLGVASIGWSVVDDNNKLIRKRGQNLWGVRLFDEANTAAERRGFRRQRRTISKRIWRLSLLKNELKSFVIKEDPGFFDRFSKSQIKPEKYMLFDGKYNDATYMREFPTIFHLRVALQSEKKCREYIKRGIYYRLLFLACHDILKTRGNFLSSSSLGGSTGNSKDSINQLINNLVTVIHEIDENSELDYNFIRKALADHLSSKEKINARKSDKNTTFLKAVLGYKFDLNNIVYFSDEKLNFDFNIETWDEQLTNDESIDGILLELFEIYKNIKLNVLIGEHKSLSYAKVAIYEKHKKDLFTLKKDIKKVDNNLNSNHYDDLFLTDGKKVSYTSYVGKLLIDKQKIKIKKETSREDLVKKLVAIRKEYQDKTNDLKLLSYIEEEDFLIIPTNKDNRLIPYQLHFNELEVILNQFINIANSKEAIEHAKNIKILLKFKVPYYAGPLSNHASDEMSNYWLIKKENHKNSKITPFNFDEVVNKRETNKAFIGKMLRKCTYLTNEICIQQETTLYQTYIFYNTINKVKVNDINLTKEQKQILFSNSKSGKTLTKSRIISMLGLPKNSDLTGFSKTDEDKPLQISLSAIKKFEKIFPEYKNNPFYMSFYDDVVNSISLIDSDELDVRREQIQDIIDSYKTIIISNQQVDELASVKSSKWGNLSSKFLNEVLFDDGEGELRTMLETLKDSNLNMMEILYKGDNQLTLDRLNNNDFNLSDSNGLHEYLKTRYISPQAKRTITQANLIIDEIIKIMNGVKPTKISIEFTREKEIYKKETQSRFKQLSEIYKNLESENIQVINELGNLQKNKEEDKLKSKKIYLYFMQLGKDLYSGKSIDFDLLMSNSKFYDIDHIFPQSRIKDDSLDNLVLTSSVINGEKNNIYPLPKEVQDNNKDLWAYLVNKKLISQKKYERLTRITPLSDYELEDFVNRQKTTLDWINLEIANIFNIKYNETNDKNFIIYSKSRHVSAFRNTFNLLKFRELNDFHHAHDAYLNIVLGKAIQKNLYINSEGKFRTYNYERILENTLEDQIKYIQDIFKHNDILVTKKTKINSQGAFWDQNIVSAKEPGKNDGYAPIKNFLEVDKYGGYNGVKTAFFTILDINGKKVIEAIPTVDCSNFYDEEMFNNQKFEHYIASNYSNATIIVPIIPIGQKVLLEGVPLRIAGKSKNNIIYHNSSQLVLDKKTQEYIRKIFSIQRRFKGKKIEENIWLSAGLTKEMNINAFEIILMKVNRLAETHKLYSKHTIDKINGSGDTLDEFMGYSFIDQIETLIMIITKLLKPNSSNQGRLFGTTYGDMPRNKILTSKGISVVKESVTGFYNKIINIDV

SEQ ID NO: 20695 - protein, 1395 aa, unidentified
  REGION 1..1395: note = Cas Enzyme sequence
MKKEIKDYFLGLDVGTGSVGWAVTDTDYKLLKANRKDLWGMRCFETAETAEVRRLHRGARRRIERRKKRIKLLQELFSQEIAKIDEGFFQRMKESPFYAEDKTILQENTLFNDKDFTDKTYHKAYPTINHLIKAWIENKVKPDPRLLYLACHNIIKKRGHFLFEGDFDSENQFDTSIQALFEYLREDMEVDIDADSQKVKEILKDSSLKNSEKQSRLNKMLGLKPSDKQKKAITNLISGNKINFADLYDNPDLKDAEKNSISFSKDDFDALSDDLASILGDSFELLLKAKAVYNCSVLSKVIGDEQYLSFAKVKIYEKHKTDLTKLKNVIKKHFPKDYKKVFGYNKNEKNNNNYSGYVGVCKTKSKKLIINNSVNQEDFYKFLKTILSAKSEIKEVNDILTEIETGTFLPKQISKSNAEIPYQLRKMELEKILSNAEKHFSFLKQKDEKGLSHSEKIIMLLTFKIPYYIGPINDNHKKSFPDRCWVVKKEKSPSGKTTPWNFFDHIDKEKTAEEFITSRTNFCTYLIGESVLPKSSLLYSEYTVLNEINNLQIIIDGKNICDIKLKQKIYEDLFKKYKKITQKQISTFIKHEGICNKTDEVIILGIDKECTSSLKSYIELKNIFGKQVDEISTKNMLEEIIRWATIYDEGEGKTILKTKIKAEYGKYCSDEQIKKILNLKFSGWGRLSRKFLETVTSEMPGFSEPVNIITAMRETQNNLMELLSSEFKFTENIKKINSGFEDVEKQFSYNGLVKPLFLSPSVKKMLWQTLKLVKEISHITQAPPKKIFIEMAKGAEFEPARTKTRLKILQDLYSNCKNDADAFSPEIQYLSGKIENEDNLRLRSDKLYLYYTQLGKCMYCGKPIEIGHVFDTSNYDIDHIYPQSKIKDDSISNRVLVCSSCNKNKEDKYPLKSEIQSKQRGFWNFLQRNNFISLEKLNRLTRATPISDDETAKFIARQLVETRQATKVAARVLEKMFPETKIVYSKAETVSMFRNKFDIVKCREINDFHHAHDAYLNIVVGNVYNTKFTNNPWNFIKEKRDNPKIADTYNYYKVFDYDVKRNNITAWEKGKTIITVKDMLKRNTPIYTRQAACKKGGLFDQTIMKKGLGQHPLKKEGPFSNISKYGGYNKVSAAYYTLIEYEEKGNKIRSLETIPLYLVKDIQKDQDVLKSYLTDLLGKKEFKILVPKIKINSLLKINGFPCHITGKTNDSFLLRPAVQFCCSNDEVLYFKKIIRFSEIRSQREKIGKTISPYEDLSFRSYIKENLCKKTKNDEIGEKEFYDLLQKKNLEIYDMLLTKHKDTIYKKRPNSATIDILVKGKEKFKSLIIENQFEVILEILKLFSATRNVSDLQHIGGSKYSGVAKIGNKISSLDNCILIYQSITGIFEKRIDLLKV

SEQ ID NO: 20696 - protein, 1395 aa, unidentified
  REGION 1..1395: note = Cas Enzyme sequence
MKKEIKDYFLGLDVGTGSVGWAVTDTDYKLLKANRKDLWGMRCFETAETAEVRRLHRGARRRIERRKKRIKLLQELFSQEIAKIDEGFFQRMKESPFYAEDKTILQENALFNDKDFTDKTYHKAYPTINHLIKAWIENKVKPDPRLLYLACHNIIKKRGHFLFEGDFDSENQFDTSIQALFEYLREDMEVDIDADSQKVKEILKDSSLKNSEKQSRLNKILGLKPSDKQKKAITNLISGNKINFADLYDNPDLKDAEKNSISFSKDDFDALSDDLASILGDSFELLLKAKAVYNCSVLSKVIGDEQYLSFAKVKIYEKHKTDLTKLKAVIKKHFPNNYKKVFGYNQDNESKNNYSGYVGVCKTKNKKLVINNSVNQEDFYKFLKPILSAKSEIKEVNDILAEIETGNFLPKQISKSNAEIPYQLRKMELEKILSNAEKHFSFLKQKDEKGLSHSEKIIMLLTFKIPYYIGPINDNHKKSFPDRCWVVKKEKSPSGKTTPWNFFDHIDKEKTAEEFITSRTNFCTYLIGESVLPKNSLLYSEYTVLNEINNLQIIIDGKNICDTKLKQKIYEDLFKKYKKITQKQISTFIKHEGICNKTDEVIILGIDKECTSSLKSYIELKNIFGKQVDEISTKNMLEEIIRWATIYDEGEGKTILKTKIKAEYGKYCSDEQIKKILNLKFSGWGRLSRKFLETVTSEMPGFSEPVNIITAMRETQNNLMELLSSEFKFTENIKKINSGFEDAEKQFSYDGLVKPLFLSPSVKKMLWQTLKLVKEISHITQAPPKKIFIEMAKGAELEPARTKTRLKILQDLYSSCKNDADAFSSEIQYLSGKIENEDNLRLRSDKLYLYYTQLGKCMYCGKPIEIGHVFDTSNYDIDHIYPQSKIKDDSISNRVLVCSSCNKNKEDKYPLKSEIQSKQRGFWNFLQRNNFISLEKLNRLTRTTPISDDETAKFIARQLVETRQATKVAAKVLEKMFPETKIVYSKAETVSMFRNKFDIIKCREINDFHHAHDAYLNIVVGNVYNTKFTNNPWNFIKEKRDNPKIADTYNYYKVFDYDVKRNNITAWEKGKTIITVKDMLKRNTPIYTRQAACKKGELFNQTIMKKGLGQHPLKKEGPFSNISKYGGYNKVSAAYYTLIEYEEKVNKIRSLETIPLYLVKDIQKDQDVLKSYLTDLLGKKEIKILVPKIKINSLLKINGFPCHITGKTGDSFVLRPAVQFCCSNDEVLYFKKIIRFNEIRSQREKMGKTISPYEDLSFRSYIKENLCKKTKADEIGEKEFYDLLQKKNLEIYDMLLTKHKDTIYNKRPNSTTLGMLTKGRYEFINLKPKDQIIVMLEILKLFCTTREAIDLGLIKGKPAAGVATLGKKISNLDNCILIYQSITGIFEKRIDLLKV

SEQ ID NO: 20697 - protein, 1395 aa, unidentified
  REGION 1..1395: note = Cas Enzyme sequence
MKKEIKDYFLGLDVGTGSVGWAVTDTDYKLLKANRKDLWGMRCFETAETAEVRRLHRGARRRIERRKKRIKLLQELFSQEIAKIDEGFFQRMKESPFYAEDKTILQENTLFNDKDFTDKTYHKAYPTINHLIKAWIENKVKPDPRLLYLACHNIIKKRGHFLFEGDFDSENQFDTSIQALFEYLREDMEVDIDADSQKIKEILKDSSLKNSEKQSRLNKMLGLKPSDKQKKAITNLISGNKINFADLYDNPDLKDAEKNSISFSKDDFDVLSDDLASILGDSFELLLKAKAVYNCSVLSKVIGDEQYLSFAKVKIYEKHKTDLTELKNVIKKHFPKDYKKVFGYNKNEKNNNNYSAYVGVCKTKSKKLVINNTVNQEDFYKFLKPILSAKSEIKEVNDILTEIETGNFLPKQISKSNAEIPYQLRKMELEKILSNAEKHFSFLKQKDEKGLSHSEKIIMLLTFKIPYYIGPINDNHKKSFPDRCWVVKKEKSPSGKTTPWNFFDHIDKEKTAEEFITSRTNFCTYLIGESVLPKNSLLYSEYTVLNEINNLQIIIDGKNICDTKLKQKIYEELFKKYKKITQKQISTFIKHEGICNKTDEVIILGIDKECTSSLKSYIELKNIFGKQVDEISTKNMLEEIIRWATIYDEGEGKTILKTKIKAEYGKYCSDEQIKKILNLKFSGWGRLSRKFLETVTSEMPGFSEPVNIITAMRETQNNLMELLSSEFKFTENIKKINSGFEDVEKQFSYNGLVKPLFLSPSVKKMLWQTLKLVKEISHITQAPPKKIFIEMAKGAELEPARTKTRLKILQDLYNSCKNDADAFSSEIKDLSGKIENEDNLRLRSDKLYLYYTQLGKCMYCGKPIEIGHVFDTSNYDIDHIYPQSKIKDDSISNRVLVCSSCNKNKEDKYPLKSEIQSKQRGFWNFLQRNNFISLEKLNRLTRTTPISDDETAKFIARQLVETRQATKVAAKVLEKMFPETKIVYSKAETVSMFRNKFDIIKCREINDFHHAHDAYLNIVVGNVYNTKFTNNPWNFIKEKRDNPKIADTYNYYKVFDYDVKRNNITAWEKGKTIITVKDMLKRNTPIYTRQAACKKGGLFDQTIMKKGLGQHPLKKEGPFSNISKYGGYNKVSAAYYTLIEYEEKGNKIRSLETLPLYLVKDMQKDQEKLKSYLTDQIGKKEFKILVPKIKINSLLKINGFPCHITGKTGDSFVLRPAVQFCCSNDEALYFKKIIRFNEIRSQREKMGKTISPYEDLSFRSYIKGNLYKKTKTDEIGEKEFYDLLQKKNLEIYDMLLTKHKDTIYSKRPNSTTLGMLIKGRYEFINLKPEDQIKVTLEILKLFCTTRELADLHLIGGNTNSGLARLGKKISNCDNCILICQSITGVFEKRIDLLKI

SEQ ID NO: 20698 - protein, 1395 aa, unidentified
  REGION 1..1395: note = Cas Enzyme sequence
MKKEIKDYFLGLDVGTGSVGWAVTDTDYKLLKANHKDLWGMRCFETAETAEVRRLHRGARRRIERRKKRIKLLQELFSQEITKIDESFFQRMKESSLYAEDKTILQENALFNDRDFTDKAYYKAYPTINHLIKAWIENKVKPDPRLLYLACHNIIKKRGHFLFEGDFDSENQFDTSIQALFEYLREDMEVDIDADNQKIKEILKDSSLKNSEKQSRLNKTLGLKSSDKQKKALTNLISGNKINFTDLYDNPDLKDAEKNSISFSKDDFDALSDELASILGDSFELLLKAKAVYNCSVLSKVIGDEQYLSFAKVKIYEKHKTDLTKLKNVIKKHFPKDYKKVFGYNKNEKNNNNYSAYVGVCKTKNKKLVINNSVNQEDFYKFLKPILSAKSEIKEVNDILTEIETGNFLPKQISKSNAEIPYQLRKMELEKILANAEKYFSFLKQKDENGLSHSEKIIMLLTFKIPYYIGPINDNHKKSFPDRCWVVKKEKSPSGKTTPWNFFDHIDKEKTAEAFITSRTNFCTYLIGESVLPKSSLLYSEYTVLNEINNLQIIIDGKNICDIKLKQKIYEDLFKKYKKITQKQISTFIKHEGVCNKTDEVIILGIDKECTSSLKSYIELKNIFGKQVDEISIKNMLEEIIRWATIYDEGEGKTILKTKIKAEYGKYCSDEQIKKILNLKFSGWGRLSRKFLETVTSEMPGFSEPVNIITAMRETQNNLMELLSSEFKFTENIKKINSGFEDAEKQFSYDSLVKPLFLSPSVKKMLWQTLKLVKEISHITQNPPKKIFIEMAKGAELDPVRTKTRLKILQDLYNNCKNDADAFSSEIKDLSGKIENEDNLRLRSDKLYLYYTQLGKCMYCGKPIEIGHVFDTSNYDIDHIYPQSKIKDDSISNRVLVCSSCNKNKEDKYPLRSEIQLKQRGFWNFLQRNNFISLEKLNRLTRTSPISDDETAKFIARQLVETRQATKVAAKVLEKMFPETKIVYSKAETVSMFRNKFDIVKCREINDFHHAHDAYLNIVVGNVYNTKFTNNPWNFIKEKRDNPKIADTYNYYKVFDYDVKRNNITAWEKGKTIITVKDMLKRNTPIYTRQAACKKGGLFDQTIMKKGFGQHSLKKEGPFSNISKYGGYNKVSAAYYTLIEYEEKGNKIRSLETIPLYLVKDVQKGQDVLKSYLTDQLGKKEFKILVPKIKINSLLKINGFPCHITGKTNDSFLLRPAVQFCCSNDEVLYFKKIIRFNEIRSQREKIGKTISPYEDLSFRSYIKENLCKKTKNDEIGEKEFYDLLQKKNLEIYDMLLTKHKDSIYKKRPNSATIDILVKGKEKFKSLIIENQFEVILEILKLFSATRNVSDLQHIGGSKYSGVAKIGNKISSLDDCILICQSITGIFEKRIDLLKI

SEQ ID NO: 20699 - protein, 1365 aa, unidentified
  REGION 1..1365: note = Cas Enzyme sequence
MVSAKKQDYYLGLDIGTDSVGYAVTDAEYSLLKYRGEPMWGVMTFEEGMNAAERRSFRTARRRLDRKKQRAELLRTLFAEDICKIDPHFFIRRKESFLFPEDTAHGVHLFCGAGITDEEYHRRYPTIHHLILDLMMGTAPHDVRLVYLACNWLVTHRGHFLFDLDAGQAESLLDFSRIYDEFITYLNEVEYPLPWANSVKSEQVLQIMQMKNGVKGKKDAFKAELFSGKRFPSQEGEAYAVEQLVGLLSGGSVKLAALFAEPELDVSVNLRGDDETFAQALASLTEEQAEFLNLLRKMSDCARLLTTMTFSKDTPLPCISAAKIEVYDQHKRDLAYLKKFIRAYHSEKYAEVFRRAVEGNYASYSKHIGSLKKAGQKAKFKWAGKEKFSEYLKKIVRNTPVSETDRPDYEDMMTRLEQGIFLPKQKDTDNRIIPQQLYRMELDRILAVAAEYLPMLTQKDESGMTVSEKIQSIFAFRVPYFVGPLNTKSPNAWVVRKSQEKILPWNLKEIIDLDASEEAFIKCMTNTCTYLPGEDVLPEKSLLYSRFTVLNELNNLKIDGRPIPVETKQAIFTEVFAKERRVSPAKIRSYLLGRGLIGKESVLSGVDTTIHSSLSSYHVFQQLLESKKLSEHQVEDIIHHCAYSEDRGRLVRWLEMQCPGLSKEDRLYVSRQNLKGFGRLSREFLTQLQGGPVTGGPQKSILEWLWDTNENLMQLLSERYTFSKAIEERVRAYYVIPGNRKCLSERLKEDRLPGSARRAIHRTLDVVRDVTGAVGAPKKIFIEMARGGTQDQRGKRTSSRKKQLLDLYQSIKTEEVRQLQKQLEDMGEMADNRLQSDALFLYYLQMGKCAYTGHPIDLSRLGGDFYNKDHIYPQSYVKDDSVLNNLVLVESTANGVKKDIYPIAKEIRDRQRLFWEELLKTGLMTQEKFRRLTRAEPFTDAEKQGFINRQLVETRQSTKAVAELLKEAYPKAEIVYVKAGLVSEFRQEYGIVKCRSVNDLHHAKDAYLNIVVGNVYHERFNKQWFRLTEHYNVQVKKIMSSSWNHGETVIWRGSESLAKVKAVCEKNAVHVTRYAFCRGGGLFDQMPVKAGSDLLPLKKGLETEKYGGYNKPTASYYILASFVQKKKREGMLVPVELHEQERVNSNAEYANAYVRQQIMRIKGEDAITDVQILWKERKIKINTVFSFDGLKMTLSGKSSGGSRILLAPIMPLMLGAEQERYIKRLDSFQEKCRTNPAILLDERYDEISKQKNMELYDALVQKLEASPFQKFPANPCQVLNDGRGKFHELPLQKQVATLINIVTLFQRSGSGGVDLSEIGGSKHSGVKVLSAYFSNWKKYYTNVHIVDASPAGLHETSSPNLLDLL

SEQ ID NO: 20700 - protein, 1160 aa, unidentified
  REGION 1..1160: note = Cas Enzyme sequence
MRRPVGITGKKTAFKEQVYGGKAMPKEDAETDWYAVDQVAALLSGGKAKLAAVFPWADTEESVSLSGDDDAFAQATAALDEDQREFLEILRKLSDCARLTATMTAEDGTQYSCISMAKVAVYDRHKADLEYLKGFLRTYHPDKFAEVFRQVREDNYVTYSKHIASVKKQNRPAKFKWSDKEKFSDHLKRIVKDTPVSEKDRPAYEDMLFRLDQRTFLPKQKDSDNRIIPQQLYRMELDQILNLAEGYLPMLLKKDEDGLTAKEKIQSIFAFRIPYFVGPLNRTSSNAWVVRKPEGKILPWNLEQMVDLDASETAFINRMTNQCTYLPGEDVLPEKSLLYSRFTVLNELNNLKVDGCPIPVEVKQLLFTQVFCEHKRVSPKKLKECLISNGLVEENAELSGLDETVKSSLSSYHIFRELLQSKKLTQPQVESIITRCAYSEDKGRLLRWLRDTYTLSEADYRYIARQNLKGFGRLSRRFLTQLKGGPVDGSQSKTILEWMWDTNENLMQLLSDRYTFAQTIREETAAYYAKPENKKTLSQRLKDEHLPGSVRRSIYRTLDMVQDVTGTMGAPKKIFVEMARGGTPEQKGQRTRSRKNQLLDLYNAIKTEESRQLQQQLEDMGEMADNRLQSDKLFLYFLQMGKCMYTGHAIDLAKLGNDAYYNKDHIYPRSQTKDDSVLNNLVLVESAVNGSKKDVYPVAPDIQRSQGQWWAALRKVGLMTEEKYRRLTRTTRLTDAEKMGFINRQLVETRQSTKVIAQLLKENYPQADIVYVKAGLVSEFRQDSGIVKCRSVNDLHHAKDAYLNIVVGNVYHERFSKQWFRLTESYNIELKKIMAHPLSHGQEVIWRGETDIAKVKKVCEKNAVHVTRYAFCRNGGLFDQQPVRAGADLVPLKQGLDTQKYGGYNKPAASFFVLAGFTQGKKRDVMIVPVELQYAQRFQTDRDFAQSYLEGQISQIKGGKEVTRVSILLNGRILKINTVFSCDGVKMALSGKCSGGSRIAIAPILPLILGEEMEQYIKHLDSFNSKKGVNTSIVLDPKHDKITPEGNLALYDILTQKLRSDPFQKLPANPVSLLIKERDRFCAFTPEEQVSFLINLLVYFQRRGSGGTDLSAIGGSKQGGKKLLSATLSNWKKVYRDVRILDSSPTGLWERSSDNLLELL

SEQ ID NO: 20701 - protein, 1358 aa, unidentified
  REGION 1..1358: note = Cas Enzyme sequence
MRDYFIGLDIGTDSVGWAVTDPEYHIQKKNGKALWGVRLFDQANTAAERRGYRVARRRLERRKQRIEWLREMFAHEIAKVDPAFFLRVDESKYLESDKRLMENGQPLGRYTLFADRDFCDKDYHKAYPTIYHLRYALMTKDHSFDVRLVYLAIHHIMKNRGHFLFSDMNLDDVNFASCLQELKELLMGDYDLTFDIADPDTFSKILTNRKLNTTGKKTALRKAGGFAKTDIQQLAICDLLSGSKVKLSALFNRELPKENDRSVTFKGDFEGVEAELIETLGEDMPLIYLIKKIYDWSVLDELRAGKKYLSEAKIEVYEQHKAELAVFKKLLRHNKEIYKEMFGAARQKLDNYAAYTGHRSANYRCSYEAFGKYARKQLDAVMPILDESEKNIALDVRMGFENGTFLSMQTSKSNGVIPHQLHEQELELILKRASSYLPFLNEKDDSGLMLQERILAMFKFRIPYYVGPLYVNPNAKTNHGWIVRSNERITPWNFEQVVDLEKCAENFITRMTAVCSYIGESVLPADSLLYSKFVALNMINKIRINSQPISVETKQRIFNECLLVQGKGTFQSIKSFLMANGMMQKGDELDGIDKDFRVSLSGYRVFAQLLSRENTTMMVEDIIRHIVLFGEDRKLLERWLKKEYGKVLSETDRTYVIRNRSNFRGWGRLSAEFLTEIKHMDQETGELISIIDMLWQTNDNLMELLSERYSFAKAVEEYRAEKYAGKERTLDEVLADSYASPGIRRAIHQTIRIVSEIEKIMGCEPKRVFVEVTRQNGEKNKRTTSRKMQLEALYAHCKEMAPDVYELLQGYDEAALRSTKLYLYFTQLGKCMYSGEPIDLDRLAIDYDIDHIHPQKKVKDDSITNRVLVKKELNATKSDQYPLSADVQNKMHGFWSQLKAKGLISDEKYRRLTRKERFTDDELSNFIARQLVETSQACKLVAELLRNRYHGADKVVYVKANNVSSFRQDQRILPDGTQMQAWACKGVQTKQDPLFVKCREVNDFHHAKDAYLNIVVGNVYHLKFTRSPINFIKGKHEYSLNRMFDFNVERNGEVAWRAGDEGTIATVRHTMRKNNVLFTRYAHEVTGGLFDQLPVGKGGGQAMIKSSDLRMSTEKYGGYNKLTGAYFCLVEHTEKKKRVRSVESVLLMHKGFFEANPVAYCEKILGLNDPKVLIEKIKINSLVSFDGFRMHVSGRTGTQIVYKNANQLVLSPVENEYLKRVAKYIERCTAARIALPINAFDGLSSEENQHIYSLFIEKLMNNRYSVKFTTARKTLEEHSEKFCALSIYEQCLVLMQILNLFKTSAASADLKLLSGKAGIGILLTSKNLANYSSNKFSLIHQSVTGVFEKEINLLGDAF

SEQ ID NO: 20702 - protein, 1359 aa, unidentified
  REGION 1..1359: note = Cas Enzyme sequence
MMRDYFIGLDIGTDSVGWAVTDPEYHIQKKNGKALWGVRLFDQANTAAERRGYRVARRRLERRKQRIEWLREMFAHEIAKVDPAFFLRVDESKYLESDKRLMENGQPLGRYTLFADRDFCDKDYHKAYPTIYHLRYALMTKDHSFDVRLVYLAIHHIMKNRGHFLFSDMNLDDVNFASCLQELKELLMGDYDLTFDIADPDTFSKILTNRKLNTTGKKTALRKAGGFAKTDIQQLAICDLLSGSKVKLSALFNRELPKENDRSVTFKGDFEGVEAELIETLGEDMPLIYLIKKIYDWSVLDELRAGKKYLSEAKIEVYEQHKAELAVFKKLLRHNKEIYKEMFGAARQKLDNYAAYTGHRSANYRCSYEAFGKYARKQLDAVMPILDESEKNIALDVRMGFENGTFLSMQTSKSNGVIPHQLHEQELELILKRASSYLPFLNEKDDSGLMLQERILAMFKFRIPYYVGPLYVNPNAKTNHGWIVRSNERITPWNFEQVVDLEKCAENFITRMTAVCSYIGESVLPADSLLYSKFVALNMINKIRINSQPISVETKQRIFNECLLVQGKGTFQSIKSFLMANGMMQKGDELDGIDKDFRVSLSGYRVFAQLLSRENTTMMVEDIIRHIVLFGEDRKLLERWLKKEYGKVLSETDRTYVIRNRSNFRGWGRLSAEFLTEIKHMDQETGELISIIDMLWQTNDNLMELLSERYSFAKAVEEYRAEKYAGKERTLDEVLADSYASPGIRRAIHQTIRIVSEIEKIMGCEPKRVFVEVTRQNGEKNKRTTSRKMQLEALYAHCKEMAPDVYELLQGYDEAALRSTKLYLYFTQLGKCMYSGEPIDLDRLAIDYDIDHIHPQKKVKDDSITNRVLVKKELNATKSDQYPLSADVQNKMHGFWSQLKAKGLISDEKYRRLTRKERFTDDELSNFIARQLVETSQACKLVAELLRNRYHGADKVVYVKANNVSSFRQDQRILPDGTQMQAWACKGVQTKQDPLFVKCREVNDFHHAKDAYLNIVVGNVYHLKFTRSPINFIKGKHEYSLNRMFDFNVERNGEVAWRAGDEGTIATVRHTMRKNNVLFTRYAHEVTGGLFDQLPVGKGGGQAMIKSSDLRMSTEKYGGYNKLTGAYFCLVEHTEKKKRVRSVESVLLMHKGFFEANPVAYCEKILGLNDPKVLIEKIKINSLVSFDGFRMHVSGRTGTQIVYKNANQLVLSPVENEYLKRVAKYIERCTAARIALPINAFDGLSSEENQHIYSLFIEKLMNNRYSVKFTTARKTLEEHSEKFCALSIYEQCLVLMQILNLFKTSAASADLKLLSGKAGIGILLTSKNLANYSSNKFSLIHQSVTGVFEKEINLLGDAF

SEQ ID NO: 20703 - protein, 1357 aa, unidentified
  REGION 1..1357: note = Cas Enzyme sequence
MQEYYLGLDIGTDSVGWAVTDLQYKILKKNGKALWGTRLFPEANTAADRRANRIARRRIERREQRIALLRDIFAPAVAAVDPAFFQRLDESKFLEADKRPDGSGAPLGKYALFADGAYCDRDYHREFPTIYHLRRALLLEDRAFDVRLVYLAAHHILKKRGHFLFGDLALEDVTFESCLSELRECLREEYDQEFFLQDEESFSQALRDRSLGANRKKDALREAMGPDAKDRQLSTLLDFLAGKKGSAAALCGLELAEDVKFSFKDDFEAAEPQLIAALGDDMNLVYCAKRMYDWSALAEILNGERYLSCAKAKEYEKHKEDLQRLKGVLRDFPAEYRAMFRKSDVEHNYAAYSGHGSAQQRCNADDFLAYVKKVLGALREKMNAASRAEVEAILNEVEAGTFLPRQSSTANGRVPYQCHEKELEIILERASRYLPFLREKDESGLTAQEKILAIFRFRIPYYVGPLNPKSKNAWLVRGEEKISPWNFDQVVDLDKSAENFITRMTAKCSYIGAPVLPRDSLLYTRFVALNMLNKLSVNGHPISVALKQEIYEKHLIPRGKTNFKALHQWLLSNGKLQKSDELGGVDTEFKLAMPGYAVFRNLLARGNSEDMVEEIIRHIVLFGKERKLLSHWLEREYGGRLSEEDRAYVLRQRERFSGWGNLSAQLLRDIRCPVEEGGEPLSIDEALWRTNCNLNELLSNQYGFASAIEQRRAQVLGREKPTLEEFLRDSYASPGIRRAIHQSMGILDEIQKLMGGAPKRVFVEVTRGEGAKERTQSRKKQLEALYKSCKKDAEKIYEDYAELYAHLQKQDDAALRGKKLYLYFTQMGRCMYSGRRIDLADLFAEGYDIDHIHPRSVVKDDSFDNLVLVRAELNRSKTNDYPIRDSIRETMRGHWTFLRKHGLISEEKYRRLTRATRFEDSELAGFIARQLVQTGQAAKIVAELLRQRYGDDRVVYVKAGNVSAFRQDQRITAEGEQKQAGACKGQKTQQDPLFVKCREVNDFHHAKDAYLNIVVGNTYHVKFTRNPLRFVQSRQTYSMNRVFDFDVVEKDGFAWKAGEDGSIAMVRRMMRKNNILLTRYAREETGALFDLQILPKGKGQALIKASDPRMSIEKFGGYNKVKGAYFALIEHEERKKRVRSLEVVTILDKALYEREPLRYCEEILGLKAPKVLIPKIKIDSLFCLDGFRMHLSGRTGDRLIYKNANPLVLDPEWAQYIKQAAKCVERYAGEKEDVQLTAFDAVDARRNCELYQILLAKLALQPYRVKYGTPAKTLAEHAEAFRRLAPLPQCKVLLQILNLFSTNANSADLKLLCGKAGIGILLTSKNLGNFAGHSFHLIHPSITGVFEREIDLLGDEF

SEQ ID NO: 20704 - protein, 1399 aa, unidentified
  REGION 1..1399: note = Cas Enzyme sequence
MNTAVSKDSRGSDYYLGLDIGTASVGWAVANTDYELVKEHRKYLWGVRLFDTADTAAERRLHRAARRRHQRRLQRQRLLKEIFEDKISEVDPHFFERLKESSYHREDRSGNFLSTLFNDESFKDTDYFAKFPTIFHLRSHLIHHPEERPDIRILYLAIHSILKHRGHFLFPGESLESISSFSLLFDELLKNIETSLQCTLHVSCTPETFGTILKKKRRTDKKNDLQGVLTLTRTTEEEIEETPKKLTSELIKALSGTPFLLSMLFKNDSYKDSEQDKIEFDKEGFEDLKESIEVLLEPEEYALIETLEGIYNWTLLSDILNGEKFISDAKVASYRNHKDDLKQLKLLVKKYAGSAYYKAFKDPSIQNNYAHYIGTGNKSGKKVQVAHKGKCLQEDVNKYFHNLLKPYQNDEDRDLDNMLEKLEQKSALPKQRVRDNRVIPHQLHLKELQIILENAKAYYPFLTIPDDDGYTPTQKIISMMTFRIPYYVGPLNTSHMEKEGKEGFCWMVRQQGKEDVPIFPWNWTEVVDKNASAEKFITRMTNSCTYLFNEEVLPKFSLLYNRYMVLNELNNLKVNGEPISVELKQKIYNELFLHSGKKTITLKMLQKFLVVNNIVNKGDVTTIEGIDNGFANSLKSHIDFAPYLEANILSVEDVEKIIEWKAYYVDDATILKEKITQELHEKLTSEQIDDITKLVRNYKGWGRLSRAFLEDIYHVDRATGEGYSIIHMMWETNENLMELLSSKYDYLDEIQRINNETLINKKFSYESLVKPLSVSPPVKRQIWQTLLIVHELKKVMGKAPKRVFIEMAREEREKKRTTSRKESLRILYDRCKNDISFNKALLESLDTKTDVELRNDRLYFYYTQMGRCPYCGGKIELDQMNNTQLYDIDHIYPQSLIKDDSLNNRVLAHKACNGEKGNSYPINPQWQNTMIGFWKVLLDRSLISEEKYARLTRTTPLSDEELFAFINRQLVETRQSTKVVASILKNLFQDEGTEIVYVKARNVSSFRTDFEIKKSRLVNDHHHAHDAYLNIVVGNAYHTKFTGDARNFIKELKRGDQYYNASNIFSRSIQRNGRLAWIADERYDANKGRPKSEKQETGTIATVRKMLRNHQVLVTRQAVEVSGALFKLQPLRKKKNLLPLKGSSQTLQDTTKYGGYNAPATAYFALVQHEKKGKEVRQFVPVPILYAELFKQNPGTLLKYCEEELDLINAKIVIPQILLHELVQLKGYTMSLSGITGTQIIANNEIQLVLGEEQYDYIAQIEKYLSLLKKVKAPEIKENAEILAESLHICKQDNLTLYELLLAKERDSIYRYRPANQAKFLEEKRSVFESLDIKGQCAVLVQIINLFTCTPESANLTKLGGGSSSGIVKFQSQIADKEARLIHQSPTGIFTKSRRVYEI

SEQ ID NO: 20705 - protein, 1395 aa, unidentified
  REGION 1..1395: note = Cas Enzyme sequence
MKKEIKDYFLGLDVGTGSVGWAVTDTDYKLLKANRKDLWGMRCFETAETAEVRRLHRGARRRIERRKKRIKLLQELFSQEIAKIDEGFFQRMKESPFYAEDKTILQENTLFNDKDFTDKTYHKAYPTINHLIKAWIENKVKPDPRLLYLACHNIIKKRGHFLFEGDFDSENQFDTSIQALFEYLREDMEVDIDADSQKIKEILKDSSLKNSEKQSRLNKMLGLKPSDKQKKAITNLISGNKINFADLYDNPDLKDAEKNSISFSKDDFDVLSDDLASILGDSFELLLKAKAVYNCSVLSKVIGDEQYLSFAKVKIYEKHKTDLTELKNVIKKHFPKDYKKVFGYNKNEKNNNNYSAYVGVCKTKSKKLVINNTVNQEDFYKFLKPILSAKSEIKEVNDILTEIETGNFLPKQISKSNAEIPYQLRKMELEKILSNAEKHFSFLKQKDEKGLSHSEKIIMLLTFKIPYYIGPINDNHKKSFPDRCWVVKKEKSPSGKTTPWNFFDHIDKEKTAEEFITSRTNFCTYLIGESVLPKNSLLYSEYTVLNEINNLQIIIDGKNICDTKLKQKIYEELFKKYKKITQKQISTFIKHEGICNKTDEVIILGIDKECTSSLKSYIELKNIFGKQVDEISTKNMLEEIIRWATIYDEGEGKTILKTKIKAEYGKYCSDEQIKKILNLKFSGWGRLSRKFLETVTSEMPGFSEPVNIITAMRETQNNLMELLSSEFKFTENIKKINSGFEDVEKQFSYNGLVKPLFLSPSVKKMLWQTLKLVKEISHITQAPPKKIFIEMAKGAELEPARTKTRLKILQDLYNSCKNDADAFSSEIKDLSGKIENEDNLRLRSDKLYLYYTQLGKCMYCGKPIEIGHVFDTSNYDIDHIYPQSKIKDDSISNRVLVCSSCNKNKEDKYPLKSEIQSKQRGFWNFLQRNNFISLEKLNRLTRTTPISDDETAKFIARQLVETRQATKVAAKVLEKMFPETKIVYSKAETVSMFRNKFDIIKCREINDFHHAHDAYLNIVVGNVYNTKFTNNPWNFIKEKRDNPKIADTYNYYKVFDYDVKRNNITAWEKGKTIITVKDMLKRNTPIYTRQAACKKGGLFDQTIMKKGLGQHPLKKEGPFSNISKYGGYNKVSAAYYTLIEYEEKGNKIRSLETLPLYLVKDMQKDQEKLKSYLTDQIGKKEFKILVPKIKINSLLKINGFPCHITGKTGDSFVLRPAVQFCCSNDEALYFKKIIRFNEIRSQREKMGKTISPYEDLSFRSYIKGNLYKKTKTDEIGEKEFYDLLQKKNLEIYDMLLTKHKDTIYSKRPNSTTLGMLIIGRYEFINLKPEDQIKVTLEILKLFCTTRELADLHLIGGNTNSGLARLGKKISNCDNCILICQSITGVFEKRIDLLKI

SEQ ID NO: 20706 - protein, 1353 aa, unidentified
  REGION 1..1353: note = Cas Enzyme sequence
MKREPYYIGLEVGPTYAAYAVTNESYNLERFRGKDMWGIYKFDEAESSQDRKNARSARKNIKKEKERIGLIRSYFHDEIEKADVNFFARLDNSTFHAEDKDKILSGDRNVLFNDENYKDADYNEQFPTIYHLRSFLAKHNELVDIRLVYLAVSNIMKHRGNFYSKNLEDTDSAIKDIYAGICEKASQADMQLYPEADTDKIMDYMLNTALTNKVKATLVSQEVKALTKSETALIKLMCGLKVKITDIFPGLLETLPEEDKKTSMSFSDNDYLDRTEEIENLTGEDNYELISAVKELYDAVIIQNIMQGHRFISDAKIASYEKHMADLKLLKSTMKRYLSKQEYSRFFNIEEPGTYAAYVKSGMSNGVKTRRNSEKGRTLDDLYGSIKKLLLKADEDDEDAEYILDEIGKRTFLPKQRTSDNRLIPNQLYATELKAILDNAAEHYEFLNEKDDSGLTVSERIMKIFTFTMPYFIGPTSEYNTRGWVVRKEAGKVMPWNLEEKIDVKESAKSFIESMIGKCTYLSGERVLPKSSLLYERFMVLNEMNCIRVDGEKIPVEIKQEIVNGKLALGKKLTRKQILSFLVKKGLATSDSLITGMDEKLNNTMTSHKIFADIFGTLDSETEAAAEDIILWSAIYGDSKEYVKQQIENKYPGLLDEDRMKKALSIKSNDWGKLSKEFLTMTGTNKETGERISIIDAMWQMNLSLNELINDNRYDFMSLIKEKTIKAEKNIFTFEYDDLNELYATASQKRSIWAAVKIVREVEKIKGYAPESVFLNTIKNRPKDVKKDARKTRLIELYKNLKGVSKEWKDSMISHISECDSDGSLKSKKVYLYFLQLGKDMYTWKDIDFKEVMATGSDVYNIDHIYPKHYVKDDSIDNIVLTNAGFNKEEKKDIYPVPDSIYQTMHENWLYLRQNGFMSAEKLARLSDRNPMSDEKRAAFIGKLYTQVSSSTKMLADIFKNILSKDTKVIYTKSSEVSDFRRQYGFPKMTMLNEHYLAKDAYLNIVVGNVWYTKFTASPMWYIEKEYRTGKSEYNLNRMYDFNIIRDERIAWIAEREKKNIPGTIAVIKKVMSRNTPATVTRITEGHGALTNATISKAAKSKPGVYLPLKSDERYKDVTKYGGKTSIKTAYNFLVEHTDKHGSRIRTLYSLPLYLANNVKNKEDIEKYCRETLGLKEPDVRINKIMLNSELEIDGYRYLLGGKTGLQYGLKNNIPMVFNVEWQGYISKIEKYIDFKSVDKDITSERNIELYDEILGKHKNSIFSRKRNPLYNLIESCRDNFVGLSLEEQMQALYQILFLTRMGTNVSNLSVIGAGANVGLMHLNATISKASSVKLIEISITGMYTIETDMLNC

SEQ ID NO: 20707 - protein, 920 aa, unidentified
  REGION 1..920: note = Cas Enzyme sequence
QLHENELNAILDNAQKFYPFLLEKDQDGYTPVEKIQKIFRFRIPYYVGPLNTAHQDKGGHSWSVRKKEGKIYPWNFSEMIDEEESATKFIERMTNKCTYLIGEDVLPKESLLYAKFNVLNELNNLRIDGELIAPELKQDIYNNVFKKYQRVTGKKVKDYLRINGVISKEQELSGFDQNFKSSLKAYHDFKQIVGTGVLSESEQEDIVRDITLFADSQKMLKQRIHRKYPMLSDKQIAQLANKKYAGWGRLSRTFLENIESVNKETGEVMNIITALWETNENLMKLLSGKYDYTKQIEQWNAGQMKKGEIEYQDIEELYVSPAVKRPIWQTIKIVREITNIMGGAPKRIFVEVAREPGEKGVRKVSRRNQLLDLYKACKKEAPELYDRLANKESDNALRSDKLFLYYSQMGRCMYSGDAIDLDELFTNRYDIDHIYPQSKVMDDSIDNRVLVKRDLNSKKTDTFPVSEEYRKAGKALWSTLLKKGLISKEKYKRLTRTEPFGEDELAGFIARQLVETRQSTKAVAHLLEEAYPDAEIVYAKARAVSEFRHKFDMIKVREVNDFHHAKDAYLNIVVGNTYYVKFTKDAAWFVRNNPGRTYNLKKMFENETVKRGNETAWIPGDNGTICTVKKWMRKNNVLFTRRAYEVKGGLFDQNILKKGKGQIPIKGGADERLQSIEKYGAYNKASGAYFMLVESDGKKGERKRTIEFVPVYLAKSLEESVELRRRYCEEELGLVNPDVRILKIKINTLFDVDGFKMHLSGRTGKQLLFKGANQLVLSEELQLIVKKIGKYCADYKENKEAVLSEKSEVTQEVLEELYDEFLHKLRNSLYGHRLSAQIEKIEKGKEIFQSMSNEQKCLILMEILHLFQCASQAANLQLIDGPGKAGILVLNNDISKLEDIKIINQSITGFYEQVIDLKTI

SEQ ID NO: 20708 - protein, 1356 aa, unidentified
  REGION 1..1356: note = Cas Enzyme sequence
MKKFEEYYIGLDMGTGSVGWAVTDPTYNIIKRHGKALWGIRLFESAKTAEERRIFRTSRRRTERRKNRLHLLQEIFAEEISKKDMGFYQRMKESKYWHEDKKDINGNMPELPYALFADDGFTDKDYYKKYPTIFHLRYALATNTTDKPDIRLLYLALHHIIKHRGHFLFEGKKLSEVKEFSTAIEALVQQAEEQEIDLKSLTQEEVLTQLEHIMSDAQCTKSDKKTQVSKLIVGTDKQKQKQEKAIAALITGCTVKLSDIFADPELDKEEISKICFSDNGYEEKEVEIESVLADRFLLIAAAKGVYDWTVLHDILGDARFLSEAKVKTYEKHRDDLRKVKQLLRMDKEVYEAVFGVSEKNEANYSAYIGMAKKNGKKQPIEKKCSQEDFYKFLKKQLDRLSVDEMGQEIIDELKAEMDLGTLFPKQMIRDNGVIPYQLHENELNAILDNAQKFYPFLLEKDQDGYTPVEKIQKIFRFRIPYYVGPLNTAHQDKGGHSWSVRKKEGKIYPWNFSEMIDEEESATKFIERMTNKCTYLIGEDVLPKESLLYAKFNVLNELNNLRIDGELIAPELKQDIYNNVFKKYQRVTGKKVKDYLRINGVISKEQELSGFDQNFKSSLKAYHDFKQIVGTGVLSESEQEDIVRDITLFADSQKMLKQRIHRKYPMLSDKQVAQLANKKYAGWGRLSRTFLENIESVNKETGEVMNIITALWETNENLMKLLSGKYDYTKQIEQWNAGQMKKGEIEYQDIEELYVSPAVKRPIWQTIKIVREITNIMGGAPKRIFVEVAREPGEKGVRKVSRRNQLLDLYKACKKEAPELYDRLANKESDNALRSDKLFLYYSQMGRCMYSGDAIDLDELFTNRYDIDHIYPQSKVMDDSIDNRVLVKRDLNSKKTDTFPVSEEYRKAGKALWSTLLKKGLISKEKYKRLTRTEPFGEDELAGFIARQLVETRQSTKAVAHLLEEAYPDAEIVYAKARAVSEFRHKFEMIKVREVNDFHHAKDAYLNIVVGNTYYVKFTKDAAWFVRNNPGRTYNLKKMFENETVKRGNETAWIPGDNGTICTVKKWMRKNNVLFTRRAYEVKGGLFDQNILKKGKGQIPIKGGVDERLQSIEKYGAYNKASGAYFMLVESDGKKGERKRTIEFVPVFLAKSLEESVELRRRYCEEELGLVNPDVRIPKIKINTLFDVDGFKMHLSGRTGKQLLFKGANQLVLSEELQLIVKKIGKYCADYKENKEAVLSEKSEVTQEVLEELYDEFLHKLRNSLYGHRLSAQIEKIEKGKEIFQSMSNEQKCLILMEILHLFQCASQAANLQLIDGPGKAGILVLNNDISKLEDIKIINQSITGFYEQVIDLKTI

SEQ ID NO: 20709 - protein, 1056 aa, unidentified
  REGION 1..1056: note = Cas Enzyme sequence
  REGION 1045..1050: note = misc_feature - Xaa can be any naturally occurring amino acid
MKKFEEYYIGLDMGTGSVGWAVTDSAYNIIKRHGKALWGIRLFESAKTAEERRIFRTSRRRTERRKNRLHLLQEIFAEEISKKDMGFYQRMKESKYWHEDKKDINGNMPELPYALFADDGFTDKDYYKKYPTIFHLRYALATNTTDKPDIRLLYLALHHIIKHRGHFLFEGKKLSEVKEFSTAIEALVQQAEEQEIDLKSLTQEEVLTQLEHIMSDAQCTKSDKKTQVSKLIVGTDKQKQKQEKAIAALITGCTVKLSDIFADPELDKEEISKICFSDNGYEEKEVEIESVLADRFLLIAAAKGVYDWTVLHDILGDARFLSEAKVKTYEKHRDDLRKVKQLLRMDKEVYEAVFGVSEKNEANYSAYIGMAKKNGKKQPIEKKCSQEDFYKFLKKQLDRLSVDEMGQEIIDELKAEMDLGTLFPKQMIRDNGVIPYQLHENELNAILDNAQKFYPFLLEKDQDGYTPVEKIQKIFRFRIPYYVGPLNTAHQDKGGHSWSVRKKEGKIYPWNFSEMIDEEESATKFIERMTNKCTYLIGEDVLPKESLLYAKFNVLNELNNLRIDGELIAPELKQDIYNNVFKKYQRVTGKKVKDYLRINGVISKEQELSGFDQNFKSSLKAYHDFKQIVGTGVLSESEQEDIVRDITLFADSQKMLKQRIHRKYPMLSDKQIAQLANKKYAGWGRLSRTFLENIESVNKETGEVMNIITALWETNENLMKLLSGKYDYTKQIEQWNAGQMKKGEIEYQDIEELYVSPAVKRPIWQTIKIVREITNIMGGAPKRIFVEVAREPGEKGVRKVSRRNQLLDLYKACKKEAPELYDRLANKESDNALRSDKLFLYYSQMGRCMYSGDAIDLDELFTNRYDIDHIYPQSKVMDDSIDNRVLVKRDLNSKKTDTFPVSEEYRKAGKALWSTLLKKGLISKEKYKRLTRTEPFGEDELAGFIARQLVETRQSTKAVAHLLEEAYPDAEIVYAKARAVSEFRHKFDMIKVREVNDFHHAKDAYLNIVVGNTYYVKFTKDAAWFVRNNPGRTYNLKKMFENETXXXXXXSMDSWR

SEQ ID NO: 20710 - protein, 1356 aa, unidentified; identical to SEQ ID NO: 20228
  REGION 1..1356: note = Cas Enzyme sequence

SEQ ID NO: 20711 - protein, 960 aa, unidentified
  REGION 1..960: note = Cas Enzyme sequence
QLDRLSVDEMGQEIIDELKAEMDLGTLFPKQMIRDNGVIPYQLHENELNAILDNAQKFYPFVLETDQDGDTPVEKIQKIFRFRIPYYVGPLNTAHQDKGGHSWSVRKKEGKIYPWNFSEMIDEEESATKFIERMTNKCTYLIGEDVLPKESLLYAKFNVLNELNNLRIDGELIAPELKQDIYNNVFKKYQRVTGKKVKDYLRINGVISKEQELSGFDQNFKSSLKAYHDFKQIVGTGVLSESEQEDIVRDITLFADSQKMLKQRIHRKYPMLSDKQIAQLANKKYAGWGRLSRTFLENIESVNKETGEVMNIITALWETNENLMKLLSGKYDYTKQIEQWNAGQMKKGEIEYQDIEELYVSPAVKRPIWQTIKIVREITNIMGGAPKRIFVEVAREPGEKGVRKVSRRNQLLDLYKACKKEAPELYDRLANKESDNALRSDKLFLYYSQMGRCMYSGDAIDLDELFTNRYDIDHIYPQSKVMDDSIDNRVLVKRDLNSKKTDTFPVSEEYRKAGKALWSTLLKKGLISKEKYKRLTRTEPFGEDELAGFIARQLVETRQSTKAVAHLLEEAYPDAEIVYAKARAVSEFRHKFDMIKVREVNDFHHAKDAYLNIVVGNTYYVKFTKDAAWFVRNNPGRTYNLKKMFENETVKRGNETAWIPGDNGTICTVKKWMRKNNVLFTRRAYEVKGGLFDQNILKKGKGQIPIKGGADERLQSIEKYGAYNKASGAYFMLVESDGKKGERKRTIEFVPVYLAKSLEESVELRRRYCEEELGLVNPDVRILKIKINTLFDVDGFKMHVSGRTGKQLLFKGANQLVLSEELQLIVKKIGKYCADYKENKEAVLSEKSEVTQEVLEELYDEFLHKLRNSLYGHRLSAQIEKIEKGKEIFQSMSNEQKCLILMEILHLFQCASQAANLQLIDGPGKAGILVLNNDISKLEDIKIINQSITGFYEQVIDLKT

SEQ ID NO: 20712 - protein, 1356 aa, unidentified
  REGION 1..1356: note = Cas Enzyme sequence
MKKFEEYYIGLDMGTGSVGWAVTDPTYNIIKRHGKALWGICLFESAKTAEERRIFRTSRRRTERRKNRLHLLQEIFAEEISKKDMGFYQRMKESKYWHEDKKDINGNMPELPYALFADDGFTDKDYYKKYPTIFHLRYALATNTTDKPDIRLLYLALHHIIKHRGHFLFEGKKLSEVKEFSTAIEALVQQAEEQEIDLKSLTQEEVLTQLEHIMSDAQCTKSDKKTQVSKLIVGTDKQKQKQEKAIAALITGCTVKLSDIFADPELDKEEISKICFSDNGYEEKEVEIESVLADRFLLIAAAKGVYDWTVLHDILGDARFLSEAKVKTYEKHRDDLRKVKQLLRMDKEVYEAVFGVSEKNEANYSAYIGMAKKNGKKQPIEKKCSQEDFYKFLKKQLDRLSVDEMGQEIIDELKAEMDLGTLFPKQIIRDNGVIPYQLHENELNAILDNAQKFYPFLLEKDQDGYTPVEKIQKIFRFRIPYYVGPLNTAHQDKGGHSWSVRKKEGKIYPWNFSEMIDEEESATKFIERMTNKCTYLIGEDVLPKESLLYAKFNVLNELNNLRIDGELIAPELKQDIYNNVFKKYQRVTGKKVKDYLRINGVISKEQELSGFDQNFKSSLKAYHDFKQIVGTGVLSESEQEDIVRDITLFADSQKMLKQRIHRKYPMLSDKQIAQLANKKYAGWGRLSRTFLENIESVNKETGEVMNIITALWETNENLMKLLSGKYDYTKQIEQWNAGQMKKGEIEYQDIEELYVSPAVKRPIWQTIKIVREITNIMGGAPKRIFVEVAREPGEKGVRKVSRRNQLLDLYKACKKEAPELYDRLANKESDNALRSDKLFLYYSQMGRCMYSGDVIDLDELFTNRYDIDHIYPQSKVMDDSIDNRVLVKRDLNSKKTDTFPVSEEYRKAGKALWSTLLKKGLISKEKYKRLTRTEPFGEDELAGFIARQLVETRQSTKAVAHLLEEAYPDAEIVYAKARAVSEFRHKFDMIKVREVNDFHHAKDAYLNIVVGNTYYVKFTKDAAWFVRNNPGRTYNLKKMFENETVKRGNETAWIPGDNGTICTVKKWMRKNNVLFTRRAYEVKGGLFDQNILKKGKGQIPIKGGADERLQSIEKYGAYNKASGAYFMLVESDGKKGERKRTIEFVPVFLAKSLEKSVELRRRYCEEELGLVNPDVRLSKIKINTLFDVDGFKMHLSGRSSNGLLFKGANQLVVPYKMEKIIKVISKYCFDYKENKEAVLSEKNRPTEEMFEELFDILVSKLEYAVYEKRLSAQVPKLKNGKIIFVELSAEEKCIVLMEILHLFQCASQSANLKLINGPGHAGILIMGFDISGLSNVHIINQSITGFYEQVIDLKTI

SEQ ID NO: 20713 - protein, 924 aa, unidentified
  REGION 1..924: note = Cas Enzyme sequence
FLPKQTVKDNSVIPYQIHLYELNAILKNLEDKVPLLKENGEKIQKIFTFRIPYYVGPLNGIRKKGEKSNWAVRKEGKIYPWNFDEMVDLEASAEQFIRRMTNKCTYLPSEDVLPKYSLLYSKYEVLNELNNLRLDGEKISVEQKQKIYEEVFQKSRKVTQKKLKNYLVKEGITGKEVEITGIDGDFKSSLTAYHDFKEKLTNLSLNQAEKECIILNVTLFGDDKAILKQRLKKLFPELTEKQRDSISKLPYRGWGRLSKVFLEETEAPAPETGEAWSIIRALWETNDNLMQLLSEKYLFASAIEEKNGNEQKKRDISYELVEELYVSPAVKRQIWQSLLIVKEICKVMGNPPKRVFIEMAREKTDQGRTSSRKKKLLELYKKCKAEEKDWIDEIEKRSDAEMRRDKLYLYYTQKGKCMYSGETIELEELWDNQKYDIDHIFPQSKVMDDSLDNRVLVKKKCNQMKEDKYPIDETVRKKMQPFWKSLVDAGLISEEKYKRLIRRNGFEPSELAGFISRQLVETRQSTKAAASILQQVIPDTQIVYVKAPTVSKFRKDFKFLKVREMNDYHHAKDAYLNIVVGNAYFVKFTSNPIHFIKENPGRSYNLKKMFEQERIERNGEIAWEGGNGTIVTVRKFMEKNNILVTRRSYEATGALFDQQIVKKGKGQVPIKSSDERLCDIQKYGGYNKEAGAYFVLAESEGKKGKKIRTIEYVPIRLKKEIQKSEENIIRYLEEERQLKNPRVLVPEIKIDTLLCVDGFYMWVSGRSGDQLLMQGANQLVLSQEETEILKKIVQYVERKKQNKELKIYDSDHLEEKKVMMLYETFLNKLINTVYAKKLGAQAKTLTEKREKFKELCIEEKCIVLYEVLHFFQCQSAAADLKLIGGSGRAGILCLNKNITDCSRIEMIHQSPTGIYEQAVDLNAL

SEQ ID NO: 20714 - protein, 1282 aa, unidentified
  REGION 1..1282: note = Cas Enzyme sequence
  REGION 1276..1279: note = misc_feature - Xaa can be any naturally occurring amino acid
MKGEYYLGLDMGSSSVGWAVTNEKYEILRAHGKTLWGVRLFDSAQTAEERRGFRTAKRRLDRRNWRIELLQKIFAEEVEKIDDGFFRRMKESRYWPEDKRDRRGKCPELPYALFADDDYTDKEYHKQFPTIYHLRKWLMETDETPDIRLIYLALHHMMKHRGHFLLNGNIEQVREFQTTFEQFLEAVRAEELGFSSEIGVERSKEIEAILKDRTLTKSAKKTKAVKAMRAETSCEKEWLGLITGGTAKLGNLFGEKQMDTLERPKLCFADAGYEEYAGEIEAELGEKYVLIEHAKAVYDWAVLADILQNYSSLSEAKVALYEKHKKDLKDLKKLVRENLSREEYQRLFAKKDEKANYYAYIKAPKQCSQEDFYGYLKKNILGKISDVTKVSCMQKEMEMGTFLPKQTVKDNSVIPYQIHLYELNAILKNLEDKVPLLKENGEKIQKIFTFRIPYYVGPLNGIRKKGEKSNWAVRKEGKIYPWNFDEMVDLEASAEQFIRRMTNKCTYLPSEDVLPKYSLLYSKYEVLNELNNLRLDGEKISVEQKQKIYEEVFQKSRKVTQKKLKNYLVKEGITGKEVEITGIDGDFKSSLTAYHDFKEKLTNLSLNQAEKECIILNVTLFGDDKAILKQRLKKLFPELTEKQRDSISKLPYRGWGRLSKVFLEETEAPAPETGEAWSIIRALWETNDNLMQLLSEKYLFASAIEEKNGNEQKKRDISYELVEELYVSPAVKRQIWQSLLIVKEICKVMGNPPKRVFIEMAREKTDQGRTSSRKKKLLELYKKCKAEEKDWIDEIEKRSDAEMRRDKLYLYYTQKGKCMYSGETIELEELWDNQKYDIDHIFPQSKVMDDSLDNRVLVKKKCNQMKEDKYPIDETVRKKMQPFWKSLVDAGLISEEKYKRLIRRNGFEPSELAGFISRQLVETRQSTKAAASILQQVIPDTQIVYVKAPTVSKFRKDFKFLKVREMNDYHHAKDAYLNIVVGNAYFVKFTSNPIHFIKENPGRSYNLKKMFEQERIERNGEIAWEGGNGTIVTVRKFMEKNNILVTRRSYEATGALFDQQIVKKGKGQVPIKSSDERLCDIQKYGGYNKEAGAYFVLAESEGKKGKKIRTIEYVPIRLKKEIQKSEENIIRYLEEERQLKNPRVLVPEIKIDTLFCVDGFYMWVSGRSGDQLLMQGANQLVLSQEEMEILKKIVQYVERKKQNKELKIYDSDHLEEKKVVMQYETFLNKLTNTVYAKKLGAQAKTLTEKREKFKELCIEEKCIVLYEILHFFQCQXXXXPLI

SEQ ID NO: 20715 - protein, 1327 aa, unidentified
  REGION 1..1327: note = Cas Enzyme sequence
MDKKYYIGADIGTESVGWAVTDEDYNILKARGRELWGSYLFDKAESAAERRLYRNARRRTARVRRRLNLLQELFAEEISKVDPLFFIRLNNSSLFTEDKDGVLTSKDALFADEKFCDKDYFKKYPTIYHLRSGLIKGEVDDIRLFYLAVHHIIKYRGHFLFELQNFSLGNSEIIREKFYLINAFLSDRDMPVLDLSDLDKAIDELKKKEGSKRSRQKLLTDILHTGSEKSLTAVVKAITGGSVKLKELYNIEEDNEKITSFSFEKSTFEDNDMPAIEEAVGIDEAVLVRELKAIYDWSVLCEIMGEETYVSFAKVKIYEKHREDLAWLKRYIRENCPEKYTAVFRNKNGKDNYAAYVGMDKQKRVSKCTREEFYAFLRKEVEITDKKVLAEIERSNFMPKQVSEKNGVIPYQVHLTELRKILDEAEKKFPFLKEKKDGKTVAEKIIMLMTFRIPYYVGPLHTQSDFGWSVRNPGYEKVSITPWNYSEAIDEDASEEKFIRLLTKKCTYLKGEDVLPENSLLYSEFAFLNELNNLRINGEKSEEARRLIYEYAKTHKKVTLKSCLALLIRNGCIPAGSGKEIFSGIDDDFKRSLKSYNDLSFLGEKRYTHSEMCEKIITWLTLISDKHRFEKRLRREYGKILTEEEIKKLKSLNYSKWGRLSEKLLDGITSARCTDENGECLTIIEAMRKKGENFMQLMSDKYGFQDAIREYNSESEQDEKVTYKKVSALYCSPAVKRSIWKTIEIVKEIVKIQGKDPAKVFIEMAREVKDGSMKGSRTVSRKDQLLELYKNIKGEEREWIAEIEQTPDAKFNSDKLVLYYRQLGKSMYSGKDISIDEVFDTNICDIDHIYPQSKIKDDSLDNRVLVYKTENQGKQDKYPIAEDIRVKMTPFWKMLKERKLISDVKFERLIRRTQLTQDELKDFINRQLVFTRQSTKAVAQLLKEMLPDTEIVYAKAGNANDFKSENNIIKIRELNDLHHAKDAYINIVVGNVYNTKFNHSARFYFNERESNDYDLKNLYRRDIPGAWKVADKERIIQIVEKNTAKAIRMTLGGQGRLFDVNPVKAGQNDDLLPLKMKGAISDTSKYGGYNSQKTAYFMLVRSKGKKGKIMLSMEAFPLWMEKQNKAGIEEKVRFCAKQGLVEPEIVIDRIKLNTLLYMDGSYAWLRGKTGNRIKLCNANQLYLNKEEMKILKRISNYMTDRKLLKRQDLPVGEKIKAEDNVRLYDALAEKLESPVYRGLSIRKQAEFLKKSRERFISLSLEKQCVVIFEVLHLMQCNSVNSDLTLLGGVPNAGSLVNSKFVQDNEMKIIYQSCTGYYREIIDFKRFL

SEQ ID NO: 20716 - protein, 1376 aa, unidentified
  REGION 1..1376: note = Cas Enzyme sequence
MSDFDKYKDQICTHKGFKRGNYFIGFDIGTNSVGWAVTNEKYELLKFKSHKMWGSRLFAEAQTAVDTRMKRSARRRLQRRKFRLLLLEELFAKAINAADDTFFLRLHESKYHVEDKTNPVKCTLFMDKDYTDIDYYKEFPTIYHLRHHLMTSGTKDIRLLFLGIHHILKYRGNFLYGRKEFSIDGEMYSVLRSTLEELGFGSYVEDASVLQSIANLVLDRGNVRSEKVKQIEPLIAQGKKLTSVEKNRLKAWAYLIIGLKANLVNLFTDEDVEVVLPEEKEFKTINLHEGIYEDVRDAYEDAWGDRFAIVDQCKVLHDIIVISSIIKPGQSLSEAKIESYNQHKEDLVLLKSVLKEDKKLYDDMFVVDIDKGTNYVKYIKQGVNGNTSTTQEAFYKYVRKVVSVLPETENTRRIVQKLEEGTFLPLQRISKNGVVPYQLHKEELVRILEKAKLNFPFLNEVEDGLTVADKIISILEFKIPYYVGPLNPTHSIENGGFAWVVRKEAGQVLPWNFEQKVDVQASAVKFIENLTNKCTYLIDQDVLPKYSLLYAEFSLLNELNNIRVNDKPLPVDVKQAFIRDHFMSLQDSKTATKKVVAKYLVDNNYVSQPPIITGMDQQIATKLTSHRDMTRILGEHFDYAMAEDIIRYITIFGESKDMLRQVLKNYYGDRLTTEQIKKLGKLTYTGWGRLSKKFLSDIWGMKKNDDDAEAGTIIEHMREGQENLMQLLSSSYSFIDVVQEYVTNVLGEKEKTAFEMLEDLSLSPMVKRSVWQTLRILDEIVSIRKELPKKIFVEVARTNKADKKRTQSRKALLEELYEQIKDEDVHVLQQELESKEDSALNSKKLYLYFTQMGRCMYSGRRIDIHELFTDKYDIDHIYPRSLTKDDSWHNIVLVEKQLNAEKTDRFPILSAIQSKQKGFWKLLWDRGFISEKKYDRLVRTTDLTDEELNQFINRQMVSTNQSVKGVTTLLHQLYPETEVVFSKAENVSDFRRDYGFVKVRSINHHHHAKDAYLNIVVGNVYHEKFTKNFLSFAKQKGTHRTYNLTKMFEYEIKLTEESKKVIWDPNIHMDIVKKMMKSNDVRVTQRAVPQKGGLSDETIYKKGIAKRGVYLPLKSSDERVRDVEKYGGRTSITISEYIILNIRDTSDQDRIEIFSLPLYIAGKKDIHKAIEEAYLSTCKKPASVVDIQILYRGLYIGSKVNINGFTYYMGGKTGSNVSVDSAVDVVMDITSSVYIKLLEKVAIKKIENSKTFRIENIKTSYNHKEVTVSKEQNIALYQELLKKLDTPLFSKMKGNKLEEFRTVGFDTFIALSLEDQASVLLEVLNVLTNFKTKRDITKIGMTSSRSTLGINISNTEQFSVITTSITGLYEQEIKIK

SEQ ID NO: 20717 - protein, 1343 aa, unidentified
  REGION 1..1343: note = Cas Enzyme sequence
MITMGEKYFVGLDIGTDSVGWAVTDEHYKLMRMKGKTAWGSRIFSEASDAKSRRVFRTTGRRLARRKYRIQLLNQLFAPEIAKVDDSFFERLAQSAYQIDDKSGPVNAPYPLFKTRKEEVAFYRSWPTIWHLRADMLNDNPEAFADVRYVYLAIHHIIKYRGNFLIKGAVSTDKVDDAVFDSINEAVASLIAEETDSEISDSDYTAIPSDKRESLFRILKNKDTNKVQKRKELKQEVIQNYQGSEKVDAYLDMLRSLLVGGKYALKTIFDDPDPKDISFGADFDDLEGQYRSLFGDYYPIVEAAKRIHDTVFLSDLKGDSQWLSEAFVKVYENHKNDLRELKRLAKLIDSAAGITDFKKEKGAYFSLFVDPDCENNYPAFVHVRTNIGKRPSVQDFNKFVRSVLEPHKDVIGSEPTYGPLMKALENEDLLSIVANKSTSVIPHQLHEVELAKILDNAGKRYPFVNGIKDKVMALFRWRVPYYFGPLATSKKSEHAWLVRKSNEAITPWNVNEIVDVDATKEAFINRLTNNCQYLHGEKVLASDSIVYADYVNLNRLNGMRIDGERIDEGTKKELFGFINSNHGQTVSVRGLKRFLLSKHKDIFGQDGVVISGLNETDKFSCKARFAFREAFDLEKDGAMVEDIINIQTIYKDDLDDGLAYLKKRYPSLTPKQQKAIKSFVPGGWGNLSLKLLKGLKWVDPVGVVHSIMDLLLETTETFMEIYHDERYGFQKLVEEANGAAFGTESKQDRVNELIESASPMTRRSTIQALRIIAEIAKIKKCPPSEISIEVTRKHDKKKNQALSRKKELSAFLKSLVKEKKETMLASQAKDVLGELEKQDLNALRGKHLYLYFKQAGLDLYTGKKIDINDINDATKYDTDHIIPQSKMKDDSMDNLALVNREANQRLKQDKYPLPETIRDNQTVRSLWRFLLKKKGITEKKYNNLIRDEPLTDQELQEFVARQLNSLNITNVLIRDCIVELYGIKPIFSKAQYPSYLRKSLSIPKIRDLNDCHHAIDAYLNIVAGVILQKHYGDPKLAYAQKKAGVKFTYNMESYLDKIMSEDSFKKLVVDTCWRHDFLLTYRNTYQEDALYKQTIMKKGEGDLIPVHSSGDNPLHDTKKYGGYTQLSTTGFRIVDGKEGKKTLEPVSLMSLKRGELKNESIIYPNQKVIINDLEFLIKSKNKNCASLELVTPLFLPKDDSEYLALAIRFQKKFEECDDDSFTFSTDKDGLVKKTVSKELNKKVLMSFLSYARNPRLSIIPYDGKLLKLFEEDIGIQSFDNAKLFDQVTELVSVMKLFTRSSRDSKIEGIPTTVFLKSYGSLGDLDLSFVYESVTGLYRTVKKL

SEQ ID NO: 20718 - protein, 1352 aa, unidentified
  REGION 1..1352: note = Cas Enzyme sequence
MKKFEEYYLGLDMGTGSVGWAVTDPSYNVIKRHGKALWGIRLFESANTAEERRAFRISRRRTERRKERLALLQEIFAEEICKRDAGFYQRMKESKYWHEDKLDINGNMPELPYALFADDGFTDKDYYKKYPTIYHLRYALVNNSEDKPDIRLVYLALHHIIKYRGHFLFEGKKLSEVENFSTAMDALKQQALEQDIDLSLLDDPDVLNQLESIICDVNCSKSDKKTQIGKLIAGTDKQKKAIAALITGCTVKLNDIFPDLELDKDDNAKVCFSDNNYEEKEAEIEALLTDRFLLITAAKCVYDWTVLHDILSNSHYLSEAKVKTYQKHCEDLRKVKKLLRADKEIYEAVFGVPANKEANYSAYIGMVKKNGKKQPIEKTCTTDDFYKFLKGKLDKLQVDEAGQMLIDQLKAEMETGTLFPKQRIRDNGVIPYQLHENELNAILKNASKFYPFLLQADTDSHTPIEKIQKIFRFRIPYYVGPLNTTHKDEGGHSWSVRKKEGKIYPWNFTEMIDEEESATKFIERMTNKCSYLIGEDVLPKESLLYAKFNVLNELNNLRIDGEFVSVEIKQLIYNQVFQKYQHVTGKKLKDFLLHNGIISKGQELSGFDQNFKSSLKAYHDFKQIVGAGVLTQNQQEDIVRDITLFGDSQPMLRKRLRRKYPALSDKQVQQLASRKYTGWGRLSRTFLEEIESVNKETGEIMNIITALWETNDNLMQLLSGKYDYITRIEERNAGRNFEGEVTYQNVEELYVSPAVKRPIWQTIRIVKEVAHIMGGSPKRIFVEMAKEPGEKGVRKVSRRNNLLDLYKQCKKEAPELYDRLANKESDNALRSDKLYLYYSQMGKCMYSNEPIDLDDLFTNRYDIDHIYPQSKVMDDSLDNRILVKRELNSRKSDNFPVPKEYVDAAKPLWDTLLSKKLISKEKYKRLTRRDSFGEEELAGFIARQLVETRQSTKAVTKLLATAYPESEIVYSKAKAVSEFRHKFDALKVRDVNDYHHAKDAYLNIVVGNTYYVKFTKDAAWFIRNNPGRSYNLKKMFENETVKRGNETAWIPGNNGTVCVVKKWLNKNNILFTRQSFEEKGGLFDQNIMKKGKGQVPLKNGSDKRLQDKEKYGAYNKASGAYFMLVESDGKKGTRKRTLEFVPVYMVKQMTESDEFRKRYCEETLGLINPDIRIPQIKINTLFDVDGFKMHLSGRTGKQLIFKGANQLVLSPEMQTIVKKIGKYCADRKENKNAVLSEKSELTSDNLEQLFDELLNKLKNSIYAKRLSKQAECLEMGKSKFLELTNENKCILLSETMHLFQCTSQSADLSLLNGPKHAGILLMNNDITKLEKINIYNQSITGFYEQVIDLQTI

SEQ ID NO: 20719 - protein, 1352 aa, unidentified
  REGION 1..1352: note = Cas Enzyme sequence
MKKFEEYYLGLDMGTGSVGWAVTDPSYNVIKRHGKALWGIRLFESANTAEERRAFRISRRRTERRKERLALLQEIFAEEICKRDAGFYQRMKESKYWHEDKLDINGNMPELPYALFADDGFTDKDYYKKYPTIYHLRYALVNNSEDKPDIRLVYLALHHIIKYRGHFLFEGKKLSEVESFSTAMDALKQQALEQDIDLSLLDDPDVLKQLESIICDVNCSKSDKKTQIGKLIAGTDKQKKAIAALITGCTVKLNDIFPDLELDKDDNAKVCFSDNNYEEKEAEIEALLADRFLLITAAKCVYDWTVLHDILSNSHYLSEAKVKTYQKHCEDLRKVKKLLRADKEIYEAVFGVPANKEANYSAYIGMVKKNGKKQPIEKTCTTDDFYKFLKGKLDKLQVDEAGQALIDQLKSEMEMGTLFPKQRIRDNGVIPYQLHENELNAILENASKFYPFLLQADPDGHTPIEKIQKIFRFRIPYYVGPLNTTHKDKGGHSWSVRKKEGKIYPWNFTEMIDEEESATKFIERMTNKCSYLIGEDVLPKESLLYAKFNVLNELNNLRIDGEFVSVEIKQLIYNQVFQKYQHVTGKKLKDFLLHNGIISKGQELSGFDQNFKSSLKAYHDFKQIVGAGVLTQNQQEDIVRDITLFGDSQPMLRKRLRRKYPALSDKQVQQLASRKYTGWGRLSRTFLEEIESVNKETGEIMNIITALWETNDNLMQLLSGKYDYITQIEEWNAGRNLEREVTYQNVEELYVSPAVKRPIWQTIRIVKEVAHIMGGSPKRIFVEMAKEPGEKGVRKVSRRNSLLDLYKQCKKEAPELYDRLANKESDNALRSDKLYLYYSQMGKCMYSNEPIDLDDLFTNRYDIDHIYPQSKVMDDSLDNRVLVKRELNSRKSDNFPVLKEYVDAAKPLWDTLLSKKLISKEKYKRLTRRDPFGEEELAGFIARQLVETRQSTKAVTKLLATAYPESEIVYSKAKAVSEFRHKFDALKVRDVNDYHHAKDAYLNIVVGNTYYVKFTKDAAWFIRNNPGRSYNLKKMFENETVKRGNETAWIPGDNGTVCVVKKWLNKNNILFTRQSFEEKGGLFDQNIMKKGKGQIPLKNGADKRLQNKEKYGAYNKASGAYFMLVESEGKKGTRKRTIEFVPVYLVKQMTESDAFRKKYCEEAFGLVNPDVRIPQIKINTLFDVDGFKMHLSGRSEKRLLFKGANQLVLSPEMQIIVKKIGKYCADRKENKNAVLSEKSQLSSDKLEQLYDELLNKLMNSIYAKRLATQAKFLDIGKPDFIELSTEDKCILLAEILHLFQCNSQASDLSLLNGPKRAGILKMNNDITKLEKINVYNQSITGFYEQVIDLQTI

SEQ ID NO: 20720 - protein, 1352 aa, unidentified
  REGION 1..1352: note = Cas Enzyme sequence
MKKFEEYYLGLDMGTGSVGWAVTNPSYNVIKRHGKALWGIRLFESANTAEERRAFRISRRRTERRKERLALLQEIFAEEICKRDAGFYQRMKESKYWHEDKLDINGNMPELPYALFADDGFTDKDYYKKYPTIYHLRYALVNNSEDKPDIRLVYLALHHIIKYRGHFLFEGKKLSEVENFSTAMDALKQQALEQDIDLSLLDDPDVLNQLESIICDVNCSKSDKKTQIGKLIAGTDKQKKAIAALITGCTVKLNDIFPDLELDKDDNAKVCFSDNNYEEKEAEIEALLADRFLLITAAKCVYDWTVLHDILSNSHYLSEAKVKTYQKHCEDLRKVKKLLRADKEIYEAVFGVPANKEANYSAYIGMVKKNGKKQPIEKTCTTDDFYKFLKGKLDKLQVDEAGQMLIDQLKTEMEMGTLFPKQRIRDNGVIPYQLHENELNAILKNASKFYPFLLQADTDSHTPIEKIQKIFRFRIPYYVGPLNTTHKDEGGHSWSVRKKEGKIYPWNFTEMIDEEESATKFIERMTNKCSYLIGEDVLPKESLLYAKFNVLNELNNLRIDGELVSVEIKQLIYNQVFQKYQHVTGKKLKDFLLHNGIISKGQELSGFDQNFKSSLKAYHDFKQIVGAGVLTQNQQEDIVRDITLFGDSQPMLRKRLRRKYPALSDKQVQQLASRKYTGWGRLSRTFLEEIESVNKETGEIMNIITALWETNDNLMQLLSGKYDYITQIEEWNAGRNLEGEVTYQNVEELYVSPAVKRPIWQTIRIVKEVAHIMGGSPKRIFVEMAKEPGEKGVRKVSRRNSLLDLYKQCKKEAPELYDRLANKESDNALRSDKLYLYYSQMGKCMYSNEAIDLNDLFTNRYDIDHIYPQSKVMDDSLDNRVLVKRELNSRKSDNFPVPKEYVDAAKPLWDTLLSKKLISKEKYKRLTRRDSFGEEELAGFIARQLVETRQSTKAVTKLLATAYPESEIVYSKAKAVSEFRHKFDALKVRDVNDYHHAKDAYLNIVVGNTYYVKFTKDAAWFIRNNPGRSYNLKKMFENETVKRGNETAWIPGDNGTVHVVKKWLNKNNILFTRQSFEEKGGLFDQNIMKKGKGQIPLKNGADKRLQNKEKYGAYNKASGAYFMLVESDGKKGTRKRTIEFVPVYMVKQMTESDEFRKRYCEETLGLINPDVRIPQIKINTLFDVDGFKMHLSGRTGKQLIFKGANQLVLSPEMQTIVKKIGKYCADRKENKNAVLSEKSQLSSDKLEQLYDELLNKLMNSIYAKRLATQAKFLDIGKPDFIELSTEDKCILLAEILHLFQCNSQASDLSLLNGPKRAGILKMNNDITKLEKINVYNQSITGFYEQVIDLQTI

SEQ ID NO: 20721 - protein, 1325 aa, unidentified
  REGION 1..1325: note = Cas Enzyme sequence
MKGEYYLGLDMGSGSVGWAVTNEKYEILRAHGKTLWGVRLFDSAQTAEERRGFRTAKRRLDRRNWRIELLQKIFAEEVEKIDDGFFRRMKESRYWPEDKRDRQGKCPELPYALFADDDYTDKEYHKQFPTIYHLRKWLMETDETPDIRLIYLALHHMMKHRGHFLLNGNIEQVREFQTTFEQFLEAVRAEELGFSSEIGVERSKEIEAILKDRTLTKSAKKTKAVKAMRAETSCEKEWLGLITGGTAKLGNLFGEKQMDTLERPKLCFADAGYEEYAGEIEAELGEKYALIEHAKAVYDWAVLADILQNYSSLSEAKVALYEKHKKDLKDLKKLVRENLSREEYQRLFAKKDEKANYYAYIKAPKQCSQEDFYGYLKKNILGKISDVTKASCMQKEMEMGTFLPKQTVKDNSVIPYQIHLYELNAILKNLEDKVPLLKENGEKIQKIFTFRIPYYVGPLNGIRKKGEKSNWAVRKEGKIYPWNFDEMVDLEASAEQFIRRMTNKCTYLPSEDVLPKYSLLYSKYEVLNELNNLRLDGEKISVEQKQKIYEEVFQKSRKVTQKKLKNYLVKEGITGKEVEITGIDGDFKSSLTAYHDFKEKLTNLSLNQAEKECIILNVTLFGDDKAILKQRLKKLFPELTEKQRDSISKLPYRGWGRLSKVFLEETEAPAPETGEAWSIIRALWETNDNLMQLLSEKYLFASAIEEKNGNEQKKRDISYELVEELYVSPAVKRQIWQSLLIVKEICKVMGNPPKRVFIEMAREKTDQGRTSSRKKKLLELYKKCKAEEKDWIDEIEKRSDAEMRRDKLYLYYTQKGKCMYSGETIELEELWDNQKYDIDHIFPQSKVMDDSLDNRVLVKKKCNQMKEDKYPIDETVRKKMQPFWKSLVDAGLISEEKYKRLIRRNGFEPSELAGFISRQLVETRQSTKAAASILQQVIPDTQIVYVKAPTVSKFRKDFKFLKVREMNDYHHAKDAYLNIVVGNAYFVKFTSNPIHFIKENPGRSYNLKKMFEQERIERNGEIAWEGGNGTIVTVRKFMEKNNILVTRRSYEATGALFDQQIVKKGKGQVPIKSSDERLCDIQKYGGYNKEAGAYFVLAESEGKKGKKIRTIEYVPIRLKKEIQKSEENIIRYLEEERQLKNPRVLVPEIKIDTLFCVDGFYMWVSGRSGDQLLMQGANQLVLSQEETEILKKIVQYVERKKQNKELKIYDSDHLEEKKVVMLYETFLNKLTNTVYAKKLGAQAKTLTEKREKFKELCIEEKCIVLYEILHFFQCQSVTADLKLIGGSGRAGVLCLNKNITDCNRIEMIHQSPTGIYEQAVDLNAL

SEQ ID NO: 20722 - protein, 1092 aa, unidentified
  REGION 1..1092: note = Cas Enzyme sequence
  REGION 8..18: note = misc_feature - Xaa can be any naturally occurring amino acid
VKKSGWGXXXXXXXXXXXLFGEKQMDTLERPKLCFADAGYEEYAGEIEAELGEKYVLIEHAKAVYDWAVLADILQNYSSLSEAKVALYEKHKKDLKDLKKLVRENLSREEYQRLFAKKDEKANYYAYIKAPKQCSQEDFYGYLKKNILGKISDVTKVSCMQKEMEMGTFLPKQTVKDNSVIPYQIHLYELNAILKNLEDKVPLLKENGEKIQKIFTFRIPYYVGPLNGIRKKGEKSNWAVRKEGKIYPWNFDEMVDLEASAEQFIRRMTNKCTYLPSEDVLPKYSLLYSKYEVLNELNNLRLDGEKISVEQKQKIYEEVFQKSRKVTQKKLKNYLVKEGITGKEVEITGIDGDFKSSLTAYHDFKEKLTNLSLNQAEKECIILNVTLFGDDKAILKQRLKKLFPELTEKQRDSISKLPYRGWGRLSKVFLEEMEAPAPETGEAWSIIRALWETNDNLMQLLSEKYLFASAIEEKNGNEQKKRDISYELVEELYVSPAVKRQIWQSLLIVKEICKVMGNPPKRVFIEMAREKTDQGRTTSRKKKLLELYKKCKAEEKDWIDEIEKRSDAEMRRDKLYLYYTQKGKCMYSGETIELEELWDNQKYDIDHIFPQSKVMDDSLDNRVLVKKKCNQMKEDKYPIDETVRKKMQPFWKSLVDAGLISEEKYKRLIRGNGFEPSELAGFISRQLVETRQSTKAAASILQQVIPDTQIVYVKAPTVSKFRKDFKFLKVREMNDYHHAKDAYLNIVVGNAYFVKFTSNPIHFIKENPGRSYNLKKMFEQERIERNGEIAWEGGNGTIVTVRKFMEKNNILVTRRSYEATGALFDQQIVKKGKGQVPIKSSDERLCDIQKYGGYNKEAGAYFVLAESEGKKGKKIRTIEYVPIRLKKEIQKSEENIIRYLEEERQLKNPRVLVPEIKIDTLFCVDGFYMWVSGRSGDQLLMQGANQLVLSQEEMEILKKIVQYVERKKQNKELKIYDSDHLEEKKVVMLYETFLNKLTNTVYAKKLGAQAKTLTEKREKFKELCIEEKCIVLYEILHFFQCQSVTADLKLIGGSGRAGILYLNKNITDCSRIEMIHQSPTGIYEQAVDLNAL

SEQ ID NO: 20723 - protein, 1341 aa, unidentified
  REGION 1..1341: note = Cas Enzyme sequence
MGKGYYVGLDMGTGSVGWAVTDESYQIFRRHGKAMWGVRLFESAKTAEERRMFRTGRRRLDRRGWRIEILQEIFAEEISRVDPGFFLRMKESKYYPEDKRDIQGNCPELPYTLFVDKTFTDKDFHKKYPTIYHLRKMLMETEDTPDMRLVYLALHHMMKHRGHFLLSGDISQVTEFKNTFNQFIENIRNEEMDFEIELDESAVQMIEETLKDKNLTRSAKKAKLVKGLNAKNVRDKAFLTLLSGGTVKLSDLFGMEELNEGERPKISFADNRYEEYAAVVEMELGELYYIVESAKAVYDWAILSDILGGSTSVSDAKVRAYEKHKADLKYLKAVVKEYFPKEVYNAVFVESSDKLNNYPAYIGMTKKNGKKVSLEGKRCSREEFMDFLKKNIVVKLPDEETKMYLQSELEKDSFLPKQVNKDNGVIPYQVHKYELKKILDNLGDKIPFLKENAEKIEKLFSFRIPYYVGPLRTGNGENSKFAWAERKSTEKIYPWNFENVIDVEQSAENFIRRMTNKCTYLIGEDVLPKDSLLYSKFMVLNELNNLRLDGQKISVELKQKIYRDVFCRSRKVTQKKLKSYLIREGIAGKNVELTGIDGDFKGSLTAYHDFKEKLTGVELTQKEKEEIILNIVLFGDDKKLLKQRLKKKFPQLTEKQINTVTALSYKGWGRLSKKLLEEVTVPAPETGEVWNIITALWETNDNFMQLLGKEYQFSDRIEEFNEEKADPEVSYQTIEDLYVSPAVKRQIWQTLQIVQEIEKVMGEKPKRVFVEMAREKQENKRMESRKKTLSDLYKKCKKEEPEWIETLCTSLEKHEEHQLRSDKLYLYYTQKGRCMYSGEPIDLEDLWDNTKYDIDHIYPQSKTMDDSLKNRVLVKKEYNAKKSDTYPIAADIQKKMMPFWKSLLTGGFIPKEKYDRLVRNNPLDANELAGFIERQIVETRQSTKAVAEILKKILPDTEIVYVKAKTVSKFRQDFDFIKVRDMNDLHHAKDAYLNIVVGNVYFVKFTKNAGWFVKENPGRTYNLEKMFIWDVARDGEIAWKAGKSGSIVQVRAMMEKNHILVTRRSYEVKGGLFDQQILKKGKGQVPVKESDERLRDIGKYGGYNKAAGAYFMLVSSKDKKGKEQRTIEFVPIYLKDRVEKDMESARNYLMEERGLREPKILIKKIKIDTLFKVDGFYMWLSGRTSNQLIFKGANQLILSKEDMKTLKKVVKYIQRQKEDKNVKISVRDGITEEELLKLYETFLDKIRHSIYGVRLSSQEKTLVNGKEKFIDLSVEAKCQVLYEILHLFQCQSGASNLKMIGGPASAGILVMNNNISKCKNISIVNQSPTGIYEKEIDLLRV

SEQ ID NO: 20724 - protein, 1325 aa, unidentified
  REGION 1..1325: note = Cas Enzyme sequence
MKGEYYLGLDMGSSSVGWAVTNEKYEILRAHGKTLWGVRLFDSAQTAEERRGFRTAKRRLDRRNWRIELLQKIFAEEVEKIDDGFFRRMKESRYWPEDKRDRQGKCPELPYALFADDDYTDKEYHKQFPTIYHLRKWLMETDETPDIRLIYLALHHMMKHRGHFLLNGNIEQVREFQTTFEQFLEAVRAEELGFSSEIGVERSKEIEAILKDRTLTKSAKKTKAVKAMRAETSCEKEWLGLITGGTAKLGNLFGEKQMDTLERPKLCFADAGYEEYAGEIEAELGEKYVLIEHAKAVYDWAVLADILQNYSSLSEAKVALYEKHKKDLKDLKKLVRENLSREEYQRLFAKKDEKANYYAYIKAPKQCSQEDFYGYLKKNILGKISDVTKASCMQKEMEMGTFLPKQTVKDNSVIPYQIHLYELNAILKNLEDKVSLLKENGEKIQKIFTFRIPYYVGPLNGIRKKGEKSNWAVRKEGKIYPWNFDEMVDLEASAEQFIRRMTNKCTYLPSEDVLPKYSLLYSKYEVLNELNNLRLDGEKISVEQKQKIYEEVFQKSRKVTQKKLKNYLVKEGITGKEVEITGIDGDFKSSLTAYHDFKEKLTNLSLNQAEKECIILNVTLFGDDKAILKQRLKKLFPELTEKQRDSISKLPYRGWGRLSKVFLEETEAPAPETGEAWSIIRALWETNDNLMQLLSEKYLFASAIEEKNGNEQKKRDISYELVEELYVSPAVKRQIWQSLLIVKEICKVMGNPPKRVFIEMAREKTDQGRTSSRKKKLLELYKKCKAEEKDWIDEIEKRSDAEMRRDKLYLYYTQKGKCMYSGETIELEELWDNQKYDIDHIFPQSKVMDDSLDNRVLVKKKCNQMKEDKYPIDETVRKKMQPFWKSLVDAGLISEEKYKRLIRGNGFEQSELAGFISRQLVETRQSTKAAASILQQVIPNTQIVYVKAPTVSKFRKDFKFLKVREMNDYHHAKDAYLNIVVGNAYFVKFTSNPIHFIKENPGRSYNLKKMFEQERIERNGEIAWESGNGTIATVRKFMEKNNILVTRRSYEATGALFDQQIVKKGKGQVPIKSSDERLCDIQKYGGYNKEAGAYFVLAESEGKKGKKIRTIEYVPIRLKKEIQKSEENIIRYLEEERQLKNPRVLVPEIKIDTLFCVDGFYMWVSGRSGDQLLMQGANQLVLSQEETEILKKIVQYVERKKQNKELKIYDSDHLEEKKVMMLYETFLNKLTNTVYAKKLGAQAKTLTEKREKFKELCIEEKCIVLYEVLHFFQCQSAAADLKLIGGSGRAGILCLNKNITDCSRIEMIHQSPTGIYEQTVDLNAL

SEQ ID NO: 20725 - protein, 1325 aa, unidentified
  REGION 1..1325: note = Cas Enzyme sequence
MKGEYYLGLDMGSSSVGWAVTNEKYEILRAHGKTLWGVRLFDSAQTAEERRGFRTAKRRLDRRNWRIELLQKIFAEEVEKIDDGFFRRMKESRYWPEDKRDRQGKCPELPYALFADDAYTDKEYHKQFPTIYHLRKWLMETDETPDIRLIYLALHHMMKHRGHFLLNGNIEQVREFQTTFEQFLEAVRAEELGFSSEIGVERSKEIEAILKDRTLTKSAKKTKAVKAMRAETSCEKEWLGLITGGTAKLGNLFGEKQMDTLERPKLCFADAGYEEYTGEIEAELGEKYVLIEHAKAVYDWAVLADILQNYSSLSEAKVALYEKHKKDLKDLKKLVRENLSREEYQRLFAKKDEKANYYAYIKAPKQCSQEDFYGYLKKNILGKISDVTKASCMQKEMEMGTFLPKQTVKDNSVIPYQIHLYELNAILKNLEDKVPLLKENGEKIQKIFTFRIPYYVGPLNGIRKKGEKSNWAVRKEGKIYPWNFDEMVDLEASAEQFIRRMTNKCTYLPSEDVLPKYSLLYSKYEVLNELNNLRLDGEKISVEQKQKIYEEVFQKSRKVTQKKLKNYLVKEGITGKEVEITGIDGDFKSSLTAYHDFKEKLTNLSLNQAEKECIILNVTLFGDDKAILKQRLKKLFPELTEKQRDSISKLPYRGWGRLSKVFLEETEAPAPETGEAWSIIRALWETNDNLMQLLSEKYLFASAIEEKNGNEQKKRDISYELVEELYVSPAVKRQIWQSLLIVKEICKVMGNPPKRVFIEMAREKTDQGRTSSRKKKLLELYKKCKAEEKDWIDEIEKRSDAEMRRDKLYLYYTQKGKCMYSGETIELEELWDNQKYDIDHIFPQSKVMDDSLDNRVLVKKKCNQMKEDKYPIDETIRKKMQPFWKSLVDAGLISEEKYKRLIRGNGFEPSELAGFISRRLVETRQSTKAAASILQQVIPDTQIVYVKAPTVSKFRKDFKFLKVREMNDYHHAKDAYLNIVVGNAYFVKFTSNPIHFIKENPGRSYNLKKMFEQEKIERNGEIAWESGNGTIATVRNFMEKNNILVTRRSYEATGALFDQQIVKKGKGQVPIKSSDERLCDIQKYGGYNKEAGAYFVLAESEGKKGKKIRTIEYVPIRLKKEIQKSEENIIRYLEEERQLKNPRVLVPEIKIDTLFCVDGFYMWVSGRSGDQLLMQGANQLVLSQEETEILKKIVQYVERKKQNKELKIYDSDHLEEKKVVMLYETFLNKLTNTVYAKKLGAQAKTLTEKREKFKELCIEEKCIVLYEILHFFQCQSVTADLKLIGGSGRAGILYLNKNITDCSRIEMIHQSPTGIYEQAVDLNAL

SEQ ID NO: 20726 - protein, 1341 aa, unidentified
  REGION 1..1341: note = Cas Enzyme sequence
MGKGYYVGLDMGTGSVGWAVTDESYQIFRRHGKAMWGVRLFESAKTAEERRMFRTGRRRLDRRGWRIEILQEIFAEEISRVDPGFFLRMKESKYYPEDKRDIQGNCPELPYTLFVDKTFTDKDFHKKYPTIYHLRKMLMETEDTPDMRLVYLALHHMMKHRGHFLLSGDISQVTEFKNTFNQFIENIRNEEMDFEIELDESAVQMIEETLKDKNLTRSAKKSKLVKGLNAKNVRDKAFLTLLSGGTVKLSDLFGMEELNEGERPKISFADNGYEEYAAVVEMELGELYYIVESAKAVYDWAILSDILGGSTSISDAKVRAYEKHKADLKYLKAVVKEYFPKEVYNAVFVESSDKLNNYPAYIGMTKKNGKKVSLEGKRCSREEFMDFLKKNIVVKLPDEEAKMYLQSELEKDSFLPKQVNKDNGVIPYQVHKYELKKILDNLGDKIPFLKENAEKIEKLFSFRIPYYVGPLRTGNGENSKFAWAERKSTEKIYPWNFENVIDVEQSAENFIRRMTNKCTYLIGEDVLPKDSLLYSKFMVLNELNNLRLDGQKISVELKQKIYRDVFCRSRKVTQKKLKSYLIREGIAGKNVELTGIDGDFKGSLTAYHDFKEKLIDVELTQKEKEEIILNIVLFGDDKKLLKQRLKKKFPQLTEKQINTVTALSYKGWGRLSKKLLEEVTVPAPETGEVWNIITALWETNDNFMQLLSKEYQFSDRIEEFNEEKADPEVSYQTIEDLYVSPAVKRQIWQTLQIIQEIEKVMGEKPKRVFVEMAREKQENKRTESRKKTLSDLYTKCKKEEPEWIEALCTSLEKHEEHQLRSDKLYLYYTQKGRCMYSGEPIDLEDLWDNTKYDIDHIYPQSKTMDDSLKNRVLVKKEYNAKKSDTYPIAADIQKKMMPFWKSLLTGGFIPKEKYDRLVRNNPLDANELAGFIERQIVETRQSTKAVAEILKKILPDTEIVYVKAKTVSKFRQDFDFIKVRDMNDLHHAKDAYLNIVVGNVYFVKFTKNAAWFVKENPGRTYNLEKMFIWDVARDGEIAWKAGKSGSIVQVRAMMEKNHILVTRRSYEVKGGLFDQQILKKGKGQVPVKESDERLRDIGKYGGYNKAAGAYFMLVSSKDKKGKEQRTIEFVPIYLKDRVEKDMESARNYLMEERGLREPKILIKKIKIDTLFKVDGFYMWLSGRTSNQLIFKGANQLILSKEDMKTLKKVVKYIQRQKEDKNVKISVRDGITEEELLKLYETFLDKIRHSIYGVRLSSQEKTLVNGKEKFIDLSVEAKCQVLYEILHLFQCQSGASNLKMIGGPASAGILVMNNNISKCKNISIVNQSPTGIYEKEIDLLRV

SEQ ID NO: 20727 - protein, 1233 aa, unidentified
  REGION 1..1233: note = Cas Enzyme sequence
LPYTLFVDKTFTDKDFHKKYPTIYHLRKMLMETEDTPDMRLVYLALHHMMKHRGHFLLSGDISQVTEFKNTFNQFIENIRNEEMDFEIELDESAVQMIEETLKDKNLTRSAKKSKLVKGLNAKNVRDKAFLTLLSGGTVKLSDLFGMEELNEGERPKISFADNGYEEYAAVVEMELGELYYIVESAKSVYDWAILSDILGGSTSISDAKVRAYEKHKADLKYLKAVVKEYFPKEVYNVVFVESSDKLNNYPAYIGMTKKNGKKVSLEGKRCSREEFMDFLKKNIVVKLPDEEAKMYLQSELEKDSFLPKQVNKDNGVIPYQVHKYELKKILDNLGDKIPFLKENAEKIEKLFSFRIPYYVGPLRTGNGENSKFAWAERKSTEKIYPWNFENVIDVEQSAENFIRRMTNKCTYLIGEDVLPKDSLLYSKFMVLNELNNLRLDGQKISVELKQKIYRDVFCRSRKVTQKKLKSYLIREGIAGKNVELTGIDGDFKGSLTAYHDFKEKLTDVELTQKEKEEIILNIVLFGDDKKLLKQRLKKKFPQLTEKQINTVTALSYKGWGRLSKKLLEEVTVPAPETGEVWNIITALWETNDNFMQLLSKEYQFSDRIEEFNEEKADPEVSYQTIEDLYVSPAVKRQIWQTLQIIQEIEKVMGEKPKRVFVEMAREKQENKRTESRKKTLSDLYKKCKKEEPEWIEALCTSLEKHEEHQLRSDKLYLYYTQKGRCMYSGEPIDLEDLWDNTKYDIDHIYPQSKTMDDSLKNRVLVKKEYNAKKSDTYPIAADIQKKMMPFWKSLLTGGFIPKEKYDRLIRNNPLDANELAGFIERQIVETRQSTKAVAEILKKILPDTEIVYVKAKTVSKFRQDFDFIKVRDMNDLHHAKDAYLNIVVGNVYFVKFTKNAGWFVKENPGRTYNLEKMFIWDVARDGEIAWKAGKSGSIVQVRAMMEKNHILVTRRSYEVKGGLFDQQILKKGRGQVPVKESDERLRDIGKYGGYNKAAGAYFMLVSSKDKKGKEQKTIEFVPIYLKDRVEKDMESARNYLMEERGLREPKILIKKIKIDTLFKVDGFYMWLSGRTSNQLIFKGANQLILSKEDMKTLKKVVKYIQRQKEDKNVKISVRDGITEEELLKLYETFLDKIRHSIYGVRLSSQEKTLVNGKEKFIDLSVEAKCQVLYEILHLFQCQSGASNLKMIGGPASAGILVMNNNISKCKNISIVNQSPTGIYEKEIDLLRV

SEQ ID NO: 20728 - protein, 1344 aa, unidentified
  REGION 1..1344: note = Cas Enzyme sequence
  REGION 311..314: note = misc_feature - Xaa can be any naturally occurring amino acid
MGKGYYVGLDMGTGSVGWAVTDESYQILRRHGKAMWGVRLFESAKTAEERRMFRTGRRRLDRRGWRIEILQEIFAEEISRVDPGFFLRMKESKYYPEDKRDIQGNCPELPYTLFVDKTFTDKDFHKKYPTIYHLRKMLMETEDTPDMRLVYLALHHMMKHRGHFLLSGDISQVTEFKNTFNQFIENIRNEEMDFEIELDESAVQMIEETLKDKNLTRSAKKSKLVKGLNAKNVRDKAFLTLLSGGTVKLSDLFGMEELNEGERPKISFADNGYEEYAAVVEMELGELYYIVESAKAVYDWAILSDILGGSXXXXSISDAKVRAYEKHKADLKYLKAVVKEYFPKEVYNAVFVESSDKLNNYPAYIGMTKKNGKKVSLEGKRCSREEFMDFLKKNIVVKLPDEEAKMYLQSELEKDSFLPKQVNKDNGVIPYQVHKYELKKILDNLGDKIPFLKENAEKIEKLFSFRIPYYVGPLRTGNGENSKFAWAERKSTEKIYPWNFENVIDVEQSAENFIRRMTNKCTYLIGEDVLPKDSLLYSKFMVLNELNNLRLDGQKISVELKQKIYRDVFCRSRKVTQKKLKSYLIREGIAGKNVELTGIDGDFKGSLTAYHDFKEKLIDVELTQKEKEEIILNIVLFGDDKKLLKQRLKKKFPQLTEKQINTVTALSYKGWGRLSKKLLEEVTVPAPETGEVWNIITALWETNDNFMQLLSKEYQFSDRIEEFNEEKADPEVSYQTIEDLYVSPAVKRQIWQTLQIIQEIEKVMGEKPKRVFVEMAREKQENKRTESRKKTLSDLYTKCKKEEPEWIEALCTSLEKHEEHQLRSDKLYLYYTQKGRCMYSGEPIDLEDLWDNTKYDIDHIYPQSKTMDDSLKNRVLVKKEYNAKKSDTYPIAADIQKKMMPFWKSLLTGGFIPKEKYDRLVRNNPLDANELAGFIERQIVETRQSTKAVAEILKKILPDTEIVYVKAKTVSKFRQDFDFIKVRDMNDLHHAKDAYLNIVVGNVYFVKFTKNAAWFVKENPGRTYNLEKMFIWDVARDGEIAWKAGKSGSIVQVRAMMEKNHILVTRRSYEVKGGLFDQQILKKGKGQVPVKESDERLRDIGKYGGYNKAAGVYFMLVSSKDKKGKEQRTIEFVPIYLKDRVEKDMESARNYLMEERGLREPKILIKKIKIDTLFKVDGFYMWLSGRTSNQLIFKGANQLILSKEDMKTLKKVVKYIQRQKEDKNVKISVRDGITEEELLKLYETFLDKIRHSIYGVRLSSQEKTLVNGKEKFIDLSVEAKCQVLYEILHLFQCQSGASNLKMIGGPASAGILVMNNNISKCKNISIVNQSPTGIYEKEIDLLRV

SEQ ID NO: 20729 - protein, 1341 aa, unidentified
  REGION 1..1341: note = Cas Enzyme sequence
MGKGYYVGLDMGTGSVGWAVTDESYQILRRHGKAMWGVRLFESAKTAEERRMFRTGRRRLDRRGWRIEILQELFAEEISRVDPGFFLRMKESKYYPEDKRDIEGNCPELPYTLFVDKTFTDKDFHKKYPTIYHLRKMLMETEDTLDIRLVYLALHHMMKHRGHFLLSGDISQVTEFKNTFNQFIENIRNEEMDFEIELDESAVQMIEETLKDKNLTRSAKKSKLVKGLNAKNVRDKAFLTLLSGGTVKLSDLFGMEELNEGERPKISFADNGYEEYAAVVEMELGELYYIVESAKAVYDWAILSDILGGSTSISDAKVRAYEKHKADLKYLKAVVKEYFPKEVYNAVFVESSDKLNNYPAYIGMTKKNGKKVSLEGKRCSREEFMDFLKKNIVVKLPDEEAKMYLQSELEKDSFLPKQVNKDNGVIPYQVHKYELKKILDNLGDKIPFLKENAEKIEKLFSFRIPYYVGPLRTGNGENSKFAWAERKSTEKIYPWNFENVIDVEQSAENFIRRMTNKCTYLIGEDVLPKDSLLYSKFMVLNELNNLRLDGQKISVELKQKIYRDVFCRSRKVTQKKLKSYLIREGIAGKNVELTGIDGDFKGSLTAYHDFKEKLTDVELTQKEKEEIILNIVLFGDDKKLLKQRLKKKFPQLTEKQINTVTALSYKGWGRLSKKLLEEVTVPAPETGEVWNIITALWETNDNFMQLLSKEYQFSDRIEEFNEEKADPEVSYQTIEDLYVSPAVKRQIWQTLQSIQEIEKVMGEKPKRVFVEMAREKQENKRTESRKKTLSDLYKKCKKEEPEWIEALCTSLEKHEEHQLRSDKLYLYYTQKGRCMYSGEPIDLEDLWDNTKYDIDHIYPQSKTMDDSLKNRVLVKKEYNAKKSDTYPIAADIQKKMMPFWKSLLTGGFIPKEKYDRLVRNNPLDANELAGFIERQIVETRQSTKAVAEILKKILPDTEIVYVKAKTVSKFRQDFDFIKVRDMNDLHHAKDAYLNIVVGNVYFVKFTKNAAWFVKENPGRTYNLEKMFIWDVVRDGEIAWKAGKSGSIVQVRAMMEKNHILVTRRSYEVKGGLFDQQILKKGKGQVPVKESDERLRDIGKYGGYNKAAGAYFMLVSSKDKKGKEQRTIEFVPIYLKDRVEKDMESARNYLMEERGLREPKILIKKIKIDTLFKVDGFYMWLSGRTSNQLIFKGANQLILSKEDMKTLKKVVKYIQRQKEDKNVKISMRDGITEEELLKLYETFLDKIRHSIYGVRLSSQEKTLVNGKEKFIDLSVEAKCQVLYEILHLFQCQSGAANLKMIGGPASAGILVMNNNISKCKNISIVNQSPTGIYEKEIDLLRV

SEQ ID NO: 20730 - protein, 1352 aa, unidentified
  REGION 1..1352: note = Cas Enzyme sequence
MEIMKQKFYVGLDMGTASVGWAVTDDKYNIIKRHGKALWGVRLFKTANTAEERRTFRAARRRTQRRKQRMELLQEIFGDEISKTDIGFYQRMKESKYWFEDKRDINGKQPELPYALFVDDGFTDKDYHEQFPTIFHLRNVLVNEWTQKYDIRLVYLAIHHIIKHRGHFLFEGKKMSEVMDFGSAFEAFCKVASDNDIEITVDEEKLKDIEDLLKSRQKSKTAKKQELGKIIAGTDKQKKALAALITGCTVKLSEIFADKSLDDGERNKISFADSNYDEYIANVEETLAERFLLIAAGKALYDWAVLSDILEGSKFLSEAKVRIYKKHSDDLKKLKTLLKTRQDEYKKVFGLPEKQANYSAYIGVVRKNGKKVPIDKKCTKADFYSFLKKTLNKINFEDEKEKEVAESIINEIENETFLPKQIISDNGVIPYQLHEAELNLILKNAALYYPFLNEKDDEGYTNAEKIKAIFKFRIPYYVGPLNTYHSDKGGNSWAVRKQDGKIYPWNFESKIDAEESAGKFIGRMTNKCTYLIGKDVLPKESLLYSKFMVLNELNNLRIDGEKVSVEIKQAVYENVFKKYQRVTGKKVKDFLIRSGIIGREQELSGFDQNFKSSLKVYHDIKQIAGDINLSQNQKEDIIKDITVFADSQKMLKKRLKIKYPELSDKQVTKLAAKKYTGWGRLSREFLEEVESVNKETGEVLNIISALWETNENLMQLLSNKYDYLSAIKRLNDEAEDKSEVVTYDDVQKLYVSPAVKRPVWQTLKIVEEISKIMGSKPERIFVEMAREPGQKGDVKVSRKSRLLEKYKYCKKEAPEIYENLVKEDDNKLRSDKLFLYYTQMGRCMYSNEVIDIEDLFTNRYDIDHIYPQSKVMDDSLDNRVLVKRELNSNKTDVFPVPKEYMDKSKTLWDMLKKKDLISKEKYHRLTRRDGFSENELSGFIARQLVETRQSTKAVTQLLTKAYPESEIVYAKANAVSEFRHKFGFTKVRSINDYHHAKDAYLNIVVGNTYYVKFTKDAAWFIRNNPGRTYNLKKMFEQGTVSRGGETAWVSGEDGTIFTVKRVMGKNNILFTRKAYEVKGGLFDQQIMKKGKGQIPIKNNSGDDRLCATEKYGAYNKASGAYFMLVESEDKKGNKIRTLEFVPVYIAKELEKSEDAAIRYCVEKLELKNPDIRVRKIKMDSLFNVDGFRMHLSGRTRKQLIFKCAEQLVLDEESQKILKKTAKISADYKENKNVKISDKMELTDEMMIKLYELFYKKLKDTIYNIRLSTQVKTLESGKEKFEKLSLLDKCLVIEEILHLFQCQSSSANLSSIGGAATAGILVLNNEISRCDKVEIINQSITGFYEQVIDLKTI

SEQ ID NO: 20731 - protein, 1341 aa, unidentified
  REGION 1..1341: note = Cas Enzyme sequence
MGKGYYVGLDMGTGSVGWAVTDESYQIFRRHGKAMWGVRLFESAKTAEERRMFRTGRRRLDRRGWRIEILQEIFAEEISRVDPGFFLRMKESKYYPEDKRDIQGNCPELPYTLFVDKTFTDKDFHKKYPTIYHLRKMLMETEDTPDMRLVYLALHHMMKHRGHFLLFGDISQVTEFKNTFNQFIENIRNEEMDFEIELDESAVQMIEETLKDKNLTRSAKKAKLVKGLNAKNVRDKAFLTLLSGGTVKLSDLFGMEELNEGERPKISFADNRYEEYAAVVEMELGELYYIVESAKAVYDWAILSDILGGSTSVSDAKVRAYEKHKADLKYLKAVVKEYFPKEVYNAVFVESSDKLNNYPAYIGMTKKNGKKVSLEGKRCSREEFMDFLKKNIVVKLPDEETKMYLQSELEKDSFLPKQVNKDNGVIPYQVHKYELKKILDNLGDKIPFLKENAEKIEKLFSFRIPYYVGPLRTGNGENSKFAWAERKSTEKIYPWNFENVIDVEQSAENFIRRMTNKCTYLIGEDVLPKDSLLYSKFMVLNELNNLRLDGQKISVELKQKIYRDVFCRSRKVTQKKLKSYLIREGIAGKNVELTGIDGDFKGSLTAYHDFKEKLTGVELTQKEKEEIILNIVLFGDDKKLLKQRLKKKFPQLTEKQINTVTALSYKGWGRLSKKLLEEVTVPAPETGEVWNIITALWETNDNFMQLLGKEYQFSDRIEEFNEEKADPEVSYQTIEDLYVSPAVKRQIWQTLQIVQEIEKVMGEKPKRVFVEMAREKQENKRMESRKKTLSDLYKKCKKEEPEWIETLCTSLEKHEEHQLRSDKLYLYYTQKGRCMYSGEPIDLEDLWDNTKYDIDHIYPQSKTMDDSLKNRVLVKKEYNAKKSDTYPIAADIQKKMMPFWKSLLTGGFIPKEKYDRLVRNNPLDANELAGFIERQIVETRQSTKAVAEILKKILPDTEIVYVKAKTVSKFRQDFDFIKVRDMNDLHHAKDAYLNIVVGNVYFVKFTKNAAWFVKENPGRTYNLEKMFIWDVARDGEIAWKAGKSGSIVQVRAMMEKNHILVTRRSYEVKGGLFDQQILKKGKGQVPVKESDERLRDIGKYGGYNKAAGVYFMLVSSKDKKGKEQRTIEFVPIYLKDRVEKDMESARNYLMEERGLREPKILIKKIKIDTLFKVDGFYMWLSGRTSNQLIFKGANQLILSKEDMKTLKKVVKYIQRQKEDKNVKISVRDGITEEELLKLYETFLDKIRHSIYGVRLSSQEKTLVNGKEKFIDLSVEAKCQVLYEILHLFQCQSGAANLKMIGGPASAGILVMNNNISKCKNISIVNQSPTGIYEKEIDLLRV

SEQ ID NO: 20732 - protein, 1342 aa, unidentified
  REGION 1..1342: note = Cas Enzyme sequence
  REGION 1029..1035: note = misc_feature - Xaa can be any naturally occurring amino acid
MGKGYYVGLDMGTGSVGWAVTDESYQILRRHGKAMWGVRLFESAKTAEERRMFRTGRRRLDRRGWRIEILQEIFAEEISRVDPGFFLRMKESKYYPEDKRDIQGNCPELPYTLFVDKTFTDKDFHKKYPTIYHLRKMLMETEDTPDMRLVYLALHHMMKHRGHFLLSGDISQVTEFKNTFNQFIENIRNEEMDFEIELDESAVQMIEETLKDKNLTRSAKKSKLVKGLNAKNVRDKAFLTLLSGGTVKLSDLFGMEELNEGERPKISFADNGYEEYAAVVEMELGELYYIVESAKSVYDWAILSDILGGSTSISDAKVRAYEKHKADLKYLKAVVKEYFPKEVYNVVFVESSDKLNNYPAYIGMTKKNGKKVSLEGKRCSREEFMDFLKKNIVVKLPDEEAKMYLQSELEKDSFLPKQVNKDNGVIPYQVHKYELKKILDNLGDKIPFLKENAEKIEKLFSFRIPYYVGPLRTGNGENSKFAWAERKSTEKIYPWNFENVIDVEQSAENFIRRMTNKCTYLIGEDVLPKDSLLYSKFMVLNELNNLRLDGQKISVELKQKIYRDVFCRSRKVTQKKLKSYLIREGIAGKNVELTGIDGDFKGSLTAYHDFKEKLTDVELTQKEKEEIILNIVLFGDDKKLLKQRLKKKFPQLTEKQINTVTALSYKGWGRLSKKLLEEVTVPAPETGEVWNIITALWETNDNFMQLLSKEYQFSDRIEEFNEEKADPEVSYQTIEDLYVSPAVKRQIWQTLQIIQEIEKVMGEKPKRVFVEMAREKQENKRTESRKKTLSDLYKKCKKEEPEWIEALCTSLEKHEEHQLRSDKLYLYYTQKGRCMYSGEPIDLEDLWDNTKYDIDHIYPQSKTMDDSLKNRVLVKKEYNAKKSDTYPIAADIQKKMMPFWKSLLTGGFIPKEKYDRLIRNNPLDANELAGFIERQIVETRQSTKAVAEILKKILPDTEIVYVKAKTVSKFRQDFDFIKVRDMNDLHHAKDAYLNIVVGNVYFVKFTKNAGWFVKENPGRTYNLEKMFIXXXXXXXGEIAWKAGKSGSIVQVRAMMEKNHILVTRRSYEVKGGLFDQQILKKGRGQVPVKESDERLRDIGKYGGYNKAAGAYFMLVSSKDKKGKEQKTIEFVPIYLKDRVEKDMESARNYLMEERGLREPKILIKKIKIDTLFKVDGFYMWLSGRTSNQLIFKGANQLILSKEDMKTLKKVVKYIQRQKEDKNVKISVRDGITEEELLKLYETFLDKIRHSIYGVRLSSQEKTLVNGKEKFIDLSVEAKCQVLYEILHLFQCQSGASNLKMIGGPASAGILVMNNNISKCKNISIVNQSPTGIYEKEIDLLRV

SEQ ID NO: 20733 - protein, 1352 aa, unidentified
  REGION 1..1352: note = Cas Enzyme sequence
MEIMKQKFYVGLDMGTASVGWAVTDDKYNIIKRHGKALWGVRLFKTANTAEERRTFRAARRRTQRRKQRMELLQEIFGDEISKTDIGFYQRMKESKYWFEDKRDINGKQPELPYALFIDDGFTDKDYHEQFPTIFHLRNVLVNEWTQKYDIRLVYLAIHHIIKHRGHFLFEGKKMSEVTDFGSAFEAFCKVASDNDIEITVDEEKLKDIEDLLKSRQKSKTAKKQELGKIIAGADKQKKALAALVTGCTVKLSEIFADKSLDDGERNKISFADSNYDEYIANVEETLAERFLLIAAGKALYDWAVLSDILEGSTYISEAKVKIYKKHGDDLRKLKGLLKARPDEYKLIFGLPEKQANYSAYIGMVKKNGKKVPIDKKCTKADFYSFLKKTLNKINFEDEKEREIAESIINEIENETFLPKQVISDNGVIPYQLHEAELDRILKNAALYYPFLSEKDDEGYTNTDKIKAIFKFRIPYYVGPLNTYHSDKGGNSWAVRKQDGKIYPWNFESKIDAEESAGKFIERMTNKCTYLIGKDVLPKESLLYSKFMVLNELNNLRIDGEKVPVEIKQAVYENVFKKYQRVTGKKVKDFLIRSGIIGREQELSGFDQNFKSSLKAYHDIKQIAGDINLSQNQKEDIIKDITVFADSQKMLKKRLKIKYPELSDKQVTQLAAKKYTGWGRLSREFLEEVESVNKETGEVLNIISALWETNENLMQLLSNKYDYLSAIKRLNDEAEDKSEVVTYDDVQKLYVSPAVKRPVWQTLKIVEEISKIMGSKPERIFVEMAREPGQKGDVKVSRKSRLLEKYKYCKKEAPEIYENLVKEDDNKLRSDKLFLYYTQMGRCMYSNEVIDIEDLFTNRYDIDHIYPQSKVMDDSLDNRVLVKRELNSNKTDVFPVPKEYMDKAKTLWDMLKKKDLISKEKYHRLTRRDGFSENELSGFIARQLVETRQSTKAVTQLLTKAYPESEIVYAKANAVSEFRHKFGFTKVRNINDYHHAKDAYLNIVVGNTYYVKFTKDAAWFIRNNPGRTYNLKKMFEQGTVSRGGETAWVSGEDGTIFTVKRVMGKNNILFTRKAYEVKGGLFDQQIMKKGKGQIPIKNNSGDDRLCATEKYGAYNKASGAYFMLVESEDKKGNKIRTLEFVPVYIAKELEKSEDAAIRYCVEKLELKKPDIRVRKIKMDSLFNVDGFRMHLSGRTEKRLIFKCAEQLVLDEESQKILKKTAKVFADYKVNKNIKISDKMELTDEMLIKLYELFYKKLKDTVYNIRLSTQVKTLESGKEKFEKLSLLDKCLVIEEILHLFQCQSSGANLSSIGGAATAGILVLNKEISRCGRVEIINQSITGFYEQVIDLKTI

SEQ ID NO: 20734 - protein, 1325 aa, unidentified
  REGION 1..1325: note = Cas Enzyme sequence
MKGEYYLGLDMGSGSVGWAVTNEKYEILRAHGKTLWGVRLFDSAQTAEERRGFRTAKRRLDRRNWRIELLQKIFAEEVEKIDDGFFRRMKESRYWPEDKRDRQGKCPELPYALFADDDYTDKEYHKQFPTIYHLRKWLMETDETPDIRLIYLALHHMMKHRGHFLLNGNIEQVREFQTTFEQFLEAVRAEELGFSSEIGVERSKEIEAILKDRTLTKSAKKTKAVKAMRAETSCEKEWLGLITGGTAKLGNLFGEKQMDTLERPKLCFADAGYEEYAGEIEAELGEKYALIEHAKAVYDWAVLADILQNYSSLSEAKVALYEKHKKDLKDLKKLVRENLSREEYQRLFAKKDEKTNYYAYIKAPKQCSQEDFYGYLKKNILGKISDVTKASCMQKEMEMGTFLPKQTVKDNSVIPYQIHLYELNAILKNLEDKVPLLKENGEKIQKIFTFRIPYYVGPLNGIRKKGEKSNWAVRKEGKIYPWNFDEMVDLEASAEQFIRRMTNKCTYLPSEDVLPKYSLLYSKYEVLNELNNLRLDGEKISVEQKQKIYEEVFQKSRKVTQKKLKNYLVKEGITGKEVEITGIDGDFKSSLTAYHDFKEKLTNLSLNQAEKECIILNVTLFGDDKAILKQRLKKLFPELTEKQRDSISKLPYRGWGRLSKVFLEETEAPAPETGEAWSIIRALWETNDNLMQLLSEKYLFASAIEEKNGNEQKKRDISYELVEELYVSPAVKRQIWQSLLIVKEICKVMGNPPKRVFIEMAREKTDQGRTTSRKKKLLELYKKCKAEEKDWIDEIEKRSDAEMRRDKLYLYYTQKGKCMYSGETIELEELWDNQKYDIDHIFPQSKVMDDSLDNRVLVKKKCNQMKEDKYPIDETVRKKMQPFWKSLVDAGLISEEKYKRLIRRNGFEPSELAGFISRQLVETRQSTKAAASILQQVIPDTQIVYVKAPTVSKFRKDFKFLKVREMNDYHHAKDAYLNIVVGNAYFVKFTSNPIHFIKENPGRSYNLKKMFEQERIERNGEIAWEGGNGTIVTVRKFMEKNNILVTRRSYEATGALFDQQIVKKGKGQVPIKSSDERLCDIQKYGGYNKEAGAYFVLAESEGKKGKKIRTIEYVPIRLKKEIQKSEENIIRYLEEERQLKNPRVLVPEIKIDTLLCVDGFYMWVSGRSGDQLLMQGANQLVLSQEETEILKKIVQYVERKKQNKELKIYDSDHLEEKKVMMLYETFLNKLINTVYAKKLGAQAKTLTEKREKFKELCIEEKCIVLYEVLHFFQCQSAAADLKLIGGSGRAGILCLNKNITDCSRIEMIHQSPTGIYEQTVDLNAL

SEQ ID NO: 20735 - protein, 1255 aa, unidentified
  REGION 1..1255: note = Cas Enzyme sequence
  REGION 1239..1242: note = misc_feature - Xaa can be any naturally occurring amino acid
MKGEYYLGLDMGSSSVGWAVTNEKYEILRAHGKTLWGVRLFDSAQTAEERRGFRTAKRRLDRRNWRIELLQKIFAEEVEKIDDGFFRRMKESRYWPEDKRDRQGKCPELPYALFADDDYTDKEYHKQFPTIYHLRKWLMETDETPDIRLIYLALHHMMKHRGHFLLNGNIEQVREFQTTFEQFLEAVRAEELGFSSEIGVERSKEIEAILKDRTLTKSAKKTKAVKAMRAETSCEKEWLGLITGGTAKLGNLFGEKQMDTLERPKLCFADAGYEEYAGEIEAELGEKYALIEHAKAVYDWAVLADILQNYSSLSEAKVALYEKHKKDLKDLKKLVRENLSREEYQRLFAKKDEKTNYYAYIKAPKQCSQEDFYGYLKKNILGKISDVTKASCMQKEMEMGTFLPKQTVKDNSVIPYQIHLYELNAILKNLEDKVPLLKENGEKIQKIFTFRIPYYVGPLNGIRKKGEKSNWAVRKEGKIYPWNFDEMVDLEASAEQFIRRMTNKCTYLPSEDVLPKYSLLYSKYEVLNELNNLRLDGEKISVEQKQKIYEEVFQKSRKVTQKKLKNYLVKEGITGKEVEITGIDGDFKSSLTAYHDFKEKLTNLSLNQAEKECIILNVTLFGDDKAILKQRLKKLFPELTEKQRDSISKLPYRGWGRLSKVFLEETEAPAPETGEAWSIIRALWETNDNLMQLLSEKYLFASAIEEKNGNEQKKRDISYELVEELYVSPAVKRQIWQSLLIVKEICKVMGNPPKRVFIEMAREKTDQGRTTSRKKKLLELYKKCKAEEKDWIDEIEKRSDAEMRRDKLYLYYTQKGKCMYSGETIELEELWDNQKYDIDHIFPQSKVMDDSLDNRVLVKKKCNQMKEDKYPIDETVRKKMQPFWKSLVDAGLISEEKYKRLIRRNGFEPSELAGFISRQLVETRQSTKAAASILQQVIPDTQIVYVKAPTVSKFRKDFKFLKVREMNDYHHAKDAYLNIVVGNAYFVKFTSNPIHFIKENPGRSYNLKKMFEQERIERNGEIAWEGGNGTIVTVRKFMEKNNILVTRRSYEATGALFDQQIVKKGKGQVPIKSSDERLCDIQKYGGYNKEAGAYFVLAESEGKKGKKIRTIEYVPIRLKKEIQKSEENIIRYLEEERQLKNPRVLVPEIKIDTLLCVDGFYMWVSGRSGDQLLMQGANQLVLSQEETEILKKIVQYVERKKQNKELKIYDSDHLEEKKVMMLYETFLNKLINTVYAKKXXXXSTGKDINGKKRKI

SEQ ID NO: 20736 - protein, 1340 aa, unidentified
  REGION 1..1340: note = Cas Enzyme sequence
MGKGYYVGLDMGTGSVGWAVTDESYQILRRHGKAMWGVRLFESAKTAEERRMFRTGRRRLDRRGWRIEILQEIFAEISRVDPGFFLRMKESKYYPEDKRDIEGNCPELPYTLFVDKTFTDKDFHKKYPTIYHLRKMLMETEDTLDIRLVYLALHHMMKHRGHFLLSGDISQVTEFKNTFNQFIENIRNEEMDFEIELDESAVQMIEETLKDKNLTRSAKKSKLVKGLNAKNVRDKAFLTLLSGGTVKLSDLFGMEELNEGERPKISFADNGYEEYAAVVEMELGELYYIVESAKAVYDWAILSDILGGSTSISDAKVRAYEKHKADLKYLKAVVKEYFPKEVYNAVFVESSDKLNNYPAYIGMTKKNGKKVSLEGKRCSREEFMDFLKKNIVVKLPDEETKMYLQSELEKDSFLPKQVNKDNGVIPYQVHKYELKEILDNLGDKIPFLKENAEKIEKLFSFKIPYYVGPLRTGNGENSKFAWAERKSTEKIYPWNFENVIDVEQSAENFIRRMTNKCTYLIGEDVLPKDSLLYSKFMVLNELNNLRLDGQKISVELKQKIYRDVFCRSCKVTQKKLKSYLIREGIAGKNVELTGIDGDFKGSLTAYHDFKEKLTDVELTQKEKEEIILNIVLFGDDKKLLKQRLKKKFPQLTEKQINTVTALSYKGWGRLSKKLLEEVTVPAPETGEVWNIITALWETNDNFMQLLSKEYQFSDRIEEFNEEKADPKVSYQTIEDLYVSPAVKRQIWQTLQIIQEIEKVMGEKPKRVFVEMAREKQENKRTESRKKTLSDLYKKCKKEEPEWIEALCTSLEKHEEHQLRSDKLYLYYTQKGKCMYSGEPIDLEDLWDNTKYDIDHIYPQSKTMDDSLKNRVLVKKEYNAKKSDTYPIATDIQKKMMPFWKSLLTGGFIPKEKYDRLVRNNPLDANELAGFIERQIVETRQSTKAVAEILKKILPDTEIVYVKAKTVSKFRQDFDFIKVRDMNDLHHAKDAYLNIVVGNVYFVKFTKNAAWFVKENPGRTYNLEKMFIWDVARDGEIAWKAGKSGSIVQVRAMMEKNHILVTRRSYEVKGGLFDQQILKKGKGQVPVKESDERLRDIGKYGGYNKAAGAYFMLVSSKDKKGKEQRTIEFVPIYLKDRVEKDMESAKNYLMENRGLTEPKILIKKIKIDTLFKVDGFYMWLSGRTENRLIFKGANQLLLLKDDMKTLKKVVKYIQRQKEDKNVKISVRDGITEEELLKLYETFLDKIRHSIYRVRLSSQEKTLVNGKEKFIDLSVEAKCQVLYEILHLFQCQSGAANLKMIGGPASAGILVMNNNISKCKNISIVNQSPTGIYEKEIDLLRV

SEQ ID NO: 20737 - protein, 1341 aa, unidentified
  REGION 1..1341: note = Cas Enzyme sequence
  REGION 301..307: note = misc_feature - Xaa can be any naturally occurring amino acid
MGKGYYVGLDMGTGSVGWAVTDESYQILRRHGKAMWGVRLFESAKTAEERRMFRTGRRRLDRRGWRIEILQEIFAEEISRVDPGFFLRMKESKYYPEDKRDIEGNCPELPYTLFVDKTFTDKDFHKKYPTIYHLRKMLMETEDTLDIRLVYLALHHMMKHRGHFLLSGDISQVTKFKNTFNQFIENIRNEEMDFEIELDESAVQMIEETLKDKNLTRSAKKSKLVKGLNAKNVRDKAFLTLLSGGTVKLSDLFGMEELNEGERPKISFADNGYEEYAAVVEMELGELYYIVESAKAVYDWXXXXXXXGGSTSISDAKVRAYEKHKADLKYLKAVVKEYFPKEVYNAVFVESSDKLNNYPAYIGMTKKKGKKVSLEGKRCSREEFMDFLKKNIVVKLPDEEAKMYLQSELEKDSFLPKQVNKDNGVIPYQVHKYELKKILDNLGDKIPFLKENAEKIEKLFSFRIPYYVGPLRTGNGENSKFAWAERKSTEKIYPWNFENVIDVEQSAENFIRRMTNKCTYLIGEDVLPKDSLLYSKFMVLNELNNLRLDGQKISVELKQKIYRDVFCRSRKVTQKKLKSYLIREGIAGKNVELTGIDGDFKGSLTAYHDFKEKLIDVELTQKEKEEIILNIVLFGDDKKLLKQRLKKKFPQLTEKQINTVTALSYKGWGRLSKKLLEEVTVPAPETGEVWNIITALWETNDNFMQLLSKEYQFSDRIEEFNEEKADPEVSYQTIEDLYVSPAVKRQIWQTLQIIQEIEKVMGEKPKRVFVEMAREKQENKRTESRKKTLSDLYTKCKKEEPEWIEALCTSLEKHEEHQLRSDKLYLYYTQKGRCMYSGEPIDLEDLWDNTKYDIDHIYPQSKTMDDSLKNRVLVKKEYNAKKSDTYPIAADIQKKMMPFWKSLLTGGFIPKEKYDRLVRNNPLDANELAGFIERQIVETRQSTKAVAEILKKILPDTEIVYVKAKTVSKFRQDFDFIKVRDMNDLHHAKDAYLNIVVGNVYFVKFTKNAAWFVKENPGRTYNLEKMFIWDVARDGEIAWKAGKSGSIVQVRAMMEKNHILVTRRSYEVKGGLFDQQILKKGKGQVPVKESDERLRDIGKYGGYNKAAGVYFMLVSSKDKKGKEQRTIEFVPIYLKDRVEKDMESARNYLMEERGLREPKILIKKIKIDTLFKVDGFYMWLSGRTSNQLIFKGANQLILSKEDMKTLKKVVKYIQRQKEDKNVKISVRDGITEEELLKLYETFLDKIRHSIYGVRLSSQEKTLVNGKEKFIDLSVEAKCQVLYEILHLFQCQSGASNLKMIGGPASAGILVMNNNISKCKNISIVNQSPTGIYEKEIDLLRV

SEQ ID NO: 20738 - protein, 1352 aa, unidentified
  REGION 1..1352: note = Cas Enzyme sequence
MEIMKQKFYVGLDMGTASVGWAVTDDKYNIIKRHGKALWGVRLFKTANTAEERRIFRAARRRTQRRKQRMELLQEIFGDEISKTDIGFYQRMKESKYWFEDKRDINGKQPELPYALFVDDGFTDKDYHEQFPTIFHLRNVLVNEWTQKYDIRLVYLAIHHIIKHRGHFLFEGKKMSEVTDFGSAFEAFCKVASDNDIEITVDEEKLKDIEDLLKSRQKSKTAKKQELGKIIAGADKQKKALAALVTGCMVKLSEIFADKSLDDGERNKISFADSNYDEYIANVEETLAERFLLIAAGKALYDWAVLSDILEGSTYISEAKVKIYKKHGDDLRKLKGLLKTRPDEYKLIFGLPEKQANYSAYIGMVKKNGKKVPIDKKCTKADFYSFLKKTLNKINFEDEKEREIAESIINEIENETFLPKQVISDNGVIPYQLHEAELDRILKNAALYYPFLSEKDDEGYTNMDKIKAIFKFRIPYYVGPLNTYHSDKGGNSWAVRKQDGKIYPWNFESKIDAGESARKFIGRMTNKCTYLIGKDVLPKESLLYSKFMVLNELNNLRIDGEKVSVEIKQAVYENVFKKYQRVTGKKVKDFLIRSGIIGREQELSGFDQNFKSSLKAYHDIKQIAGDINLSQNQKEDIIKEITVFADSQKMLKKRLKIKYPELSDKQVTKLAAKKYTGWGRLSREFLEEVESVNKETGEVLNIISALWETNENLMQLLSNKYDYLSEIKRLNDEAEDKSEVVTYDDVQKLYVSPAVKRPVWQTLKIVEEISKIMGSKPERIFVEMAREPGQKGDVKVSRKSRLLEKYKYCKKEAPEIYENLVKEDDNKLRSDKLFLYYTQMGRCMYSNEVIDIEDLFTNRYDIDHIYPQSKVMDDSLDNRVLVKRELNSNKTDVFPVPKEYMDKAKTLWDMLKKKDLISKEKYHRLTRRDGFSENELSGFIARQLVETRQSTKAVTQLLTKAYPESEIVYAKANAVSEFRHKFGFTKVRSINDYHHAKDAYLNIVVGNTYYVKFTKDAAWFIRNNPGRTYNLKKMFEQGTVSRGGETAWVSGEDGTIFTVKRVMGKNNILFTRKAYEVRGGLFDQQIMKKGKGQIPVKNNSEDDRLCATEKYGAYNKASGAYFMLVESEDKKGNKIRTLEFVPVYLAKELEKSEDAAIRYCVEKLELKNPDVRVRKIKMDSLFNVDGFRMHLSGRTGKQLIFKCAEQLVLDEESQKILKKTAKVFADYKENKNIKISDKIELTDEMLIKLYELFYKKLKDTVYNIRLSTQVKTLESGKEKFEKLSLLDKCLVIEEILHLFQCQSVAANLSSIGGAATAGILVLNNEISRCGKVEIINQSITGFYEQVIDLKNI

SEQ ID NO: 20739 - protein, 1325 aa, unidentified
  REGION 1..1325: note = Cas Enzyme sequence
MKGEYYLGLDMGSSSVGWAVTNEKYEILRAHGKTLWGVRLFDSAQTAEERRGFRTAKRRLDRRNWRIELLQKIFAEEVEKIDDGFFRRMKESRYWPEDKRDRQGKCPELPYALFADDDYTDKEYHKQFPTIYHLRKWLMETDETPDIRLIYLALHHMMKHRGHFLLNGNIEQVREFQTTFEQFLEAVRAEELGFSSEIGVERSKEIEAILKDRTLTKSAKKTKAVKAMRAETSCEKEWLGLITGGTAKLGNLFGEKQMDTLERPKLCFADAGYEEYAGEIEAELGEKYVLIEHAKAVYDWAVLADILQNYSSLSEAKVALYEKHKKDLKDLKKLVRENLSREEYQRLFAKKDEKANYYAYIKAPKQCSQEDFYGYLKKNILGKISDVTKVSCMQKEMEMGTFLPKQTVKDNSVIPYQIHLYELNAILKNLEDKVPLLKENGEKIQKIFTFRIPYYVGPLNGIRKKGEKSNWAVRKEGKIYPWNFDEMVDLEASAEQFIRRMTNKCTYLPSEDVLPKYSLLYSKYEVLNELNNLRLDGEKISVEQKQKIYEEVFQKSRKVTQKKLKNYLVKEGITGKEVEITGIDGDFKSSLTAYHDFKEKLTNLSLNQAEKECIILNVTLFGDDKAILKQRLKKLFPESTEKQRDSISKLPYRGWGRLSKVFLEETEAPAPETGEAWSIIRALWETNDNLMQLLSEKYLFASAIEEKNGNEQKKRDISYELVEELYVSPAVKRQIWQSLLIVKEICKVMGNPPKRVFIEMAREKTDQGRTSSRKKKLLELYKKCKAEEKDWIDEIEKRSDAEMRRDKLYLYYTQKGKCMYSGETIELEELWDNQKYDIDHIFPQSKVMDDSLDNRVLVKKKCNQMKEDKYPIDETVRKKMQPFWKSLVDAGLISEEKYKRLIRGNGFEPSELAGFISRQLVETRQSTKAAASILQQVIPDTQIVYVKAPTVSKFRKDFKFLKIREMNDYHHAKDAYLNIVVGNAYFVKFTSNPIHFIKENPGRSYNLKKMFEQEKIERNGEIAWEGGNGTIVTVRKFMEKNNILVTRRSYEATGALFDQQIVKKGKGQVPIKSSDERLCDIQKYGGYNKEAGAYFVLAESEGKKRKKIRTIEYVPIRLKKEIQKSEENIIRYLEEERQLKNPRVLVPEIKIDTLFCVDGFYMWVSGRSGDQLLMQGANQLVLSQEETEILKKIVQYVERKKQNKELKIYDSDHLEEKKVVMLYETFLNKLTNTVYAKKLGAQAKTLTEKREKFKELCIEEKCIVLYEILHFFQCQSVTADLKLIGGSGRAGILYLNKNITDCSRIEMIHQSPTGIYEQAVDLNAL

SEQ ID NO: 20740 - protein, 1325 aa, unidentified
  REGION 1..1325: note = Cas Enzyme sequence
MKGEYYLGLDMGSSSVGWAVTNEKYEILRAHGKTLWGVRLFDSAQTAEERRGFRTAKRRLDRRNWRIELLQKIFAEEVEKIDDGFFRRMKESRYWPEDKRDRQGKCPELPYALFADDDYTDKEYHKQFPTIYHLRKWLMETDETLDIRLIYLALHHMMKHRGHFLLNGNIEQVREFQTTFEQFLEAVRAEELGFSSEIGVERSKEIEAILKDRTLTKSAKKTKAVKAMRAETSCEKEWLGLITGGTAKLGNLFGEKQMDTLERPKLCFADAGYEEYAGEIEAELGEKYVLIEHAKAVYDWAVLADILQNYSSLSEAKVALYEKHKKDLKDLKKLVRENLSREEYQRLFAKKDEKANYYAYIKAPKQCSQEDFYGYLKKNILGKISDVTKVSCMQKEMEMGTFLPKQTVKDNSVIPYQIHLYELNAILKNLEDKVPLLKENGEKIQKIFTFRIPYYVGPLNGIRKKGEKSNWAVRKEGKIYPWNFDEMVDLEASAEQFIRRMTNKCTYLPSEDVLPKYSLLYSKYEVLNELNNLRLDGEKISVEQKQKIYEEVFQKSRKVTQKKLKNYLVKEGITGKEVEITGIDGDFKSSLTAYHDFKEKLTNLSLNQAEKECIILNVTLFGDDKAILKQRLKKLFPELTEKQRDSISKLPYRGWGRLSKVFLEETEAPAPETGEAWSIIRALWETNDNLMQLLSEKYLFASAIEEKNGNEQKKRDISYELVEELYVSPAVKRQIWQSLLIVKEICKVMGNPPKRVFIEMAREKTDQGRTTSRKKKLLELYKKCKAEEKDWIDEIEKRSDAEMRRDKLYLYYTQKGKCMYSGETIELEELWDNQKYDIDHIFPQSKVMDDSLDNRVLVKKKCNQMKEDKYPIDETVRKKMQPFWKSLVDAGLISEEKYKRLIRGNGFEPSELAGFISRQLVETRQSTKAAASILQQVIPDTQIVYVKAPTVSKFRKDFKFLKVREMNDYHHAKDAYLNIVVGNAYFVKFTSNPIHFIKENPGRSYNLKKMFEQERIERNGEIAWEGGNGTIVTVRKFMEKNNILVTRRSYEATGALFDQQIVKKGKGQVPIKSSDERLCDIQKYGGYNKEAGAYFVLAESEGKKGKKIRTIEYVPIRLKKEIQKSEENIIRYLEEERQLKNPRVLVPEIKIDTLFCVDGFYMWVSGRSGDQLLMQGANQLVLSQEEMEILKKIVQYVERKKQNKELKIYDSDHLEEKKVVMLYETFLNKLTNTVYAKKLGAQAKTLTEKREKFKELCIEEKCIVLYEILHFFQCQSVTADLKLIGGSGRAGILYLNKNITDCSRIEMIHQSPTGIYEQAVDLNAL

SEQ ID NO: 20741 - protein, 1336 aa, unidentified
  REGION 1..1336: note = Cas Enzyme sequence
MGKDYYVGLDAGTGSLGWSVTNEKYEIQRSHGKALWGVRLFDAAETAEERRGFRTNRRRLDRRNWRLELLQEIFAEQINQVDDGFFLRMKESRYLPEDKRGKDGNCPELPYAIFADHDYTDKNYHKQFPTIYHLRKWLMETSDTPDIRLVYLAMHHLVKHRGHFLFSGNIDEIREFHTAFDAFLDLVRGEELGFERTFDENCYQETERILKDEHLTRSMKKSHLVKCLDAGTAAEKELIGAISGCTVKLSSIFADGELDACARPKFSFSDISYDEYAGELQDILGEQYVIIESAKAVYDWAILADVLGSYRSISEAKTALYEKHKKDLRYLKKLVKKHLSAEAYKEIFVRSSEKVSNYPAYIGMTKKNGKKVPIQGKQCSQGDLYVYLKKNVIDRIKDENATQYLRDEMEHGTFLPKLVSKENSVIPYQIHLYELNRILENLQDRIPLLKQEGEHIRQIFAFRIPYYVGPLNGVRKDGKETNWVCRRQEGKIYPWNFSEIIDTEASAERFIRRMTNKCTYLPAEDVLPKNSLLYGKFMVLDELNNLRLNGEPISVELKQTIYQDVFKRYRKVTQKKLLTYLIREGIAGRETDITGIDGDFKSSLTAYHDFKEKLSEIELSPSEKETIILNITLFGEDKKLLQKRLEKLFPDMTEKQRIAVSNLSYKGWGRLSGKFLEGITAPDPETGEVWTIIRTMWETNDNLMQILSSKYQFAEAIERENDADEKKEISYRLIENLMVSPAVRRQIWQMLLVLKELCKVQGAPPKRIFIEMAREKADSGRTRSRKKMLIDLYKKCKSEERDWINELEQTEDSRLRSDRLYLYYTQNGRCMYSGDPIELKDLWDNTKYDIDHIYPQSKVMDDSLDNRVLVKRVYNGEKEDRYPIEKSIRDARHGFWKSLLDKGFISREKYKRLTRTTEFEEAELTGFIARQLVETRQGTKAAASILKQVFPDTDIVYVKAPVVSRFRQDFKFIKVREMNDLHHAKDAYLNIVVGNTYFVKFTKDAGWFVRKNPGRTYNLKKMFLSGKVERNGETAWISGDCGTIGTVRRFMAKNNIIVTRRPYEVTGGFYDQMLMKKGKGQIPIKTGDVRLQDVAKYGGYNKETGAYFVLAESDGKKDTRIRTIEYVPVRLKKELGDEKKLCAYLEQRGLKNPKILLKKIKIDTLFRVDGFYMWLSGRTGNQLIFKGANPLILSQEDSAVLKKIQKFITRRKQDKSVQIYDTDGLSEENLSHLYDTFLEKLRTTVYAKRLGTQEKTLSEKKKDFLALGKEDKCIVLNEILHLFQCQSGSANLKLIGGPGSAGILVLNSDITKCQDICIINQSPAGIHEQIVDLKAL

SEQ ID NO: 20742 - protein, 1036 aa, unidentified
  REGION 1..1036: note = Cas Enzyme sequence
KPLYNKIFRQDGDISYEKYAKGIKGRNQIDFCKDLKKQLEGIAEYKKIMQEITSIDDAKTEEERLLFRVANGFAFPKQTTKDNGIIPIQVHLAELKSILDNAEGYLPFLGENDNNGLSVREKIEQIVKFRIPYYVGPLAGTRMSREQGRCWVVRKNEKIYPWNFTEIVNLEESAEKFITNMTAKCTYLVGEDVLPKESLLYSEFMVRNAINNITVDGERLPADVLEKIFKQLFLAKTSKVTKKTLERFFRQENISFQNIGGIDDKINASMKSYNDFRRIFGEDYIQLHRDEIENIIRWITLFCDEKKMLVTKIKNTYPQISDDEIKAIKKLKYKDWGRLSATLLNSSTIAYEDKAFGELVTIISALRHTNKNFMELLSSYCYYDFIGKIKEFNGSRQSSNGKLTYKDVEELYVSPSVKRSIWQTLTILEEIKKIMGCEPKRIFIEMARSKEESKRTDSRLKKLQDLYKKCREENIDFMPRKDEFNVLKTQLNSKNEEDLRSDKLYLYYTQMGRCMYTGEIIELASLYDNNLYDIDHIYPRSKTKDDSLSNRVLVKKQVNAAKTDIYPLDAAIRTKMHRFWKLLYDKGFIDERKYDRLTRSTQLRDEELAGFISRQLVETRQSTKAVAAILKTAYQNSEVVYVKAGNVSDFRQQFKFVKCREVNDLHHAKDAYLNIVVGNCYHVKFTANPLNFITKNQDNRRYSLKPEIFYKFSIKRDGEIAWLGGEDGTMATVARTMHKNNILFTRQAVEGKGELFKQNPLKANSGQLPLKAGLSVEKYGGYDSLTTAYFAVVKSEGKKGAVQLSIEGIPLVYARQGEDAIKKYLIEVVHLCNPIIKLNKIKKYSLFKINGFPMHISGRTGNRMLFYGAGQLCLDEADVDYLKKALKYENDIAENELVIADKNSDDIQKQQAQKNLDYYNQKWRIGRKVNMHIYDMLLAKSGNNLYKNRPASQTTDLQEQREFFEKLSLANQVHVIGEVLKLFKCASASANLKLLDKGNACGVIKVSNNILKFKQCVLINQSPTGVFEQEVDLMKL

SEQ ID NO: 20743 - protein, 1379 aa, unidentified
  REGION 1..1379: note = Cas Enzyme sequence
MQKLKNCDYYIGLDMGDASVGWAVTDTNYNILKFNGKALWGIRLFDSANTAASTRVFRSGRRRIDRTTWRLKMLQELFAEKIAKVDPGFFMRLEDSRLHLDDKRDKAVYNLFVDKNYTDKDFYQQYPTMYHLRYALATQAGPFDVRLLYLAVQHIAKHRGHFLFDNLDASKVNDFNAVFSEVENYVRDEMGIEDWSCQNIDELAKVLCDVNLGRTTKQKAMQSLLPAQTKQQKAIIQLFSGGKAKLAELFVDEELDECEKKSVSFQDDDLNEFEPVLTAALGERNEGLLRFKAIYDWSLLAKILHLDTSKKDEDEQHLLSECKVQVYEDHKRDLAVLKSMLKGKPLYNKIFRQDGDISYEKYAKGIKGRNQIDFCKDLKKQLEGITEYKKIMQEITSIDDAKTEEERVLFRITNGFAFPKQTTKDNGIIPIQVHLAELKCILDNAEGYLPFLGETDNNGLSVREKIEQIVKFRIPYYVGPLAGTRMSREQGRYWVVRKNEKIYPWNFTEIVNLEESAEKFITNMTAKCTYLVGEDVLPKESLLYSEFMVRNAINNITVYGERLPVDVLEKIFKQLFLAKTSKVTKKTLERFFRQENISFQNIGGIDDKINASMKSYNDFRRIFGEDYIQLHRDEIENIIRWITLFCDEKKMLVTKIKNTYPQISDDEIKAIKKLKYKDWGRLSATLLNSSTIAYEDKAFGELVTIISALRHTNKNFMELLSSYCSYDFIGKIKEFNGSRQSSNGKLAYKDVEELYVSPSVKRSIWQTLTILEEIKKIMGCEPKRIFIEMARSKEESKRTDSRLKKLQDLYKKCREENIDFMPRKDEFNVLKTQLSSKNEEDLRSDKLYLYYTQMGRCMYTGEIIELASLYDNNLYDIDHIYPRSKTKDDSLSNRVLVKKQVNAAKTDIYPLDAAIRTKMHSFWKLLYDKGFIDERKYERLTRSTQLRDEELAGFISRQLVETRQSTKAVAAILKTAYQNSEVVYVKAGNVSDFRQQFKFVKCREVNDLHHAKDAYLNIVVGNCYHVKFTANPLNFITKNQDNRRYSLKPEIFYKFSIKRDGEIAWLGGEDGTMATVARTMHKNNILFTRQAVEGKGELFDQQPLKAKGGQLPLKAGLSIEKYGGYNSLTTAYFAVVKSEGKKGAVQLSIEAIPLVYAKQGEIAVQKYLTEVVQLCKPEIMLPKIKKYSLFKINGFPMHISGRTGNRMLFYGAGQLCLDEADVDYLKKALKYENDIAENELVIADKNSDDIQKQQAQKNLDYYNQKWRIGRKVNMHIYDMLLAKSGNNLYKNRPASQTTDLQEQREFFEKLSLANQIHVIGEVLKLFKCASASANLKLLDKGNACGVIKVSNNILKFKQCVLINQSPTGVFEQEVDLMKL

SEQ ID NO: 20744 - protein, 1135 aa, unidentified
  REGION 1..1135: note = Cas Enzyme sequence
KLAELFVDEELDECEKKSVSFQDDDLNEFEPVLTAALGERNEGLLRFKAIYDWSLLAKILHLDTSKKDEDEQHLLSECKVQVYEDHKRDLAVLKSMLKGKPLYNKIFRQDGDISYEKYAKGIKGRNQIDFCKDLKKQLEGITEYKKIMQEITSIDDAKTEEERVLFRITNGFAFPKQTTKDNGIIPIQVHLAELKCILDNAEGYLPFLGETDNNGLSVREKIEQIVKFRIPYYVGPLAGTRMSREQGRYWVVRKNEKIYPWNFTEIVNLEESAEKFITNMTAKCTYLVGEDVLPKESLLYSEFMVRNAINNITVDGERLPVDVLEKIFKQLFLAKTSKVTKKTLERFFRQENISFQNIGGIDDKINASMKSYNDFRRIFGEDYIQLHRDEIENIIRWITLFCDEKKMLVTKIKNTYPQISDDEIKAIKKLKYKDWGRLSATLLNSSTIAYEDKAFGELVTIISALRHTNKNFMELLSSYCSYDFIGKIKEFNGSRQSSNGKLAYKDVEELYVSPSVKRSIWQTLTILEEIKKIMGCEPKRIFIEMARSKEESKRTDSRLKKLQDLYKKCREENIDFMPRKDEFNVLKTQLSSKNEEDLRSDKLYLYYTQMGRCMYTGEIIELASLYDNNLYDIDHIYPRSKTKDDSLSNRVLVKKQVNAAKTDIYPLDAAIRTKMHSFWKLLYDKGFIDERKYERLTRSTQLRDEELAGFISRQLVETRQSTKAVAAILKTAYQNSEVVYVKAGNVSDFRQQFKFVKCREVNDLHHAKDAYLNIVVGNCYHVKFTANPLNFITKNQDNRRYSLKPEIFYKFSIKRDGEIAWLGGEDGTMATVARTMHKNNILFTRQAVEGKGELFDQQPLKAKGGQLPLKAGLSIEKYGGYNSLTTAYFAVVKSEGKKGAVQLSIEAIPLVYAKQGEIAVQKYLTEVVQLCKPEIMLPKIKKYSLFKINGFPMHISGRTGNRMLFYGAGQLCLDEADVDYLKKALKYENDIAENELVIADKNSDDIQKQQAQKNLDYYNQKWRIGRKVNMHIYDMLLAKSGNNLYKNRPASQTTDLQEQREFFEKLSLANQIHVIGEVLKLFKCASASANLKLLDKGNACGVIKVSNNILKFKQCVLINQSPTGVFEQEVDLMKL

SEQ ID NO: 20745 - protein, 1379 aa, unidentified
  REGION 1..1379: note = Cas Enzyme sequence
MQKLKNCDYYIGLDMGDASVGWAVTDTNYNILKFNGKALWGIRLFDSANTAASTRVFRSGRRRIDRTTWRLKMLQELFAEEIAKVDPGFFMRLEDSRLHLDDKRDKAVYNLFVDKNYTDKDFYQQYPTMYHLRYALATQAGPFDVRLLYLAVQHIAKHRGHFLFDNLDASKVNDFNAVFSEVENYVRDEMGIEDWSCQNIDELAKVLCDVNLGRTTKQKAMQSLLPAQTKQQKAIIQLFSGGKAKLAELFVDAELDECEKKSVSFQDDDLNEFEPVLTAALGERYEGLLRFKAIYDWSLLAKILHLDTSKKDEDEQHLLSECKVQVYEDHKRDLAVLKSMLKGKPLYNKIFRQDGDISYEKYAKGIKGRNQIDFCKDLKKQLEGIAEYKKIMQEITSIDDAKTEEERVLFRITNGFAFPKQTTKDNGIIPIQVHLAELKCILDNVEGYLPFLGETDNNGLSVREKIEQIVKFRIPYYVGPLAGTRMSREQGRYWVVRKNEKIYPWNFTEIVNLEESAEKFITNMTAKCTYLVGEDVLPKESLLYSEFMVRNAINNITVDGERLPVDVLEKIFKQLFLAKTSKVTKKTLERFFRQENISFQNIGGIDDKINASMKSYNDFRRIFGEDYIQLHRDEIENIIRWITLFCDEKKMLVTKIKNTYPQISDDEIKAIKKLKYKDWGRLSATLLNSSAIAYEDKAFGELVTIISALRHTNKNFMELLSSYCSYDFIGKIKEFNGSRQSSNGKLTYKDVEELYVSPSVKRSIWQTLTILEEIKKIMGCEPKRIFIEMARSKEESKRTDSRLKKLQDLYKKCREENIDFMPRKDEFNTLKTQLSSKKEDDLRSDKLYLYYTQMGRCMYTGEKIELASLYDNNLYDIDHIYPRSKTKDDSLSNRVLVKKQVNAVKTDTYPLDAAIRTKMHSFWKLLYDKGFIDERKYQRLTRSTQLRDEELAGFISRQLVETRQSTKAVAAILKTAYQNSEVVYVKAGNVSDFRQQFKFVKCREVNDLHHAKDAYLNIVVGNCYHVKFTANPLNFITKNQDNRRYSLKPEIFYKFSIKRDGEIAWLGGEDGTMATVARTMHKNNILFTRQPLEGKGELFKQNPLKAKSGQLPLKAGLSVEKYGGYDSLTTAYFALVKSEGKKGSVQLSIEGIPLVYAKQGEKAVKDYLTEVVQICKPEIKIPKIKKYSLFKINGFPMHISGRQGKQLIFYVAGQLCINEDSIAYLKKVFKYESDLAVNEEILADENGDEVRKQKARNRLAFYDNTWGISLEANMQLYDMLLAKSANNLYKNRPASQTSTLKEQREQFSILPLSKQIHVIKEILKLFKCASATADFKLLEKGSTCGKIQVSTNITKCKQCILINQSPTGVFEQEVDLMKL

SEQ ID NO: 20746 - protein, 1379 aa, unidentified
  REGION 1..1379: note = Cas Enzyme sequence
MQKLKNCDYYIGLDMGDASVGWAVTDTNYNILKFNGKALWGIRLFDSANTAASTRVFRSGRRRIDRTTWRLKMLQELFAEEIAKVDPGFFMRLEDSRLHLDDKRDKAVYNLFVDKNYTDKDFYQQYPTMYHLRYALATQAGPFDVRLLYLAVQHIAKHRGHFLFDNLDASKVNDFNAVFSEVENYVRDEMGIEDWSCQNIDELAKVLCDVNLGRTTKQKAMQSLLPAQTKQQKAIIQLFSGGKAKLAELFVDEELDECEKKSVSFQDDDLNEFEPVLTAALGERYEGLLRFKAIYDWSLLAKILHLDTSKKDEDEQHLLSECKVQVYEDHKRDLAVLKSMLKGKPLYNKIFRQDGDISYEKYAKGIKGRNQIDFCKDLKKQLEGIAEYKKIMQEITNIDDAKTEEERLLFRITNGFAFPKQTTKDNGIIPIQVHLAELKCILDNAEGYLPFLGETDNNGLSVREKIEQIVKFRIPYYVGPLAGTRMSREQGRCWVVRKHEKIYPWNFTEIVNLEESAEKFITNMTAKCTYLVGEDVLPKESLLYSEFMVRNAINNITVDGERLPVDVLEKIFKQLFLAKTSKVTKKTLERFFRQENISFQNIGGIDDKINASMKSYNDFRRIFGEDYIQLHRDEIENIIRWITLFCDEKKMLVTKIKNTYPQISDDEIKAIKKLKYKDWGRLSATLLNSSTIAYEDKAFGELVTIISALRHTNKNFMELLSSYCYYDFIGKIKEFNGSRQSSNGKLTYKDVEELYVSPSVKRSIWQTLTILEEIKKIMGCEPKRIFIEMARSKEESKRTDSRLKKLQDLYKKCREENIDFMPRKDEFNALKTQLSSKKEENLRSDKLYLYYTQMGRCMYTGERIELASLDDNNLYDIDHIYPRSKTKDDSLSNRVLVKKQVNAAKTDTYPLDAAIRTKMHSFWKLLYDKGFIDERKYERLTRSTQLRDEELAGFISRQLVETRQSTKAVAAILKTAYQNSEVVYVKAGNVSDFRQQFKFVKCREVNDLHHAKDAYLNIVVGNCYHVKFTANPLNFITKNQDNRRYSLKPEIFYKFSIKRDGEIAWLGGEDGTMATVARTMHKNNILFTRQAVEGKGELFDQQPLKAKGGQLPLKAGLSIEKYGGYNSLTTAYFAVVKSEGKKGAVQLSIEAIPLVYAKQGEIAVQKYLTEVVQLCKPEIMLPKIKKYSLFKINGFPMHISGRTGKQLIFYGAGQLCIADDVADYLKKALMYETNIAEKEKTLADQNADDIQKQKAQKGLDFYEQKWGISGAVNVQLYDMFIAKSANNLYKNRPVSQTITLKEKREHFVKLTVSKQIHIIKEILNLFKCASASADFKLIDKGTSCGTLKISNNINKLKECILINQSPTGVFEQEVDLMKL

SEQ ID NO: 20747 - protein, 1271 aa, unidentified
  REGION 1..1271: note = Cas Enzyme sequence
YNLFVDKNYTDKDFYQQYPTMYHLRYALATQAGPFDVRLLYLAVQHIAKHRGHFLFDNLDASKVNDFNAVFSEVENYVRDEMGIEDWSCQNIDELAKVLCDVNLGRTTKQKAMQSLLPAQTKQQKAIIQLFSGGKAKLAELFVDEELDECEKKSVSFQDDDLNEFEPVLTAALGERYEGLLRFKAIYDWSLLAKILHLDTSKKDEDEQHLLSECKVQVYEDHKRDLAVLKSMLKGKPLYNKIFRQDGDISYEKYAKGIKGRNQIDFCKDLKKQLEGIAEYKKIMQEITNIDDAKTEEERLLFRITNGFAFPKQTTKDNGIIPIQVHLAELKCILDNAEGYLPFLGETDNNGLSVREKIEQIVKFRIPYYVGPLAGTRMSREQGRCWVVRKHEKIYPWKFTEIVNLEESAEKFITNMTAKCTYLVGEDVLPKESLLYSEFMVRNAINNITVDGERLPVDVLEKIFKQLFLAKTSKVTKKTLERFFRQENISFQNIGGIDDKINASMKSYNDFRRIFGEDYIQLHRDEIENIIRWITLFCDEKKMLVTKIKNTYPQISDDEIKAIKKLKYKDWGRLSATLLNSSTIAYEDKAFGELVTIISALRHTNKNFMELLSSYCYYDFIGKIKEFNGSRQSSNGKLTYKDVEELYVSPSVKRSIWQTLTILEEIKKIMGCEPKRIFIEMARSKEESKRTDSRLKKLQDLYKKCREENIDFMPRKDEFNALKTQLSSKKEENLRSDKLYLYYTQMGRCMYTGERIELASLYDNNLYDIDHIYPRSKTKDDSLSNRVLVKKQVNAAKTDTYPLDAAIRTKMHSFWKLLYDKGFIDERKYERLTRSTQLRDEELAGFISRQLVETRQSTKAVAAILKTAYQNSEVVYVKAGNVSDFRQQFKFVKCREVNDLHHAKDAYLNIVVGNCYHVKFTANPLNFITKNQDNRRYSLKPEIFYKFSIKRDGEIAWLGGEDGTMATVARTMHKNNILFTRQAVEGKGELFDQQPLKAKGGQLPLKAGLSIEKYGGYNSLTTAYFAVVKSEGKKGAVQLSIEAIPLVYAKQGEIAVQKYLTEVVQLCKPEIMLPKIKKYSLFKINGFPMHISGRTGKQLIFYGAGQLCIADDVADYLKKALMYETNIAEKEKTLADQNADDIQKQKAQKGLDFYEQKWGISGAVNVQLYDMFIAKSANNLYKNRPVSQTITLKEKREHFVKLTVSKQIHIIKEILNLFKCASASADFKLIDKGTSCGTLKISNNINKLKECILINQSPTGVFEQEVDLMKL

SEQ ID NO: 20748 - protein, 1379 aa, unidentified
  REGION 1..1379: note = Cas Enzyme sequence
MQKLKNCDYYIGLDMGDASVGWAVTDTNYNILKFNGKALWGIRLFDSANTAASTRVFRSGRRRIDRTTWRLKMLQELFAEEIAKVDPGFFMRLEDSRLHLDDKRDKAVYNLFVDKNYTDKDFYQQYPTMYHLRYALATQAGPFDVRLLYLAVQHIAKHRGHFLFDNLDASKVNDFNAVFSEVENYVRDEMGIEDWSCQNIDELAKVLCDVNLGRTTKQKAMQSLLPAQTKQQKAIIQLFSGGKAKLAELFVDEELDECEKKSVSFQDDDLNEFEPVLTAALGERYEGLLRFKAIYDWSLLAKILHLDTSKKDEGEQHLLSECKVQVYEDHKRDLAVLKSMLKGKPLYNKIFRQDGDISYEKYAKGIKGRNQIDFCKDLKKQLEGIAEYKKIMQEITSIDDAKTEEERLLFRITNGFAFPKQTTKDNGIIPIQVHLAELKCILDNAEGYLPFLGETDNNGLSVREKIEQIVKFRIPYYVGPLAGTRMSREQGRCWVVRKNEKIYPWNFTEIVNLEESAEKFITNMTAKCTYLVGEDVLPKESLLYSEFMVRNAINNITVDGERLPVDVLEKIFKQLFLAKTSKVTKKTLERFFRQENISFQNIGGIDDKINASMKSYNDFRRIFGEDYIQLHRDEIENIIRWITLFCDEKKMLVTKIKNTYPQISDDEIKAIKKLKYKDWGRLSATLLNSSTIAYEDKAFGELVTIISALRHTNKNFMELLSSYCSYDFIGKIKEFNGSRQSSNGKLTYKDVEELYVSPSVKRSIWQTLTILEEIKKIMGCEPKRIFIEMARSKEESKRTDSRLKKLQDLYKKCREENIDFMHRKDEFNALKTQLSSKKEEDLRSDKLYLYYTQMGRCMYTGERIELASLYDNNLYDIDHIYPRSKTKDDSLSNRVLVKKQVNAAKTDIYPLDAAISTKMHSFWKLLYDKGFIDERKYERLTRSTQLRDEELAGFISRQLVETRQSTKAVAAILKTAYQNSEVVYVKAGNVSDFRQQFKFVKCRDVNDLHHAKDAYLNIVVGNCYHVKFTANPLNFITKNQDNRRYSLKPEIFYKFSIKRDSEIAWIGGKDGTITTVTKTMHKNNILFTRQPVEGKGELFKQNPLKAKNGQLPLKAGLSVEKYGGYNSLSTAYFAVVKSEGKKGAVQLSIEAIPLVYAKQGEEAVQDYLTEVVQLCNPEIRIPKIKKYSLFKINGFPMHISGKTVKQIIFYAAGQLCLADDVADYLKKALKYEAYIALNEGLISDKNADDTQKQKAQQRLDYFKQKWGISSDANMKIYDILLAKSANNLYKNRPASQTKDLQEQRCVFEKLSLAEQIHIIGEVLNLFKCASASANLKLLGKGNSCGVIKTSNNITKCKQCILINQSPTGVFEQEVDLMKL

SEQ ID NO: 20749 - protein, 1379 aa, unidentified
  REGION 1..1379: note = Cas Enzyme sequence
MQKLKNCDYYIGLDMGDASVGWAVTDTNYNILKFNGKALWGIRLFDSANTAASTRVFRSGRRRIDRTTWRLKMLQELFAEEIAKVDPGFFMRLEDSRLHLDDKRDKAVYNLFVDKNYTDKDFYQQYPTMYHLRYALATQAGPFDVRLLYLAVQHIAKHRGHFLFDNLDASKVNDFNAVFSEVENYVRDEMGIEDWSCQNIDELAKVLCDVNLGRTTKQKAMQSLLPAQTKQQKAIIQLFSGGKAKLAELFVDAELDECEKKSVSFQDDDLNEFEPVLTAALGERYEGLLRFKAIYDWSLLAKILHLDTSKKDEDEQHLLSECKVQVYEDHKRDLAVLKSMLKGKPLYNKIFRQDGDISYEKYAKGIKGRNQIDFCKDLKKQLEGIAEYKKIMQEITSIDDAKTEEERVLFRITNGFAFPKQTTKDNGIIPIQVHLAELKCILDNVEGYLPFLGETDNNGLSVREKIEQIVKFRIPYYVGPLAGTRMSREQGRYWVVRKNEKIYPWNFTEIVNLEESAEKFITNMTAKCTYLVGEDVLPKESLLYSEFMVRNAINNITVDGERLPVDVLEKIFKQLFLAKTSKVTKKTLERFFRQENISFQNIGGIDDKINASMKSYNDFRRIFGEDYIQLHRDEIENIIRWITLFCDEKKMLVTKIKNTYPQISDDEIKAIKKLKYKDWGRLSATLLNSSAIAYEDKAFGELVTIISALRHTNKNFMELLSSYCSYDFIGKIKEFNGSRQSSNGKLTYKDVEELYVSPSVKRSIWQTLTILEEIKKIMGCEPKRIFIEMARSKEESKRTDSRLKKLQDLYKKCREENIDFMPRKDEFNTLKTQLSSKKEDDLRSDKLYLYYTQMGRCMYTGEKIELASLYDNNLYDIDHIYPRSKTKDDSLSNRVLVKKQVNAAKTDIYPLDAAIRTKMHSFWKLLYDKGFIDERKYQRLTRSTQLRDEELAGFISRQLVETRQSTKAVAAILKTAYQNSEVVYVKAGNVSDFRQQFKFVKCREVNDLHHAKDAYLNIVVGNCYHVKFTANPLNFITKNQDNRRYSLKPEIFYKFSIKRDGEIAWLGGEDGTMATVARTMHKNNILFTRQAVEGKGELFDQQPLKAKGGQLPLKAGLSIEKYGGYNSLTTAYFAVVKSEGKKGAVQLSIEAIPLVYAKQGEIAVQKYLTKVVQLCKPEIMLPKIKKYSLFKINGFPMHISGRTGNRMLFYGAGQLCLDEADVDYLKKALKYENDIAENELVIADKNSDDIQKQQAQKNLDYYNQKWRIGRKVNMHIYDMLLAKSGNNLYKNRPASQTTDLQEQREFFEKLSLANQIHVIGEVLKLFKCASASANLKLLDKGNACGVIKVSNNILKFKQCVLINQSPTGVFEQEVDLMKL

SEQ ID NO: 20750 - protein, 1379 aa, unidentified
  REGION 1..1379: note = Cas Enzyme sequence
MQKLKNCDYYIGLDMGDASVGWAVTDANYNILKFNGKALWGIRLFDSANTAASTRVFRSGRRRIDRTTWRLKMLQELFAKEIAKVDPGFFMRLEDSRLHLDDKRDKAVYNLFVDKNYTDKDFYQQYPTMYHLRYALATQAGPFDVRLLYLAVQHIAKHRGHFLFDNLDASKVNDFNAVFSEVENYVRDEMGIEDWSCQNIDELAKVLCDVNLGRTTKQKAMQSLLPAQTKQQKAIIQLFSGGKAKLAELFVDEELDECEKKSVSFQDDDLNEFEPVLTAALGERYEGLLRFKAIYDWSLLAKILHLDTSKKDEDEQHLLSECKVQVYEDHKRDLAVLKSMLKGKPLYNKIFRQDGDISYEKYAKGIKGRNQIDFCKDLKKQLDGIAEYKKIMQEITSIDAAGTEEERLLFRIANGFAFPKQTTKDNGIIPIQVHLAELKCILDNAEGYLQFLGETDNNGLSVREKIEQIVKFRIPYYVGPLAGTRMSREQGRCWVVRKNEKIYPWNFTEIVNLEESAEKFITNMTAKCTYLVGEDVLPKESLLYSEFMVRNAINNITVDGERLPVDVLEKIFKQLFLAKTSKVTKKTLERFFRQENISFQNIGGIDDKINASMKSYNDFRRIFGADYIQLHRDEIENIIRWITLFCDEKKMLVTKIKNTYPQISDDEIKAIKKLKYKDWGRLSATLLNSSAIAYEDKAFGELVTIISALRHTNKNFMELLSSYCSYDFIGKIKEFNGSRQSSNGKLTYKDVEELYVSPSVKRSIWQTLTILEEIKKIMGCEPKRIFIEMARSKEESKRTDSRLKKLQDLYKKCREENIDFMPRKDEFNALKTQLTSQKEENLRSDKLYLYYTQMGRCMYTGERIELASLYDNNLYDIDHIYPRSKTKDDSLSNRVLVKKEVNAAKTDIYPLDAAIRTKMHSFWKLLYDKGFIDERKYERLTRSTQLRDEELAGFISRQLVETRQSTKAVAAILKTAYQNSEVVYVKAGNVSDFRQQFKFVKCREVNDLHHAKDAYLNIVVGNCYHVKFTANPLNFITKNQDNRRYSLKPEIFYKFSIKRDGEIAWLGGEDGTMATVARTMHKNNILFTRQPLEGKGELFKQNPLKAKSGQLPLKAGLSVEKYGGYDSLTTAYFALVKSEGKKGSVQLSIEGIPLVYAKQGEKAVKDYLTEVVQLCKPEIKIPKIKKYSLFKINGFPMHISGRQGKQLIFYVAGQLCINEDSIAYLKKVFKYESDLAVNEEILADENGDEVRKQKARNRLAFYDNTWGISLEANMQLYDMLLAKSANNLYKNRPASQTSTLKEQREQFSILPLSKQIHVIKEILKLFKCASATADFKLLEKGSTCGKIQVSTNITKCKQCILINQSPTGVFEQEVDLMKL

SEQ ID NO: 20751 - protein, 1148 aa, unidentified
  REGION 1..1148: note = Cas Enzyme sequence
MQKLKNCDYYIGLDMGDASVGWAVTDTNYNILKFNGKALWGIRLFDSANTAASTRVFRSGRRRIDRTTWRLKMLQELFAEKIAKVDPGFFMRLEDSRLHLDDKRDKAVYNLFVDKNYTDKDFYQQYPTMYHLRYALATQAGPFDVRLLYLAVQHIAKHRGHFLFDNLDASKVNNFNEVFSEVENYVRDEMGIEDWSCQNIDELAKVLCDVNLGRTTKQKAMQSLLPAQTKQQKAIIQLFSGGKAKLAELFVDEELDECEKKSVSFQDDDLNEFEPVLTAALGERYEGLLRFKAIYDWSLLAKILHLDTSKKDEGEQHLLSECKVQVYEDHKRDLAVLKSMLKGKPLYNKIFRQDGDISYEKYAKGIKGRNQIDFCKDLKKQLEGIAEYKKIMQEITSIDDAKTEEERLLFRITNGFAFPKQTTKDNGIIPIQVHLAELKCILDNAEGYLPFLGETDNNGLSVREKIEQIVKFRIPYYVGPLAGTRMSREQGRCWVVRKNEKIYPWNFTEIVNLEESAEKFITNMTAKCTYLVGEDVLPKESLLYSEFMVRNAINNITVDGERLPVDVLEKIFKQLFLAKTSKVTKKTLERFFRQENISFQNIGGIDDKINASMKSYNDFRRIFGEDYIQLHRDEIENIIRWITLFCDEKKMLVTKIKNTYPQIADDQIKAIKKLKYKDWGRLSATLLNSSAIAYEDKAFGELVTIISALRHTNKNFMELLSSYCSYDFIGKIKEFNGSRQSSNGKLTYKDVEELYVSPSVKRSIWQTLTILEEIKKIMGREPKRIFIEMARSKEESKRTDSRLKKLQDLYKKCKEENIVFVPRKDEFNALKTQLSSKKEDDLRSDKLYLYYTQMGRCMYTGERIELASLYDNNLYDIDHIYPRSKTKDDSLSNRVLVKKQVNAAKTDTYPLDAVIRIKMHSFWKLLYDKGFIDERKYERLTRSTQLRDEELAGFISRQLVETRQSTKAVATILKTAYKHSEVVYVKAGNVSDFRQQFKFVKCREVNDLHHAKDAYLNIVVGNCYYVKFTANPLNFIKKNQDSRSYSLKPEIFYKFNIKRDDDIAWLGGEDGTMATVARTMHKNNILFTRQAVEGKGELFKQNPLKANSGQLPLKAGLSIEKYGGYNSLTTAYFAVVKSEGKKGLCSCL

SEQ ID NO: 20752 - protein, 1379 aa, unidentified
  REGION 1..1379: note = Cas Enzyme sequence
MQKLKNCDYYIGLDMGDASVGWAVTDTNYNILKFNGKALWGIRLFDSANTAASTRVFRSCRRRIDRTTWRLKMLQELFAEEIAKVDPGFFMRLEDSRLHLDDKRDKEVYNLFVDKNYTDKDFYQQYPTMYHLRYALATQAGPFDVRLLYLAVQHIAKHRGHFLFDNLDASKVNDFNAVFSEVENYVRDEMGIEDWSCQNIDELAKVLCDVNLGRTTKQKAMQSLLPAQTKQQKAIIQLFSGGKAKLAELFADEELDECEKKSVSFQDDDLNEFEPVLTAALGERYEGLLRFKAIYDWSLLAKILHLDTSKKDKDEQHLLSECKVQVYEDHKRDLAVLKSMLKGKPLYNKIFRQDGDISYEKYAKGIKGRNQIDFCKDLKKQLEGIAEYKKIMQEITSIDDAKTEEERLLFRITNGFAFPKQTTKDNGIIPIQVHLAELKCILDNAEGYLPFLGETDNNGLSVREKIEQIVKFIIPYYVGPLAGTRMSREQGRCWVVRKNEKIYPWNFTEIVNLEESAEKFITNMTAKCTYLVGEDVLPKESLLYSEFMVRNAINNITVDGERLPVDVLEKIFKQLFLAKTSKVTKKTLERFFRQENISFQNIGGIDDKINASMKSYNDFRRIFGEDYIQLHRDEIENIIRWITLFCDEKKMLVTKIKNTYPQISDDEIKAIKKLKYKDWGRLSATLLNSSAIAYEDKAFGELVTIISALRHTNKNFMELLSSYCSYDFIGKIKEFNGSRQSSNGKLTYKDVEELYVSPSVKRSIWQTLTILEEIKKIMGCEPKRIFIEMARSKEESKRTDSRLKKLQDLYKKCREENIDFMPRKDEFNTLKTQLSSKKEDDLRSDKLYLYYTQMGRCMYTGEKIELASLYDNNLYDIDHIYPRSKTKDDSLSNRVLVKKQVNAAKTDTYPLDAAIRTKMHSFWKLLYDKGFIDERKYQRLTRSTQLRDEELAGFISRQLVETRQSTKAVAAILKTAYQNSEVVYVKAGNVSDFRQQFKFVKCREVNDLHHAKDAYLNIVVGNCYHVKFTANPLNFITKNQDNRRYSLKPEIFYKFSIKRDGEIAWLGGEDGTMATVARTMHKNNILFTRQPLEGKGELFKQNPLKAKSGQLPLKAGLSVEKYGGYDSLTTAYFALVKSEGKKGSVQLSIEGIPLVYAKQGEKAVKDYLTEVVQLCKPEIKIPKIKKYSLFKINGFPMHISGRQGKQLIFYVAGQLCINEDSIAYLKKVFKYESDLAVNEEILADENGDEVRKQKARNRLAFYDNTWGISLEANMQLYDMLLAKSANNLYKNRPASQTSTLKEQREQFSILPLSKQIHVIKEILKLFKCASATADFKLLEKGSTCGKIQVSTNITKCKQCILINQSPTGVFEQEVDLMKL

SEQ ID NO: 20753 - protein, 1320 aa, unidentified
  REGION 1..1320: note = Cas Enzyme sequence
MKISGNREKVSDYYIGLDVGTNSVGWAVTDTEYNILKFRGNAMWGARLFEKANPAAERRQYRIARRLNKRRKQRLEWLELLFDEEISKTDPSFFIRLKESSLLNEDKTHRADFPIFNDSDYTDKDYYRDYPTAYHLRNELIESDKPHDIRLVFLALHHIIKSRGHFLFDMELSDEYKTVDIMLDEFTDRVFEAYGVKLGFADKEKFVSVLSSGNLGINAKKKLLRDGVTIEGESDDIDFALAIDSLSGAAINLSKLFFDEELKDSGKFSLNEDLDEALGETAALLGEESTELLRMLKEIFDSGKLAQMLGGHQYICEAKVERYETNKRDLKRLKEYVRKNAPDKYREIFCDKKDKLNNFAAYSGKTLESGDYSCKQEDFCKYIKKTLPELKNDSEFADIYAKLDNNTLLSKLKGADNGVIPYQLHLKELKKILDNAENYLELLKQTDENGVSVKEKIISVFSFRIPYYVGPLNKNAAHSWVVRTDEKIYPWNFNRVVDTEKSSEGFIINLISKCGYTGEEVLPKESLLFSEYCVWNEINPLKVNGEKISPEIKKEIFDELFLKSNSKVTAKLIKGFLLKKCYIKPEDEISGVADILKSRLKSYHSLSKIMSVEENYETAENIIRAVTIFGDDKKLLKGWLKRNCPSLDERQTAAVCRLSFSGWGSLSKTLLTEIYSPDENGEARSIMDMLRSTDNNLMQLLSNSFKFAENAEAHLKEKCGERESLREMIEDMYISPAVKRSLLQTVKIVDEITDIKKSAPKKIMIEVARDREGDNAKKATVSRRERLLGLYKACRDEYPELYKAIEAADEGDLRRDALYLYYTQFGKCMYSGEKISLERLDSDYDIDHIFPQSRIKDDSIENRVLVKKICNREKSNEYPIKSDWQKNMQPFWRMLKDKGYISQKKYDRLTRRTPLTEEELSAFVARQLVETRQSTKALAEIFKTMYGAAGTKVVYSKAGNVSEFRQEFKLIKCRDVNDLHHAKDAYLNIVVGNVYDTKFTDAFFKNIRNENYSLNKVFEYSVPGAWDKDKSIAAVKSVMRKNNILATRMPHETRGALYDLQLMPAGKGQLPSKSGKPIEKYGGYNKVKVAYFFVAEHTEKKARVRSIQPVYIYKKALYEKDPIAYCTEILGLCDPKIIYPRLLIHATVEIDGKRLGICGKSENYLLCRHEYQLAVSPADEGYIKEISKYIARSAAERAENGIRLAPDSEICSEKNTELYRLFLRKLETQVYNRLHDGQLKKLKAKEEAFAELPLVAQCKMLLEILKLFKCDRQTSDFSAIGEGANCGNLREHNSLKKVHSAFAICSSVTGLYSRRVDLLK

SEQ ID NO: 20754 - protein, 1320 aa, unidentified
  REGION 1..1320: note = Cas Enzyme sequence
MKISGNREKVSDYYIGLDVGTNSVGWAVTDTEYNILKFRGNAMWGARLFEKANPAAERRQYRIARRLNKRRKQRLEWLELLFDEEISKTDPSFFIRLKESSLLNEDKTHRADFPIFNDSDYTDKDYYRDYPTAYHLRNELIESDKPHDIRLVFLALHHIIKSRGHFLFDMELSDEYKTVDIMLDEFTDRVFEAYGVKLGFADKEKFVSVLSSGNLGINAKKKLLRDGVTIEGESDDIDFALAIDSLSGAAINLSKLFFDEELKDSGKFSLNEDLDEALGETAALLGEESTELLRMLKEIFDSGKLAQMLGGHQYICEAKVERYETNKRDLKRLKEYVRKNAPDKYREIFCDKKDKLNNFAAYSGKTLESGDYSCKQEDFCKYIKKTLPELKNDSEFADIYAKLDNNTLLSKLKGADNGVIPYQLHLKELKKILDNAENYLELLKQTDENGVSVKEKIISVFSFRIPYYVGPLNKNAAHSWVVRTDEKIYPWNFNRVVDTEKSSEGFIINLISKCGYTGEEVLPKESLLFSEYCVWNEINPLKVNGEKISPEIKKEIFDELFLKSNSKVTAKLIKGFLLKKCYIKPEDEISGVADILKSRLKSYHSLSKIMSVEENYETAENIIRAVTIFGDDKKLLKGWLKRNCPSLDERQTAAVCRLSFSGWGSLSKTLLTEIYSPDENGEARSIMDMLRSTDNNLMQLLSNSFKFAENAEAHLKEKCGERESLREMIEDMYISPAVKRSLLQTVKIVDEITDIKKSAPKKIMIEVARDREGDNAKKATVSRRERLLGLYKACRDEYPELYKAIEATDEGDLRRDALYLYYTQFGKCMYSGEKISLERLDSDYDIDHIFPQSRIKDDSIDNRVLVKKICNREKSNEYPIKSDWQKNMQPFWRMLKDKGYISQKKYDRLTRRTPLTEEELSAFVARQLVETRQSTKALAEIFKTMYGAAGTKVVYSKAGNVSEFRQQFKLIKCRDVNDLHHAKDAYLNIVVGNVYDTKFTDAFFKNIRNENYSLNKVFEYSVPGAWDKDKSIAAVKSVMRKNNILATRMPHETRGALYDLQLMPAGKGQLPSKSGKPIEKYGGYNKVKVAYFFVAEHTEKKARVRSIQPVYIYKKALYEKDPIAYCTEILGLCDPKIIYPRLLIHATVEIDGKRLGICGKSENYLLCRHEYQLAVSPADERYIKEISKYIARSAAERAENGIRLAPDSEICSEKNTELYRLFLRKLETQVYNRLHDGQLKKLKAKEEAFAELPLVAQCKMLLEILKLFKCDRQTSDFSAIGEGANCGNLREHNSLKKVHSAFAICSSVTGLYSRRVDLLK

SEQ ID NO: 20755 - protein, 1250 aa, unidentified
  REGION 1..1250: note = Cas Enzyme sequence
RKQRLEWLELLFDEEISKTDPSFFIRLKESSLLNEDKTHRADFPIFNDSDYTDKDYYKDYPTAYHLRNELIESDKPHDIRLVFLALHHIIKSRGHFLFDMELSDEYKTVDIMLDEFTDRVFEAYGVKLGFADKEKFVSVLSSGNLGINAKKKLLRDGVTIEGESDDIDFALAIDSLSGAAINLSKLFFDEELKDSGKFSLNEDLDEALGETAALLGEESTELLRMLKEIFDSGKLAQMLGGHQYICEAKVERYETNKRDLKRLKEYVRKNAPDKYREIFCDKKDKLNNFAAYSGKTLESGDYSCKQEDFCKYIKKTLPELKNDSEFADIYAKLDNNTLLSKLKGADNGVIPYQLHLKELKKILDNAENYLELLKQTDENGVSVKEKIISVFSFRIPYYVGPLNKNAAHSWVVRTDEKIYPWNFNRVVDTEKSSEGFIINLISKCGYTGEEVLPKESLLFSEYCVWNEINPLKVNGEKISPEIKKEIFDELFLKSNSKVTAKLIKGFLLKKCYIKPEDEISGVADILKSRLKSYHSLSKIMSVEENYETAENIIRAVTIFGDDKKLLKGWLKRNCPSLDERQTAAVCRLSFSGWGSLSKTLLTEIYSPDENGEARSIMDMLRSTDNNLMQLLSNSFKFAENAEAHLKEKCGERESLREMIEDMYISPAVKRSLLQTVKIVDEITDIKKSAPKKIMIEVARDREGDNAKKATVSRRERLLGLYKACRDEYPELYKAIEAADEGDLRRDALYLYYTQFGKCMYSGEKISLERLDSDYDIDHIFPQSRIKDDSIENRVLVKKICNREKSNEYPIKSDWQKNMQPFWRMLKDKGYISQKKYDRLTRRTPLTEEELSAFVARQLVETRQSTKALAEIFKTMYGAAGTKVVYSKAGNVSEFRQEFKLIKCRDVNDLHHAKDAYLNIVVGNVYDTKFTDAFFKNIRNENYSLNKVFEYSVPGAWDKDKSIAAVKSVMRKNNILATRMPHETRGALYDLQLMPAGKGQLPSKSGKPIEKYGGYNKVKVAYFFVAEHTEKKARVRSIQPVYIYKKALYEKDPIAYCTEILGLCDPKIIYPRLLIHATVEIDGKRLGICGKSENYLLCRHEYQLAVSPADERYIKEISKYIARSAAERAENGIRLAPDSEICSEKNTELYRLFLRKLETQVYNRLHDGQLKKLKAKEEAFAELPLVAQCKMLLEILKLFKCDRQTSDFSAIGEGANCGNLREHNSLKKVHSAFAICSSVTGLYSRRVDLLK

SEQ ID NO: 20756 - protein, 1320 aa, unidentified
  REGION 1..1320: note = Cas Enzyme sequence
MKISGNREKVSDYYIGLDVGTNSVGWAVTDTEYNILKFRGNAMWGARLFEKANPAAERRQYRIARRLNKRRKQRLEWLELLFDEEISKTDPSFFIRLKESSLLNEDKTHRADFPIFNDSDYTDKDYYKDYPTAYHLRNELIESDKPHDIRLVFLALHHIIKSRGHFLFDMELSDEYKTVDIMLDEFTDRVFEAYGVKLGFADKEKFVSVLSSGNLGINAKKKLLRDGVTIEGESDDIDFALAIDSLSGAAINLSKLFFDEELKDSGKFSLNEDLDEALGETAALLGEESTELLRMLKEIFDSGKLAQMLGGHQYICEAKVERYETNKRDLKRLKEYVRKNAPDKYREIFCDKKDKLNNFAAYSGKTLESGDYSCKQEDFCKYIKKTLPELKNDSEFADIYAKLDNNTLLSKLKGADNGVIPYQLHLKELKKILDNAENYLELLKQTDENGVSVKEKIISVFSFRIPYYVGPLNKNAAHSWVVRTDEKIYPWNFNRVVDTEKSSEGFIINLISKCGYTGEEVLPKESLLFSEYCVWNEINPLKVNGEKISPEIKKEIFDELFLKSNSKVTAKLIKGFLLKKCYIKPEDEISGVADILKSRLKSYHSLSKIMSVEENYETAENIIRAVTIFGDDKKLLKGWLKRNCPSLDERQTAAVCRLSFSGWGSLSKTLLTEIYSPDENGEARSIMDMLRSTDNNLMQLLSNSFKFAENAEAHLKEKCGERESLREMIEDMYISPAVKRSLLQTVKIVDEITDIKKSAPKKIMIEVARDREGDNAKKATVSRRERLLGLYKACRDEYPELYKAIEAADEGDLRRDALYLYYTQFGKCMYSGEKISLERLDSDYDIDHIFPQSRIKDDSIENRVLVKKICNREKSNEYPIKSDWQKNMQPFWRMLKDKGYISQKKYDRLTRRTPLTEEELSAFVARQLVETRQSTKALAEIFKTMYGAAGTKVVYSKAGNVSEFRQEFKLIKCRDVNDLHHAKDAYLNIVVGNVYDTKFTDAFFKNIRNENYSLNKVFEYSVPGAWDKDKSIAAVKSVMRKNNILATRMPHETRGALYDLQLMPAGKGQLPSKSGKPIEKYGGYNKVKVAYFFVAEHTEKKARVRSIQPVYIYKKALYEKDPIAYCTEILGLCDPKIIYPRLLIHATVEIDGKRLGICGKSENYLLCRHEYQLAVSPADERYIKEISKYIARSAAERAENGIRLAPDSEICSEKNTELYRLFLRKLETQVYNRLHDGQLKKLKAKEEAFAELPLVAQCKMLLEILKLFKCDRQTSDFSAIGEGANCGNLREHNSLKKVHSAFAICSSVTGLYSRRVDLLK

SEQ ID NO: 20757 - protein, 1316 aa, unidentified
  REGION 1..1316: note = Cas Enzyme sequence
MKISGNDRRTGSYYLGLDVGTESVGWAVTSCEYELLRHRGNAMWGVRLFDEAKGAAERRSYRTARRRAARRRQRLDLLELIFSEEIGRVDPLFFVRLKESALHLDDKTQVRSKYSIFDDDKLSDVIYHKKYPTVYHLRSELIHSDEPHDIRLVYLALHHIMKSRGHFLFDMDAGDEYKDIHVILGELRTLLADEYNTEIKFGEEYISALLRSDIGVTAKAKLVKEALVETSPDAAIDIAVMSEALAGKTIKFDALFKDPALKESEEKTLCLRGDIEEKYDSYAEILGERIEIVTAMKAVFDSARLAQILGGDKYISDAKVRQWNENRADLVGLKAYVREYESEKYDNIFICKSEKLNNYASYSRYNHGSAEHTCTQEEFCKYLKKELDSMKEHSEYSELWQKIQNNELLPKLRGADNGVIPKQLHLIELKKVLDNASKYLGFLSETDSDGLSVTQKIIKLFDFRIPYYVGPLNKKSPNAWVIRTDEKITPWNFEHVVDTKASANEFMVRLTGKCTYTGEDVLPRDSLLYSEYAVLNEINPICVNGNPLPVDVKQRIFEDMFVVSNSKVTKRRIKDYLIEHCLIQPNDEITGIDDTIKSKLKSYHDFKKILDKTHDTAMVEDMISHILIFGDDKKLLREWLRDNCNGLDAKDIEYVSRLKYKDWGRLSRAFLTELYTPDEHGEALSVIDMMRATNCNLMQLMSDKYKFSEAAEAYRNNKFGTDETLEQRLDTLYVSPAVKRSIRQTLRIVDEITDIRKAAPEKIFIEMARGADESQKGKRTESRKNRLISLYKACKEDSGALYEALESEPEGRLRHDALYLYYTQFGRCMYSGEEIDLSQIDKAYDVDHIYPQSKIKDDSLDNRVLVAKRLNMDKTNVYPVSAEIRNKMRPMWHMLKEKGMISEKKYERLVRSTPLSEDELASFVGRQLVETRQSTKALATVLGELYPDTHLVYSKAGNVSTFRQKYNIVKCRDVNDLHHAKDAYLNIVVGNVYCTKFTDAFFKNISRENYSLNRIFDYDVPGAWNASIDLGRVKNIVSKNNIIVTRMAYEVKGEIAKRQISPKGKGQLPIKEGMDIAAYGGYDKIAGAYFFVVEHASKKKRVRTVEPVYIYKKALYESDPVRYCTEILGLEDPIIVYPRILKDSLLELDGRKMYITGRSVDKLLGKHPYQLSVSYEFEQNIKRISKYIERCAAAKCELEITNYDGITTDNNIKLYDLLISKLHTPVYGGYYSGICQTCENGRDIFISLSLYQQCVQLLELLKLFKCDRTTANLTLIGGAKTSGVICPMKTVSNCNNAYLINQSVTGLFETRVDLLS

SEQ ID NO: 20758 - protein, 1316 aa, unidentified
  REGION 1..1316: note = Cas Enzyme sequence
MKISGNDRRTGSYYLGLDVGTESVGWAVTSCEYELLRHRGNAMWGVRLFDEAKGAAERRSYRTARRRAARRRQRLDLLELIFSEEIGRVDPLFFVRLKESALHLDDKTQVRSKYSIFDDDKLSDVIYHKKYPTVYHLRSEIIHSDEPHDIRLVYLALHHIMKSRGHFLFDMDAGDEYKDIHVILGELRTLLADEYNTEIKFGEEYISALLHSDIGVTAKAKLVKGALGEISFDEAIDTVVMSEALAGKTIKLDALFKDPALKESEEKTLCLRGDIEEKYDSYAEILGERIEIVTAMKAVFDSARLAQILGGDKYISDAKVRQWNENRADLVGLKAYVREYESEKYDNIFVCKSEKLNNYASYSRYNHGSAEHTCTQEEFCKYLKKELDSMKEHSEYSELWQKIQNNELLPKLRGADNGVIPKQLHLIELKKILDNASKYLGFLSETDSDGLSVTQKIIKLFDFRIPYYVGPLNKKSPNAWVIRTDEKITPWNFEHVVDTKASANEFMVRLTGKCTYTGEDVLPRDSLLYSEYAVLNEINPICVNGNPLPVDVKQRIFEDMFVVSNSKVTKRRIKDYLIGHCLIQPSDEITGIDDTVKSKLKSYHDFKKILDKTHDTAMVEDMISHILIFGDDKKLLREWLRDNCNGLDAKDIEYVSRLKYKDWGRLSRAFLTELYTPDEHGEALSVIDMMRATNCNLMQLMSDKYKFSEAAEAYRNNKFGTDETLEQRLDTLYVSPAVKRSIRQTLRIVDEITDIRKAAPEKIFIEMARGADESQKGKRTESRKNRLISLYKACKEDSGALYEALESEPEGRLRHDALYLYYTQFGRCMYSGEEIDLSQIDKAYDVDHIYPQSKIKDDSLDNRVLVAKRLNMNKTNVYPVSAEIRNKMRPMWHMLKEKGMISEKKYERLVRSTPLSEDELASFVGRQLVETRQSTKALATVLGELYPDTRLVYSKAGNVSTFRQKYNIVKCRDVNDLHHAKDAYLNIVVGNVYCTKFTDAFFKNISRENYSLNRIFDYDVPGAWNASIDLGRVKNIVSKNNILVTRMAYEVKGEIAKRQISPKGKGQLPIKEGMDIAAYGGYDKIAGAYFFVVEHASKKKRVRTVEPVYIYKKALYESDPVRYCTEILGLEEPIIVYPRILKDSLLELDGRKMYITGRSVDKLLGKHPYQLSVSYEFEQNIKRISKYIERCAAAKCELEITNYDGITTDNNIKLYDLLISKLHTPVYGGYYSGICQTCENGRDIFISLSLYQQCVQLLELLKLFKCDRTTANLTLIGGAKTSGVICPMKTVSNCNNAYLINQSVTGLFETRVDLLS

SEQ ID NO: 20759 - protein, 1351 aa, unidentified
  REGION 1..1351: note = Cas Enzyme sequence
MKKQFGEYYLAFDIGTDSVGWAVTDLNYNLERLNGKYMWGTRLFEAGKTAAERRSFRAARRRLQRRTQRIRLLQEIFAEEISKADMGFFHRLAESKYRLEDKNNQTNTLFNDANFKDKDYHAKFPTIFHLRKTLIESKEKFDVRLVYLALQHILKNRGHFLFEGQRMENVTSFDAAFSPLNNYLEDEYQFAFADDSLDKVQNILKDSSLGVKDKNKYLNDLLGADTKQKKEMVNLICGGTAKIKNILDIAEDTDLEIDKLCFKTMDYADIHDKLLDTIGDLSKIECLDRLKSIFDWSLLTEIKKGNDYLSFAKVDVYEKHKQDIKLLKSLIKKYYDNAAYNEIFNDVNTANNYVAYVGMTKKNNKKQVVLSRKCTQEEFCKFVKGYLDRIKSMDSDVEQLKSKCANVSFAPKQINRDNGVIPYQMHLLELEKILENAKRYLPFLNEKDASGYTAAEKIVKIMTFRIPYYVGPLNDHHKIADGQKGHCWIVKNSDEKIRPWNFERVVDQEACAEAFIRRMTNKCTYMHDADVLPKDSLLYSKFVVLNELNNVCVNGDRLPTDLKQHIYRELFMRQKKVKAKNFRDFMINNGYMRETDSLSGFDGDFKGSLGSLIDFRKIIGVKAGDNKMVEEIIKWIVLFGDTKKLLKDRINKFYGDKLSENEIKAIVNLKYTGWGRLSREFLEQITSQIPGFANELGIITAMYETPNNLMELLSGQYQYLDKLQAYNNTMHEATGSLTYETVADLYVSPAVKRSIWQTLVLAEEIKNVMGHEPKKVFIEMTRSDVQNKKRTVSRKNSLISLYKACKGETRDWLAELENRTDGDLRGDKLFLYYTQMGRCMYTGERIEIGELFSTGADGRALYDIEHIFPQSKIKDDSIDNRVLVKAGANRAKGDQYPVPQEYRNKCGGIWKMLLERGFISQKKYDRLVRNTPFSEDELAGFIARQIVETSQSTKAVAEILKREYKNTEIVYVKAGNVSAFRQKNDFVKCREINDYHHAKDAYLNIVVGNVYNTKFTHSPINFIKSKNNKYSLNKMYDFKVERNGNVAWEPGDNGTIATVKQTMHNNRVLFTRYASQAKGGFFKQMLLKKGKGQHPIKGNMNDPISKIENYGGYDKVAGAYFFLVEHTLKNKRVKTIEYVPILKAVMLQDNPAALLQYCLDDLILHEPRILLAGIKINTLFKVDGFKMHLSGRTGNQLIYKGAEQLVLAVNDEKYIKKIAKYIQRNKEAKGQLPVTVFDKFDKDTNIALYDKLLDKLQNTVYGVRLSAQIKNLEKGRETFINLGVKEQVITLFEILHLFQCNSVNGDLTAIGGAKSAGILVLGKNISELPKISIINQSPTGLFEQEIDLLKL

SEQ ID NO: 20760 - protein, 1351 aa, unidentified
  REGION 1..1351: note = Cas Enzyme sequence
MKKQFGEYYLAFDIGTDSVGWAVTDLNYNLERLNGKYMWGTRLFEAGKTAAERRSFRAARRRLQRRTQRIRLLQEIFAEEISKADMGFFHRLAESKYRPEDKNNQTNTLFNDANFKDKDYHAKFPTIFHLRKTLIESKEKFDVRLVYLALQHILKNRGHFLFEGQRMENVTSFDAAFSPLNNYLEDEYQFAFADDSLDKVQNILKDSSLGVKDKNKYLNDLLGADTKQKKEMVNLICGGTAKIKNILDIVEDTDLEIDKLCFKTMDYADIHDKLLDTIGDLSKIECLDRLKSIFDWSLLAEIKKGNDYLSFAKVDVYEKHKQDIKLLKSLIKKYYDNAAYNEIFNDVNTANNYVAYVGMTKKNNKKQVVLSRKCTQEEFCKFVKGYLDRIKSMDADVEQLKSKCANVSFAPKQINRDNGVIPYQMHLLELEKILENAKRYLPFLNEKDASGYTAAEKIVKIMTFRIPYYVGPLNDHHKIADGQKGHCWIVKNSDEKIRPWNFERVVDQEACAEAFIRRMTNKCTYMHDADVLPKDSLLYSKFVVLNELNNVCVNGDRLPTDLKQHIYRELFMRQKKVKAKNFRDFMINNGYMRETDSLSGFDGDFKGSLGSLIDFRKIIGVKAGDNKMVEEIIKWIVLFGDTKKLLKDRINKFYGDKLSENEIKAIVNLKYTGWGRLSREFLEQITSQIPGFANELGIITAMYETPNNLMELLSGQYQYLDKLQAYNNTMHEATGSLTYETVADLYVSPAVKRSIWQTLVLAEEIKNVMGHEPKKVFIEMTRSDVQNKKRTVSRKNSLISLYKACKGETRDWLAELENRTDGDLRGDKLFLYYTQMGRCMYTGERIEIGELFSTGADGRALYDIEHIFPQSKIKDDSIDNRVLVKAGANRAKGDQYPVPQEYRNKCGGIWKMLLERGFISQKKYDRLVRNTPFSEDELAGFIARQIVETSQSTKAVAEILKREYKNTEIVYVKAGNVSAFRQQNDFVKCREINDYHHAKDAYLNIVVGNVYNTKFTHSPINFIKSKNNKYSLNKMYDFKVERNGNVAWEPGDNGTIATVKQTMHNNRVLFTRYASQAKGGFFKQMLLKKGKGQHPIKGNMNDPISKIENYGGYDKVAGAYFFLVEHTLKNKRVKTIEYVPILKAVMLQDNPAALLHYCLDDLILHEPRILLAGIKINTLFKVDGFKMHLSGRTGNRLIYKGAEQLVLAVNDEKYIKKIAKYIQRNKEAKGQLPVTVFDKFDKDTNIALYDKLLDKLQNTVYGVRLSAQIKNLEKGRETFINLGIKEQVITLFEILHLFQCNSVNGDLTAIGGAKSAGILVLGKNISELPKISIINQSPTGLFEQEIDLLKL

SEQ ID NO: 20761 - protein, 1353 aa, unidentified
  REGION 1..1353: note = Cas Enzyme sequence
MKRGNYYLGLDIGTETVGYAVTDENYNLLKFNGSPAWGTTVFDAVSSNAERRSFRSARRRLDRRQQRVNLLQDLFAREIANVDENFYKRIRESQLYREDVGDKYILFNDTNYTDTDYFAEYPTIHHLINELVKNPAPHDVRLVYLACSWLVAHRGHFLNNMEKGNISDVKDFEKVYKKFLEYFTETRKCAAPWECDDIEAFGKAVKAKKNVTAKNKELIEVLLNGQKPSKETTEEFPFRQDCIIKLLAGGTCKLSDLFACEEYSDYGSISLGMDEDAMTDISSKIGDDYELISAMREIYDWSLLVDILGEYSTISEAKVAVYEQHKKDLGTLKAFIKEYKPEKYNEVFREIGKDNYAAYSYHTDEPNSAGLKRKNVEDFSKYILGIINKIEPKEEDIEKFNDMKSRLELRTFLPKQRNTNNRVIPHQLYWHELNEILKNASKYLDFLNEKDEDGISVKDKILSVFMFKIPYFVGPLNDKSPNAWIVRKTGRIYPWNFESMVDLDASEDAFIRKMTNRCTYLPDEYVLPKDSLCYHKFMVLNEINNLKINGEKISVELKQRIYNELFLQKKKVTRKRIIDFLICNGYLEKGSEDLVSGIDININSNLEPQIAFRRLFENNILSESDAKRIIERSSYAEDKLRFLKWLKREYPQLNDDDREYIGRLKFKDFGRLSRKFLCDFEGTDRKTGEVFTILGALWSTQNNLMELLSNSFTFAERIEEYQKEYYSENPKTLNDRLNEMYISDSVKRPIYRTLDIVKDVVKAFGVPKKIFVEMTRGGSADQKGKRTKSRKQQILDLYEKCDEEDVRELKQQLESMGELADNKLQGDKLFLYYMQLGKCMYSGEPIKLEELGTKSYDIDHIYPQAYVKDDSIINNKVLVLSELNGEKGDIYPIKSNIRQKMVGWWKHLKDKELISGEKYKRLTRSTPFSDDEKLGFINRQLTETSQSTKAVATLLGEKYDTEIVYCKARLTSEFRQEFDLLKSRTFNDLHHAKDAYLNIVCGNVYNMKFTKKWFNIDSQYNIKTKALFSHPVICGEKTVWDGEPMLAKVKATVAKNNAHFTKYKFFKRGGLFDQNPVHAGADKTPLKKGLPTEKYGGYNKAGVMFFIPVKYTAGKKTEIIIMSVELLVGKKFLADKAFALEYSYSRLQRILGKPVDAISFPMGMTPWKINSVLSLDGFRVCITGIGSGGKSLRAQPIVQFSDDKFWEYYLKKLEAVSEKIARNPKYVYSEYFDKVSAEKNIELYDLYLNKLKSTIYSKRTNNPVAIVESGREKFVSLDIKDQISTLLNVQMVFGRMVGGCDLHCIGGSKNTASTGNFSSTISNWKKYYSDVRIIDQSASGLWEKKSENLLDLL

SEQ ID NO: 20762 - protein, 1341 aa, unidentified
  REGION 1..1341: note = Cas Enzyme sequence
MSRREYGDYYLGLDIGTESVGWAVTNPDYQLMKFGKKTMWGVRLFPEAQTAAERRLFRVSRRRLERRAQRLALLQELFTEEIKKVDPGFFMRLQEGALHEEDKTVPQPNNLFCDAVLTDKKYHRLYPTIYHLRRSLISSDSPHDIRLVYLAIHHIIKYRGHFLFGGKLDEVPALDAILSEISDEAVDCFGFSLPCGSMASFAGVLTDRSLRMSVKQKKLYELLEADSPRARAFIRAMTGGKVNLSDLFDVQEAVEQEKIKIAFGTDEYEALQPELEELLGEQFYYLDKIRAIHDWAALESIVGGGRTLSDAKVAAYEEHRRDLKLLKRVVKHYLPAEYGRVFHRADEKNNYASYIGMTRKNGRKIPVTARCSQADFHKFVAGLLKGLPEDDPDIIELQERLATGQLMPRAVTKANSIIPNQLHYIELKAILQKAGNYHPFLNQKDEEGLTMADKILQILTFRIPYYVGPLNNRDPRAENTWVVRRTREKILPWNFDRVVDKEASAAEFITRMTSCCTYLRDQRVLPRHSVLYSRFTVLNELNNLKLDGDPIPVALKQDIYTQLFLQRRRVTRKSLGRFSNSKGLAVDRDRVSGIDQDFHSSMASLLDMQKLLGAHYTEETAEEIIRLSTIFGEDRNMLHARLANAFGKVLPAETLRRASTLRFRGWGNLSAAFLTGIKSPDSQTGELLSIMDLLWHTNNNLMQLLSRDYGFAGQVAQHNRLLEEGEGFSYRMVEDLYVSPAVRRAIWQALLVTREIRKIMGHDPVRLFIEVARGEEKKKRKKSRKKRLGELYKACGEEAAHLAASLEARDERELRRDRLYLYYTQMGRCMYSGEPVDVDRLFDEQVYDIDHIFPQSKVKDDSLSNRVLVRRTENMKKGDAYPISQSVRQSQAPFWRMLLQKGLISKQKYERLARSTPLQPDELFGFVARQLVETRQSTKAAAEILGRLMPRTDIVYVKAGLVSDFRKRMDLLKCREVNDLHHAGDAYLNVVVGNVYHTKFTQDPRKFFAQPEPDRHYNLRTLFDYDVRRGSVTAWRAGEGGSICRVKDMMRRYNALVTWMPFEQGGQLFDTQLVRKGAWQLPQSTARECFRDSAKYGGYNKVKGSYFMLVEHDEGKKDRARSLIDMPLHLAGAVRDEEALQAMLEGEKGLKNPVVILSKIRMNALFDIDGFRMRITGRTGNNVVYAPAMQLVVGYPWEKYIRDVLKFAQRSAEYRRENRQKDLQAEASDGIDRDRNLALYDIFLMKLRDTVYKVRLGAQADNLERARDRFMALDAGAQCDVLKEILNIFACNRSTADLKALGLGGQLGIVSTSRKLSRYGCAWLVHQSVTGLFERQADLLA

SEQ ID NO: 20763 - protein, 1325 aa, unidentified; identical to SEQ ID NO: 20190
  REGION 1..1325: note = Cas Enzyme sequence

SEQ ID NO: 20764 - protein, 1325 aa, unidentified; identical to SEQ ID NO: 20185
  REGION 1..1325: note = Cas Enzyme sequence

SEQ ID NO: 20765 - protein, 1325 aa, unidentified
  REGION 1..1325: note = Cas Enzyme sequence
MKGEYYLGLDMGSSSVGWAVTNEKYEILRAHGKTLWGVRLFDSAQTAEERRGFRTAKRRLDRRNWRIELLQKIFAEEVEKIDDGFFRRMKESRYWPEDKRDRQGKCPELPYALFADDDYTDKEYHKQFPTIYHLRKWLMETDETPDIRLIYLALHHMMKHRGHFLLNGNIEQVREFQTTFEQFLEAVRAEELGFSSEIGVERSKEIEAILKDRTLTKSAKKTKAVKAMRAETSCEKEWLGLITGGTAKLGNLFGEKQMDTLERPKLCFADAGYEEYAGEIEAELGEKYVLIEHAKAVYDWAVLADILQNYSSLSEAKVALYEKHKKDLKDLKKLVRENLSREEYQRLFAKKDEKANYYAYIKAPKQCSQEDFYGYLKKNILGKISDVTKASCMQKEMEMGTFLPKQTVKDNSVIPYQIHLYELNAILKNLEDKVPLLKENGEKIQKIFTFRIPYYVGPLNGIRKKGEKSNWAVRKEGKIYPWNFDEMVDLEASAEQFIRRMTNKCTYLPSEDVLPKYSLLYSKYEVLNELNNLRLDGEKISVEQKQKIYEEVFQKSRKVTQKKLKNYLVKEGITGKEVEITGIDGDFKSSLTAYHDFKEKLTNLSLNQAEKECIILNVTLFGDDKAILKQRLKKLFPELTEKQRDSISKLPYRGWGRLSKVFLEEMEAPAPETGEAWSIIRALWETNDNLMQLLSEKYLFASAIEEKNGNEQKKRDISYELVEELYVSPAVKRQIWQSLLIVKEICKVMGNPPKRVFIEMAREKTDQGRTSSRKKKLLELYKKCKAEEKDWIDEIEKRSDAEMRRDKLYLYYTQKGKCMYSGETIELEELWDNQKYDIDHIFPQSKVMDDSLDNRVLVKKKCNQMKEDKYPIDETVRKKMQPFWKSLVDAGLISEEKYKRLIRGNGFEPSELAGFISRQLVETRQSTKAAASILQQVIPDTQIVYVKAPTVSKFRKDFKFLKVREMNDYHHAKDAYLNIVVGNAYFVKFTSNPIHFIKENPGRSYNLKKMFEQERIERNGEIAWEGGNGTIVTVRKFMEKNNILVTRRSYEATGALFDQQIVKKGKGQVPIKSSDERLCDIQKYGGYNKEAGAYFVLAESEGKKGKKIRTIEYVPIRLKKEIQKSEENIIRYLEEERQLKNPRVLVPEIKIDTLFCVDGFYMWVSGRSGDQLLMQGANQLVLSQEETEILKKIVQYVERKKQNKELKIYDSDHLEEKKVMLLYETFLNKLTNTVYAKKLGAQAKTLTEKREKFKELCIEEKCIVLYEILHFFQCQSVTADLKLIGGSGRAGILYLNKNITDCSRIEMIHQSPNGIYEQAVDLNAL

SEQ ID NO: 20766 - protein, 1325 aa, unidentified
  REGION 1..1325: note = Cas Enzyme sequence
MKGEYYLGLDMGSSSVGWAVTNEKYEILRAHGKTLWGVRLFDSAQTAEERRGFRTAKRRLDRRNWRIELLQKIFAEEVEKIDDGFFRRMKESRYWPEDKRDRQGKCPELPYALFADDDYTDKEYHKQFPTIYHLRKWLMETDETPDIRLIYLALHHMMKHRGHFLLNGNIEQVREFQTTFEQFLEAVRAEELGFSSEIGVERSKEIEAILKDRTLTKSAKKTKAVKAMRAETSCEKEWLGLITGGTAKLGNLFGEKQMDTLERPKLCFADAGYEEYAGEIEAELGEKYVLIEHAKAVYDWAVLADILQNYSSLSEAKVALYEKHKKDLKDLKKLVRENLSREEYQRLFAKKDEKANYYAYIKAPKQCSQEDFYGYLKKNILGKISDVTKASCMQKEMEMGTFLPKQTVKDNSVIPYQIHLYELNAILKNLEDKVPLLKENGEKIQKIFTFRIPYYVGPLNGIRKKGEKSNWAVRKEGKIYPWNFDEMVDLEASAEQFIRRMTNKCTYLPSEDVLPKYSLLYSKYEVLNELNNLRLDGEKISVEQKQKIYEEVFQKSRKVTQKKLKNYLVKEGITGKEVEITGIDGDFKSSLTAYHDFKEKLTNLSLNQAEKECIILNVTLFGDDKAILKQRLKKLFPELTEKQRDSISKLPYRGWGRLSKVFLEEMEAPAPETGEAWSIIRALWETNDNLMQLLSEKYLFASAIEEKNGNEQKKRDISYELVEELYVSPAVKRQIWQSLLIVKEICKVMGNPPKRVFIEMAREKTDQGRTSSRKKKLLELYKKCKAEEKDWIDEIEKRSDAEMRRDKLYLYYTQKGKCMYSGETIELEELWDNQKYDIDHIFPQSKVMDDSLDNRVLVKKKCNQMKEDKYPIDETVRKKMQPFWKSLVDAGLISEEKYKRLIRGNGFEPSELAGFISRQLVETRQSTKAAASILQQVIPDTQIVYVKAPTVSKFRKDFKFLKVREMNDYHHAKDAYLNIVVGNAYFVKFTSNPIHFIKKNPGRSYNLKKMFEQERIERNGEIAWEGGNGTIVTVRKFMEKNNILVTRRSYEATGALFDQQIVKKGKGQVPIKSSDERLCDIQKYGGYNKEAGAYFVLAESEGKKGKKIRTIEYVPIRLKKEIQKSEENIIRYLEEERQLKNPRVLVPEIKIDTLFCVDGFYMWVSGRSGDQLLMQGANQLVLSQEETEILKKIVQYVERKKQNKELKIYDSDHLEEKKVVMLYETFLNKLTNTVYAKKLGAQAKTLTEKREKFKELCIEEKCIVLYEVLHFFQCQSAAADLKLIGGSGRAGILCLNKNITDCSRIEMIHQSPTGIYEQTVDLNAL

SEQ ID NO: 20767 - protein, 1325 aa, unidentified
  REGION 1..1325: note = Cas Enzyme sequence
MKGEYYLGLDMGSSSVGWAVTNEKYEILRAHGKTLWGVRLFDSAQTAEERRGFRTAKRRLDRRNWRIELLQKIFAEEVEKIDDGFFRRMKESRYWPEDKRDRQGKCPELPYALFADDAYTDKEYHKQFPTIYHLRKWLMETDETPDIRLIYLALHHMMKHRGHFLLNGNIEQVREFQTTFEQFLEAVRAEELGFSSEIGVERSKEIEAILKDRTLTKSAKKTKAVKAMRAETSCEKEWLGLITGGTAKLGNLFGEKQMDTLERPKLCFADAGYEEYAGEIEAELGEKYVLIEHAKAVYDWAVLADILQNYSSLSEAKVALYEKHKKDLKDLKKLVRENLSREEYQRLFAKKDEKANYYAYIKAPKQCSQEDFYGYLKKNILGKISDVTKASCMQKEMEMGTFLPKQTVKDNSVIPYQIHLYELNAILKNLEDKVPLLKENGEKIQKIFTFRIPYYVGPLNGIRKKGEKSNWAVRKEGKIYPWNFDEMVDLEASAEQFIRRMTNKCTYLPSEDVLPKYSLLYSKYEVLNELNNLRLDGEKISVEQKQKIYEEVFQKSRKVTQKKLKNYLVKEGITGKEVEITGIDGDFKSSLTAYHDFKEKLTNLSLNQAEKECIILNVTLFGDDKAILKQRLKKLFPELTEKQRDSISKLPYRGWGRLSKVFLEEMEAPAPETGEAWSIIRALWETNDNLMQLLSEKYLFASAIEEKNGNEQKKRDISYELVEELYVSPAVKRQIWQSLLIVKEICKVMGNPPKRVFIEMAREKTDQGRTSSRKKKLLELYKKCKAEEKDWIDEIEKRSDAEMRRDKLYLYYTQKGKCMYSGETIELEELWDNQKYDIDHIFPQSKVMDDSLDNRVLVKKKCNQMKEDKYPIDETVRKKMQPFWKSLVDAGLISEEKYKRLIRGNGFEPSELAGFISRQLVETRQSTKAAASILQQVIPDTQIVYVKAPTVSKFRKDFKFLKVREMNDYHHAKDAYLNIVVGNAYFVKFTSNPIHFIKENPGRSYNLKKMFEQERIERNGEIAWEGGNGTIVTVRKFMEKNNILVTRRSYEATGALFDQQIVKKGKGQVPIKSSDERLCDIQKYGGYNKEAGAYFVLAESEGKKGKKIRTIEYVPIRLKKEIQKSEENIIRYLEEERQLKNPRVLVPEIKIDTLFCVDGFYMWVSGRSGDQLLMQGANQLVLSQEETEILKKIVQYVERKKQNKELKIYDSDHLEEKKVVMLYETFLNKLTNTVYAKKLGAQAKTLTEKREKFKELCIEEKCIVLYEVLHFFQCQSAAADLKLIGGSGRAGILCLNKNITDCSRIEMIHQSPTGIYEQTVDLNAL

SEQ ID NO: 20768 - protein, 1068 aa, unidentified
  REGION 1..1068: note = Cas Enzyme sequence
MDTLERPKLCFADAGYEEYTGEIEAELGEKYVLIEHAKAVYDWAVLADILQNYSSLSEAKVALYEKHKKDLKDLKKLVRENLSREEYQRLFAKKDEKANYYAYIKAPKQCSQEDFYGYLKKNILGKISDVTKASCMQKEMEMGTFLPKQTVKDNSVIPYQIHLYELNAILKNLEDKVPLLKENGEKIQKIFTFRIPYYVGPLNGIRKKGEKSNWAVRKEGKIYPWNFDEMVDLEASAEQFIRRMTNKCTYLPSEDVLPKYSLLYSKYEVLNELNNLRLDGEKISVEQKQKIYEEVFQKSRKVTQKKLKNYLVKEGITGKEVEITGIDGDFKSSLTAYHDFKEKLTNLSLNQAEKECIILNVTLFGDDKAILKQRLKKLFPELTEKQRDSISKLPYRGWGRLSKVFLEETEAPAPETGEAWSIIRALWETNDNLMQLLSEKYLFASAIEEKNGNEQKKRDISYELVEELYVSPAVKRQIWQSLLIVKEICKVMGNPPKRVFIEMAREKTDQGRTSSRKKKLLELYKKCKAEEKDWIDEIEKRSDAEMRRDKLYLYYTQKGKCMYSGETIELEELWDNQKYDIDHIFPQSKVMDDSLDNRVLVKKKCNQMKEDKYPIDETVRKKMQPFWKSLVDAGLISEEKYKRLIRGNGFEPSELAGFISRQLVETRQSTKAAASILQQVIPDTQIVYVKAPTVSKFRKDFKFLKVREMNDYHHAKDAYLNIVVGNAYFVKFTSNPIHFIKENPGRSYNLKKMFEQERIERNGEIAWEGGNGTIVTVRKFMEKNNILVTRRSYEATGALFDQQIVKKGKGQVPIKSSDERLCDIQKYGGYNKEAGAYFVLAESEGKKGKKIRTIEYVPIRLKKEIQKSEENIIRYLEEERQLKNPRVLVPEIKIDTLFCVDGFYMWVSGRSGDQLLMQGANQLVLSQEETEILKKIVQYVERKKQNKELKIYDSDHLEEKKVVMLYETFLNKLTNTVYAKKLGAQAKTLTEKREKFKELCIEEKCIVLYEVLHFFQCQSAAADLKLIGGSGRAGILCLNKNITDCSRIEMIHQSPTGIYEQTVDLNAL

SEQ ID NO: 20769 - protein, 1325 aa, unidentified
  REGION 1..1325: note = Cas Enzyme sequence
MKGEYYLGLDMGSSSVGWAVTNEKYEILRAHGKTLWGVRLFDSAQTAEERRGFRTAKRRLDRRNWRIELLQKIFAEEVEKIDDGFFRRMKESRYWPEDKRDRQGKCPELPYALFADDDYTDKEYHKQFPTIYHLRKWLMETDETPDIRLIYLALHHMMKHRGHFLLNGNIEQVREFQTTFEQFLEAVRAEELGFSSEIGVERSKEIEAILKDRTLTKSAKKTKAVKAMRAETSCEKEWLGLITGGTAKLGNLFGEKQMDTLERPKLCFADAGYEEYAGEIEAELGEKYVLIEHAKAVYDWAVLADILQNYSSLSEAKVALYEKHKKDLKDLKKLVRENLSREEYQRLFAKKDEKANYYAYIKAPKQCSQEDFYGYLKKNILGKISDVTKVSCMQKEMEMGTFLPKQTVKDNSVIPYQIHLYELNAILKNLEDKVPLLKENGEKIQKIFTFRIPYYVGPLNGIRKKGEKSNWAVRKEGKIYPWNFDEMVDLEASAEQFIRRMTNKCTYLPSEDVLPKYSLLYSKYEVLNELNNLRLDGEKISVEQKQKIYEEVFQKSRKVTQKKLKNYLVKEGITGKEVEITGIDGDFKSSLTAYHDFKEKLTNLSLNQAEKECIILNVTLFGDDKAILKQRLKKLFPESTEKQRDSISKLPYRGWGRLSKVFLEETEAPAPETGEAWSIIRALWETNDNLMQLLSEKYLFASAIEEKNGNEQKKRDISYELVEELYVSPAVKRQIWQSLLIVKEICKVMGNPPKRVFIEMAREKTDQGRTSSRKKKLLELYKKCKAEEKDWIDEIEKRSDAEMRRDKLYLYYTQKGKCMYSGETIELEELWDNQKYDIDHIFPQSKVMDDSLDNRVLVKKKCNQMKEDKYPIDETVRKKMQPFWKSLVDAGLISEEKYKRLIRGNGFEPSELAGFISRQLVETRQSTKAAASILQQVIPDTQIVYVKAPTVSKFRKDFKFLKIREMNDYHHAKDAYLNIVVGNAYFVKFTSNPIHFIKENPGRSYNLKKMFEQEKIERNGEIAWEGGNGTIVTVRKFMEKNNILVTRRSYEATGALFDQQIVKKGKGQVPIKSSDERLCDIQKYGGYNKEAGAYFVLAESEGKKGKKIRTIEYVPIRLKKEIQKSEENIIRYLEEERQLKNPRVLVPEIKIDTLFCVDGFYMWVSGRSGDQLLMQGANQLVLSQEETEILKKIVQYVERKKQNKELKIYDSDHLEEKKVVMLYETFLNKLTNTVYAKKLGAQAKTLTEKREKFKELCIEEKCIVLYEILHFFQCQSVTADLKLIGGSGRAGILYLNKNITDCSRIEMIHQSPTGIYEQAVDLNAL

SEQ ID NO: 20770 - protein, 1325 aa, unidentified
  REGION 1..1325: note = Cas Enzyme sequence
MKGEYYLGLDMGSSSVGWAVTNEKYEILRAHGKTLWGVRLFDSAQTAEERRGFRTAKRRLDRRNWRIELLQKIFAEEVEKIDDGFFRRMKESRYWPEDKRDRQGKCPELPYALFADDDYTDKEYHKQFPTIYHLRKWLMETDETPDIRLIYLALHHMMKHRGHFLLNGNIEQVREFQTTFEQFLEAVRAEELGFSSEIGVERSKEIEAILKDRTLTKSAKKTKAVKAMRAETSCEKEWLGLITGGTAKLGNLFGEKQMDTLERPKLCFADAGYEEYAGEIEAELGEKYVLIEHAKAVYDWAVLADILQNYSSLSEAKVALYEKHKKDLKDLKKLVRENLSREEYQRLFAKKDEKANYYAYIKAPKQCSQEDFYGYLKKNILGKISDVTKASCMQKEMEMGTFLPKQTVKDNSVIPYQIHLYELNAILKNLEDKVPLLKENGEKIQKIFTFRIPYYVGPLNGIRKKGEKSNWAVRKEGKIYPWNFDEMVDLEASAEQFIRRMTNKCTYLPSEDVLPKYSLLYSKYEVLNELNNLRLDGEKISVEQKQKIYEEVFQKSRKVTQKKLKNYLVKEGITGKEVEITGIDGDFKSSLTAYHDFKEKLTNLSLNQAEKECIILNVTLFGDDKAILKQRLKKLFPELTEKQRDSISKLPYRGWGRLSKVFLEEMEAPAPETGEAWSIIRALWETNDNLMQLLSEKYLFASAIEEKNGNEQKKRDISYELVEELYVSPAVKRQIWQSLLIVKEICKVMGNPPKRVFIEMAREKTDQGRTSSRKKKLLELYKKCKAEEKDWIDEIEKRSDAEMRRDKLYLYYTQKGKCMYSGETIELEELWDNQKYDIDHIFPQSKVMDDSLDNRVLVKKKCNQMKEDKYPIDETVRKKMQPFWKSLVDAGLISEEKYKRLIRGNGFEPSELAGFISRQLVETRQSTKAAASILQQVIPDTQIVYVKAPTVSKFRKDFKFLKVREMNDYHHAKDAYLNIVVGNAYFVKFTSNPIHFIKENPGRSYNLKKMFEQERIERNGEIAWEGGNGTIVTVRKFMEKNNILVTRRSYEATGALFDQQIVKKGKGQVPIKSSDERLCDIQKYGGYNKEAGAYFVLAESEGKKGKKIRTIEYVPIRLKKEIQKSEENIIRYLEEERQLKNPRVLVPEIKIDTLFCVDGFYMWVSGRSGDQLLMQGANQLVLSQEETEILKKIVQYVERKKQNKELKIYDSDHLEEKKVMMLYETFLNKLTNTIYAKKLGAQAKTLTEKREKFKELCIEEKCIVLYEVLHFFQCQSAAADLKLIGGSGRAGILCLNKNITDCSRIEMIHQSPTGIYEQTVDLNAL

SEQ ID NO: 20771 - protein, 1070 aa, unidentified
  REGION 1..1070: note = Cas Enzyme sequence
KQMDTLERPKLCFADAGYEEYAGEIEAELGEKYVLIEHAKAVYDWAVLADILQNYSSLSEAKVALYEKHKKDLKDLKKLVRENLSREEYQRLFAKKDEKANYYAYIKAPKQCSQEDFYGYLKKNILGKISDVTKASCMQKEMEMGTFLPKQTVKDNSVIPYQIHLYELNAILKNLEDKVPLLKENGEKIQKIFTFRIPYYVGPLNGIRKKGEKSNWAVRKEGKIYPWNFDEMVDLEASAEQFIRRMTNKCTYLPSEDVLPKYSLLYSKYEVLNELNNLRLDGEKISVEQKQKIYEEVFQKSRKVTQKKLKNYLVKEGITGKEVEITGIDGDFKSSLTAYHDFKEKLTNLSLNQAEKECIILNVTLFGDDKAILKQRLKKLFPELTEKQRDSISKLPYRGWGRLSKVFLEEMEAPAPETGEAWSIIRALWETNDNLMQLLSEKYLFASAIEEKNGNEQKKRDISYELVEELYVSPAVKRQIWQSLLIVKEICKVMGNPPKRVFIEMAREKTDQGRTSSRKKKLLELYKKCKAEEKDWIDEIEKRSDAEMRRDKLYLYYTQKGKCMYSGETIELEELWDNQKYDIDHIFPQSKVMDDSLDNRVLVKKKCNQMKEDKYPIDETVRKKMQPFWKSLVDAGLISEEKYKRLIRGNGFEPSELAGFISRQLVETRQSTKAAASILQQVIPDTQIVYVKAPTVSKFRKDFKFLKVREMNDYHHAKDAYLNIVVGNAYFVKFTSNPIHFIKENPGRSYNLKKMFEQERIERNGEIAWEGGNGTIVTVRKFMEKNNILVTRRSYEATGALFDQQIVKKGKGQVPIKSSDERLCDIQKYGGYNKEAGAYFVLAESEGKKGKKIRTIEYVPIRLKKEIQKSEENIIRYLEEERQLKNPRVLVPEIKIDTLFCVDGFYMWVSGRSGDQLLMQGANQLVLSQEETEILKKIVQYVERKKQNKELKIYDSDHLEEKKVVMLYETFLNKLTNTVYAKKLGAQAKTLTEKREKFKELCIEEKCIVLYEVLHFFQCQSAAADLKLIGGSGRAGILCLNKNITDCSRIEMIHQSPTGIYEQTVDLNAL

SEQ ID NO: 20772 - protein, 1325 aa, unidentified
  REGION 1..1325: note = Cas Enzyme sequence
MKGEYYLGLDMGSSSVGWAVTNEKYEILRAHGKTLWGVRLFDSAQTAEERRGFRTAKRRLDRRNWRIELLQKIFAEEVEKIDDGFFRRMKESRYWPEDKRDRQGKCPELPYALFADDDYTDKEYHKQFPTIYHLRKWLMETDETPDIRLIYLALHHMMKHRGHFLLNGNIEQVREFQTTFEQFLEAVRAEELGFSSKMGVERSKEIETILKDRTLTKSAKKTKAVKAMRAETSCEKEWLGLITGGTAKLGNLFGEKQMDTLERPKLCFADAGYEEYAGEIEAELGEKYALIEHAKAVYDWAVLADILQNYSSLSEAKVALYEKHKKDLKDLKKLVRENLSREEYQRLFAKKDEKTNYYAYIKAPKQCSQEDFYGYLKKNILGKISDVTKASCMQKEMEMGTFLPKQTIKDNSVIPYQIHLYELNAILKNLEDKVPLLKENGEKIQKIFTFRIPYYVGPLNGIRKKGEKSNWAVRKEGKIYPWNFDEMVDLEASAEQFIRRMTNKCTYLPSEDVLPKYSLLYSKYEVLNELNNLRLDGEKISVEQKQKIYEEVFQKSRKVTQKKLKNYLVKEGITGKEVEITGIDGDFKSSLTAYHDFKEKLTNLSLNQAEKECIILNVTLFGDDKAILKQRLKKLFPELTEKQRDSISKLPYRGWGRLSKVFLEEMEAPAPETGEAWSIIRALWETNDNLMQLLSEKYLFASAIEEKNGNEQKKRDISYELVEELYVSPAVKRQIWQSLLIVKEICKVMGNPPKRVFIEMAREKTDQGRTSSRKKKLLELYKKCKAEEKDWIDEIEKRSDAEMRRDKLYLYYTQKGKCMYSGETIELEELWDNQKYDIDHIFPQSKVMDDSLDNRVLVKKKCNQMKEDKYPIDETVRKKMQPFWKSLVDAGLISEEKYKRLIRGNGFEPSELAGFISRQLVETRQSTKAAASILQQVIPDTQIVYVKAPTVSKFRKDFKFLKVREMNDYHHAKDAYLNIVVGNAYFVKFTSNPIHFIKENPGRSYNLKKMFEQERIERNGEIAWEGGNGTIVTVRKFMEKNNILVTRRSYEATGALFDQQIVKKGKGQVPIKSSDERLCDIQKYGGYNKEAGAYFVLAESEGKKGKKIRTIEYVPIRLKKEIQKSEENIIRYLEEERQLKNPRVLVPEIKIDTLFCVDGFYMWVSGRSGDQLLMQGANQLVLSQEETEILKKIVQYVERKKQNKELKIYDSDHLEEKKVVMLYETFLNKLTNTVYAKKLGAQAKTLTEKREKFKELCIEEKCIVLYEVLHFFQCQSAAADLKLIGGSGRAGILCLNKNITDCSRIEMIHQSPTGIYEQTVDLNAL

SEQ ID NO: 20773 - protein, 1325 aa, unidentified
  REGION 1..1325: note = Cas Enzyme sequence
MKGEYYLGLDMGSSSVGWAVTNEKYEILRAHGKTLWGVRLFDSAQTAEERRGFRTAKRRLDRRNWRIELLQKIFAEEVEKIDDGFFRRMKESRYWPEDKRDRQGKCPELPYALFADDAYTDKEYHKQFPTIYHLRKWLMETDETPDIRLIYLALHHMMKHRGHFLLNGNIEQVREFQTTFEQFLEAVRAEELGFSSEIGVERSKEIEAILKDRTLTKSAKKTKAVKAMRAETSCEKEWLGLITGGTAKLGNLFGEKQMDTLERPKLCFADAGYEEYTGEIEAELGEKYVLIEHAKAVYDWAVLADILQNYSSLSEAKVALYEKHKKDLKDLKKLVRENLSREEYQRLFAKKDEKANYYAYIKAPKQCSQEDFYGYLKKNILGKISDVTKASCMQKEMEMGTFLPKQTVKDNSVIPYQIHLYELNAILKNLEDKVPLLKENGEKIQKIFTFRIPYYVGPLNGIRKKGEKSNWAVRKEGKIYPWNFDEMVDLEASAEQFIRRMTNKCTYLPSEDVLPKYSLLYSKYEVLNELNNLRLDGEKISVEQKQKIYEEVFQKSRKVTQKKLKNYLVKEGITGKEVEITGIDGDFKSSLTAYHDFKEKLTNLSLNQAEKECIILNVTLFGDDKAILKQRLKKLFPELTEKQRDSISKLPYRGWGRLSKVFLEETEAPAPETGEAWSIIRALWETNDNLMQLLSEKYLFASAIEEKNGNEQKKRDISYELVEELYVSPAVKRQIWQSLLIVKEICKVMGNPPKRVFIEMAREKTDQGRTSSRKKKLLELYKKCKAEEKDWIDEIEKRSDAEMRRDKLYLYYTQKGKCMYSGETIELEELWDNQKYDIDHIFPQSKVMDDSLDNRVLVKKKCNQMKEDKYPIDETIRKKMQPFWKSLVDAGLISEEKYKRLIRGNGFEPSELAGFISRQLVETRQSTKAAASILQQVIPDTQIVYVKAPTVSKFRKDFKFLKVREMNDYHHAKDAYLNIVVGNAYFVKFTSNPIHFIKENPGRSYNLKKMFEQEKIERNGEIAWESGNGTIATVRNFMEKNNILVTRRSYEATGALFDQQIVKKGKGQVPIKSSDERLCDIQKYGGYNKEAGAYFVLAESEGKKGKKIRTIEYVPIRLKKEIQKSEENIIRYLEEERQLKNPRVLVPEIKIDTLFCVDGFYMWVSGRSGDQLLMQGANQLVLSQEETEILKKIVQYVERKKQNKELKIYDSDHLEEKKVVMLYETFLNKLTNTVYAKKLGAQAKTLTEKREKFKELCIEEKCIVLYEILHFFQCQSVTADLKLIGGSGRAGILYLNKNITDCSRIEMIHQSPTGIYEQAVDLNAL

SEQ ID NO: 20774 - protein, 1325 aa, unidentified
  REGION 1..1325: note = Cas Enzyme sequence
MKGEYYLGLDMGSSSVGWAVTNEKYEILRAHGKTLWGVRLFDSAQTAEERRGFRTAKRRLDRRNWRIELLQKIFAEEVEKIDDGFFRRMKESRYWPEDKRDRRGKCPELPYALFADDDYTDKEYHKQFPTIYHLRKWLMETDETPDIRLIYLALHHMMKHRGHFLLNGNIEQVREFQTTFEQFLEAVRAEELGFSSEIGVERSKEIEAILKDRTLTKSAKKTKAVKAMRAETSCEKEWLGLITGGTAKLGNLFGEKQMDTLERPKLCFADAGYEEYAGEIEAELGEKYVLIEHAKAVYDWAVLADILQNYSSLSEAKVALYEKHKKDLKDLKKLVRENLSREEYQRLFAKKGEKANYYAYIKAPKQCSQEDFYGYLKKNILGKISDVTKASCMQKEMEMGTFLPKQTVKDNSVIPYQIHLYELNAILKNLEDKVPLLKENGEKIQKIFTFRIPYYVGPLNGIRKKGEKSNWAVRKEGKIYPWNFDEMVDLEASAEQFIRRMTNKCTYLPSEDVLPKYSLLYSKYEVLNELNNLRLDGEKISVEQKQKIYEEVFQKSRKVTQKKLKNYLVKEGITGKEVEITGIDGDFKSSLTAYHDFKEKLTNLSLNQAEKECIILNVTLFGDDKAILKQRLKKLFPELTEKQRDSISKLPYRGWGRLSKVFLEETEAPAPETGEAWSIIRALWETNDNLMQLLSEKYLFASAIEEKNGNEQKKRDISYELVEELYVSPAVKRQIWQSLLIVKEICKVMGNPPKRVFIEMAREKTDQGRTTSRKKKLLELYKKCKAEEKDWIDEIEKRSDAEMRRDKLYLYYTQKGKCMYSGETIELEELWDNQKYDIDHIFPQSKVMDDSLDNRVLVKKKCNQMKEDKYPIDETVRKKMQPFWKSLVDAGLISEEKYKRLIRGNGFEPSELAGFISRQLVETRQSTKAVASILQQVIPDTQIVYVKAPTVSKFRKDFKFLKVREMNDYHHAKDAYLNIVVGNAYFVKFTSNPILFIKENPGRSYNLKKMFEQERIERNGEIAWEGGNGTIVTVRKFMEKNNILVTRRSYEATGALFDQQIVKKGKGQVPIKSSDERLCDIQKYGGYNKEAGAYFVLAESEGKKGKKIRTIEYVPIRLKKEIQKSEENIIRYLEEERQLKNPRVLVPEIKIDTLLCVDGFYMWVSGRSGDQLLMQGANQLVLSQEETEILKKIVQYVERKKQNKELKIYDSDHLEEKKVMMLYETFLNKLINTVYAKKLGAQAKTLTEKREKFKELCMEEKCIVLYEILHFFQCQSVTADLKLIGGSGRAGVLCLNKNITDCNRIEMIHQSPTGIYEQAVDLNAL

SEQ ID NO: 20775 - protein, 1324 aa, unidentified
  REGION 1..1324: note = Cas Enzyme sequence
MKGEYYLGLDMGSSSVGWAVTNEKYEILRAHGKTLWGVRLFDSAQTAEERRGFRTAKRRLDRRNWRIELLQKIFAEEVEKIDDGFFRRMKESRYWPEDKRDRQGKCPELPYALFADDDYTDKEYHKQFPTIYHLRKWLMETDETPDIRLIYLALHHMMKHRGHFLLNGNIEQVREFQTTFEQFLEAVRAEELGFSSEIGVERSKEIEAILKDRTLTKSAKKTKAVKAMRAETSCEKEWLGLITGGTAKLGNLFGEKQMDTLERPKLCFADAGYEEYAGEIEAELGEKYVLIEHAKAVYDWAVLADILQNYSSLSEAKVALYEKHKKDLKDLKKLVRENLSREEYQRLFAKKDEKANYYAYIKAPKQCSQEDFYGYLKKNILGKISDVTKASCMQKEMEMGTFLPKQTVKDNSVIPYQIHLYELNAILKNLEDKVPLLKENGEKIQKIFTFRIPYYVGPLNGIRKKGEKSNWAVRKEGKIYPWNFDEMVDLEASAEQFIRRMTNKCTYLPSEDVLPKYSLLYSKYEVLNELNNLRLDGEKISVEQKQKIYEEVFQKSRKVTQKKLKNYLVKEGITGKEVEITGIDGDFKSSLTAYHDFKEKLTNLSLNQAEKECIILNVTLFGDDKAILKQRLKKLFPELTEKQRDSISKLPYRGWGRLSKVFLEEMEAPAPETGEAWSIIRALWETNDNLMQLLSEKYLFASAIEEKNGNEQKKRDISYELVEELYVSPAVKRQIWQSLLIVKEICKVMGNPPKRVFIEMAREKTDQGRTSSRKKKLLELYKKCKAEEKDWIDEIEKRSDAEMRRDKLYLYYTQKGKCMYSGETIELEELWDNQKYDIDHIFPQSKVMDDSLDNRVLVKKKCNQMKEDKYPIDETVRKKMQPFWKSLVDAGLISEEKYKRLIRGNGFEPSELAGFISRQLVETRQSTKAAASILQQVIPDTQIVYVKAPTVSKFRKDFKFLKVREMNDYHHAKDAYLNIVVGNAYFVKFTSNPIHFIKENPGRSYNLKKMFEQERIERNGEIAWEGGNGTIVTVRKFMEKNNILVTRRSYEATGALFDQQIVKKGKGQVPIKSSDERLCDIQKYGGYNKEAGAYFVLAESEGKKGKKIRTIEYVPIRLKKEIQKSEENIIRYLEEERQLKNPRVLVPEIKIDTLFCVDGFYMWVSGRSGDQLLMQGANQLVLSQEEMEILKKIVQYVERKKQNKELKIYDSDHLEEKKVVMLYETFLNKLTNTVYAKKLGAQAKTLTEKREKFKELCIEEKCIVLYEVLHFFQCQSAAALKLIGGSGRAGILCLNKNITDCSRIEMIHQSPTGIYEQTVDLNAL

SEQ ID NO: 20776 - protein, 1325 aa, unidentified
  REGION 1..1325: note = Cas Enzyme sequence
MKGEYYLGLDMGSSSVGWAVTNEKYEILRAHGKTLWGVRLFDSAQTAEERRGFRTAKRRLDRRNWRIELLQKIFAEEVEKIDDGFFRRMKESRYWPEDKRDRQGKCPELPYALFADDDYTDKEYHKQFPTIYHLRKWLMETDETPDIRLIYLALHHMMKHRGHFLLNGNIEQVREFQTTFEQFLEAVRAEELGFSSEIGVERSKEIEAILKDRTLTKSAKKTKAVKAMRAETSCEKEWLGLITGGTAKLGNLFGEKQMDTLERPKLCFADAGYEEYAGEIEAELGEKYVLIEHAKAVYDWAVLADILQNYSSLSEAKVALYEKHKKDLKNLKKLVRENLSREEYQRLFAKKDEKANYYAYIKAPKQCSQEDFYGYLKKNILGKISDVTKASCMQKEMEMGTFLPKQTVKDNSVIPYQIHLYELNAILKNLEDKVPLLKENGEKIQKIFTFRIPYYVGPLNGIRKKGEKSNWAVRKEGKIYPWNFDEMVDLEASAEQFIRRMTNKCTYLPSEDVLPKYSLLYSKYEVLNELNNLRLDGEKISVEQKQKIYEEVFQKSRKVTQKKLKNYLVKEGITGKEVEITGIDGDFKSSLTAYHDFKEKLTNLSLNQAEKECIILNVTLFGDDKAILKQRLKKLFPELTEKQRDSISKLPYRGWGRLSKVFLEETEAPAPETGEAWSIIRALWETNDNLMQLLSEKYLFASAIEEKNGNEQKKRDISYELVEELYVSPAVKRQIWQSLLIVKEICKVMGNPPKRVFIEMAREKNDQGRTSSRKKKLLELYKKCKVEEKDWIDEIEKRSDAEMRRDKLYLYYTQKGKCMYSGETIELEELWDNQKYDIDHIFPQSKVMDDSLDNRVLVKKKCNQMKEDKYPIDETVRKKMQPFWKSLVDAGLISEEKYKRLIRGNGFEPSELAGFISRQLVETRQSTKAAASILQQVIPDTQIVYVKAPTVSKFRKDFKFLKVREMNDYHHAKDAYLNIVVGNAYFVKFTSNPIHFIKENPGRSYNLKKMFEQERIERNGEIAWESGNRTIATVRKFMEKNNILVTRRSYEATGALFDQQIVKKGKGQVPIKSSDERLCDIQKYGGYNKEAGAYFVLAESEGKKGKKIRTIEYVPIRLKKEIQKSEENIIRYLEEERQLKNPRVLVPEIKIDTLFCVDGFYMWVSGRSGDQLLMQGANQLVLSQEETEILKKIVQYVERKKQNKELKIYDSDHLEEKKVVMLYETFLNKLTNTVYAKKLGAQAKTLTEKREKFKELCMEEKCIVLYEILHFFQCQSVTADLKLIGGSGRAGVLCLNKNITDCNRIEMIHQSPTGIYEQAVDLNAL

SEQ ID NO: 20777 - protein, 1272 aa, unidentified
  REGION 1..1272: note = Cas Enzyme sequence
RTAKRRLDRRNWRIELLQKIFAEEVEKIDDGFFRRMKESRYWPEDKRDRQGKCPELPYALFADDDYTDKEYHKQFPTIYHLRKWLMETDETPDIRLIYLALHHMMKHRGHFLLNGNIEQVREFQTTFEQFLEAVRAEELGFSSEIGVERSKEIEAILKDRTLTKSAKKTKAVKAMRAETSCEKEWLGLITGGTAKLGNLFGEKQMDTLERPKLCFADAGYEEYAGEIEAELGEKYVLIEHAKAVYDWAILADILQNYSSLSEAKVALYEKHKKDLKDLKKLVRENLSREEYQRLFAKKDEKANYYAYIKAPKQCSQEDFYGYLKKNILGKISDVTKASCMQKEMEMGTFLPKQTVKDNSVIPYQIHLYELNAILKNLEDKVPLLKENGEKIQKIFTFRIPYYVGPLNGIRKKGEKSNWAVRKEGKIYPWNFDEMVDLEASAEQFIRRMTNKCTYLPSEDVLPKYSLLYSKYEVLNELNNLRLDGEKISVEQKQKIYEEVFQKSRKVTQKKLKNYLVKEGITGKEVEITGIDGDFKSSLTAYHDFKEKLTNLSLNQAEKECIILNVTLFGDDKAILKQRLKKLFPELTEKQRDSISKLPYRGWGRLSKVFLEEMEAPAPETGEAWSIIRALWETNDNLMQLLSEKYLFASAIEEKNGNEQKKRDISYELVEELYVSPAVKRQIWQSLLIVKEICKVMGNPPKRVFIEMAREKTDQGRTSSRKKKLLELYKKCKAEEKDWIDEIEKRSDAEMRRDKLYLYYTQKGKCMYSGETIELEELWDNQKYDIDHIFPQSKVMDDSLDNRVLVKKKCNQMKEDKYPIDETVRKKMQPFWKSLVDAGLISEEKYKRLIRGNGFEPSELAGFISRQLVETRQSTKAAASILQQVIPDTQIVYVKAPTVSKFRKDFKFLKVREMNDYHHAKDAYLNIVVGNAYFVKFTSNPIHFIKENPGRSYNLKKMFEQERIERNGEIAWEGGNGTIVTVRKFMEKNNILVTRRSYEATGALFDQQIVKKGKGQVPIKSSDERLCDIQKYGGYNKEAGAYFVLAESEGKKGKKIRTIEYVPIRLKKEIQKSEENIIRYLEEERQLKNPRVLVPEIKIDTLFCVDGFYMWVSGRSGDQLLMQGANQLVLSQEETEILKKIVQYVERKKQNKELKIYDSDHLEEKKVVMLYETFLNKLTNTVYAKKLGAQAKTLTEKREKFKELCIEEKCIVLYEVLHFFQCQSAAADLKLIGGSGRAGILCLNKNITDCSRIEMIHQSPTGIYEQTVDLNAL

SEQ ID NO: 20778 - protein, 1325 aa, unidentified
  REGION 1..1325: note = Cas Enzyme sequence
MKGEYYLGLDMGSGSVGWAVTNEKYEILRAHGKTLWGVRLFDSAQTAEERRGFRTAKRRLDRRNWRIELLQKIFAEEVEKIDDGFFRRMKESRYWPEDKRDRQGKCPELPYALFADDDYTDKEYHKQFPTIYHLRKWLMETDETLDIRLIYLALHHMMKHRGHFLLNGNIEQVREFQTTFEQFLEAVRAEELGFSSEIGVERSKEIEAILKDRTLTKSAKKTKAVKAMRAETSCEKEWLGLITGGTAKLGNLFGEKQMDTLERPKLCFADAGYEEYAGEIEAELGEKYVLIEHAKAVYDWAVLADILQNYSSLSEAKVALYEKHKKDLKDLKKLVRENLSREEYQRLFAKKDEKANYYAYIKAPKQCSQEDFYGYLKKNILGKISDVTKASCMQKEMEMGTFLPKQTVKDNSVIPYQIHLYELNAILKNLEDKVPLLKENGEKIQKIFTFRIPYYVGPLNGIRKKGEKSNWAVRKEGKIYPWNFDEMVDLEASAEQFIRRMTNKCTYLPSEDVLPKYSLLYSKYEVLNELNNLRLDGEKISVEQKQKIYEEVFQKSRKVTQKKLKNYLVKEGITGKEVEITGIDGDFKSSLTAYHDFKEKLTNLSLNQAEKECIILNVTLFGDDKAILKQRLKKLFPELTEKQRDSISKLPYRGWGRLSKVFLEETEAPAPETGEAWSIIRALWETNDNLMQLLSEKYLFASAIEEKNGNEQKKRDISYELVEELYVSPAVKRQIWQSLLIVKEICKVMGNPPKRVFIEMAREKTDQGRTSSRKKKLLELYKKCKAEEKDWIDEIEKRSDAEMRRDKLYLYYTQKGKCMYSGETIELEELWDNQKYDIDHIFPQSKVMDDSLDNRVLVKKKCNQMKEDKYPIDETVRKKMQPFWKSLVDAGLISEEKYKRLIRGNGFEPSELAGFISRQLVETRQSTKAAASILQQVIPDTQIVYVKAPTVSKFRKDFKFLKVREMNDYHHAKDAYLNIVVGNAYFVKFTSNPIHFIKENPGRSYNLKKMFEQERIERNGEIAWEGGNGTIVTVRKFMEKNNILVTRRSYEATGALFDQQIVKKGKGQVPIKSSDERLCDIQKYGGYNKEAGAYFVLAESEGKKGKKIRTIEYVPIRLKKEIQKSEENIIRYLEEERQLKNPRVLVPEIKIDTLFCVDGFYMWVSGRSGDQLLMQGANQLVLSQEEMEILKKIVQYVERKKQNKELKIYDSDHLEEKKVVMLYETFLNKLTNTVYAKKLGAQAKTLTEKREKFKELCIEEKCIVLYEILHFFQCQSVTADLKLIGGSGRAGILYLNKNITDCSRIEMIHQSPTGIYEQAVDLNAL

SEQ ID NO: 20779 - protein, 1325 aa, unidentified
  REGION 1..1325: note = Cas Enzyme sequence
MKGEYYLGLDMGSGSVGWAVTNEKYEILRAHGKTLWGVRLFDSAQTAEERRGFRTAKRRLDRRNWRIELLQKIFAEEVEKIDDGFFRRMKESRYWPEDKRDRQGKCPELPYALFADDDYTDKEYHKQFPTIYHLRKWLMETDETPDIRLIYLALHHMMKHRGHFLLNGNIEQVREFQTTFEQFLEAVRAEELGFSSEIGVERSKEIEAILKDRTLTKSAKKTKAVKAMRAETSCEKEWLGLITGGTAKLGNLFGEKQMDTLERPKLCFADAGYEEYAGEIEAELGEKYVLIEHAKAVYDWAVLADILQNYSSLSEAKVALYEKHKKDLKDLKKLVRENLSREEYQRLFAKKDEKANYYAYIKAPKQCSQEDFYGYLKKNILGKISDVTKASCMQKEMEMGTFLPKQTVKDNSVIPYQIHLYELNAILKNLEDKVPLLKENGEKIQKIFTFRIPYYVGPLNGIRKKGEKSNWAVRKEGKIYPWNFDEMVDLEASAEQFIRRMTNKCTYLPSEDVLPKYSLLYSKYEVLNELNNLRLDGEKISVEQKQKIYEEVFQKSRKVTQKKLKNYLVKEGITGKEVEITGIDGDFKSSLTAYHDFKEKLTNLSLNQAEKECIILNVTLFGDDKAILKQRLKKLFPELTEKQRDSISKLPYRGWGRLSKVFLEETEAPAPETGEAWSIIRALWETNDNLMQLLSEKYLFASAIEEKNGNEQKKRDISYELVEELYVSPAVKRQIWQSLLIVKEICKVMGNPPKRVFIEMAREKTDQGRTSSRKKKLLELYKKCKAEEKDWIDEIEKRSDAEMRRDKLYLYYTQKGKCMYSGETIELEELWDNQKYDIDHIFPQSKVMDDSLDNRVLVKKKCNQMKEDKYPIDETVRKKMQPFWKSLVDAGLISEEKYKRLIRGNGFEPSELAGFISRQLVETRQSTKAAASILQQVIPDTQIVYVKAPTVSKFRKDFKFLKVREMNDYHHAKDAYLNIVVGNAYFVKFTSNPIHFIKENPGRSYNLKKMFEQERIERNGEIAWEGGNGTIVTVRKFMEKNNILVTRRSYEATGALFDQQIVKKGKGQVPIKSSDERLCDIQKYGGYNKEAGAYFVLAESEGKKGKKIRTIEYVPIRLKKEIQKSEENIIRYLEEERQLKNPRVLVPEIKIDTLFCVDGFYMWVSGRSGDQLLMQGANQLVLSQEEMEILKKIVQYVERKKQNKELKIYDSDHLEEKKVVMLYETFLNKLTNTVYAKKLGAQAKTLTEKREKFKELCIEEKCIVLYEILHFFQCQSVTADLKLIGGSGRAGILYLNKNITDCSRIEMIHQSPTGIYEQAVDLNAL

SEQ ID NO: 20780 - protein, 1325 aa, unidentified
  REGION 1..1325: note = Cas Enzyme sequence
MKGEYYLGLDMGSGSVGWAVTNEKYEILRAHGKTLWGVRLFDSAQTAEERRGFRTAKRRLDRRNWRIELLQKIFAEEVEKIDDGFFRRMKESRYWPEDKRDRQGKCPELPYALFADDDYTDKEYHKQFPTIYHLRKWLMETDETPDIRLIYLALHHMMKHRGHFLLNGNIEQVREFQTTFEQFLEAVRAEELGFSSEIGVERSKEIEAILKDRTLTKSAKKTKAVKAMRAETSCEKEWLGLITGGTAKLGNLFGEKQMDTLERPKLCFADAGYEEYAGEIEAELGEKYVLIEHAKAVYDWAVLADILQNYSSLSEAKVALYEKHKKDLKDLKKLVRENLSREEYQRLFAKKDEKANYYAYIKAPKQCSQEDFYGYLKKNIMGKISDVTKASCMQKEMEMGTFLPKQTVKDNSVIPYQIHLYELNAILKNLEDKVPLLKENGEKIQKIFTFRIPYYVGPLNGIRKKGEKSNWAVRKEGKIYPWNFDEMVDLEASAEQFIRRMTNKCTYLPSEDVLPKYSLLYSKYEVLNELNNLRLDGEKISVEQKQKIYEEVFQKSRKVTQKKLKNYLVKEGITGKEVEITGIDGDFKSSLTAYHDFKEKLTNLSLNQAEKECIILNVTLFGDDKAILKQRLKKLFPELTEKQRDSISKLPYRGWGRLSKVFLEETEAPAPETGEAWSIIRALWETNDNLMQLLSEKYLFASAIEEKNGNEQKKRDISYELVEELYVSPAVKRQIWQSLLIVKEICKVMGNPPKRVFIEMAREKTDQGRTSSRKKKLLELYKKCKAEEKDWIDEIEKRSDAEMRRDKLYLYYTQKGKCMYSGETIELEELWDNQKYDIDHIFPQSKVMDDSLDNRVLVKKKCNQMKEDKYPIDETVRKKMQPFWKSLVDAGLISEEKYKRLIRGNGFEPSELAGFISRQLVETRQSTKAAASILQQVIPDTQIVYVKAPTVSKFRKDFKFLKVREMNDYHHAKDAYLNIVVGNAYFVKFTSNPIHFIKENPGRSYNLKKMFEQERIERNGEIAWESGNGTIATVRKFMEKNNILVTRRSYEATGALFDQQIVKKGKGQVPIKSSDERLCDIQKYGGYNKEAGAYFVLAESEGKKGKKIRTIEYVPIRLKKEIQKSEENIIRYLEEERQLKNPRVLVPEIKIDTLFCVDGFYMWVSGRSGDQLLMQGANQLVLSQEETEILKKIVQYVERKKQNKELKIYDSDHLEEKKVMMLYETFLNKLTNTIYAKKLGAQAKTLTEKREKFKELCIEEKCIVLYEVLHFFQCQSAAADLKLIGGSGRAGILCLNKNITDCSRIEMIHQSPTGIYEQTVDLNAL

SEQ ID NO: 20781 - protein, 1016 aa, unidentified
  REGION 1..1016: note = Cas Enzyme sequence
YSSLSEAKVALYEKHKKDLKDLKKLVRENLSREGYQRLFAKKDEKTNYYAYIKAPKQCSQEDFYGYLKKNILGKISDVTKASCMQKEMEMGTFLPKQTVKDNSVIPYQIHLYELNAILKNLEDKVPLLKENGEKIQKIFTFRIPYYVGPLNGIRKKGEKSNWAVRKEGKIYPWNFDEMVDLEASAEQFIRRMTNKCTYLPSEDVLPKYSLLYSKYEVLNELNNLRLDGEKISVEQKQKIYEEVFQKSRKVTQKKLKNYLVKEGITGKEVEITGIDGDFKSSLTAYHDFKEKLTNLSLDQAEKECIILNVTLFGDDKAILKQRLKKLFPELTEKQRDSISKLPYRGWGRLSKVFLEETEAPAPETGEAWSIIRALWETNDNLMQLLSEKYLFASAIEEKNGNEQKKRDISYELVEELYVSPAVKRQIWQSLLIVKEICKVMGNPPKRVFIEMAREKTDQGRTTSRKKRLLELYKKCKAEEKDWIDEIEKRSDAEMRRDKLYLYYTQKGKCMYSGETIELEELWDNQKYDIDHIFPQSKVMDDSLDNRVLVKKKCNQMKEDKYPIDETVRKKMQPFWKSLVDAGLISEEKYKRLIRGNGFEPSELAGFISRQLVETRQSTKAAASILQQVIPDTQIVYVKAPTVSKLRKDFKFLKVREMNDYHHAKDAYLNIVVGNAYFVKFTSNPIHFIKENPGRSYNLKKMFEQEKIERNGEIAWESGNGTIATVRNFMEKNNILVTRRSYEATGALFDQQIVKKGKGQVPIKSSDERLCDIQKYGGYNKEAGAYFVLAESEGKKGKKIRTIEYVPIRLKKEIQKSEENIIRYLEEERQLKNPRVLVPEIKIDTLFCVDGFYMWVSGRSGDQLLMQGANQLVLSQEETEILKKIVQYVERKKQNKELKIYDSDHLEEKKVVMLYETFLNKLTNTVYAKKLGAQAKTLTEKREKFKELCIEEKCIVLYEVLHFFQCQSAAADLKLIGGSGRAGILCLNKNITDCSRIEMIHQSPTGIYEQTVDLNAL

SEQ ID NO: 20782 - protein, 1311 aa, unidentified
  REGION 1..1311: note = Cas Enzyme sequence
MKGEYYLGLDMGSSSVGWAVTNEKYEILRAHGKTLWGVRLFDSAQTAEERRGFRTAKRRLDRRNWRIELLQKIFAEEVEKIDDGFFRRMKESRYWPEDKRDRQGKCPELPYALFADDDYTDKEYHKQFPTIYHLRKWLMETDETPDIRLIYLALHHMMKHRGHFLLNGNIEQVREFQTTFEQFLEAVRAEELGFSSEIGVERSKEIEAILKDRTLTKSAKKTKAVKAMRAETSCEKEWLGLITGGTAKLGNLFGEKQMDTLERPKLCFADAGYEEYAGEIEAELGEKYVLIEHAKAVYDWAVLADILQNYSSLSEAKVALYEKHKKDLKDLKKLVRENLSREEYQRLFAKKDEKANYYAYIKAPKQCSQEDFYGYLKKNILGKISDVTKASCMQKEMEMGTFLPKQTVKDNSVIPYQIHLYELNAILKNLEDKVPLLKENGEKIQKIFTFRIPYYVGPLNGIRKEGKIYPWNFDEMVDLEASAEQFIRRMTNKCTYLPSEDVLPKYSLLYSKYEVLNELNNLRLDGEKISVEQKQKIYEEVFQKSRKVTQKKLKNYLVKEGITGKEVEITGIDGDFKSSLTAYHDFKEKLTNLSLNQAEKECIILNVTLFGDDKAILKQRLKKLFPELTEKQRDSISKLPYRGWGRLSKVFLEEMEAPAPETGEAWSIIRALWETNDNLMQLLSEKYLFASAIEEKNGNEQKKRDISYELVEELYVSPAVKRQIWQSLLIVKEICKVMGNPPKRVFIEMAREKTDQGRTSSRKKKLLELYKKCKAEEKDWIDEIEKRSDAEMRRDKLYLYYTQKGKCMYSGETIELEELWDNQKYDIDHIFPQSKVMDDSLDNRVLVKKKCNQMKEDKYPIDETVRKKMQPFWKSLVDAGLISEEKYKRLIRGNGFEPSELAGFISRQLVETRQSTKAAASILQQVIPDTQIVYVKAPTVSKFRKDFKFLKVREMNDYHHAKDAYLNIVVGNAYFVKFTSNPIHFIKENPGRSYNLKKMFEQERIEEIAWEGGNGTIVTVRKFMEKNNILVTRRSYEATGALFDQQIVKKGKGQVPIKSSDERLCDIQKYGGYNKEAGAYFVLAESEGKKGKKIRTIEYVPIRLKKEIQKSEENIIRYLEEERQLKNPRVLVPEIKIDTLFCVDGFYMWVSGRSGDQLLMQGANQLVLSQEETEILKKIVQYVERKKQNKELKIYDSDHLEEKKVVMLYETFLNKLTNTVYAKKLGAQAKTLTEKREKFKELCIEEKCIVLYEVLHFFQCQSAAADLKLIGGSGRAGILCLNKNITDCSRIEMIHQSPTGIYEQTVDLNAL

SEQ ID NO: 20783 - protein, 1325 aa, unidentified
  REGION 1..1325: note = Cas Enzyme sequence
MKGEYYLGLDMGSSSVGWAVTNEKYEILRAHGKTLWGVRLFDSAQTAEERRGFRTAKRRLDRRNWRIELLQKIFAEEVEKIDDGFFRRMKESRYWPEDKRDRRGKCPELPYALFADDDYTDKEYHKQFPTIYHLRKWLMETDETPDIRLIYLALHHMMKHRGHFLLNGNIEQVREFQTTFEQFLEAVRAEELGFSSEIGVERSKEIEAILKDRTLTKSAKKTKAVKAMRAETSCEKEWLGLITGGTAKLGNLFGEKQMDTLERPKLCFADAGYEEYAGEIEAELGEKYVLIEHAKAVYDWAVLADILQNYSSLSEAKVALYEKHKKDLKDLKKLVRENLSREEYQRLFAKKDEKANYYAYIKAPKQCSQEDFYGYLKKNILGKISDVTKVSCMQKEMEMGTFLPKQTVKDNSVIPYQIHLYELNAILKNLEDKVPLLKENGEKIQKIFTFRIPYYVGPLNGIRKKGEKSNWAVRKEGKIYPWNFDEMVDLEASAEQFIRRMTNKCTYLPSEDVLPKYSLLYSKYEVLNELNNLRLDGEKISVEQKQKIYEEVFQKSRKVTQKKLKNYLVKEGITGKEVEITGIDGDFKSSLTAYHDFKEKLTNLSLNQAEKECIILNVTLFGDDKAILKQRLKKLFPELTEKQRDSISKLPYRGWGRLSKVFLEETEAPAPETGEAWSIIRALWETNDNLMQLLSEKYLFASAIEEKNGNEQKKRDISYELVEELYVSPAVKRQIWQSLLIVKEICKVMGNPPKRVFIEMAREKTDQGRTSSRKKKLLELYKKCKAEEKDWIDEIEKRSDAEMRRDKLYLYYTQKGKCMYSGETIELEELWDNQKYDIDHIFPQSKVMDDSLDNRVLVKKKCNQMKEDKYPIDETVREKMQPFWKSLVDAGLISEEKYKRLIRRNGFEPSELAGFISRQLVETRQSTKAAASILQQVIPDTQIVYVKAPTVSKFRKDFKFLKVREMNDYHHAKDAYLNIVVGNAYFVKFTSNPIHFIKENPGRSYNLKKMFEQERIERNGEIAWEGGNGTIVTVRKFMEKNNILVTRRSYEATGALFDQQIVKKGKGQVPIKSSDERLCDIQKYGGYNKEAGAYFVLAESEGKKGKKIRTIEYVPIRLKKEIQKSEENIIRYLEEERQLKNPRVLVPEIKIDTLFCVDGFYMWVSGRSGDQLLMQGANQLVLSQEEMEILKKIVQYVERKKQNKELKIYDSDHLEEKKVVMQYETFLNKLTNTVYAKKLGAQAKTLTEKREKFKELCIEEKCIVLYEILHFFQCQSVTADLKLIGGSGRAGILYLNKNITDCSRIEMIHQSPTGIYEQAVDLNAL

SEQ ID NO: 20784 - protein, 1325 aa, unidentified
  REGION 1..1325: note = Cas Enzyme sequence
MKGEYYLGLDMGSSSVGWAVTNEKYEILRAHGKTLWGVRLFDSAQTAEERRGFRTAKRRLDRRNWRIELLQKIFAEEVEKIDDGFFRRMKESCYWPEDKRDRQGKCPELPYALFADDDYTDKEYHKQFPTIYHLRKWLMETDETPDIRLIYLALHHMMKHRGHFLLNGNIEQVREFQTTFEQFLEAVRAEELGFSSEIRVERSKEIEAILKDRTLTKSAKKTKAVKAMRAETSCEKEWLGLITGGTAKLGNLFGEKQMDTLERPKLCFADAGYEEYAGEIEAELGEKYVLIEHAKAVYDWAVLADILQNYSSLSEAKVALYEKHKKDLKDLKKLVRENLSREEYQRLFAKKDEKANYYAYIKAPKQCSQEDFYGYLKKNILGKISDVTKASCMQKEMEMGTFLPKQTVKDNSVIPYQIHLYELNAILKNLEDKVPLLKENGEKIQKIFTFRIPYYVGPLNGIRKKGEKSNWAVRKEGKIYPWNFDEMVDLEASAEQFIRRMTNKCTYLPSEDVLPKYSLLYSKYEVLNELNNLRLDGEKISVEQKQKIYEEVFQKSRKVTQKKLKNYLVKEGITGKEVEITGIDGDFKSSLTAYHDFKEKLTNLSLNQAEKECIILNVTLFGDDKAILKQRLKKLFPELTEKQRDSISKLPYRGWGRLSKVFLEETEAPAPETGEAWSIIRALWETNDNLMQLLSEKYLFASAIEEKNGNEQKKRDISYELVEELYVSPAVKRQIWQSLLIVKEICKVMGNPPKRVFIEMAREKTDQGRTSSRKKKLLELYKKCKAEEKDWIDEIEKRSDAEMRRDKLYLYYTQKGKCMYSGETIELEELWDNQKYDIDHIFPQSKGMDDSLDNRVLVKKKCNQMKEDKYPIDETVRKKMQPFWKSLVDAGLISEEKYKRLIRRNGFEPSELAGFISRQLVETRQSTKAAASILQQVIPDTQIVYVKAPTVSKFRKDFKFLKVREMNDYHHAKDAYLNIVVGNAYFVKFTSNPIHFIKENPGRSYNLKKMFEQERIERNGEIAWESGNGTIATVRKFMEKNNILVTRRSYEATGALFDQQIVKKGKGQVPIKSSDERLCDIQKYGGYNKEAGAYFVLAESEGKKGKKIRTIEYVPIRLKKEIQKSEENIIRYLEEERQLKNPRVLVPEIKIDTLFCVDGFYMWVSGRSGDQLLMQGANQLVLSQEEMEILKKIVQYVERKKQNKELKIYDSDHLEEKKVVMLYETFLNKLTNTVYAKKLGAQAKTLTEKREKFKELCIEEKCIVLYEILHFFQCQSVTADLKLIGGSGRAGILYLNKNITDCSRIEMIHQSPTGIYEQAVDLNAL

SEQ ID NO: 20785 - protein, 1325 aa, unidentified
  REGION 1..1325: note = Cas Enzyme sequence
MKGEYYLGLDMGSGSVGWAVTNEKYEILRAHGKTLWGVRLFDSAQTAEERRGFRTAKRRLDRRNWRIELLQKIFAEEVEKIDDGFFRRMKESRYWPEDKRDRQGKCPELPYALFADDDYTDKEYHKQFPTIYHLRKWLMETDETLDIRLIYLALHHMMKHRGHFLLNGNIEQVREFQTTFEQFLEAVRAEELGFSSEIGVERSKEIEAILKDRTLTKSAKKTKAVKAMRAETSCEKEWLGLITGGTAKLGNLFGEKQMDTLERPKLCFADAGYEEYAGEIEAELGEKYVLIEHAKAVYDWAVLADILQNYSSLSEAKVALYEKHKKDLKDLKKLVRENLSREEYQRLFAKKDEKANYYAYIKAPKQCSQEDFYGYLKKNILGKISDVTKASCMQKEMEMGTFLPKQTVKDNSVIPYQIHLYELNAILKNLEDKVPLLKENGEKIQKIFTFRIPYYVGPLNGIRKKGEKSNWAVRKEGKIYPWNFDEMVDLEASAEQFIRRMTNKCTYLPSEDVLPKYSLLYSKYEVLNELNNLRLDGEKISVEQKQKIYEEVFQKSRKVTQKKLKNYLVKEGITGKEVEITGIDGDFKSSLTAYHDFKEKLTNLSLNQAEKECIILNVTLFGDDKAILKQRLKKLFPELTEKQRDSISKLPYRGWGRLSKVFLEETEAPAPETGEAWSIIRALWETNDNLMQLLSEKYLFASAIEEKNGNEQKKRDISYELVEELYVSPAVKRQIWQSLLIVKEICKVMGNPPKRVFIEMAREKTDQGRTTSRKKKLLELYKKCKAEEKDWIDEIEKRSDAEMRRDKLYLYYTQKGKCMYSGETIELEELWDNQKYDIDHIFPQSKVMDDSLDNRVLVKKKCNQMKEDKYPIDETVRKKMQPFWKSLVDAGLISEEKYKRLIRGNGFEPSELAGFISRQLVETRQSTKAAASILQQVIPDTQIVYVKAPTVSKFRKDFKFLKVREMNDYHHAKDAYLNIVVGNAYFVKFTSNPIHFIKENPGRSYNLKKMFEQERIERNGEIAWEGGNGTIVTVRKFMEKNNILVTRRSYEATGALFDQQIVKKGKGQVPIKSSDERLCDIQKYGGYNKEAGAYFVLAESEGKKGKKIRTIEYVPIRLKKEIQKSEENIIRYLEEERQLKNPRVLVPEIKIDTLFCVDGFYMWVSGRSGDQLLMQGANQLVLSQEEMEILKKIVQYVERKKQNKELKIYDSDHLEEKKVVMLYETFLNKLTNTVYAKKLGAQAKTLTEKREKFKELCIEEKCIVLYEILHFFQCQSVTADLKLIGGSGRAGILYLNKNITDCSRIEMIHQSPTGIYEQAVDLNAL

SEQ ID NO: 20786 - protein, 1325 aa, unidentified
  REGION 1..1325: note = Cas Enzyme sequence
MKGEYYLGLDMGSSSVGWAVTNEKYEILRAHGKTLWGVRLFDSAQTAEERRGFRTAKRRLDRRNWRIELLQKIFAEEVEKIDDGFFRRMKESRYWPEDKRDRRGKCPELPYALFADDDYTDKEYHKQFPTIYHLRKWLMETDETPDIRLIYLALHHMMKHRGHFLLNGNIEQVREFQTTFEQFLEAVRAEELGFSSEIGVERSKEIEAILKDRTLTKSAKKTKAVKAMRAETSCEKEWLGLITGGTAKLGNLFGEKQMDTLERPKLCFADAGYEEYAGEIEAELGEKYALIEHAKAVYDWAVLADILQNYSSLSEAKVALYEKHKKDLKDLKKLVRENLSREEYQRLFAKKDEKTNYYAYIKAPKQCSQEDFYGYLKKNILGKISDVTKASCMQKEMEMGTFLPKQTVKDNSVIPYQIHLYELNAILKNLEDKVPLLKENGEKIQKIFTFRIPYYVGPLNGIRKKGEKSNWAVRKEGKIYPWNFDEMVDLEASAEQFIRRMTNKCTYLPSEDVLPKYSLLYSKYEVLNELNNLRLDGEKISVEQKQKIYEEVFQKSRKVTQKKLKNYLVKEGITGKEVEITGIDGDFKSSLTAYHDFKEKLTNLSLNQAEKECIILNVTLFGDDKAILKQRLKKLFPELTEKQRDSISKLPYRGWGRLSKVFLEETEAPAPETGEAWSIIRALWETNDNLMQLLSEKYLFASAIEEKNGNEQKKRDISYELVEELYVSPAVKRQIWQSLLIVKEICKVMGNPPKRVFIEMAREKTDQGRTSSRKKKLLELYKKCKAEEKDWIDEIEKRSDAEMRRDKLYLYYTQKGKCMYSGETIELEELWDNQKYDIDHIFPQSKVMDDSLDNRVLVKKKCNQMKEDKYPIDETVRKKMQPFWKSLVDAGLISEEKYKRLIRGNGFEPSELAGFISRQLVETRQSTKAAASILQQVIPDTQIVYVKAPTVSKFRKDFKFLKVREMNDYHHAKDAYLNIVVGNAYFVKFTSNPIHFIKENPGRSYNLKKMFEQERIERNGEIAWEGGNGTIVTVRKFMEKNNILVTRRSYEATGALFDQQIVKKGKGQVPIKSSDERLCDIQKYGGYNKEAGAYFVLAESEGKKGKKIRTIEYVPIRLKKEIQKSEENIIRYLEEERQLKNPRVLVPEIKIDTLFCVDGFYMWVSGRSGDQLLMQGANQLVLSQEETEILKKIVQYVERKKQNKELKIYDSDHLEEKKVVMLYETFLNKLTNTVYAKKLGAQAKTLTEKREKFKELCIEEKCIVLYEILHFFQCQSVTADLKLIGGSGRAGILYLNKNITDCSRIEMIHQSPTGIYEQAVDLNAL

SEQ ID NO: 20787 - protein, 912 aa, unidentified
  REGION 1..912: note = Cas Enzyme sequence
IPYQIHLYELNAILKNLEDKVPLLKENGEKIQKIFTFRIPYYVGPLNGIRKKGEKSNWAVRKEGKIYPWNFDEMVDLEASAEQFIRRMTNKCTYLPSEDVLPKYSLLYSKYEVLNELNNLRLDGEKISVEQKQKIYEEVFQKSRKVTQKKLKNYLVKEGITGKEVEITGIDGDFKSSLTAYHDFKEKLTNLSLNQAEKECIILNVTLFGDDKAILKQRLKKLFPELTEKQRDSISKLPYRGWGRLSKVFLEEMEAPAPETGEAWSIIRALWETNDNLMQLLSEKYLFASAIEEKNGNEQKKRDISYELVEELYVSPAVKRQIWQSLLIVKEICKVMGNPPKRVFIEMAREKTDQGRTSSRKKKLLELYKKCKAEEKDWIDEIEKRSDAEMRRDKLYLYYTQKGKCMYSGETIELEELWDNQKYDIDHIFPQSKVMDDSLDNRVLVKKKCNQMKEDKYPIDETVRKKMQPFWKSLVDAGLISEEKYKRLIRGNGFEPSELAGFISRQLVETRQSTKAAASILQQVIPDTQIVYVKAPTVSKFRKDFKFLKVREMNDYHHAKDAYLNIVVGNAYFVKFTSNPIHFIKENPGRSYNLKKMFEQERIERNGEIAWEGGNGTIVTVRKFMEKNNILVTRRSYEATGALFDQQIVKKGKGQVPIKSSDERLCDIQKYGGYNKEAGAYFVLAESEGKKGKKIRTIEYVPIRLKKEIQKSEENIIRYLEEERQLKNPRVLVPEIKIDTLFCVDGFYMWVSGRSGDQLLMQGANQLVLSQEETEILKKIVQYVERKKQNKELKIYDSDHLEEKKVMLLYETFLNKLTNTVYAKKLGAQAKTLTEKREKFKELCIEEKCIVLYEILHFFQCQSVTADLKLIGGSGRAGILYLNKNITDCSRIEMIHQSPTGIYEQAVDLNAL

SEQ ID NO: 20788 - protein, 1352 aa, unidentified
  REGION 1..1352: note = Cas Enzyme sequence
MKQDYYIGLDMGTESVGWAVTDVDYNLVKKRGQDYWGVYLFDEAKTAQGRRAFRTNRRRLARVRHRLNLLQELFDSEISAKDFGFFYRLENSKYFDEDKPEIARGKFLLFNDEDFGDKEYYKNYPTIFHLRNALRTQEIKDVRLLYLAVHHILKNRGHFLFGEQDFNVNDASDVSGEFEKINRFLSENDGAGFYREKIPEIFETLCNENLAKRERKEKILELAGNSKNKLLGEAVNAVVGLNFSLSKMFGEDRDFQGENKMSFTDSSFEEKLAKARMALDDDEADFLETLKKVQSVASLHNILHGKEFISQAKTEAYETHRRDLSELKKYVRENCPEKYALVFRRQVKKGKKNTSGADENEKDDKKVNNYAAYIGMDKGKGFAKCKKEEFYAFLKKEIGINDESLLAKIDEGIFLPKQISAENCDIPYQVHLAELKAILANAENYFPFLKQKDENCEMTVSEKIISLMKFRVPYYVGPFTDKETRFSWMIKKEGLSTQKITPWNFDDVVDRDASEQKFIERMTNFCTYLTGEKVLPASSFLYSEYAFLNELNNLKVNGTKDLRVKNILFDFAKTNKKLTLKKCCEQLVKNGLLPEGSKARDVFSSTDGDFKNSLSSYIDFKRIIGDKADLYRDMCEEIILWITIISDKERLVKIIKDKYGTVLSDEEIKGLKALNYTKWGRLSAKLLDGIFETDSEGEVGNVSIIEKMRTDTENFMELLSNKHNYKRAIELANSESIVDEKVTYRAVEELYCSPAVKRSIWSALKIVREIVKVQGHSPKKIFVETTREKPDGARKGQRTESRKQRLLDKYRENLRNEKELIKKIEGTEDSKFNSDKLFFYFTQMGLDAYTGEKIEFDDVFKTEKYDIDHIYPRSKIKDDSLDNRVLTGKKINQGVKQDIYPLPAEIRNRMEGLWRQLKDKKLISEEKFYRLTRSTPLTEKECGDFINAQLVATSQSAKAAIQLLKRMLPESEIVYSKAGNVNEFKKRLEFVKIRELNDLHHAKDAYFNIVVGNVFNTKFNHNAAVFLRNNGTGNYDFERLYDFDITNAWKKGDENRISSVAEKNTCRVVRFSKTEKGQFYDATIYPAGKNDKLAPVKGKAPLNDTSKYGGYDKETTAYFMLVKSRDKKKKDKTLLSLECVTVLADKNFRTAEDKLKYCEKELGLKEPEILIEKIKLNTLFKINGSYAWIRGRTNDRLVLCNANQLWLDNGSAKELKKISNHFRDVKKYNNKDLPVREEEFSKEQNLALYDLFTEKLGGKIYAGLPVQGQIKNFEKGRDKFEALELKDQLFVLMEILKFMQCNNMTSNLTLIDGKSRAGANYISKYIQDSDVKMISCSPTGYFCKVVDFKRFL

SEQ ID NO: 20789 - protein, 1352 aa, unidentified
  REGION 1..1352: note = Cas Enzyme sequence
MKQDYYIGLDMGTESVGWAVTDVDYNLIKKRGQDYWGVYLFDEAQTAQGRRAFRTNRRRLARVRHRLNLLQELFDSEISAKDFGFFYRLENSKYFDEDKPEIARGKFLLFNDKDFGDKEYYKNYPTIFHLRNALRTQEIKDVRLLYLAVHHILKNRGHFLFGEQDFNVNDASDVSGEFEKINRFLSENDGAGFDREKIPEIFETLCNVDLAKRERKEKILELAGNSKNKLLGEAVNAVVGLNFSLSKMFGEDRDFQGENKMSFTDSSFEEKLAKARMALDDDEADFLETLKKVQSVASLHNILHGKEFISEAKTEAYETHRRDLSELKKYVRENCPEKYALVFRRQVKKGKKNTSGADENEKDDKKVNNYAAYIGMDKGKGFAKCKKEEFYAFLKKEIGIKDESILAKIDEGVFLPKQISAENCDIPYQVHLAELKAILANAENYFPFLKQKDENCEMTVSEKIISLMKFRVPYYVGPFTDKETGFSWMIKKEGLSTQKITPWNFDDVVDKDASEQKFIERMTNFCTYLTGEKVLPASSFLYSEYAFLNELNNLKVNGTKDLRVKNILFDFAKTNKKLTLKKCCEQLVKNGLLPEGSKAQDVFSGTDGDFKNSLSSYIDFKRIIGDKADLYRDMCEEIILWITVISDKKRLEKLIKSNYGTVLSDEEIKGLKALNYTKWGRLSKKLLDGIFETDSEGEVGNVSIIEKMRTDTENFMELLSNRHNYKRAIDLANSESVEDKNVTYRAVEELYCSPAVKRSIWSALKIVSEIKKVQGYSPKKIFVETTREKPDGTRKGKRTVSRKQRLLDKYRENLRNETELIKKIEETEDSKFNSDKLFFYFTQMGKDAYTGEKIEFDDVFKTEKYDIDHIYPRSKIKDDSLDNRVLVRRKINQSVKKDSYPLSAEIRNRMEGLWRQLRDKKLISDEKFYRLTRSTPLTEKECGDFINAQLIATSQSAKAAIQLLKRMLPESEIVYSKAGNVNEFKNRLKFVKIRELNDLHHAKDAYFNIVVGNVFNTKFNHNAAVFLRNNGTGNYDLKRLYDFDITNAWKAGDENRIRSVAEKNTCRVVRFSKTEKGQFYDATIYPAGKNDKLAPVKGKAPLNDTSKYGGYDKETTAYFMLVKSRDKKKKDKTLLSLECVTVLADKNFRTAEDKLKYCEKELGLKEPEILIEKIKLNTLFKINGSYAWIRGRTNDRLVLCNANQLWLDNGSAKELKKISNHFRDVKKYKNKDLPVRDKEISKEQNLALYDLFTEKLGGKTYAGLPFKKQIKCLEKGRDKFEALELKDQLFVLMEILKFMQCNNMTSNLTLIDGKSRAGANYISKYIQDSDVKMISCSPTGYFCKVVDFKRFL

SEQ ID NO: 20790 - protein, 1352 aa, unidentified
  REGION 1..1352: note = Cas Enzyme sequence
MKQDYYIGLDMGTESVGWAVTDVDYNLIKKRGQDYWGVYLFDEAQTAQGRRAFRTNRRRLARVRHRLNLLQELFDSEISAKDFGFFYRLENSKYFDEDKPEIARGKFLLFNDKDFGDKEYYKNYPTIFHLRNALRTQEIKDVRLLYLAVHHILKNRGHFLFGEQDFNVNDASDVSGEFEKINRFLSENDGAGFDREKIPEIFETLCNENLAKRERKEKILELAGNSKNKLLGEAVNAVVGLNFSLSKMFGEDRDFQGENKMSFTDSSFEEKLAKARMALDDDEADFLETLKKVQSVASLHNILHGKEFISEAKTEAYETHRRDLSELKKYVRENCPEKYALVFRRQAKKVNKNTSGADENEKDDKKVNNYAAYIGMDKGKGFAKCKKEEFYAFLKKEIGIKDESILAKIDEGVFLPKQISAENCDIPYQVHLAELKAILANAENYFPFLKQKDENCEMTVSEKIISLMKFRVPYYVGPFTDKETGFSWMIKKEGLSTQKITPWNFDDVVDKDASEQKFIERMTNFCTYLTGEKVLPASSFLYSEYAFLNELNNLKVNGTKDLRVKNILLDYAKTNKKLTLKKCCEQLVKNGLLPEGSKAQDVFSGTDGDFKNSLSSYIDFKRIIGDKADLYRDMCEEIILWITVISDKKRLEKLIKSNYGTVLSDEEIKGLKALNYTKWGRLSKKLLDGIFETDSEGEVGNVSIIEKMRTDTENFMELLSNRHNYKRAIDLANSESVEDKKVTYRAVEELYCSPAVKRSIWSALKIVSEIKKVQGYSPKKIFVETTREKPDGARKGQRTVSRKQQLLDKYRENLRNETELIKKIEETEDSKFNSDKLFFYFTQMGKDAYTGEKIEFDDVFKTEKYDIDHIYPRSKIKDDSLDNRVLVRRKINQGVKQDIYPLPAEIRNKMEGLWRQLRDKKLISDEKFYRLTRSTPLTEKECGDFINAQLIATSQSAKAAIQLLKRMLPESEIVYSKAGNVNEFKKRLEFVKIRELNDLHHAKDAYFNIVVGNVFNTKFNHNAAVFLRNNGTGNYDFERLYDFDITNAWKKGDENRIRSVAEKNTCRVVRFSKTEKGQFYDATIYPAGKNDKLAPVKGKAPLNDTSKYGGYDKETTAYFMLVKSRDKKKKDKTLLSLECVTVLADKNFRTAEDKLKYCEKELGLKEPEILIEKIKLNTLFKINGSYAWIRGRTNDRLVLCNANQLWLDNGSAKELKKISNHFRDVKKYNNKDLPVREEEFSKEQNLALYDLFTEKLGGKIYAGLPVQGQIKNLEKGRDKFEALELKDQLFVLMEILKFMQCNSMTSNIKLIGGAENAGKNRISKLIQDSDVKMISCSPTGYFCKVVDFKRFL

SEQ ID NO: 20791 - protein, 1076 aa, unidentified
  REGION 1..1076: note = Cas Enzyme sequence
MALDDDEADFLETLKKVQSVASLHNILHGKEFISEAKTEAYETHRRDLSELKKYVRENCPEKYALVFRRQVKKGKKNTSGADENEKVDKKVNNYAAYIGMDKGKGFEKCKKEDFYAFLKKEIGINDESLLAKIDEGIFLPKQISAENCDIPYQVHLAELKAILANAENYFPFLKQKDENCEMTVSEKIISLMKFRVPYYVGPFTDKETRFSWMIKKEGLSTQKITPWNFDDVVDRDASEQKFIKRMTNFCTYLTGEKVLPASSFLYSEYAFLNELNNLKVNGTKDLRVKNILFDFAKTNKKLTLKKCCEQLVKNGLLPEGSKARDVFSGTDGDFKNSLSSYIDFKRIIGDKADLYRDMCEEIILWITVISDKKRLEKLIKSKYGTVLSDEEIKGLKALNYTKWGRLSEKLLDGIFETDSEGEVGSVSIIEKMRTDTENFMELLSNKHNYKRAIELVNSESIVDERVTYRAVDELYCSPAVKRSIWSALKIVSEIKKVQGHSPKKIFVETTREKPDGARKGQRTVSRKQRLLDVYRKNLRNEKELIKKIEETEDSKFNSDEDKLFFYFTQMGKDAYTGEKIELDDLSKTEIYDIDHIYPRSKIKDDSLDNRVLTRKKINQGVKQDIYPLPAEIRNKMEGLWRQLKDKKLISEEKFYRLTRSTPLTEEECGDFINAQLVATSQSAKAAIQLLKRMLPESEIVYSKAVNVNEFKNRLKFVKIRELNDLHHAKDAYFNIVVGNVFNTKFNHNAAVFLRNNGTGNYDLKRLYDFDITNAWKAGDENRIRSVAEKNTCRVVRFSKTEKGQFYKVTICPAGKNDKLAPIKGNGPLNDTSKYGGYDKETTAYFMLVKSRDKKKKDKTLLSLECVTVLADKNFRTAEDKLKYCEKELGLKEPEILIEKIKLNTLFKINGSYAWIRGRTGDRLELCNANQLWLDNGSAKELKKISNHFRDVKKYKDLPVREEEISKEQNLALYDLFTEKLGGKIYAGLSIKGQIENLEKGRDKFEALELKDQLFVLMEILKFMQCNSMTSNIKLIGGAENAGKNRISKLIQDSDVKMISCSPTGYFCKVVDFKRFL

SEQ ID NO: 20792 - protein, 1353 aa, unidentified
  REGION 1..1353: note = Cas Enzyme sequence
MKQDYYIGLDMGTESVGWAVTDVDYNLIKKRGQDYWGVYLFDEAQTAQGRRAFRTNRRRLARVRHRLNLLQELFDSEISAKDFGFFYRLENSKYFDEDKPEIARGKFLLFNDKDFGDKEYYKNYPTIFHLRNALRTQEIKDVRLLYLAVHHILKNRGHFLFGEQDFNVNDASDVSGEFEKINRFLSENDGAGFDREKIPEIFETLCNENLAKRERKEKILELAGNSKNKLLGEAVNAVVGLNFSLSKMFGEDRDFQGENKMSFTDSSFEEKLAKARMALDDDEADFLETLKKVQSVASLHNILHGKEFISEAKTEAYETHRRDLSELKKYVRENCPEKYALVFRRQVKKGKKNTSGADENEKDDKKVNNYAAYIGMDKGKGFEKCKKEDFYAFLKKEIGINDESLLAKIDEGIFLPKQISAENCDIPYQVHLAELKAILANAENYFPFLKQKDENCEMTVSEKIISLMKFRVPYYVGPFTDKETRFSWMIKKEGVISTQKITPWNFDDVVDRDASEQKFIKRMTNFCTYLTGEKVLPASSFLYSEYAFLNELNNLKVNGTKDLRVKNILFDFAKTDKKLTLKKCCEQLVKNGLLPEGSKARDVFSGTDGDFKNSLSSYIDFKRIIGDKADLYRDMCEEIILWITVISDKKRLEKLIKSNYGTVLSDEEIKGLKALNYTKWGRLSKKLLDGIFETDSEGEVGNVSIIEKMRTDTENFMELLSNRHNYKRAIDLANSESVEDKKVTYRAVEELYCSPAVKRSIWSALKIVSEIKKVQGYSPKKIFVETTREKPDGARKGQRTVSRKQRLLDVYRKNLRNEKELIKKIEETEDSKFNSDEDKLFFYFTQMGKDAYTGEKIELDDLSKTEIYDIDHIYPRSKIKDDSLDNRVLTRKKINQGVKQDIYPLPAEIRNKMEGLWRQLKDKKLISEEKFYRLTRSTPLTEEECGDFINAQLVATSQSAKAAIQLLKRMLPESEIVYSKAVNVNEFKNRLKFVKIRELNDLHHAKDAYFNIVVGNVFNTKFNHNAAVFLRNNGTGNYDLKRLYDFDITNAWKAGDENRIRSVAEKNTCRVVRFSKTEKGQFYKVTICPAGKNDKLAPIKGKAPLNDTSKYGGYNKETTAYFMLVKSKDKKKKDKTSLSLECVTVLADKNFRTAEDKLKYCETRLKLEKPEILIEKIKLNTLFKINGSYAWIRGKTNDRLELCNANQLWLDDGSAKELKKISNHFRDVKKYKDLPVREEEISKEQNLALYDLFTEKLGGKIYAGLSIKGQIENLEKGRDKFEALELKDQLFVLMEILKFMQCNSMTSNIKLIGGAENAGKNRISKLIQDSDVKMISCSPTGYFCKVVDFKRFL

SEQ ID NO: 20793 - protein, 1354 aa, unidentified
  REGION 1..1354: note = Cas Enzyme sequence
MKQDYYIGLDMGTESVGWAVTDVEYNLVKKRGQDYWGVYLFDEAKTAQGRRAFRTNRRRLARVRHRLNLLQELFDSEISAKDFGFFYRLENSKYFDEDKPEIARGKFLLFNDKDFGDKEYYKNYPTIFHLRNALRTQEIKDVRLLYLAVHHILKNRGHFLFGEQDFNVNDASDVSGEFEKINRFLRENDGTELDREKIPEIFETLCNVDLAKRERKEKILKLSGNSKNKLLGEALNAVVGLEFSLSKMFGEDRDFQDIKKMSLANSSFEEDFAKAKMALDDDEADFLETLKKVQSIASLHNILHGKEFISQAKTEAYETHRRDLSELKKYVRENCPEKYALVFRRQAKKVNKNTSGADENEKDDKKVNNYAAYIGMDKGKGFAKCKKEEFYAFLKKEIGINDESLLAKIDEGIFLPKQISAENCDIPYQVHLAELKAILANAENYFPFLKQKDENCEMTVSEKIISLMKFRVPYYVGPFTDKETGFSWMIKKEGLSTQKITPWNFDDVVDKDASEQKFIERMTNFCTYLTGEKVLPASSFLYSEYAFLNELNNLKVNGTKDLRVKNILFDFAKTNKKLTLKKCCEQLVKNGLLPEGSKAQDVFSGTDGDFKNSLSSYIDFKRIIGDKADLYRDMCEEIILWITVISDKKRLEKLIKSNYGTVLSDEEIKGLKALNYTKWGRLSKKLLDGIFETDSEGEVGNVSIIEKMRTDTENFMELLSNRHNYKRAIDLANSESVEDKNVTYRAVEELYCSPAVKRSIWSALKIVSEIKKVQGYSPKKIFVETTREKPDGTRKGKRTVSRKQRLLDVYRKNLRNEKELIKKIEETEDSKFNSDEDKLFFYFTQMGKDAYTGEKIELDDLSKTEIYDIDHIYPRSKIKDDSLDNRVLTRKKINQGVKQDIYPLPAEIRNKMEGLWRQLKDKKLISEEKFYRLTRSTPLTEKECGDFINAQLVATSQSAKAAIQLLKRMLPESEIVYSKAGNVNEFKKRLEFVKIRELNDLHHAKDAYFNIVVGNVFNTKFNHNAAVFLRNNGTGNYDLKRLYDFDITNAWKAGDENRIRSVAEKNTCRVVRFSKTEKGQFYDATIYPAGKNDKLAPVKGKAPLNDTSKYGGYDKETTAYFMLVKSRDKKKKDKTLLSLECVTVLADKNFRTAEDKLKYCEKELGLKEPEILIEKIKLNTLFKINGSYAWIRGRTNDRLVLCNANQLWLDNGSAKELKKISNHFRDVKKYNNKDLPVREEEFSKEQNLALYDLFTEKLGGKIYAGLPVQGQIKNLEKGRDKFEALELKDQLFVLMEILKFMRCNSMTSNIKLIGGAENAGKNRISKLIQDSDVKMISCSPTGYFCKVVDFKRFL

SEQ ID NO: 20794 - protein, 1350 aa, unidentified
  REGION 1..1350: note = Cas Enzyme sequence
MKQDYYIGLDMGTESVGWAVTDVDYNLIKKRGQDYWGVYLFDEAQTAQGRRAFRTNRRRLARVRHRLNLLQELFDSEISAKDFGFFYRLENSKYFDEDKPEIARGKFLLFNDKDFGDKEYYKNYPTIFHLRNALRTQEIKDVRLLYLAVHHILKNRGHFLFGEQDFNVNDASDVSGEFEKINRFLSENDGAGFDREKIPEIFETLCNENLAKRERKEKILELAGNSKNKLLGEAVNAVVGLNFSLSKMFGEDRDFQGENKMSFTDSSFEEKLAKARMALDDDEADFLETLKKVQSVASLHNILHGKEFISEAKTEAYETHRRDLSELKKYVRENCPEKYALVFRRQVKKGKKNTSGADENEKDDKKVNNYAAYIGMDKGKGFEKCKKEDFYAFLKKEIGINDESLLAKIDEGIFLPKQISAENCDIPYQVHLAELKAILANAENYFPFLKQKDENCEMTVSEKIISLMKFRVPYYVGPFTDKETRFSWMIKKEGLSTQKITPWNFDDVVDRDASEKKFIERMTNFCTYLTGEKVLPASSFLYSEYAFLNELNNLKVNGTKDLRVKNILFDFAKTNKKLTLKKCCEQLVKNGLLPEGSKARDVFSGTDGDFKNSLSSYIDFKRIIGDKADLYRDMCEKIILWITVISDKERLVKIIKDKYGTVLSDEEIKGLKALNYTKWGRLSEKLLDGIFETDSEGEVGNVSIIEKMRTDTENFMELLSNKHNYKRAIELANSESIVDERVTYRAVDELYCSPAVKRSIWSALKIVSEIKKVQGYSPKKIFVETTREKPDGARKGQRTESRKQKLLDKYRENLRNEKELIKKIEETEDSKFNSDKLFFYFTQMGKDAYTGEKIEFDDVFKTEKYDIDHIYPRSKIKDDSLDNRVLVRRKINQSVKKDSYPLSAEIRNRMEGLWRQLRDKKLISEEKFYRLTRSTPLTEEECGDFIKAQLVATSQSAKAAIQLLKRMLPESEIVYSKAVNVNEFKNRLKFVKIRELNDLHHAKDAYFNIVVGNVFNTKFNHNPAVFQRSNGTGNYDFERLYDFDITNAWKKGDENRIRSVAEKNTCRVVRFSKTEKGQFYDATIYPAGKNDKLAPVKGKAPLNDTSKYGGYDKETTAYFMLVKSRDKKKKDKTLLSLECVTVLADKNFRTAEDKLKYCEKELGLKEPEILIEKIKLNTLFKINGSYAWIRGRTGDRLELCNANQLWLDNGSAKELKKISNHFRDVKKYKDLPVREEEISKEQNLALYDLFTEKLGGKIYAGLSIKGQIENLEKGRDKFEALELKDQLFVLMEILKFMQCNSMTSNIKLIGGAENAGKNRISKLIQDSDVKMISCSPTGYFCKVVDFKRFL

SEQ ID NO: 20795 - protein, 1354 aa, unidentified
  REGION 1..1354: note = Cas Enzyme sequence
MKQDYYIGLDMGTESVGWAVTDVDYNLIKKRGQDYWGVYLFDEAQTAQGRRAFRTNRRRLARVRHRLNLLQELFDSEISAKDFGFFYRLENSKYFDEDKPEIARGKFLLFNDKDFGDKEYYKNYPTIFHLRNALRTQEIKDVRLLYLAVHHILKNRGHFLFGEQDFNVNDASDVSGEFEKINRFLSENDGAGFDREKIPEIFETLCNENLAKRERKEKILELAGNSKNKLLGEAVNAVVGLNFSLSKMFGEDRDFQGENKMSFTDSSFEEKLAKARMALDDDEADFLETLKKVQSVASLHNILHGKEFISEAKTEAYETHRRDLSELKKYVRENCPEKYALVFRRQVKKGKKNTSGADENEKDDKKVNNYAAYIGMDKGKGFEKCKKEDFYAFLKKEIGINDESLLAKIDEGIFLPKQISAENCDIPYQVHLAELKAILANAENYFPFLKQKDENCEMTVSEKIISLMKFRVPYYVGPFTDKETRFSWMIKKEGVISTQKITPWNFDDVVDRDASEQKFIKRMTNFCTYLTGEKVLPASSFLYSEYAFLNELNNLKVNGTKDLRVKNILFDFAKTDKKLTLKKCCEQLVKNGLLPEGSKARDVFSGTDGDFKNSLSSYIDFKRIIGDKADLYRDMCEEIILWITVISDKKRLEKLIKSNYGTVLSDEEIKGLKALNYTKWGRLSKKLLDGIFETDSEGEVGNVSIIEKMRTDTENFMELLSNRHNYKRAIDLANSESVEDKKVTYRAVEELYCSPAVKRSIWSALKIVSEIKKVQGYSPKKIFVETTREKPDGARKGQRTVSRKQRLLDVYRKNLRNEKELIKKIEETEDSKFNSDEDKLFFYFTQMGKDAYTGEKIELDDLSKTEIYDIDHIYPRSKIKDDSLDNRVLTRKKINQGVKQDIYPLPAEIRNKMEGLWRQLKDKKLISEEKFYRLTRSTPLTEEECGDFINAQLVATSQSAKAAIQLLKRMLPESEIVYSKAVNVNEFKNRLKFVKIRELNDLHHAKDAYFNIVVGNVFNTKFNHNAAVFLRNNGTGNYDLKRLYDFDITNAWKAGDENRIRSVAEKNTCRVVRFSKTEKGQFYKVTICPAGKNDKLAPVKGKAPLNDTSKYGGYNKETTAYFMLVKSKDKKKKDKTSLSLECVTVLADKNFRTAEDKLKYCETRLKLEKPEILIEKIKLNTLFKINGSYAWIRGKTNDRLELCNANQLWLDDGSAKELKKISNHFRDVKKYKNKDLSVREEFSKEQNLALYDLFTEKLGGKIYAGLPVQEQIKNLEKGRDKFEALELKDQLFVLMEILKFMRCNSMTSNIKLIGGAKNAGKNRISKLIQDSDVKMIFCSPTGYFCKVVDFKRFL

SEQ ID NO: 20796 - protein, 1350 aa, unidentified; identical to SEQ ID NO: 20006
  REGION 1..1350: note = Cas Enzyme sequence

SEQ ID NO: 20797 - protein, 1352 aa, unidentified
  REGION 1..1352: note = Cas Enzyme sequence
MKQDYYIGLDMGTESVGWAVTDVDYNLVKKRGQDYWGVYLFDEAKTAQGRRAFRTNRRRLARVRHRLNLLQELFDSEISAKDFGFFYRLENSKYFDEDKPEIARGKFLLFNDKDFGDKEYYKNYPTIFHLRNALRTQEIKDVRLLYLAVHHILKNRGHFLFGEQDFNVNDASDVSGEFEKINRFLSENDGAGFDREKIPEIFETLCNENLAKRERKEKILKLAGNSKNKLLGEAVNAFVGLNFSLSKMFGEDRDFQGENKMSFTDSSFEEKLAKARMALDDDEADFLETLKKVQSVASLHNILHGKEFISEAKTEAYETHRRDLSELKKYVRENCPEKYALVFRRQVKKGKKNTSGADENEKDDKKVNNYAAYIGMDKGKGFEKCKKEDFYAFLKKEIGINDESLLAKIDEGVFLPKQISAENCDIPYQVHLAELKAILANAENYFPFLKQKDENCEMTVSEKIISLMKFRVPYYVGPFTDKETRFSWMIKKEGLSTQKITPWNFDDVVDRDASEKKFIKRMTNFCTYLTGEKVLPASSFLYSEYAFLNELNNLKVNGTKDLRVKNILFDFAKTNKKLTLKKCCEQLVKNGLLPEGSKARDVFSGTDGDFKNSLSSYIDFKRIIGDKADLYRDMCEEIISWITVISDKERLVKIIKDKYGTVLSDEEIKGLKALNYTKWGRLSAKLLDGIFETDSEGEVGSVSIIEKMRTDTENFMELLSNKHNYKRAIELVNSESIVDERVTYRAVDELYCSPAVKRSIWSALKIVSEIKKVQGHSPKKIFVETTREKPDGARKGQRTVSRKQRLLDVYRKNLRNEKELIKKIEETEDSKFNSDEDKLFFYFTQMGKDAYTGEKIELDDLSKTEIYDIDHIYPRSKIKDDSLDNRVLTRKKINQGVKQDIYPLPAEIRNKMEGLWRQLKDKKLISEEKFYRLTRSTPLTEEECGDFINAQLVATSQSAKAAIQLLKRMLPESEIVYSKAVNVNEFKNRLKFVKIRELNDLHHAKDAYFNIVVGNVFNTKFNHNAAVFLRNNGTGNYDLKRLYDFDITNAWKAGDENRIRSVAEKNTCRVVRFSKTEKGQFYKVTICPAGKNDKLAPIKGNGPLNDTSKYGGYDKETTAYFMLVKSRDKKKKDKTLLSLECVTVLADKNFRTAEDKLKYCEKELGLKEPEILIEKIKLNTLFKINGSYAWIRGRTGDRLELCNANQLWLDNGSAKELKKISNHFRDVKKYKDLPVREEEISKEQNLALYDLFTEKLGGKIYAGLSIKGQIENLEKGRDKFEALELKDQLFVLMEILKFMQCNSMTSNIKLIGGAENAGKNRISKLIQDSDVKMISCSPTGYFCKVVDFKRFL

SEQ ID NO: 20798 - protein, 1352 aa, unidentified
  REGION 1..1352: note = Cas Enzyme sequence
MKQDYYIGLDMGTESVGWAVTDVEYNLVKKRGQDYWGVYLFDEAQTAQGRRAFRTNRRRLARVRHRLNLLQELFDSEISAKDFGFFYRLENSKYFDEDKPEIARGKFLLFNDKDFGDKEYYKNYPTIFHLRNALRTQEIKDVRLLYLAVHHILKNRGHFLFGEQDFNVNDASDVSGEFEKINRFLRENDGTELDREKIPEIFETLCNVDLAKRERKEKILKLSGNSKNKLLGEAVNAVVGLEFSLSKMFGEDRDFQDIKKMSLANSSFEEDFAKAKMALDDDEADFLETLKKVQSIASLHNILHGKEFISQAKTEAYETHRRDLSELKKYVRENCPEKYALVFRRQAKKVNKNTSGADENEKDDKKVNNYAAYIGMDKGKGFAKCKKEEFYAFLKKEIGINDESLLAKIDEGIFLPKQISAENCDIPYQVHLAELKAILANAENYFPFLKQKDENCEMTVSEKIISLMKFRVPYYVGPFTDKETRFSWMIKKEGLSTQKITPWNFDDVVDRDASEQKFIERMTNFCTYLTGEKVLPASSFLYSEYAFLNELNNLKVNGTKDLRVKNILFDFAKTNKKLTLKKCCEQLVKNGLLPEGSKARDVFSGTDGDFKNSLSSYIDFKRIIGDKADLYRDMCEEIILWITIISDKERLVKIIKDKYGTVLSDEEIKGLKALNYTKWGRLSAKLLDGIFETDSEGEVGNVSIIEKMRTDTENFMELLSNKHNYKRAIELANSESIVDEKVTYRAVEELYCSPAVKRSIWSALKIVSEIKKVQGYSPKKIFVETTREKPDGARKGQRTVSRKQQLLDKYRENLRNETELIKKIEETEDSKFNSDKLFFYFTQMGKDAYTGEKIEFDDVFKTEKYDIDHIYPRSKIKDDSLDNRVLVRRKINQSVKKDSYPLSAEIRNRMEGLWRQLRDKKLISDEKFYRLTRSTPLTEKECGDFINAQLIATSQSAKAAIQLLKRMLPESEIVYSKAGNVNEFKKRLEFVKIRELNDLHHAKDAYFNIVVGNVFNTKFNHNPAVFQRSNGTGNYDFERLYDFDITNAWKKGDENRIRSVAEKNTCRVVRFSKTEKGQFYDATIYPAGKNDKLAPVKGKAPLNDTSKYGGYDKETTAYFMLVKSRDKKKKDKTLLSLECVTVLADKNFRTAEDKLKYCEKELGLKEPEILIEKIKLNTLFKINGSYAWIRGRTNDRLVLCNANQLWLDNGSAKELKKISNHFRDVKKYNNKDLPVREEEFSKEQNLALYDLFTEKLGGKIYAGLPVQGQIKNLEKGRDKFEALELKDQLFVLMEILKFMRCNSMTSNIKLIGGAENAGKNRISKLIQDSDVKMISCSPTGYFCKVVDFKRFL

SEQ ID NO: 20799 - protein, 1353 aa, unidentified
  REGION 1..1353: note = Cas Enzyme sequence
MKQDYYIGLDMGTESVGWAVTDVDYNLVKKRGQDYWGVYLFDEAKTAQGRRASRTNRRRLARVRHRLNLLQELFDSEISAKDFGFFYRLENSKYFDEDKPEIARGKFLLFNDKDFGDKEYYKNYPTIFHLRNALRTQEIKDVRLLYLAVHHILKNRGHFLFGEQDFKVNDASDVSGEFEKINRFLRENDGAELDREKIPEIFETLCNVDLAKRERKEKILKLSGNSKNKLLGEALNAVVGLEFSLSKMFGEDRDFQDIKKMSLANSSFEEDFAKAKMALDDDEADFLETLKKVQSIASLCNILHGKEFISQAKTETYETHRRDLSELKKYVRENCPEKYALVFRRQAKKVNKNTSGADENEKDDKKVNNYAAYIGMDKGKGFAKCKKEEFYAFLKKEIGIKDESILAKIDEGVFLPKQISAENCDIPYQVHLAELKAILANAENYFPFLKQKDENCEMTVSEKIISLMKFRVPYYVGPFTDKETGFSWMIKKEGLSTQKITPWNFDDVVDKDASEQKFIERMTNFCTYLTGEKVLPASSFLYSEYAFLNELNNLKVNGTKDLRVKNILLDYAKTNKKLTLKKCCEQLVKNGLLPEGSKAQDVFSGTDGDFKNSLSSYIDFKRIIGDKADLYRDMCEEIILWITVISDKKRLEKLIKSNYGTVLSDEEIKGLKALNYTKWGRLSKKLLDGIFETDSEGEVGNVSTIEKMRTDTENFMELLSNRHNYKRAIDLANSESVEDKKVTYRAVEELYCSPAVKRSIWSALKIVSEIKKVQGYSPKKIFVETTREKPDGARKGQRTVSRKQRLLDVYRKNLRNEKELIKKIEETEDSKFNSDEDKLFFYFTQMGKDAYTGEKIELDDLSKTEIYDIDHIYPRSKIKDDSLDNRVLTRKKINQGVKQDIYPLPAEIRNKMEGLWRQLKDKKLISEEKFYRLTRSTPLTEEECGDFINAQLVATSQSAKAAIQLLKRMLPESEIVYSKAVNVNEFKNRLKFVKIRELNDLHHAKDAYFNIVVGNVFNTKFNHNAAVFLRNNGTGNYDLKRLYDFDITNAWKAGDENRIRSVAEKNTCRVVRFSKTEKGQFYKVTICPAGKNDKLAPIKGKAPLNDTSKYGGYNKETTAYFMLVKSKDKKKKDKTSLSLECVTVLADKNFRTAEDKLKYCETRLKLEKPEILIEKIKLNTLFKINGSYAWIRGKTNDRLELCNANQLWLDDGSAKELKKISNHFRDVKKYKNKDLSVREEFSKEQNLALYDLFTEKLGGKIYAGLPVQEQIKNLEKGRDKFEALELKDQLFVLMEILKFMRCNSMTSNIKLIGGAENAGKNRISKLIQDSDVKMIFCSPTGYFCKVVDFKRFL

SEQ ID NO: 20800 - protein, 1352 aa, unidentified
  REGION 1..1352: note = Cas Enzyme sequence
MKQDYYIGLDMGTESVGWAVTDVDYNLIKKRGQDYWGVYLFDEAQTAQGRRAFRTNRRRLARVRHRLNLLQELFDSEISAKDFGFFYRLENSKYFDEDKPEIARGKFLLFNDKDFGDKEYYKNYPTIFHLRNALRTQEIKDVRLLYLAVHHILKNRGHFLFGEQDFNVNDASDVSGEFEKINRFLSENDGAGFDREKIPEIFETLCNENLAKRERKEKILELAGNSKNKLLGEAVNAVVGLNFSLSKMFGEDRDFQGENKMSFTDSSFEEKLAKARMALDDDEADFLETLKKVQSVASLHNILHGKEFISEAKTEAYETHRRDLSELKKYVRENCPEKYALVFRRQVKKGKKNTSGADENEKDDKKVNNYAAYIGMDKGKGFEKCKKEDFYAFLKKEIGINDESLLAKIDEGIFLPKQISAENCDIPYQVHLAELKAILANAENYFPFLKQKDENCEMTVSEKIISLMKFRVPYYVGPFTDKETRFSWMIKKEGLSTQKITPWNFDDVVDRDASEKKFIERMTNFCTYLTGEKVLPASSFLYSEYAFLNELNNLKVNGTKDLRVKNILFDFAKTNKKLTLKKCCEQLVKNGLLPEGSKARDVFSGTDGDFKNSLSSYIDFKRIIGDKADLYRDMCEKIILWITVISDKERLVKIIKDKYGTVLSDEEIKGLKALNYTKWGRLSEKLLDGIFETDSEGEVGNVSIIEKMRTDTENFMELLSNKHNYKRAIELANSESIVDERVTYRAVEELYCSPAVKRSIWSALKIVREIVKVQGHSPKKIFVETTREKPDVTRKGQRTVSRKQQLLDKYRENLRNETELIKKIEETEDSKFNSDKLFFYFTQMGKDAYTGEKIELDDLSKTEIYDIDHIYPRSKIKDDSLDNRVLTRKKINQGVKQDIYPLPAEIRNKMEGLWRQLKDKKLISEEKFYRLTRSTPLTEEECGDFINAQLVATSQSAKAAIQLLKRMLPESEIVYSKAVNVNEFKNRLKFVKIRELNDLHHAKDAYFNIVVGNVFNTKFNHNAAVFQRSNGTGNYDFERLYDFDITNAWKKGDENRIRSVAEKNTCRVVRFSKTEKGQFYDATIYPAGKNDKLAPVKGKAPLNDTSKYGGYDKETTAYFMLVKSRDKKKKDKTLLSLECVTVLADKNFRTAEDKLKYCEKELGLKEPEILIEKIKLNTLFKINGSYAWIRGRTNDRLVLCNANQLWLDNGSAKELKKISNHFRDVKKYNNKDLPVREEEFSKEQNLALYDLFTEKLGGKIYAGLPVQGQIKNLEKGRDKFEALELKDQLFVLMEILKFMQCNSMTSNIKLIGGAENAGKNRISKLIQDSDVKMIFCSPTGYFCKVVDFKRFL

SEQ ID NO: 20801 - protein, 1354 aa, unidentified
  REGION 1..1354: note = Cas Enzyme sequence
MKQDYYIGLDMGTESVGWAVTDVDYNLVKKRGQDYWGVYLFDEAKTAQGRRASRTNRRRLARVRHRLNLLQELFDSEISAKDFGFFYRLENSKYFDEDKPEIARGKFLLFNDKDFGDKEYYKNYPTIFHLRNALRTQEIKDVRLLYLAVHHILKNRGHFLFGEQDFKVNDASDVSGEFEKINRFLRENDGAELDREKIPEIFETLCNVDLAKRERKEKILKLSGNSKNKLLGEALNAVVGLEFSLSKMFGEDRDFQDIKKMSLANSSFEEDFAKAKMALDDDEADFLETLKKVQSIASLCNILHGKEFISQAKTETYETHRRDLSELKKYVRENCPEKYALVFRRQAKKVNKNTSGADENEKDDKKVNNYAAYIGMDKGKGFAKCKKEEFYAFLKKEIGIKDESILAKIDEGVFLPKQISAENCDIPYQVHLAELKAILANAENYFPFLKQKDENCEMTVSEKIISLMKFRVPYYVGPFTDKETGFSWMIKKEGLSTQKITPWNFDDVVDKDASEQKFIERMTNFCTYLTGEKVLPASSFLYSEYAFLNELNNLKVNGTKDLRVKNILLDYAKTNKKLTLKKCCEQLVKNGLLPEGSKAQDVFSGTDGDFKNSLSSYIDFKRIIGDKADLYRDMCEEIILWITVISDKKRLEKLIKSNYGTVLSDEEIKGLKALNYTKWGRLSKKLLDGIFETDSEGEVGNVSTIEKMRTDTENFMELLSNRHNYKRAIDLANSESVEDKKVTYRAVEELYCSPAVKRSIWSALKIVSEIKKVQGYSPKKIFVETTREKPDGARKGQRTVSRKQRLLDVYRKNLRNEKELIKKIEETEDSKFNSDEDKLFFYFTQMGKDAYTGEKIELDDLSKTEIYDIDHIYPRSKIKDDSLDNRVLTRKKINQGVKQDIYPLPAEIRNKMEGLWRQLKDKKLISEEKFYRLTRSTPLTEEECGDFINAQLVATSQSAKAAIQLLKRMLPESEIVYSKAVNVNEFKNRLKFVKIRELNDLHHAKDAYFNIVVGNVFNTKFNHNAAVFLRNNGTGNYDLKRLYDFDITNAWKAGDENRIRSVAEKNTCRVVRFSKTEKGQFYKVTICPAGKNDKLAPIKGKAPLNDTSKYGGYNKETTAYFMLVKSKDKKKKDKTSLSLECVTVLADKNFRTAEDKLKYCETRLKLEKPEILIEKIKLNTLFKINGSYAWIRGKTNDRLELCNANQLWLDDGSAKELKKISNHFRDVKKYKNKDLSVREEFSKEQNLALYDLFTEKLGGKIYAGLPVQEQIKNLEKGRDKFEALELKDQLFVLMEILKFMRCNSMTSNIKLIGGAKNAGKLTIDKKFIQDSDVKMISCSPTGYFCKVVDFKRFL

SEQ ID NO: 20802 - protein, 1347 aa, unidentified
  REGION 1..1347: note = Cas Enzyme sequence
MKQDYYIGLDMGTESVGWAVTDVDYNLVKKRGQDYWGVYLFDEAKTAQGRRAFRTNRRRLARVRHRLNLLQELFDSEISAKDFGFFYRLENSKYFDEDKPEIARGKFLLFNDEDFGDKEYYKNYPTIFHLRNALRTQEIKDVRLLYLAVHHILKNRGHFLFGEQDFNVNDASDVSGEFEKINRFLSENDGAGFYREKIPEIFETLCNENLAKRERKEKILELAGNSKNKLLGEAVNAVVGLNFSLSKMFGEDRDFQGENKMSFTDSSFEEKLAKARMALDDDEADFLETLKKVQSVASLHNILHGKEFISEAKTEAYETHRRDLSELKKYVRENCPEKYALVFRRQVKKGKKNTSGADENEKDDKKVNNYAAYIGMDKGKGFAKCKKEEFYAFLKKEIGIKDESILAKIDEGVFLPKQISAENCDIPYQVHLAELKAILANAENYFPFLKQKDENCEMTVSEKIISLMKFRVPYYVGPFTDKETGFSWMIKKEGLSTQKITPWNFDDVVDKDASEQKFIERMTNFCTYLTGEKVLPASSFLYSEYAFLNELNNLKVNGTKDLRVKNILFDFAKTKKKLTLKKCCEQLVKNGLLPEGSKAQDVFSGTDGDFKNSLSSYIDFKRIIGDKADLYRDMCEEIILWITVISDKKRLEKLIKSNYGTVLSDEEIKGLKALNYTKWGRLSKKLLDGIFETDSEGEVGNVSIIEKMRTDTENFMELLSNRHNYKRAIDLANSESVEDKKVTYRAVEELYCSPAVKRSIWSALKIVSEIKKVQGYSPKKIFVETTREKPDGARKGQRTVSRKQQLLDKYRENLRNETELIKKIEETEDSKFNSDKLFFYFTQMGKDAYTGEKIEFDDVFKTEKYDIDHIYPRSKIKDDSLDNRVLVRRKINQGVKQDIYPLSAEIRNRMEGLWRQLRDKKLISDEKFYRLTRSTPLTEKECGDFINAQLIATSQSAKAAIQLLKRMLPESEIVYSKAGNVNEFKKRLEFVKIRELNDLHHAKDAYFNIVVGNVFNTKFNHNPAVFQRSNGTGNYDFERLYDFDITNAWKKGDENRIRSVAEKNTCRVVRFSKTEKGQFYDATIYPAGKNDKLAPVKGKAPLNDTSKYGGYDKETTAYFMLVKSRDKKKKDKTLLSLECVTVLADKNFRTAEDKLKYCEKELGLKEPEILIEKIKLNTLFKINGSYAWIRGRTNDRLVLCNANQLWLDNGSAKELKKISNHLKYNKDLPVREEEFSKEQNLALYDLFTEKLGGKIYAGLPVQEQIKNLEKGRDKFEALELKDQLFVLMEILKFMQCNNMTSNLTLIDGKSRAGANYISKYIQDSDVKMIACSPTGYFCKVVDFKRFL

SEQ ID NO: 20803 - protein, 1352 aa, unidentified
  REGION 1..1352: note = Cas Enzyme sequence
MKQDYYIGLDMGTESVGWAVTDVDYNLVKKRGQDYWGVYLFDEAKTAQGRRAFRTNRRRLARVRHRLNLLQELFDSEISAKDFGFFYRLENSKYFDEDKPEIARGKFLLFNDEDFGDKEYYKNYPTIFHLRNALRTQEIKDVRLLYLAVHHILKNRGHFLFGEQDFNVNDASDVSGEFEKINRFLRENDGAELDREKIPEIFETLCNVDLAKRERKEKILKLSGNSKNKLLGEALNAVVGLEFSLSKMFGEDRDFQGENKMSFTDSSFEEKLAKARMALDDDEADFLETLKKVQSVASLHNILHGKEFISEAKTEAYETHRRDLSELKKYVRENCPEKYALVFRRQAKKVNKNTSGADENEKDDKKVNNYAAYIGMDKGKGFAKCKKEEFYAFLKKEIGIKDESILAKIDEGVFLPKQISAENCDIPYQVHLAELKAILANAENYFPFLKQKDENCEMTVSEKIISLMKFRVPYYVGPFTDKETRFSWMIKKEGLSTQKITPWNFDDVVDRDASEQKFIERMTNFCTYLTGEKVLPASSFLYSEYAFLNELNNLKVNGTKDLRVKNILFDFAKTNKKLTLKKCCEQLVKNGLLPEGSKARDVFSGTDGDFKNSLSSYIDFKRIIGDKADLYRDMCEEIILWITIISDKERLVKIIKDKYGTVLSDEEIKGLKALNYTKWGRLSAKLLDGIFETDSEGEVGNVSIIEKMRTDTENFMELLSNKHNYKRAIELANSESIVDEKVTYRAVEELYCSPAVKRSIWSALKIVREIVKVQGHSPKKIFVETTREKPDGARKGQRTESRKQRLLDKYRENLRNEKELIKKIEGTEDSKFNSDKLFFYFTQMGLDAYTGEKIEFDDVFKTEKYDIDHIYPRSKIKDDSLDNRVLTGKKINQGVKQDIYPLPAEIRNRMEGLWRQLKDKKLISEEKFYRLTRSTPLTEKECGDFINAQLVATSQSAKAAIQLLKRMLPESEIVYSKAGNVNEFKNRLKFVKIRELNDLHHAKDAYFNIVVGNVFNTKFNHNAAVFLRNNGTGNYDLKRLYDFDITNAWKAGDENRIRSVAEKNTCRVVRFSKTEKGQFYDATIYPAGKNDKLAPVKGKAPLNDTSKYGGYDKETTAYFMLVKSRDKKKKDKTLLSLECVTVLADKNFRTAEDKLKYCEKELGLKEPEILIEKIKLNTLFKINGSYAWIRGRTNDRLVLCNANQLWLDNGSAKELKKISNHFRDVKKYNNKDLPVREEEFSKEQNLALYDLFTEKLGGKIYAGLPVQGQIKNLEKGRDKFEALELKDQLFVLMEILKFMRCNSMTSNIKLIGGAENAGKNRISKLIQDSDVKMISCSPTGYFCKVVDFKRFL

SEQ ID NO: 20804 - protein, 1349 aa, unidentified
  REGION 1..1349: note = Cas Enzyme sequence
MKQDYYIGLDMGTESVGWAVTDVDYNLVKKRGQDYWGVYLFDEAKTAQGRRAFRTNRRRLARVRHRLNLLQELFDSEISAKDFGFFYRLENSKYFDEDKPEIARGKFLLFNDEDFGDKEYYKNYPTIFHLRNALRTQEIKDVRLLYLAVHHILKNRGHFLFGEQDFNVNDASDVSGEFEKINRFLSENDGAGFYREKIPEIFETLCNENLAKRERKEKILELAGNSKNKLLGEAVNAVVGLNFSLSKMFGEDRDFQGENKMSFTDSSFEEKLAKARMALDDDEADFLETLKKVQSVASLHNILHGKEFISEAKTEAYETHRRDLSELKKYVRENCPEKYALVFRRQVKKGKKNTSGADENEKDDKKVNNYAAYIGMDKGKGFAKCKKEEFYAFLKKEIGIKDESILAKIDEGVFLPKQISAENCDIPYQVHLAELKAILANAENYFPFLKQKDENCEMTVSEKIISLMKFRVPYYVGPFTDKETGFSWMIKKEGLSTQKITPWNFDDVVDKDASEQKFIERMTNFCTYLTGEKVLPASSFLYSEYAFLNELNNLKVNGTKDLRVKNILFDFAKTKKKLTLKKCCEQLVKNGLLPEGSKAQDVFSGTDGDFKNSLSSYIDFKRIIGDKADLYRDMCEEIILWITVISDKKRLEKLIKSNYGTVLSDEEIKGLKALNYTKWGRLSKKLLDGIFETDSEGEVGNVSIIEKMRTDTENFMELLSNRHNYKRAIDLANSESVEDKNVTYRAVEELYCSPAVKRSIWSALKIVSEIKKVQGYSPKKIFVETTREKPDGTRKGKRTVSRKQRLLDVYRKNLRNEKELIKKIEETEDSKFNSDEDKLFFYFTQMGKDAYTGEKIELDDLSKTEIYDIDHIYPRSKIKDDSLDNRVLTRKKINQGVKQDIYPLPAEIRNKMEGLWRQLKDKKLISEEKFYRLTRSTPLTEKECGDFINAQLVATSQSAKAAIQLLKRMLPESEIVYSKAGNVNEFKNRLKFVKIRELNDLHHAKDAYFNIVVGNVFNTKFNHNPAVFQRSNGTGNYDFERLYDFDITNAWKKGDENRIRSVAEKNTCRVVRFSKTEKGQFYDATIYPAGKNDKLAPVKGKAPLNDTSKYGGYDKETTAYFMLVKSRDKKKKDKTLLSLECVTVLADKNFRTAEDKLKYCEKELGLKEPEILIEKIKLNTLFKINGSYAWIRGRTNDRLVLCNANQLWLDNGSAKELKKISNHLKYNKDLPVREEEFSKEQNLALYDLFTEKLGGKIYAGLPVQGQIKNLEKGRDKFEALELKDQLFVLMEILKFMQCNNMTSNLTLIDGKSRAGANYISKYIQDSDVKMISCSPTGYFCKVVDFKRFL

SEQ ID NO: 20805 - protein, 1349 aa, unidentified
  REGION 1..1349: note = Cas Enzyme sequence
MKQDYYIGLDMGTESVGWAVTDVDYNLIKKRGQDYWGVYLFDEAKTAQGRRAFRTNRRRLARVRHRLNLLQELFDSEISAKDFGFFYRLENSKYFDEDKPEIARGKFLLFNDEDFGDKEYYKNYPTIFHLRNALRTQEIKDVRLLYLAVHHILKNRGHFLFGEQDFNVNDASDVSGEFEKINRFLSENDGAGFYREKIPEIFETLCNENLAKRERKEKILELAGNSKNKLLGEAVNAVVGLNFSLSKMFGEDRDFQGENKMSFTDSSFEEKLAKARMALDDDEADFLETLKKVQSVASLHNILHGKEFISEAKTEAYETHRRDLSELKKYVRENCPEKYALVFRRQVKKGKKNTSGADENEKDDKKVNNYAAYIGMDKGKGFAKCKKEEFYAFLKKEIGIKDESILAKIDEGVFLPKQISAENCDIPYQVHLAELKAILANAENYFPFLKQKDENCEMTVSEKIISLMKFRVPYYVGPFTDKETGFSWMIKKEGLSTQKITPWNFDDVVDKDASEQKFIERMTNFCTYLTGEKVLPASSFLYSEYAFLNELNNLKVNGTKDLRVKNILFDFAKTKKKLTLKKCCEQLVKNGLLPEGSKAQDVFSGTDGDFKNSLSSYIDFKRIIGDKADLYRDMCEEIILWITVISDKKRLEKLIKSNYGTVLSDEEIKGLKALNYTKWGRLSKKLLDGIFETDSEGEVGNVSIIEKMRTDTENFMELLSNRHNYKRAIDLANSESVEDKNVTYRAVEELYCSPAVKRSIWSALKIVSEIKKVQGYSPKKIFVETTREKPDGTRKGKRTVSRKQRLLDVYRKNLRNEKELIKKIEETEDSKFNSDEDKLFFYFTQMGKDAYTGEKIELDDLSKTEIYDIDHIYPRSKIKDDSLDNRVLTRKKINQGVKQDIYPLPAEIRNKMEGLWRQLKDKKLISEEKFYRLTRSTPLTEKECGDFINAQLVATSQSAKAAIQLLKRMLPESEIVYSKAGNVNEFKNRLKFVKIRELNDLHHAKDAYFNIVVGNVFNTKFNHNAAVFLRNNGTGNYDLKRLYDFDITNAWKKGDENRIRSVAEKNTCRVVRFSKTEKGQFYDATIYPAGKNDKLAPVKGKAPLNDTSKYGGYDKETTAYFMLVKSRDKKKKDKTLLSLECVTVLADKNFRTAEDKLKYCEKELGLKEPEILIEKIKLNTLFKINGSYAWIRGRTNDRLVLCNANQLWLDNGSAKELKKISNHLKYNKDLPVREEEFSKEQNLALYDLFTEKLGGKIYAGLPVQEQIKNLEKGRDKFEALELKDQLFVLMEILKFMQCNNMTSNLTLIDGKSRAGANYISKYIQDSDVKMISCSPTGYFCKVVDFKRFL

SEQ ID NO: 20806 - protein, 1196 aa, unidentified
  REGION 1..1196: note = Cas Enzyme sequence
MKQDYYIGLDMGTESVGWAVTDVDYNLVKKRGQDYWGVYLFDEAKTAQGRRAFRTNRRRLARVRHRLNLLQELFDSEISAKDFGFFYRLENSKYFDEDKPEIARGKFLLFNDEDFGDKEYYKNYPTIFHLRNALRTQEIKDVRLLYLAVHHILKNRGHFLFGEQDFNVNDASDVSGEFEKINRFLRENDGAELDREKIPEIFETLCNVDLAKRERKEKILKLSGNSKNKLLGEALNAVVGLEFSLSKMFGEDRDFQGENKMSFTDSSFEEKLAKARMALDDDEADFLETLKKVQSVASLHNILHGKEFISEAKTEAYETHRRDLSELKKYVRENCPEKYALVFRRQAKKVNKNTSGADENEKDDKKVNNYAAYIGMDKGKGFAKCKKEEFYAFLKKEIGIKDESILAKIDEGVFLPKQISAENCDIPYQVHLAELKAILANAENYFPFLKQKDENCEMTVSEKIISLMKFRVPYYVGPFTDKETRFSWMIKKEGLSTQKITPWNFDDVVDRDASEQKFIERMTNFCTYLTGEKVLPASSFLYSEYAFLNELNNLKVNGTKDLRVKNILFDFAKTNKKLTLKKCCEQLVKNGLLPEGSKARDVFSGTDGDFKNSLSSYIDFKRIIGDKADLYRDMCEEIILWITIISDKERLVKIIKDKYGTVLSDEEIKGLKALNYTKWGRLSAKLLDGIFETDSEGEVGNVSIIEKMRTDTENFMELLSNKHNYKRAIELANSESIVDEKVTYRAVEELYCSPAVKRSIWSALKIVREIVKVQGHSPKKIFVETTREKPDGARKGQRTESRKQRLLDKYRENLRNEKELIKKIEGTEDSKFNSDKLFFYFTQMGLDAYTGEKIEFDDVFKTEKYDIDHIYPRSKIKDDSLDNRVLTGKKINQGVKQDIYPLPAEIRNRMEGLWRQLKDKKLISEEKFYRLTRSTPLTEKECGDFINAQLVATSQSAKAAIQLLKRMLPESEIVYSKAGNVNEFKNRLKFVKIRELNDLHHAKDAYFNIVVGNVFNTKFNHNAAVFLRNNGTGNYDLKRLYDFDITNAWKAGDENRIRSVAEKNTCRVVRFSKTEKGQFYDATIYPAGKNDKLAPVKGKAPLNDTSKYGGYDKETTAYFMLVKSRDKKKKDKTLLSLECVTVLADKNFRTAEDKLKYCEKELGLKEPEILIEKIKLNTLFKINGSYAWIRGRTNDR

SEQ ID NO: 20807 - protein, 1354 aa, unidentified
  REGION 1..1354: note = Cas Enzyme sequence
MKQDYYIGLDMGTESVGWAVTDVDYNLVKKRGQDYWGVYLFDEAKTAQGRRAFRTNRRRLARVRHRLNLLQELFDSEISAKDFGFFYRLENSKYFDEDKPEIARGKFLLFNDEDFGDKEYYKNYPTIFHLRNALRTQEIKDVRLLYLAVHHILKNRGHFLFGEQDFNVNDASDVSGEFEKINRFLRENDGAELDREKIPEIFETLCNVDLAKRERKEKILKLSGNSKNKLLGEALNAVVGLEFSLSKMFGEDRDFQGENKMSFTDSSFEEKLAKARMALDDDEADFLETLKKVQSVASLHNILHGKEFISEAKTEAYETHRRDLSELKKYVRENCPEKYALVFRRQVKKGKKNTSGADENEKDDKKVNNYAAYIGMDKGKGFAKCKKEEFYAFLKKEIGIKDESILAKIDEGVFLPKQISAENCDIPYQVHLAELKAILANAENYFPFLKQKDENCEMTVSEKIISLMKFRVPYYVGPFTDKETGFSWMIKKEGLSTQKITPWNFDDVVDKDASEQKFIKRMTNFCTYLTGEKVLPASSFLYSEYAFLNELNNLKVNGTKDLRVKNILFDFAKTKKKLTLKKCCEQLVKNGLLPEGSKAQDVFSGTDGDFKNSLSSYIDFKRIIGDKADLYRDMCEEIILWITVISDKKRLEKLIKSNYGTVLSDEEIKGLKALNYTKWGRLSKKLLDGIFETDSEGEVGNVSIIEKMRTDTENFMELLSNRHNYKRAIDLANSESVEDKNVTYRAVEELYCSPAVKRSIWSALKIVSEIKKVQGYSPKKIFVETTREKPDGTRKGKRTVSRKQRLLDVYRKNLRNEKELIKKIEETEDSKFNSDEDKLFFYFTQMGKDAYTGEKIELDDLSKTEIYDIDHIYPRSKIKDDSLDNRVLTRKKINQGVKQDIYPLPAEIRNKMEGLWRQLKDKKLISEEKFYRLTRSTPLTEKECGDFINAQLVATSQSAKAAIQLLKRMLPESEIVYSKAGNVNEFKNRLKFVKIRELNDLHHAKDAYFNIVVGNVFNTKFNHNAAVFLRNNGTGNYDLKRLYDFDITNAWKAGDENRIRSVAEKNTCRVVRFSKTEKGQFYDATIYPAGKNDKLAPVKGKAPLNDTSKYGGYDKETTAYFMLVKSRDKKKKDKTLLSLECVTVLADKNFRTAEDKLKYCEKELGLKEPEILIEKIKLNTLFKINGSYAWIRGKTNDRLVLCNANQLWLDNGSAKELKKISNHFRDVKKYNNKDLPVREEEFSKEQNLALYDLFTEKLGGKIYAGLPVQGQIKNLEKGRDKFEALELKDQLFVLMEILKFMQCNNMTSNLTLIDGKSRAGANYISKYIQDSDVKMISCSPTGYFCKVVDFKRFL

SEQ ID NO: 20808 - protein, 1349 aa, unidentified
  REGION 1..1349: note = Cas Enzyme sequence
MKQDYYIGLDMGTESVGWAVTDVDYNLVKKRGQDYWGVYLFDEAKTAQGRRAFRTNRRRLARVRHRLNLLQELFDSEISAKDFGFFYRLENSKYFDEDKPEIARGKFLLFNDEDFGDKEYYKNYPTIFHLRNALRTQEIKDVRLLYLAVHHILKNRGHFLFGEQDFNVNDASDVSGEFEKINRFLRENDGAELDREKIPEIFETLCNVDLAKRERKEKILKLSGNSKNKLLGEAVNAVVGLNFSLSKMFGEDRDFQGENKMSFTDSSFEEKLAKARMALDDDEADFLETLKKVQSVASLHNILHGKEFISEAKTEAYETHRRDLSELKKYVRENCPEKYALVFRRQVKKGKKNTSGADENEKDDKKVNNYAAYIGMDKGKGFAKCKKEEFYAFLKKEIGIKDESILAKIDEGVFLPKQISAENCDIPYQVHLAELKAILANAENYFPFLKQKDENCEMTVSEKIISLMKFRVPYYVGPFTDKETGFSWMIKKEGLSTQKITPWNFDDVVDKDASEQKFIERMTNFCTYLTGEKVLPASSFLYSEYAFLNELNNLKVNGTKDLRVKNILFDFAKTNKKLTLKKCCEQLVKNGLLPEGSKAQDVFSGTDGDFKNSLSSYIDFKRIIGDKADLYRDMCEEIILWITVISDKKRLEKLIKSNYGTVLSDEEIKGLKALNYTKWGRLSKKLLDGIFETDSEGEVGNVSIIEKMRTDTENFMELLSNRHNYKRAIDLANSESVEDKNVTYRAVEELYCSPAVKRSIWSALKIVSEIKKVQGYSPKKIFVETTREKPDGTRKGKRTVSRKQRLLDVYRKNLRNEKELIKKIEETEDSKFNSDEDKLFFYFTQMGKDAYTGEKIELDDLSKTEIYDIDHIYPRSKIKDDSLDNRVLVRRKINQGVKQDIYPLPAEIRNKMEGLWRQLKDKKLISEEKFYRLTRSTPLTEKECGDFINAQLVATSQSAKAAIQLLKRMLPESEIVYSKAGNVNEFKNRLKFVKIRELNDLHHAKDAYFNIVVGNVFNTKFNHNAAVFLRNNGTGNYDLKRLYDFDITNAWKAGDENRIRSVAEKNTCRVVRFSKTEKGQFYKVTICPAGKNDKLAPIKGKAPLNDTSKYGGYDKETTAYFMLVKSRDKKKKDKTLLSLECVTVLADKNFRTAEDKLKYCEKELGLKEPEILIEKIKLNTLFKINGSYAWIRGRTNDRLVLCNANQLWLDNGSAKELKKISNHLKYNKDLPVREEEFSKEQNLALYDLFTEKLGGKIYAGLPVQEQIKNLEKGRDKFEALELKDQLFVLMEILKFMQCNNMTSNLTLIDGKSRAGANYISKYIQDSDVKMISCSPTGYFCKVVDFKRFL

SEQ ID NO: 20809 - protein, 1347 aa, unidentified
  REGION 1..1347: note = Cas Enzyme sequence
MKQDYYIGLDMGTESVGWAVTDVEYNLVKKRGQDYWGVYLFDEAKTAQGRRAFRTNRRRLARVRHRLNLLQELFDSEISAKDFGFFYRLENSKYFDEDKPEIARGKFLLFNDKDFGDKEYYKNYPTIFHLRNALRTQEIKDVRLLYLAVHHILKNRGHFLFGEQDFNVNDASDVSGEFEKINRFLRENDGTELDREKIPEIFETLCNVDLAKRERKEKILKLSGNSKNKLLGEALNAVVGLEFSLSKMFGEDRDFQDIKKMSLANSSFEEDFAKAKMALDDDEADFLETLKKVQSIASLHNILHGKEFISQAKTEAYETHRRDLSELKKYVRENCPEKYALVFRRQAKKVNKNTSGADENEKDDKKVNNYAAYIGMDKGKGFAKCKKEEFYAFLKKEIGINDESLLAKIDEGIFLPKQISAENCDIPYQVHLAELKAILANAENYFPFLKQKDENCEMTVSEKIISLMKFRVPYYVGPFTDKETRFSWMIKKEGLSTQKITPWNFDDVVDRDASEQKFIERMTNFCTYLTGEKVLPASSFLYSEYAFLNELNNLKVNGTKDLRVKNILFDFAKTNKKLTLKKCCEQLVKNGLLPEGSKARDVFSGTDGDFKNSLSSYIDFKRIIGDKADLYRDMCEEIILWITIISDKERLVKIIKDKYGTVLSDEEIKGLKALNYTKWGRLSAKLLDGIFETDSEGEVGNVSIIEKMRTDTENFMELLSNKHNYKRAIELANSESIVDEKVTYRAVEELYCSPAVKRSIWSALKIVREIVKVQGHSPKKIFVETTREKPDGARKGKRTESRKQRLLDKYRENLRNEKELIKKIEGTEDSKFNSDKLFFYFTQMGLDAYTGEKIEFDDVFKTEKYDIDHIYPRSKIKDDSLDNRVLTGKKINQGVKQDIYPLPAEIRNRMEGLWRQLKDKKLISEEKFYRLTRSTPLTEKECGDFINAQLVATSQSAKAAIQLLKRMLPESEIVYSKAGNVNEFKKRLEFVKIRELNDLHHAKDAYFNIVVGNVFNTKFNHNAAVFLRNNGTGNYDFERLYDFDITNAWKKGDENRISSVAEKNTCRVVRFSKTEKGQFYDATIYPAGKNDKLAPVKGKAPLNDTSKYGGYDKETTAYFMLVKSRDKKKKDKTLLSLECVTVLADKNFRTAEDKLKYCEKELGLKEPEILIEKIKLNTLFKINGSYAWIRGRTNDRLVLCNANQLWLDNGSAKELKKISNHLKYNKDLPVREEEFSKEQNLALYDLFTEKLGGKIYAGLPVQGQIKNLEKGRDKFEALELKDQLFVLMEILKFMQCNNMTSNLTLIDGKSRAGANYISKYIQDSDVKMISCSPTGYFCKVVDFKRFL

SEQ ID NO: 20810 - protein, 1012 aa, unidentified
  REGION 1..1012: note = Cas Enzyme sequence
LFFAVRSKRARKIRRARDENEKDDKKVNNYAAYIGMDKGKGFAKCKKEEFYAFLKKEIGIKDESILAKIDEGVFLPKQISAENCDIPYQVHLAELKAILANAENYFPFLKQKDENCEMTVSEKIISLMKFRVPYYVGPFTDKETGFSWMIKKEGLSTQKITPWNFDDVVDKDASEQKFIERMTNFCTYLTGEKVLPASSFLYSEYAFLNELNNLKVNGTKDLRVKNILLDYAKTNKKLTLKKCCEQLVKNGLLPEGSKAQDVFSGTDGDFKNSLSSYIDFKRIIGDKADLYRDMCEEIILWITVISDKKRLEKLIKSNYGTVLSDEEIKGLKALNYTKWGRLSKKLLDGIFETDSEGEVGNVSIIEKMRTDTENFMELLSNRHNYKRAIDLANSESVEDKKVTYRAVEELYCSPAVKRSIWSALKIVREIVKVQGHSPKKIFVETTREKPDGARKGQRTVSRKQQLLDKYRENLRNETELIKKIEETEDSKFNSDKLFFYFTQMGLDAYTGEKIEFDDVFKTEKYDIDHIYPRSKIKDDSLDNRVLVRRKINQSVKKDSYPLSAEIRNRMEGLWRQLRDKKLISDEKFYRLTRSTPLTEKECGDFINAQLIATSQSAKAAIQLLKRMLPESEIVYSKAGNVNEFKKRLEFVKIRELNDLHHAKDAYFNIVVGNVFNTKFNHNPAVFQRSNGTGNYDFERLYDFDITNAWKKGDENRIRSVAEKNTCRVVRFSKTEKGQFYDATIYPAGKNDKLAPVKGKGPLNDTSKYGGYDKETTAYFMLVKSKDKKKKDKILLSLECVTVLADKNFRTAEDKLKYCEKELGLKEPEILIEKIKLNTLFKINGSYAWIRGRTNDRLVLCNANQLWLDNGSAKELKKISNHFRDVKKYNNKDLPVREEEFSKEQNLALYDLFTEKLGGKIYAGLPVQGQIKNLEKGRDKFEALELKDQLFVLMEILKFMRCNSMTSNIKLIGGAENAGKNRISKLIQDSDVKMISCSPTGYFCKVVDFKRFL

SEQ ID NO: 20811 - protein, 1352 aa, unidentified
  REGION 1..1352: note = Cas Enzyme sequence
MKQDYYIGLDMGTESVGWAVTDVDYNLVKKRGQDYWGVYLFDEAQTAQGRRAFRTNRRRLARVRHRLNLLQELFDSEISAKDFGFFYRLENSKYFDEDKPEIARGKFLLFNDKDFGDKEYYKNYPTIFHLRNALRTQEIKDVRLLYLAVHHILKNRGHFLFGEQDFKVNDASDVSGEFEKINRFLRENDGAELDREKIPEIFETLCNVDLAKRERKEKILKLSGNSKNKLLGEALNAVVGLEFSLSKMFGEDRDFQGENKMSFTDSSFEEKLAKARMALDDDEADFLETLKKVQSVASLHNILHGKEFISEAKTEAYETHRRDLSELKKYVRENCPEKYALVFRRQVKKGKKNTSGADENEKVDKKVNNYAAYIGMDKGKGFAKCKKEEFYAFLKKEIGIKDESILAKIDEGVFLPKQISAENCDIPYQVHLAELKAILANAENYFPFLKQKDENCEMTVSEKIISLMKFRVPYYVGPFTDKETGFSWMIKKEGLSTQKITPWNFDDVVDKDASEQKFIERMTNFCTYLTGEKVLPASSFLYSEYAFLNELNNLKVNGTKDLRVKNILLDYAKTNKKLTLKKCCEQLVKNGLLPEGSKARDVFSGTDGDFKNSLSSYIDFKRIIGDKADLYRDMCEKIILWITVISDKERLVKIIKDKYGTVLSDEEIKGLKALNYTKWGRLSEKLLDGIFETDSEGEVGNVSIIEKMRTDTENFMELLSNKHNYKRAIELANSESIVDERVTYRAVEELYCSPAVKRSIWSALKIVREIVKVQGHSPKKIFVETTREKPDVTRKGQRTVSRKQQLLDKYRENLRNETELIKKIEETEDSKFNSDKLFFYFTQMGKDAYTGEKIEFDDVFKTEKYDIDHIYPRSKIKDDSLDNRVLVRRKINQSVKKDSYPLSAEIRNRMEGLWRQLRDKKLISDEKFYRLTRSTPLTEKECGDFINAQLIATSQSAKAAIQLLKRMLPESEIVYSKAGNVNEFKKRLEFVKIRELNDLHHAKDAYFNIVVGNVFNTKFNHNPAVFQRSNGTGNYDFERLYDFDITNAWKKGDENRIRSVAEKNTCRVVRFSKTEKGQFYDATIYPAGKNDKLAPVKGKAPLNDTSKYGGYDKETTAYFMLVKSRDKKKKDKTLLSLECVTVLADKNFRTAEDKLKYCEKELGLKEPEILIEKIKLNTLFKINGSYAWIRGRTNDRLVLCNANQLWLDNGSAKELKKISNHFRDVKKYNNKDLPVREEEFSKEQNLALYDLFTEKLGGKIYAGLPVQGQIKNLEKGRDKFEALELKDQLFVLMEILKFMQCNSMTSNIKLIGGAENAGKNRISKLIQDSDVKMIFCSPTGYFCKVVDFKRFL

SEQ ID NO: 20812 - protein, 1354 aa, unidentified
  REGION 1..1354: note = Cas Enzyme sequence
MKQDYYIGLDMGTESVGWAVTDVDYNLIKKRGQDYWGVYLFDEAQTAQGRRAFRTNRRRLARVRHRLNLLQELFDSEISAKDFGFFYRLENSKYFDEDKPEIARGKFLLFNDKDFGDKEYYKNYPTIFHLRNALRTQEIKDVRLLYLAVHHILKNRGHFLFGEQDFNVNDASDVSGEFEKINRFLRENDGAELDREKIPEIFETLCNVDLAKRERKEKILKLSGNSKNKLLGEALNAVVGLEFSLSKMFGEDRDFQGENKMSFTDSSFEEKLAKARMALDDDEADFLETLKKVQSVASLHNILHGKEFISEAKTEAYETHRRDLSELKKYVRENCPEKYALVFRRQVKKGKKNTSGADENEKDDKKVNNYAAYIGMDKGKGFAKCKKEEFYAFLKKEIGIKDESILAKIDEGVFLPKQISAENCDIPYQVHLAELKAILANAENYFPFLKQKDENCEMTVSEKIISLMKFRVPYYVGPFTDKETGFSWMIKKEGLSTQKITPWNFDDVVDKDASEQKFIERMTNFCTYLTGEKVLPASSFLYSEYAFLNELNNLKVNGTKDLRVKNILFDFAKTKKKLTLKKCCEQLVKNGLLPEGSKAQDVFSGTDGDFKNSLSSYIDFKRIIGDKADLYRDMCEEIILWITVISDKKRLEKLIKSNYGTVLSDEEIKGLKALNYTKWGRLSKKLLDGIFETDSEGEVGNVSIIEKMRTDTENFMELLSNRHNYKRAIDLANSESVEDKNVTYRAVEELYCSPAVKRSIWSALKIVSEIKKVQGYSPKKIFVETTREKPDGTRKGKRTVSRKQRLLDVYRKNLRNEKELIKKIEETEDSKFNSDEDKLFFYFTQMGKDAYTGEKIELDDLSKTEIYDIDHIYPRSKIKDDSLDNRVLTRKKINQGVKQDIYPLPAEIRNKMEGLWRQLKDKKLISEEKFYRLTRSTPLTEKECGDFINAQLVATSQSAKAAIQLLKRMLPESEIVYSKAGNVNEFKNRLKFVKIRELNDLHHAKDAYFNIVVGNVFNTKFNHNAAVFLRNNGTGNYDLKRLYDFDITNAWKAGDENRIRSVAEKNTCRVVRFSKTEKGQFYDATIYPAGKNDKLAPVKGKAPLNDTSKYGGYDKETTAYFMLVKSRDKKKKDKTLLSLECVTVLADKNFRTAEDKLKYCEKELGLKEPEILIEKIKLNTLFKINGSYAWIRGRTNDRLVLCNANQLWLDNGSAKELKKISNHFRDVKKYNNKDLPVREEEFSKEQNLALYDLFTEKLGGKIYAGLPVQGQIKNLEKGRDKFEALELKDQLFVLMEILKFMRCNSMTSNIKLIGGAENAGKNRISKLIQDSDVKMISCSPTGYFCKVVDFKRFL

SEQ ID NO: 20813 - protein, 1349 aa, unidentified
  REGION 1..1349: note = Cas Enzyme sequence
MKQDYYIGLDMGTESVGWAVTDVDYNLVKKRGQDYWGVYLFDEAKTAQGRRAFRTNRRRLARVRHRLNLLQELFDSEISAKDFGFFYRLENSKYFDEDKPEIARGKFLLFNDEDFGDKEYYKNYPTIFHLRNALRTQEIKDVRLLYLAVHHILKNRGHFLFGEQDFNVNDASDVSGEFEKINRFLRENDGAGFYREKIPEIFETLCNENLAKRERKEKILELAGNSKNKLLGEALNAVVGLNFSLSKMFGEDRDFQGENKMSFTDSSFEEKLAKARMALDDDEADFLETLKKVQSVASLHNILHGKEFISEAKTEAYETHRRDLSELKKYVRENCPEKYALVFRRQVKKGKKNTSGADENEKDDKKVNNYAAYIGMDKGKGFAKCKKEEFYAFLKKEIGIKDESILAKIDEGVFLPKQISAENCDIPYQVHLAELKAILANAENYFPFLKQKDENCEMTVSEKIISLMKFRVPYYVGPFTDKETGFSWMIKKEGLSTQKITPWNFDDVVDKDASEQKFIERMTNFCTYLTGEKVLPASSFLYSEYAFLNELNNLKVNGTKDLRVKNILFDFAKTKKKLTLKKCCEQLVKNGLLPEGSKAQDVFSGTDGDFKNSLSSYIDFKRIIGDKADLYRDMCEEIILWITVISDKKRLEKLIKSNYGTVLSDEEIKGLKALNYTKWGRLSKKLLDGIFETDSEGEVGNVSIIEKMRTDTENFMELLSNKHNYKRAIELANSESIVDEKVTYRAVEELYCSPAVKRSIWSALKIVSEIKKVQGYSPKKIFVETTREKPDGTRKGKRTVSRKQRLLDVYRKNLRNEKELIKKIEETEDSKFNSDEDKLFFYFTQMGKDAYTGEKIELDDLSKTEIYDIDHIYPRSKIKDDSLDNRVLTRKKINQGVKQDIYPLPAEIRNKMEGLWRQLKDKKLISEEKFYRLTRSTPLTEKECGDFINAQLVATSQSAKAAIQLLKRMLPESEIVYSKAGNVNEFKNRLKFVKIRELNDLHHAKDAYFNIVVGNVFNTKFNHNAAVFLRNNGTGNYDLKRLYDFDITNAWKKGDENRIRSVAEKNTCRVVRFSKTEKGQFYDATIYPAGKNDKLAPVKGKAPLNDTSKYGGYDKETTAYFMLVKSRDKKKKDKTLLSLECVTVLADKNFRTAEDKLKYCEKELGLKEPEILIEKIKLNTLFKINGSYAWIRGRTNDRLVLCNANQLWLDNGSAKELKKISNHLKYNKDLPVREEEFSKEQNLALYDLFTEKLGGKIYAGLPVQGQIKNLEKGRDKFEALELKDQLFVLMEILKFMQCNNMTSNLTLIDGKSRAGANYISKYIQDSDVKMISCSPTGYFCKVVDFKRFL

SEQ ID NO: 20814 - protein, 1079 aa, unidentified
  REGION 1..1079: note = Cas Enzyme sequence
  REGION 463..466: note = misc_feature - Xaa can be any naturally occurring amino acid
MALDDDEADFLETLKKVQSVASLHNILHGKEFISEAKTEAYETHRRDLSELKKYVRENCPEKYALVFRRQVKKGKKNTSGADENEKVDKKVNNYAAYIGMDKGKGFEKCKKEDFYAFLKKEIGINDESLLAKIDEGIFLPKQISAENCDIPYQVHLAELKAILANAENYFPFLKQKDENCEMTVSEKIISLMKFRVPYYVGPFTDKETRFSWMIKKEGLSTQKITPWNFDDVVDRDASEKKFIERMTNFCTYLTGEKVLPASSFLYSEYAFLNELNNLKVNGTKDLRVKNILFDFAKTNKKLTLKKCCEQLVKNGLLPEGSKARDVFSGTDGDFKNSLSSYIDFKRIIGDKADLYRDMCEKIILWITVISDKERLVKIIKDKYGTVLSDEEIKGLKALNYTKWGRLSEKLLDGIFETDSEGEVGNVSIIEKMRTDTENFMELLSNKHNYKRAIELANSESIVXXXXERVTYRAVEELYCSPAVKRSIWSALKIVREIVKVQGHSPKKIFVETTREKPDVTRKGQRTVSRKQQLLDKYRENLRNETELIKKIEETEDSKFNSDKLFFYFTQMGKDAYTGEKIEFDDVFKTEKYDIDHIYPRSKIKDDSLDNRVLVRRKINQSVKKDSYPLSAEIRNRMEGLWRQLRDKKLISDEKFYRLTRSTPLTEKECGDFINAQLIATSQSAKAAIQLLKRMLPESEIVYSKAGNVNEFKKRLEFVKIRELNDLHHAKDAYFNIVVGNVFNTKFNHNPAVFQRSNGTGNYDFERLYDFDITNAWKKGDENRIRSVAEKNTCRVVRFSKTEKGQFYDATIYPAGKNDKLAPVKGKAPLNDTSKYGGYDKETTAYFMLVKSRDKKKKDKTLLSLECVTVLADKNFRTAEDKLKYCEKELGLKEPEILIEKIKLNTLFKINGSYAWIRGRTNDRLVLCNANQLWLDNGSAKELKKISNHFRDVKKYNNKDLPVREEEFSKEQNLALYDLFTEKLGGKIYAGLPVQGQIKNLEKGRDKFEALELKDQLFVLMEILKFMQCNSMTSNIKLIGGAENAGKNRISKLIQDSDVKMIFCSPTGYFCKVVDFKRFL

SEQ ID NO: 20815 - protein, 1349 aa, unidentified
  REGION 1..1349: note = Cas Enzyme sequence
MVVNHLSDYIIKHFKGIVNMKEEYFVGLDIGTDSVGWAATDKNYKLLKARGQDMWGSYLFDTAETAAQRRNFRASRRRLVRVRHRLSLLQSLFSEEINKIDPTFFIRLNDSKLLPEDKDERISVRYVLFGDANYTDKNYFKDYPTIFHLRNALRENEIRDIRLLYLAIHHIIKHRGHFLFEGQRINVNSSEIVKNSINHINTFLYERDSATLDLQNIDECLNIIKNRSIDKKSKQKQLKELFSAGSDKQLNTIIAAMTGGKVGINELYKIDADNPFKFSFEEANFEENILPKIQTQIEDDEIELILKAKSVYDWSLLSSILHGHSFISQAKIEIYDKHRNDLMLLKKYVKENCPEKYGLVFRHKKDVDNYAAYAGMDKHRGYKKTTKEKFYQFLKKTIDFEDSAILKEIESGTFLPKQITNANGVIPYQVNLAELEAILENAKKYFPFLIGSDNSLTVADKIKALMTFRIPYYVGPLNTSSRYAWAVRNRGAEKTSVTPWNFDEIIDKDASEEKFIARMTTKCTYLPSEDVLPANSLLYKKFVFLNELNNLTVFEEKNERVRNIAKKYAETHRKITVESLLKTLIKEGIVPAGTNKTDVFGGIDGDFKSNLSSYYDLKRIINAKVDTESEMCEEIIKWITLISDKNRLYARIKKTYSSKLSEAEIKSICALNYSGWGRLSKKLLTGITSTRFCDPSTGEMLNIIDAMDISGKNLMQLLSNELGYVDAIKEYNSEFNMDERVTYSTINNLYCSPSVKRAIWRTITLVREIIKIQGAPPKKIAIEMSRGATEQQKNRRTIPRKQQLLNLYKSIKDEARDWSREIAAISDEKFNSDKVFLYYLQMGRCMYTGQPIFFNDLFVKNTYDIDHIYPQAKIKDDSLDNRVLVNKQDNASKTDVYPIDQAVRAKMLPFWKILKGKGLLASTKYARLVRNAPLSIEEMADFIQRQLVETRQSTKLVASILKSMYPSTEIVYSKARNAADFKNELELVKVRELNNLHHAKDAYINIVVGNVLTSKYGNNPIVFFRSRNEKDYNIRKPFSKDIPGAWSVSMKNDIIHTYNKNTCSVVRFSSEESGALFNATIKSAGENDNLIPLKASGPIANTDKYGGYDSATTAYFALVKSEGKKRLPLLSLECVPVYIEKIIGGDKTELTKYFAEKQGLVNPEIIIDKIKINTLFKINGSYAYLRGRTGNRVVWCNANELILDLKSTKYLKHITSYFDGIKKLGKEIPVDPIYDKITAEENIMLYNTLLEKLSSKTYSGLPSSRQHDFLSSKTDAFAALNLTDQCKIIIQVLKLMQTNSALSDFRLLNGVANAGANFTSKYIQDLDLQIIYRSPTGYYTKILDVNKLK

SEQ ID NO: 20816 - protein, 1382 aa, unidentified
  REGION 1..1382: note = Cas Enzyme sequence
LITPYRNGTIKKGKNVYSVLSPRVRRRRPADFTIITKFFYGGYGKMNERDYFIGLDAGTDSIGWAVTDEQYRLQKARGQDMWGSYLFDPADTAEKRRGFRTARRRLARTHQRLMLLQKLFAEETEKVDPTFFIRLNDSKLFAEDKDGRIKTKYVLFGDENYNDKDYFKEYPTIFHLRSALIDGEIKDVRLLYLAVHHIIKNRGHFLFEGQSFNAGSADTAKSALSAINAFFGDREYQTLDLENADECLNIIKETNAKKTEKLKKLKELFVTGADKRLIAVVYGFIGGTINLNALYDAEEEYDVKKFSFDSDSFDDTVLPQIEKAVGNDEAELVRQMKAVYDWSVLSNIMRDRQYISQAKTDIYDKHKADLKLLKDYLRNNCSDETYKRVFRHNDKDKNYAAYIGMDKHKGYAKATRDDFYKFLKTLGISDEKIQKEIENKTFLPKQITNSNGIIPYQVNLSELKAILANAEKYFPFLKNESDGLTVSEKIISLMTFRIPYYVGPLYVNSDETKRKVPWAVRKEGTERVSVTPWNFDKVIDKDLSEEKFIQNMTCKCTYIPTEDVLPAASFLYGEYKFLNELNNLTVFGQKNEQARQAIIEYAKTHKKLSLKNLAALLATDGIIPSGTKPEDVFAGVDGDLKNNLASYIDFRRIIGTKADTESEMCEEIIKWITVVSDKKRLHDRIKRVYGEKLTEDEIKGLSYLKYKDWGRLSKKFLTEIYSEKFIVGETGEMPNIIDAMRISGKNLMQLLSDECGYADAVKKYNEENSEKASVTYNTVEELYCSPSVKRAIWRTVTLVREIVKIRGKAPKKIFIEMARGATEEQKHKRTVPRKEQILQLYKNIKDESRDWITEIENTEDGKFNKDAVFLYYTQMGKCMYTGENIAFGDLFDTNIYDIDHIYPQSKVKDDSLTNRVLVKKQVNAQKTDVYPVPDTIRRDMTGFWGILKKNNLINDEKFKRLTRGTPLSSEELADFIARQIVETQQSTKAAAKILHDMLPDTTIVYTKAKNAAEFKNDNKLLKIRDLNDFHHAKDAYVNIVVGNVLTTKYGRNIQEISMRRPEDYNIKNPYAKSVGGAWDTSYLDAVKRTYNKNTCTVVRFCGEGTGGLFNATIKTAGANDSLIPLKASGKISDTSKYGGYDSATTAYFMLVKSVGKKGKTLLSLECVTIYVDKLIRGDREKLTEFCVAKLGLVNPEIVIEKIKINTLFRINGSYAYIRGKTLKQILWCNANELILDAKNTEYLKHITSYFDGLKKIGREDICVDEKYDKIDAESNLVLYDALIEKLSSKVYAGLSLAGQKEFLIGNRTKFAALPLTNQCKVIKEILAFMQCNSVTSDLSLLDGVKNAGKILTSKFIQDYDIDIIYRSPTGYYTTVIDVNNLK

SEQ ID NO: 20817 - protein, 1327 aa, unidentified
  REGION 1..1327: note = Cas Enzyme sequence
MGKNYYIGIDMGTDSVGWAVTDEEYRLLKSKGRDLWGSYLFEEAQAAAQRRSFRTARRRTARTRQRLLLLQSLFAEEMAKVDPLFFLRLNNSSLFLQDKDGKLRCSDALFGDSSYRDKDYFAEYPTIYHLRAALLQGEVKDIRLLYLAIHHIIKNRGHFLFESQSFSVGDAQTVRDKFTAINAFLSDREMPTLELSALSEGLEVLRNSRIGKRDKQLRLKDIFKTGGEKSLIALVKALTGGSVNLKELYCAEESFADVSVFSFEKASFDETDLPAIENAVGQEEAELVLLLKSVYDWSVLCAIMGEEQFISRAKKRIYEKHKADLCRLKEYIRKNCPKKYADVFRRREKKSNYAAYIGMDKQKGCAKCKRGDFYAFLKKEIKIEDEYILTEIEKGEFLPKQVSDANGVIPYQIHLLELKAILANAAGKFPFLTDERDGSTVAEKIISLMTFRIPYYVGPLHTQSPFAWAVRKSGYERTSVTPWNFDSVIDADASEEQFIRRMTNKCTYLAGQDVLPANSLLYSEFTFLNELNNLRVNGVKNDAARKLIYEYAKQHKKVTLKNCLALLIREGLLPVGSRAEETFSGIDGDFKTSLAPWYDLRFLGNKIETHREMCEEIIIWITLISDKERLEKRIRRAYGTILSDEEIKRFKGLNYSKWGRLSAVLLDGIVSPRCADENGEPLTIIRAMRATGENFMQLLSAKYGYQEAIDAYNAENAPRGKVTYKTVEDLYCSPSVKRAIWRTVELVREIAKICGGAPKKLFIETVREVNDDRRGQRTVSRKQQLIDLYKNIKKEERDWIAEIENTADKKFDSDRLVLYYRQLGRSMYSQKPIRLEDVFDTNICDIDHIYPQSKIKDDSLDNRVLVFKTENTAKGDRYPLSADVREKMISFWRELKDRALIGEKKFERLTRTTALTQEELADFINRQLVSTSQSTKAAAQILGEIFPDTEIVYAKAGNANRFKDENKIVKVRELNDLHHAKDAYVNIVVGNVYNTKFNHNAAVYFRDHGVDSYNLKNLFTHDIPGAWKVSEKERILQTVAKNTCRVVRMTENGKGALFNVQPKSAGKNADLIPLKICGAISDTSKYGGYDSATTAYFMLVRSKGKKGKVALSLEAYPLWLDKRSSAKEDKLKFCTERIGLKDPEIIFDNIKLNTLFCIDGSYAWLRGITGKQLIWRNANELFLDEESMRTLKNISNYMRDRKRLNKPDLRAGDKITAEGNIRLYDALVEKLGSSVYAGLSVKGQEPFLRGKREAFAELSREDQCKIIFEVLHLMQCNSVLSDFSSLGGVAHAGKNFSNKFVQDMDIKMIFQSPTGYYRRVVDLKEFV

SEQ ID NO: 20818 - protein, 1349 aa, unidentified
  REGION 1..1349: note = Cas Enzyme sequence
MRENYYVGLDIGTDSVGWAVTDRQYNLLRAKGKDMWGAYLFDPAKTAAERRGYRTARRRTARVRQRIKLLQELFAPEVYAVDPAFFIRMEQSKFVETDKTIEGKDAIFHDEAFGDKEFYKKFPTIYHLRAAFLDPQQARGITDVRLLYLAIHHIIKNRGHFLFEGQNITAGDTDLLKTSLSAINAYFSDDDLSEDNKHTLPLDKYAEIADVLKNRKTGKNAREAQLKKICDVDKADKTALAVIRCIVGKKVDLKDLFGENHSVAKEKLCFDDTDFDKNYETLQLQLNDEEAAFVDAMKAVYDWAMLAEVLNGNTYLSLAMIERYRIHAEHLKMLKSYIKSECPERYAQTFRRNSSNNYAAYVGSDRGRDFKHCTREDFYKYLRSFVKDEQILQLIERGEFLPKLRTSVNGVIPYQVHRAELVTILKNAEDNFPFLKEEQDGFTVAQKIIKLLEFRIPYYVGPLSSAHESKNPKKGFYWAVKNPGFERTKITPWNFDKIIDRDASEDKFISRMTNKCTYLLGEDVLPKSSLLYSEFTFRNELNNLCFKDNRLSEKAREEIFKYATEHKRVTLSGIGKLLEEKNLIECGEGKPENFSGTDGDFHSSLSSLITIKRVLGENFDRDMAEQIILWATLTPDKDRLVRRVKNHYSLPDDVLKKIKGLSFSGWGRLSEKFLTDIWAADDDGVRTNIIEAMKSTGANLMELLSAKYGFSDAIKEFNADLNPSPNVEYSDVDELYCSPSVKRAIWRTICLVREIEKINGCPPKRIFVEMARGATKEQKGKRTTSRKEQIKALFKDIHDNERDWVAEIESQPDNLFSSDKMFMYYMQMGKCAYSGENIPLTDVFNTNLYDIDHIYPQSKIKDDSLDNRVLCKKEYNQDIKKDVYPVSKEIRDKMRDIWAVWLDKKLISKEKYKRLTRSTPLTEAELSDFIDRQLVETRQSTKAVATLLKRMYPDSEIVYSKAGNVADFKEKVNNDYKKHDKPELSIVKIRELNDLHHAKDAYLNIVVGNVYFTKFNRNAAIFFKKNNIDSYNLKNLFNYDLPGAWKVSEKERILQTARKNTCRVVQFVSEERGQLFNDNISPQDTVTKGFVPIKANGPISDMYKYGGYTKVARAYFSLVLSSGNKGKQTITLEVIPIYIDLLGENAVNDYIRRVTGDKNATRLIDKIKMNSLLKIDSTYCYLIGKADERRVLLCNANQFIISDEDAAYLKKISRFCEKNKKAEGKLTADEQHDGLTKDKNLEFYRMLVKRLEEKPYCLLPMPDSTTLLKSKENVFVMLNIEEQCSVIMEIMHFFQCNSVESDLTLLDGKKTGMVRRSKTIDPDEEILLIYQSPTGFYQKTVSLTGFYKA

SEQ ID NO: 20819 - protein, 1332 aa, unidentified
  REGION 1..1332: note = Cas Enzyme sequence
MEKKDYYIGLDMGTESIGWAVTDKDYNLLKARGRDMWGSFLFEEAKTAEERRKNRNSRRRLARVHYRLMLLQMLFKEEIEKKDQTFFLRLNDSKLMEDDKDKNIKTKYVLFGDLKYTDKEYYKKFPTIFHLRDYLTKNKTEDIRFIYLALHHIIKNRGHFLFEGQEFNFSENEIVRNIFSEINTLLSEQDSKAFSFEKLEEALDVIKDSKVNKKDKQKKLKTLFVSDNDIRLNAIICAITGGTVKIKDLFMLDEDLEGVSKFSFESSDFIEKTFPEIENTVGVDNAELILKIKAIYDWSVLCNILKGKKYISEAKIEIYNKHKYDLYKLKNYIRKNMPEKYSYVFRYKKGINNYAAYVGMDKQKGFSKCLKEDFYAFLKNTLKITETSILSEIESGSFMPKQISNANGVIPYQVNLAELKAILSIAEQSFSFLKERENGITVSEKIIALMTFRVPYYVGPLNTSNKKFAWVVKRDGQERTKITPWNFEDIIDRDASEEAFITRMTSKCTYLPTEDVLPASSFLYSEFIFLNELNNLKINGEKNENVRQIIFEYAKSHKRLTLNNIYKLLIKEGVLTTDSKKENVFSGIDGDFKMSLSSYIDFKNIIGEKVDSEQEMCEEIIKWITLVSDKNRLVARIKNKYGRILSDEEINRIKSMNYSQWGKLSKALLTDIKRVDQETGELASIIQAMRNTENNFMQLLSYKYDYIKEIQNYNSQFSSSRIVTYKTIEDLYCSPSVKRSIWRSICLIKEIIKIEDSAPIKIFIEMARGSKENQKGKRTLSRQQQLIDLYRNIKDEKHDWISEINETEAGKFNSDKVILYYRQMGRCMYTGEPITFSSLFDTNVYDIDHIYPQSKIKDDSLDNRVLVTKESNLIKIDIYPISVDVRNKMRSFWNILHSNHLISDEKYYRLTRNSQLTQDELADFINRQLVETRQSTKAVAEIFKTMLPDTEIVYAKAKNADDFKNTNGIIKVRELNNLHHAKDAYINIVVGNIYNTKFGHNAAIYFKNNNLKKFDLRKLYSQEVKGAWIPSEKDRILAIAKKNTCIINRFTNEGTGMLFNATIKTAGANDKLIPLKSKGAISNTLKYGGYDSATTAYFMLVKCKGKKGEQLLSLECIPIYLDRILNIDTQKLIDFCIEKLELSEPEILISKIKLNTLFNIDGSYAYIRGRTGKQLIWCNANELFIDEENIKYLKKITGYFDSMKKLNKKEMPISEKYDGITKQQNNRLYLVLKDKLSSDIYKGLSIANQSKFLEEKKSVFEELSIENQCRVLIEVLHFMQCNSVTSDVSLIGGGNNAGKILTSKFIHDKDIKMIYSSPTGYYKQIIDIKKYL

SEQ ID NO: 20820 - protein, 1355 aa, unidentified
  REGION 1..1355: note = Cas Enzyme sequence
MVLFRTVVNRSSTFIINNTREDVNRKMKNYYVGIDMGTNSVGWAATDCEYHLLKARGQDLWGSYLFDEAEGAQKRRSFRTARRRTARTRQRLLLLQSLFQEEMAKKDPLFFIRLNNSPLVLKDKNESLKTSDSLFADQSFTDKNYFKKYPTIYHLRASLINDKVTDVRLLYLAVHHIIKNRGHFLFESQNFNVANEEVVKDKFFAINAFLSDREMPTLNLERLHEVLQVLKQTKSSKRDKQKTLGELLGVSKEKPLTSIVKALIGGTVSLKDLYSAESDFDDIKSFCFDKASFEDSDLPAIKSAVGEDDAELVLLLKSVYDWTVLCGIMGDEEYISFAKVKIYNKHKSDLVWLKNYVRQNFSKETYNEVFRRKDKKNNYAAYIGMDKQKGFSKCKQEDFYAFLKKRLNITDETVLAEMDKGQFLPKQVIKTNGVVPYQLHLLELKAILRNAQKYFSFLSEKQEGVTVAEKIVSLMTFRIPYYVGPLNTASKKYAWAVRRPGYENVSITPWNFHQIVDSDASEEQFIRRMTNKCTYLVGQDVLPANSLLYSEYVFLNELNNLRINGEKNNKARQLIFHYAKQHKRVTLKNCLALLVRNGLLPADSSTDVFSGLDGDFKTSLSTWYDFRFLGDRLQTQREMCEQIILWITLISDKNRLEKRIRTAYGQYLSDEEIKRIKGFNYSKWGRLSKILLDGIVSERCFDENGELLTIIEAMRQKGENFMQLLSDKYGFQDAIERYNQENSPSDDKVSYQTVEDLYCSPSVKRAIWRTVEIVREIVKIQGCAPQKLFLETARETKDNGKAGKRTVSRKQQLLDLYKDIHLQQHDWIKEIESLPDSKFNSDRLVLYYRQLGRSMYSGKPIKLEEVFDRNICDIDHIYPQSKIKDDSLDNRVLVYKDENSVKSDKYPISSEVRNAMRPFWQSLWVQGLISERKYQRLIRSTPLTVDELADFINRQLVITRQSTKATAQILKQMLPDTEIVYTKAANANEFKDKNNLLKVRELNDLHHAKDAYINIVVGNVYNTKFNHNAAVFFRNNSIDSYNFNKLYESDIPGAWRVAQKADVLATFQKNTCKVVRMTVNGHGALFDVNPVVAGKNADLVPLKKHGAIADTSRYGGYNSAKTAYFVLVRSDGKAGKQLLSLEQWPLWMEKQTGGSTEAKLNYFSQKLTNPQICIDRIKQNTLLCVNGSYAWLKGKTGNAISLCNANQLFLDGENVQTLKLISNYMRDRKTFNNPQMPANEKITAENNLRLYDALVQKLSSSLYAGLAICGQVPFLKEKRPVFASLSVEKQCCVLWEVLRLMQCNVGLSDFTLLGGVANAGVTTINKFIQDKNIKLIFQSPTGYYRTVVDVGRFLK

SEQ ID NO: 20821 - protein, 1361 aa, unidentified
  REGION 1..1361: note = Cas Enzyme sequence
MIKQEYYLGLDCGTDSIGYAVTDEAYALLKSKGEPMIGVMTFDEPYSAQERRANRTGRRRLHRRQQRVQLLQELFAPAIAARDPGFFQRLRESALWRQDVTTSATGGVFFNDDDFTDREYHRMYPTIHHLICELMESEAPHDVRLVYLACAWLVAHRGHFLSAISEDNLESATDIRGVYADFMNWFETEKPWECDAEAFGSVLKARVRIRDKEAQLNELLFNGAKNPPVLAFDAEDPDAPVLSRAAMVKLLSGGKVKASDLFLHRAEEYAEVGSISLGGKEEDLAMALSRLGEDAELVLRLKALFDWAVLADILRNEPYISRAKVLVYDRHREDLARLKAFIRKYLPARYDEVFNASGGVNYAAYSRHAPTGGTAPKYVSKEDFCDYLRKLVAGVSVEEEDLPAYEDMTARLEACAFLPKQRDRDNRVIPYQLYAYELRMILARAERYLPFLAQRDADGLSVSDKIISIFKFRIPYYVGPLNQNSSYAWLERKAERIYPWNFEKIVDLDASEDAFIRRMTGRCTYLPAEYVLPKNALCYARFNVLNEINLLKINAVPITVAQKQAIYTQLFERRSRVTFRALQSFCIAEGYMNPGDTISGIDKEGIKSSLRPQQAFARLLRRGDLTEAQAEQIVERITCTEERPRLHRWLCRTFPQLAAEDIDYLSRLKFSDSGRLSRRFLCELEGMCRETGEVFTVLEAMWETNCTLMELLSDRFTFAERVREEAQAYYAEHPRTLEARMDDLYLSNGARRPIYRTLEIVKDVVHAAGGPPKKIFVEMARGGTADQKGKRTKSRKEQIREYYKRFAREEVRDLLSLLDARDENELQSEKLYLYFMQLGRCMYSGEPIDLQHLSDRKFYDVDHIFPQCRVKDDSVLNNKVLCLSVLNGQKGDVYPIAPEIRQRMGGFWAALHGKGLITDEKYRRLTRTTPFTDEELMGFIQRQLVETRQSTKAIATILKERYPDTQIVYVKAGLVSEFRQEFGMLKSRILNDLHHAKDAYLNIVVGNVYYERFNKNYFRLNETYSMKTRELFTHSVWSGGARVWRGGADIGLVREVVSRNHIHVTRFAFCRRGALFDQQPLRAQPDGGDLIPRKANLPVERYGGYRKPTATFFALARFTAGRKRELMVVPIDLMAEADFRRDDACALAVVRAAIEKIVGKPVDAVELPLGMRVLKVNTVFSLDGFRVALSGKASGGKLLLISPLMPLWLDARWERYVKRIESFQNKRSKRPGLSLQPAFDRLTPEENLLLYDLLRGKLAAWPYSKRPGTEAMRRTLEERREAFSALPPEAQVALLAALLGAFGRSGQGVDLTPIGGVSKAGVPTLSSALSNWKKLYADVRIVDPSPAGLFERASVNLLTLL

SEQ ID NO: 20822 - protein, 1361 aa, unidentified
  REGION 1..1361: note = Cas Enzyme sequence
MIKQEYYLGLDCGTDSIGYAVTDEAYALLKNKGEPMIGVMTFDEPYSAQERRANRTGRRRLHRRQQRVQLLQELFAPAIAARDPGFFQRLRESALWRQDVTTSATGGVFFNDDDFTDREYHRMYPTIHHLICELMESEAPHDVRLVYLACAWLVAHRGHFLSAISEDNLESATDIRGVYADFMNWFEAEKPWECDAEAFGSVLKARVRIRDKEAQLNELLFNGAKNPPVLAFDAEDPDAPVLSRAAMVKLLSGGKVKASDLFLHRAEEYAEVGSISLGGKEEDLAMALSRLGEDAELVLRLKALFDWAVLADILRNEPYISRAKVLVYDRHREDLARLKAFIRKYLPARYDEVFNASGGVNYAAYSRHAPTGGTAPKYVSKEDFCDYLRKLVAGVSVEEEDLPAYEDMMARLEACAFLPKQRDRDNRVIPYQLYAYELRMILARAERYLPFLAQRDADGLSVSDKIISIFKFRIPYYVGPLNQNSSYAWLERKAERIYPWNFEKIVDLDASEDAFIRRMTGRCTYLPAEYVLPKNALCYARFNVLNEINLLKINSVPITVAQKQAIYTQLFERRTRVTFKALQSFCIAEGYMNPGDTISGIDKEGIKSSLRPQQAFARLLRRGDLTEAQAEQIVERITCTEERPRLHRWLCRTFPQLAAEDIDYLSRLKFSDFGRLSRRFLCELEGMCRETGEVFTVLEAMWETNCTLMELLSDRFTFAERVREEAQAYYAEHPRTLEARMDDLYLSNGARRPIYRTLEIVKDVVHAAGGPPKKIFVEMARGCTADQKGKRTKSRKEQIREHYKRFAREEVRDLLSLLDARDENELQSEKLYLYFMQLGRCMYSGEPIDLQHLSDRKFYDVDHIFPQCRVKDDSVLNNKVLCLSVLNGQKGDVYPIAPEIRQRMGGFWAALHDKGLLTDEKYRRLTRTTPFTDEELMGFIQRQLVETRQSTKAIATILKERYPDTQIVYVKAGLVSEFRQEFGMLKSRILNDLHHAKDAYLNIVVGNVYYERFNKNYFRLNETYSMKTRELFTHSVWSGGARVWRGGADIGLVREVVSRNHIHVTRFAFCRRGALFDQQPLRAQPDGGDLIPRKANLPVERYGGYRKPTATFFMLARYTAGRKRELMVVPIDLMAEADFRRDDACALAVVRAAIEKIVGKPVDAVELPLGMRVLKVNTVFSLDGFRVALSGKVGGGKQLLLTPLMPLWLDARWERYVKRIESFQNKRSKRPGLSLQPAFDRLTPEENLLLYDLLCGKLAAWPYSKRPVVEPIRNTLEERREAFSALPPEAQVALLAALLGAFGRSSQGIDLTPIGGVKRAGETKLSSALSNWEKLYADVRIVDPSPAGLFERASVNLLTLL

SEQ ID NO: 20823 - protein, 1361 aa, unidentified
  REGION 1..1361: note = Cas Enzyme sequence
MIKQEYYLGLDCGTDSIGYAVTDEAYALLKNKGEPMIGVMTFDEPYSAQERRANRTGRRRLHRRQQRVQLLQELFAPAIAARDPGFFQRLRESALWRQDVTTSATGGVFFNDDDFTDREYHRMYPTIHHLICELMESEAPHDVRLVYLACAWLVAHRGHFLSAISEDNLESATDIRGVYADFMNWFEAEKPWECDAEAFGSVLKARVRIRDKEAQLNELLFNGAKNPPVLAFDAEDPDAPVLSRAAMVKLLSGGKVKASDLFLHRAEEYAEVGSISLGGKEEDLALALSRLGEDAELVLRLKALFDWAVLADILRNEPYISRAKVLVYDRHREDLARLKAFIRKYLPARYDEVFNASGGVNYAAYSRHAPTGGTAPKYVSKEDFCDYLRKLVAGVSVEEEDLPAYEDMMARLEACAFLPKQRDRDNRVIPYQLYAYELRMILARAERYLPFLAQRDADGLSVSDKIISIFKFRIPYYVGPLNQNSSYAWLERKAERIYPWNFEKIVDLDASEDAFIRRMTGRCTYLPAEYVLPKNALCYARFNVLNEINLLKINSVPITVAQKQAIYTQLFERRSRVTFKALQSFCIAEGYMKPGDTISGIDKEGIKSSLRPQQAFARLLRRGDLTEAQAEQIVERITCTEERPRLHRWLCRTFPQLAAEDIDYLSRLKFSDFGRLSRRFLCELEGMCRETGEVFTVLEAMWETNCTLMELLSDRFTFAERVREEAQAYYAEHPRTLEARMDDLYLSNGARRPIYRTLEIVKDVVHAAGGPPKKIFVEMARGGTADQKGKRTKSRKEQIREHYKRFAREEVRDLLSLLDARDENELQSEKLYLYFMQLGRCMYSGEPIDLQHLSDRKFYDVDHIFPQCRVKDDSVLNNKVLCLSVLNGQKGDVYPIAPEIRQRMGGFWAALHGKGLLTDEKYRRLTRTTPFTDEELMGFIQRQLVETRQSTKAIATILKERYPEAQIVYVKAGLVSEFRQEFGMLKSRILNDLHHAKDAYLNIVVGNVYYERFNKNYFRLNETYSMKTRELFTHSVWSGGARVWRGGADIGLVRAVMSRNHIHVTRFAFCRRGALFDQQPLRAQPDGGDLIPRKANLPVERYGGYRKPTATFFMLARYTAGRKRELMVVPIDLMAEADFRRDDACALAVVRAAIEKIVGKPVDTVELPLGMRVLKVNTVFSLDGFRVALSGKTGGGKQLLLTPLMPLWLDARWERYVKRIESFQNKRSKRPGLSLQPAFDRLTLEENLLLYDLLRGKLAAWPYSKRPGTEAMRRTLEERREAFSALPPEAQVALLAALLGAFGRSGQGTDLTPIGGVKSAGVPLLSSSLSNWKKLYADVRIVDPSPAGLFERASVNLLSLL

SEQ ID NO: 20824 - protein, 1361 aa, unidentified
  REGION 1..1361: note = Cas Enzyme sequence
MIKQEYYLGLDCGTDSIGYAVTDEAYALLKNKGEPMIGVMTFDEPYSAQERRANRTGRRRLHRRQQRVQLLQELFAPAIAARDPGFFQRLRESALWRQDVTTSATGGVFFNDDDFTDREYHRMYPTIHHLICELMESEAPHDVRLVYLACAWLVAHRGHFLSAISEDNLESATDIRGVYADFMNWFETEKPWECDAEAFGSVLKARVRIRDKEAQLNELLFNGAKNPPVLAFDAEDPDAPVLSRAAMVKLLSGGKVKASDLFLHRAEEYAEVGSISLGGKEEDLAMALSRLGEDAELVLRLKALFDWAVLADILRNEPYISRAKVLVYDRHREDLARLKAFIRKYLPERYDEVFNASGGVNYAAYSRHAPTGGTAPKYVSKEDFCDYLRKLVAGVSVEEEDLPAYEDMMARLEACAFLPKQRDRDNRVIPYQLYAYELRMILARAERYLPFLAQRDADGLSVSDKIISIFKFRIPYYVGPLNQNSSYAWLERKAERIYPWNFEKIVDLDASEDAFIRRMTGRCTYLPSEYVLPKNALCYARFNVLNEINLLKINSVPITVAQKQAIYTQLFERRSRVTFKALQSFCIAEGYMKPGDTISGIDKEGIKSSLRPQQAFARLLRRGDLTEAQAEQIVERITCTEERPRLHRWLCRTFPQLAAADIDYLSRLKFSDFGRLSRRFLCELEGMCRETGEVFTVLEAMWETNCTLMELLSDRFTFAERVREEAQAYYAEHPRTLEARMDDLYLSNGARRPIYRTLEIVKDVVHAAGGPPKKIFVEMARGGTADQKGKRTKSRKEQIREYYKRFAREEVRDLLSLLDARDENELQSEKLYLYFMQLGRCMYSGEPIDLQHLSDRKFYDVDHIFPQCRVKDDSVLNNKVLCLSVLNGQKGDVYPIAPEIRQRMGGFWAALHGKGLITDEKYRRLTRTTPFTDEELMGFIQRQLVETRQSTKAIATILKERYPDTQIVYVKAGLVSEFRQEFGMLKSRILNDLHHAKDAYLNIVVGNVYYERFNKNYFRLNETYSMKTRELFTHSVWSGGARVWRGGADIGLVREVVSRNHIHVTRFAFCRRGALFDQQPLRAQPDGGDLIPRKANLPVERYGGYRKPTATFFALARFTAGRKRELMVVPIDLMAEADFRRDDACALAVVRAAIEKIVGKPVDAVELPLDMRVLKVNTVFSLDGFRVALSGKASGGKLLLISPLMPLWLDARWERYVKRIESFQNKRSKRPGLSLQPAFDRLTPEENLLLYDLLRGKLAAWPYSKRPGTEAMRRTLEERREAFSALPPEAQVALLAALLGAFGRSGQGVDLTPIGGVSKAGVPTLSSALSNWKKLYADVRIVDPSPAGLFERASVNLLSLL

SEQ ID NO: 20825 - protein, 1367 aa, unidentified
  REGION 1..1367: note = Cas Enzyme sequence
MKNQNYYVGFDIGTDSVGYAVTDGKYNLCKHGGEPMWGVTLFDSANLASERRAFRTARRRLDRRQQRVQLVMDLFASEISKIDKKFFTRIKDSYKYSNTSSDKVRLFDSYTDQKKYAYQYPTIHHLIADLMSSSEPHDVRLVYIACSWLVAHRGHFLSEVDKNNISAVTDFAAVWENLTTYLTRDEYALPWTDGININTIQDVLKAKVGITKKSKLLGEVLFDGKKIPKVINEQYEYNYELVCKLLCGGKVSLKDLFGKDEYADLDEKSIALNMPDEKLALILQSIGDDSEFVLVLKAVYDWSVLVDVLKGKQTVSEAKVAVFEQHQQDLKSLKQLIKKYIPSKYNEVFRSSSTKNNYVEYIGKNKTANHQIKVKKSNSREDFSKYILSIVKCISADATDANIVADIIARLEVYDFLPKQVNSDNRVIPYQLYWYELNKVLQNASKYLPFLNEVDCDGITNLQKILSVFEFRVPYYVGPLKENPTNSKKLNCWMVRKAQGPILPWNFNSMVDCDASEEAFIKRMTNTDTYLPGEDVLPKNSLVYSAFEVLNEINNINIDGNPISVELKQRIYQDIFMQYDKVTVSRIKNYLEANGIVKKDNYVLSGIDVTIKSSLKSFRLFSRLVHNQKLSYADVENIINRATYSEDRFRYTSWLKANYTHLSDDDVNYISRLKFKEFGRLSRKLLCGIEGCDQTEKTTGEMFTVIRALWETNCNFMELLSDRFTFKEQIDQIVKDYYDQNPTSLAERLDEMRVSNAVKRPIIRTLDILKDIVKIQGCAPKTIFIEMARGSNEELKGKRTNSRLDQILELYKKVDQEDVRKLKDQLESFGDTVHNKLQSDKLFLYFIQLGKCLYTGQQMDIQSVMAGDGSFNIDHIYPRTFVKDDSVINNKVLVSSTANAAKGDRYPIDGDVQSKMRGYWTYLNKIGLISDEKFKRLTRNTHFTEEEKFSFINRQLVETRQSTKVVATLLNELYPNTQVVYVKANLASDFRQQFDLVKSRAVNDLHHAKDAYLNIVVGNVWHHKFSRQFWRTDEKLNAKPEVVFTRPVFFKGQTIWSGADDKDRVVKIARKNTARVTKYSFCRKGGFFDQMPVSAAPGLVPRKKDMPTEIYGGYNKTTATFFVLVRYFVAKKQDVMVMPVELLHANEFLKNSSFAEQYAIQTISQIINKPVTKVEFLLNRRILKVNTMLSLDGLKVCITGKSSGGAKIGVSVMEVFKTSYQNECYIRKLESFDKKRKANANIVLSSSFDGITTEQNVALYDYYIKKLQNTPYKYRPANPVESLTKCRARFIGLSPSVQVGVLLQIQGMFGRLVKADLTPIGGVASTGVTALSSSISNWKKNYRDVRIIDQSASGLYETSTCNLLELL

SEQ ID NO: 20826 - protein, 1362 aa, unidentified
  REGION 1..1362: note = Cas Enzyme sequence
MKKQNYFIGLDIGTDSVGYAVTDEEYNLCKFKGESMWGVTLFDEAQLAAERRGFRTARRRLDRRQQRVQLIQELFAHEISKIDEGFFIRIKESYLYPEKEEEKIRLFDTYEMQKEYLTKYPTIHHLIVELMENADPHDVRLVYLACAWLVAHRGHFLSEVDKHNIAAVTDFKTVYEKLVSYITRDEYTLPWKTDVDLEVIQNVLKAKSGIQRKSKALTEAFFGTVKAPKIVNEQYEYNYECIIKLLCGGKVNLSDLFAKDEYAELEEKAIALNMDDEKLAIIMQSIGDDAELISALKEICDWSVLVDVLKGRDTISKAKVAVYEQHKRDLATLKYFVKKYAPSKYNEIFRSDKTNNNYVSYIGKNQTGNDSRNVKKAGKKEELCKYVLSVVKSILPDESDLEKYSDMVTQLETYDFLPKQVDGDNRVIPYQLYWYELNIILENAERYIPFISEVDEDGISGKNKILSVFEFRVPYYVGPLKGKSNCRYNHWMVRKAEGRIFPWNFNRVVDLDESENAFIARMTNSCTYLPGEDVLPKNSLVYCSFEVLNEINNIRINGNEIPVVVKQGIYNDLFMRNSKVTPKKICEYLISNNYMCESDVLSGIDITVKSSLKPFLQFKNLVNRKMLTYTDVEKIIHRATYSEDKARFKKWLSEQYSDLPESEITYISGLKFKDFGRLSRKLLCGIEGVNTQTGEVYSSIIRAMWETNYNLMQLLSDNFNFEKNIDEIIGEYYDVNPKSISDRLDEMYVSNAVKRPIIRTLDILKDVVKIQGHAPERIFIEMARGANEDQKGKRTVTRLKQIQELYEKVKDEDVRELQSVLDEWGDAAHNKLQSDKLFLYFIQLGKCLYTEKSIDLESLISGDGSYNIEHIYPRSFVKDDSIINNKILVDSKANGDKSDSYPIAPAIQEKMRGYWTRLNKIGLISDEKFKRLTRNSHFTEEEKFEFINRQLVETRQSTKAVATLLKELYPHTEIVYVKAGLVSDFRQTFDILKSRAVNDLHHAKDAYLNIVVGNVWHSKFSRRFWNANNHYSIKPEVIFTRTVTCGDKTVWNGVLDKNRVVNIVRKNTAHMTKYSFCRKGGFFDQIPLSANKGLIPRKKNMRTEIYGGYNKSTASFFTLVKYKIDKKQDVIVMPVELLYVDKFLNDKNFAKLYAIKTISDIINKEILDVEFLLNNRVLKINTMLSLNGLRVCITGKSGGGKQLGVSITEPFKTSADNELYIKKIESFKNKKKKNPNIVYNELHDDINKDKNLEIYDCYIGKLQQAPYSFRPANPINTLLLGREKFISLSCESQVDILLDVLGLFGRIQSADLTSIGGVQKAGVATLSSTLSNWKKNYTDVRIIDQSASGFFETVSDNLLELL

SEQ ID NO: 20827 - protein, 1287 aa, unidentified
  REGION 1..1287: note = Cas Enzyme sequence
EICKDDPCFFKRIKESYHYPETENDKVRLFDTYEKQKEYAEKYPTIHHLIVELMNNAEPHDVRLVYIACAWLVAHRGHFLSEVDKHNIVAATDFANVYDELVKFIERDGEYALPWKKTADMNAVEDALKSNQGITKKSKVVTEALFGTSKAPKTVGEEYEYNYELVIKLLCGGKVGLKELFDKDEYAELEEKSVALNMDDEKLAAIMQSIGDDSALVSALKKVYDWSVLVDMLKGKQTVSEAKVDVYYQHQSDLRTLKYFIKKYRSEKYNEIFRSDNVKNNYVAYIGKNKTSNKDIKVKKSVNREDFCKYILSVLKSVTPTDADAEEYNRMISRLETAQFMPKQVDGDNRVIPYQIYWFELNKILENAKGYLPFLSVPDENRITVAEKILSVFEFRVPYYVGPLKENNNSKYNHWMVRKAEGEILPWNFGDIVDLDASENAFIARLTNSCTYLPGEDVLPKCSLVYSAFEVLNEINNIKINDNDIPVEIKQVVYNNLFMRPKKVTPKRIRDYLLSNNYICEDDVISGFDVTIKSSLKSFMEFRNLIKNELLTYSDAEKIINRATYSEDKIRFSEWLKKEYPCLPESELKYISNLKFKEFGRLSRKLLCGIEGANKETGEVYPSILRAMWETNCNLMQILSEQFTFAEHINAIVKEYYGCSSESITERLDEMCVSNAVKRPIIRTFDILKDIVKVQGRAPERIFIEMARGSNEDLKGKRTKTRLSQIYELYEKVKDEDVRCLTKQLEAWGETAHNRLQSDKLFLYFIQLGKCLYTGKKIDIESLISGDGTYNIEHIYPRSFVKDDSVINNKILVDSKANGDKSDNFPISADIQSKMRGFWERLNKLNLIGDEKFKRLTRTTLFTDEERFEFINRQLVETRQSTNAVATILKEMYPKTEVVYVKAGLTSEFRQQFGLLKSRTVNDLHHAKDAYLNIVTGNVWHCKFSKQFWRAEEQNNAKVEVVFTRPVICNGKTIWNGIGHKELAVKTARKNTAHMTMYSFCKHSGQSGGLFDQNPVSAAKDLIPLKKDRPTEIYGGYSGGTVAGFVLARYKESKKTQVSLVPLKLMNMAKFIADDEYAVEYIADELKSKATEIEILLNKRIIKIYSMISLDGARYSIRGKAGLSDIGLINMMPFMTSAENENYIKKLERFTEKRKKNDNYVWDEKYDGVSAKDNIALYHLYIQKLSRWPYNTRPGNETFVNKLRLHTEDLEKLDVFRQAYILLQIQGVLGRIKQADLKDFKESANSGIIKLSLNLSNWKKNYTDVRIIDQSASGLFEKASDNLLELL

SEQ ID NO: 20828 - protein, 1290 aa, unidentified
  REGION 1..1290: note = Cas Enzyme sequence
FAEEICKDDPCFFKRIKESYHYPETENDKVRLFDTYEKQKEYAEKYPTIHHLIVELMNNAEPHDVRLVYIACAWLVAHRGHFLSEVDKHNIVAATDFANVYDELVKFIERDGEYALPWKKTADMNAVEDALKSNQGITKKSKVVTEALFGTSKAPKTVGEEYEYNYELVIKLLCGGKVGLKELFDKDEYAELEEKSVALNMDDEKLAAIMQSIGDDSALVSALKKVYDWSVLVDMLKGKQTVSEAKVDVYYQHQSDLRTLKYFIKKYRSEKYNEIFRSDNVKNNYVAYIGKNKTSNKDIKVKKSVNREDFCKYILSVLKSVTPTDADAEEYNRMISRLETAQFMPKQVDGDNRVIPYQIYWFELNKILENAKGYLPFLSVPDENRITVAEKILSVFEFRVPYYVGPLKENNNSKYNHWMVRKAEGEILPWNFGDIVDLDASENAFIARLTNSCTYLPGEDVLPKCSLVYSAFEVLNEINNIKINDNDIPVEIKQVVYNNLFMRPKKVTPKRIRDYLLSNNYICEDDVISGFDVTIKSSLKSFMEFRNLIKNELLTYSDAEKIINRATYSEDKIRFSEWLKKEYPCLPESELKYISNLKFKEFGRLSRKLLCGIEGANKETGEVYPSILRAMWETNCNLMQILSEQFTFAEHINAIVKEYYGCSSESITERLDEMCVSNAVKRPIIRTFDILKDIVKVQGRAPERIFIEMARGSNEDLKGKRTKTRLSQIYELYEKVKDEDVRCLTKQLEAWGETAHNRLQSDKLFLYFIQLGKCLYTGKKIDIESLISGDGTYNIEHIYPRSFVKDDSVINNKILVDSKANGDKSDNFPISADIQSKMRGFWERLNKLNLIGDEKFKRLTRTTLFTDEERFEFINRQLVETRQSTNAVATILKEMYPKTEVVYVKAGLTSEFRQQFGLLKSRTVNDLHHAKDAYLNIVTGNVWHCKFSKQFWRAEEQNNAKVEVVFTRPVICNGKTIWNGIGHKELAVKTARKNTAHMTMYSFCKHSGQSGGLFDQNPVSAAKDLIPLKKDRPTEIYGGYSGGTVAGFVLARYKESKKTQVSLVPLKLMNMAKFIADDEYAVEYIADELKSKATEIEILLNKRIIKIYSMISLDGARYSIRGKAGLSDIGLINMMPFMTSAENENYIKKLERFTEKRKKNDNYVWDEKYDGVSAKDNIALYHLYIQKLSRWPYNTRPGNETFVNKLRLHTEDLEKLDVFRQAYILLQIQGVLGRIKQADLKDFKESANSGIIKLSLNLSNWKKNYTDVRIIDQSASGLFEKASDNLLELL

SEQ ID NO: 20829 - protein, 1153 aa, unidentified
  REGION 1..1153: note = Cas Enzyme sequence
KQKLGMNKKLKLLKEAVFKNGKIPQNDEDCIVSWEHALKLICGGKVKLADLFSNDSYSEFGSLSLDSDDETIAQAVADVDSDGEILVKLKMLYDWSVLVDALKGKNSISEGKVEVYNQHKKDLAMLKMLVHKYLPTKYKDIFDATDNPLNYAAYTYHSTKGKVNKKASKTDFCDYIKKLFKEVKIDSDDVAAFEDMSSRLETESFMPKQRDGDNRVIPYQLYWYELKTILDKSSEKFPFLNTKDDDGISIAEKLLSVFEFRVPYYVGPLRNDGNNKNAWMERKATGKIYPWNFDKIVDLDKSENAFIEKMLGRCTYLSGESVLPKNSLLYSSFTVLNEINNLKINNEPISVEIKQEIYSEIFMNPTNRRVSLKKIQNYLLSRGYIEKTDTLSGADINLTSTLNPYHLFRRLLEKNILSENEVEEIITRSTYTEDRNRFEKWLRENYSKLCDDDIKYVRSLKLKDFGRLSKKLLCDMFGCPDDETGEARSVIRAMWDTNLNINQLILSDNYTYKAQIEAFNHDYYSRHPKSLNDRLDDMYISNAVKRPIIRTLDILKDITKVMRSAPEAVFVEMARGTNEDLKGKRTQSRLAQVKTLYEKIDKEEVRLLSQQLDSLGETAENRLQSDKIFLYFMQLGKCLYTGKTITFESVLKGDGTYNIEHIYPRCHVKDDSIINNKILVDSKANEAKGDSYPIAAEIQADRAGLWKYLHDSELISDEKYKRLTRKTRFTDEEKNGFINRQLVETRQSTKAVATILKEKYPDTEICYVKAGLVSDFRQQFSMLKSRAINDLHHAKDAYLNIVVGNVYYSYFNKNYFRLDDDYNLKTEIMFSREVKCGSRVVWEGGKSVDMVRRNVAKNTAHLTKYAFCRKGGFFDQMPLKANEGLIPLKKGMPTEIYGGYNKPTASFFVLVKYKTAKKEDIMVMPVELLYADKFIANEDFAKEYSLKTVESIIGKKTESVEFLLNKRILKVNTMLSLDGLRVCLTGKSGGGSKIMTMIMSSFKSTYENENYIKKLESFTNKKRNNDNIVYDIRYDIISKEKNEEIYCHFIEKFQRWPYNKRPANPVNTLTKAKEEFLKLDVSTQADVLLRILGLFGRINNADLKIIGGSGATGVATLSTSMSNWRKSYTDVRIIDTSASGLFETQSENLLDLL

SEQ ID NO: 20830 - protein, 1349 aa, unidentified
  REGION 1..1349: note = Cas Enzyme sequence
MKKATSPYFLGLDVGTDSVGYAVTDEQYALKKFKGEPMWGVHLFEEAQLNDERRSFRTARRRLDRRQQRVHLLQELFAREIERVDAHFFVRIKESAMYPEDSKYGVSLFADEKYRDADYHKQYPTIHHLIMDLIDNPAPHDVRLVYLACAWLCAHRGHFLSEISKENIQELLDITTIYQEFMDCFEEEKPWYCDDLNAFGAILKKKIGVNKKYREMALLLFGTSKAPKKKDEDSVDCETLLKLLCGGKIAPKALFANDEYTDIESFSLDKADEELAPVFGALGEDAQVVLKAKALFDWAVLGDVLRGESFVSCAKIKVYEQHRTDVFHLKYIIRKYNRKAYNAMFRQVDGAKVNYEAYAKGNGAKQEDFCKYAKTLIKDVVPEEEDRSILQELLTRIENTALCPKQVNTDNRVIPHQVYWAELKAVLDNAVEYLPFLNEKADGTTVAQKILAIFEFRIPYFVGPLNKASEYAWVKRKAEGKIYPWNFEQKVDLEASEQAFIDRMTATCTYLPDADVLPKQSLCYEAFSLLNEINPITVNGKRLSVVVKQQLFKELFMIRKKVTRKAIKEWLLVRNYYKKDDLETLGGVDDTIKSSLSSRMAFRRLLETGQLTEQDVEQIIARRTYTESKRRFMMWLEREYADLSDADRTYIGSLRFKDFGRLSHKLLCELYGTACQTETGEAITILERMWTENVTLMEVLADDYTYGAQIADIRKEYYAQHTSTLDDRLKEMYVSNAVKRPIIRTLDIVGEVTKALGRAPDKIFVEMARGGKPEEKGKRTKTRLDSIRELYNACRDEDVRRLNEELAQMGDAAENRLQSDKLFLYYMQLGKCMYTGTPIELSQLGTKSYDIDHIYPQSKVKDDSVHNNKVLVLSEANGEKGDVYPIKAEIRRTMHHWWEYLQKCGLITAEKYKRLTRSEPFSEAEQWGFINRQLVETRQSTKALATLLSEKYPHSKIVYVKAGLVSEFRQEFDMLKSRAVNDLHHAKDAYLNIVVGNVYNERFTKQWFMAHHRDYNLKVKTLFTHEVKNATGQVVWNGTQKLGEVKKIVQNKNAIHLTRYAFCRKGGLFDQQPVKAGQGLTPLKAGLPTEKYGGYNKTTATFFLFVKYTAGKKSDVMLMPVELLVADQVLSDTGFAEEYSKRAVGSIVGKTVSSISFPLGMRPVKIGTVFEFDGGYRAYLTGKANAGRVIGLSTFMPLVLGYSWEVYIKRLEKMTDKAKANPKFMYSAQYDGVTKEENEALYAVLLNKLKQSPYCQCPANPVETLQAGEQRFAQLDVIEQAKCLLQIVTVFGRISGSDLSAIGGASKAAVTTLSSALSNWKKKYTDVRLVDMSASGLHQSRTCNLLAWV

SEQ ID NO: 20831 - protein, 1164 aa, unidentified
  REGION 1..1164: note = Cas Enzyme sequence
IDEFEFKFNDNDKDKLADILKKKGIFLKKKEINLLINNPSSQQKEILNLLVGGKVNLIKIFGEEIFADSDIKPEINFSDSGFEDKLPELASMLQDKIYIIEALKRAYDWGVLADILQGENYLSYAKVKVYEKHKKDLHILKGLVKKYLPKEKYQEIFSNVNLKDNYVAYVSVNKHNDKKEVVENGKCSQEDFNKYLRKQFEQVQNDDSILFAMREELEQNSFMPKQTSKDNGVIPYQVHLSEMKVILNNAIKYLSFLSETDAEGITIKQKIEMIMKFRIPYYIGPLNDAHKEKGGNCWIVKKVNEKIRPWNFETVVDIEKSAEQFIRKMTNKCTYTFDDVVPKHSLLYSKYMVLNELNNLKINNEAISTELKQRLYTDLFLKKPKVTNKALRDYLLSECICDKDMIISGIDGDFKANMSVYLDYKRIFSNRISESTFEQIILDVVLFGEDKKLLKNRLKKKLPDITNDEEKNICALRYSGWGRFSDTFLNQLEGINKETGETFTIISALNNTNDNLMQLLSSRYTFIDEIQKHNAEMNDNNNAMTYDNLVKDLYVSPVIKRSIWQTLEIVQEIKKIMGGAPKKVFVEVAREEGEKKRTTSRQRKLIELYDKCKDDSREWRKEIEGKSEDTFKGDRLYLYYTQMGKCMYCGGAIEINDLSDQNMYDIDHIYPQSKVKDDSLNNRILAHRSCNAKKKDDYPLKAEMHQPALWKLLKEKDFISEIKYERLMRNTPLNNDELAGFIERQLVETRQSTKAVAEILNKVFDNTEVVYVKAGNVSEFRKGIKCCPGDYAINNEFVKVREINDYHHAKDAYLNIVVGNVYNTKFTRDPRNYMKNEQQKYPYDFQRMYEYDVVRNGVTAWKCGDDGTMATVKKYMAKNNVLFTRYATEVKGGLFDQMLMKKGKGQIPIKGSDKRLVNFEDKYGAYNKASGAYFTMVEHEDKKKTVRTIEYVPVYMAKIINNDKASLTDYCQENLGLKNPRVLIDKIKINTLFKLDNFYMHLTSRTGTLIVFSCAIQLKIDKETEQYIKKIIIFNEKNKNRKGSLMISSFEKITKEDNIKLYMCLQNKIKETLYLTKLSSQIETLEKGKEKFTELTVENQCKVIAEILHLFQCNKVLANFELINESTQSGRITISKNITKLENLKIIHQSPTGIFEKEVDLKKL

SEQ ID NO: 20832 - protein, 1355 aa, unidentified
  REGION 1..1355: note = Cas Enzyme sequence
MKSIRKESQEPYYIGLNVGPTYAAYAVTNTSYNLSRFKGKDMWGVYKYDEAETAEDRRRFRQGRNSNLKEKERIRLLRSYFFDEIQKVDENFFVRLDNSFYYSEDKDIRLNGDRNVLFADKDYSDRQYMSEYPTIYHLRSELAHGSKKPDIRCLYLAVSHMMKNRGNFYTKNLEDTDKSLGEVYENICTKAAEYDIVLKMEVPAEKIMDIMINPGISGKVKATLVTQLVDATSKPALSIIKLMCGLKAKIADIFPELAESLEEDEKKLSFSFKDEDYFERADSIEKLIGENEYSLIESVKEMYDAAIIKNIIQDYRYVSDAKIASYEKHANDLEILKAELKTILSKNEYKRFFSKEEPGTYSAYVHFSNHNNQITRRKSDKGRTQEDLYHTIKKYLADADDEQAEYILDEIDKGTFLPKQRIKDNSLIPNQLYSVELKAILENASKYYDFLNSRDESGLTVSERILSLFTFTMPYFIGPVSPYNSRGWAVRKELGKVYPWNLKDKVDMGQSAKQFIEKIIGKCNYLSGEKVLPNASLLYEKYRVLNEINSISVDGEKISVEMKQAIVNELLAGGKTVSKKKILSFLVKKGSATSDSIITGIDDKLNNSMASHRFFADIFGSLNKDNEAVAEDIILWSTIYGSSKDFVTEQILNKYPDMFDEEQLRKIHNLNCKDWGRLSRGFLNMKGLDKDNNELISVIDAMWSNNLNLMELMYDTRFDFSARVKDKTENAVKNLFSFDYDDLNDLYATTAQRRTIWASVKIVREIVKIKGYAPESIFLDTVKSRPNDMPKESRKGKLTALYKGMKGVSADWKKKMISLIVQCDADGSLKAKNVYLYFLQMGKDMYTGEDISLEELKSPDKRKKHNIDHIYPKHFVKDESIDNLVLTNTDLNRDLSDRYPVPQDIYDNMHEFWQQLRRSGLISAEKLARLTDRNPMSDEKRASFIGKLYNQAGSSTRMMADIFINILPKDTKVIYAKTSEANEFRHKFDFPRTTIINDDYLAKDAYLNIVVGNVWYTKFTASPIWYIKEEYRKKKSEYNLNRMYDFNVIRDDRIAWITDKTNPEAATIHTVNKVMNRNTVITITRTIQGHGGLTNATITRADKAKEGVYLPLKTSNERMSVTKYGGKTSITSAYMFLAEHTLKKSRVRTIYSLPLHLVSQIKGKKDLEKYCTDVLHLIEPVIKIAKIMLYSELIIDGYSYLLGGKAGVQYYLRNNVPMKVNAEWQKYVSKIEKYINFKSLDKDMSADKNIELYDELVDKHTNSIYSKRRNTAGDMLKKGRDTFIKLSVKEQLEVLNQIFTLTRMGTNIANLSGIGAGQHVGSITMGCNISTFDSVKLVNRSVTGLFSNEVDLLHI

SEQ ID NO: 20833 - protein, 1355 aa, unidentified
  REGION 1..1355: note = Cas Enzyme sequence
MKSIRKESQEPYYIGLNVGPTYAAYAVTNTSYNLSRFKGKDMWGVYKYDEAETAEDRRRFRQGRNSNLKEKERIRLLRSYFFDEIQKVDENFFVRLDNSFYYSEDKDILLNGDRNVLFADKDYSDRQYMSEYPTIYHLRSELAHGSKKPDIRCLYLAVSHMMKNRGNFYTKNLEDTDKSLGEVYENICTKAAEYDIVLKMEVPAEKIMDIMINPGISGKVKATLVTQLVDATSKPALSIIKLMCGLKAKIADIFPELAESLEEDEKKLSFSFKDEDYFERADSIEKLIGENEYSLIESVKEMYDAAIIKNIIQDYRYVSDAKIASYEKHANDLEILKAELKTILSKNEYKRFFSKEEPGTYSAYVHFSNHNNQITRRKSDKGRTQEDLYHTIKKYLADADDEQAEYILDEIDKGTFLPKQRIKDNSLIPNQLYSVELKAILENASKYYDFLNSRDESGLTVSERILSLFTFTMPYFIGPVSPYNSRGWAVRKEPGKVYPWNLKDKVDMGQSAKQFIEKIIGKCNYLSGEKVLPNASLLYEKYRVLNEINSISVDGEKISVEMKQAIVNELLAGGKTVSKKKILSFLVKKGSATSDSIITGIDDKLNNSMASHRFFADIFGSLNKDNEAVAEDIILWSTIYGSSKDFVTEQILNKYPDMFDEEQLRKIHNLNCKDWGRLSREFLNMKGLDKDNNELISVIDAMWSNNLNLMELMYDTRFDFSARVKDKTENAVKNLFSFDYDDLNDLYATTAQRRTIWASVKIVREIVKIKGYAPESIFLDTVKSRPNDMPKESRKGKLTALYKGMKGVSADWKKKMISLIVQCDADGSLKAKNVYLYFLQMGKDMYTGEDISLEELKSPDKRKKHNIDHIYPKHFVKDESIDNLVLTNTDLNRDLSDRYPVPQDIYDNMHEFWQQLRRSGLISAEKLARLSDRNPLSDEKRASFIGKLYNQAGSSTRMMADIFKNILPKDTKVIYAKTSETNEFRHKFDFPRTTIINDDYLAKDAYLNIVVGNVWYTKFTASPIWYIKEEYRKKKSEYNLNRMYDFNVIRDDRIAWITDKTNPEAATIHTVNKVMNRNTVITITRTIQGHGGLTNATITRADKAKEGVYLPLKTSNERMSVTKYGGKTSITSAYMFLAEHTLKKSRVRTIYSLPLHLVSQIKGKKDLEKYCTDVLHLIEPVIKIAKIMLYSELIIDGYSYLLGGKAGVQYYLRNNVPMKVNAEWQKYVSKIEKYINFKSLDKDMSADKNIELYDELVDKHTNSIYSKRRNTAGDMLKKGRDTFIKLSVKEQLEVLNQIFTLTRMGTNIANLSGIGAGQHVGSITMGCNISTFDSVKLVNRSVTGLFSNEVDLLHI

SEQ ID NO: 20834 - protein, 1355 aa, unidentified
  REGION 1..1355: note = Cas Enzyme sequence
MKSIRKESQEPYYIGLNVGPTYAAYAVTNTSYNLSRFKGKDMWGVYKYDEAETAEDRRRFRQGRNSNLKEKERIRLLRSYFFDEIQKVDENFFVRLDNSFYYSEDKDIRLNGDRNVLFADKDYSDRQYMSEYPTIYHLRSELAHGSKKPDIRCLYLAVSHMMKNRGNFYTKNLEDTDKSLGEVYENICTKAAEYDIVLKMEVPAEKIMDIMINPGISGKVKATLVTQLVDATSKPALSIIKLMCGLKAKIADIFPELAESLEEDEKKLSFSFKDEDYFERADSIEKLIGENEYSLIESVKEMYDAAIIKNIIQDYRYVSDAKIASYEKHANDLEILKAELKTILSKNEYKRFFSKEEPGTYSAYVHFSNHNNQITRRKSDKGRTQEDLYHTIKKYLADADDEQAEYILDEIDKGTFLPKQRIKDNSLIPNQLYSVELKAILENASKYYDFLNSRDESGLTVSERILSLFTFTMPYFIGPVSPYNSRGWAVRKEPGKVYPWNLKDKVDMGQSAKQFIEKIIGKCNYLSGEKVLPNASLLYEKYRVLNEINSISVDGEKISVEMKQAIVNELLAGGKTVSKKKILSFLVKKGSATSDSIITGIDDKLNNSMASHRFFADIFGSLNKDNEAVAEDIILWSTIYGSSKDFVTEQILNKYPDMFDEEQLRKIHNLNCKDWGRLSRGFLNMKGLDKDNNELISVIDAMWSNNLNLMELMYDTRFDFSARVKDKTENAVKNLFSFDYDDLNDLYATTAQRRTIWASVKIVREIVKIKGYAPESIFLDTVKSRPNDMPKESRKGKLTALYKGMKGVSADWKKKMISLIDQCDADGSLKAKNVYLYFLQMGKDMYTGEDISLEDLKSPDKRKKHNIDHIYPKHFVKDESIDNLVLTNTDLNRDLSDRYPVPQDIYDNMHEFWQQLRRSGLISAEKLARITDRNPMSDEKRASFIGKLYNQAGSSTRMMADIFINILPKDTKVIYAKTSEANEFRHKFDFPRTTIINDDYLAKDAYLNIVVGNVWYTKFTASPIWYIKEEYRKKKSEYNLNRMYDFNVIRDDRIAWITDKTNPEAATIHTVNKVMNRNTVITITRTIQGHGGLTNATITRADKAKEGVYLPLKTSNERMSVTKYGGKTSITSAYMFLAEHTLKKSRVRTIYSLPLHLVSQIKGKKDLEKYCTDVLNLIKPVIKIAKIMLYSELIIDGYSYLLGGKAGVQYYLRNNVPMRVNAEWQKYVSKIEKYINFKSLDKDISADKNIELYDELVDKHTNSIYAKRRNTAGDMLKKGKDTFIKLAVKEQLEVLNQIFTLTRMGTNITNLSGIGAGQHVGSITMGCNISTFDSVKLVNRSVTGLFSNEVDLLHI

SEQ ID NO: 20835 - protein, 1355 aa, unidentified
  REGION 1..1355: note = Cas Enzyme sequence
MKSIRKESQEPYYIGLNVGPTYAAYAVTNTSYNLSRFKGKDMWGVYKYDEAETAEDRRRFRQGRNSNLKEKERIRLLRSYFFDEIQKVDENFFVRLDNSFYYSEDKDIRLNGDRNVLFADKDYSDRQYMSEYPTIYHLRSELAHGSKKPDIRCLYLAVSHMMKNRGNFYTKNLEDTDKSLGEVYENICTKAAEYDIVLKMEVPAEKIMDIMINPGISGKVKATLVTQLVDATSKPALSIIKLMCGLKAKIADIFPELAESLEEDEKKLSFSFKDEDYFERADSIEKLIGENEYSLIESVKEMYDAAIIKNIIQDYRYVSDAKIASYEKHANDLEILKAELKTILSKNEYKRFFSKEEPGTYSAYVHFSNHNNQITRRKSDKGRTQEDLYHTIKKYLADADDEQAEYILDEIDKGTFLPKQRIKDNSLIPNQLYSVELKAILENASKYYDFLNSRDESGLTVSERILSLFTFTMPYFIGPVSPYNSRGWAVRKEPGKVYPWNLKDKVDMGQSAKQFIEKIIGKCNYLSGEKVLPNASLLYEKYRVLNEINSISVDGEKISVEMKQAIVNELLAGGKTVSKKKILSFLVKKGSATSDSIITGIDDKLNNSMASHRFFADIFGSLNKDNEAVAEDIILWSTIYGSSKDFVTEQILNKYPDMFDEEQLRKIHNLNCKDWGRLSRGFLNMKGLDKDNNELISVIDAMWSNNLNLMELMYDTRFDFSARVKDKTENAVKNLFSFDYDDLNDLYATTAQRRTIWASVKIVREIVKIKGYAPESIFLDTVKSRPNDMPKESRKGKLTALYKGMKGVSADWKKKMISLIDQCDADGSLKAKNVYLYFLQMGKDMYTGEDISLEDLKSPDKRKKHNIDHIYPKHFVKDESIDNLVLTNTDLNRDLSDRYPVPQDIYDNMHEFWQQLRRSGLISAEKLARLTDRNPMSDEKRASFIGKLYNQAGSSTRMMADIFINILPKDTKVIYAKTSEANEFRHKFDFPRTTIINDDYLAKDAYLNIVVGNVWYTKFTASPIWYIKEEYRKKKSEYNLNRMYDFNVIRDDRIAWITDKTNPEAATIHTVNKVMNRNTVITITRTIQGHGGLTNATITRADKAKEGVYLPLKTSNERMSVTKYGGKTSITSAYMFLAEHTLKKSRVRTIYSLPLHLVSQIKGKKDLEKYCTDVLNLIKPVIKIAKIMLYSELIIDGYSYLLGGKAGVQYYLRNNVPMRVNAEWQKYVSKIEKYINFKSLDKDISADKNIELYDELVDKHTNSIYAKRRNTAGDMLKKGKDTFIKLAVKEQLEVLNQIFTLTRMGTNITNLSGIGAGQHVGSITMGCNISTFDSVKLVNRSVTGLFSNEVDLLHI

SEQ ID NO: 20836 - protein, 1355 aa, unidentified
  REGION 1..1355: note = Cas Enzyme sequence
MKSIRKESQETYYIGLNVGPTYAAYAVTNTSYNLSRFKGKDMWGVYKYDEAETAEDRRRFRQGRNSNLKEKERIRLLRSYFFDEIQKVDENFFVRLDNSFYYSEDKDIRLNGDRNVLFADKDYSDRQYMSEYPTIYHLRSELAHGSKKPDIRCLYLAVSHMMKNRGNFYTKNLEDTDKSLGEVYENICAKAAEYDIVLKMEVPAEKIMDIMINPGISGKVKATLVTQLVDATSKPALSIIKLMCGLKAKIADIFPELAESLEEDEKKLSFSFKDEDYFERADSIEKLIGENEYSLIESVKEMYDAAIIKNIIQDYRYVSDAKIASYEKHANDLEILKSELKTILSKNEYKRFFSKEEPGTYSAYVHFSNHNNQITRRKSDKGRTQEDLYHTIKKYLAEADDEQAEYILDEIDKGTFLPKQRIKDNSLIPNQLFSVELKAILENASKYYDFLNSRDESGLTVSERILSLFTFTMPYFIGPVSPYNSRGWAVRKEPGKVYPWNLKDKVDMGQSAKQFIEKIIGKCNYLSGENVLPNASLLYEKYRVLNEINSISVDGEKISVEMKQAIVNELLAGGKTVSKKKILSFLVKKGSATSDSIITGIDDKLNNSMASHRFFADIFGSLNKDNEAVAEDIILWSTIYGSSKDFVTEQILNKYPDMFDEEQLRKIHNLNCKDWGRLSRGFLNMKGLDKDNNELISVIDAMWSNNLNLMELMYDTRFDFSARVKDKTENAVKNLFSFDYDDLNDLYATTAQRRTIWASVKIVREIVKIKGYAPESIFLDTVKSRPNDIPKESRKGKLTALYKGMKGVSADWKKKMISLIDQCDADGSLKAKNVYLYFLQMGKDMYTGEDISLEELKSPDKRKKHNIDHIYPKHFVKDESIDNLVLTNTDLNRDLSDRYPVPQDIYDNMHEFWQQLRRSGLISAEKLARLSDRNPLSDEKRASFIGKLYNQAGSSTRMMADIFKNILPKDTKVIYAKTSETNEFRHKFDFPRTTIINDDYLVKDAYLNIVVGNVWYTKFTASPIWYIKEEYRKKKSEYNLNRMYDFNVIRDDRIAWITDKTNPEAATIHTVNKVMNRNTVITITRTIQGHGGLTNATITRADKAKEGVYLPLKTSNERMSVTKYGGKTSITSAYMFLAEHTLKKSRVRTIYSLPLHLVSQIKGKKDLEKYCTDVLHLIEPVIKIAKIMLYSELIIDGYSYLLGGKAGVQYYLRNNIPMRVNAEWQKYVSKIEKYINFKSLDKDMSADKNIELYDELVDKHTNSIYSKRRNTAGDMLKKGRDTFIKLSVKEQLEVLNQIFTLTRMGTNIANLSGIGAGQHVGSITMGCNISTFDSVKLVNRSVTGLFSNEVDLLHI

SEQ ID NO: 20837 - protein, 1355 aa, unidentified
  REGION 1..1355: note = Cas Enzyme sequence
MKSIRKESQEPYYIGLNVGPTYAAYAVTNTSYNLSRFKGKDMWGVYKYDEAETAEDRRRFRQGRNSNLKEKERIRLLRSYFFDEIQKVDENFFVRLDNSFYYSEDKDIRLNGDRNVLFADKDYSDRQYMSEYPTIYHLRSELAHGSKKPDIRCLYLAVSHMMKNRGNFYTKNLEDTDKSLGEVYENICTKAAEYDIVLKMEVPAEKIMDIMINPGISGKVKATLVTQLVDATSKPALSIIKLMCGLKAKIADIFPELAESLEEDEKKLSFSFKDEDYFERADSIEKLIGENEYSLIESVKEMYDAAIIKNIIQDYRYVSDAKIASYEKHANDLEILKSELKTILSKNEYKRFFSKEEPGTYSAYVHFSNHNNQITRRKSDKGRTQEDLYHTIKKYLADADDEQAEYILDEIDKGTFLPKQRIKDNSLIPNQLYSVELKAILENASKYYDFLNSRDESGLTVSERILSLFTFTMPYFIGPVSPYNSRGWAVRKEPGKVYPWNLKDKVDMGQSAKQFIEKIIGKCNYLSGEKVLPNASLLYEKYRVLNEINSISVDGEKISVEMKQAIVNELLAGGKTVSKKKILSFLVKKGSATSDSIITGIDDKLNNSMASHRFFADIFGSLNKDNEAVAEDIILWSTIYGSSKDFVTEQILNKYPDMFDEEQLRKIHNLNCKDWGRLSRGFLNMKGLDKDNNELISVIDAMWSNNLNLMELMYDTRFDFSARVKDKTENAVKNLFSFDYDDLNDLYATTAQRRTIWASVKIVREIVKIKGYAPESIFLDTVKSRPNDIPKESRKGKLTALYKGMKGVSADWKKKMISLIDQCDADGSLKAKNVYLYFLQMGKDMYTGEDISLEELKSPDKRKKHNIDHIYPKHFVKDESIDNLVLTNTDLNRDLSDRYPVPQDIYDNMHEFWQQLRRSGLISAEKLARLSDRNPLSDEKRASFIGKLYNQAGSSTRMMADIFKNILPKDTKVIYAKTSETNEFRHKFDFPRTTIINDDYLAKDAYLNIVVGNVWYTKFTASPIWYIKEEYRKKKSEYNLNRMYDFNVIRDDRIAWITDKTNPEAATIHTVNKVMNRNTVITITRTIQGHGGLTNATITRADKAKEGVYLPLKTSNERMSVTKYGGKTSITSAYMFLAEHTLKKSRVRTIYSLPLHLVSQIKGKKDLEKYCTDVLHLIEPVIKIAKIMLYSELIIDGYSYLLGGKAGVQYYLRNNVPMRVNAEWQKYVSKIEKYINFKSLDKDMSADKNIELYDELVDKHTNSIYSKRRNTAGDMLKKGRDTFIKLSVKEQLEVLNQIFTLTRMGTNIANLSGIGAGQHVGSITMGCNISTFDSVKLVNRSVTGLFSNEVDLLHI

SEQ ID NO: 20838 - protein, 1355 aa, unidentified
  REGION 1..1355: note = Cas Enzyme sequence
MKSIRKESQEPYYIGLNVGPTYAAYAVTNTSYNLSRFKGKDMWGVYKYDEAETAEDRRRFRQGRNSNLKEKERIRLLRSYFFDEIQKVDENFFVRLDNSFYYSEDKDIRLNGDRNVLFADKDYSDRQYMSEYPTIYHLRSELAHGSKKPDIRCLYLAVSHMMKNRGNFYTKNLEDTDKSLGEVYENICTKAAEYDIVLKMEVPAEKIMDIMINPGISGKVKATLVTQLVDATSKPALSIIKLMCGLKAKIADIFPELAESLEEDEKKLSFSFKDEDYFERADSIEKLIGENEYSLIESVKEMYDAAIIKNIIQDYRYVSDAKIASYEKHANDLEILKAELKTILSKNEYKRFFSKEEPGTYSAYVHFSNHNNQITRRKSDKGRTQEDLYHTIKKYLADADDEQAEYILDEIDKGTFLPKQRIKDNSLIPNQLYSVELKAILENASKYYDFLNSRDESGLTVSERILSLFTFTMPYFIGPVSPYNSRGWAVRKEPGKVYPWNLKDKVDMVQSAKQFIEKIIGKCNYLSGEKVLPNASLLYEKYRVLNEINSISVDGEKISVEMKQAIVNELLAGGKTVSKKKILSFLVKKGSATSDSIITGIDDKLNNSMASHRFFTDIFGSLNKDNEAVAEDIILWSTIYGSSKDFVTEQILNKYPDMFDEEQLRKIHNLNCKDWGRLSRGFLNMKGFDKDNDEFISVIDAMWSNNLNLMELMYDTRFDFSARVKDKTENAVKNLFSFDYDDLNDLYATTAQRRNIWASVKIVREIVKIKGFAPESIFLDTVKSRPNDIPKESRKGKLTALYKGMKGVSADWKKKMISLIDQCDADGSLKAKNVYLYFLQMGKDMYTGEDISLEELKSPDKRKKHNIDHIYPKHFVKDESIDNLVLTNTDLNRDLSDRYPVPQDIYDNMHEFWQQLRRSGLISAEKLARLSDRNPLSDEKRAYFIGKLYNQAGSSTRMMADIFKNILPKDTKVIYAKTSETNEFRHKFDFPRTTIINDDYLAKDAYLNIVVGNVWYTKFTASPIWYIKEEYRKKKLEYNLNRMYDFNVIRDDRIAWITDKTNPEAATIHTVNKVMNRNTVITITRTTQGHGGLTNATITRADKAKEGVYLPLKTSNERMSVTKYGGKTSITSAYMFLAEHTFKKSRVRTIYSLPLHLVSQIKGKKDLEKYCTDVLHLIEPVIKIAKIMLYSELIIDGYSYLLGGKAGVQYYLRNNVPMRVNAEWQKYVSKIEKYINYKSLDKDMSADRNIELYDELVDKHTNSIYSKRRNTAGDMLKKGRDTFIKLSVKEQLEVLNQIFTLTRMGTNIANLSGIGAGQHVGSITMGCNISTFDSVKLVNRSVTGLFSNEVDLLHI

SEQ ID NO: 20839 - protein, 1393 aa, unidentified
  REGION 1..1393: note = Cas Enzyme sequence
MKKTSDYFLGFDVGTGSVGWAVTDESYNLMHFKGKDLWGMRMFETAQTAEQRRIQRTSRRRLERRRKRLLLLQELFAEEITKVDPAFFQRLKESPFYAEDKHIVQRNSLFNDADFNDKTFHSLYPTVYHLIKALIEDKAAHDIRLLYLACHTIIKKRGHFLFEGDLDSDNRMDDAVKELFEYLREDMEIDFGSDIQAITRILKDNALSLSIKQSRLKETLNIDAKEVQKKAVISLITGGTVELANLFNREEFKDAEQKKIALSKDDFDSVEDKLGSLLNEDFELIRKAKAVYDSSILSAIIGDEQYLSDAKIKIYEKHKNDLALLKKTVKKYHPDSYVKLFKSETEKDNYCAYIGSCKKNGKKVAIEKKSDQEAFYSYLKKILTKKDIQDTEYKSILRDIELQGFLPKQTDKKNAHIPYQLREIELKKILEIQSAYFPFLEKKDVQGMRVRDKILSLLTFRIPYYIGPVNDAHKERFPDRCWVVKKENTKKEKISPWNFDNYIDEDKTAEAFITTRTNKCSYLIGEDVLPRHSLLYSEYTVLNEINNLKIHLHGNNILNIALKQKIYTGLFKKYKTVSKKSIEKFLITEGICSKNDAHDLVITGIDDLCTSSLNSYISLKNIIGEKIEEHSVRMMMEEIIRWLSIYDEGEGKKIIKEKIKQSYSDALTETEIKSILKLKFSGWGRLSKKVLEGIKCDFEGFSEKINIITALRETNYNLMELLSNKNAFGKEIDSLNAGFEDTKAEFSYKSLVKDLYLSPSVKRMLWQTLRVAGEIKKVLKIPPKKIFIEMARGEEAEKGRTQSRQSMIKNLYEECRKDAGKWENDVLTLFSKIEKEDNLKLRSDKLYLYYTQLGRCMYSGESINLETLLTSNVYDIDHIYPQSKIKDDSLTNRVLVKKDVNQNKEDKYPLSLEIQDKQRAFWMFLHSKGFINSEKLSRLTRKTPLSGDELADFIARQLVETRQATKEAGKVLKRLFPDTQIVYVKARDVSDFRQKFDLIKCRDINDFHHAHDAYLNIAVGNVYHTKFTSNPRNFIKESRAEDGDSSYNLNTLFEHDVSVNNRIAWKKNESIACIKKMLAKNTPLYVRHSFCQRGSLFDLTIMKKGKGQFSLKKEGALSSITKYGGYNKVAVSYYVLVEYREKDKIIKSLETVPLYLAADIEKNKDILFDHLNKVLNDKAFKILIPKIKVNTLVYINGFPCHITGKTGERFVVRNAVQFCCNQETTLFLKRILKFNNVKSVYERIKKPFYAYDDYTLRTYVKNEVYGKKAIAVISETEFFKNLDKKLMHLYDYFVDKHKNSIYRKRPNSAVLDVLENGRGRFISLTIEDKLKTIEEILRLFRTVNENCDLENIGGEKKSGKTTMGKNVSNLECCVIVYQSVTGIFERRVDVLAL

SEQ ID NO: 20840 - protein, 1351 aa, unidentified
  REGION 1..1351: note = Cas Enzyme sequence
MKSENYYVGIDVGTNSVGYAVTNEDYKLLKHKGEPMWGSHLFEEGKNAQERRSFRTARRRSDRKKQRVTLVSEIFAPEIIKADERFFIRRKESALFREDVLESDKYIVFNDDDFNDKTYYEKYPTIHHLIYELMTSKEPHDVRLVYMACAYIVAHRGHFLNEVSKDNIDGLLDFNGVYDNFMGTVSDYDDVPWECDKETFKKVLLKKELISTKEKHFLEILNNGKKFKTEDEDIISKEGLVKLISGGAYELGKLFPKCAMEEKISVSFKKSEEDFMAVLLNLADDEANILISLRNVYDWATLSDALKGTKSISESKIAVYEQHKADLKSLKYFIRKYRPEKYYEVFRDGTIEGNYVSYSYNVKNVQKFEIKKKANKEEFCKYISGIIKDLSVSEEDMPDYEDMKLRLNLLTFMPKQVEGDNRIIPYQLYYYELSQILKNAKGYLPFLNQKDSEGYTNEEKILSIMEFRVPYYVGPLRSDNGDHAWLVRKAEGKIYPWNFTEKVDLDKSEQAFIDRMTNSCTYIPGENVVPSQSLLYSSFMVLNEINNIKINGCDIPTIHKQGIYSLFIQNKKVTVKRIREYLEANNLLHKQDILSGLDESVKASLKPYHDFKRLLENKTFNEKQVDEIIERLTYSEDKSRIVKWLKETYPTLPEEDVKYISKLKYNDFGRLSKKFLIEVQGCRKNTGEVFTIMGALWNTNDNLMQLLSDKYTFMDEIEGIRKDFYSNNPQTLESIMDEMYISNAVKRPIYRTLDILSDVRKACGSVPKKIFIEMARGEGEKGKRTRTRRDQIKDLYETIDKEEVRELSRQLEDRSDNELQSEVLFLYFMQLGKSAYSGISLDIDKLKTNLYNVDHIYPQSYVKDDSIDNKVLVLSEENGAKGDIYPIKKEIRDKMQPYWNMLMKNHLISEEKYKRLVRNTPFTDEEKTGFINRQLVETRQSTKALATILKMKYPEAEIVYSKAGLVSDFRHEFGMLKNRSVNDLHHAKDAYLNIVVGNVYHCRFTKKFYIDQKYSLKTKTIFTHNVMDGDKIVWDGKNSIENVRRTMMKNNIHCTKYAFMRKGGLFDQNPLRAGEDLTPRKAGLDTEKYGGYAKSTATAFLLVGYKDKGKKEAMIMPVEYMVSGKVFAEEDYALIYTKETLEKVWGRSDDQITEICFPLGLRPIKINTVLSFDGFRACITGKANKGKIIGLSSMMPLVIGESWEMYVKKLDSFSNKKEYNKNLILDEKYDEISREKNEQLYEVLVGKIDNNLYSIPFSTQAPVLKDGFDKFKNLETEKQVKVLKQIILLLKSGRAGNCDLTLVGGKGTAGVYNASSKISNWQRQFSDVRIINVSASGIYETCSCNLLELLS

SEQ ID NO: 20841 - protein, 1359 aa, unidentified
  REGION 1..1359: note = Cas Enzyme sequence
  REGION 822..824: note = misc_feature - Xaa can be any naturally occurring amino acid
MKKEKNYYLGLDIGTDSVGYAVTDEQYNLIKYHGEPAWGSMIFDAGQLKADRRSIRSARRRLDRRQQRVKLVQEIFAKEIAKVDERFFLRLQESYKWREDVKDQYIFFNDEDYTDIQYGGEYPTIHHLIKELMDNPEPHGVRLVYLACAWLVSHRGHFLSNIDEKNIEEIRDIYSAYQGFIQFCTDKECDNPFHDADMEKLAEALKEKSGVNSKRNKLAEALLNGKKPAKACMEDFPYSEDSILRLLAGGTCKLKDLFGKEEYEEFGSLTLGQDEDKFAELMGNIGEDYDLIAVLRAIYDWAVLADTLGDAKSISEAKVNVYDRHKDDLSFLKYFIQKYLKGKYNEVFREVREDNYVAYAYHTKGMDEDQKEKLKKKADIEIFSKYILKIVKDIQPDDGDKEKYADMIQRLELREFMPKQKNTDNRVIPNQLYLYELNKLLENASVYLPFLLAKDEDEITNKDKIISIFKYKLPYFVGPLNENSNFSWVKRKEGRILPWNYKEQIDFDASEEAFIKKMTNSCTYLPGENVLPKDSLCYQKFMVLNEINNLKVNGIKIPVEVKQSLYHDLFERKRKVRRKDITEYLISNNILEKGQEDSVSGIDQEIKSSLSSYFSFRRLMENGTLSEEDVEKIIERASYAEDKSRVAKWLTKNYPVLSEEDRKYIVRIKIKDFGRLSKAFLKETEGMDKETGEVTTILRAMWDNLMELLSSDYSFADVLAEERKEYYGRAKKTLEERLDDMYVSNAVRRPIYRTLDIVQDINKAFGAPKKIFIEMTRAADPDKKGKRTSTRRQQIETNYAKCQDEEVRDLKNELEKLGERVXXXNKLQGDRLYLYFMQFGRCAYSGEPINLEKLMSGSKEYDVDHIYPQAYVKDDSIINNKVLVLSELNGAKKDIYPINSTIRHQMKPIWEHWKEVGAISEEKYNRLVRSTEFTDDEKYGFINRQLTETSQSTKAVADLLKEKFPETKIVYTKARLTSEFRQEFDLPKSRIYNDLHHAVDAYLNIVTGNVYDMRFSRQWFNIHMNYSIKTKTLFTHPVICNDIIVWDGADMLKKVIRTAQKNNAHFTKYAFFKKGGLFDQMPVKKAEGLVPLKKGLPTEKYGGYNKSGAMFYIPTQYKRGKKEEIIIMSVELMYGKQFLADEAFAKRYAFDRLYTILGKRVESVSFPMGMRPWKVNTMLSLDGFRVCITGIGSGGKCLSAQPVMQFSSHPYWKYYIKKIERFVEKTGANSNYIYDQEYDVVASDKNIELYDLYIDKLENNIYIKRINSPIQILQEGKMLFASLDIRKQCQALLNIHAVFGRMTSGCDLSMIGGSAHSAATVNFSSTISNWKKNYTDVRIIDQSASGLWEKQSQNLLELL

SEQ ID NO: 20842 - protein, 1225 aa, unidentified
  REGION 1..1225: note = Cas Enzyme sequence
MKKEKNYYLGLDIGTDSVGYAVTDEQYNLIKFHGEPAWGSMIFDAGQLKADRRSFRSARRRLDRRQQRVKLVQEIFAKEIAKVDERFFLRLQESYKWREDVKDQYIFFNDEDYTDIQYGGEYPTIHHLIKELMDNPEPQDVRLVYLACAWLVSHRGHFLSNIDEKNIEEIRDIYSAYQGFIQFCTDKECDNPFHDADMEKLAEALKEKSGVNSKRNKLVEALLNGKKPAKACTEDFPYSEDSILRLLAGGTCKLKDLFGKEEYEEFGSLTLGQDEDKFAELMGNIGEDYDLIAVLRAIYDWAVLADTLGDAKSISEAKVNVYDRHKDDLSFLKYFIRKYLKGKYNEVFREVREDNYVAYAYHTKGMGEDQKEKLKKKADIEIFSKHILKIVKDIQPDDGDKEKYADMIQRLELREFMPKQKNTDNRVIPNQLYLYELNKLLENASVYLPFLLAKDEDEITNKDKIISIFKYKLPYFVGPLNENSNFSWVKRKEGRILPWNYKEQIDFDASEEAFIKKMTNSCTYLPGENVLPKDSLCYQKFMVLNEINNLKVNGIKIPVEVKQSLYHDLFERKRKVRRKDITEYLISNNILEKGQEDSVSGIDQEIKSSLSSYFSFRRLMENGTLSEEDVEKIIERASYAEDKSRVAKWLTKNYPVLSEEDRKYIVRIKIKDFGRLSKAFLKETEGMDKETGEVTTILRAMWDTNNNLMELLSSDYSFADVLAEERKEYYGRAKKTLEERLDDMYVSNAVRRPIYRTLDIVQDINKAFGAPKKIFIEMTRAADPDKKGKRTSTRRQQIETNYAKCQDEEVRDLKNELEKLGERVDNKLQGDRLYLYFMQFGRCAYSGEPINLEKLMSGSKEYDVDHIYPQAYVKDDSIINNKVLVLSELNGAKKDIYPISSTIRHQMKPIWEHWKEVGAISEEKYKRLVRSTEFTDDEKYGFINRQLTETSQSTKAVADLLKEKFPETKIVYTKARLTSEFRQEFDLPKSRIYNDLHHAVDAYLNIVTGNVYDMRFSRQWFNIHMNYSSVSFPMGMRPWKVNTMLSLDGFRVCITGIGSGGKCLLAQPVMQFSSHPYWKYYIKKIERFVEKTGANSNYIYDQEYDVVTSDKNIELYDLYIDKLENSIYKKRINSPIQTLKDGRALFIALDIRGQCQTLLNIQSIFGRITLGCDMTLIGGKTHSAATVSFSSTISNWKKNYTDVRIIDQSASGLWEKQSQNLLELL

SEQ ID NO: 20843 - protein, 1155 aa, unidentified
  REGION 1..1155: note = Cas Enzyme sequence
LDRKDPQIKNLAKLLTGYEAKFTDLFGEQYKEAGTTKVKLSKVEEDTLDQLRSTLEDDHFELILAASAFYNLVRLETLLQGADSLSQTKINIYEKHGKDLKRLKSVFRKYVSQEEYHYFFSKSAKGLDNYVAYSGYHTVKKVKHPVLQKCNQESFLDYLKKTISRFPQEIQANNDVVEILNEVEKGTFLPKITDKDNSLIPHQLHHAELQLILRNASTYLPFLNEIGSDGFTKAQMISLISDFRIPYYVGPLNPAHSIQKSPNSRSHHAWITKLVNEPVRPWNFNRVVDVEQSASDFIANLTNKCTYLIGEDVLPKESPIYAKYSILNLLNSVKVKGERLETSLKQKIFRHFFLDPDRKRKATKKAIADFIKSETGSNIMETDIEGMDLEIPGEMKAEKLIEKIAPGKLTAEEKETIVRLITVFPDSFKMIYTRLSRELDKKLTPQQITQLSRLKFTGWGRFSERFLDGIEAPNEKAEFKTIVDLMWEESLNLQEVLSSRYLFKDIVQQINDDLIGSSRSFSYNAIENYPVSPAVKRMVWQAIRIIKELIKVNHGKAPSKIFLEVAREEGEKVRTKSRKTQLLELYKDLKKQEESLYSDLNDRSEAELRSKKLFLYFTQLGKCMYTGERISVDSLNNKGADGHDIYDIDHIYPRSVTKDDSLLNNLVLVKSSANRDKGNEYPIAEPIRTARRGFWAQLKTSGLITEEKFRRLVRQSHLSEDELAGFINRQLVETRQAAKAAADLIKQFLPETRLVYVKAGHVSDFRNRQSDFRFPKIRGMNDLHHAKDAYLNIVVGNVFDSKFTNNPLNFIRKSNSEKPKYNLARMYDFTVKSPDGVLAWQPGETGTIAVIKKMMTRNNILVTYQTHHQHSGRNGGIFNQTILPKGQGQFPIKTADSRLTGQSGIDKYGAYTDETGATFCLVEHQQGKKKARTILSIGLGWYLTHPLNEEALQNYCLETLRLQNPKILIKDIPYNTIISMDSYPLRILAKTGTSLKVANTIQPIFSAELEPVIKEMFFQINKETVEDEQAVVGEEFIKADFLRLYDAFIEKLGNPPFSRLSAYANQASNIKQGRQKFQELTVKEQAKVLNQVLTLFLCDSRLSDISLISPLKNGKPQNTQAGMITIAQNLPWDKKEFSICYQSVTGLFEKWVKVS

SEQ ID NO: 20844 - protein, 1135 aa, unidentified
  REGION 1..1135: note = Cas Enzyme sequence
MSKILGLDLGTNSIGWALIENTTILGMGSRVFPEGVINLGEGEGREISKNASRTDSRGKRRQFFRKRLRKRYLLKELAKHSLCPIPASLIRDWNGIEIFKNELLQEWLRRNPYELRAKAVSEKITLLELGRIFYHMIQRRGFLSNSRSAGSEVKESSTLFKGDTKIGKIGINETLQSIEKKKTLGSYLHSIFPKENEPFSGELERIRNRYTTRQMYIDEFEAIWEFQKNHHSELTNNLKTIIGGRKKDGYKEDGVLFHQRPLRSQKHLVGHCSFETKKTKCQLSAIPFEMFRVYQWVNTVSYDLNGERQKITPQEKEKIVALLLSKEKIKFKEIRQKINRLEAYYQFNYKDNEQIIGTHTISKLSNKMFFGKEWFNFSDTEQENIWHILSFFDDRDKLKEYAIKNWNFDEEKAIKISRFNLKEGYANLSRKAINNILPFLKLGFMYDIAVGLAGVKNVLGNSYKEHEQFVFDNVPEIVRSNLKGGYIEPLKQMMKNEFSCTEIQLKKLYHHSSSITTNEVLDRLPLGPEADKEIQKIKNPVVITALFEIRKLVNEIIDAYGKPNEIKVELARDLKVSKKNRNDTRRKQQVLEKENDRVKGEIEKLGMRLNHTNILKYKLWEECNHTCPYTGKTITISQLFTSEIEIEHIFPWSRSLNDSFNNKTLCFTYENRAKENKTPYEFYSSQGDEKWEAIKLQALNCFKTKAKYPNCYTKFKHFVKKKHDEDFISRQLNDTRYISKEAKNYLSKICTKVLVAPGQMTATLRRHWGLNSILNKEDNTKTRDDHRHHAIDALVMACSTRSHLHELTKRNRYRKNHELKDFPDPWFNFRRDVEKAVEQILVSHKKTKNILTIRPHTTIKKGVKHRNIGVAARGQLHKESVYGKRKDVFTKELNYHIRKPLILLSAAEIPKIVDLEIKKIIYKAIEEIGLNIDDNRKPIVKTREDKKLFEQLLSKPFFLPNKNGNPVPIKKIRIQKKFSNAKPLKESKNQWVDLGKNHHVLIYKDLNGNLKEDVVTFWTAVNRKRKGKEVFQLPKDGKEMVTTLQKNELFLLGLKDDDIDWKNLNYNLLKKHLFKVQVLSSFFYEFRLSTDSTQNKDTKSKVFRRIQSFSDGKTGWKTHNPIKVKVNSIGKIEKI

SEQ ID NO: 20845 - protein, 1007 aa, unidentified
  REGION 1..1007: note = Cas Enzyme sequence
LIEKLENSEGLSTEDAAWIKQIPSRLENEEFLRRLRTSDNGSIPYQLHLEEMDAIIKNQGKYYPFLLKEKDKIESLITFRIPYYVGPLTLKNAARDAYGKPRFAWIQKKEKEAHTRILPWNWEDVVDKHATAEAFIRRMTGKCTYLYAEDVLPKCSLLYEEFCAYNELNGTRWTTDNDQYNRFSADYREGIYKDLFVISKGKITYKKIENWLEQQGELHPHVKGGQGENGLESRLSSYHFFKELFEFNALTTPQRQIIEKIILWNTIFEDRTILNEKLNSRSFQMEFTAAFNNPLTADQIQKICKKRFTGWGKLSKKLLTGLSVDIDGERLTILDLLINGDVTDGRKGRALIFQEIVTMNQFKEAISKTNEEALSKCIIDIDDLPCSPADKRTVNQALRVVDEIASIASCAPSRIFIEVTRENDTKNKGKRTDKRTSKLEMGLKKLRDHEDTKAILEELKEHKTKLEAHENSDEKLMLYFAQNGKSLYSGTPLDINDLSHYQVDHIIPQSYIKDDSIDNKALVLAGENQRKSDSLLLEDSIRRKMTHTWNALFKAGLMSEKKLNNLKCSNITDRRLKSFINRQLVETSQICKYAMQLLKEKYPRCEIIPVKAGISSGIRKTWDIAKCRDANDYHHAHDAYLACEVGRFIQLHYPKIYSNPTAYNKEVRGLIQSNIIHSASEGNGRYRLPGDSGWLTYSFAHKNTDTWNCDAEKDRLLRYVDYPDCFVTRMAYIETGAFWKQTIYSPHNEKAKDLIPLKKHLDTNKYGGYSSKKYAIFFVYASQNSKGVKECHLSGLLIAKLAVATDNATGKIDMHRLIKLEEQLVAARGTSIQILQPIVYKNQMIEFGKRREIITGLKERRNAKELAFKQQHMRLLKKWNDDIQEEGHKTTEVIDEDAQLNEMFDLILEKTDHCAPALHNKLLNIVGADVDDYARIEQKFAAISDKDTKKRVLFKIISNANAQENQIDLTAIEGSKHFGVISDWPKKFDIIEQSVTGMFEKRIHIGI

SEQ ID NO: 20846 - protein, 1402 aa, unidentified
  REGION 1..1402: note = Cas Enzyme sequence
MNLRKASDYSVGLDLGTGSVGWCAVDSNGYLYSFKRKPTWGSRIYGSAAPAADARQFRSLRRRYDRRRQRLNLLQELFSEEMYHVDPDFFIRLNQSQLLKEDRDETCKDYACPLFKTAADEKQYYKTYPTIYHLRAALMHANQKIDLRLVYLALHNIVKYRGNFLYQEYAHLSAKDAGLSKQCSNFFTSIEHFEDERHISFSYNTEDIIQFLDNLKPTRAQNCDKWQNLFVCEASDDIPEKRAKDITKCIAQAIFGYQADFSALFGTEKEKSKFKLSQDEKVMDFEKICPTEFLPLFNALKAMHSAYLLTTVIKNSNGGTISNAKIAQYNAYHIDLSKLKELVKRILGKDEYNAFFQGVYYKNTKLYNKQKAKGYTAYDLGKLSYDDFVKELKKLIEKLEKSGDLSTEDAAWIKQIPSRLENEEFLRRLRTSDNGSIPYQFHFEEMDAIINNQGKYYPFLLKEKEKIESLITFRIPYYVGPLTLKNAARDAYGKTRFAWIQKKEGAEKTRILPWNWEDVVDKHATAEAFIRRMTGKCTYLYAEDVLPKCSLLYQEFCAYNELNGTRWTTDNDQYNRFSADYREGVYNDLFVMSKGKVTYKKIEHWLEQQGELYPHVKGGQGEAGLESTLSSYHFFKDLLKFDVLTAQQEKVIEKIILWNTIFEDRTILKEKLKAQSFQTEFTSAFSRVLTAEQIQKICKKRFTGWGKLSKKLLTGLYVNINGEQLSILDLLEHGDVTDGRAGRALIFQEIVTMKQFKEAIVKANEKALSTCVIGINDLPCSPADKRTVNQALRVVDEIASIASCAPSRIFIEVTRENDTNNKGKRTDKRTSKLEMGLKKLRDHEDTKAILDELKDHENLSEKLMLYFAQNGKSLYSGTPLDINELSHYQVDHIIPQSYIKDDSIDNKALVLASENQRKSDSLLLDDSIRRKMSNTWNALFKAGLMSEKKLNNLKCSSITDRRLKSFINRQLVETSQICKYAMQLLKEKYPHCEVIPVKAGISSGIRKTWDIAKCRDANDYHHAHDAYLACEVGRFIQLHYPKIYSNPTAYNKEVRSLVQSNIKHSESKGNGRCRLPGDSAWLTYSFAHKNTDTWNCDAEKDRLLRYVDYPDCFVTRMAYIETGAFWDQTIYSPHNEKAKDLIPLKKHLDTNKYGGYYSKNYALFFIYALQKKKGNKKYYLSGLPIAKLAAVTNNTTGKIVMHRLIQLEEQLVTARRASVQIVQPIVYKNQLIEFDGRREIITGKEERKYAKELAFKQQHMRLLKKWNNDIQEEGHKTTEVVDENVQLNEMFDLILEKTAHCAPALHNKLLNIVGADVDNYALIEQKFAAISDKDTKKRVLFGIISIANTNTNPNKNVKKWKADLTVMGGNKGFERIRDWPKKFDIIEQSVTGMFEKRIHIGI

SEQ ID NO: 20847 - protein, 1254 aa, unidentified
  REGION 1..1254: note = Cas Enzyme sequence
METDEKADLRLVYLAMHNIVKHRGNFLREDEKNLKSKDANPAKASKAFYSALKEWCAAHDYSEPADKSAQLTKILLNEEKLNRSSLVQEIVPLVVISGAENLDPKRASKAFANAMLGLAAEFKDIFGDFACEKTKVSLGAEEDFDALKEACPDDSVELLDALCGVYSAFVLQGLLSYAPGESISANMIKKCEQYDADLEILKGLVREYCSKEECKAFFRGPTYHELDAEDSSEDYSYDKAQGYTAYNLHKLGYDDFKKEVEKLFKGTGATSDERYVDMIARFERQQFLRRLKTSDNGSIYYQLHLEELKVIIENQSRFYPFLKRDAAKIESLVSFRIPYYVGPLTGKNARQDAHGKNRFQWSERKPGMEDAVITPWNWDQVIDKNKSAEKFILRMTGDCTYLAGEKTLPKCSLLYEEFCVLNELNGVRWSDDGDDWRRLDAAQREGIINDLFHKSRRVTYKKIADWLVRQGDATNPRVRGGQGESALESNLGSLIFFTKDIFPGEEIVPGTRLYKDVETIILWNTLFEDRAILREKLESEFGQSGKGLLSDAQIKAICKKRFTGWGRLSEKFLCELKVDAQNGRKVSIMDVLREGNPNSTRRNGETMVMMEVLRDEDLGFQKAVDAANRAHYAKEGSILGVNDLPGSPAIRRSLNQAIRIVDEIAGIAGHAPENIFIEVTRDEDERNKGKRTKRRYEQLKVALETFKNENPQIWDAQIWDEFRRITPADLDERLTLYFMQRGKCLYSGRPIKIEQLSNAGLYEVDHIIPRAYIKDDSLENKALVYREENQRKTDELLLDESIRRNMSSEWRTLHDAGLIGDKKFNNLLRSHISEGAMRGFIARQIVETSQMVKLTQSLLEARYANAGTKVVPVKASMSHNLREAAGFVKCREANDFHHAHDAYLACRVGLFIQMRHPGIYDNPIGYTRVVKDYVRSQAEEFNKRHQMPGSAGFVINSFMKSGFDKETGEIFRDGWDAEAELEGMRRALNYRQCYISRMPEEDTGVFWNATIYSPRNPKMGPKLALPVKQGLDPKQFGGFSSQQFAYFFIYEAKKKGKPCFQFAEVPVWLAGRVGSCPDALADYAAELAQAAGLEFVRIERAKIYKKQLIELNGERFVLRGKKELLSANELAFTLAELSTFKEDSSSEEIDSVLRSISSSSSVVGKRVARLLDLPTLGERAVSLGVDEKRGLLRSLCPVLNGSNDRIDLSLIGGPKRTGTLQVSFTGLLNNVEVDFEIIDQSVTGMFERKTRVGL

SEQ ID NO: 20848 - protein, 1329 aa, unidentified
  REGION 1..1329: note = Cas Enzyme sequence
VRRRWRLDLLQQLFQDEVSKADPEFFIRLRQSRLLKEDREEGHRDYNHPLFNDSDFTETDYYNRFPTIYHLRKWLMETDEKADIRLVYLAAHNIVKHRGNFLRQENTSLSAKNARPLDALREFRSALVDWCAELGYECNPDESGEISNEILSVLEEEHVANSDKKKRISSLIGVAMNEGAKESKACNDALAGAMVGLKAEFKNVFGEISAEQTSIYLSNDEAVDALCEGIPDEGLELFGKLCSVYSSYVLQGLLSYAPGQTISVNMVAKYEKYGNDLKTLKALVCEYARAEYDSFFRGEFYRDQDGHELNIYNASKAQGYTRYNLGTSKMSYEDFEKAVKKLFAGTAAEEDSRYLQMMKEFGEQRFLRRLKTSDNGSIYYQLHLEELTAILANQGKHYPFLMEDVEKIKSLVSFRIPYYVGPLTDRNARKDRHGKNRFAWSERKPGMEDAVITPWNWDEVIDRGKSAEAFITRMTGMCTYLQGEDVLPKCSLLYEEFCVLNELNGSRWGMDGDKEHRFDAADREAIIEELFKKKKTVKYKDVANWLEREPGHMNVHVLGGQGETGYESKLSSYYFFRRDIFDVEELDRADYPMIEQIILWNTLFEDRKILKEKLEDAYGPKGNGRLNDDQIKKICRKRFTGWGRLSKKFLTGIKVDTDCGPRSIMDVLREGDPNAGFRGKTMVMMEVLRDENLGFQQKVDEFNKNYFGQKGKALEVNELPGSPAIRRSLNQAIRIVDEIAKIAGKDPENIFIEVTRDDELDKRGKRTKRRYDALKEALTVFKKEDPEIWAELQATSPSDLDERLTLYFMQRGKCLYSGEPIDINKLSSGEYEVDHIIPRSYIKDDSLENKALVCRKYNQSKTDAMLLDPSIRQMRSYWDMLLDAKLIGPKKHRNLLRDHIDEKAMKGFVARQLVETSQSVKLVGSLLSVRYPNANIVPVKASMSHDLREAAGFVKCREANDFHHAHDAYLACRMGLFIQMRHPKVYENPIAMTYVMRKYAQQQSKEFNRNHRVPGTSGFIVNSFMSSGFDAETGEIFKDTWNAEAEIEGIRKALNYRQCYISRMPMEDTGAFWNATVYSPRDPKMGPKLALSLKQGLDPKKYGGFSSQQFAYFFVYEARDKKDKQVFRFAEVPVWLASQIESDKTALERYATELAEAEKLKFVRIERAKILKKQLIEIDGDRFILTGKKEMRNGRELALSQEEILNLIVAGDENALPDDRGNASDVVFDAIVRQGDEIGLRLYKQLKIAEIAERYRSVGTDAKVGAVMSLLSSINASSNMVDLSMVGGSRYAGNLKPNYSNLLSDPETNFVIIDQSVTGMFERRTRIGL

SEQ ID NO: 20849 - protein, 1404 aa, unidentified
  REGION 1..1404: note = Cas Enzyme sequence
MNLRNYPGSFNIGLDLGPASAGWSVVDSEGKLFHFKKKPTWGSRLFDSAQTASEARMHRGQRRRYVRRRWRLNLLQALFTEEMEKVDPGFFMRLNHSRTVEGDPIFTKDFTKKDYYKRFPTIYHLRAHLMETDDPADLRLVYLAIHNIVKHRGNFLRQEEKLTAKIANTSEALGKLSVSLKEWCDSRGYSAGKVDEEAIAAVLADERISRSQKAKNVTLLISVDTGDSKANAKLAKALANAIVGLQAEFKDLFGDFECEATKLNLSEEEKLEVLQAACPDDSAELLEAVCGAYSAYVLQGLLSYAEGQTISHNMIKKYDCYAEDLECLKALVRDYLPKTKGDDGLKPFDRFFRGVTYHDLDKSDPSRDYDVSKAKGYTAYNLHKLSYDEFRKEVEKLLKGTGAQDDERYITMMDAFEKQRFLRRLKTSDNGAIYYQLHLEELQAILENQGRFYPFLKQEASKIESLVTFRIPYYVGPLTSKNAAKDAHNKNRFQWSERKPGMEDAVITPWNWESVIDKNRSAENFIMRMTGDCTYLAGEKVLPRHSLLYEEFCVLNELNGVRFTNDGDNWHRLDSEQRAGIIRDLFHKKRSVKYADIAAWLVRMGYLERTPQVRGGQGESGLESKMSSYLLFAKDVFGVDELDEALFPAIEQIILWNTLFEDRSIFEEKLRDEFGPNGNGMLNDEQIKKCKKRLSGWGRLSEKFLTGIKVTTQGGRQVGIMDVLREGSPNSERRQGEALVMMEVLHDNTFGFQKKIDEVNRVYYAQNAKAMGVNELPGSPDIRRSINQAIRIVDEIVKIAGHAPGNIFIEVTRDEDEKKKGKRTVKRWDRIEAALNAFRAEGGDLAVMGDFKRLKGAEADLSERLTLYLLQNGKCLYSGRAIDLEALMAGSGEYEVDHIVPRAYIKDDSLDNKALVYRSENQRKTDQLLIDEKVRQKMGETWKQLHDAKMISDKKYNNLMRLTVTEGAMKGFIARQLVETSQIVKMTKALLEARYGDVGTKIVPVKASMSHNLREVAGLVKCREANDFHHAHDAYLACRMGLFIQKRYPGIYENPIGYAHAMKKYVLEQSELFKKTHWMPGSAGLIVDSFMTAGFDPETGEMFEDAWAGNDETKRYKKKRYDDAWNAAAEVESIRRALNYRQCYVSRMPYEDSGKFWDANPISKRSNPKLALKSTLDPACFGGYNTKTAAYFFIYEVTDKKGMTGLRIAQMPIFMKAKCESDNAAFEKYCQDLESGSRVSFTRIVIPKLLKWQLVEIDGSLLRINAEEEMKSASQLAFSQEELERILLVCTDGYLDADVNRSVYMAIAKALERAKCPMLTKDLDLAGRFDAFCGLAVADQKDLLKKILLLCRGNKQSSPINLSSVGGKKKAGHLRPARYKVPDGMVLIDQSVTGMFERRTRVGV

SEQ ID NO: 20850 - protein, 1408 aa, unidentified
  REGION 1..1408: note = Cas Enzyme sequence
MNLRNYSGEYSIGLDMGTNSVGWAVTDEHGKLLHFKKQPTWGSRLFDAAQPASEARVHRGQRRRYVRRRWRLDLLQKLFEPAMNEVDPGFFMRLNQSRTVEGDPIFTKDFTKADYYERFPTIYHLRAYLMDTDEQADLRLVYLAIHNIVKHRGNFLRQGEKLTAKTAKTSDALKRLNGSLQTWCESREYEAQKINESVVAKILADEKSSRSQKAKDIQALVKVDTGDAAANKKLAKGLSNAVVGLQCEFKDVFGEFECEATKLALSDDEKLEALQAACPDDCVELFEAICGVYSACVLQGLLSYAEGQTISKNMIAKYKQYNRDLETLKYLVHGAPKDKADKFVGYAPGTYDAFFRGSTYHDANTDDPSRDYDVSKAQGYTAYDLHKLSYDDFAKSVKKLFTGTGAETDERYIAMMDAFDKQRFLRRLKTSDNGAIYYQLHLEELQAILKNQGRFYPFLKDEAGKIESLVTFRIPYYVGPLTPKNAAQDKHGKHRFQWSERKPGMEDTTITPWNWDTVIDKNKSAENFILRMTGDCTYLAGEKVLPKQSLLYEEFCVLNELNGVRWSEDGDDWQRLDAAQREGLVHELFHKKRRVTYKMIADWLVKEGDATNPVVRGGQGESGLESKMGSYIFFAKDIFGVDELSRAEYPVIEKIILWNTLFEDRSILKEKLQDEFGPSGNGMLDAEQIKKICKKRLTGWGRMSEKFLTGIRIDTQAGRSMSIMDVLREGNPSSERRLGETMVMMEILHDNTLGFQEKVDEHNRKYYAENEKSLGVNELPGSPAIRRSLNQAIRIVDEIAKIAGHAPANVFVEVTRDEDEKKKGKRTTKRWDAIEDALKAFKAEGGDLSVMGDFKELKAAGVDLDERLTLYLMQNGKCLYSGRAIDLNKLMAGSGEYEVDHIIPRAYIKDDSLENKALVYREENQHKTDQLLIDKSIRWKMGETWKQLHQTKLIGDKKYRNLLRSSINENAMKGFVARQLVETSQMVKMAQALLEARYVDEGTKIVPIKASVSHNLREAAGLVKCREANDFHHAHDAYLACRLGLFIQMRHPGMYENPIGYSHVIKKYVREQSELFKKTHRMPGSAGFVVNSFMTAGFDPETGEVFDDAWSEDDEVKRYRGKYLPDGWNAAAEVEGIRRALNYRQCYVSRMPQEDTGAFWDATVYSPRSGKSLSLSLKQGLAADRFGSYSREQFAYFYIYEALKKDKPFYKFCQVPVSMRLRVAQEPSLLDEIAARDAEESKLQFVRIERDKIFKKQLFEINGCRLILTGSEEFRNGREVAFSIRQLEALSGSIGNAECEDLLDEIWMDFLSEMGPARGFLFKGLKLANYNERFYGLRAEEKRSVLLGLIKLVNADANVVDLSLIGGPKNAGKIRPPRSKLLNDRYTDFYIVDQSVTGMFERRTRVGL

SEQ ID NO: 20851 - protein, 1401 aa, unidentified
  REGION 1..1401: note = Cas Enzyme sequence
MNLRNCSGDYNIGLDMGTGSVGWAVTDDQGKLLHFKKQPTWGSRLFDSAQLASEARVHRGQRRRYVRRRWRLDLLQKLFEPAMSEVDPGFFMRLNQSRTIEGDPIFTKDFTKADYYDRFPTIYHLRAYLMDTDEQVDLRLVYLAIHNIVKHRGNFLRQGEKLTAKTAKTSDALERLNDSLQAWCESREYDVTKINKSAVAKILADERSSRSQKAKDIQALVKVGTADAAANKKLAKALSNAVVGLQCEFKDVFGDFECEATKLALSDDEKLEALQAACPDDCVELLESVCGVYSAYVLQGLLSYAEGQTISVNMIEKYNCYANDLDRLKTLVREYAPGSYESFFRGATYHDSNSDDPSRDYDASKAQGYTAYDLHKLSYDDLAKSVKKLFAGTGAETDERYIAMMDAFDKQRFLRRLKTSDNGAIYYQLHLEELQAILKNQGRFYPFLKDEAAKIESLVTFRIPYYVGPLTPKNAAQDKHGNHRFQWSERKPGMEDATITPWNWDTVIDKNKSAENFIMRMTGDCTYLAGEKVLPKQSLLYEEFCVLNELNGVRWSEDGDDWQRLDAAQREGIVHELFHKKRRVTYKMIADWLVKEGDATNPVVRGGQGESGLESKMGSYIFFAKDIFGVDELSRAEYPVIEKIILWNTLFEDRSILKEKLQDEFGPSGNGMLDAEQIKKICKKRLTGWGRLSEKFLTGIRIDTQAGRSMSIMDVLREGNPSSERRLGETMVMMEILHDNTLGFQEKVDEHNRKYYAENEKSLGVNELPGSPAIRRSLNQAIRIVDEIAKIAGHAPANVFVEVTRDEDEKKKGKRTTKRWDAIEDALKAFKAEGGDLVVMDDFKELKAANVDLDERLTLYLMQNGKCLYSGRAIDLNKLMAGSGEYEVDHIIPRAYIKDDSLENKALVYREENQHKTDQLLIDKSIRWKMGETWKQLHQAKLIGDKKYRNLLRSSINENAMKGFVARQLVETSQMVKMAQALLEARYADEGTKIVPVKASVSHNLREAAGLVKCREANDFHHAHDAYLACRLGLFIQMRHPGMYENPIGYSHVIKKYVREQSELFKKTHRMPGSAGFVVNSFMTAGFDPETGEVFDDAWTEDDEVKRYRGKYLPDGWNAAAEVESIRRALNYRQCYISRMPQEDTGAFWKATIYSPRDPKMGAKLELSTKQGLDAKQYGGFSSQQFAYFFIYEAKKKGKPVFRFSQVPVWLAARIEGDSAALGEYAREFAEKEGLEYVGITRSKIYKKQLIEVDGDRLIITGAKEVRSGSQLAFSQDEMLLLNMSKKDERLSVLPLLEGLVHKIDHAANATCGKLSRQLKLSRLSSVSVLDELQQRELAFGLIRIENGADRVVDLSGIGGPAKAGAMVTDMSKLINEPAAPFFIIDQSVTGMFERRTRVGL

SEQ ID NO: 20852 - protein, 1397 aa, unidentified
  REGION 1..1397: note = Cas Enzyme sequence
MWNPKKGDYENSLFEPCSVISYGNQLRYFYYKQIDFFCQEWRRTKMNKKYYLGLDIGTNSVGWAVTDENYNLYKYAGKRMWGIRLFEAADTAAERRMKRSNRRRLSRKKQRIDLLQELFSEEIVKKDLTFFIRLNESRLHFEDKSTGEKYPLFVDKEYTDIDYHKQYPTMYHLRKELIENPEPHDIRLVYLACHHILKNRGHFLINGSISDVKNLSFVCGEMIKEFNSVSEYEISLTDIRELERILSDKKTAKSVKAKQVAQLFECTPAEDKEQQKCAKIIITNLSKLIVGLKGDISKMFHQPLEEISTKSFKFTEAKYEDEIMPAIEENYPDYASVIDRIKGVYDWSVLVEILDGEDYLSFAKVKAYEKHGKNLHILKNVMKKYCKDEVYQAFFNGINEKNGYGNYIGAIRKNGHTYKMDRCKSEEDFYKGLQKTLSMIVPDQEDEELLEKLKTEVENQTLLPLARSKENGTIPNQVHLQELMKILDNAKGYLDFLKKEDEYGTIAEKIISIAKFRIPYYVGPLSRRHKGEGSNSWMIRKEEGRIYPWNFGDKVDVEQSNKEFIERITNKCTYLIGEDVLPKNSLLYSKYMVLNELNNLKIRGNKISVELKQRIYKDLFCTMAKVTGKRILEYLKMEDPEIVQEDISGFDIDFKSALTSYLDFKKQVVGNEIEKDHYKEIIEEIIKWKTIYDDDSKMMRRMIEREYPEVFDKEQIKKICQLKYSGWGNFSDRFLNGVRGADKETGESYTIIEALWKTNYNLMQLLSKQFSFKEEIDQINAEKAGDVGKINYKNTVKDLIVSPSNKRAIWQTIQIAEEIKKVMKCEPERIFIEMARGGEKEKKRTVSRKTRLQELYAGCKDDTRNWMKEIGDREEREFNSRKLYLYYTQMGKCMYTGDEIDVDALMKGNSNWDIDHIYPQSRIKDDSLDNMVLVRKDVNNKKRNKILSPKIREDMKQYWKMLYQKELISKKKYDRLTRTTDFTDEELSGFIERQLVETRQSSKAVAELLQRLYKDSEVVYVKAGLVSDFRHDNDLLKSRRVNDYHHAKDAFLNIVVGNVYHARFTSNPRKWIKDNRDSNYSIRRVFNYDVKQGDKIVWHGSENGGHSIDHIKKTMSRNDILYTEYTYCEKGQLFNETLAKKGNEKAIALKKNLDPVKYGGYTTPKTSAFAFIEFDGKKKERKNHIVGIPVYVVNIAKREPDAVKKYLEERKGYSNVVIKKYPIKKNSLIKMDGYLARLRGANETDIILKNAVQLILNKDLYEIVRKIEKYLEYNSQYQADAKFEGFTMKDLNMIYEELYLKLKESIFQKRPAQQMKTLEKGKEAFISIDNLGEKAKVINEIITMFRCDATTVANLKAINGSQNAGSMKVKKNTLTSKSLKVVHQSITGLFETEEELV

SEQ ID NO: 20853 - protein, 1397 aa, unidentified
  REGION 1..1397: note = Cas Enzyme sequence
MWNPKKGDYENSLFEPCSVISYGNQLRYFYYKKIDFFCQEWRGTKMNKKYYLGLDIGTNSVGWAVTDENYNLYKYAGKRMWGIRLFEAADTAAERRMKRSNRRRLSRKKQRIDLLQELFSKEIAKKDPTFFIRLNESGLHLEDKSTGEKYPLFVDKEYTDIDYHKEYPTMYHLRKELIENPEPHDIRLVYLACHHILKNRGHFLINGSISDVKNLSFVCGEMIKEFNSVSEYEISLTDIRELERILSDKKTAKSVKAKQVAQLFECIPAEDKEQQKCAKAIITNLSKLIVGLKGDISKMFHQPLEEISTKSFKFTEAKYEDEIMPAIEENYPDYASVIDRIKGVYDWSVLVEILDGEDYLSFAKVKAYEKHGKNLHILKNIMKKYCKDEVYQAFFNGINEKNGYGNYIGAIRKNGHTYKMDQCKSEEDFYKGLQKILSTIVPDQEDEELLEKLKAEVENQTLLPLARSKENGTIPNQVHLQELMKILDNAKEYLDFLKKEDEYGTIAEKIISIAKFRIPYYVGPLSRRHKEEGSNSWMIRKEEGRIYPWNFGDKVDVEQSNKEFIERMTNKCTYLIGEDVLPKNSLLYSKYMVLNELNNLKIRGNKISVELKQRIYKDLFCTMAKVTGKRILEYLKMEDPEIVQEDISGFDIDFKSALTSYLDFKKQVVGNEIEKDHYKEIIEEIIKWKTIYDDDSKMMRRMIEREYPEVFDKEQIKKICQLKYSGWGNFSDRFLNGVRGADKETGESYTIIEALWKTNYNLMQLLSKQFSFKEEIDQINAEKAGDVGKINYENTVKDLIVSPSNKRAIWQTIQIAEEIKKVMKCEPERIFIEMARGGEKEKKRTVSRKTRLQELYAGCKDDTRNWMKEIGDREEREFNSRKLYLYYTQMGKCMYTGDEIDVDALMKGNSNWDIDHIYPQSRIKDDSLDNMVLVRKDVNNKKRNKILSPKIREDMKGYWTMLCQKGLISKRKYDRLTRTTDFTDEELSGFIERQLVETRQSSKAVAELLNRLYKDSEVVYVKAGLVSDFRHDNNLLKSRRVNDYHHAKDAFLNIVVGNVYHARFTSNPRKWIKDNRDSNYSIRRVFNYDVKQGDKIVWHGSENGGHSIDQIKKIMSRNDILYTEYTYCEKGQLFNETLAKKGNEKAIALKKNLDPVKYGGYTTPKTSAFAFVEFDGKKKERKNHIVEIPVYVVNIAKREPDAVKKYLEERKGYSNVVIKKYPIKKNSLIKMDGYLARLRGANEKDIILKNAVQLILNKDLYEIVRKIEKYLEYNSQYQADAKFEGFTMKDLNMIYEELYLKLKESIFQKRPAQQMKTLEKGKEAFISIENLGEKAKVINEIIAMFRCDATTVANLKVINGSQNAGSMKVNKNTLTSKSLKLVHQSITGLFETEEELV

SEQ ID NO: 20854 - protein, 1123 aa, unidentified
  REGION 1..1123: note = Cas Enzyme sequence
  REGION 1117..1123: note = misc_feature - Xaa can be any naturally occurring amino acid
MNKKYYLGLDIGTNSVGWAVTDENYNLYKYAGKRMWGIRLFEAADTAAERRMKRSNRRRLSRKKQRIDLLQELFSKEIAKKDPTFFIRLNESGLHLEDKSTGEKYPLFVDKEYTDIDYHKEYPTMYHLRKELIENPEPHDIRLVYLACHHILKNRGHFLINGSISDVKNLSFVCGEMIKEFNSVSEYEISLTDIRELERILSDKKTAKSVKAKQVAQLFECTPAEDKEQQKCAKAIITNLSKLIVGLKGDISKMFHQPLEEISTKSFKFTEAKYEDEIMPAIEENYPDYASVIDRIKGVYDWSVLVEILDGEDYLSFAKVKAYEKHGKNLHILKNIMKKYCKDEVYQAFFNGINEKNGYGNYIGAIRKNGHTYKMDRCKSEEDFYKGLQKILSTIVPDQEDEELLEKLKAEVENQTLLPLARSKENGTIPNQVHLQELMKILDNAKEYLDFLKKEDEYGTIAEKIISIAKFRIPYYVGPLSRRHKEEGSNSWMIRKEEGRIYPWNFGDKVDVEQSNKEFIERMTNKCTYLIGEDVLPKNSLLYSKYMVLNELNNLKIRGNKISVELKQRIYKDLFCTMAKVTGKRILEYLKMEDPEIVQEDISGFDIDFKSALTSYLDFKKQVVGNEIEKDHYKEIIEEIIKWKTIYDDDSKMMRRMIEREYPEVFDKEQIKKICQLKYSGWGNFSDRFLNGVRGADKETGESYTIIEALWKTNYNLMQLLSKQFSFKEEIDQINAEKAGDVGKINYENTVKDLIVSPSNKRAIWQTIQIAEEIKKVMKCEPERIFIEMARGGEKEKKRTVSRKTRLQELYAGCKDDTRNWMKEIGDREEREFNSRKLYLYYTQMGKCMYTGDEIDVDALMKGNSNWDIDHIYPQSRIKDDSLDNMVLVRKDVNNKKRNKILSPKIREDMKGYWTMLCQKGLISKRKYDRLTRTTDFTDEELSGFIERQLVETRQSSKAVAELLNRLYKDSEVVYVKAGLVSDFRHDNNLLKSRRVNDYHHAKDAFLNIVVGNVYHARFTSNPRKWIKDNRDSNYSIRRVFNYDVKQGDKIVWHGSENGGHSIDQIKKIMSRNDILYTEYTYCEKGQLFNETLAKKGNEKAIALKKNLDPVKYGGYXXXXXXX

SEQ ID NO: 20855 - protein, 1396 aa, unidentified
  REGION 1..1396: note = Cas Enzyme sequence
MWNPKKGDYENSLFEPCSVISYGNQLRYFYYKQIDFFCQEWRGTKMNKKYYLGLDIGTNSVGWAVTDENYNLYKYAGKRMWGIRLFEAADTAAERRTKRSNRRRLSRKKQRIDLLQELFSKEIAKKDPTFFIRLNESGLHLEDKSTGEKYPLFVDKEYTDIDYHKEYPTMYHLRKELIENPEPHDIRLVYLACHHILKNRGHFLINGSISDVKNLSFVCGEMIKEFNSVSEYEISLTDIRELERILSDKKTAKSIKAKQVAQLFECTPAEDKEQQKCAKAIITNLSKLIVGLKGDISKMFHQPLEEISTKSFKFTEAKYEDEIMPAIEENYPDYASVIDRIKGVYDWSVLVEILDGEDYLSFAKVKAYEKHGKNLHILKNIMKKYCKDEVYQAFFNGINEKNGYGNYIGAIRKNGHTYKMDRCKSEEDFYKGLQKILSTIVPDQEDEELLEKLKTEVENQTLLPLARSKENGTIPNQVHLQELMKILDNAKEYLDFLKKEDEYGTIDEKIISIAKFRIPYYVGPLSRRHKEGSNSWMIRKEEGRIYPWNFGDKVDVEQSNKEFIERMTNKCTYLIGEDVLPKNSLLYSKYMVLNELNNLKIRGNKISVELKQRIYKDLFCTMAKVTGKRILEYLKMEDPEIVQEDISGFDIDFKSALTSYLDFKKQVVGNEIEKDHYKEIIEEIIKWKTIYDDDSKMMRRMIEREYPEVFDKEQIKKICQLKYSGWGNFSDRFLNGVRGADKETGESYTIIEALWKTNYNLMQLLSKQFSFKEEIDQINAEKAGDVGKINYENTVKDLIVSPSNKRAIWQTIQIAEEIKKVMKCEPERIFIEMARGGEKEKKRTVSRKTRLQELYAGCKDDTRNWMKEIGDREEREFNSRKLYLYYTQMGKCMYTGDEIDVDALMKGNSNWDIDHIYPQSRIKDDSLDNMVLVRKDVNNKKRNKILSPKIREDMKGYWTMLCQKGLISKRKYDRLTRTTDFTDEELSGFIERQLVETRQSSKAVAELLNRLYKDSEVVYVKAGLVSDFRHDNDLLKSRRVNDYHHAKDAFLNIVVGNVYHARFTSNPRKWMKDNRDSNYSIRRVFNYDVKQGDKIVWHGSENGGHSIDQIKKIMSRNDILYTEYTYCEKGQLFNETLAKKGNEKAIALKKNLDPVKYGGYTTPKTSAFAFVEFDGKKKERKNHIVEIPVYVVNIAKREPDAVKKYLEERKGYSNVVIKKYPIKKNSLIKMDGYLARLRGANEKNVRLKNSIQLVLNRKAYETVRRIEKYLEYNVRYEVDSKFEGFTDEDLNNVYDELYLKLKESVYNKRPAQQLSTLEKGREKFRTIEKLSEKAKLINDMLVMFRCDATMVANLKLIGGSISAGNMEVNKNTLTSKSLKLVHQSITGLFETEEELV

SEQ ID NO: 20856 - protein, 1397 aa, unidentified
  REGION 1..1397: note = Cas Enzyme sequence
MWNPKKGDYENSLFEPCSVISYGNQLRYFYYKQIDFFCQEWRGTKMNKKYYLGLDIGTNSVGWAVTDENYNLYKYAGKRMWGIRLFEAADTAAERRMKRSNRRRLSRKKQRIDLLQELFSEEIVKKDLTFFIRLNESRLHFEDKSTGEKYPLFVDKEYTDIDYHKQYPTMYHLRKELIENPEPHDIRLVYLACHHILKNRGHFLINGSISDVKNLSFVCGEMIKEFNSVSEYEISLTDIRELERILSDKKTAKSVKAKQVAQLFECTPAEDKEQQKCAKAIITNLSKLIVGLKGNISKMFHQPLEEISTKSFKFTEAKYEDEIMPAIEENYPDYASVIDRIKGVYDWSVLVEILDGEDYLSFAKVKAYEKHGKNLHILKNVMKKYCKDEVYQAFFNGINEKNGYGNYIGAIRKNGHTYKMDRCKSEEDFYKGLQKILSTIVPDQEDEELLEKLKAEVENQTLLPLARSKENGTIPNQVHLQELMKILDNAKEYLDFLKKEDEYGTIAEKIISIAKFRIPYYVGPLSRRHKEEGSNSWMIRKEEGRIYPWNFGDKVDVEQSNKEFIERMTNKCTYLIGEDVLPKNSLLYSKYMVLNELNNLKIRGNKISVELKQRIYKDLFCTMAKVTGKRILEYLKMEDPEIVQEDISGFDIDFKSALASYLDFKKQVVGNEIEKDHYKEIIEEIIKWKTIYDDDSKMMRRMIEREYPEVFDKEQIKKICQLKYSGWGNFSDRFLNGVRGADKETEESYTIIEALWKTNYNLMQLLSKQFSFKEEIDQINAEKAGDVGKINYENTVKDLIVSPSNKRAIWQTIQIAEEIKKVMKCEPERIFIEMARGGEKEKKRTVSRKTRLQELYAGCKDDTRNWMKEIGDREEREFNSRKLYLYYTQMGKCMYTGDEIDVDALMKGNSNWDIDHIYPQSRIKDDSLDNMVLVRKDVNNKKRNKILSPKIREDMKGYWTMLCQKGLISKRKYDRLTRTTDFTDEELSGFIERQLVETRQSSKAVAELLNRLYKDSEVVYVKAGLVSDFRHDNDLLKSRRVNDYHHAKDAFLNIVVGNVYHARFTSNPRKWIKDNRDSNYSIRRVFNYDVKQGDKIVWHGSENGGHSIDQIKKIMSRNDILYTEYTYCEKGQLFNETLAKKGNEKAIALKKNLDPVKYGGYTTPKTSAFAFVEFDGKKKERKNHIVEIPVYVVNIAKREPDAVKKYLEERKGYSNVVIKKYPIKKNSLIKMDGYLARLRGANEKDIILKNAVQLILNKDLYEIVRKIEKYLEYNSQYQADAKFEGFTMKDLNMIYEELYLKLKESIFQKRPAQQMKTLEKGKEAFISIENLGEKAKVINEIIAMFRCDATTVANLKVINGSQNAGSMKVNKNTLTSKSLKLVHQSITGLFETEEELV

SEQ ID NO: 20857 - protein, 1352 aa, unidentified
  REGION 1..1352: note = Cas Enzyme sequence
MNKKYYLGLDIGTNSVGWAVTDENYNLYKYAGKRMWGIRLFEAADTAAERRMKRSNRRRLSRKKQRIDLLQELFSEEIVKKDLTFFIRLNESRLHFEDKSTGEKYPLFVDKEYTDIDYHKQYPTMYHLRKELIENPEPHDIRLVYLACHHILKNRGHFLINGSISDVKNLSFVCGEMIKEFNSVSEYEISLTDIRELERILSDKKTAKSVKAKQVAQLFECTPAEDKEQQKCAKIIITNLSKLIVGLKGDISKMFHQPLEEISTKSFKFTEAKYEDEIMPAIEENYPDYASVIDRIKGVYDWSVLVEILDGEDYLSFAKVKAYEKHGKNLHILKNVMKKYCKDEVYQAFFNGINEKNGYGNYIGAIRKNGHTYKMDRCKSEEDFYKGLQKTLSMIVPDQEDEELLEKLKTEVENQTLLPLARSKENGTIPNQVHLQELMKILDNAKGYLDFLKKEDEYGTIAEKIISIAKFRIPYYVGPLSRRHKGEGSNSWMIRKEEGRIYPWNFGDKVDVEQSNKEFIERITNKCTYLIGEDVLPKNSLLYSKYMVLNELNNLKIRGNKISVELKQRIYKDLFCTMAKVTGKRILEYLKMEDPEIVQEDISGFDIDFKSALTSYLDFKKQVVGNEIEKDHYKEIIEEIIKWKTIYDDDSKMMRRMIEREYPEVFDKEQIKKICQLKYSGWGNFSDRFLNGVRGADKETGESYTIIEALWKTNYNLMQLLSKQFSFKEEIDQINAEKAGDVGKINYKNTVKDLIVSPSNKRAIWQTIQIAEEIKKVMKCEPERIFIEMARGGEKEKKRTVSRKTRLQELYAGCKDDTRNWMKEIGDREEREFNSRKLYLYYTQMGKCMYTGDEIDVDALMKGNSNWDIDHIYPQSRIKDDSLDNMVLVRKDVNNKKRNKILSPKIREDMKQYWKMLYQKELISKKKYDRLTRTTDFTDEELSGFIERQLVETRQSSKAVAELLQRLYKDSEVVYVKAGLVSDFRHDNDLLKSRRVNDYHHAKDAFLNIVVGNVYHARFTSNPRKWIKDNRDSNYSIRRVFNYDVKQGDKIVWHGSENGGHSIDHIKKTMSRNDILYTEYTYCEKGQLFNETLAKKGNEKAIALKKNLDPVKYGGYTTPKTSAFAFIEFDGKKKERKNHIVGIPVYVVNIAKREPDAVKKYLEERKGYSNVVIKKYPIKKNSLIKMDGYLARLRGANETDIILKNAVQLILNKDLYEIVRKIEKYLEYNSQYQADAKFEGFTMKDLNMIYEELYLKLKESIFQKRPAQQMKTLEKGKEAFISIDNLGEKAKVINEIITMFRCDATTVANLKAINGSQNAGSMKVKKNTLTSKSLKVVHQSITGLFETEEELV

SEQ ID NO: 20858 - protein, 1397 aa, unidentified
  REGION 1..1397: note = Cas Enzyme sequence
MWNPKKGDYENSLFEPCSVISYGNQLRYFYYKQIDFFCQEWRGKKMNKKYYLGLDIGTNSVGWAVTDENYNLYKYAGKRMWGIRLFEAADTAAERRTKRSNRRRLSRKKQRIDLLQELFSKEIAKKDPTFFIRLNESGLHLEDKSTGEKYPLFVDKEYTDIDYHKEYPTMYHLRKELIENPEPHDIRLVYLACHHILKNRGHFLINGSISDVKNLSFVCGEMIKEFNSVSEYEISLTDIRELERILSDKKTAKSVKAKQVAQLFECTPAEDKEQQKCAKAIITNLSKLIVGLKGDISKMFHQPLEEISTKSFKFTEAKYEDEIMPAIEENYPDYAGVIDRIKGVYDWSVLVEILDGEDYLSFAKVKAYEKHGKNLHILKNIMKKYCKDEVYQAFFNGINEKNGYGNYIGAIRKNGHTYKMDRCKSEEDFYKGLQKILSTIVPDQEDEELLEKLKAEVENQTLLPLARSKENGTIPNQVHLQELMKILDNAKEYLDFLKKEDEYGTIAEKIISIAKFRIPYYVGPLSRRHKEEGSNSWMIRKEEGRIYPWNFGDKVDVEQSNKEFIERMTNKCTYLIGEDVLPKNSLLYSKYMVLNELNNLKIRGNKISVELKQRIYKDLFCTMAKVTGKRILEYLKMEDPEIVQEDISGFDIDFKSALTSYLDFKKQVVGNEIEKDHYKEIIEEIIKWKTIYDDDSKIMRRMIEREYPEVFDKEQIKKICQLKYSGWGNFSDRFLNGVRGADKETGESYTIIEALWKTNYNLMQLLSKQFSFKEEIDQINAEKAGDVGKINYKNTVKDLIVSPSNKRAIWQTIQIAEEIKKVMKCEPERIFIEMARGEEKEKKRTVSRKTRLQELYAGCKDDTRNWMKEIGDREEREFNSRKLYLYYTQMGKCMYTGDEIDVDALMKGNSNWDIDHIYPQSRIKDDSLDNMVLVRKDVNNKKRNKILSPKIREDMKQYWKMLYQKELISKKKYDRLTRTTDFTDEELSGFIERQLVETRQSSKAVAELLKRLYKDSEVVYVKAGLVSDFRHDNNLLKSRRVNDYHHAKDAFLNIVVGNVYHVRFTSNPRKWIKDNRDSNYSIRRVFNYDVKQGDKIVWHGSENGGHSIDHIKKTMSRNDILYTEYTYCEKGQLFNETLAKKGNEKAIALKKNLDPVKYGGYTTPKTSAFAFIEFDGKKKERKNHIVEIPVYVVNIAKREPDAVKKYLEERKGYSNVVIKKYPIKKNSLIKMDGYLARLRGANETDIILKNAVQLILNKDLYEIVRKIEKYLEYNSQYQADAKFEGFTMKDLNMIYEELYLKLKESIFQKRPAQQMKTLEKGKEAFISIDNLGEKAKVINEIITMFRCDATTVANLKAINGSQNAGSMKVKKNTLTSKSLKVVHQSITGLFETEEELV

SEQ ID NO: 20859 - protein, 1078 aa, unidentified
  REGION 1..1078: note = Cas Enzyme sequence
LGDDAELIRKLKAVYDWSVLTDILAGEKTISKAKIAIYDRHKDDLKELKRIVRKYLPEKYDYVFKKAIKGNYASYVANYKTHNFNEDQLVPDKFKVKKEEFRDFLKKNIFSKLIPDQEDVAIIEAIKERIERCEFLPKQVDGNNRVIPYQLYGYELKTLLKSAAAYLPFLEEKDSDGLTATDKILSVFKFRVPYYVGPLNSSSQNAWLIRRAEGKILPWNFDSKIDLEASENEFIRRMTNKCTYLPDEDVLPKYSMLYCKFNVLNEINNITVNGIKISAELKQGIYESLFLTRQKVTVKAIKEYLWSNGVDKTAVVSGLDESIKSSLKPQLEFRRLLESKTLTEKDVEEIIERSTCTENKKRLKKWIKESFSQLSAEDVDYLASRRYTDFGRLSRKLLEDILVTEYKTGEVNTVIGWMWNTNRNFMQLMSTDFDLAVHIENYTRDLFTEHPLTLAERLDSMYLSGAVKRPVMRTLDIVSDVIKAMKGQKPAKVFVEMARGGSEDQKGKRTQSRKQQIIDFYKIVKDESVKKLNKELEELGESADNKLQSDALFLYFMQLGKCMYTGEEIDIHKLKSGNYNIEHIYPRSLVKDDSLLNNRILVNSKVNEAKGDIYPVPTNIKERMQHFWTMLHENKMLTDEKYKRLVRTTPFTDEEKWSFINRQLVETRQSTKAVATLLKERFGEDCEIVYVKAGLVSEFRHEVLNMHKTRAINDLHHAKDAYLNIVVGNVYHTRFTEEWFFSDNRGAYNVKAPQLFGHPVKKANWKGGESIAFVRKVMSKNAIHYTRYAFCRKGGLFNQMPLKAAEGLVPRKAGLETAKYGGYGSTTASFYVLAEFTTAKGKDAMFVPIELMVDKKFRADKAFAENYVKEQIKKIEGKEILSSKILLNGRIIKINTILELDGLRFCIAGKNSGGAMILLRLMTPNILSVEWENYVKSMEVLSEKLKKNANYIVDVPYDKVTKEQNGLLYDLLCKKIVEQPFNTVPGLPIDVIQNGSEMFNALSIKEQCECLIQLLSVLKTGRAGSCDLKSIGGSGMAATLRKGAKVSSYKKQYNDFRIVDVSVSGLFESKTDNLLNLL

SEQ ID NO: 20860 - protein, 1367 aa, unidentified
  REGION 1..1367: note = Cas Enzyme sequence
MGSRKFDGSQEWYLGLDVGTNSVGWAATDTEYNVLKFNGNSTWGIYLFDEAKNAADRRLNRTARRRLQRKKQRIGLLQDFFAEAISKVDDKFYIRLKESQLWSEDRTTGIDHQLFVGGELNDKVYNETYPTIHHLICELMDNDEDHDPRLVYMACSYILSHRGHFLIEVDENNVDKVTDFRNIYDDFLSWFSTSEIDEPWICSADSFAQVMKKKQSIGYKEKSFYDLLFDGKKPTNEDGQISVKDILSFLSGRKTKIADLFLNEEYKSLEIASISITSVNLEDELDSLSAEIDDIEYDLLLKLKRIYDWSVLVDVLQGEKFISKAKVNVYEQHKKDVRFLKYIIKGYAPNKYNFVFRDVGKENNYASYSYNVKDFGKSKTLPSDFKMCNAEEFSKFVDTIVRPLEPEISEKEADQFTDMLERLTLRTFCPKQVTSDNRVIPYQLYYAELKTILENSSRYLPFMNDQDEYGTTAAKILSIMKFRIPYYVGPLTSSKNSSYAWMVRKNEGKITPWNFEEMIDKDRSEENFIRRMTCKCSYLAGADVLPHNSLLYAKYMVLNEINNIRVNENKISPEAKQGIYENLFMKKRRVSVKNIQDYLISNGYMKAEDEIKGLDISIKSELKAYHDFKPYITSGILNERQVEDIINRITLTTDHSRLKVWLISEYQLPEEDAKKISKLKYKDFGRLSKELLTEVYDVDSATGELRREENIIGMLWSTNENLMNLRSKQYGYFEHIEQFNRDYYSNNPMSIDSRLADMYISNAVKRPILRTLEITKELSKIFNRQPKKIFIEMARGAKEEQKKKRTKSRKDQIKELYANLDQQEVAKLLSEIEDKTDDQMRSEKLFLYFSQLGKCMYSGEPINISEIGNNKLYDVDHIWPQSKIKDDSLDNKVLVLSKYNGEKGDKYPIAEQWRSARFSMWKLLCDKKLISDKKFDRLKRSTTFTDEELAAFIDRQLVETRQSTKAIATLLGETMPESDIVYVKADLVSSFRQEYKDDYFTLKCREVNDFHHAKDAYLNIVMGNIYDVKFTRNPINFIKTRAQYTLNLNKILSFDVERNGVVAWKTDNDSWFDKVISTIQKNNIRFVRYSYCQKGALFDIKPMRKGLGQVPRKKEMDKIERYGGYNKQTVTGFYLISYEDKKSRETTLIAVPLLKASGINNLRGIKEFCIAEGYKNPEVLLNGRMIKTNSLWEIDGYRVHLSCKSADYVWFKGAQQLVLSSAQEIYIKKIYKYCERANGSKELPAITSFDQISAEDNIDLYEMILNKIKKTKYNTLMHKACVSLENGRNIFIKLSVENQTKVLTSIVKLFSCNDSNGKDLTLIGGVKSAGIQLMPMKFNNKKFTDIRIIDQSATGLFEKKSPNLLTL

SEQ ID NO: 20861 - protein, 1358 aa, unidentified; identical to SEQ ID NO: 20264
  REGION 1..1358: note = Cas Enzyme sequence

SEQ ID NO: 20862 - protein, 1358 aa, unidentified; identical to SEQ ID NO: 20265
  REGION 1..1358: note = Cas Enzyme sequence

SEQ ID NO: 20863 - protein, 1170 aa, unidentified
  REGION 1..1170: note = Cas Enzyme sequence
VSPWVCESKALQATLLSRNSVNDKYKALKSLIFGSQKPEDNFDANISEDGLIQLLAGKKVKVNKLFPQESNDASFTLNDKEDAIEEILGTLTPDECEWIAHIRRLFDWAIMKHALKDGRTISESKVKLYEQHHHDLTQLKYFVKTYLAKEYDDIFRNVDSETTKNYVAYSYHVKEVKGTLPKNKATQEEFCKYVLGKVKNIECSEADKVDFDEMIQRLTDNSFMPKQVSGENRVIPYQLYYYELKTILNKAASYLPFLTQCGKDAISNQDKLLSIMTFRIPYFVGPLRKDNSEHAWLERKAGKIYPWNFNDKVDLDKSEEAFIRRMTNTCTYYPGEDVLPLDSLIYEKFMILNEINNIRIDGYPISVDVKQQVFGLFEKKRRVTVKDIQNLLLSLGALDKHGKLTGIDTTIHSNYNTYHHFKSLMERGVLTRDDVERIVERMTYSDDTKRVRLWLNNSYGTLTADDVKHISRLRKHDFGRLSKMFLTGLKGVHKETGERASILDFMWNTNDNLMQLLSECYTFSDEITKLQEAYYAKAQLSLNDFLDSMYISNAVKRPIYRTLAVVNDIRKACGTAPKRIFIEMARDGESKKKRSVTRREQIKNLYRSIRKDFQQEVDFLEKILENKSDGQLQSDALYLYFAQLGRDMYTGDPIKLEHIKDQSFYNIDHIYPQSMVKDDSLDNKVLVQSEINGEKSSRYPLDAAIRNKMKPLWDAYYNHGLISLKKYQRLTRSTPFTDDEKWDFINRQLVETRQSTKALAILLKRKFPDTEIVYSKAGLSSDFRHEFGLVKSRNINDLHHAKDAFLAIVTGNVYHERFNRRWFMVNQPYSVKTKTLFTHSIKNGNFVAWNGEEDLGRIVKMLKQNKNNIHFTRFSFDRKEGLFDIQPLKASTGLVPRKAGLDVVKYGGYDKSTAAYYLLVRFTLEDKKTQHKLMMIPVEGLYKARIDHDKEFLTDYAQTTISEILQKDKQKVINIMFPMGTRHIKLNSMISIDGFYLSIGGKSSKGKSVLCHAMVPLIVPHKIECYIKAMESFARKFKENNKLRIVEKFDKITVEDNLNLYELFLQKLQHNPYNKFFSTQFDVLTNGRSTFTKLSPEEQVQTLLNILSIFKTCRSSGCDLKSINGSAQAARIMISADLTGLSKKYSDIRLVEQSASGLFVSKSQNLLEYL

SEQ ID NO: 20864 - protein, 1358 aa, unidentified
  REGION 1..1358: note = Cas Enzyme sequence
MGKMYYLGLDIGTNFVGYAVTDPSYHLLKFKGEPMWGAHVFAAGNQSAERRSFRTSRRRLDRRQQRVKLVQEIFAPVISPIDPRFFIRLHESALWRDDVAETDKHIFFNDPTYTDKEYYSDYPTIHHLIVDLMESSEKHDPRLVYLAVAWLVAHRGHFLNEVDKDNIGDVLSFDAFYPEFLAFLSDNGVSPWVCESKALQATLLSRNSVNDKYKALKSLIFGSQKPEDNFDANISEDGLIQLLAGKKVKVNKLFPQESNDASFTLNDKEDAIEEILGTLTPDECEWIAHIRRLFDWAIMKHALKDGRTISESKVKLYEQHHHDLTQLKYFVKTYLAKEYDDIFRNVDSETTKNYVAYSYHVKEVKGTLPKNKATQEEFCKYVLGKVKNIECSEADKVDFDEMIQRLTDNSFMPKQVSGENRVIPYQLYYYELKTILNKAASYLPFLTQCGKDAISNQDKLLSIMTFRIPYFVGPLRKDNSEHAWLERKAGKIYPWNFNDKVDLDKSEEAFIRRMTNTCTYYPGEDVLPLDSLIYEKFMILNEINNIRIDGYPISVDVKQQVFGLFEKKRRVTVKDIQNLLLSLGALDKHGKLTGIDTTIHSNYNTYHHFKSLMERGVLTRDDVERIVERMTYSDDTKRVRLWLNNNYGTLTADDVKHISRLRKHDFGRLSKMFLTGLKGVHKETGERASILDFMWNTNDNLMQLLSECYTFSDEITKLQEAYYAKAQLSLNDFLDSMYISNAVKRPIYRTLAVVNDIRKACGTAPKRIFIEMARDGESKKKRSVTRREQIKNLYRSIRKDFQQEVDFLEKILENKSDGQLQSDALYLYFAQLGRDMYTGDPIKLEHIKDQSFYNIDHIYPQSMVKDDSLDNKVLVQSEINGEKSSRYPLDAAIRNKMKPLWDAYYNHGLISLKKYQRLTRSTPFTDDEKWDFINRQLVETRQSTKALAILLKRKFPDTEIVYSKAGLSSDFRHEFGLVKSRNINDLHHAKDAFLAIVTGNVYHERFNRRWFMVNQPYSVKTKTLFTHSIKNGNFVAWNGEEDLGRIVKMLKQNKNNIHFTRFSFDRKEGLFDIQPLKASTGLVPRKAGLDVVKYGGYDKSTAAYYLLVRFTLEDKKTQHKLMMIPVEGLYKARIDHDKEFLTDYAQTTISEILQKDKQKVINIMFPMGTRHIKLNSMISIDGFYLSIGGKSSKGKSVLCHAMVPLIVPHKIECYIKAMESFARKFKENNKLRIVEKFDKITVEDNLNLYELFLQKLQHNPYNKFFSTQFDVLTNGRSTFTKLSPEEQVQTLLNILSIFKTCRSSGCDLKSINGSAQAARIMISADLTGLSKKYSDIRLVEQSASGLFVSKSQNLLEYL

SEQ ID NO: 20865 - protein, 1358 aa, unidentified
  REGION 1..1358: note = Cas Enzyme sequence
MGKMYYLGLDIGTNSVGYAVTDPSYHLLKFKGEPMWGAHVFAAGNQSAERRSFRTSRRRLDRRQQRVKLVQEIFAPVIMPIDPRFFIRLHESALWRDDVAETDKHIFFNDPTYTDKEYYSDYPTIHHLIVDLMESSEKHDPRLVYLAVAWLVAHRGHFLNEVDKDNIGDVLSFDAFYPEFLAFLSDNGVSPWVCESKALQATLLSRNSVNDKYKALKALIFGSQKPEDNSDANISEDGLIQLLAGKKVRLNKLFPQESNDTSFTLNDKEDAIEEILGTLTPDECEWIAHIRRLFDWAIMKHALKDGRTISEAKVKIYEQHHHDLTQLKYFVKTYLAKEYDDIFRNVDGETTKNYVAYSYHVKEVKGTLPKNKATQEEFCKYVLGKVKNIKCSEADKVDFDEMIQRLTDNSFMPKQVSGENRVIPYQLYYYELKTILNKAACYLPFLTQCGKDAISNQDKLLSIMTFRIPYFVGPLRKDNSEHAWLERKAGKIYPWNFNDKVDLDKSEEAFIRRMTNTCTYYPGEDVLPIDSLIYEKFMILNEINNIRIDGFPISVDVKQQVFGLFEKKRRVTVKDIQNLLLSLGALDKHGKLTGIDTTIHSNYNTYHHFKSLMERGVLTRDDVERIVERMTYSDDTKRVRLWLNKNYGTLTADDVKHISRFQKHDFGRLSKMFLTGLKGVHKETGERASILDFMWNTNDNLMQLLSECYTFADEITKLQEAYYAKAQLSLNDFLDSMYISNAVKRPIYRTLAVVDDIRKACGTAPKRIFIEMARDGESKKKRSVTRREQIKNLYKSIRKDFQQEVDFLEKILENKSDGQLQSDALYLYFAQLGRDMYTGDPIKLEHIKDQSFYNIDHIYPQSMVKDDSLDNRVLVQSEINGEKSSRYPLDAAIRNKMKPLWDAYYNHGLISLKKYQRLTRSTPFTDEEKWDFINRQLVETRQSTKALAVLLKRKFPDTEIVYSKAGLSSDFRHEFGLVKSRNINDLHHAKDAFLAIVTGNVYHERFNRRWFMVNQPYSVKTKTLFTHSIRNGNFVVWNGEEDLGRIVKRLKQNKNNIHFTRFSFDRKEGLFDIQPLKASTGLVPRKAGLDVVKYGGYDKSTAAYYLLVRFTLEDKKTQHKLMMIPVEGLYKTRIDHDKEFLTDYAQTIISEILQKDKQKVKNIMFPMGTRHIKMNSMISIDDFYLSIGGKSSKGKTVLCHAMVPLIVPYKIERYIKSMESFNRKFKENNKLRIVEKFDKITVEDNLKLYELFLQKLQHDPYNKFFSTQFDVLTNGRSTFTKLSPEEQVQTLLNILSIFKTCRSSGCDLKSINGSAQAARIMIRADLTGRSKKYSDIRLVEQSASGLFVSKSQNLLEYL

SEQ ID NO: 20866 - protein, 1358 aa, unidentified
  REGION 1..1358: note = Cas Enzyme sequence
MGKMYYLGLDIGTNSVGYAVTDPSYHLLKFKGEPMWGAHVFAAGNQSAERRSFRTSRRRLDRRQQRVKLVQEIFAPVISPIDPRFFIRLHESALWRDDVAETDKHIFFNDPTYTDKEYYSDYPTIHHLIVDLMESSEKHDPRLVYLAVAWLVAHRGHFLNEVDKDNIGDVLSFDAFYPEFLAFLSDNGVSPWVCESKALQATLLSRNSVNDKYKALKSLIFGSQKPEDNFDANISEDGLIQLLAGKKVKVNKLFPQESNDASFTLNDKEDAIEEILGTLTSDECEWIAHIRRLFDWAIMKHALKDGRTISESKVKLYEQHHHDLTQLKYFVKTYLAKEYDDIFRNVDSETTKNYVAYSYHVKEVKGTLPKNKATQEEFCKYVLGKVKNIECSEADKVDFDEMIQRLTDNSFMPKQVSGENRVIPYQLYYYELKTILNKAASYLPFLTQCGKDAISNQDKLLSIMTFRIPYFVGPLRKDNSEHAWLERKAGKIYPWNFNDKVDLDKSEEAFIRRMTNTCTYYPGEDVLPLDSLIYEKFMILNEINNIRIDGYPISVDVKQQVFGLFEKKRRVTVKDIQNLLLSLGALDKHGKLTGIDTTIHSNYNTYHHFKSLMERGVLTRDDVERIVERMTYSDDTKRVRLWLNNNYGTLTADDVKHISRLRKHDFGRLSKMFLTGLKGVHKETGERASILDFMWNTNDNLMQLLSECYTFSDEITKLQEAYYAKAQLSLNDFLDSMYISNAVKRPIYRTLAVVNDIRKACGTAPKRIFIEMARDGESKKKRSVTRREQIKNLYRSIRKDFQQEVDFLEKILENKSDGQLQSDALYLYFAQLGRDMYTGDPIKLEHIKDQSFYNIDHIYPQSMVKDDSLDNKVLVQSEINGEKSSRYPLDAAIRNKMKPLWDAYYNHGLISLKKYQRLTRSTPFTDDEKWDFINRQLVETRQSTKALAILLKRKFPDTEIVYSKAGLSSDFRHEFGLVKSRNINDLHHAKDAFLAIVTGNVYHERFNRRWFMVNQPYSVKTKTLFTHSIKNGNFVAWNGEEDLGRIVKMLKQNKNNIHFTRFSFDRKEGLFDIQPLKASTGLVPRKAGLDVVKYGGYDKSTAAYYLLVRFTLEDKKTQHKLMMIPVEGLYKARIDHDKEFLTDYAQTTISEILQKDKQKVINIMFPMGTRHIKLNSMISIDDFYLSIGGKSSKGKSVLCHAMVPLIVPHKIECYIKAMESFARKFKENNKLRIVEKFDKITVEDNLNLYELFLQKLQHNPYNKFFSTQFDVLTNGRSTFTKLSPEEQVKTLLNILSIFKTCRSSGCDLKSINGSAQAARIMISADLTGLSKKYSDIRLVEQSASGLFVSKSQNLLEYL

SEQ ID NO: 20867 - protein, 1230 aa, unidentified
  REGION 1..1230: note = Cas Enzyme sequence
MGKMYYLGLDIGTNSVGYAVTDPSYHLLKFKGEPMWGAHVFAAGNQSAERRSFRTSRRRLDRRQQRVKLVQEIFAPVISPIDPRFFIRLHESALWRDDVAETDKHIFFNDPTYTDKEYYSDYPTIHHLIVDLMESSEKHDPRLVYLAVAWLVAHRGHFLNEVDKDNIGDVLSFDAFYPEFLAFLSDNGVSPWVCESKALQATLLSRNSVNDKYKALKSLIFGSQKPEDNFDANISEDGLIQLLAGKKVKVNKLFPQESNDASFTLNDKEDAIEEILGTLTPDECEWIAHIRRLFDWAIMKHALKDGRTISESKVKLYEQHHHDLTQLKYFVKTYLAKEYDDIFRNVDSETTKNYVAYSYHVKEVKGTLPKNKATQEEFCKYVLGKVKNIECSEADKVDFDEMIQRLTDNSFMPKQVSGENRVIPYQLYYYELKTILNKAASYLPFLTQCGKDAISNQDKLLSIMTFRIPYFVGPLRKDNSEHAWLERKAGKIYPWNFNDKVDLDKSEEAFIRRMTNTCTYYPGEDVLPLDSLIYEKFMILNEINNIRIDGYPISVDVKQQVFGLFEKKRRVTVKDIQNLLLSLGALDKHGKLTGIDTTIHSNYNTYHHFKSLMERGVLTRDDVERIVERMTYSDDTKRVRLWLNNNYGTLTADDVKHISRLRKHDFGRLSKMFLTGLKGVHKETGERASILDFMWNTNDNLMQLLSECYTFSDEITKLQEAYYAKAQLSLNDFLDSMYISNAVKRPIYRTLAVVNDIRKACGTAPKRIFIEMARDGESKKKRSVTRREQIKNLYRSIRKDFQQEVDFLEKILENKSDGQLQSDALYLYFAQLGRDMYTGDPIKLEHIKDQSFYNIDHIYPQSMVKDDSLDNKVLVQSEINGEKSSRYPLDAAIRNKMKPLWDAYYNHGLISLKKYQRLTRSTPFTDDEKWDFINRQLVETRQSTKALAILLKRKFPDTEIVYSKAGLSSDFRHEFGLVKSRNINDLHHAKDAFLAIVTGNVYHERFNRRWFMVNQPYSVKTKTLFTHSIKNGNFVAWNGEEDLGRIVKMLKQNKNNIHFTRFSFDRKEGLFDIQPLKASTGLVPRKAGLDVVKYGGYDKSTAAYYLLVRFTLEDKKTQHKLMMIPVEGLYKARIDHDKEFLTDYAQTTISEILQKDKQKVINIMFPMGTRHIKLNSMISIDDFYLSIGGKSSKGKSVLCHAMVPLIVPHKIECYIKAMESFARNLKKIIN

SEQ ID NO: 20868 - protein, 1342 aa, unidentified
  REGION 1..1342: note = Cas Enzyme sequence
MRYFMGLDMGTSSVGWAVTDEHYQLLRRKGKDMWGIREFEEAATAVERRTHRVSRRRRQRQVARIGLLQEYFHDAIHQVDPNFYQRLKNSKYHEEDKDEIVRESNGIFNDAEYTDKEYFKEFPTIFHLRQELIKSKEPHDVRLVYLALLNMFKHRGHFLNATLSADGESRKIKDIYTDFVDKAAEQLGVSFATDIRYEELENYLSSNDLSRKRKGELIAELLHVTRKDKQQYALIECMLGLDKSVKLMFGDTLPEDFDNTIKVNFSDIAFEEKATEISEAIGEEKYDLILIMKEIYDAAILNRIMNGYTYLSDARVAEYEKHKSDLACLKHYIKEYGTQQQFDFLFRGTEKGSYSAYVHSVNSHEKQRRNMAGNKKEDLYSALKKMLKDMPENEEKTCIMMQIELDNFLPKQLTASNGVIPNQIHLKEMKKILANAENYLPFLKEKDESGYTVSERIQKLFAFQIPYYIGPTTEKSAEFGGNGWVVRKEEGKVLPWNIDQKIDMKKTSEKFISRMVRRCTYMNDEQVLPKESLEYESFCVLNELNNIKVYGEKLPVDIKQDIYRTLCEKGKRVTKKSLMQYLVGRGVIKAEDEEQLTGLMDGLNNTLKSFAKFKAIFGDAIYEDSCKKMVEQIIFWCTVYGDSKHFLKEQLLEKYGEVLTGAQIKRILGIKFRDWGNLSKKFLELQGCSKETGEVNSLIRMLWETNDNLMELLAQDSYTFKEELENMQESTYKVLTELQPEDLDHMYFSAPVKRMIWQTILIIKEVTKVMGCQPERLFIEMTREHGQKNDIKDSRAKKFYELYSKIKDEDKDWRKVIEDADKDGRIRSKKMYLYLTQMGRCMYTGRPIDLDQLFNNNLYDIDHIYPRHYVKDDNLENNMVLVEKQSNAHKSDVYPLESGIYEKQVNWWRELHRKNLINDEKLKRLTGRNPFTDEQKAGFIARQLVETSQGTKGVATILQEALPDTTLVYAKARNVSEFRSDNDLLKSRIVNDFHHAHDAYLNIVIGNVYYVKFTKNPINFIREHGTYNLGKMFAKDVKRGDDIGWVAQSGNGQTATMETIKRTMARNTPLLTRMSYEVTGGLANQTLYSASKAKEGTYIPLKSSDERMQDVTKYGGFTSVSTAYFMLVEHDGKKGKRIRTIESVPIMWKERIEKNPAELERYCLDVLKLSNPDIRVRKILIQSLIKRNGYYMQITGKTGNQLYVRNTVSLCLKQEWVNYIKKLEKGNDENITKDKNLVLYDILVDKHNNTIYSQRPNPVGEKLVKRREEFINLNLNDQVTVLLEILKLTQIALGGANLKLIGEAEKTGVMLISKDITTLDEMLLINQSVTGLYEQKVNLLTV

SEQ ID NO: 20869 - protein, 1342 aa, unidentified
  REGION 1..1342: note = Cas Enzyme sequence
MRYFMGLDMGTSSVGWAVTDEHYQLLRRKGKDMWGIREFEEAATAVERRTHRVSRRRRQRQVARIGLLQEYFHDAIHQVDPNFYQRLKNSKYHEEDKDEIVRESNGIFNDAEYTDKEYFKEFPTIFHLRQELIKSKEPHDVRLVYLALLNMFKHRGHFLNATLSADGESRKIKDIYTDFVDKAAEQLGVSFATDIRYEELENYLSSNDLSRKRKGELIAELLHVTRKDKQQYALIECMLGLDKSVKLMFGDTLPEDFDKTIKVNFSDIAFEEKATEISEAIGEEKYDLILIMKEIYDAAILNRIMNGYTYLSDARVAEYEKHKSDLACLKHYIKEYGTQHQFDFLFRGTEKGSYSAYVHSVNSHEKQRRNMDGNKKEDLYSTLKKILKDMPENEEKTYIMMQIELDNFLPKQLTASNGVIPNQIHLKEMKKILANAENYLPFLKEKDESGYTVSERIQKLFAFQIPYYIGPTTEKSAEFGGNGWVVRKEEGKVLPWNIDQKIDMKKTSEKFISRMVRRCTYMNDEQVLPKESLEYESFCVLNELNNIKVYGEKLPVDIKQDIYRTLCEKGKRVTKKSLMQYLVGRGVIKAEDEEQLTGLMDGLNNTLKSFAKFKAIFGDAIYEDSCKKMVEQIIFWCTVYGDSKHFLKEQLLEKYGEVLTDAQIKRILGIKFRDWGNLSKKFLELQGCSKETGEVNSLIRMLWETNDNLMELLAQDSYTFKEELENMQESTYKVLTELQPEDLDHMYFSAPVKRMIWQTILIIKEVTKVMGCQPERLFIEMTREHGQKNDIKDSRAKKFYELYSKIKDEDKDWRKVIEDADKDGRIRSKKMYLYLTQMGRCMYTGRPIDLDQLFNNNLYDIDHIYPRHYVKDDNLENNMVLVEKQSNAHKSDVYPLESGIYEKQVNWWRELHRKNLINDEKLKRLTGRNPFTDEQKAGFIARQLVETSQGTKGVATILQEALPDTTLVYAKARNVSEFRSDNDLLKSRIVNDFHHAHDAYLNIVIGNVYYVKFTKNPINFIREHGTYNLGKMFAKDVKRGDDIGWVAQSGNGQTATMETIKRTMARNTPLLTRMSYEVTGGLANQTLYSASKAKEGTYIPLKSSDERMQDVTKYGGFTSVSTAYFMLVEHDGKKGKRIRTIESVPIMWKERIEKNPAELERYCLEVLKLSNPDIRVRKILIQSLIKRNGYYMQITGKTGNQLYVRNTVSLCLKQEWVNYIKKLEKGNDENITKDKNLVLYDILVDKHNNTIYSQRPNPVGEKLVKRREEFINLNLNDQVTVLLEILKLTQIALGGANLELINESKTTGSMKISKTVSEEREVTLINQSVTGLYEQRVNLLTV

SEQ ID NO: 20870 - protein, 1342 aa, unidentified
  REGION 1..1342: note = Cas Enzyme sequence
MRYFMGLDMGTSSVGWAVTDEHYQLLRRKGKDMWGIREFEEAATAVERRTHRVSRRRRQRQVARIGLLQEYFHDAIHQVDPNFYQRLKNSKYHEEDKDEIVRGSNGIFNDAEYTDKEYFKEFPTIFHLRQELIKSKEPHDVRLVYLALLNMFKHRGHFLNATLSADGESRKIKDIYTDFVDKAAEQLGISFATDIKYEELENYLSSNDLSRKRKGELIAELLHVTRKDKQQYALIECMLGLDKSVKLMFGDTLPEDFDKTIKVNFSDIAFEEKATEISEAIGEEKYDLILIMKEIYDAAILNRIMNGYTYLSDARVAEYEKHKSDLACLKHYIKEYGTQHQFDFLFRGTEKGSYSAYVHSVNSHEKQRRNMDGNKKEDLYSTLKKILKDMPENEEKTHIMMQIELDNFLPKQLTASNGVIPNQIHLKEMKKILANAENYLPFLKEKDESGYTVSERIQKLFAFQIPYYIGPTTEKSAEFGGNGWVVRKEEGKVLPWNIDQKIDMKKTSEEFISRMVRRCTYMNDEQVLPKESLEYESFCVLNELNNIKVYGEKLPVDIKQDIYRTLCEKGKRITKKSLMKYLVGRGVIKAEDEEQLTGLMDGLNNTLKSFAKFKAIFGDAIYEDSCKKMVEQIIFWCTVYGDSKHFLKEQLLEKYGEVLTDAQIKRILGIKFRDWGNLSKKFLELQGCCKETGEVNSLIRMLWETNDNLMELLARDSYTFKEELENMQESTYKVLAELQPEDLDHMYFSAPVKRMIWQTILIIKEVTKVIGCQPERLFIEMTREHGQKNDIKDSRAKKFYELYSKIKDEDKDWRKVIEDADKDGRIRSKKMYLYLTQMGRCMYTGRPIELDQLFNNNLYDIDHIYPRHYVKDDNLENNMVLVEKQSNAHKSDVYPLESGIYEKQVNWWRELHRKNLINDEKLKRLTGRNPFTDEQKAGFIARQLVETSQGTKGVATILQEALPDTTLVYAKAKNVSDFRNDYDLLKSRIVNDFHHAHDAYLNIVIGNVYYVKFTKNPINFIREHGTYNLGKMYAKDVKRGDEIAWVAQSGNGQTATMETIRRTMARNTPLLTRMSYEVTGGLANQTLYSASKAKEGTYISLKSSDERMQDVTKYGGFTSVSTAYFMLVEHDGKKGKRIRTIESVPIMWKERIEKNPVELERYCLEVLKLSNPDIRVRKILIQSLIKRNGYFMYITGKTNKQLSVRNKVSLCLTQNWVNYIKNLENDNDDNITKKENLELYDILSDKHNNTIYRQRPNPVGSKLHKCRDRFINLEMNEQKVVLLEILKLTQIASTSANLELLGESKQTGVMFIGKDITALDEILLINQSVTGLYEQRVNLLTV

SEQ ID NO: 20871 - protein, 1024 aa, unidentified
  REGION 1..1024: note = Cas Enzyme sequence
MRYFMGLDMGTSSVGWAVTDEHYQLLRRKGKDMWGIREFEEAATAVERRTHRVSRRRRQRQVARIGLLQEYFHDAIHQVDPNFYQRLKNSKYHEEDKDEIVRESNGIFNDAEYTDKEYFKEFPTIFHLRQELIKSKEPHDVRLVYLALLNMFKHRGHFLNATLSADGESRKIKDIYTDFVDKAAEQLGVSFATDIRYEELENYLSSNDLSRKRKGELIAELLHVTRKDKQQYALIECMLGLDKSVKLMFGDTLPEDFDKTIKVNFSDIAFEEKATEISEAIGEEKYDLILIMKEIYDAAILNRIMNGYTYLSDARVAEYEKHKSDLACLKHYIKEYGTQHQFDFLFRGTEKGSYSAYVHSVNSHEKQRRNMDGNKKEDLYSTLKKILKDMPENEEKTYIMMQIELDNFLPKQLTASNGVIPNQIHLKEMKKILANAENYLPFLKEKDESGYTVSERIQKLFAFQIPYYIGPTTEKSAEFGGNGWVVRKEEGKVLPWNIDQKIDMKKTSEKFISRMVRRCTYMNDEQVLPKESLEYESFCVLNELNNIKVYGEKLPVDIKQDIYRTLCEKGKRVTKKSLMQYLVGRGVIKAEDEEQLTGLMDGLNNTLKSFAKFKAIFGDAIYEDSCKKMVEQIIFWCTVYGDSKHFLKEQLLEKYGEVLTDAQIKRILGIKFRDWGNLSKKFLELQGCSKETGEVNSLIRMLWETNDNLMELLAQDSYTFKEELENMQESTYKVLTELQPEDLDHMYFSAPVKRMIWQTILIIKEVTKVMGCQPERLFIEMTREHGQKNDIKDSRAKKFYELYSKIKDEDKDWRKVIEDADKDGRIRSKKMYLYLTQMGRCMYTGRPIDLDQLFNNNLYDIDHIYPRHYVKDDNLENNMVLVEKQSNAHKSDVYPLESGIYEKQVNWWRELHRKNLINDEKLKRLTGRNPFTDEQKAGFIARQLVETNQSFAELSISWYNFWITFRSLQSNRNGFIITDAILSKVRILSGSDNTQFSSDIISCISTEKISGFSTIKIFIIFSSI

SEQ ID NO: 20872 - protein, 1358 aa, unidentified; identical to SEQ ID NO: 20287
  REGION 1..1358: note = Cas Enzyme sequence

SEQ ID NO: 20873 - protein, 1358 aa, unidentified
  REGION 1..1358: note = Cas Enzyme sequence
MEKKSKKIYLGLDIGTDSVGYAVTDDQYNLLRVHGDDAWGSVIFDAASLSDERRSHRSARRRLDRRQQRINLLQEIFAKEISKVDDRFFIRLSESYRWREDVQDRYVFFNDEEYTDVQYMGEYPTIHHLICELMNNKNPHDVRLIYLACAWLITHRGHFLNNLNVEKLDEIMDISSVYQNFINYFTENGYRRPWGEIDVSALAEVLKQKTGVTAKNKELQNILLEGKKPEKSGTEEFPFSQDSIIRLLAGGQCKLKDVFCKEEYLDLGSVSLGMDEEKFGEISGNIGEDYDLLIALRGLYDWSVLADILNGHSETISMAKVQIYEQHGKDLQILKYFVRKYVPDKYNEVFRKAKADNYVAYTGHMDKDTASQIKKKAKAEDFSKYVLKLMRLIKPEKTDLQSYEDMCERLNLNSFLPKQKNTDNRVIPHQLYEYELIRILKNASLYLPFLNEVRNGISEMDKVVSIFRYKLPYYVGPLNKKSDFAWISRKAGKITPWNYKVMIDEDASENSFIKRMTNKCTYLPGEDVLPKDSLCYQKFMVLNELNNLKIDGRKVPVEVKQGIYHELFEKKKKVRRKDIEEYLISNNYLAKGSTELISGIDEQVHSCLSSYYAFRNLLSREILSENDVEKIIERASYAEDKSRVKKWLRKEYPDLSQDDVRYITKIKIKEFGKLSRTFLTELKGCNKQDGEMTTILRIMWETNDNLMEILSDKYTFREAVEIFTQEYYTGKNQSLKERLDEMRVSNSVRRPVYRTLAIVKDIEKAFGKPDKIFVEMMRGGRADQKGKRTKSRKQQILELYAKCREEDVRDLKQQLESMGERVDSRLQGEHLFLYFMQFGKCAYSGIPIELEKLMSGSKEYDIDHIYPQAYVKDDSIINNKVLVLSKINGTKGNVYPISPEIRNRMQGQWNWWHHIGVISDEKYKRLIRSTPFTDDEKYGFINRQLTETSQSTKLIAGLLKERFPNIDIVYVKAGLVSDFRHEFDLPKSRTYNDLHHAVDAYLNVVTGNVYDMRFSKRWFSVDSEYSIKTKTVFSHPVNCQGTIVWDGASMLAKVKKIAKKNTAHFVKFATFKTGGLFDQNPVKKGTGLIPLKAGLPTEKYGGYNKAGIMFLMPVKYKIRKKCAIIIMPVELLHGKHFLEDETFAREYTFNRLESILGKKVDEISFPLGMRPWKINTMLSLDGFRVCITGTGGKGKCLVAQSAMQFSSEDCWKGYIKKLEKFIEKFKKNPDFIYDKEYDKVSVEENQKLYELYIEKLQNTIYSKRVNSPVQILMDGQERFEKLNIKEQCVVLMNIQTVFGRMTSGCDLSLIGGSPNSGATVNFSSTISNWKKLYSDVRIIDQSPSGIWEKRSENILELL

SEQ ID NO: 20874 - protein, 1358 aa, unidentified; identical to SEQ ID NO: 15828
  REGION 1..1358: note = Cas Enzyme sequence

SEQ ID NO: 20875 - protein, 1306 aa, unidentified
  REGION 1..1306: note = Cas Enzyme sequence
IKLLQELFSEEIAKIDYGFFMRLRDSKYYEEDKEEFQSNTLFNDKEFKDSDYSKLYPTIYHLRKELMDNCEPHDVRLVYLALHHILKHRGHFLYAGQFSNVSEMALEPLLQELELAVADTCEYSIRCTDIESVKGGLANSNLNISAKKSIFGKAFDFPKENNKSVKAIVTLMSGGKASLTDIFSDDSYDDCEQKSVSFKDSSYEENEDAYRSILLDRIQLIESLKKIYDWGVLQDILDGEKYISYAKVRAYAEHQSDLNMLKAAIREYCPNKYNEVFRKQDGKDPNYSAYIGNYVDHGKHHVIEKTCTQEELCQYLKKEVFKGINIDDARYPGLSEKIENTSLLPKQKVKDNGVIPYQVHEQELKTILKNAEGYLPFLSEKDDNGITISEKIQKIFTFRIPYYVGPLNDAHRKDNGEGFCWIEKKTDDQIRPWNFEEVVDLEKSAENFIRRMTNKCTYLIGEDVIPKDSLLYSKFTVLNELNNIRINNEKISVDLKQHIYEDLFKRQRKITGKKVRDYLIREGVVGKSDPLELSGFDMNFKSSLKSYLDFADILGKTDFSDEETAMIEEIIKYIVLFGDDKKILKRKITREYGSKLTEEQLSRIWKLKYSDWGRFSRELLENIVEIDPSTGEVKDSSIIFALYNYDGNPNFMELLSNNYGFSTAIENYNSGKDMKKDNLVYSDLDKLYVSVPVKRSIWQTVTIVKELNKILGHAPKKVFVEMAKGPGKDDKGRKASRKDQLIELYKNCKEDTGKLFDALCETEENRLRADKLYLYYTQFGKCMYSGEIIDLSELNDYDIDHIYPQSKVMDDSLDNRVLVKRELNSIKSDNYPIPFEWQDNMKSFWFMLKEKKMISETKYKRLVRKETFSEGELVGFVSRQIVETRQSTKAVAHLFEEMYPDTEIVYVKAGNVSRFRHGVDDYAKGRKKYEIDERMKENEFIKVREINDYHHAKDAYLNIVVGNVFNSKFTSNPYNFFKQKDNTYSMNAMYKFPVTRNGITAWTPTTPEQEGTMATVRKMMQKNNIQFTRYSKEVHGGFYDQMIMKKGKGQVPLKGDGAISSIEKYGGYNKAAGAYFFLVEHTNKGKRIRTIEFMPVYYAAKVRNDENALMLYCKDVLKLDEPRILMGKIKFGTLFEYNGFRMHLSGRTGDQLVMINANQLILNESYATYVKKLSNFIARKQNNNGAEVDELHDGIYMNNNIELYDELIDVISNSVLKVKLDTQIQNLIEGRQAFELLSAENQSLVLLQILHMLQCNKTNTDLSMIGKGSLVGRVNMPKNISKLGKLYIINQSVTGLFETKVNLLEL

SEQ ID NO: 20876 - protein, 1187 aa, unidentified
  REGION 1..1187: note = Cas Enzyme sequence
MLSRQLLGASHLARPVSYSYNVQDNDVHCSYGERCFMRGKRYRIGIDVGLNSVGLAAVEVSDENSPVRLLNAQSVIHDGGVDPQKNKEAITRKNMSGVARRTRRMRRRKRERLHKLDMLLGKFGYPVIEPESLDKPFEEWHVRAELATRYIEDDELRRESISIALRHMARHRGWRNPYRQVDSLISDNPYSKQYGELKEKAKAYNDDATAAEEESTPAQLVVAMLDAGYAEAPRLRWRTGSKKPDAEGYLPVRLMQEDNANELKQIFRVQRVPADEWKPLFRSVFYAVSPKGSAEQRVGQDPLAPEQARALKASLAFQEYRIANVITNLRIKDASAELRKLTVDEKQSIYDQLVSPSSEDITWSDLCDFLGFKRSQLKGVGSLTEDEEERISSRPPRLTSVQRIYESDNKIRKPLVAWWKSASDNEHEAMIRLLSNTVDIDKVREDVAYASAIEFIDGLDDDALTKLDSVDLPSGRAAYSVETLQKLTRQMLTTDDDLHEARKTLFNVTDSWRPPADPIGEPLGNPSVDRVLKNVNRYLMNCQQRWGNPVSVNIEHVRSSFSSVAFARKDKREYEKNNEKRSIFRSSLSEQLRADEQMEKVRESDLRRLEAIQRQNGQCLYCGRTITFRTCEMDHIVPRKGVGSTNTRTNFAAVCAECNRMKSNTPFAIWARSEDAQTRGVSLAEAKKRVAMFTFNPKSYAPREVKAFKQAVIARLQQTEDDAAIDNRSIESVAWMADELHRRIDWYFNAKQYVNSASIDDAEAETMKTTVSVFQGRVTASARRAAGIEGKIHFIGQQSKTRLDRRHHAVDASVIAMMNTAAAQTLMERESLRESQRLIGLMPGERSWKEYPYEGTSRYESFHLWLDNMDVLLELLNDALDNDRIAVMQSQRYVLGNSIAHDATIHPLEKVPLGSAMSADLIRRASTPALWCALTRLPDYDEKEGLPEDSHREIRVHDTRYSADDEMGFFASQAAQIAVQEGSADIGSAIHHARVYRCWKTNAKGVRKYFYGMIRVFQTDLLRACHDDLFTVPLPPQSISMRYGEPRVVQALQSGNAQYLGSLVVGDEIEMDFSSLDVDGQIGEYLQFFSQFSGGNLAWKHWVVDGFFNQTQLRIRPRYLAAEGLAKAFSDDVVPDGVQKIVTKQGWLPPVNTASKTAVRIVRRNAFGEPRLSSAHHMPCSWQWRHE

SEQ ID NO: 20877 - protein, 1398 aa, unidentified
  REGION 1..1398: note = Cas Enzyme sequence
METQTSNQLITSHLKDYPKQDYFVGLDIGTNSVGWAVTNTSYELLKFHSHKMWGSRLFEEGESAVTRRGFRSMRRRLERRKLRLKLLEELFADAMAQVDSTFFIRLHESKYHYEDKTTGHSSKHILFIDEDYTDQDYFTEYPTIYHLRKDLMENGTDDIRKLFLAVHHILKYRGNFLYEGATFNSNAFTFEDVLKQALVNITFNCFDTNSAISSISNILMESGKTKSDKAKAIERLVDTYTVFDEVNTPDKPQKEQVKEDKKTLKAFANLVLGLSANLIDLFGSVEDIDDDLKKLQIVGDTYDEKRDELAKVWGDEIHIIDDCKSVYDAIILMSIKEPGLTISQSKVKAFDKHKEDLVILKSLLKLDRNVYNEMFKSDKKGLHNYVHYIKQGRTEETSCSREDFYKYTKKIVEGLADSKDKEYILNEIELQTLLPLQRIKDNGVIPYQLHLEELKVILDKCGPKFPFLHTVSDGFSVTEKLIKMLEFRIPYYVGPLNTHHNIDNGGFSWAVRKQAGRVTPWNFEEKIDREKSAAAFIKNLTNKCTYLFGEDVLPKSSLLYSEFMLLNELNNVRIDGKALAQGVKQHLIDSIFKQDHKKMTKNRIELFLKDNNYITKKHKPEITGLDGEIKNDLTSYRDMVRILGNNFDVSMAEDIITDITIFGESKKMLRQTLRNKFGSQLNDETIKKLSKLRYRDWGRLSKKLLKGIDGCDKAGNGAPKTIIELMRNDSYNLMEILGDKFSFMECIEEENAKLAQGQVVNPHDIIDELALSPAVKRAVWQALRIVDEVAHIKKALPSRIFVEVARTNKSEKKKKDSRQKRLSDLYSAIKKDDVLQSGLQDKEFGALKSGLANYDDAALRSKKLYLYYTQMGRCAYTGNIIDLNQLNTDNYDIDHIYPRSLTKDDSFDNLVLCERTANAKKSDIYPIDNRIQTKQKPFWAFLKHQGLISERKYERLTRIAPLTADDLSGFIARQLVETNQSVKATTTLLRRLYPDIDVVFVKAENVSDFRHNNNFIKVRSLNHHHHAKDAYLNIVVGNVYHEKFTRNFRLFFKKNGANRTYNLAKMFNYDVICTNAQDGKAWDVKTSMNTVKKMMASNDVRVTRRLLEQSGALADATIYKASVAAKAKDGAYIGMKTKYSVFADVTKYGGMTKIKNAYSIIVQYTGKKGEEIKEIVPLPIYLINRNATDIELIDYVKSVIPKAKDISIKYRKLCINQLVKVNGFYYYLGGKTNDKIYIDNAIELVVPHDIATYIKLLDKYDLLRKENKTLKASSITTSIYNINTSTVVSLSNKVGIDVFDYFMSKLRTPLYMKMKGNKVDELSSTGRSKFIKMTLEEQSIYLLEVLNLLTNSKTTFDVKPLGITGSRSTIGVKIHNLDEFKIINESITGLYSNEVTIV

SEQ ID NO: 20878 - protein, 1346 aa, unidentified
  REGION 1..1346: note = Cas Enzyme sequence
MKQANKYYLGLDIGTDSVGYATTDEEYGLLKHKGEPMWGVHLFEEASQSQERRGYRTARRRLDRRQQRVKLAQELFAAEIAKVDPYFYRRIGESALWREDAKDAYTLFADADYTDVDYHKEYPTIHHLIFDLMENKKPHDVRLVYLACAWLLAHRGHFFSDVSKDHIEDILSIEASYRHLEELFEGGLPWDCRAEEFGKILKKRLGVNAKYKELCQLLYHTPKAPKDQKAEDETYYSTDGVLKLLCGGKVSPKDLLGKEEYGEIPSFSLDKADEDLAQIVSELGDDGELVVRLKALFDWAVLADILSDAKCISEKKVVIYQQHKADLQLLKRLVRRYLPQKYDEVFRSESVAGYATYSKKGKTEDFCKYLKALFAGITPDEEDKADFADMLAKLENHNFCPMQVTSDNRVIPYQVYFVELKQILENASAYLPFLNEADGDGYITKDKLLSIMEFRVPYYVGPLNRQSNFSWFVRKGEGRILPWTFETLVDLDLSEQAFIDRMTNACTYLPYAKVMPKSALLHEKFQVLNEINTLTVCGKRISVELKQKIYTDLFAKKKKVTLKSIRSYLLREGYYTADELTTLCGADETIKSSLSATLAFRRLLTLGQLTEADAEEIVKRSSYTEDRLRFAKWIDATYPALSEEDRKYLSKLKFKDFARLSKELLCDTYGTEVNSQTGEALSIIERMWTENLNLMEILSDRFTYRAYIEEQNEAYYREHPKSLDERMTEMCLPSAVKRSIIRTMDIVADVVKANGKAPDKIFIEMARGGKPEEKGKRTKSRYEQLKELYAKCDREEVRELSARLDAMGDERDRKLQSEKLFLYYLQLGKSMYSDTPIDIERLSDKSYDVDHIYPQSKVKDDSLLNNKVLVLSSENGAKSDRYPIDASIRQNMQSWWKLLLDHQLITPEKYKRLTRHTPFDEEEEWGFINRQLVETRQSTKAVATLLKEKYPQTEIVYVKAGLVSEFRQEFDMLKSRAVNDLHHAKDAYLNIVVGNVYNMQFTRKWFMANRDEYNLKVSTLFSRRVTVNGNLIWNGEISLGKVKHTVQNKNAIHLTRYAFCRKGGLFDQQPVKADAGLVSLKKHLPTEQYGGYKRTTASFYVIAKYRVGKKAEVMLVPVELLASARFAADQAFARQYIQEAIEKIIGKPVNVVELPMGMRQIKINTVFAFDGMRMCLAGKSNGGKSIIPSLLMPLLLGYSWEKYVKHLERFVEKKKEHPNMVYSQQYDKISAEDNVKLYDILVDKLYRSYAKRPANPIETLQKGRDKFMKADVYEQAKCLMQILMVFGRVSGGCDLQLVGGAGKAAAMSGFSASMSNWKKYYSDVRIIDQSASGLFESRSDNLLDLL

SEQ ID NO: 20879 - protein, 1378 aa, unidentified
  REGION 1..1378: note = Cas Enzyme sequence
MEKKYYIGLDLGTSSVGWAATDENYNFLRLKGKTAWGARIFSEAVDCKGRRSFRSSKRRVARRKYRLLLLKNLFAEEMAKVDKTFFLRLENSTYWAEDKAKDAEGNDLGKTLIFKTTEEEREFHKAYPTTWHLRKKLVDNDEQALSDLRLVYLAIHHIMKYRGNFLSDGTKDNEEPSKDTIDRINVILNLLEAKDNESGISDNITYLSKESYNELIETLEDKNLNKTKKQDKIKKLFKNVDKTNEDIKVYIDLFKTLVTGGVFSVKKINEEYDKLKIDFNNGFDDNADEISKALGDAYELVLIAKAYNDYISLKDLLGGNPYLSYVMADIYDEHKKDLKSLKKILVSIDYNLGNEGNNRVYNLVFKPVIVPKEERKDKDGKKNKKLTTPNYASFIQGDDVEKKSVTLENLNKNIKEILEANKQYVDEKDKEEFDRLLDKASNNELFKKQATVSTSLIPHQCHLEELNKILENAGKKYPFIKENSDKIIQLFKFRVPYYYGPLNNESKEHAWIVKNEGKERTKITPWNIDEVVNKEKTREGFFKKLTNSCTYLVGETVLPKVSLVYEKYLALERLNKMQVNGNYLNHSDKMDLLNYVLGNSNTTIENIRKKLASDTGMKINDIVISNIKNNVPFTATSHAFFRKHFNLENSGEFELCEEVIKYATIYADDKKELKKFLSENFSFDEKLIKEIANLQTNKWGRLSKKFLCGGAKDEMYYTDENGVMYTILDLLEETNQNLQEIVNSGKYGFDEKIKEFNDALTKDETIDEQISKILEGTPALMVRSITQTIKVVDDVIKAAKCEPKKIIMEVTRTDEKKGQEVASRYIQLKKKISEDKEIDDKEKEGLLSDLEEANKTKKLKGKHLYLYFSQLGIDLYTGKKMKIEEVLEGKYDIDHIVPQSLIKDDSLDNQVLVNKKYNQDVKKDIYPICDEIRSKMLNLWYNYKERGIIKEEKYNRLIRTTDLTDDEINDFVKRQINVVNYSNIQIKRIFELKYHDTEIIFSKAGFPSLLRKEYEIAKMRDLNDAHHAVDAYLNIVCGDILTSLYTDVFYLIKRKKEKKENPTFNMERRLLGYIKKNDLMDKIKSNCLRHDALITFKPDYDSGMFYKQTIFKKSGDKETGLIPLHTKGPMSDVKKYGGYSSLSQSYLLAVEYKVKKKTIKKLLRVPTMYVKLYGDDLNTIAKLMIDDEMATDIKVLRKIYLNQKIKYTGCYYLIYTKNEFVNKYKMAYQNYIDNDALVYLNKCLKKTDELDDKDKTEQEIIVNKDGDKLKITKEENLKIFKLIKEQYSKPIYESTPYIAKSKEMPEDVFNNLSIKKQIDTLFNMIKILSRSNEDAKFDKSLNNGSSKYFLKVNTITDDKIYIVNESPSGLFKGKEELI

SEQ ID NO: 20880 - protein, 1378 aa, unidentified
  REGION 1..1378: note = Cas Enzyme sequence
MEKKYYIGLDLGTSSVGWAATDENYNFLRLKGKTAWGARIFSEAVDCKGRRSFRSSKRRVARRKYRLLLLKNLFAEEMAKVDKTFFLRLENSTYWVEDKAKDDKGNDLGKTLIFKTTEEEREFHKAYPTTWHLRKKLVDNDEQALSDLRLVYLAIHHIMKYRGNFLSDGTKDNEEPSKDTIDRINVILNLLEAKDNESGISDNITYLSKESYNELIETLEDKNLNKTKKQDKIKKLFKNVDKTNEDIKVYIDLFKTLVTGGVFSVKKINEEYDKLKIDFNNGFDDNADEISKALGDAYELVLIAKAYNDYISLKDLLGGNPYLSYVMADIYDEHKKDLRSLKEILISIDNKLGNEGNNRIYNLVFKPVIVPKEERKDKDGKKNKKLTTPNYASFIQGDDVEKKSVTLENLNKNIKEILEANKQYVDEIDKEEFDRLLDKASNNELFKKQATVSTSLIPHQCHLKELNKILENAGEKYPFIKENSDKIIQLFKFRVPYYYGPLNNESKEHAWIVKNEGKERTKITPWNIDEVVNKEKTREGFFKKLTNSCTYLVGETVLPKVSLVYEKYLALERLNKMQVNGNYLNHSDKMDLLNYVLGNSNTTIENIRKKLASDTGMKINDIVISNIKNNVPFTATSHAFFRKRFNLENSKEFELCEEVIKYATIYADDKKELKKFLSENFSFDEKLIKEIANLQTNKWGRLSKKFLCGGAKDEMYYTDENGVMYTILDLLEETNQNLQEIVNSGKYGFDEKIKEFNDALTKDETIDEQISKILEGTPALMVRSITQTIKVVDDVIKAAKCEPKKIIMEVTRTDEKKGQEVASRYIQLKKKISEDKGIDDKEREELLSDLEEANKTKKLKGKHLYLYFSQLGIDLYTGKKMKIEEVLEGKYDIDHIVPQSLIKDDSLDNQVLVNKKYNQDVKKDIYPICDEIRSKMLNLWYNYKERGIIKEEKYNRLIRTTELTDDEINDFVKRQINVVNYSNVQIKRIFELKYPDTEIIFSKAGFPSLLRKEYEIAKMRDLNDAHHAVDAYLNIVCGDILTSLYTDVFYLIKRKKEKKENPTFNMERRLLGYIKKNDLMNKIKSNCLRHDALITFKPDYDSGMFYKQTIFKKSGDKETGLIPLHTKGPMSDVKKYGGYSSLSQSYILAVEYKVKKKTVKKLLRIPTMYIKLYGEDLNTIAKLMIDDEKAINIKILRKICLNQKVRFNNCYYLIYTSDDTRCKLKMAYQNYIDNDALVYLNKCLKKIDELDDKDKTEQEIIVNKDGDKLKITKEENLKIFKLIKEQYSKSIYNSITYIVKSRDILEDSFNNLSIKKQIDTLFNMIKILSRSNEDAKFDESLKNGGIKYYRISMNIDNNQIYIVNESPSGLFKGKEELI

SEQ ID NO: 20881 - protein, 1378 aa, unidentified
  REGION 1..1378: note = Cas Enzyme sequence
MEKKYYIGLDLETSSVGWAATDENYNFLRLKGKTAWGARIFSEAVDCKGRRSFRSSKRRVARRKYRLLLLKNLFAEEMAKVDKTFFLRLENSTYWAEDKAKDAEGNDLGKTLIFKTTEEEREFHKAYPTTWHLRKKLVDNDEQALSDLRLVYLAIHHIMKYRGNFLSDGTKDNEEPSKDTIDRINVILNLLEAKDNESGISDNITYLSKESYNELIETLEDKNLNKTKKQDKIKKLFKNVDKTNEDIKVYIDLFKTLVTGGVFSVKKINEEYDKLKIDFNNGFDDNADEISKALGDAYELVLIAKAYNDYISLKDLLGGNPYLSYVMADIYDEHKKDLKSLKKILVSIDYNLGNEGNNRVYNLVFKPVIVPKEERKDKDGKKNKKLTTPNYASFIQGDDVEKKSVTLENLNKNIKEILEANKQYVDEKDKEEFERLLDKASNNELFKKQATVSTSLIPHQCHLEELNKILENAGKKYPFIKENSDKIIQLFKFRVPYYYGPLNNESKEHAWIVKNEGKERTKITPWNIDEVVNKEKTREGFFKKLTNSCTYLVGETVLPKVSLVYEKYLALERLNKMQVNGNYLNHSDKMDLLNYVLGNSNTTIENIRKKLASDTGMKINDIVISNIKNNVPFTATSHAFFRKHFNLENSGEFELCEEVIKYATIYADDKKELKKFLSENFSFDEKLIKEIANLQTNKWGRLSKKFLCGGAKDEMYYTDENGVMYTILDLLEETNQNLQEIVNSGKYGFDEKIKEFNDALTKDETIDEQISKILEGTPALMVRSITQTIKVVDDVIKAAKCEPKKIIMEVTRTDEKKGQEVASRYIQLKKKISEDKGIDDKEREELLSDLEEANKTKKLKGKHLYLYFSQLGIDLYTGKKMKIEEVLEGKYDIDHIVPQSLIKDDSLDNQVLVNKKYNQDVKKDIYPICDEIRSKMLNLWYNYKERGIIKEEKYNRLIRTTELTDDEINDFVKRQINVVNYSNVQIKRIFELKYPDTEIIFSKAGFPSLLRKEYEIAKMRDLNDAHHAVDAYLNIVCGDILTSLYTDVFYLIKRKKEKKENPTFNMERRLLGYIKKNDLMNKIKSNCLRHDALITFKPDYDSGMFYKQTIFKKSGDKETGLIPLHTKGPMSDVKKYGGYSSLSQSYILAVEYKVKKKTIKKLLRVPTMYVKLYGDDLNTIAKLMIDDEKAINIKILRKICLNQKVRFNNCYYLIYTSDDTRCKLKMAYQNYIDNDALVYLNKCLKKIDELDDKDKTEQEIIVNKDGDKLKITKEENLKIFKLIKEQYSKSIYNSITYIVKSRDILEDSFNNLSIKKQIDTLFNMIKILSRSNEDAKFDESLKNGGIKYYRISMNIDNNQIYIVNESPSGLFKGKEELI

SEQ ID NO: 20882 - protein, 1108 aa, unidentified
  REGION 1..1108: note = Cas Enzyme sequence
LTAKTNIRYRVGADVGLNSLGFSAIQLDANGNPITLLKTLSYIHDGGVDPTQNKSGTTRKAMAGIARRTRNMRKRRRHRLNQLDRQLYQLGYPVDDVPESEHGLYEYWNVRSALATAYVPDKDKRDRMMVMAIRHIARHRGWRNSYSRVETLFEDVEPSDQYKDLKQRAETRLGMKLDENMTPAQLVALTLSDRDENFMRVRTSTKYGEGVLPSRLMQSDNARELRRIFTVQQVPEDVWKPILRTVFHCASPKGSAEKRVGTDPLDQTQKRALKASIAFQKYRILNVITNLRIRRKGEASRPLTVSEKQNVYELLTTAKEDVEWLDVCAVLDIERNELKGVGTLTHDGEERIGNKPPVLDTVIRLHGIKNTKLRKMMDAWWDAATEDEQAAMIRLLSNTVDLDKVRDLIEYASPIEFIDGLDEDLLTPLDSISLPVGRAAYSEKTLTRLSKRMLETEDDLHYAIRHEFDVPADWKPPVPPVQEPTGNPAVDRVLKAFNRFLSQCEQEYGIPESIAIETTKESFSSVAFGRTLDYERRQRRDKDNQMRAAIREDMRKQLSNGGSFKVHDYDIRRWEIVQSQNNTCLYCGATSPRFSFDKSELDHIVPRRGVGSDSKRTNMAAVCPECNASKSNIPFTVWVHSDYAKAHGITMNDVIARVNQLMFPPSMNRKQVGQVKKSIISRLKQTEQDEPLDNRSIESVGWMADELHRRLDGRYSNKTVKVFTFPGSITYEARRASGIDGQIHFIGAQWKTRLDRRHHAVDASVIAMMNQSVALRLAERHYLRESQRLCGTPFGQADWKQYPNKNTPGYVRYQQWIEQMKSLLNLLNKGLDEDTIPVVRSRRLRLGNSTAHDATVKPLQYVRLGDALSPTLIDHAITPQVWKALTRLSDYDPQTGLPANPNRVITALGEVCHAKDEIGFLPGNNAQLYVNGGAADIGGTIHHARIYRCEQALKSGKRKTFYGMVRVFQCDLMKRKKNTDLFRTPLRPADVSLRYADGKVRESILSGNATCIAQLTVNDEIRLTPEVMEDTCPEYSRIFHTDSGVERRFTVLGFPTSSKLRLVPSVISEEGLDKLKEQGVEIPVKVEKMFKLHTYTPAISKIGSLLEC

SEQ ID NO: 20883 - protein, 1108 aa, unidentified
  REGION 1..1108: note = Cas Enzyme sequence
LTAKTNIRYRVGADVGLNSLGFSAIQLDANGNPTALLKTLSYIHDGGVDPTQNKSGTTRKAMAGIARRTRNMRKRRRHRLNQLDRQLYQLGYPVDDVPESEHGLYEYWNVRSALATAYVPDKDKRDRMMVMAIRHIARHRGWRNSYSRVETLFEDVEPSDQYKDLKQRVETRLGMKLDDDMTPAQLVALTLSDRDENFMRVRTSTKYGEGVLPSRLMQSDNARELRRIFTVQQVPEDVWKPILRTVFHCASPKGSAEKHVGTDPLDSTQKRALKASIAFQKYRILNVITNLRIRRKGEEPRPLTVSEKQDVYELLTTAKEDVEWLDVCAVLDIERNELKGVGTLTHDGEERIGNKPPVLDTVIRLHGIKNTKLRKMMDAWWDVATEGERAAMIRLLSNTIDLDKVRDLIEYASPIEFIDGLDEDLLTPLDSISLPVGRAAYSEKTLTRLSKRMLETEDDLHYAIRHEFNVPADWKPPVPPVQEPTGNPAVDRVLKAFNRFLSQCEQQYGIPESVSIETTKESFSSIAFGRTLDYERRQRRDKDNQMRAAIREDMKKQLSNGGSFKVHDYDIRRWEIVQSQNNTCLYCGATSPRFSFDKSELDHIVPRRGVGSDSKRTNMAAVCPECNASKSNVPFAVWVRSDYAREHGITMNDVIARVNQLMFPPSMNRKQVGQVKKSIISRLKQTEQDEPLDNRSIESVGWMADELHRRLDGRYANKTVKVSTFPGSITYEARRASGIDGQIHFIGAQWKTRLDRRHHAVDASVIAMMNQSVALRLAERHYLRESQRLCGTPFGQADWKQYPNKNTPGYVRYQQWIEQMKSLLHLLNKGLDEDTIPVVRSRRLRLGNSTAHDATVKPLQYVRLGDALSPTLIDHAITPQVWKALTRLPDYNPQTGLPANPNRVITALGEVCHAQDEIGFLPGNNAQLYVNGGAADIGGTIHHARIYRCEQVLKNGKRKTFYGMVRVFQCDLMKRRKNTDLFRTPLRPADVSLRYADGKVREAIALGNATCIAQLTVNDEIRLTPEVMEDTCPEYSRIFHTDSGVERRFTVLGFPTSTKIRLAPSVISEEGLDKLKEQGVEIPVKVEKMFKLHTYTPAISKIGPLLEC

SEQ ID NO: 20884 - protein, 1108 aa, unidentified
  REGION 1..1108: note = Cas Enzyme sequence
LTAKTNIRYRVGADVGLNSLGFSAIQLDANGNPTALLKTLSYIHDGGVDPTQNKSGTTRKAMAGIARRTRNMRKRRRHRLNQLDRQLYQLGYPVDDVPESEHGLYEYWNVRSALATAYVPDKDKRDRMMVMAIRHIARHRGWRNSYSRVETLFEDVEPSDQYKDLKQRVETRLGMKLDDDMTPAQLVALTLSDRDENFMRVRTSTKYGEGVLPSRLMQSDNARELRRIFTVQQVPEDVWKPILRTVFHCASPKGSAEKHVGTDPLDSTQKRALKASIAFQKYRILNVITNLRIRRKGEEPRPLTVSEKQDVYELLTTAKEDVEWLDVCAVLDIERNELKGVGTLTHDGEERIGNKPPVLDTVIRLHGIKNTKLRKMMDAWWDVATEGERAAMIRLLSNTVDLDKVRDLIEYASPIEFIDGLDEDLLTPLDSISLPVGRAAYSEKTLTRLSKRMLETEDDLHYAIRHEFDVPADWKPPVPPVQEPTGNPAVDRVLKAFNRFLSQCEQQYGIPESVSIETTKESFSSVAFGRTLDYERRQRRDKDNQTRAAIREDMRKQLSNGGSFKVHDYDIRRWEIVQSQNNTCLYCGATSPRFSFDKSELDHIVPRRGVGSDSKRTNMAAVCPECNASKSNVPFAVWVRSDYAREHGITMNDVIARVNQLMFPPSMNRKQVGQVKKSIISRLKQTEQDEPLDNRSIESVGWMADELHRRLDGRYANKTVKVSTFPGSITYEARRASGIDGQIHFIGAQWKTRLDRRHHAVDASVIAMMNQSVALRLAERHYLRESQRLCGTPFGQADWKQYPNKNTPGYVRYQQWIEQMKSLLHLLNKGLDEDTIPVVRSRRLRLGNSTAHDATVKPLQYVRLGDALSPTLIDHAITPQVWKALTRLPDYNPQTGLPANPNRVITALGEVCHAQDEIGFLPGNNTQLYVNGGAADIGGTIHHARIYRCEQVLKNGKRKTFYGMVRVFQCDLMKRRKNTDLFRTPLRPADVSLRYADGKVREAIALGNATCIAQLTVNDEIRLTPEVMEDTCPEYSRIFHTDSGVERRFTVLGFPTSTKIRLAPSVISEEGLDKLKEQGVEIPVKVEKMFKLHTYTPAISKIGPLLEC

SEQ ID NO: 20885 - protein, 1108 aa, unidentified; identical to SEQ ID NO: 20882
  REGION 1..1108: note = Cas Enzyme sequence

SEQ ID NO: 20886 - protein, 1365 aa, unidentified
  REGION 1..1365: note = Cas Enzyme sequence
MDKYYIGLDIGTNSVGWAVTDENYNILKRKGKRMWGIRLFESADTAADRRSFRAARRRLQRRKQRIDLLQELLAEEMQKTDPTFFIRLNESRLHIEDKSVDSKFPLFMDEGYTDREFYDRFPTIFHLRKELIEDAVPHDIRHLYLALHHILKNRGHFLISGELENAKSFTAVAEQFENIIYDEFKLEVRRDKWRDFEETLRDKKMQPSVKAKTLLSYFDLEVEGDSAEDTKQRKAAAENICKLIAGNKGDLAKIFGEEAGGLEKPSFSFGDSTYDDAIRPNIQDVLPEKSHVIDAVKALYDWNILVDILDGEEYISFAKVKQYEIHQSNLRSLRGFLKKYLSKEDYKKFFDDPAGKTNYAAYIGSVKTKGKKTDVKKCAEDDFYKELKKLLENIQLDDEDRALYEMLLGEAERKTLLPLQRSKDNGVIPNQIHKAELKKILENAEKHFPFLKAKDENGKTVTDKIISIFEFRIPYYVGPLSDRHKGSGANVWIVRKEEGRIYPWNFDDKVDREKSNEAFIGRMTNKCTYLVGEDVLPKNSLLYSRYMALNELNNLRIRGNKISVGLKQRIYNDLFCKHTKVTGKRLLEYLQTEDRDLKREDLSGFDQDFKASLSPYLDFQKKVFGDEMAKDKVRAIVEDVIRWKTIYGDDYQMTEQVIKHEYPGVLTEEQLKAVRRLRYTGWGNFSAKFLNGIEGANKETGEVYTIIQALWETNCNLMQLLSSDFTFAEEIARHNDEAQGEVKEISYESLVEDLIVSPAIKRAIWQTVQIVEEIRRVMGSDPDKIFVEMARENEEKDQNGKGKRKDSRKNRLLELYRNCEADMRDWIKEIEDTDERQFNSIKLYLYYTQMGRCMYTGEQIDLGQLMSGSSIWDRDHIYPQSRIKDDSLDNLVLVKREFNAKKSNGTLSPEIQKQQREQWAKLLKMGLISKKKYDRLTRTGDFTDDELAGFISRQLVETRQSSKAVVELLGRLMPDSRIVQVKAGITSEFRRRDLNVLKSRRVNDYHHAKDAYLNIVTGNVYDAKFTSNPRAWLKNNKEREYNVSRVFDFDVYRGKTKIWEAPEYNGKARNENDEKYGGTLDLVRATVKRNDILYTEYSYCDKGKLFDATIVKKDKSAPIQLKAGLDTEKYGGYHSANTSYFALIEFDGKKGERVRNVMEVPIYVANMLDHDPDAYLRYCTDVKGLKNVRILRPCIKKNSLIIVDGYPMRIRGVDSKNVIWKNGIQPVLSRHERLIYYIEKYLEKNSNYDINKQFDKITDEELVALYDAVTEKLCTTYAKRPAKLGVFLKEKREKFLSLQIKDKTMLAYNLIALVTCGNTTTVDLSLIEGKARMGSMSINKNTIGKSKLILVNQSVTGLYENRTEL

SEQ ID NO: 20887 - protein, 1345 aa, unidentified
  REGION 1..1345: note = Cas Enzyme sequence
VNKRRWIEFERYIQMKKEWYLGLDIGTNSIGWAATDTDYKVLRKSKRKLIGVELFDAADTAEERRLARNSRRVLGKRKWRLSLLKGLFEDEIKKTDSDFFLRLEESKYHLEDKRVNSKYVLFNDRNYTDVEYNKQYPTIFHLRAALMTEENPDIRMIYLAIHNIMKSRGHFLFDGLSVDTGSFDGALGTLLTKLGVSGLDTTKVKAICTSKGNTTTKTKEFKELTNDVRVQEIFRLIFGGSVALEKIYGVEEYKELDSNVKTISFKNKVYDEVRSDYEAVLGTDIELLDNIKRVYDSLILMGIKQEGLSLSQSKMVVYDKHKSDKALLKEVICLDSKLSDKDKKELIVKVFSKDEKGLDNYVAYTRNSDINKSCSGDAFRTFVNKVLDELQETETIKSIKEELTLGLFLPLQKVKDNSVIPNQLHREELIAILENASKYNNFFTDDLKTKIIELFDFKVPYFVGPLNSTSKYAWAVRNEGYENVKVTPWNYKEVINESKSAAKFIDNLVGKCTYLEGELVLPDNSLLYSEYKVLNELNALKIDGDRVGIETRNLIIEELYLNSVGVVTKAKIKKLLVSKGIIDKDAELTGISNVLGSKLKSRVDFTNILGANFDEDDVEKMIYWLTVYGDAKYLIRDRIIEAFGSKYTEQEITAILKLNYKDWGRLSEKFLKSIYSKCFIDTTTGEMLNIIDIMRSQTIILMEILGNAYDLTEAVEAHNSKVVGDVIEITPALVENLYVSPSVKRAIWQTIKLVERLKKLIGCEPKKIFIETTRTNQAPKVETDSRYKVLVKKYSALKSKDFEKFDIDVESLYEMLKNEDPSALKSKRLYHYYSQLGKCLYTGKTIERSQVDSIALYDLDHIYPQSKVKDDSLDNMVLVCRVANGYKSDTYPLSEDVQKEHKELWSKLKANKMISDTKYERLVRVDGFTTDELTGFIARQLVETSQSVKTISKLLGKLNKTSRVVYSKAENVDQFKHNFGKIKDGNRKSISKEKILKVRELNDLHHAYDAYLNIVVGNVYDVRFTSNPRNFISNKENRNYSLNTLFYYDVKGAWVMGVTVKMVESVINNPYVQINKMAVRKTGKLYDATIYKANKAKPESYHPLKTKDGRMLDVTKYGGYSSVSISHYVFVGYTLVKPKESISSTYLVPIRICDVDKLKTEVDLLEYVKKVIPCKAKESIEDLHIIKDNITTYTKVKLGKIPVYLGGKTGNYITYRSALQIRFDDESTEYMKTLTNYNGWRIANRSCEVWKSVTLEKNLKFYDRIIEKMQVGVIHELNPKKFDALLDIKYRELFAALDLLDQTKVLLELVNLMTQRLVPNADVLKLIDFKASVGKISLANPGIEV

SEQ ID NO: 20888 - protein, 1350 aa, unidentified
  REGION 1..1350: note = Cas Enzyme sequence
MEKNYYLGLDLGSNSVGWAATDEDYNFLRLKGKTAWGARIFSEAKDCKERRTYRSNKRRLARRKYRLVLLKQLFAEEMTKVDKTFFLRLANSTYWEEDKAKDSDGNEIGKNLIFKTHEEEKQYYTKYPTIWHLRKALIENDEEALSNLRYVYLAIHHIVKYRGNFLTEGEMGNDIPPISTIEEINQTLSLLEVDSSEDAKDKTTYIKLESYNELFTILENNNLNKVKKQQEIDKLFISSKERSENIKNYINLFKTIIVGGSFSLKKINEDTEDISVDFTKDFENSEADISKALGDAFNLVLIAKKYYDYIILKELLGKNKEISEAMVQIYEEHKEDLKSLKTILKDLDNNLGNDGKDRIYYSVFKQEPTEKFKETNYLSFVQGGKLEELNKYIKKILENNEKDIDDKETYNALYEKACKGDLFKKQANACTSLIPHQFHLRELKKILENAGKKYPFLNDISDKIIKIFKFRVPYYYGPLNNESDAHSWVVKKEGQEKAKITPWNINEIIDTPKTRDNFFKKLTNSCTYLVGETVLPKTSLYYEKYLALDRLNKMQVNGDYLSASEKNDVLKFILSRKTTTIEQIRTYLSKTRSTKANDISISNIKATDPFNAVSHAFYGKHPDLNINLCEELIKFATIYADDKKELKKFVSSNFNLTDEFIKEYLNTPTNKWGRLSKKFLCGGNQLEMYYVDDNGILHSILNILEETNENLQEILNNEKYGFNQKIADFNNTLTADKTTEEQIEDILDSTPALMRRSIIQTLAVVDDVIKAAGKAPQKIMMEVTRTDGKKEETKSRYVQLKKQITNDKVLTSDEKKEWLKNLDEQNQLKRLKGKHIYLYFMQMGIDFYTGKRMDINDVINGKYDIDHIIPQSMIKDDSLDNMVLVSKDYNQKVKKDIYPICDEIRNNMLDKWKGYYARKIISEEKYNRLKRTKELNADEINAFINRQINVVNYSNIQIKRIFEIKYPETKIIFSKASFPSLLRKEYEIAKMRDLNDAHHAVDAYLNIVCGNILTTLYTDIFYMFKEKKEDHKNISFNMEKRLINYIDKNNLKDKIKTSCLRHDALITFKPDYDSGKFYKETIFKKSGDKETGLIPLHTKGPMSDTKKYGGYSSFSQSYIIAVEYKLKNKTVKKLCRVPTLYLKQYNNDLNTIAKIMIDDEKATDIKVLRKIYLNQKIKYNGCYYFIYTSNEKQNKYKMAYQNYLDNDYLIYLNKCLKKIDELDDGELTSQEFIVNKDGDKFLIDKNHNLEIFKSIKEQYNKTIYDYTPYIVQSREMKEEDFNNLSLKKQIDTLNNMIKILSRSCENAKFDKSLNNECTKNFRISTTINTEKVYIVNESPSGLFKGKEELI

SEQ ID NO: 20889 - protein, 1352 aa, unidentified
  REGION 1..1352: note = Cas Enzyme sequence
MEKNYYLGLDLGSNSVGWAATDEDYNFLRLKGKTAWGARIFSEAKDCKERRTYRSNKRRLARRKYRLVLLKQLFAEEMAKVDKTFFLRLANSTYWEEDKTKDSDGNEIGKNLIFKTHEEEKQYYTKYPTIWHLRKALIENDEEALSNLRYVYLAIHHIVKYRGNFLTEGEMGNDIPPITTIEEINQTLSLLEVDSSEDATDKTTYIKPESYNELFTILENNNLNKVKKQQEIDKLFISSKERSENIKNYINLFKTIIVGGSFSLKKINEDTEDISVDFTKDFENSEADISKALGDAFNLVLIAKKYYDYIILKELLGKNKEISEAMVQIYEEHKEDLKSLKTILKDLDNNLGNDGKDRIYYSVFKQEPTEKFKETNYLSFVQGGKLEELNKYIKKILENNEKDIDDKETYNALYEKACKGDLFKKQANACTSLIPHQFHLRELKKILENAGRKYSFLNDISDKIIKIFKFRVPYYYGPLNNESDAHSWVVKKEGQEKAKITPWNINEIIDTPKTRDNFFKKLTNSCTYLVGETVLPKTSLYYEKYLALDRLNKMQVNGDYLSASEKNDVLKFILSRKTTTIEQIRTYLSKTRSTKANDISISNIKATDPFNAVSHAFYGKHLDLNNSKNINLCEELIKFATIYADDKKELKKFVSSNFNLTDEFIKEYLNTPTNKWGRLSKKFLCGGDQLEMYYVDDNGILHSILNILEETNENLQEILNNEKYGFNQKIADFNNTLTADKTTEEQIEDILDSTPALMRRSIIQTLAVVDDVIKAAGKAPQKIMMEVTRTDGKKEETKSRYVQLKKQITNDKVLTSDEKKELLTNLEKKKIQLKGKHIYLYFMQMGIDFYTGKIMDINDVINGKYDIDHIIPQSMIKDDSLDNMVLVSKDYNQKVKKDIYPICDEIRNNMLDKWKGYYARKIISEEKYNRLKRTKELNADEINAFINRQINVVNYSNIQIKRIFEIKYPETKIIFSKASFPSLLRKEYEIAKMRDLNDAHHAVDAYLNIVCGNILTTLYTDIFYMFKEKKEDHKNISFNMEKRLINYIDKNNLKDKIKTSCLRHDALITYKPDYDSGKFYKETIFKKSGDKETGLIPLHTKGPMSDTKKYGGYSSFSQSYIIAVEYKLKNKTVKKLCRVPTLYLKQYNNDLNTIAKIMIDDEKATDIKVLRKIYLNQKIKYNGCYYLIYTANENRNKYKVAYQNYLDNNYLIYLNKCLKKIDELDDEQLSSKELTINKDGDKFLVDKNHNLEIFKAIKEKYNNPIYDYTPYIVKSREMKEEDFNNLSLKKQIDTLLNMIKILSRSNEQAKFETAFFENFTKVFLKTMTITNEKVYIVNESPSGLFKGKEELI

SEQ ID NO: 20890 - protein, 960 aa, unidentified
  REGION 1..960: note = Cas Enzyme sequence
MKKILENNEKDIDDKETYNALYEKACKGDLFKKQANACTSLIPHQFHLRELKKILENAGKKYPFLNDISDKIIKIFKFRVPYYYGPLNNESDAHSWVVKKEGQEKAKITPWNINEIIDTPKTRDNFFKKLTNSCTYLVGETVLPKTSLYYEKYLVLDRLNKMQVNGDYLSASEKNDVLKFILSRKTTTIEQIRTYFSKTRSTKANDISISNIKATDPFNAVSHAFYGKHLDLNNSKNINLCEELIKFATIYADDKKELKKFVSSNFNLTDEFIKEYLNTPTNKWGRLSKKFLCGGDQLEMYYVDDNGILHSILNILEETNENLQEILNNEKYGFNQKIADFNNTLTADKTTEEQIEDILDSTPALMRRSIIQTLAVVDDVIKAAGKAPQKIMMEVTRTDGKKEETKSRYVQLKKQITNDKVLTSDEKKELLTNLENKKIQLKGKHIYLYFMQMGIDFYTGKIMDINDVINGKYDIDHIIPQSMIKDDSLDNMVLVSKDYNQKVKKDIYPICDEIRNNMLDKWKGYYARKIISEEKYNRLKRTKELNADEINAFINRQINVVNYSNIQIKRIFEIKYPETKIIFSKASFPSLLRKEYEIAKMRDLNDAHHAVDAYLNIVCGNILTTLYTDIFYMFKEKKEDHKNISFNMEKRLINYIDKNNLKDKIKTSCLRHDALITFKPDYDSGKFYKETIFKKSGEKDTGLISLHTKGPMSDTKKYGGYSQLSQSYIIAVEYKLKNKTVKKLCRVPTLYLKQYKNDLNTIAKIMIDDEKATDIKVLRKIYLNQKIKYNGCYYLIYTANENKNKYKVAYQNYLDNNYLIYLNKCLKKIDELDDEQLSSKELTINKDGDKFLVDKNHNLEIFKAIKEKYNNPIYDYTPYIVKSREMKEEDFNNLSLKKQIDTLLNMIKILSRSNEQAKFETAFFENFTKVFLKTMTITNEKVYIVNESPSGLFKGKEELI

SEQ ID NO: 20891 - protein, 1352 aa, unidentified
  REGION 1..1352: note = Cas Enzyme sequence
MEKNYYLGLDLGSNSVGWAATDEDYNFLRLKGKTAWGARIFSEAKDCKERRTYRSNKRRLARRKYRLVLLKQLFAEEMTKVDKTFFLRLANSTYWEEDKAKDSDGNEIGKNLIFKTHEEEKQYYTKYPTIWHLRKALIENDEEALSNLRYVYLAIHHIVKYRGNFLTEGEMGNDIPPISTIEEINQTLSLLEVDSSEDATDKTTYIKPESYNELFTILENNNLNKVKKQQEIDKLFISSKERSENIKNYINLFKTIIVGGSFSLKKINEDTEDISVDFTKDFENSEADISKALGDAFNLVLIAKKYYDYIILKELLGKNKEISEAMVQIYEEHKEDLKSLKTILKDLDNNLGNDGKDRIYYSVFKQEPTEKFKETNYLSFVQGGKLEELNKYIKKILENNEKDIDDKETYNALYEKACKGDLFKKQANACTSLIPHQFHLRELKKILENAGKKYPFLNDISDKIIKIFKFRVPYYYGPLNNESDAHSWVVKKEGQEKAKITPWNINEIIDTPKTRDNFFKKLTNSCTYLVGETVLPKTSLYYEKYLVLDRLNKMQVNGDYLSASEKNDVLNFILSRKTTTIEQIRTYFSKTRSTKANDISISNIKATDPFNAVSHAFYGKHLDLNNSKNINLCEELIKFATIYADDKKELKKFVSSNFNLTDEFIKEYLNTPTNKWGRLSKKFLCGGDQLEMYYVDDNGILHSILNILEETNENLQEILNSEKYGFNQKIADFNNTLTADKTTEEQIEDILDSTPALMRRSIIQTLAVVDDVIKAAGKAPQKIMMEVTRTDGKKEETKSRYVQLKKQITNDKVLTSDEKKELLTNLENKKIQLKGKHIYLYFMQMGIDFYTGKIMDINDVINGKYDIDHIIPQSMIKDDSLDNMVLVSKDYNQKVKKDIYPICDEIRNNMLDKWKGYYARKIISEEKYNRLKRTKELNADEINAFINRQINVVNYSNIQIKRIFEIKYPETKIIFSKASFPSLLRKEYEIAKMRDLNDAHHAVDAYLNIVCGNILTTLYTDIFYMFKEKKEDHKNISFNMEKRLINYIDKNNLKDKIKTSCLRHDALITYKPDYDSGKFYKETIFKKSGDKETGLIPLHTKGPMSDTKKYGGYSSFSQSYIIAVEYKLKNKTVKKLCRVPTLYLKQYNNDLNTIAKIMIDDEKATDIKVLRKIYLNQKIKYNGCYYLIYTANENRNKYKVAYQNYLDNNYLIYLNKCLKKIDELDDEQLSSKELTINKDGDKFLVDKNHNLEIFKAIKEKYNNPIYDYTPYIVKSREMKEEDFNNLSLKKQIDTLLNMIKILSRSNEQAKFETAFFENFTKVFLKTMTITNEKVYIVNESPSGLFKGKEELI

SEQ ID NO: 20892 - protein, 1352 aa, unidentified
  REGION 1..1352: note = Cas Enzyme sequence
MEKNYYLGLDLGSNSVGWAATDEDYNFLRLKGKTAWGARIFSEAKDCKERRTYRSNKRRLARRKYRLVLLKQLFAEEMTKVDKTFFLRLANSTYWEEDKAKDSDGNEIGKNLIFKTHEEEKQYYTKYPTIWHLRKALIENDEEALSNLRYVYLAIHHIVKYRGNFLTEGEMGNDIPPISTIEEINQTLSLLEVDSSEDATDKTTYIKPESYNELFTILENNNLNKVKKQQEIDKLFISSKERSENIKNYINLFKTIIVGGSFSLKKINEDTEDISVDFTKDFENSEADISKALGDSFNLVLIAKKYYDYIILKELLGKNKEISEAMVQIYEEHKEDLKSLKAILKDLDNNLGNDDKDRIYYSVFKQEPTEKFKETNYLSFVQGGKLEELNKYIKKILENNEKDIDDKETYNALYEKACKGDLFKKQANACTSLIPHQFHLRELKKILENAGRKYSFLNDISDKIIKIFKFRVPYYYGPLNNESDAHSWVVKKEGQEKAKITPWNINEIIDTPKTRDNFFKKLTNSCTYLVGETVLPKTSLYYEKYLVLDRLNKMQVNGDYLSASEKNDVLKFILSRKTTTIEQIRTYFSKTRSTKANDISISNIKATDPFNAVSHAFYGKHLDLNNSKNINLCEELIKFATIYADDKKELKKFVSSNFNLTDEFIKEYLNTPTNKWGRLSKKFLCGGDQLEMYYVDDNGILHSILNILEETNENLQEILNNEKYGFNQKIADFNNTLTADKTTEEQIEDILDSTPALMHRSIIQTLAVVDDVIKAAGKAPQKIMMEVTRTDGKKEETKSRYVQLKKQITNDKVLTSDEKKELLTNLEKKKIQLKGKHIYLYFMQMGIDFYTGKIMDINDVINGKYDIDHIIPQSMIKDDSLDNMVLVSKDYNQKVKKDIYPICDEIRNNMLDKWKGYYARKIISEEKYNRLKRTKELNADEINAFINRQINVVNYSNIQIKRIFEIKYPETKIIFSKASFPSLLRKEYEIAKMRDLNDAHHAVDAYLNIVCGNILTTLYTDIFYMFKEKKEDHKNISFNMEKRLINYIDKNNLKDKIKTSCLRHDALITYKPDYDSGKFYKETIFKKSGEKDTGLISLHTKGPMSDTKKYGGYSSFSQSYIIAVEYKLKNKTVKKLCRVPTLYLKQYKNDLNTIAKIMINDEKATDIKVLRKIYLNQKIRYNGCYYLIYTSNEKQNKYKMAYQNYLDNDYLIYLNKCLKKIDELDDGELTSQEFIVNKDGDKFLIDKNHNLEIFKSIKEQYNKTIYDYTPYIVQSREMKEEDFNNLSLKKQIDALNNMIKILSRSCENAKFDKSLNNECTKNFRISTTINTEKVYIVNESPSGLFKGKEELI

SEQ ID NO: 20893 - protein, 1014 aa, unidentified
  REGION 1..1014: note = Cas Enzyme sequence
SLKTILKYLDNNLGNDGKDRIYYSVFKQEPTEKFKETNYLSFVQGGKLEELNKYIKKILENNEKDIDDKETYNALYEKACKGDLFKKQANACTSLIPHQFHLRELKKILENAGKKYPFLNDISDKIIKIFKFRVPYYYGPLNNESDAHSWVVKKEGQEKAKITPWNINEIIDTPKTRDNFFKKLTNSCTYLVGETVLPKTSLYYEKYLVLDRLNKMQVNGDYLSASEKNDVLNFILSRKTTTIEQIRTYFSKTRSTKANDISISNIKATDPFNAVSHAFYGKHLDLNNSKNINLCEELIKFATIYADDKKELKKFVSSNFNLTDEFIKEYLNTPTNKWGRLSKKFLCGGDQLEMYYVDDNGILHSILNILEETNENLQEILNNEKYGFNQKIADFNNTLTADKTTEEQIEDILDSTPALMRRSIIQTLAVVDDVIKAAGKAPQKIMMEVTRTDGKKEETKSRYVQLKKQITNDKVLTSDEKKELLTNLENKKIQLKGKHIYLYFMQMGIDFYTGKIMDINDVINGKYDIDHIIPQSMIKDDSLDNVVLVSKDYNQKVKKDIYPICDEIRNNMLDKWKGYYARKIISEEKYNRLKRTKELNADEINAFINRQINVVNYSNIQIKRIFEIKYPETKIIFSKASFPSLLRKEYEIAKMRDLNDAHHAVDAYLNIVCGNILTTLYTDIFYMFKEKKEDHKNISFNMEKRLINYIDKNNLKDKIKTSCLRHDALITYKPDYDSGKFYKETIFKKSGDKETGLIPLHTKGPMSDTKKYGGYSSFSQSYIIAVEYKLKNKTVKKLCRVPTLYLKQYNNNLNTIAKIMIDDEKATDIKVLRRIYLNQKIKYNGCYYLIYTANENKNKYKVAYQNYLDNNYLIYLNKCLKKIDELDDGELTSQEFIVNKDRDKFLIDKNHNLEIFKAIKEKYNNPIYDYTPYIVKSREMKEEDFNNLSLKKQIDTLLNMIKILSRSNEQAKFETAFFENFTKVFLKTMTITNEKVYIVNESPSGLFKGKEELI

SEQ ID NO: 20894 - protein, 1045 aa, unidentified
  REGION 1..1045: note = Cas Enzyme sequence
MKDYYLKDANQSPVGKDSFLNGLVFGFDVGTGSIGYAVRQGSEFKDVGVLICDSEDSDLSKRRDLRRQRRTLRSKKFRRQWFDKELVKLGLPKSETVLDDPISLRLRALNGDALKPEELHAALTHLFKRRGYSKVPWANVEKATKETAKPKKDDDEGIIKEAVKEMKVKLGDKHPCQFLAEEKVRVGNSPTTNWARKIYWPREVLRDEFLSIVAAQKKKFPKLAEKTDWLLYGDSQSKEKNGETFHVFFKTTEARNPGVLGLRWPRFDNRGPALDSLQPVDEQGRPLHVVRKNKEAFTKAQWELALINFRVIDRATGKLTSPDNKSLIRLREIWESGKRKKKKTPMDSDESESIKISEKVLQRWEKDFSQKYKLVEGQQALTPQTGAGRARYSSLTLERIVAGEHFNPPQPILRRKGENAEQALNRYLADIKHPLVRHRLVLFRRLMMQLVSRYGQPDMIVLEAVRSLALGQKAKNELNKRNERFRKERENAREQLSSNHESFSRKAIQRFRLWQEAKGRCPFCLQPIERTDLGHGADIEHLVPRAIVDCNEFYNLTVAHIKCNRELKGDRTPLTAFGGTSQWEGIKANAENCFSGRKLEIFLSPNAEELIEQKSDLQHTAYIARVIRHISLIQLGWLNDEGRDPTPEKQNPALSFQVTNGQITHRLRKAWGLNQILHPLPPGKRWDELTDAEQNQFTEKNRGDLRHHALDAMVICCTLPWLAHRTVRVKYPATGEDGWWDLDEKTQRSVARNPLFPNEGQMHEVVKQEIEKVVVRHHVSRSNHQQAYATTLYAKKAKDTYVAREVFTSLTPKNLGSIWPETFASYCEAAWRRYADEAANLEGELKRTKNCVPENFTRKLCFSHFQKWRQDDCPEFYWPKEIIIPIRSVRLISLKDDTAVVPFSPGTHAYVKRTGFKEVQIFLAEDEKSFVPVFIPYWKKDKPLCVKPIKENTKPVATIRRGGIVTLKKLSGPKNPLGNYRVVSTMQAKINLVPTHIQDKPEALLASGFLANGVNISWQTFFNAAGYELPHPPPVKPQPSGAAEA

SEQ ID NO: 20895 - protein, 1032 aa, unidentified
  REGION 1..1032: note = Cas Enzyme sequence
MKVTLSSDSFLKGLVFGFDVGTGSIGYAVRKGADFKDVGVLICESEGSDLRQRRDLRRQRRTLRSRKYRRQWFAKELMNLGLPRPEQPPHDPISLRLRALNGDPLKPEELHAALAHLFKRRGYSKVPWANVEKTAKENAKPKKNDEEGEIKKAVEGIRKEMDEKKCEFPCQLLEARRKEAGTSPDKEWGRKIYWPRDLLEKELRAIAAAQKERFPALIEKADWLLYGDAKEVKGHRVFFKTTEARNPGVLGVRWPRFDNRGPALDSLQPVDEQGRPLHVVRKNKEAFTKAQWELALMNFRVLDAKTRQRIDPRIHFPIFIENLRNEWNKRGKVTEARLKKLAEPFADKFLLIEDQKPLTPETGAGRARYSSPTLELIRKRIDEGGRVDPPQPVLRREGEIAEQALNRYLADIRHPLVRHRLVLFRGILRQLVKDYGQPNMIVLEAVRSLAMDKKSEKYKEMLRRNEIFRKDRVDAREELSANQESTSRRAIQRYRLWKEAKGRCPFCLETIARTDLGHRADIEHIVPRALVDCSEWYNLTVAHLKCNRELKGNQTPFAAFANTANWEAIKKNAEDCFKNAHLNRDCTKADFFVSPQAEEMIEQKSDIQHTAYIARLIRHVSLIQLGWLNDQGRDPTPEKQNPALSFQVTNGQLTSRLRKAWGLNQILHPLPPGMKWEDLSEEEQKQFTEKNRGDLRHHALDAMVIACTLPWLAHRTHGATDELGNHGWWTQDEKQRSKTANPIFGDQMHDMVKREIASVVVRPHVSRSNHGKKLDTTPLSLRVIEGKKEVFVARRPLREKSPESIRDIFSAHLKNYIATEWASWAEANPDWDKENKGPNKGRFPERFIRQLVDPIWKKPVRSVKFIVERSRSSVFKVGVHPSGNRRDIFVAYGENKEVRVYKLATGSGFVAQAIRPCYANGESPARPPQAGELAFVVRRGTLFRLNNAFKIGKQELPPGIYKVVALPGEADGRVSFFPHFQSTSSKDGKRLQPIRADIEKIAAHIDMLSNKGTRELPHPPSVKPQPESPHQA

SEQ ID NO: 20896 - protein, 1296 aa, unidentified
  REGION 1..1296: note = Cas Enzyme sequence
MKTHDTVPPAPAASPKDPFLTGLVFGFDVGTASIGYAVRKGAEFLDMGVLICDSKSADLENRRNLRRQRRTLDHRQSRRDWFAENLAKVFGLVLHKGTRLPESAWAKNSKGGWVPISPKLACPVSLRVAALAGEPLTVEQLFTALVHLTKHRGPAEKVPWSKTLSEKKREEDEKEKESASDTIPADQVRAEFENARKIFVSQNPDAPAFHPAHYLLQLDDAGKRQRKRAWPHDLAEAEAAAILETQSCHHRRLKDEIEFRDVSGKQRKTTVAEWLLHGNSSVKTMREGAIANRFHVFDRNHLGRERGPFTYQAARIHNRKPGLDLVEPRDEFGRPRYVMSRERPEYRRWQIEIALLNFKVHDLTSLKKKKPLTVPSAKALDELREIIARTGKLSLEDLQNWIKPYQEKRIYGLVEKQTDLVGEGEGRGRFNIFGLQKATEIIRPLQAEHDAMSKLTPKGQRAKQKLKTPEDKADAYVRQYVNYTPKLRYNWKNPVTRAVEPEPLPRALRRYIQEIRDPVVRHRVELFDRMLDDLLEKHRSEGTPSHIIVECVRKLEQDSEDAQAAWEKQKGNREKNQVARTTLKDMGIKEPTDKDIRKFRLLDECKWRCPYNPQDRFMQSEFDDLVIHRIIPPVGDPRRPAYLKAARAALHSTHVEHMVPQAATVCDEWFNVTVTRSATNQAKGDRIPYEFILRDADEDRRRQLLDNAANCFGADSLKFKIFSSPDARSLIQERDKLQRTAYIARCLRYVCLLKFGWLSPEDRDPGHEKANDASRGYLVTNGGTTHRLRGAWNLDELLRETISAECWASMTDSEKERALSQGARIPSEEWKKLDKAKQDEALLARRTKNRQDVRHHALDAMVVACTLPWAANLTAWGGGWCNLDPEDGSVSSVQCPVFGEKDFGKGIYAAAEVKLAELKSAQPDANRNTIIHYRSHERHKQVFDSQLYGRRTSYDGKPLDRTAFVVSKKLCDLTPGALNESSLGDVIFSPKLRGHITNAWKAYTADTANWRRVLNRSRSELEKEKAEALQNKAKPQTLEAIGRRLWRVGKWIEAAPNAELWEELQKFLHKEKGVMQPKAVFPDDFIATLRHWRYGTEIRSVRVIGQTKDEDAYAELRAGSKTFWKYKGRYVELRVYEQPAKTPKASGKFICWRIRPFYPRKRDENGKLESWKEARSAAMPAACRNRKLVATFHNGQVIRFTRSLKNMEISHNWLICETNPGGLETNSQIVVIPAHLAAIVRDPDNPKKLVNLKDTESEKLGLNDFMWALGYEPPGKGYELPHPPSVKPQSAGPAET

SEQ ID NO: 20897 - protein, 1034 aa, unidentified
  REGION 1..1034: note = Cas Enzyme sequence
MKTYVLKPANQSPSGKDSFLTGLVFGFDVGTGSIGYAVRKGSEFKDVGVLICDSEGSDLSKRRDLRRQRRTLRSKKFRRQWFDKELVKLGLPKPENPPNDPILLRLRALNGEELKPEELHAALTHLFKRRGYSKVPWANVEKAAKESAKPKKDDDDEGVIEKVEEIRAKLGGKHPCQFLAEEKARVGNSPTDKWARKIYWPREVLRDEFLAIVAAQKKNFPKVAEKTDWLLYGDSQSKKKGEETFHVFFKTTEARNPGVMGLRWPRFDNRGPALDSMRPVDDQGRPLHVVRKNKEAFGKAQWELALMNFRVLDFKTRQKRDPRTDFPIFIDNLRNEWNKKGKVTEARLKKLSEPFKEKFLLIEDQKPLTPETGVGRARYSSPTLELIRKEIGEGRRVDPPQPILRRKGENAEQALNRYLADIKHPLVRHRLVLFRRLLMQLASRYGQPDMIILEAVRSLALGQKKKNELNQRNEKFRKERESAREQLSSNNESFSRKAIQRYRLWQEAKAHCPFCLQTIERTDLGHGADIEHLVPRSVVDCNEFYNLTVAHIKCNRELKGDRTPLAAFGGKAQWEGIKSNAENCFSGRKLEIFLSPDAEELIEQKSDLQHTAYIARVIRHISLIQLGWLNDEGRDPTPEKQNPALSFQVTNGQLTSRLRKSWGLNQILHPLPPGKRWDELTEEEQKQFTEKNRGDLRHHSLDAMVIACTLPWLAHRTHGATDELGRHGWWTQDEKQRSKAANPLFPNEGQMHEVVKKEIEKVVVRHHVSQSNHQQAYATTLYAKKAKDTYVAREVFTSLTPKNLGNIWPETFASYCEAAWRRYSDESADIEGELKKTKGNVPEGYTKKLCFAHFQKWRADDCPEFYWPKEIKIPIRNVRLISVKDDTAVVPFSPGTHAFVKRTGFKEVQVFLAEDEKSFVPVFIPHWKGDKLVSEKPIKQNTKPVAVIRRGMVVETKKAFSAGQPPGKYRVLVTGQMQLKLLPHHVANKEEAIVSFGLGKKGIQPMWADFIRVLGHELPHPPSVKPQPPGAAEA

SEQ ID NO: 20898 - protein, 1051 aa, unidentified
  REGION 1..1051: note = Cas Enzyme sequence
EAQKGHFPELVKNVESLFHRNTREIKREVDGKKQTFHVFFKTDTGKEPGVLGIRWPKFENRGPGLDALEPFRKDHETGAWIPQHTLRRDNLLFKEWQLEVALRNFRVKRRLITVGRSKKEKYELIPPPPPALDALRKLWNERGHLWAEDLREWARNCGGQFELRDPDFNLTPRNDFSGRARFSKHGMAVIRQVIADAREKHDTAYSVWEQKFKDKNPKANEEDVANGYARFLTVGAASNQGAADNSYARTVAPPPVLILPGETTVGAFQRYLNTIRNPQVRHRVELFGRELRRLMKLHSQNQAPDFIIIEMARDLMMSQEQKDAKEAKDKERRDDRDKAAQILRDMGYVPEADNVKKFLLAQEAGWRCPFTLQPFCQSDFSKLTIAQLVQAENKPRFVKEVSSVFRDLEVEHLVPRAPLVCNEWYNLTVTLHSTNAQKRKRTPFQWLSVDRDGVPPDLDWERACKNAADRFGANSLKYQVFTSPNAAEIIENNAKRSIQQTAYIARCLREACLIHFGKEWLDWTDGAGRDPRLLPDNRASKSYLTTNGAITARLRDAWHLNGILWPKPQRLNDAEWNKLTDEEKTILKAKYKDERAVRALKNRQDHRHHAIDAMVISCAVPWQTFKPRLGNQQPEDGLCELDAETGEITKIWNPVFNDYGYGIMQAVESKMDLLLKFSTDRQIDLLRHHKSSQRNAQAFDTTAYGRREKFCGDELGQTLFVARKRMLDLKKSHLDPSNTGGFIFSPLLRDHISKEWESFSANEKNWFHIQSDWIGIFEAQINTLRAPGKDDQKTRVGIKARESRVYKLRQMEERKDWDELLSFIAKELGAKQPQPKFPSQFVETLRHPFYKTPITSVKVTAQSKDDDSFSLVREPTSEKARSGTYVMRKQEDKYREMRVYRLPKPGRSGPYACWLLLPWYGKLDARGKRFKTVENDFMTRACKDAEFVRSFRRDEIVCFANNHLANKGIKQNESWRVVRTDAKGDFLATVGLLPANLVRETTHPITDEKVKLEPVVVALNDFMKALERKTSADELPHPPLTEPESPGATKA

SEQ ID NO: 20899 - protein, 1115 aa, unidentified
  REGION 1..1115: note = Cas Enzyme sequence
MNNSYTRFLNGLVFGFDVGTGSIGWAVRKGREFLDVGVLICPEEAGKLDTRRNLRRQRRTLRSKKYRRQWLARELAALLDLKLIQSAGDGQLPLPESAWTRNAKGGWVPQPGFESLRDPVALRVAALAGKPLRPEELFTALTHLFRRRGYTKVPWATSAEMAGKEDKPKNGNDDREEGDILKAVAGVRREMEAKQCEHPCQLLALRDKEHALWRQSLEQADKQQRPQAEVLAELWTAQGMKGQPPTEEPRQRKTYWPRELLEKEFRAVAAAQSAPGRFPQILEKTDWLLYGDTREVKGHRVYFKQTEARNPGVLGLKWPRFENRGPALDALRPLDEQGRPLHVVRKNKEAFTKAQWELAVMNFRVIHRMTGANVAPDSRAMARLREMWESSRRKKKGGTAAAPEAPVRVEIKLSLLQKWEKEFASRYKLIDGQQPLTPQTGAGRARYSSPTLEMIRQQLEQGVRFDPPQPLLRRPGESARRALDRYLADIKHPLVRHRLVLFSRLLEKLVRQYGEPDLIVLEAVRSLALSEKNKRELQNRIKANRDERESIRQDLAVRNASTSRKAILRYRLWKEAQSTCPFCGDKITQEQLLNGEADIEHLVPRSVVDCNEFYNLTIGHLRCNREIKGDRTPFQAFAHTEHWPQLRDNAEKCFKGRKLEIYLSEKAEELIEQKADLQHTAYIARVIRHVALIQLGWTGEDGRDPTIVKGNTPSSSFQVTNGQLTSRLRQAWGLNQILHPLPEGKRWDDLTDAEREQLQQKNRGDLRHHALDAMVIACTLPWLAHRTVGATDPETGEHGWWKLDERTQRSLAVNPVFPGDGQMRKVATDQIAKVIVRHHVSRSPHQSAYATTIYGKKAPNTYVAREEFTTLTPKNLASIWPPDFSAYCQAAWARYEDEASDIATELKRSKGCVPESFTSRLCFAHFQKWREQAKRGGNTEFSWPDAVKIPIRRVKLISVKDDTAVMRFAPGTPGFVKRTGFKEVRIHLSEDGKSFVPVFVPFWKEDSISPEKLIKPRSTPLATIRRGMVVETKKPSSAGWPAAKYRVLVTGQERIKLLPCHVANTEEAMAAFNLPKKALQLTWPDFIRCIGHELPHPPSAQSASTGAGEAGPASH

SEQ ID NO: 20900 - protein, 1325 aa, unidentified
  REGION 1..1325: note = Cas Enzyme sequence
MGEEIGDYYLGLDIGTSSVGWAVTDSEYNILSYRRKALWGIHLFEEGKTAEERRQHRCARRRLTRRKQRISLLRELFGKEIIKVDPGFFERLDESGLHEDDRRTRQPNSLFNDPAFTDKDFHSRFPTIYHLRKYLMYTDEKPDIRLVYLAIHHIIKYRGHFLFETTSDDIPRFEDVINTLIDDVCKYHMELSISDYDSVSKLVSDREKSIIDKKRELATLLGCNEPDEKELAALLSGSSANLGKLFSDEELDKEKIKFSDSSADMRLEELEDILDSDSFNTLRTAKTVYDWGILSSLLRNHSTISEALVAAYDQHRKDLQTLKNAVRTHIPEHYKTMFKSKDTTANYCSYSGRGKPNKSCTQEEFCKYCLKLFEKTTAHNDPSLSDMFDRLNKNTYMPKQSSKDNAVLPYTVHRKELLKILTNASRFYPFLNEEGEDGFTINQKILLLQQFRIPYYVGPLFKNDTNNAWVVRKTDQKITPWNFSDVVDEDASAQRFMDNLTGMCTYIVGEKVLPKNSILYSYFSLYNELNNVRVNGERLDVKLKNDIVRDLFENSTKRVTEKGIIGYLVKRGLIDKKDTCEIQGINGEIKTTLRSLTILKDKIGDKIRDRSMCEGIIMTITVFGDPKRIEKNLSSKYGNKLTKDEIRELSRIRFEGWGRLSSKLLTGLRGKDPDTGINDCVLGFMESTQRNLMEVLHECGFIEQIDRYNREMTTDTEVSYKTVESLQMSPAVKRAVWRTVRIVQDVVDRIGHPPAKVFVETTRGPMEKKSTTSRKNALIQLYKSCKEDSELLGDAMSRTEVEFKSRSLYLYYTQLGRCMYCGKKIDFEKINDKSLVDLDHIYPQSLVKDDSIHNNLVLCHKECNMAKSNHFPLDDNIQMMQKPAWDELLRKKYITKEKYSRLIRKDAFTNDELARFISRQLVETSQSAKGSIEMLRRILGEDTDIVYVKAEMVSEFRQIMESPIMTKCRSVNDLHHAKDAYLNIVVGNVYDTKFTKNYRSFVDSGERYNIRRIYDYDVVRNGTVAWKAGCDGTKMTVLKNMRRNNILFTKMQFIEHSALFDDQLVRAKENSDALIERKKGMLPTKYGGYNKPTGACYSLIEYQNKGRLVHSLEVLPIYAIHYLNDKEKLEQFFAERIGTNVSIVIPVVRMNAMLEWGGIRVHLGGRTGDSVLLYNAEQLLMDDTHYAYCKKLFKFGEDRKARVFHPADYYGLTNELNTNLFDYLRNKIKSEPYCRLPTASSFIGNLDSVKNVFSSKDETTQAVFLNEILHTFQCNNTNTNLKDLGGPATTGRNVVNKKLPDRNAKKVYLINQSITGIMENKILLN

SEQ ID NO: 20901 - protein, 1351 aa, unidentified
  REGION 1..1351: note = Cas Enzyme sequence
MKKQFGEYYLAFDIGTDSVGWAVTDLNYNLERLNGKYMWGTRLFEAGKTAAERRSFRAARRRLQRRTQRIRLLQEIFAEEISKADMGFFHRLAESKYRLEDKNNQTNTLFNDANFKDKDYHAKFPTIFHLRKTLIESKEKFDVRLVYLALQHILKNRGHFLFEGQRMENVTSFDAAFSPLNNYLEDEYQFAFADDSLDKVQNILKDSSLGVKDKNKYLNDLLGADTKQKKEMVNLICGGTAKIKNILDIAEDTDLEIDKLCFKTMDYADIHDKLLDTIGDLSKIECLDRLKSIFDWSLLAEIKKGNDYLSFAKVDVYEKHKQDIKLLKSLIKKYYDNAAYNEIFNDVNTANNYVAYVGMTKKNNKKQVVLSRKCTQEEFCKFVKGYLDRIKSMDSDVEQLKSKCANVSFAPKQINRDNGVIPYQMHLLELEKILENAKRYLPFLNEKDASGYTAAEKIVKIITFRIPYYVGPLNDHHKIADGQKGHCWIVKNSDEKIRPWNFERVVDQEACAEVFIRRMTNKCTYMHDADVLPKDSLLYSKFVVLNELNNVCVNGDRLPTDLKQHIYRELFMRQKKVKAKNFRDFMINNGYMRETDSLSGFDGDFKGSLGSLIDFRKIIGVKAGDNKMVEEIIKWIVLFGDTKKLLKDRINKFYGDKLSENEIKAIVNLKYTGWGRLSREFLEQITSQIPGFANELGIITAMYETPNNLMELLSGQYQYLDKLQAYNNTMHEATGSLTYETVADLYVSPAVKRSIWQTLVLAEEIKNVMGHEPKKVFIEMTRSDVQNKKRTVSRKNSLISLYKACKGETRDWLAELENRTDGDLRGDKLFLYYTQMGRCMYTGERIEIGELFSTGADGRALYDIEHIFPQSKIKDDSIDNRVLVKAGANRAKGDQYPVPQEYRNKCGGIWKMLLERGFISQKKYDRLVRNTPFSEDELAGFIARQIVETSQSTKAVAEILKREYKNTEIVYVKAGNVSAFRQQNDFVKCREINDYHHAKDAYLNIVVGNVYNTKFTHSPINFIKSKNNKYSLNKMYDFKVERNGNVAWEPGDNGTIATVKQTMHNNRVLFTRYASQAKGGFFKQMLLKKGKGQHPIKGNMNDPISKIENYGGYDKVAGAYFFLVEHTLKNKRVKTIEYVPILKAVMLQDNPAALLQYCLDDLILHEPRILLAGIKINTLFKVDGFKMHLSGRTGNQLIYKGAEQLVLAVNDEKYIKKIAKYIQRNKEAKGQLLVTMFDKFDKDTNIALYDKLLDKLQNTVYGVRLSAQIKNLEKGRETFINLGIKEQVITLFEILHLFQCNSVNGDLTAIGGAKSAGILVLGKNISELPKISIINQSPTGLFEQEIDLLKL

SEQ ID NO: 20902 - protein, 1351 aa, unidentified
  REGION 1..1351: note = Cas Enzyme sequence
MKKQFGEYYLAFDIGTDSVGWAVTDLNYNLERLNGKYMWGTRLFEAGKTAAERRSFRAARRRLQRRTQRIRLLQEIFAEEISKADMGFFHRLAESKYRLEDKNNQTNTLFNDANFKDKDYHAKFPTIFHLRKTLIESKEKFDVRLVYLALQHILKNRGHFLFEGQRMENVTSFDAAFSPLNNYLEDEYQFAFADDSLDKVQNILKDSSLGVKDKNKYLNDLLGADTKQKKEMVNLICGGTAKIKNILDIAEDTDLEIDKLCFKTMDYADIHDKLLDTIGDLSKIECLDRLKSIFDWSLLAEIKKGNDYLSFAKVDVYEKHKQDIKLLKSLIKKYYDNAAYNEIFNDVNTANNYVAYVGMTKKNNKKQVVLSRKCTQEEFCKFVKGYLDRIKSMDSDVEQLKSKCANVSFAPKQINRDNGVIPYQMHLLELEKILENAKRYLPFLNEKDASGYTAAKKIVKIMTFRIPYYVGPLNDHHKIADGQKGHCWIVKNSDEKIRPWNFEQVVDQEACAEAFIRSMTNKCTYMHDADVLPKDSLLYSKFVVLNELNNVCVNGDRLPTDLKQHIYRELFMRQKKVKAKNFRDFMINNGYMRETDSLSGFDGDFKGSLGSLIDFRKIIGVKAGDNKMVEEIIKWIVLFGDTKKLLKDRINKFYGDKLSENEIKAIVNLKYTGWGRLSREFLEQITSQIPGFANELGIITAMYETPNNLMELLSGQYQYLDKLQAYNNTMHEATGSLTYETVADLYVSPAVKRSIWQTLVLAEEIKNVMGHEPKKVFIEMTRSDVQNKKRTVSRKNSLISLYKACKGETRDWLAELENRTDGDLRGDKLFLYYTQMGRCMYTGERIEIGELFSTGADGRALYDIEHIFPQSKIKDDSIDNRVLVKAGANRAKGDQYPVPQEYRNKCGGIWKMLLERGFISQKKYDRLVRNTPFSEDELAGFIARQIVETSQSTKAVAEILKREYKNTEIVYVKAGNVSAFRQQNDFVKCREINDYHHAKDAYLNIVVGNVYNTKFTHSPINFIKSKNNKYSLNKMYDFKVERNGNVAWEPGDNGTIATVKQTMHNNRVLFTRYASQAKGGFFKQMLLKKGKGQHPIKGNMNDPISKIENYGGYDKVAGAYFFLVEHTLKNKRVKTIEYVPILKAVMLQDNPAALLQYCLDDLILHEPRILLAGIKINTLFKVDGFKMHLSGRTGNRLIYKGAEQLVLAVNDEKYIKKIAKYIQRNKEAKGQLPVTVFDKFDKDTNIALYDKLLDKLQNTVYRVRLSAQIKNLEKGRETFINLGIKEQVITLFEILHLFQCNSVNGDLTAIGGAKSAGILVLGKNISELPKISIINQSPTGLFEQEIDLLKL

SEQ ID NO: 20903 - protein, 1357 aa, unidentified
  REGION 1..1357: note = Cas Enzyme sequence
MQEYYLGLDIGTDSVGWAVTDLQYKILKKNGKALWGTRLFPEANTAADRRANRIARRRIERREQRIALLRDIFAPAVAAVDPAFFQRLDESKFLEADKRPDGSGAPLGKYALFADGAYCDRDYHREFPTIYHLRRALLLEERAFDVRLVYLAAHHILKKRGHFLFGDLALEDVTFESCLSELRECLREEYDQEFFLQDEESFSQALRDRSLGANRKKDALREAMGPDAKDRQLSTLLDFLAGKKGSAAALCGLELVEDVKFSFKDDFEAAEPQLIAALGDDMNLVYCAKRMYDWSALAEILNGERYLSCAKAKEYEKHKEDLQRLKGVLRDFPAEYRAMFRKSDVEHNYAAYSGHGSAQQRCNADDFLAYVKKVLGALREKMNAASRAEVEAILNEVEAGTFLPRQSSTANGRVPYQCHEKELEIILERASRYLPFLREKDESGLTAQEKILAIFRFRIPYYVGPLNPKSKNAWLVRGEEKIFPWNFEQVVDLDKSAENFITRMTAKCSYIGAPVLPRDSLLYTRFVALNMLNKLSVNGHPISVALKQEIYEKHLIPRGKTNFKALHQWLLSNGKLQKSDELGGVDEEFKLAMPGYAVFRNLLARGNSEDMVEEIIRHIVLFGKERKLLSHWLEREYGGRLSEEDRAYVLRQRERFSGWGNLSAQLLRDIRCPVEEGGEPLSIDEALWRTNCNLNELLSNQYGFASAIEQRRAQVLGREKPTLEEFLRDSYASPGIRRAIHQSMGILDEIQKLMGGAPKRVFVEVTRGEGAKERTQSRKKQLEALYKSCKKDAEKIYEDYAELYAHLQKQDDAALRGKKLYLYFTQMGRCMYSGRRIDLADLFAEGYDIDHIHPRSVVKDDSFDNLVLVRAELNRSKTNDYPIRDSIRETMRGHWTFLRKHGLISEEKYRRLTRATRFEDSELAGFIARQLVQTGQAAKIVAELLRQRYGDDRVVYVKAGNVSAFRQDQRITAEGEQKQAGACKGLKIPQDPLFVKCREVNDFHHAKDAYLNIVVGNTYHVKFTRNPLRFVQSRQIYSMNHVFDYDVAEKDGFAWKAGEDGSIAMVRRMMRKNNILLTRYAREETGKLFDVQIVRKEKGKVPIKSSDPRMRTKDYGGYNSAKSAYFMLVEHGKGKKRVRSLEVVTILDKALCEREPLRYCEEVLGLEAPKVLISKIKIDSLFCLDGFRMHLSGRQGPQIKYKNANPLVLSPEWAPYIKQAAKCVERYAGEKEDVQLTAFDAVDAQRNCQLYQILLEKLTLQPYRVKYGTPAKTLAEHAAAFCRLTPLQQCKILLQILNLFSTNADSADLKLLCGKAGIGILLTSKNLENFAGHSFHLIYPSITGVFEQAINLLGDEF

SEQ ID NO: 20904 - protein, 1043 aa, unidentified
  REGION 1..1043: note = Cas Enzyme sequence
EKHKEDLQRLKGVLRDFPAEYRAMFRKSDVEHNYAAYSGHGSAQQRCNADDFLAYVKKVLGALREKMNAASRAEVEAILNEVEAGTFLPRQSSTANGRVPYQCHEKELETILERASRYLPFLREKDESGLTAQEKILAIFRFRIPYYVGPLNPKSKNAWLVRGEEKISPWNFDQVVDLDKSAENFITRMTAKCSYIGAPVLPRESLLYTRFVALNMLNKLSVNGHPISVALKQEIYEKHLIPRGKTNFKALHQWLLSNGKLQKSDELGGVDTEFKLAMPGYAVFRNLLARGNSEDMVEEIIRHIVLFGKERKLLSHWLEREYGGRLSEEDRAYVLRQRERFSGWGNLSAQLLRDIRCPVEEGGEALSIDEALWRTNCNLNELLSNQYGFASAIEQRRAQVLGREKPTLEEFLRDSYASPGIRRAIHQSMGILDEIQKLMGGAPKRVFVEVTRGEGAKERTQSRKKQLEALYKSCKKDAEKIYEDYAELYAHLQKQDDAALRGKKLYLYFTQMGRCMYSGRRIDLADLFAEGYDIDHIHPRSVVKDDSFDNLVLVRAELNRSKTNDYPIRDSIRETMRGHWTFLRKHGLISEEKYRRLTRATRFEDSELAGFIARQLVQTGQAAKIVAELLRQRYGDDRVVYVKAGNVSAFRQDQRITAEGEQKQAGACKGLKIPQDPLFVKCREVNDFHHAKDAYLNIVVGNTYHVKFTRNPLRFVQSRQIYSMNHVFDYDVAEKDGFAWKAGEDGSIAMVRRMMRKNNILLTRYAREETGALFDLQILPKGKGQALIKASDPRMSIEKFGGYNKVKGAYYALIEHEERKKRVRSLELVTILDKALYEREPLRNGEEVLGLKAPKVLISKIKIDSLFCLDGFRMHLSGRQGKQITYKNANPLVLSPEWAQYIKQVAKYVTRCNSEKRDIEITAFDGIDAQRNCELYQILLEKFKQNPYRTKYDAPLRTMEKQAETFKKLSPCKQCKVLLEILKIFGTNAATGDLDELKGSTQAGKLSTTKDIDSYAGKHSFHLIYQSITGVFEQEIDLLGDEF

SEQ ID NO: 20905 - protein, 1357 aa, unidentified
  REGION 1..1357: note = Cas Enzyme sequence
MQEYYLGLDIGTDSVGWAVTDLQYKILKKNGKALWGTRLFPEANTAADRRANRIARRRIERREQRIALLRDIFAPAVAAVDPAFFQRLDESKFLEADKRPDGSGAPLGKYALFADGAYCDRDYHREFPTIYHLRRALLLEDRAFDVRLVYLAAHHILKKRGHFLFGDLALEDVTFESCLSELQECLREEYDQEFFLQDEESFSQALRDRSLGANRKKDALREAMGPDAKDRQLSTLLDFLAGKKGSAAALCGLELAEDVKFSFKDDFEAAEPQLIAALGDDMNLVYCAKRMYDWSALAEILNGERYLSCAKAKEYEKHKEDLQRLKGVLRDFPAEYRAMFRKSDVEHNYAAYSGHGSAQQRCNADDFLAYVKKILGALREKMNAASRAEVEAILNEVEAGTFLPRQSSTANGRVPYQCHEKELEIILERASRYLPFLREKDESGLTAQEKILAIFRFRIPYYVGPLNPKSKNAWLVRGEEKISPWNFDQVVDLDKSAENFITRMTAKCSYIGAPVLPRDSLLYTRFVALNMLNKLSVNGHPISVALKQEIYEKHLIPRGKTNFKALHQWLLSNGKLQKSDELGGVDTEFKLAMPGYAVFRNLLARGNSEDMVEEIIRHIVLFGKERKLLSHWLEREYGGRLSEEDRAYVLRQRERFSGWGNLSAQLLRDIRCPVEEGGEPLSIDEALWRTNCNLNELLSNQYGFASAIEQRRAQVLGREKPTLEEFLRDSYASPGIRRAIHQSMGILDEIQKLMGGAPKRVFVEVTRGEGAKERTQSRKKQLEALYKSCKKDAEKIYEDYAEIYAYLQKQDDAALRGKKLYLYFTQMGRCMYSGRRIDLADLFAEGYDIDHIHPRSVVKDDSFDNLVLVRAELNRSKTNDYPIRDSIRETMRGHWTFLRKHGLISEEKYRRLTRATRFEDSELAGFIARQLVQTGQAAKIVAELLRQRYGDDRVVYVKAGNVSAFRQDQRITAEGEQKQAGACKGQKTQQDPLFVKCREVNDFHHAKDAYLNIVVGNTYHVKFTRNPLRFVQSRQTYSMNCVFDYDVVEKDGFAWKAGEDGSIAMVRRMMRKNNILLTRYAREETGALFDLQILPKGKGQALIKASDPRMSIEKFGGYNKVKGAYYALIEHEERKKRVRSLEVVTILDKALYEREPLRYCEEVLGLEAPKVLISKIKIDALFSLDGFRMHLSGRTSGQLIYKNANPLVLDPEWAQYIKQAAKCVERYAGEKEAVQLTAFDAVDARRNCELYQILLAKLALQPYRVKYGTPAKTLAEHAEAFRRLAPLPQCKVLLQILNLFSTNANSADLKLLCGKAGIGILRTSKNLENFAGHSFRLIHPSITGVFEREIDLLGDEF

SEQ ID NO: 20906 - protein, 1327 aa, unidentified
  REGION 1..1327: note = Cas Enzyme sequence
MDKKYYIGADIGTESVGWAVTDEDYNILKARGRELWGSYLFDKAESAAERRLYRNARRRTARVRRRLNLLQELFAEEISKVDPLFFIRLNNSSLFTEDKDGVLTSKDALFADEKFCDKDYFKKYPTIYHLRSGLIKGEVDDIRLFYLAVHHIIKYRGHFLFELQNFSLGNSEIIREKFYLINAFLSDRDMPVLDLSDLDKAIDELKKKEGSKRSRQKLLTDILHTGSEKSLTAVVKAITGGSVKLKELYNIEEDNEKITSFSFEKSTFEDNDMPAIEEAVGIDEAVLVRELKAIYDWSVLCEIMGEETYVSFAKVKIYEKHREDLAWLKRYIRENCPEKYTAVFRNKNGKDNYAAYVGMDKQKRVSKCTREEFYAFLRKEVEITDKKVLAEIERSNFMPKQVSEKNGVIPYQVHLTELRRILDEAEKKFPFLKEKKDGKTVAEKIIMLMTFRIPYYVGPLHTQSDFGWSVRNPGYEKVSITPWNYSEAIDEDASEEKFIRLLTKKCTYLKGEDVLPENSLLYSEFAFLNELNNLRINGEKSEEARRLIYEYAKTHKKVTLKSCLALLIRNGCIPAGSGKEIFSGIDDDFKRSLKSYNDLSFLGEKRYTHSEMCEKIITWLTLISDKHRFEKRLRREYGKILTEEEIKKLKSLNYSKWGRLSEKLLDGITSARCTDENGECLTIIEAMRKKGENFMQLMSDKYGFQDAIREYNSESEQDEKVTYKKVSALYCSPAVKRSIWKTIEIVKEIVKIQGKDPAKVFIEMAREVKDGSMKGSRTVSRKDQLLELYKNIKGEEREWIAEIEQTPDAKFNSDKLVLYYRQLGKSMYSGKDISIDEVFDTNICDIDHIYPQSKIKDDSLDNRVLVYKTENQGKQDKYPIAEDIRVKMTPFWKMLKERKLISDVKFERLIRRTQLTQDELKDFINRQLVFTRQSTKAVAQLLKEMLPDTEIVYAKAGNANDFKSENNIIKIRELNDLHHAKDAYINIVVGNVYNTKFNHSARFYFNERESNDYDLKNLYRRDIPGAWKVADKERIIQIVEKNTAKAIRMTLGGQGRLFDVNPVKAGQNDDLLPLKMKGAISDTSKYGGYNSQKTAYFMLVRSKGKKGKIMLSMEAFPLWMEKQNKAGIEEKVRFCAKQGLVEPEIVIDRIKLNTLLYMDGSYAWLRGKTGNRIKLCNANQLYLKEEEMKILKRISNYMTDRKLLKRQELPVGEKIKAEDNVRLYDALVEKLESPVYRGLSIRKQAEFLKKSRERFISLSLEKQCVVIFEVLHLMQCNSVNSDLTLLGGVPNAGSLVNSKFVQDNEMKIIYQSCTGYYREIIDFKRFL

SEQ ID NO: 20907 - protein, 1340 aa, unidentified
  REGION 1..1340: note = Cas Enzyme sequence
MGQEYYLGLDLGTASTGWAITDPEYHVLRKHGKALWGVRLFESASTAEERRMFRTGRRRLDRRNWRIQILQEIFAEEICKIDPGFFLRMKESKYYPEDKRDINGNCPELPYALFVDNDFTDKDYHKKFPTIYHLRKMLMNTEDTPDIRLVYLAIHHMLKHRGHFLLSGDISEIKEFGTTFSKLLENIKNEELNWNLELRAEEYAIVESILKDNMLNRSTKKTRLIKALKAKSTCEKAVLNLLAGGTVKLSDIFGLEELNETERPKISFADNGYDDYIGEVENELGEQFYIIETAKAVYDWAVLVEILGEHTSISEAKVATYEKHKSDLRFLKKIVRKYLTKEEYKDIFVSTSDKLKNYSAYIGMTKINGKKVDLQSKRCNKEEFYDFIKKGVLKKIEGQPEYEYLKEEIERETFLPKQVNKDNGVIPYQIHLYELKKILGNLRDKIDFIKENEDKLVQLFEFRIPYYVGPLNKIDDGKEEKFTWAVRKCNEKIYPWNFDDVIDIEASAEKFIRRMTNKCTYLIGEDVLPKDSLLYSKYMVLNELNNLKLDGEKLSVELKQQLYTDVFCKYRKVTVKKVKNYLKCEGIISGNVEITGIDGDFKASLTAYHDFKEILTGTELAKKDKENIIMNIVLFGDDKKLLKKRMNRLYPQITPNQLKKICALSYKGWGRFSKKFLEEIVVPAPETGEAWNIITALWESKNNLMQLLSNEFQFMEEVETYNMGKQAKTLSYETVENMYVSPSVKRQIWQTLKIVKELEKVMKESPKRIFIEMAREKQESKRTESRKKQLMDLYKACKNEEKDWVKELGAKKEQDLRSDKLYLYYTQKGRCMYSEEVIELEDLPDNTKCNIDHIYPQSKTMDDSLKNRVLVKTKYNETKLDKYPVNENIRRKRKVFWKSLLDGGFISKEKYERLVRNTELSPEELAGFIERQIVETRQSTKAVAEILKQVFPESEIVYVKAGTVSRFRKDFELLKVREVNDLHHAKDAYLNIVVGNSYYVKFTKNAALYVKENPGRTFNLKKMFISKWDIERNGEVAWKAGGKGTIVTVKQTMNKNNILVTRQVHEAKGGLFDQQIMKKGKGQIAIKESDERLASIEKYGGYNKAAGAYFMLVESKDKKDKTIRTMEFIPLYLKNKIESEESIALNYLEKDRGLKEPKILVKKIKIDTLFDVDGFKMWLSGRTGDQLLFKGANQLLLSNEHAAIMKKILKFVNRQKENKNLLLVDNDEITEEMLIQIYDMFYEKIKNTVYNVRLSAQEKTLSDKKKNFLNLKKEEKCVVLSEILHLFQCQSTSANLKMIGGPGKAGILVMNNNISKCNKISIINQSPTGVFENEIDLLKI

SEQ ID NO: 20908 - protein, 1164 aa, unidentified
  REGION 1..1164: note = Cas Enzyme sequence
MKNEENIYLGLDIGTDSVGYAVTDDKYKIMKYHGNAAWGSTIFDAGALGADRRTFRSARRRLDRRQERIQLLQEIFANEIAKVDERFFIRLLESGLWRVDAEDRYVFFNDKEYTDVQYMRDYPTIHHLICELIDNPNKHDVRLVYLACAWLMAHRGHFLSNINTENIADLVDIHNVYSAFMHFFEENEIICDWREVDVDELGKILAANIGINEKYRNLSTLLFATRKPDKKAKEGFPYSEDAIVRLMAGGTCKLKDIFIKEEYDEFGSITLGMDDEKMTEVMADIGDDFELIKALRSLYDWGILANILVNKNNSPLISKSKVKVYEQHREDLANLKYLVHKYIPYKYNEIFRELRGDNYVAYSYHYELKNDEKMGKKTDLEKFSKFLLKILEGISVEEEDKVVYDNMIERLKLRLFLPKQKNTDNRVIPHQLYEYELKSILKNAKTYLPFLKEKDSDGISNEDKIISIFKFKIPYYVGPLNCNSQFAWIQRKADGKIFPWNFEDKVDFDASEQAFIQRMTNQCTYLPEESVLPKQSLYYQKFMVLNEINNIKIDGRKISVAMKQELYNEIFEKKKRVRKKDVIDFFVSNGYLEGGKEALISGLDEQIHTNLSSFHAFRRLLQNHILSVEDVESIIERASYSDDKGRVLLFLKNKYSFLTDEDIKYICKIKIKDFGRLSKKFLVDFEGMCKETGEISTVLRLMWETNNNLMELLSDKYTFSNGIKENRKKYYTEQQKTLDARLDEMYISNSVKRTIFRTLSVVKDVTKAFGVPKKIFVEMTRTDNPDLKGKRTKTRQQRVLELYAKCDEEDVRELKHQMESLGENVDNKLQSDKLFLYFIQFGKSAYSGKMIDLEKLMSGSKVYDIEHIYPQAYVKDDSIINNKVLVFSEENGAKQDKYPIKTEIRKQMSGIWTTWHHVGAVSDEKYKRLTRSTPFNEDEKYGFINRQLTETSQSTKAVAQILNEKYPETEIVYVKAGLVSDFRHEFGLYKCRSYNDLHHATDAYLNVVVGNVYNMKFNRKWFSVDSKYSIKTKTIFSHSLVCDGKTVWDKEKMLPMVLKNAKKNNAHFTKYQFMKTGGFFDQMPCKKAPGLVPRKKGLDTERYGGYNKSGIMFLLPMRYQIGKKSDIIILSVELLYGKKFLKDEVFAKKYAEERLQKIIGKKSR

SEQ ID NO: 20909 - protein, 1084 aa, unidentified
  REGION 1..1084: note = Cas Enzyme sequence
MTEVMADIGDDFELIKALRSLYDWGILANILVNKNNSPLISKSKVKVYEQHREDLANLKYLVHKYIPYKYNEIFRELRGDNYVAYSYHYELKNDEKMGKKTDLEKFSKFLLKILEGISVEEEDKVVYDNMIERLKLRLFLPKQKNTDNRVIPHQLYEYELKSILKNAKTYLPFLKEKDSDGISNEDKIISIFKFKIPYYVGPLNCNSQFAWIQRKADGKIFPWNFEDKVDFDASEQAFIQRMTNQCTYLPEESVLPKQSLYYQKFMVLNEINNIKIDGRKISVAMKQELYNEIFEKKKRVRKKDVIDFFVSNGYLEGGKEALISGLDEQIHTNLSSFHAFRRLLQNHILSVEDVESIIERASYSDDKGRVLLFLKNKYSFLTDEDIKYICKIKIKDFGRLSKKFLVDFEGMCKETGEISTVLRLMWETNNNLMELLSDKYTFSNGIKENRKKYYTEQQKTLDARLDEMYISNSVKRTIFRTLSVVKDVTKAFGVPKKIFVEMTRTDNPDLKGKRTKTRQQRVLELYAKCDEEDVRELKHQMESLGENVDNKLQSDKLFLYFIQFGKSAYSGKMIDLEKLMSGSKVYDIEHIYPQAYVKDDSIINNKVLVFSEENGAKQDKYPIKTEIRKQMSGIWTTWHHVGAVSDEKYKRLTRSTPFNEDEKYGFINRQLTETSQSTKAVAQILNEKYPETEIVYVKAGLVSDFRHEFGLYKCRSYNDLHHATDAYLNVVVGNVYNMKFNRKWFSVDSKYSIKTKTIFSHSLVCDGKTVWDKEKMLPMVLKNAKKNNAHFTKYQFMKTGGFFDQMPCKKAPGLVPRKKGLDTERYGGYNKSGIMFLLPMRYQIGKKSDIIILSVELLYGKKFLKDEVFAKKYAEERLQKIIGKKADEVSFPMGMKPWKINTVLSLDGFNVCITGIGGGGKCLSAQPIMQLSLPYELVKYLKKIEKFVEKNKNNANYIYDEQYDSVSVDGNIKLYDVYLDKLENSIYNKRINSPEAILKNGREKFCKLNVLGQAVTLINIQSIFGRMTGGCDLENIGGKKHSAATVNFSSNVSNWKKYYNDVRVVYQSPSGIWERRSQNILELL

SEQ ID NO: 20910 - protein, 1361 aa, unidentified
  REGION 1..1361: note = Cas Enzyme sequence
MKNEENIYLGLDIGTDSVGYAVTDDKYKIMKYHGNAAWGSTIFDAGALGADRRVFRSARRRLDRRQERIQLLQEIFANEIAKVDERFFIRLLESGLWRADAEDRYVFFNDKEYTDVQYMRDYPTIHHLICELIYNPNKHDVRLVYLACAWLVTHRGHFLSNINTENIADLVDIHNVYNGFMRFFEENEIICDWREVDVDELGKILAANIGINEKYRNLSTLLFATRKPDKKAKEGFPYSEDAIVRLMAGGTCKLKDIFIKEEYDEFGSITLGMDDEKMTEVMADIGDDFELIKALRSLYDWGILANILVNKNNSPLISKSKVKVYEQHREDLANLKYLVHKYIPYKYNEVFRELRSDNYVAYSYHYELKNDEKMGKKADLEKFSKFLLKILVGISVEEEDKVVYDNMIERLTLRLFLPKQKNTDNRVIPHQLYEYELKSILKNAKNYLPFLKVKDSDGISNEDKIISIFKFKVPYYVGPLNCNSQFAWIQRKADGKIFPWNFEDKVDFDASEQAFIQRMTNQCTYLPEESVLPKQSLYYQKFMVLNEINNIKIDGRKISVAMKQELYNEIFEKKKRVRKKDVVDFFVSNGYLEGGKEALISGLDEQIHTNLSSFHAFRRLLQNNILSVEDVESIIERASYSDDKGRVLLFLKNKYSFLTDEDIKYICKIKIKDFGRLSKKFLVDFEGMCKETGEISTVLRLMWETNNNLMELLSDKYTFSNGIKENRKKYYTEQQKTLDARLDEMYISNSVKRTIFRTLSVVKDVTKAFGVPKKIFVEMTRTNNPDLKGKRTKTRQQRVLELYAKCDEEDVRELKHQMESLGEYVDNKLQSDKLFLYFIQFGKSAYSGKMIDLEKLMSGSKVYDIEHIYPQAYVKDDSIINNKVLVFSEENGAKQDIYPIKTEIRKQMSGIWAVWHHVGAVSDEKYKRLTRSTPFNDDEKYGFINRQLTETSQSTKAVAQILNEKYPETEIVYVKAGLVSDFRHEFGLYKCRSYNDLHHATDAYLNVVVGNVYNMKFNRKWFSVDSKYSIKTKTIFSHSLVCDGKTVWDKEKMLPMVLKNAKKNNAHFTKYQFMKTGGFFDQMPCKKAPGLVPRKKGLDTERYGGYNKSGIMFLLPMRYQIGKKSDIIILSVELLYGKKFLKDEVFAKKYAEERLQKIIGKKADEVFFPMGMKPWKINTVLSLDGFNVCITGIGGGGKCLSAQPIMQLSLPYELVKYLKKIEKFVEKNKNNANYIYDEQYDLVSADKNIKLYDVYLDKLENSIYNKRINSPEAILKNGREKFCELNVLEQSLTLINIQSIFGRMTGGCDLENIGGKKHSAATVNFSSNVSNWKKYYNDVRVVYQSPSGIWERRSQNILELL

SEQ ID NO: 20911 - protein, 1361 aa, unidentified
  REGION 1..1361: note = Cas Enzyme sequence
MKNEENIYLGLDIGTDSVGYAVTDDKYKIMKYHGNAAWGSTIFDAGALGADRRVFRSARRRLDRRQERIQLLQEIFANEIAKVDERFFIRLLESGLWRADAEDRYVFFNDKEYTDVQYMRDYPTIHHLICELIYNPNKHDVRLVYLACAWLVTHRGHFLSNINTENIADLVDIHNVYNGFMRFFEENEIICDWREVDVDELGKILAANIGINEKYRNLSTLLFATRKPDKKAKEGFPYSEDAIVRLMAGGTCKLKDIFIKEEYDEFGSITLGMDDEKMTEVMADIGDDFELIKALRSLYDWGILANILVNKNNSPLISKSKVKVYEQHREDLANLKYLVHKYIPYKYNEVFRELRSDNYVAYSYHYELKNDEKMGKKADLEKFSKFLLKILVGISVEEEDKVVYDNMIERLTLRLFLPKQKNTDNRVIPHQLYEYELKSILKNAKNYLPFLKVKDSDGISNEDKIISIFKFKVPYYVGPLNCNSQFAWIQRKADGKIFPWNFEDKVDFDASEQAFIQRMTNQCTYLPEESVLPKQSLYYQKFMVLNEINNIKIDGRKISVAMKQELYNEIFEKKKRVRKKDVVDFFVSNGYLEGGKEALISGLDEQIHTNLSSFHAFRRLLQNNILSVEDVESIIERASYSDDKGRVLLFLKNKYSFLTDEDIKYICKIKIKDFGRLSKKFLVDFEGMCKETREISTVLRLMWETNNNLMELLSDKYTFSNGIKENRKKYYTEQQKTLDARLDEMYISNSVKRTIFRTLSVVKDVTKAFGVPKKIFVEMTRTNNPDLKGKRTKTRQQRVLELYAKCDEEDVRELKHQMESLGEYVDNKLQSDKLFLYFIQFGKSAYSGKMIDLEKLMSGSKVYDIEHIYPQAYVKDDSIINNKVLVFSEENGAKQDIYPIKTEIRKQMSGIWAVWHHVGAVSDEKYKRLTRSTPFNDDEKYGFINRQLTETSQSTKAVAQILNEKYPETEIVYVKAGLVSDFRHEFGLYKCRSYNDLHHATDAYLNVVVGNVYNMKFNRKWFSVDSKYSIKTKTIFSHSLVCDGKTVWDKEKMLPMVLKNAKKNNAHFTKYQFMKTGGFFDQMPCKKAPGLVPRKKGLDTERYGGYNKSGIMFLLPMRYQIGKKSDIIILSVELLYGKKFLKDEVFAKKYAEERLQKIIGKKADEVFFPMGMKPWKINTVLSLDGFNVCITGIGGGGKCLSAQPIMQLSLPYELVKYLKKIEKFVEKNKNNANYIYDEQYDLVSADKNIKLYDVYLDKLENSIYNKRINSPEAILKNGREKFCELNVLEQSLTLINIQSIFGRMTGGCDLENIGGKKHSAATVNFSSNVSNWKKYYNDVRVVYQSPSGIWERRSQNILELL

SEQ ID NO: 20912 - protein, 1358 aa, unidentified
  REGION 1..1358: note = Cas Enzyme sequence
MKNEKKYYLGLDIGTDSVGYAVTDTEYRLLKFHGSDAWGSHVFSAAALCDERRNFRSARRRLDRRQQRVQLLQEIFADEISKIDSRFFLRLSESYLWREDTADRYIFFNDKEYTDVQYMGEYPTIHHLISDLMHDKKKHDVRLVYLACAWLVAHRGHFLNQISVEHMDSLLDIQEVYQNFLGFFIENGFENPWSSDAQAIGAILKEHVRVTEKQNLLAATILDDRKPNKNVSETFPYSEYHIIRLLAGGTCKLQDLYGKDEYEAFGSLSLEMDDNKMAEIMVNIGDDYELISVLRNLHDWSVLAEVLDAESGITTISEAKVKIYEQHKADLKTLKYFIRKYCPTKYDMVFREARNDNYVAYSYHVNRDIADQVKSKADVETFSKFLEKIVGKIQPDEEDEAVYQEMCERLVLRQFLPKQKNTDNRVIPHQLYEYELKKILDNASEYLPFLKQNEDGISNKDKILSVFKFKIPYYVGPLNTNSDFAWIQRKAGKILPWNFQSMIDDDASEEAFIKKMTNQCTYLPGEAVLPKDSLCYQKFMVLNEINNLKIDGRKIPVEAKQGLYTCLFLKYKRVKKKQIEDYLISNGYLDKNHRESLSGIDVTIKSSLSSYLSFKRLLDKKILSEQEVERIIERSSYAEDKGRVGKWLRKNYPDLSDEDVTYICKIKTKDFGRLSRKFLTGMEGVCKAKGEIATIINMMWETNDNLMELLSERYTFVETIDACRKEYYTGRKQTLEERLDEMYVSNAVRRPIYRTLDIVKDIEKAFGTPEKIFVEMARGGLPEQKGRRTKSRYQQILDYYAKCREEDVRDLKHQLETMGEYVDNRLQSDRLFLYFMQFGKSAYSGTPISIERLMAGSKEYDIDHIYPQAYVKDDSIINNKVLVLSEENGAKQDVYPIKAEIRNQMQSTWAYWHHLGTISDEKYKRLIRSTPFTEDEKYGFINRQLTETSQSTKVVAELLKERFPQTEIVYSKAGLVSEYRHEFDLYKSRTYNDLHHAVDAYLNVVVGNVYHMRFSRQWFRVESRYSVKTKTLFTHTVKCQDQIVWNKEEMLPRVLKTAKKNTAHFTKYASFKTGGLFDQQPVKKGANLIPLKAGLPTEKYGGYNKAGVMFFIPVRYKAGKKTALMILSVELIYGKRFLEDASFAKEYAKDRLQRILGKKVDDVTFPLGMRPWKVNTVLSLDGFRACITGVASGGTKLIAQPIMQFSSDEYWKYYLKKVERLTEKVSNNPRYVYDVDYDVVQAEDNLKLYDLYIDKLQNTIYKKRINSPLQLLIDGRERFIGCNVIEQCQVLLNIHQVFGRMTAGCNLEKIGGKAHSAATVSFSSTMSNWKKNYSDVRIIDQSASGLWEVVSDNILEYV

SEQ ID NO: 20913 - protein, 1358 aa, unidentified; identical to SEQ ID NO: 20300
  REGION 1..1358: note = Cas Enzyme sequence

SEQ ID NO: 20914 - protein, 1358 aa, unidentified
  REGION 1..1358: note = Cas Enzyme sequence
MKQGKRGYYLGLDIGTDSIGYAVTDEQYHLLRFHGNDAWGSHVFDSASLCDERRGFRSARRRLDRRQQRVKLLQEIFAKEIANIDPRFFIRLSESYRWRDDTDDRYIYFNEEEYTDIQYMRDYPTIHHLICELMENEEEHDIRLVYLACAWLVAHRGHFLSQLSVDNIDSLIDIESVYQKFLHFFIDNGCENPWIQDAELVGGILKEHIGVTEKHNRLGEIMLGNRKPSKDVRDTFLYSEYCIIRLLAGGTCKLRDLYGKEEYEDFGSVSLEMDDDKLAEIMINIGEDYELIAVLRSLHDWSVLADILDGQNGLTNISTAKVAIYEQHKKDLATLKYFIRKYCPEKYNAIFKDAREDNYVAYSYHYNNKLDGQIKKKADTETFSKFLIKIIHSIKPDKEDEIIYQDMDNRLGLRQFLPKQRNTDNRVIPHQLYEYELKKILENAAKYLPFLNQKEDGISNTEKIISIFKFKIPYYVGPLNKHSEFAWIDRKSGKILPWNYENMIDDDASEEAFIKKMTNQCTYLPGESVLPKDSLCYQKFMVLNEINNIKVDGRKISVGAKQGIYSDLFLKYKKVKRSQIEEYLISNGQLEKNRRETLSGIDIQIKSSLSSHIAFRRLLEQKILNEADVERIIERASYAEDKGRVAKWLRAKYPHLTEADIKYICKVKIKDFGRLSRTFLTGIEGACKETGEVATIISMMWESNDNLMELLSERYTFADTILEFKSDYYTERKQTLSERLDEMYVSNAVRRPIYRTLDIVKDLEKAFGKPEKIFIEMTRGAMPELKGKRTKSRQQQLLEYYDKCKEEDVRDLKQQLEALGEYVDNKLQSDRLFLYFMQFGKCAYSGMPISLERLMAGSKEYDIDHIYPQAYVKDDSIINNKVLVLSVANGEKKDVYPIKSEIRNKMQKTWSFWHHVGTISDEKYKRLIRSTPFTEDEKYGFINRQLTETSQSTKVVAELLKERYPEAEIVYSKAGLISDFRHEFDLYKSRSYNDLHHAVDAYLNIVVGNVYHMRFSRQWFNVNSSYSIKTKTLFTHTVNCNGKEVWNKDMLPGVLKTAKKNTAHFTKHATFKTGGLFDQNPVKKAPGLTPLKAGLPTEKYGGYNKAGVMFFIPVRYKSGKKTVLMVLSVELLYGNRFLEDEIFAKEYAKDRLQRIIGKSVDEIDFPIGMRPWKVNTILSLDGFRICITGNASGGKCLIAQPIMQFSSDEYWKYYLKKVEKFVEKVKNNSSYVYDVDYDAVQHEDNLKLYDLYLDKLQNSIYRKRINAPIQTLIEGREKFIDCSVIEQCQVLLNIHQVFGRMTSGCDLTLIGGKTRSASTVNFSSIILNWKKNYTDVRIIDQSASGLWEVVSENILEYL

SEQ ID NO: 20915 - protein, 1358 aa, unidentified; identical to SEQ ID NO: 20914
  REGION 1..1358: note = Cas Enzyme sequence

SEQ ID NO: 20916 - protein, 1358 aa, unidentified
  REGION 1..1358: note = Cas Enzyme sequence
MKQGKRGYYLGLDIGTDSIGYAVTDEQYHLLRFHGNDVWGSHVFDSASLCDERRGFRSARRRLDRRQQRVKLLQEIFAKEIANIDPRFFIRLSESYRWRDDTDDRYIYFNEEEYTDIQYMRDYPTIHHLICELMENEEEHDIRLVYLACAWLVAHRGHFLSQLSVDNIDSLIDIESVYQKFLHFFIDNGCENPWIQDAELVGGILKEHIGVTEKHNRLGEIMLGNRKPSKDVRDTFLYSEYCIIRLLAGGTCKLRDLYGKEEYEDFGSVSLEMDDDKLAEIMINIGEDYELIAVLRSLHDWSVLADILDGQNGLTNISTAKVAIYEQHKKDLATLKYFIRKYCPEKYNAIFKDAREDNYVAYSYHYNNKLDGQIKKKADTETFSKFLIKIINSIQPDEEDEIIYQDMDNRLGLRQFLPKQRNTDNRVIPHQLYEYELKKILENAAKYLPFLNQKEDGISNTEKIISIFKFKIPYYVGPLNKHSEFAWIDRKSGKILPWNYENMIDDDASEEAFIKKMTNQCTYLPGESVLPKDSLCYQKFMVLNEINNIKVDGRKISVGAKQGIYSDLFLKYKKVKRSQIEEYLISNGQLEKNRRETLSGIDIQIKSSLSSHIAFRRLLEQKILNEADVERIIERASYAEDKGRVAKWLRAKYPHLTEADIKYICKVKIKDFGRLSRTFLTGIEGACKETGEVATIISMMWESNDNLMELLSERYTFADTILEFKSDYYTERKQTLSERLDEMYVSNAVRRPIYRTLDIVKDLEKAFGKPEKIFIEMTRGAMPELKGKRTKSRQQQLLEYYDKCKEEDVRDLKQQLKALGEYVDNKLQSDRLFLYFMQFGKCAYSGMPISLERLMAGSKEYDIDHIYPQAYVKDDSIINNKVLVLSVANGEKKDVYPIKSEIRNKMQKTWSFWHHVGTISDEKYKRLIRSTPFTEDEKYGFINRQLTETSQSTKVVAELLKERYPKAEIVYSRAGLISDFRHEFDLYKSRSYNDLHHAVDAYLNIVVGNVYHMRFSRQWFNVNSSYSIKTKTLFTHTVNCNGKEVWNKDMLPGVLKTAKKNTAHFTKYATFKTGGLFDQNPVKKAPGLTPLKAGLPTEKYGGYNKAGVMFFIPVRYKSGKKTVLMVLSVELLYGNRFLEDEIFAKEYAKDRLQRIIGKSVDEIDFPIGMRPWKVNTVLSLDGFRVCITGNASGGKCLIAQPIMQFSSDEYWKYYLKKVERLVEKVKNNSRYIYDVDYDVVHPEDNLKLYDLYLDKLQNSIYRKRINTPIQTLIEGREKFIDCSVIEQCQVLLNIHQVFGRMTSGCDLTLIGGKSHSAATVNFSSTISNWKKNYTDVRIIDQSASGLWEVVSENILEYL

SEQ ID NO: 20917 - protein, 1358 aa, unidentified
  REGION 1..1358: note = Cas Enzyme sequence
MKQGEMGYYLGLDIGTDSIGYAVTDEQYHLLRFHGNDAWGSHVFDSASLCDERRGFRSARRRLDRRQQRVKLLQEIFAKEIANIDPRFFIRLSESYRWRDDTDDRYIYFNEEEYTDIQYMRDYPTIHHLICELMENEEEHDIRLVYLACAWLVAHRGHFLSQLSVDNIDSLIDIESVYQKFLHFFIDNGCENPWIQDAELVGGILKEHIGVTEKHNRLGEIMLGNRKPSKDVRDTFLYSEYCIIRLLAGGTCKLRDLYGKEEYEDFGSVSLEMDDDKLAEIMINIGEDYELIAVLRSLHDWSVLADILDGQNGLTNISTAKVAIYEQHKKDLATLKYFIRKYCPEKYNAIFKDAREDNYVAYSYHYNNKLDGQIKKKADTETFSKFLIKIINSIKPDKEDEIIYQDMDNRLGLRQFLPKQRNTDNRVIPHQLYEYELKKILENAAKYLPFLNQKEDGISNTEKIISIFKFKIPYYIGPLNKHSEFAWIDRKSGKILPWNYENMIDDDASEEAFIKKMTNQCTYLPGESVLPKDSLCYQKFMVLNEINNIKVDGRKISVGAKQGIYSDLFLKYKKVKRSQIEEYLISNGQLEKNRRETLSGIDIQIKSSLSSHIAFRRLLEQKILNEADVERIIERASYAEDKGRVAKWLRAKYPHLTEADIKYICKVKIKDFGRLSRTFLTGIEGACKETGEVATIISMMWESNDNLMELLSERYTFADTILEFKSDYYTERKQTLSERLDEMYVSNAVRRPIYRTLDIVKDLEKAFGKPEKIFIEMTRGAMPELKGKRTKSRQQQLLEYYDKCKEEDARDLKQQLEALGEYVDNKLQSDRLFLYFMQFGKCAYSGVPISLEQLMAGSKEYDIDHIYPQAYVKDDSIINNKVLVLSVANGEKKDVYPIKSEIRNKMQKTWSFWHHVGTISDEKYKRLIRSTPFTEDEKYGFINRQLTETSQSTKVVAELLKERYPEAEIVYSKAGLISDFRHEFDLYKSRSYNDLHHAVDAYLNIVVGNVYHMRFSRQWFNVNSSYSIKTKTLFTHTVNCNGKEVWNNDMLQGVLKTAKKNTAHFTKHATFKTGGLFDQNPVKKAPGLTPLKAGLPTEKYGGYNKAGVMFFIPVRYKSGKKTVLMVLSVELLYGNRFLEDEIFAKEYAKDRLQRIIGKSVDEIDFPIGMRPWKVNTILSLDGFRICITGNASGGKCLIAQPIMQFSSDEYWKYYLKKVEKFVEKVKNNSSYVYDVDYDAVQHEDNLKLYDLYLDKLQNSIYRKRINAPIQTLIEGREKFIDCSVIEQCQVLLNIHQVFGRMTSGCDLTLIGGKSHSAATVSFSSTISNWKKNYTDVRIIDQSASGLWEVVSENILEYL

SEQ ID NO: 20918 - protein, 1358 aa, unidentified
  REGION 1..1358: note = Cas Enzyme sequence
MKQGKRGYYLGLDIGTDSIGYAVTDEQYHLLRFHGNDAWGSHVFDSASLCDERRGFRSARRRLDRRQQRVKLLQEIFAKEIANIDPRFFIRLSESYRWRDDTDDRYIYFNEEEYTDIQYMRDYPTIHHLICELMENEEEHDVRLVYLACAWLVAHRGHFLSQLSVDNIDSLIDIESVYQKFLHFFIDNGCENPWIQDAELVGGILKEHIGVTEKHNRLGEIMLGNRKPSKDVRDTFLYSEYCIIRLLAGGTCKLRDLYGKEEYEDFGSVSLEMDDDKLAEIMINIGEDYELIAVLRSLHDWSVLADILDGQNGLTNISTAKVAIYEQHKKDLATLKYFIRKYCPEKYNAIFKDAREDNYVAYSYHYNNKLDGQIKKKADTETFSKFLIKIINSIKPDKEDEIIYQDMDNRLGLRQFLPKQRNTDNRVIPHQLYEYELKKILENAAKYLPFLNQKEDGISNTEKIISIFKFKIPYYVGPLNKHSEFAWIDRKSGKILPWNYENMIDDDASEEAFIKKMTNQCTYLPGESVLPKDSLCYQKFMVLNEINNIKVDGRKISVEAKQGIYSNLFLKYKKVKRSQIEEYLISNGQLEKNRRETLSGIDIQIKSSLSSHIAFRRLLEQKILNEADVERIIERASYAEDKGRVAKWLRAKYPHLTEADIKYICKVKIKDFGRLSRTFLTGIEGACKETGEVATIISMMWESNDNLMELLSERYTFADTILEFKSDYYTERKQTLSERLDEMYVSNAVRRPIYRTLDIVKDLEKAFGKPEKIFIEMTRGAMPELKGKRTKSRQQQLLEYYDKCKEEDVRDLKQQLEALGEYVDNKLQSDRLFLYFMQFGKCAYSGMPISLERLMAGSKEYDIDHIYPQAYVKDDSIINNKVLVLSVANGEKKDVYPIKSEIRNKMQKTWSFWHHVGTISDEKYKRLIRSTPFTEDEKYGFINRQLTETSQSTKVVAELLKERYPEAEIVYSKAGLISDFRHEFDLYKSRSYNDLHHAVDAYLNIVVGNVYHMRFSRQWFNVNSSYSIKTKTLFTHTVNCNGKEVWNKDMLPGVLKTAKKNTAHFTKHATFKTGGLFDQNPVKKAPGLTPLKAGLPTEKYGGYNKAGVMFFIPVRYKSGKKTVLMVLSVELLYGNRFLEDEIFAKEYAKDRLQRIIGKSVDEIDFPIGMRPWKVNTILSLDGFRICITGNASGGKCLIAQPIMQFSSDEYWKYYLKKVERLVEKVKNNSRYIYDVDYDVVHPEDNLKLYDLYLDKLQNSIYRKRINTPIQTLIEGREKFIDCSVIEQCQVLLNIHQVFGRMTSGCDLTLIGGKSHSAATVNFSSTISNWKKNYTDVRIIDQSASGLWEVVSENILEYL

SEQ ID NO: 20919 - protein, 1358 aa, unidentified
  REGION 1..1358: note = Cas Enzyme sequence
MKQGKRGYYLGLDIGTDSIGYAVTDEQYHLLRFHGNDVWGSHVFDSASLCDERRGFRSARRRLDRRQQRVKLLQEIFAKEIANIDPRFFIRLSESYRWRDDTDDRYIYFNEEEYTDIQYMRDYPTIHHLICELMENEEEHDIRLVYLACAWLVAHRGHFLSQLSVDNIDSLIDIESVYQKFLHFFIDNGCENPWIQDAELVGGILKEHIGVTEKHNRLGEIMLGNRKPSKDVRDTFLYSEYCIIRLLAGGTCKLRDLYGKEEYEDFGSVSLEMDDDKLAEIMINIGEDYELIAVLRSLHDWSVLADILDGQNGLTNISTAKVAIYEQHKKDLATLKYFIRKYCPEKYNAIFKDAREDNYVAYSYHYNNKLDGQIKKKADTETFSKFLIKIINSIKPDKEDEIIYQDMDNRLGLRQFLPKQRNTDNRVIPHQLYEYELKKILENAAKYLPFLNQKEDGISNTEKIISIFKFKIPYYVGPLNKHSEFAWIDRKSGKILPWNYENMIDDDASEEAFIKKMTNQCTYLPGESVLPKDSLCYQKFMVLNEINNIKVDGRKISVGAKQGIYSDLFLKYKKVKRSQIEEYLISNGQLEKNRRETLSGIDIQIKSSLSSHIAFRRLLEQKILNEADVERIIERASYAEDKGRVAKWLRAKYPHLTEADIKYICKVKIKDFGRLSRTFLTGIEGACKETGEVATIISMMWESNDNLMELLSERYTFADTILEFKSDYYTERKQTLSERLDEMYVSNAVRRPIYRTLDIVKDLEKAFGKPEKIFIEMTRGAMPELKGKRTKSRQQQLLEYYDKCKEEDVRDLKQQLEALGEYVDNKLQSDRLFLYFMQFGKCAYSGMPISLERLMAGSKEYDIDHIYPQAYVKDDSIINNKVLVLSVANGEKKDVYPIKSEIRNKMQKTWSFWHHVGTISDEKYKRLIRSTPFTEDEKYGFINRQLTETSQSTKVVAELLKERYPEAEIVYSKAGLISDFRHEFDLYKSRSYNDLHHAVDAYLNIVVGNVYHMRFSRQWFNVNSSYSIKTKTLFTHTVNCNGKEVWNKDMLPGVLKTAKKNTAHFTKYATFKTGGLFDQNPVKKALGLTPLKAGLPTEKYGGYNKAGVMFFIPVRYKSGKKTVLMVLSVELLYGNRFLEDEIFAKEYTKDRLQRIIGKPVEEVDFPIGMRPWKVNTVLSLDGFRVCITGNASGGKCLIAQPIMQFSSDEYWKYYLKKVERLVEKVKNNSRYIYDVDYDVVHPEDNLKLYDLYLDKLQNSIYRKRINTPIQTLIEGREKFIDCSVIEQCQVLLNIHQVFGRMTSGCDLTLIGGKSHSAATVNFSSTISNWKKNYTDVRIIDQSASGLWEVVSENILEYL

SEQ ID NO: 20920 - protein, 952 aa, unidentified
  REGION 1..952: note = Cas Enzyme sequence
MDNRLGLRQFLPKQRNTDNRVIPHQLYEYELKKILENAAKYLPFLNQKEDGISNTEKIISIFKFKIPYYVGPLNKHSEFAWIDRKSGKILPWNYENMIDDDASEEAFIKKMTNQCTYLPGESVLPKDSLCYQKFMVLNEINNIKVDGRKISVGAKQGIYSDLFLKYKKVKRSQIEEYLISNGQLEKNRRETLSGIDIQIKSSLSSHIAFRRLLEQKILNEADVERIIERASYAEDKGRVAKWLRAKYPHLTEADIKYICKVKIKDFGRLSRTFLTGIEGACKETGEVATIISMMWESNDNLMELLSERYTFADTILEFKSDYYTERKQTLSERLDEMYVSNAVRRPIYRTLDIVKDLEKAFGKPEKIFIEMTRGAMPELKGKRTKSRQQQLLEYYDKCKEEDVRDLKQQLEALGEYVDNKLQSDRLFLYFMQFGKCAYSGMPISLERLMAGSKEYDIDHIYPQAYVKDDSIINNKVLVLSVANGEKKDVYPIKSEIRNKMQKTWSFWHHVGTISDEKYKRLIRSTPFTEDEKYGFINRQLTETSQSTKVVAELLKERYPEAEIVYSKAGLISDFRHEFDLYKSRSYNDLHHAVDAYLNIVVGNVYHMRFSRQWFNVNSSYSIKTKTLFTHTVNCNGKEVWNKDMLPGVLKTAKKNTAHFTKHATFKTGGLFDQNPVKKAPGLTPLKAGLPTEKYGGYNKAGVMFFIPVRYKSGKKTVLMVLSVELLYGNRFLEDEIFAKEYAKDRLQRIIGKSVDEIDFPIGMRPWKVNTILSLDGFRICITGNASGGKCLIAQPIMQFSSDEYWKYYLKKVEKFVEKVKNNSSYVYDVDYDAVQHEDNLKLYDLYLDKLQNSIYRKRINAPIQTLIEGREKFIDCSVIEQCQVLLNIHQVFGRMTSGCDLTLIGGKTRSASTVNFSSIILNWKKNYTDVRIIDQSASGLWEVVSENILEYL

SEQ ID NO: 20921 - protein, 1078 aa, unidentified
  REGION 1..1078: note = Cas Enzyme sequence
MENNGNISFGIDLGIASIGWSVLDLDNNIIKDKGIYLFTEAEKAENRRILRGTRRRKKRKKHREERIYEILKRKNIYLKNTVDSNLLEVRLKSLKEKIEMQDIINIIFYFSRHRGYIPFKDEDERKSEIVDELRNENYLACEIQNEIYKNNKQYRGDEYLMQHSDYMKELHEMLEEQSKYYSEIDEEFIQDIEDIINSKRKFWEGPGGPRENQLNKYGRYRTLDDLIEYNKNKNYHKYLFEDLIGNCSVYANEKKASAWNFYAECFNFYNDIVNLRIDGQDLDETNKNFFEVVSNNVYKLKAESIQNLKDVVLNSKSVNYNNLFRKIFNIDFDKIYGYKKNSEGNAEICKFEKIRSIKNKLEDEDMISELLSDMDAYNKAIYLIQVSPDRQTRYEILKDNLSNIYSEKLLTFLSNCNLENKYHSFSEKALKKYLELMQVNNENSSYIERNFESDINSDVEEELIRNYIGENIEKGNLKYINSKYVEDIVASPATKKSLRKAISIINKLFSKYGYPNYICVENTRDLLTEKKQKEYEAKTLENQSKRTNAKKKLKEQGYEENDTNIDKYILLDETNFKCAYCNKDITVANCEVEHILPRSITANDTFLNKTVSCSQCNGEKNNRTPYEYLMSIGMYSDYKERVIKNKKFVDEKKNNLLFEQNLNKYEKNFKNRNLNDTAYATNELANQLNIFKKAYLRNNYGEFLDFKVLKVPGQFTGIIRKKANLDKNRDLDYHHAVDATIVASIPKLKIGKLISMIQNEPDKYWKINNLNEYRESLYEDLYLNKDLKEDLLNADFSNTRAVREVTKKATGPLFDANISKVIIKDDQYYKIEQIDNIYNIMPADFEKEFNQNKYFLCKDNNPELYDRLFKIVELYSNKSKKVNPFVEYCKENNVKDGEKFDYLKHGIRQSNNPNSSVVVRLRFLQKVNNPYIISNKKLIKSNRENKKEILLMYDSLKSYCTRVYRDIENGKLYFMPIYKIFIDNNSGEIRTDSDYYKKVYNECVKQDIEKLEKYMDIYNNEYVRFENKKGEVAEGLVSYYDKSNNKIEIKKTSKNITANTVKIEKIKSDVLGLYNLNF

SEQ ID NO: 20922 - protein, 1151 aa, unidentified
  REGION 1..1151: note = Cas Enzyme sequence
DDMVAQLSKLFAGLSANISKLFGEQYKEQSPKDVSFSGAGFENEKQIELQQILTDSEFSLLQSAFNLYAQIQLDSLLQGYPSFSASKIGLYEKHKSDLKRLKKLLKTNLESKAYTAYFSESKKDFCNYVAYSGHCLKNKKKQPVAYRCQKTAFYEELKKILAKLPESIRDGEEVKSIQLEIENETFLPKQVSKDNSLIPNQLQLSELRQILKNAATYLPFLNRQGEDGLTISEMIEKIADFRIPYYVGPVNPAHRVIPGKPNGSRHAWVTKISAEPVRPWNFERVIDLEQSATDFINNLTNKCTYLIGEDVLSKDSPTYARFMLLNILNLLSVNGQRLPVLVKQNIYNDLFLHPKTSGKVTKKKICAYLNAEGYPVTEAELGGMDLEIPISLKAERQLEALAPGKLSLEDKEEIVRLITVFPESNRMLRNRFSRQFGNKLTQSELTAISKLKFAKWGQLSRKFLTGLRANGPDGRETTILEAMWDYNLNLMELLSQDYGFADAVKQYKQDMLGDQQNFSYSLVDQYPTSPAVKKMIWQTMKIVDEIIRIRKQAPEKIFIEVAREEGEKKRTTSRLDQIKQIFKANKDIEDRLKKELDTKSEENLRRKKLYLYFTQLGRCIYTGKAIDLEKLDAKDSANNDFYDIDHIYPRSQTKDDSLMNNLVLVESSANRQKGDDFPIVPGIQAAQKGWWTALKDKKLISEEKYRRLVRTTPLSPEELESFISRQLVQTRQATKAVAELLKLVFPESRVVFVKAGHVSDFRYEQNAFRFPKVRGMNDLHHAKDAYLNIVVGNVFDTKFTQDVRNYIKNHPKRDFNLGRMYDFDVVGASGKLAWKTGEEGSIRMVRSMMALNAIQCTWQTRHQTSGQNGGLFDQNLLPKGKGQFPIKTSNPHLAGQEGINNYGGYNKPTGATFFVVEHELRKKAQRTILPLDLTWVLTHEQTAPELEAYCRETLGLIEPRVILADLPYNSILEVNGFPLRLLAKTGASLKLAPALQPYFPTAYEPILKALTRQAEEGKDAEADPRAVYPPEENLALYDHFTQKLGSEPYSRLSVFVNQYRNLSASRGNFILLTPFEQMKVLGQILILFLCDGRTSDLSLLQPKNPNGTPSSKNKQSGMVTISQNLQKGIKVDVLNFSCTGLFLSRTPLSQP

SEQ ID NO: 20923 - protein, 1372 aa, unidentified; identical to SEQ ID NO: 20380
  REGION 1..1372: note = Cas Enzyme sequence

SEQ ID NO: 20924 - protein, 1362 aa, unidentified
  REGION 1..1362: note = Cas Enzyme sequence
MEKFYLGMDIGTESVGMACTDERYNLLRAKGKDLWAVRLFDEAKDASERRIKRTARRRLQRRRQRIEFLQGVFAPFITDNNFFLRLNNSGFYEEDKNQKLQTRFSLFADDEYTDADFYKEYPTIFHLRDALVGGKKADLRLYYLALHHIIKYRGHFLFEGKDMNDIRDIRNLFETYNIVAGELGTEIDLRISLTNVEEFRELAVSGAGITEKKKKAIEILKVQSKELKEIVALLVGAKAKPALIFGEEYAEKYKDEKSFSFKELNDDAFEEKREAFEEEHFALLEAARAIYNFVIFEKVLDGKANISKSMISLYEKHKADLKSLKAFVKTNYPQKAYYQIFRSTKEKANYANYIGYTQTKSKKNFVKKCKTEDFFKFLKKTLCEINVQNQDKLNRILDEIENGNFLPKILHADNGLFPHQINEMELNLILDNLCGYYPEFGQKGEDGYSPIEKIKKIFLFKIPYYVGPLNNTHEDGGRGNSWIVKKSTEKITPWNFDEIVDKAASNEKFIRRMTNKCTYLHNQDVLPKGSMYYQAFDVLNQINKLTIGGAPISVALKQEIFKNVYLRNKKVSAKQIELYLIANGKCTKEELKDAPLGGYDKLTGLKASMSSYVAFKNKFGDLVDKCPEIFEDIILWHTLNTDKSIVEKIIKEKYGHIPAIRENIQWLKSLTAFKEFGRLSQKLLYELSGGFDSSTGEIYTILRQLYYTNDNFNQLLYSGEYSFFAAIESENSGENQTVSYDDVKDLYVSPMVRRGIWQSLQMVDEYVSAVGRVPDKIFIEVTRQDGEKGDKGRTVSRKNKILELYKGLGEDCSNIDELLQELNREEMTDSRLRQERLYLYFLQLGRCAYTGERIDLGQLSTDLYDVDHIVPQSMTKDDSLDNKVLVKREKNAQKTDVYPLPGGFTNQQKFWKILRKKELMSETKYARLTRVKPLSEDDFREFVNRQLVVTNQTVKAVVELLKRKYGDLGTKIVYSKAKNVDDFKQRYDIVKCRETNDLHHARDAYLNIVVGNVYDTKFTSAHDYFYRKQDEFWREYNLKKLFVRPVQNAWAGVEDIARVKAIVTKTSMRVTRFAYTAQGKFYDETVYDKDDGSISAPRKECAPYDQTTKYGGFKSLKTAYFSIVKSKDKKGKFIKTIEAIPVLVDYKSRKNKNAVIDYLLQVGLVDPEIIIPKIKIKSLVSINGYKAWIAGVTGSQIIIHNAQQWFTDTDTDAYVKQLVKLVEKEKNGKLSEKEKEQDPIPLTSNRKAVTLFATKDKNLELYTKILNTLSKKAYQGLSSVKSFACKLEEKKHLFEALTNFEQIKVLLQIVRFMKCNAEKADLTLLKDGANCGSLLVGKNITDVDFAIIHQSPCGLIERIQKI

SEQ ID NO: 20925 - protein, 1142 aa, unidentified
  REGION 1..1142: note = Cas Enzyme sequence
MGKKVLSLDLGITSFGYAIVEEYDNNSYKCLDNGVIMRDAPYDNDGNSQQSLRSKYASQRTLLTKKKHRVKALAKLFEKFGLLSYEQCMKVQIENKIQNKWKIRAEDAFMRNLSYEELFAILAHMAKHRGYKSISTKDLLYELELELGLIEENFDNENNKKDEQRAVYAAIYKLKKLKEFYKVDTISQVLHKAIQDGQICSYRNHNDYEKMIRREDIEYEIETIIKKQCEIGSFNFQEEECLSFIEAIYEIITDQNMPENDESLFGKCSYYPDEKAAPRYSFLYDMYRLYKILADLKIDSYDITYEDREKIIDFVIQKVKNGKNIKQVYYKDIRKILGLSKEQKIFGKDDYVIIKAKTVQRTLVKFFFLSQISNFSNLMTNILSSSDALTIFTKVAETIRLHKTPKPALESLQDLLLSFGIEVEDKEVLSLIKGKSAGTLAISHRFILESLPHFKDGKSESDIKEILGINTSEDYSKYPKSLKYLHLGKNNLFEQSQNKINNHAVKSLASWSLQNIADLSWRYGVFDEIILESARGILPKTIKDAIEKSMKNREKELDKIIDTYKKEFPSINRKMAKKIKLLKSQKFLDLYSGDIINISDLFDGRADIEHIVPTSLGGLTTDYNNIIAYPNTNAQKSNRLPMDWLQEDRDYINRVEMLFNEHKINWKKRKNLLATSLDEIYTEAKDTKSLRATSYLESLVSEVLKMYYPFPDKEHQKNGISVRNIPGKTTSKTRMFLGIKSKSRETNFHHAEDALILSTLSRSWQNKMHRMLKDNYGKTEQELKILWEQYTPHIDGISIVDYIKEAYEMFMSKGENSIWYKDMFGFQRSISYWVNRKPLSASSHKDSIYSAKHKYPKNPNRILPTIRKSILEVFESLDILKNRHTFDKKTFMQKYDKDIRQKLWLYHLGNIKDPVYRAIEERADIIGNLIESYIYKDPKNDKTVDELYQDEIRTLLKTTIIAGGKPVYKTLFVDNFSAIEIKRGKNNKVLVRTDDNFLAVVFEKGEKDKLSINKVDVNSLYNLKKQNVMTVYLNEVVYLFNKKKIIHYGALRSFQIKGSGAKYIALFNPRFPSNPKAQPKNFSSGKSIKSVSIGSVTGVIKVQLDISGKMTSYQKFGSIAKELEEQFRKESGYGSLENDTNY

SEQ ID NO: 20926 - protein, 1111 aa, unidentified
  REGION 1..1111: note = Cas Enzyme sequence
MNRILALDLGVTSCGYSVIDEVNNNQYKLIDYGVVMRDNPTESSIQSDWKSHIQQRKLIDGRQKRVELVKQIFDSFAFKLEVKNYSNLWELRAKDAFERRLDTSELFAIFRFLAKHRGYKSLKMEDLIAEIEAQEKIGDCESEDVIEPDSENFNETLAYLDTLKCKYKDKTVAQIIWQIESEKKNPNFRNHNNYKYMIRREDIEDEITKIIESQANLGFFESADDSERFKNRIIEEIIPQDPVVLNPNLINNCLIYKDEKVAPIYSYSFDIFNFYKHINDLKIGREVGTKDQKEILIDDFETKLKELKDIPAYTIKDIKKLLDINEDIKISGLSESKIVKGKTVNNHLVKFNFLAHLSKFDKGVIQVLQKYKTHFDKIASIFHININPNALIEEFINYFQKNNISFEKEQIKNFALSLHKYKVKGTTSYSFKALNDLLFYMKDGKNESSAKEILGVSKSEDYSKFEKGIKYLKPIKKDGTFQYEIDENSISNHVVKSLVSWACRVIIDLHDKHGSFDIIKLESTRELSQPDDVKRQIKSANDKNQKEWEDIKERYKKHFDVLGLNLENNKEYLLKIKLWEQQDKIGIYSGQSLGIADILSDKTEIEHIVPRECGGANAEYNKAIDTKNENALKGRRLPLDYLSGDKREIFLQNVDELRKSYKINFKKWLNLKAESLDDVFKEVKDDLSMHSTSYTEKLLGEILKRYYPFTNKQKENQRVMHISGRATSYLRKILSIDNKSRDTNFHHAEDAILIGCMSKSYLQNISTNFEENYELDKVNAKENFKKIVPFIDGANLNEIFAKLRESYEKDIETSPFYKNMIDGTIRAPAFWVSKKPIGTKAHNETIQSKKNLSYRVSVDSLLERVKPNHKMVAEKFIEQYNKEILNKLQIFKDNPNDFTAKAFIIKRDKIVEILKEASFITTKDEQANIDKRLRDEMRKSICDVNGNIIRRVKRIGEDASIEVRKGLAYTAPSLVCLRCSFDESKLKLQRVDIRNYLQNDSKDNIQLDIFNNDLVEIYVVKLKKVEYKATGVLKGFTESKGGRANLRNPKYPLLKEKQPKIFQGEFSIGSTCGIKKYKTDASGKVLGFYYLGRILENDNELFSKVVTYRKI

SEQ ID NO: 20927 - protein, 1078 aa, unidentified; identical to SEQ ID NO: 16593
  REGION 1..1078: note = Cas Enzyme sequence

SEQ ID NO: 20928 - protein, 1091 aa, unidentified
  REGION 1..1091: note = Cas Enzyme sequence
MKYIIGLDLGINNVGWSVVNAETNEIKSYGVKKFSISNGASDRRNFRNSRRRLKRKDTRKEDILKILNSINFPNNLTIDTKLIETRCKGLNEKISKQDITNILTYMAVHRGYIPYGDEEVSFVDLKEKYPCEYYRDKFLNSINNKYRAQRETVTSKDNEKEIRKVLKTQQEYYPEITEDVIERIIQTLNRKRKFWEGPGGLNSLTNFGRFKTEEDVTKYKEQKDINPEYEKYIFEDLIGRCEVDPDEKCASTDNFYAEKFNLLNDFINVSFLNIDEINNKEDFYLTNNKTYKLKESGLNRVFKYCLDKENVTIKGLLKDLFATTVNNMSGYRQKDHDSNKPDMSTMNTYRSIKKIFAKNNANMEIFKLENIDKYNEIINYFMLVPGNVELINMISSMVMPLYENDKDALKETFKSKRKKLRYHALCEKVLKRACNDMLSLQKNYMQVYKLKDYGKKSREIFIERYEKQNKGKLILNSSFIDDIVASPQVKKTLRQAEKVINEIVKDMKSLPYAIAIESAKEELSGNDKRNMYISMNKKNKELHDKAEKTLKSLGYDINQITKKKITKIMLYEEFNGLCPYCNKSININYLINGSDEIEHILPRSDSFNDSLDNRTISCADCNSKKGNRTPLQYLNGSDKESFINRIKSNKNISELKKENFLFYGDLTKYKTRFFNRNLRDTAYATKELVRQINIFNNYLEFKNNGKKILTMSTPGQLTHDIRERYNLEKDRDAGERPFHHAVDASILALLPTTSIGKKIMKFQNDANFFIQDNSKKIMQDIGIELKYYNTKDDKIEYDDYIKDLKEISDTNPKFMYSPEVNKDPNKKLFNANLYKVIKKEDKYYKIEQINDIYDYKVDLNLLEKLFDDSKNETLLCQSQHKEFYNKLKKIYEIYKDSGISPFEAYQREINSLSKEDEFDYITHGIRMSENGPVVKKLRYYTPINEPYLVNKKTINKKDTTYLAYDSLAQAGIEVYYNIDKNCFVFVPIPCTCYNFKTGKVNKENNEYIKYYQKNIGTYNVQYKTTLYNGNTIEINKKDGSIIKGEVSYYHKTLDKIVLKSEQAFTKSDLGFSIIDYSPIGKCQKRLTFMIK

SEQ ID NO: 20929 - protein, 1364 aa, unidentified
  REGION 1..1364: note = Cas Enzyme sequence
MEDYGVGLDIGSNSVGWCVVDSTGRMIQVRHQYGLGVRKFRTAVKAVQTRLLRIARRRYKRRRARLRLLEDYFKVNSNILQVDPTFFERLHQSSIHKDDIRFQKKFRLFSLKQDKEYQKAYPTIYHLRWKLMTEDKQFDIREVYLAMHHIVKYRGNFLMGNKNPQDFNFKSFQYVDSFRALNEYFGKRLDIVELLPDNDDDISKFKDIMLSGNKAMDRKKELSEFLKGGPQKAKIDKNIRDAVANLLVGYKAKMNILSGVGSDVQKESDWSFSLNNLEDDRERLESTLNDDDIQMLEECLGVYNAISLTRLIPNEEGFSASMVEKYNLHRSQLRILKKYAGEKTLTEKNEILGKYADYLNNQNSTTKNTQDYFYGAIKKIIKPDIGQDDNAKKIADWIEQEIFLPKQRTSQNGSIPYQIHQGELDKIIENQGKYYPWLMTPNPVMEDVMNQQYKLDELVSFHIPYFVGPLITAKAQTKNSGSHFSWMVRKQPGTVNIWNFNKKVDQTKSAIRFIQRMKTPDTYLLGEEVLPKCSLLYQEYMVLNELNNIRINKRHILREQKEAVLEGLFKNKKSVSVKEFKEFLVAKGYFEKTGEIDISGLSDPKHFTSGLTTHYAYRKILGNKVDRPEYREDLEKIINWTSLLKNDMLRQQIDQINWLSTDEKNQLAKVPLAGWGRFSRKLLTGLVDNSGRSIIDQLRWQSGRNFMAIINEKVYAQQIESMNEQYIKSHQELGISDIIDNLYTSPSVKKGIREVLGVVRDIEKAMGKKPKWIFVEAARDPDIDPKRSQKRAKTLLDTYKATAKNIVDDVVKKQLEPFANDKNKRKLTEKMTLYFMQNGQDLYGINESLNFDELSSYQVDHIIPQSKIKDDSFDNKVLTQHNQDKGDNFALSICDARVQANWKVLNRAGLISNRKLANLEMTNDIFENKSDTFANRQLVETRQIIRLATEVLSQEYNLQDTLLVSVREGLSHQLRQELSLPKIREVNDYHHAMDAALAARIGMYMVKRYPDSLGYFVYGKYGKDTRKIRNFNFIRDIIHGDKSALVDPKTKKLLWDKQDIRYLKGLYEIKHMLVTDEVYNDNGELFQQTIQAAKEGKKEGSKQNTLIRHKKDMPTELYGGHIGSSDAYMCILRVFEKKEVTYWVMRVSKLELGKVKRLEKNGLSEKKFLHELFLSEVVGYGKQFKFEVVLPHVYLQQTVRDEINGKMRTFGLSVAKSISNHQQLYLSYDTQLHLDFRQKGYSSEEDKVTDRDVYSSILKQFQEYYPLMWGKDNQTLKNMSDSEEKFDELSEDDRIETLKKIMRGMHAGTEFAKLKYFGLGDEFGRIRRKHNGHPNKGAVLTDKASLIFQSPTGLFTRQIFLKNL

SEQ ID NO: 20930 - protein, 1323 aa, unidentified
  REGION 1..1323: note = Cas Enzyme sequence
MKDFYIGLDMGTDSVGWAVADEDYNLCKFKGKAMWGVRLFDESATAAERRGFRTARRRAQRKRQRILWLQMLFNEEISKKDIAFFQRLNESKLYLEDKSTNVPYAVFADESFTDVDYHKLYPTIYHLRKELVQSDEPHDVRLVYLALHHLIKNRGHFLFENVGSDFEKESSFEVLFQNLQNYILGEYELALECISPLQIADILKDKSKRKTTKSSEICKLLGISKKGQPRLNAIVLLMCGQSVKLADLYGDENYNKEEKSSISFEKGYEDNEETYRELLLERFELIEKIKALYDWAILADILKGETYISFAKVKTYDEHRHDLQQLKAFVKERCRSDYNEIFRETSDKLNNYTAYCGKFKENGRNGVILHSAYQTDFCKYLKSKFDKLDKSGYEDMFEKIENGSFMPKIVVKDNGVIPMQVNESELRAILKNASGYLDFLNNQDKDGITVADKILQIFEFRIPYYVGPLNVHSDNSWLVRKDGKIYPWNFNKIVDVDKSAEEFINKLTAKCTYLPDRDVIPKNSILYSRYMVLNELNNLKIDGKKPDVSFKQAVFNDLFMHRRKVTQKALREYIKAQTGTEPEITGIDGDFKANMRPAIELAGYNLSEPDKEEIIKAITIFGDDKKLLKRRIKDKYSEMLSEDEIKKICKLKYKDWGRLSREFLTEIFDVDTATGECKDNIINTLWNTNDNLMELLGAKYNFTQSIEQAVSKSTHKASIEKMVEDMYVSPKVKRTVFQSLKIMKEIVKIKGHAPKKVFVEMTRHDGTKGDNGRTKSRKKQLEELYKKCKEDSTELWDELEKTDDDEFRQDKLFLYYTQMGRCMYSGERIELRDLFNKNLYDIDHIFPRSKVKDDSIDNRVLVKKQINSHKDNDYPLDSTVREKMRGHWQYLLRHGFISKKKYDRLTRVTPLTDDELADFIARQLVETSQSTKAVATLLKTLYPTTEIVYVKAELVSRFRNEYKFIKCREVNDLHHAKDAYLNIVVGNVYNVRYTHSKAIFIEGLQTKKYSLNRMFAFDTPGAWNIENEKSLSNDKKTVMKNNILYTRYSYMKKGGLFKNQPLKKGNGQAPLKKDLPLSDIGKYGGYNQPTASYFSYIKYEGKKSKECCQLVVIDNYLKKYYEENPIEYLTNRLGFKNPAVLIPVIKYNSCIEIDGFRMNISSKSNEGKTIVYKPAVQLVLGAEKEAYVKKISKVLSKPEEQKITSYDGVSAEENIELFDALTAKMTNTIFRIKLEDIGNKIKSGRDKFVTLDVKKQCYVINEILKIMHCNVDTGDLRLIGAAHYAGKVTTNPALSEIKKVSSIMLINQSVTGLFETKIDLLNI

SEQ ID NO: 20931 - protein, 963 aa, unidentified
  REGION 1..963: note = Cas Enzyme sequence
LNLIDKDISIEYVIKYKKRIEEGTFLPRITSTDNGRYPYQLNQDELIKIIKNQGKYYPFLQKTINSKDESDYKLVKLLNFRIPYYIGPLNTTTNEKCVQNNNAWIEKLDSKVQINPYNFNNIVDKELSAEKFITRMVSHCTYILEEEALPNNSILYSKFKVMNELKQIKINGYKMPIEFQHKVYENLFLKTKGTITEKKFIDYLKTTEEYKIYNEYIVEGYSSDKKFANNMQSYIDFFGENGIFENSNYNIENAEEIIRWITIFEDKDILETKIRKNYLNLSDNVIKLIISKKYSGWGNLSKKLLNEVLIEDKITKIPKSIIDLMYDTEENFMQILNNKEYKLQNKIDKLNKIENLSEINYSLVEKLATSPATKRGIYQALKVVEEIVNYMGYAPDNIMIEMARSEEKKVRKDNKRDYIIKLYEKIKNDASNYNKLKNELKEIDKIDSQKLFLYFIQEGKSLYSGVPLDINKLDEYEIDHIIPRTLIKDDSIDNKALVLRIENQEKAASFVLPYSYRTNDIKKWWKRLKDNGLISSKKYNNLCRDHYSPKDIEGFINRQLVETRQITKHVANILNNFYKDTKIIYLHADLSSNYRKKYELFKYRDLNDYHHAHDAYLSAVLGEYKEKYLNTTTDFNKLKELSKKLYDEGNYNVLSYGYVINSIDNELSTFDEETGEITFDADLFNKTIEDTLYRNDIIISRKTEIKTGEFYNQTKSKKGNNGVQLKNNLKTELYGSYTSLNTSYLTLVKYKNKQKIVGIPIFIDLQSQKNNNIKFNYIKNHLNIKENETFEILKDRIPFESLLNYKNHLIYLKGYSVAHKNCELCNAIELKIKKNDLIKWKYVLNKIFNGIKLPKNGKFTDLYILELSKDILNFLFKQKENYPLFFDKIKNIEETIDINSLNQENIEKLILELVKIYSCKSITANLKDFNLGDSIGRLGGYNIDHAILINKSVTGLMEYRNEF

SEQ ID NO: 20932 - protein, 1040 aa, unidentified
  REGION 1..1040: note = Cas Enzyme sequence
SSMKNLYDALFLKTLFGNSKHTSISSKMVEYYENHKEDLAYLKKILKYDRKEYRKVFKTTEKNVCLYDKYIHNAITYEEFKKELLKSLEKVIDVLDTDLSNQYVSIYRDKIEQGNFLPRITSTSNGKYPYQLNKSELKTIIENQEKYYPFLKEKVKDDYKLIKLLSFKIPYYVGPLVNENKSEFAWMKRNQGYENIKITPYNFDEVIDKESSAENFITRMLGHCSYLLKEPAMPNNSILYSEYKVLNELKQIRVNNERLSKEFQHRIMEEFFRKEIGTLTDKKFKNYLIHSREFDMYSGDLTVTGYSADGKFANTMSSYIDFYGDEGFFKGTNLKIEDAENIIKWITIFEDKDILATKIEKEYPILKSIMPKIIKKKYTGWSSLSQKLLTTPYYYDEETSTKKSIMDLMWETDKNFMQIITDEKYKFQDMIAEENTEKVSSKLNYSLVDNLSTSPATKRGIWQALKVVEEIVDYMGYEPNAISIEMARGDEKKVRKDDKKKYLSNLYEKAKETTDDYNRLKKELNSQEKIDSEKLFLYFIQEGKSLYSATPLDINRLSEYEVDHILPRTLIKNDSIDNKALVLKEENQNKAASLTLPEEFQKNKTWWEHLKKNGLISAYKFHNLIRKKYTEEDIQGFINRQLVETRQITKHVANILQQLHKDSKVVYLPANLSHNYREKFELYKFRDLNDYHHAHDAYLAAVLGEYKNHCNLKFNYEDLKELNKELYNSGRYKELKYGFIINSIDSAFTHFNAKTGEVFDIEKFKETVENTLYRNDILISRKTEIRTGQYFKEKILPKGKGNVSIKEGLSPEKYGGYTSIFPSYLSLIHYKKKDKLIGIPIVVDEKAKKNSQLKSDFIGSHLNIKEYSEEKSQIPFEVLIIHKNHPVYIKGYSTSHKNCELSNANELKIPRNKMLKWKYVLNKILNNKAIPKDKSVDEDNLLNISNEILTFLLDEKKNYPLFQNEIEKIQNKICYPKLSQEQIEKIIIEILKIYSCSSTNANLSDFGLGDRMGRLSGFNIDSGTIINKSVTGLRTRKYEF

SEQ ID NO: 20933 - protein, 1359 aa, unidentified
  REGION 1..1359: note = Cas Enzyme sequence
CVILNGIKTILNISYFGKRSKMPMKNNGSYNIGLDIGTNSVGWAVTDENSQLLKFKKKNMWGVRLFDEGMTAAATRNYRSNRRRLQRRKNRIALLQSLIGDEVLKVDDTFFIRMKESFFVKEEKPHRNDYILFNDKNYTDQQYYDEYPTIYHLRYKLITCREKMDIRLVYLALHHIIKYRGNFLYEGQNFTLNDVPITEEIVTLLELLRDRAEIEFFDVARVTESIIHMLEDKKTSTTDKVKRVLSDIQMPAEDKKKFKEVLNAIVGLQVDLSKIFELEEPLKIRLSEELEEEKLNVLQDYMDVIEKVQKIYSFGVLQGMLNGKTFISEAMIAKYEKHKQDLAVLKKLFKAHFPNEYNNMFRKYFDNAGKPLFNYVNYIGNQYIDKKIAKEDLYKTIKKILDTKKELAETCKEYQYCLDAIKNDDFLNLQNSRDNGAIPYQLHKEELIRIIDNQSSYYPVLQRERGNLIQLLEFRIPFYVGPLSSNPRGRQFAWVERKVKGEKVYPWNFEEVIDIEATAEKFIQRMTNKCTYLLGEDVLPKYSLLYSEFEVLNEINKIRVNGRLLSVSEKKNLLNTLFKTEKIIKEKRFKEWLVENQICRDFNVKVEGFQKEGQFSTSLTSYIDFKRIFGEVNERNYQMIEDIILWVTLFTEKDIIERKIKKTYAQVTDEQIREIKKLRDSDWGRLSRKLLAGIIVTDNYNNPRTIMDYLRDTNMNLMQIISSDKLGFKKIIEKDTRFFDDADNLEEVVNGLPGSPAIKRGILQTMKVLEEIVKVKGRMPDNIFVEFAREDQESKRTQSRMDNLMKLYQKMKEESHSFFNEIAHLELQKKNLENNKLDTLKLFLYFIQNGKCMYTGEPLDIHNLSLYEVDHILPRSYIKDDSIDNLALVLKKENQRKADDMLLKREIIDRQRTWWNYLLECGLISKKKFDNLTRDHIDPDTMKGFIQRQLVETRQITKHVVKLIKACYPYSNIVSVKAQLCSDFRQQFNLYKCRTVNDFHHAHDAYLVSVIGNYILRRFPKLSEEFNYGQYRKIARDNASKYKFGFVISSMTSYSKTIDYNTGEVFEWNPDFEIGRIKKVLDYKDCFVSRKKEELTGEFYKQTIYGKNDARASIPLKKGLDVRIYGGYTGEQKAFYSVVEYKKKNKIHHAIVGIPIYIAKLAEQNETELIRYLLQAGYEDVKILKKKILKYQLIKYDGGLFYMVSDSEIINAKQLLVDQKYLEVINAIERGDISDINVELLHELYFHLVDKIKTHYHFYNDIADRLIDSANLFCDLSLENKAKFVEEMLKITQVNSTNANFKRFGFPGLGDRVGRMAGKNLVVDKIEFIDTSVTGMFETRQKGSELWDSEQLSLPTRVS

SEQ ID NO: 20934 - protein, 1375 aa, unidentified
  REGION 1..1375: note = Cas Enzyme sequence
IHSFHSPLTMTSITSKINLIIKLFRRKSPHLFYTNNYNIGLDIGTTSVGWAVVNPENYKIMRKGNKSLWGVRLFEKAETAEGRRNLRSMRRRYERRRERIKLLQLEFNNEINKVDNNFYIKLKESFYNEEDVKRKTVILSKEEKELIKKYNKKYPTIYHLREKLINNKEQEDIRLVYLAIHHIIKYRGNFLYNGDFNVNNLDIKTKLKEIFENIDSLCQDVNINIELMDDVFYSNLEQAVTSISKNDRKVLTKKILDTSCDKIFVNEFIKLILGNQFSVAKILNIELDEEIKISFKETTYEDKYSTLEKNLDDKIEIIESLKELYSMIFLKELFGNNENNSLSSLMVNRYNKHKEDLKFLKQLLKHDKVLYKKFFRDKRIKDKEEPCIYRQYVNNNITYYDFKSEIKKAFINIDKLELEEKLKNTYLKKKENLENDIFLPRITDTDNGKYPYQLNKSELIKIIENQGEYYPFLLKKIDNEYKLVKLLSFRIPYYVGPLNTTTNKSDVKNKNAWLIRKEENIKITPYNFDEIIDKEKTAEEFITRMISHCTYILDEYAMPNNSILYSKYKMMNEIKQIKINGKRMTNDFQHQVFEELFLKENSIITESKFINYLKSTNEYSMYPSIEVEGYSADCKFANNMQSYIDFFGEDGIFVDTDYNVDDAEEIIRWITIFEDKDILESKIRNKYNKLTNNAIKKAVSKRYKGWSNLSKKLLIGIYHKDKVMGINKSIMDLMYETTDNFMQILNNKEYKFQKEIDKLNNIDNVTKINYSLVENLATSPSTKRAIFQSLKVVDEIVKYMGYAPLNIMIEMARGEEKKKQRKDAKKEYLLKLYEGCKNDIDNYNNLKKELDCKEIIDTQKLFLYFIQEGKSLYSGIPLNINDLDSYEIDHIIPRTLIKDDSIDNKALVLREENQNKAASFVVPANYRNNERIAWWKKLQKCNLISNKKFNNLCRNYYSEKDIEGFINRQLVETRQITKHIVNILNNFYKETKIIYLNANLTSNYRNKFELFKYRDLNDYHHAHDAYLTAVLGQYKEEYLNISTDFDKLKDLSKKLWQENKYKELNYGYVINSIDNELSVCNEDTGEIIFDANLFNKTIEDTLYRNDVLISKKTEIKTGEFYNQTKSKKGNKGVSLKFDLPTELYGSYTSLNPSYAVVVKYIKKGKEEQRMIGIPIYISAKQNEEETIKYIARLLKLDDTSSITIAKDKIPFYSVIDWDGQICSLVGATANVEVCNAREFNISRKKQIKWKYSLNKLFNNKNNIELNDKIYNEQLNEILSYIISKIETEYKLYSNLVDELKGYLPQENLDNLDIETKEKTIIELFKLLKFNSETANLKHLNTKASSAFGKKNDRIIKYAVIINKSVTGLKERKYEF

SEQ ID NO: 20935 - protein, 1343 aa, unidentified
  REGION 1..1343: note = Cas Enzyme sequence
MATKKEYNIGLDIGTTSVGWSVVETDNQKVMRKGNKALWGVRLFEEATTAESRRMQRSTRRRYDRRRERIKLLQEEFSEEINKVDENFFQKLKESKYVENDKINKKIVLTKEEKQELKDYQNKYKTIYHLRDELINNPEKKDIRLVYLAIHHIIKYRGNFLYQNANFNIDNLDIKYKLNVLFSILSNNIQELEIPEDYINIIDFDELEADLLKDTKNDVKALLIDNLTELTNKSFATEFGKLMVGNKGNINKLLMLETDNKIEISFSGTDYDDKYEEYQEALGENIEILDILKQIYDCIFLKKIFKGNKNTSISSLMVKSFEQHKKDLNFLKELFKDNRELYNEIFRTKKDLCLYEKYITNKIDCDEFRKEINKLLESLFSDENIKQNLLDEYNLEVKERIENGTFLPRITTTDNGKYPYQLNKSELIKIIENQGKYYPFLLNKLNDNKTYKIVKLLEFRIPYYVGPLVSEKRSENSWLERKINNVKITPYNFDDVVDKEKTAEKFIKRMISHCTYLLDEYALANNSILYSEFKVMNELKQIRVNDRKLESKFQQQILEDFFKKTSGTITERKFKNYLISTGEYSMEGGNFRITGYSADGKFANNMQSYVDFFGENGIFADTDYDFENAEEIIEWITIFEDKDILEKKVRDNYSKLNENQIKKVLAKKYSGWGSLSKKLLKTKYYKDKATELYKSILDLMYETDKNFMQIINDDKYNFQEMIKKFNNKEENKKLNYSIVEELATSPATKRGIYQALKVVEELVDYIGYEPKNISIEMARSEEEKVRKDSRKDYINNLYKGCKDSIENYKKLKHELDSHEITSQRLFLYFIQEGKCLYTGTPLNIEDIENQSLYEIDHIIPRSLIKDDSIDNKALVLKECNQDKKASYVLPSKFRNSKQKIWWKHLKDNGLMSAKKFHNLIREKYNEEDINGFINRQLVETRQITKHVANILNNLYKDTNVIYLKADLSHNYREKYDLFKFRDINDYHHAHDAYLAAVLGEYKEKFMKRKINFDMVKELNSKIVEMDEGKRRNLRFGYVINSLDENLNDIVLKVSEKLVDNETGEVLFDAHEFNKRVEDTLYRNDILISRKTEIRTGQFYKETIYKKGKGTIPIKFGMPTDIYGGYSNTNARKLMLIEYNESKMKIIGLPMALAVRNNDAEINDYIKTQINLKKNSTFKIKKCSIPFETEIIYNNQNVFIKGYSIGHKNCEISNAIQLKIAKDKMKHWKYALQYLLNDKKQYIDFAEKYVNEIYDFLINLDLFPLFNKELDKIKNKVNFEDLALDQQKKITKELFKMLHCNSVNANLSEFGLGDRMGRLSGYNITDGIIISKSVTGIRESRYEF

SEQ ID NO: 20936 - protein, 1340 aa, unidentified
  REGION 1..1340: note = Cas Enzyme sequence
MEKYSIGLDIGTTSVGWAVINPNTYKIIRKGNKKTGYKHLWGVRLFNEASTAEARRIARGIRRRYDRRRARILLLQEEFNDEINKSDSDFYQKMKESFYTEDDKINKTIILTKEEKEEIKKYNNKYPTIYHLRKELIENKEKMDIRLVYLAIHHIIKYRGNFLYGTGNFRINNINIKEELEKIFYNIANLTTIVNEEEISNLNFDNISNALNEISKSDKKKLLEHEFNQAFTSKISKELTKLFIGYKFSINTLFKLDIEEDIKISFEGTSYEDNISNLEKSLNNEIEILDQLKGIYDTVFLKTLLKDDITSISSLMVKKYEEHKKDLKDLKKIYCENKELYKKMFKSKKEICIYEKYISNNLPFEEFKKIIEKDFNNISLSENLIDVSSNIIKKLENETFMPKITDINNGKYPYQLNKEELVKILENQGQYYPFLLNKLDNETYKIVKLLEFRIPYYVGPLNNTTKNKNIFNPNSWMIKKNNEERITPYNFEKIVDLDASAEEFIERMLGKCTYLIKEKAMPSNSILYSKFKVLNELKQIKVGEKGKEERLTLDNQKKIYNELFLKTNNTITDKKFKEYLINSKEFSMFEDISVTGYSADNKFANNMNSYSDFFGEDGIFKNTNYTIEDAENIIRLITIFEDKEILKRKVEKEYPELNQDSIKKICAKKYNGWSNLSKNLLTSLKYQNKKTNEFKSIIDLMEETTENFMQIINNKEYNFEKKIEEYNKIETKGKINYQVVDELTTSPSNKRGIYQALKVIEEIIDYMGCTPENIILEMARGDEKKVRKVDKKKRLEKLYETSKNEIDRYNKLKRELKEIEIDNEKLFLYFIQEGKSLYSGTPLDIDNLDKYEVDHIIPRTLIKDNSIENKALVLREENQIKAASFVLPESFRTPKMKAWWQHLKKVGLITDKKYNNLCRYKFDEKSIEGFINRQLVETRQICKHVANIIKNYYNNTNVYYLPASLSHNYREKFELYKFREINDYHHAHDAYLAAVLGEYKNKYLKKNVDYSFLKELNYKLYNEKKYKELSDGYVINSLDPELKDYFIYFDAQTGEVKFDAQEFNKIVEETLYKNDILISKKVEFKTGEFYNQTKSKKGNKGVPLKKHLPTEKYGSYTSLNPAYAVVVNYIKKENEEQRMIGIPIYIDELSKKDKEVKNNYIKDLLNASEIKIIKDKIPFNSLLNWNNQICYLVGATDKVEIINAKQFKIEKANIKKWKYTLRRLFANNKNIIEDNLYEKHLEEIIYYIIYKIEKEYVLYQNLLEQMKMMFLNKNLTLENKETIIKEMFTLLKCNDSSNANLKKIDSSYSGAFGKKNGRIISNAIIINKSPTGLKETYNEF

SEQ ID NO: 20937 - protein, 1104 aa, unidentified
  REGION 1..1104: note = Cas Enzyme sequence
MKKILSLDLGITSIGYSILEKKQNNHYTLIDYGVSMFDSPFDKDGKSKKLLHSTNTSMSNLYAKRKQRKKALAKLFEEFGLEKAHKLLQQEKQNIYKNKWQLRCDDVFTRELSVGEFFTILYFIAKHRGYKSLDTNELLEELCEELKLNCEMKSSKKDDEKGKIKQALKRVEELKQNTNKTVAQIIYELELQKQTPTFRNHDNYNYMIRREYIEDELKKLVDAQQHFFKNNKDEFFEKLKEIIIKQDESSNDLNLFANCEYYKEHKVANQYSVVADIFKMYESVANITLNKEKITKEQIKLIADDFFIKIKKGKNIADIKYKDIRKILKLSDDIKIFGKSDSYVSKGKTIHNTIIKFHFLNNLSKFDNSFIVQNLDNLEKLAEIFEVLNKEKSPKTIFEKLNGNVDEKTIIKLIRYKSGKSLNISHYAMLKFIPYFQEGLTTDEIKQKLDLNRCEDYLAYKKGIKYLHINQFEKDDNLEINNHPVKYIVSAVMRVVKHLHTLYGAFDEIKVESTRELSLDDKTRKDIQKANQEFEKKLDDIKQNSQYQQIAQEYDKNLSKYTKKILMWQEQDRVDIYSGKTIGLNEIFSNEVDIDHIVPQSIGGLSVKHNLVLVHRDTNLQKSNQLPMNFVADKVGLKNRVEKLFSEHKINFKKMKNLLATNLDEIYKDSFESKSLRATSYIEALTAQMLKRYYPFADKQKQKDGSAVRHIQGRATSNIRKLLHVKTKVRDTNIHHGIDALLIGVTSHSWLQKISNTFRENFGVIDDKARERVKKELPLIEGVSVAELVAHIEENYNIYGEESVFYKDVFGNVRVVPFWVSKKSMVSKIHKDTIYAKKQNGIFTVREKILNKFISLKITPKTSSDEFMKKFKKEILEKMYLYKTNPKDKICAIIEQRAFEIAKLLDSLQLKDTTDKEMLSETKKYLDEFIHQDLKDYNGNVIRKVQFYQTNLTGFEIRGGLATKEKTFIGFSAILNGKKIKYKRIDVANFESMKKVDGFKVYKNDVVFFIYPDGSFKGGKIVSFLEDKKMASFSNPRFPANIGLQPHSFVTLFKGKANSHKQHSLNKAIGIIKLNLNVLGNIKSFSSMDEVDGELLEFLKELKG

SEQ ID NO: 20938 - protein, 1119 aa, unidentified
  REGION 1..1119: note = Cas Enzyme sequence
MKKILSLDLGITSIGYSVLDELENDRYSLIDYGVSMLDSPFIDDRKRISKKLLHAQSKSSKKLFNLRKIRKQKLALLFEKYDLGKSEQLLEHEKDNIYINKWQLRCEKAFNEKLKVGELFTIFYALAKHRGFKSLDSDDLLEELTRELNLEVKNNSKKKDDDEKGKIKKALRTVEALKEKYPNKTIAQIIYEEERKGTNPTFRNHDNYNYMIRREYINEEIKRIVLSQKSFGFFKDNFSVDDFILELVKTIDDQKESTNDLSLFGKCEYFQEEIVAHQYSLLSDIYKMYESVSNITFNKEKNKITPQQIKLIADDFFEKIKKGKNILNIKYKDVRKTLNLSEDVKIFNKDDSYLKDGKSVENSIIKFHFISNLSKIDNSFILNSLKQDNKYEVLKEIFDILEFEKSPKSIYVKLKTLVDDETIIDLIKYKNGNSLNISAYAMIKFIPYFEQGLTLSDIKKKLNIKESEDYSIFKKGIKYLHVSQFEKDNDNLEINNHSVKYVVSATLRLIKHLHTTYSTFDEIRVESTRELSQNEETRRNIEKANRALEKQIDEVLLNKEYQEIANQYGKNLRKYARKILMYKEQEGRDIYSGEGIEFKKIFTNEVDLDHIVPQSLGGLSVKHNFVLAHRDSNVRKSNQLPIDFVSDKQAFINRVDNLYKEHKINWKKRKNLLANNLDEVFKDTFESKSLRATSYIEALTAQLLKRYYPFANEEKQVDGSAVRHIQGRATSNIRKVLNVKTKVRDTNIHHAIDAILIGLTNESWIKKLSNTFRENVGVIDDEARAKIKKDIPLIESIVPKELVAMIEENYNSFGEDSVFYKDIFGKTKTVNFWVSKKPMSSKVHKDTIYAKKDDGIFTVRENIIEQFIALKITPETSSNKFVENFNKKILQKMYLFKTNPKDVICLVVQNRAEDIKNMLDSFDGIDAKNKELMSEAKQKLEGLIHSNLVDNNRNIIRKVKFYQTNLTGFDVRGGWATMEKTFIGFRATFENGELSYRRIDVINFKQMNNKNDGSFKVYKNDLVFFVYLDKTIKGGKIVSFLENKKIAAFSNSKFPSAYKFQPNSFCKDKSHTGAKQHSVGSAIGIIKLNLDILGNIKSYQVIGNAKSEFLETIKGIVNG

SEQ ID NO: 20939 - protein, 1108 aa, unidentified
  REGION 1..1108: note = Cas Enzyme sequence
MKKILSLDLGITSIGYSVLDELENDRYSLIDYGVSMFDSPIDKDGNSKKLLHSQSKSTKNLFNLRKIRKQNLASLFEKYDLGKSEQLLQQEKDNIYINKWQLRCEKAFNEKLKVEELFTIFYALAKHRGYKSLDSDDLLEELSAELDIEFQNNTKKKVDDEKGKIKKALKTVEALKEEYPDKTVAQIIYEVEMNGTNPTFRNHDNYNYMIRREYINDEIKKIILAQKNFGLFKGNFSVDVFILELVKTIDDQKESTNDLSLFGNCEYYQDEKVAHQYSLLSDIYKMYESVSNINFNKEKTKITKEQIRAVSDWFFEKIEKGKSFSEIKHKDIKRILNLDENTKIFNKDDGRIVKFHFVSNLSKIDNSFIIEAFKKENKYEVLKEIFDVLEFEKAPKRIYEQLKSLVDDKTIIDLIKYKNGNSLHISAFAMIEFIPYFEQGLTLSDIKKKLNLKENEDYTKYKKGIKYLHLDTFEKDDDLKINNHSVKYVVSATIRLIKHLHSTYGAFDEIRVESTRELSQNEETRKNIEKANRELEKQIDEVMLNKEYQEIANEYGKNLRKYARKILMYKEQERRDIYTGEGIEFKKIFTNEVDIDHIVPQSLGGLSVKHNFVLAHRDSNVRKSNQLPINFVLDKQAFINRVENLFKEHKINWKKRKNLLANTIDDVFQDTFESKSLRATSYIEALTAQLLKRYYPFANEKKQADGSAVRHVQGRATSNIRKVLHVKTKTRDTNIHHAIDAILIGLTNKSWLQKLSNTFRENVGVIDDEARAKIKKEIPLIEGIKPKELVSMIEENYNSFGEDSVFYRDIFGKTKTVNFWVSKKPVSSKVHKDTIYAKKEEGIFTVRESILNQFVSLRITPKTSSVKFMEEFNKKILQKMYLFKTNPKDVICLVVQNRAEDIKNMLYSFEGIDAKNKELMSESKQKLEGLIHSNLVDNNENIIRKVKFYQTNLTGFYVRGGLATKEKTFIGFKAILENGKFLYERIDVINFAKIQKENDNSFKVFKNDIVFFIYPDGSFRGGKIVSFLEEKSIVAFSNPKFPAKISSQPHSFLTLFNGKANSHKQFTIGKAVGIIKLNLDILGNIKSYQVIGNAKSEFLETIKGIVNG

SEQ ID NO: 20940 - protein, 1140 aa, unidentified
  REGION 1..1140: note = Cas Enzyme sequence
MKKILSLDLGITSIGYSVLKELENDRYFLIDYGVNMFDTPYDKNGDSKKLVHSQNTSMSKLYSLRKIRKKNLAKLFEDFNLGKKEDFLLFEKRWQKKNHNLTPKWELRAKKVFEEKLTFEELFSVFYLIAKHRGYKSLDTDDLLEELCEKLGLNQENKKEKAVDEKGKIKQALKTIEILKSQFPQKTVPQIVYEVESQKQNPTFRNHENYNYMIRREYINEEIKTIVLTQEKFELFDANFNTKLFIEKLIETIDDQKESSNDLSLFGKCEYFKEEYVAHQYSILADIYKMYQAVANITFNSKPKMRISKEQIRLIADDFFEKLNSGKSIKEIKYKDIRKILQLGDEFKIFNKEDSFKSKDKLQDNSITKFHFVNNLSKYDKDFIKNILEKSNKYEILRAIFDVLIYEKQPKPMYTKLNEIVSKYDLVSDENIKNSTILELIKNKSGKSLNISHRAMIDIIPYFEEGFTIDEIKQKLNLKTEEDYLGFKKGIKYLSISKFEEDNLEINNHPVKYVVSAVLRLVKHLHIAYGAFDEIRVESTRELSLNDEARKNIEKANRENEAKTKAILENVEYQQIAQNYGKNLLKYARKILMWEEQERFDVYSGKSISFGDIFSNSVDIDHIVPQSLGGLSVKHNFVLVHRDSNLQKLNQLPLNFIANKQEFINRVEHLFSEHKISWKKRKNLLATNLDEVYKDTFESKSLRATSYIEALTAQVLKRYYPFANQTKNSMEVRHIQGRATSNIRKLLKVKTKVRDTNIHHAIDAILIGLTNKSWLQKLSNTFRENMGVIDDIAREKIKKTIPLIEGIEPKELIEMIEDNYNMYGEDSVFYKDIFGRTKAVNFWVSKKPMVSKIHKDTIYAKKPNGFYTVKENILNQFIALKVTNTTKPEKFYEDFKKKILEKMYVYKTNPNDAICTIIENRAHEIKTLLSSFEIIDKKDKEALSQAKQQLDELIHKPLLDNNSKPIRKVKFYQTNLTGFDIRGGLATKEKTFIGFKAILENDKLSYERVDAANYQKIKVQNDNSFKAFKNDIVFFVFADSSYKGGKIVSFLEDKRMASFSNPRFPANIGSQPHFFLTLFNGKPNSHKQHSISKAIGIIKLNLDILGNIKSLQTIGDVQSELYSFLKELNNGMEGHTSDKT

SEQ ID NO: 20941 - protein, 1114 aa, unidentified
  REGION 1..1114: note = Cas Enzyme sequence
MSKKILSLDLGITSIGYSVLDELQNDRYTLLDYGISMFDKATDKDGNSKKLLHSASVSTAKLYGLRKKRKKDLAKLFEEFGFGDEKYFLYQEKQNIYKNKWELRAKKVFDEKLKIEELFTVFYTLAKHRGYKSLDSDDLLEELCSELDIKIDDKKPKKVEDEKGQIKKALLTIEELRKNSSKTVAQIIYELEIKKSNPTFRNHDNYNYMIRREYIDEEIEKLIQSQAKFGLFKDDFDEKLFIEQLKNIITWQNPSTNDMSLFGKCEYYPDRKDEKVAHQYSLISDIFKMYQSVSNITFNTKPTIKITKEQIRFIADDFFMKIKKGKSIADIKYKDIRKVLKLSSDMKIFNKDDEKLTITKFHFVNSLSKIDNSFILDALTKENGYEILKEIFETLQFKKDPKAIYEKLKDKVDDKTIINLIKEKKGNSLHISQYAMMKFIPYFEQGYTTDEIKEKLRLNRSEDYSGFKKGIKYLHVSTYEKDVGLKINNHPVKYVVSATLRLIKHLHVEHGAFDEIRVESTRELSQNEQTKKDIDKANRALEKQIDDIVANKEYQKIAEQFGKNLRKYARKILMYEEQGRRDIYSGDGIEFKDIFTNAVDLDHIVPQSLGGLSVKHNFVLVHRDTNLQKSNQLPMNFVKDKQDYINRIDNLFAEHKLHWKKKINLLATTLDETFQDRFESKSLRATSYIEALSAQVLKRYYPFADEKKRVDGSSVRHIQGRATSNIRKLLHVKMKVRDTNIHHAVDAVLIGLTNASWLQKLSNTFRDNMGVIDDEARAKIKKDLPLIEGIEPKELIEMIEDRYNEYGENSVFYKDVWGKTKSVNFWVSKKPMVSKIHKDTIYAKKPNSMYTSRINITNVLIGLKITVTTKPDDFMKKFEKDILKKMYLYETNPNDAICRVVEKRAEEINSLLIGFVDIDKKDKEVMNEAKNKLDELVHKELIDNNGKTIRKVKFFQTNLTGFNIRGGLATKEKTFIGFKASVENDKLKYERIDVSNFQKTKKENDNSFKVFKNDLVFFVYSDGNFKGGKIVSFLEDKKMCAFSNPRFPASIGLQPHSFLTIFKGKANSHKQQSVNKAIGIIKLNLDILGNIKSYKIIGEIQSELFEFIKGIKNG

SEQ ID NO: 20942 - protein, 908 aa, unidentified
  REGION 1..908: note = Cas Enzyme sequence
  REGION 893..902: note = misc_feature - Xaa can be any naturally occurring amino acid
FDECNTAVDRRTFRNSRKRIDRKKQRIAWLQMLFNEEISKVDIAFFQRLKESNLYLEDKSTNVPYAVYADKNYTDVDYHNAYPTIYHLRKDLIEREDPHDIRLVYLALHHLIKNRGHFLFDNLNSDYDSDSSFDFLYDDLVTYLSEEMGIVLECSDSSNVADVLKDKSKSRSVKKKELSNYFQITKKNNPQEVEIITLLCGLKGTLSTIFSDKTLDDAEKNKIVFDNSFDENEDDYIAILQDRYELIEKVKAIYDWAVLADILNGESYISFAKVKTYEEHKNDLRMLKDYVKERCFDKYDEIFRVSSDIPNYTSYSGKYKENGKTGVLARKNKATQEEFCSYLLKSFKNLDHSGYEDMFLKIENNTFMPKIVVKDNGVIPMQVNEKEVKMILNNASKYLPFLSEKDCDGISVSDKILKIFQFRIPYYVGPLNTHSDKSWLIRGKEKIYPWNFDKVVDVEKSAEAFITNLTSKCTYLFDRDVIPKNSILYSKFMVLNELNNLRLDGEKPDVQFKQDIFNDIFMHHKKVARKSLVNYIKSKTGETPDITGIDGDFKTSMRSAIELSSYDLSLEEKEVIISSITIFGDDKKLLKKRLKKNFADKLSDDDIKKISKLKYKDWGRFSKDLLTEIYDFDENTGEVKDNIINSLWNTNDNFMELLGSKYNFQKSIENANREIQNSTSIRKMVEALYVSPKIKRPIYQSLLIMKEIEKIQKSQPKKIFVEMTRSDGVKGDKGRKHSRKKRLEELYKNCKEDSGELWESLEKTPDNEFQQDKLYLYYTQFGKCMYTGESIDISDLFNQNIYDIDHIFPRSKVKDDSLDNRVLVKRTVNSHKDNDYPLDKSIRDKMKSFWYVLYSKELISKKKFEKLTRSTSLTDSELSDFIARQLVETSQSXXXXXXXXXXNFISKY

SEQ ID NO: 20943 - protein, 1324 aa, unidentified
  REGION 1..1324: note = Cas Enzyme sequence
MKDFYIGLDMGTDSVGWAVADEDYNLCKFKGKAMWGVRLFDESATAAERRGFRTARRRAQRKRQRILWLQMLFNEEISKKDIAFFQRLNESKLYLEDKSTNVPYAVFADESFTDVDYHKLYPTIYHLRKELVQSDEPHDVRLVYLALHHLIKNRGHFLFENVGSDFEKESSFEVLFKNLQNYILGEYELALECISPLQIADILKDKSKRKTTKSSEICKLLGISKKGQPRLNAIVLLMCGQSVKLADLYGDENYNKEEKSSICFEKGYEDNEETYRELLLERFELIEKIKALYDWAILADILKGETYISFAKVKTYDEHRHDLQQLKAFVKERCRSDYNEIFRETSDKLNNYTAYCGKFKENGRNGVILHSANQTDFCKYLKSKFDKLDKSGYEDMFEKIENGSFMPKIVVKDNGVIPMQVNESELRAILKNASGYLDFLNNQDKDGITVADKILQIFEFRIPYYVGPLNVHSDNSWLVRKDGKIYPWNFNKIVDVDKSAEEFINKLTAKCTYLPDRDVIPKNSILYSRYMVLNELNNLKLDGKKPDVSFKQAVFNDLFMHRRKVTQKALREYIKAQTGTEPEITGIDGDFKANMRPAIELAGYNLSEPDKEEIIKAITIFGDDKKLLKRRIKDKYSEMLSEDEIKKICKLKYKDWGRLSCEFLTEIFDVDTATGECKDNIINTLWNTNDNLMELLGAKYNFTQSIEQAVSKSTHKASIEKMVEDMYVSPKVKRTVFQSLKIMKEIVKIKGHAPKKVFVEMTRHDGTKGDNGRTQSRKKQLEELYKKCEEDSTELWDELEKTDDDEFRQDKLFLYYTQMGRCMYSGERIELRDLFNKNLYDIDHIFPSSKIKDDSIDNRVLVKKQINSHKDNDYPLNSTVREKMRDHWQYLLQHGFISKKKYDRLTRVTPLTDDELADFIARQLVETSQSTKAVATLLKTLYPTTEIVYVKAGLVSRFRDEYKLFIKCREVNDLHHAKDAYLNIVVGNVYNVRYTHSKAEFIKGLQNKKYSLNRMFAFDIPGAWNIENEKSLSIVKKTLMKNNILYTRYSYMQKGGLFDIQPLKKGNGQAPLKKDLPLSDIGKYGGYNQPTASYFSYIKYEGKKGKECRQLVAIDNYLKEYYEKNPIEYLTNRLGFKNPAVLIPVVKINSCIELDGFRMSISSKSNKGKEIVYKPAVQLVLGAEKEAYVKKISKVLSKPEEQKITSYDGVSAEENIELFDALTAKMTNTIFKIKLEDIGNKIKSGRDKFVTLDVKKQCIVINGILKLMHCNVDTGDLRLIGAAHYAGKVTTNSALSEIKKVSSIMLINQSVTGLFETKIDLLNI

SEQ ID NO: 20944 - protein, 1426 aa, unidentified
  REGION 1..1426: note = Cas Enzyme sequence
MYNIGLDIGTGSVGWCLTDENGYLLKVNRKGNNGNTYRNSAWGVRLFESADTAADCRIKRSTRRRYKRRRTRIIELRKIMSDMIMPIDPNFYARLDEAFLWNEDKSDKAKAPFLLFNDNGYDDVKYYTDYPTIYHLRKHLLETKEKADPRFIYLALHHMMKYRGHFLFEGQSFEAIDNIEDTFIELEHLVNVYVKEKEDTDNNAENNALYQEMKNYLADNKVKNKDKKEYITDTFIKADYDNKYSKELAAAVLGYEFNVGIIVNDNSLTDEDGKALKAKFADAKYEEQEEKLSDKLGERYYIIETLKKIYSWKVLHSILGDNKYLSYAMVDKYEKHSEQLKALKYLFHKYTSQDEYSEFFHQEKNKEGKYIVNYANYIKGIKRLSNETNKKYNTKQQLYQSIKEKLGERAADDEVYKKILVEMEQETFLEKINNVDNSAIPYQLNLMEMDKILTQQGVYYKELRDNKELLLKMLSSKIPYYVGPLNNNSNGNRNFAWMTKKAGKENEKVYPWNVKDVVDIDVTAEDFITKMTNYCTYLPDEKVLPKESLLYQRYMLLEELSQIRIDGKKLSKEDRKAIINDLFIGKGRVKVSDKDFKEYLNKVNYVKVNGKGYDVTGYQSDDGFACALSSYNKFRRILGHIDEQNGKMIEDIIYWITVFEDKDIVKRKINKQYADRLSAEQLKKILKLKFKGWGRYSSKLLNGIKGDMGTTIIEMLEDADKRFAYCDYCPNFMQIINKDEKIKQIIDDNRPRYDGTKDLLDVIQDMHTSPANRRGIWQTMKAIEEIIEYMGEKPQQIYIEFAREDDPKAKNKRADSRKRAIDKALKKLKEDVVDEYNENVYKELKQYEKRLDEEKVYLYFMQNGKDLYFPDKELNLDELEKLEIDHIIPYSLSDDDSLDNKALVLKGNNQNKGNKIVKEAFPQLFSNSGTVNYWKNLKKAGLISEKKYNNLQKNNVDDILTKGFINRQLVETRQIVKSVANLILDYYNEQIDVIEVKASLSTSVRKMLTYEKKDSNGFWEENKDNCMFYKNRDMNDYHHAHDAYLANIIGMYIQKNYPHLQKELNYSQYRKIWRKYYENAKNNNGVNWFATLGKFSSNNEEADWYGQDIIAYMRKIFCYRDVLISKKVEENTGAFYSETKYPREDKAGSKLVPLKQGDNMRGANNLKELDTRKYGGYKGGEKAYFVLVKYCIEKALKKSVKKEYHMEFVEIPVYIARGIKNNDINLYDYVCDILNEANKNSVADVEILRNKVPKYQMIIGENGEEYYLVSATEVINSKQFVLGGANQQYNRLLNYIKYGKNDKWQYIQTELLDEQLIGLYNLLIAKIKDEYKGFSKEAVRIQENNSFDKLDVKDKKEFIAEMIKLVQPDSDYPYLGKYATGLSNRMGRKTGEKVGKKITLVDKSVTGLYERRTTFELEDDSSTKSR

SEQ ID NO: 20945 - protein, 1425 aa, unidentified
  REGION 1..1425: note = Cas Enzyme sequence
MYNIGLDIGTGSVGWCLTDENGYLLKVNRKGNNGNTYRNSAWGVRLFESADTAADCRIKRSTRRRYNRRRTRIIELRKIMSDMIMPIDPNFYARLDEAFLWNEDKSDKAKAPFLLFNDNGYDDVKYYTDYPTIYHLRKHLLETKEKADPRFIYLALHHMMKYRGHFLFEGQSFEAIDNIEDTFIELEHLVNVYVKEKEDTDNNAENNALYQEMKNYLADNKVKNKDKKEYITDTFIKADYDNKYSKELAAAVLGYEFNVGIIVNDNSLTDEDGKALKAKFADAKYEEKEEKLSDTLGERYYIIETLKKIYSWKVLHSILGDNKYLSYAMVDKYEKHSEQLKALKYLFHKYTSQDEYSEFFHQEKNKEGKYIVNYANYIKGIKRLSNETNKKYNTKQQLYQSIMKILGERAADDEVYKKILVEMEQETFLEKINNVDNSAIPYQLNLMEMDKILTQQGVYYKELRDNKELLLKMLTSKIPYYVGPLNNNSNGNRNFAWMTKKDGKENEKVYPWNVKDVVDIDVTAEDFITRMTNYCTYLPNEKVLPKESLLYQRYMLLEELSQIRIDGRKLSKEDRKAIINDLFIGKGRVKVSDKDFKEYLNKVNYVKVNGKGYDVTGYQSDDGFACALSSYNKFRRILGHIDEQNEKMIEDIIYWITVFEDKDIVKRKINKQYADRLSAEQLKKILKLKFKGWGRYSSKLLNGIKGDMGTTIIEMLEDADERFAYCDYCPNFMQIINKDEKIKQIIDDNRPRYDGTKDLLDVIQDMHTSPANRRGIWQTMKAIEEIIEYMGEKPQQIYIEFAREDDPKAKNKRADSRKRAIDKALKKLKEDVVDEYNEKVYKELKQYEKRLDEEKVYLYFMQNGKSLYTGKELNLNEPENLEIDHIIPYSLSDDDSLDNKALVLKKENQNKGNKIVKEAFTQSFSDSEMMDYWKNLKKSGLISEKKYNNLQKNNVDDILTKGFINRQLVETRQIVKSVANLILDYYNEQIDVIEVKASLSTSVRKMLTYEKKDNNGFWIENKDNCMFYKNRDMNDYHHAHDAYLANIIGLYIQKNYPRLQKELNYSQYRRIWRKYYENTKNNNGVNWFATLGKFSSNNEEADWYGQDIIAYMRKIFCYRDVLISKKVEENTGAFYSETKYPREDKAGSKLVPLKQGNNMRGANNLKELDARKYGGYKGGEKAYFVLVKYCIEKALKKKVKKEYHMEFVEIPVYIARGIKNKDINLYDYVCDILNEANKNSVADVEILRNKVPKYQMIIGENGEEYYLVSATEVINSKQFVLGGANQQYNRLLNYIKYGKNDKWQYIQTELLDEQLIGLYNLLIAKIKDEYKGFSKEAVRIQENNSFDKLDVKDKKEFIAEMIKLVQPDSDYPYLGKYATGLSNRMGRKTGEKVGKKITLVDKSVTGLYERRTTFELEDDSSTKSC

SEQ ID NO: 20946 - protein, 1425 aa, unidentified
  REGION 1..1425: note = Cas Enzyme sequence
MYNIGLDIGTGSVGWCLTDENGYLLKVNRKGNNGNTYRNSAWGVRLFESADTAADCRIKRSTRRRYKRRRTRIIELRKIMSDMIMPIDPNFYARLDEAFLWNEDKSDKAKAPFLLFNDNGYDDVKYYTDYPTIYHLRKHLLETKEKADPRFIYLALHHMMKYRGHFLFEGQSFEAIDNIEDTFIELEHLVNVYVKEKEDTDNNAENNALYQEIKNYLADNKVKNKDKKEYITDTFIKADYDNKYSKELAAAVLGYEFNVGIIVNDNSLTDEDGKALKAKFADAKYEEKEEKLSDTLGERYYIIETLKKIYSWKVLHSILGDNKYLSYAMVDKYEKHSEQLKALKYLFHKYTSQDEYSEFFHQEKNKEGKYIVNYANYIKGIKRLSNETNKKYNTKQQLYQSIKEKLGERAADDEVYKKILVEMEQETFLEKINNVDNSAIPYQLNLMEMDKILTQQGVYYKELRDNKELLLKMLSSKIPYYVGPLNNNSNGNRNFAWMTKKAGKENEKVYPWNVKDVVDIDVTAEDFITKMTNYCTYLPDEKVLPKESLLYQRYMLLEELSQIRIDGKKLSKEDRKAIINDLFIGKGRVKVSDKDFKEYLNKVNYVKVNGKGYDVTGYQSDDGFACALSSYNKFRRILGHIDEQNGKMIEDIIYWITVFEDKDIVKRKINKQYADRLSAEQLKKILKLKFKGWGRYSSKLLNGIKGDMGTTIIEMLEDADKRFAYCDYCPNFMQIINKDEKIKQIIDDNRPRYDGTKDLLDVIQDMHTSPANRRGIWQTMKAIEEIIEYMGEKPQQIYIEFAREDDPKAKNKRADSRKRAIDKALKKLKEDVVDEYNENVYKELKQYEKRLDEEKVYLYFMQNGKSLYTGEELNLNEPGNLEIDHIIPYSLSDDDSLDNKALVLKRENQNKGNKIVKEAFLQSYSDSDMKSYWKALKKAGLMSEKKYNNLMKDNVNEVLTRGFINRQLVETRQIVKSVANLILDYYNEQIDVIEVKAGLSTSVRKMLTYEKKDSNGFWEENKDNCMFYKNRDMNDYHHAHDAYLANIIGMYIQKNYPHLQKELNYSQYRRVWRKYYENTKNNNGVNWFATLGKFSSNNEEADWYGQDIIAYMRKIFCYRDVLISKKVEENTGAFYSETKYPREDKADSKLVPLKQGDNMRGANNLKELDTRKYGGYKGGEKAYFVLVKYCIEKALKKSVKKEYHMEFVEIPVYIARGIKNKDINLYDYVCDILNEANKNSVADVEILRNKVPKYQMIIGENGEEYYLVGATEVINSKQFVLGGANQRYNRLLNYITYGENDKWQYIQTELIDEQLIGLYNLLIAKIKDEYKGFSKEAVRIQENNSFDKLDVKNKKEFIAEMIKLVQPDSDYPYLGKYATGLSNRMGRKTGEKVGKKITLVDKSVTGLYERRTTFELEDDSSTKSC

SEQ ID NO: 20947 - protein, 1426 aa, unidentified
  REGION 1..1426: note = Cas Enzyme sequence
MYNIGLDIGTGSVGWCLTDENGYLLKVNRKGNNGNTYKNSAWGVRLFESADTAADCRIKRSTRRRYKRRRTRIIELRKIMSDMIMPIDPNFYARLDEAFLWNEDKSDKAKAPFLLFNDNGYDDVKYYTDYPTIYHLRKHLLETKEKADPRFIYLALHHMMKYRGHFLFEGQSFKAIDNIEDTFIELEHLVNVYVKEKEDTDNNAENNALYQEIKNYLADNKVKNKDKKEYITDTFIKADYDNKYSKELAAAVLGYEFNVGIIANDNSLTDEDGKALKAKFADAKYEEKEEKLSDTLGERYYIIETLKKIYSWKVLHSILGDNKYLSYAMVDKYEKHSEQLKALKYLFHKYTSQDEYSEFFHQEKNKEGKYIVNYANYIKGIKRLSNETNKKYNTKQQLYQSIKEKLGERAADDEVYKKILVEMEQETFLEKINNVDNSAIPYQLNLMEMDKILTQQGVYYKELRDNKELLLKMLSSKIPYYVGPLNNNSNGNRNFAWMTKKAGKENEKVYPWNVKDVVDIDVTAEDFITKMTNYCTYLPDEKVLPKESLLYQRYMLLEELSQIRIDGKKLSKEDRKAIINDLFIGKGRVKVSDKDFKEYLNKVNYVKVNGKGYDVTGYQSDDGFACALSSYNKFRRILGHIDEQNEKMIEDIIYWITVFEDKDIVKRKINKQYTDRLSAEQLKKILKLKFKGWGRYSAKLLNGIKGDMGTTIIEMLEDADERFAYCDYCPNFMQIINKDEKIKQIIDDNRPRYDGTKDLLDVIQDMHTSPANRRGIWQTMKAIEEIIEYMGEKPQQIYIEFAREDDPKAKNKRADSRKRAIDKALKKLKEDVVDEYNENVYKELKQYEKRLDEEKVDLYFMQNGKDLYFPDKELNLDELEKLEIDHIIPYSLSDDDSLDNKALVLKGNNQNKGNKIVKEAFPQLFSNSGTVNYWKNLKKAGLISEKKYNNLQKNNVDDILTKGFINRQLVETRQIVKSVANLILDYYNEQIDVIEVKASLSTSVRKMLTYEKKDSNGFWEENKDNCMFYKNRDMNDYHHAHDAYLANIIGMYIQKNYPHLQKELNYSQYRRVWRKYYENTKNNNGVNWFATLGKFSSNNEEADWYGQDIIAYMRKIFCYRDVLISKKVEENTGAFYSETKYPREDKAGSKLVPLKQGDNMRGANNLKELDTRKYGGYKGGEKAYFVLVKYCIEKALKKSVKKEYHMEFVEIPVYIARGIKNKNINFYDYVCDTLNEANKNSVADVEILRNKVPKYQMIIGENGEEYYLVSATEVINSKQFVLGGANQQYNRLLNYIKYGKNDKWQYIQTELLDEQLIGLYNLLIAKIKDEYKGFSKEAVRIQENNSFDKLDVKDKKEFIAEMIKLVQPDSDYPYLGKYATGLSNRMGRKTGEKVGKKITLVDKSVTGLYERRTTFELEDDSSTKSR

SEQ ID NO: 20948 - protein, 1425 aa, unidentified
  REGION 1..1425: note = Cas Enzyme sequence
MYNIGLDIGTGSVGWCLTDENGYLLKVNRKGNNGNTYRNSAWGVRLFESADTAADCRIKRSTRRRYKRRRTRIIELRKIMSDMIMPIDPNFYARLDEAFLWNEDKSDKAKAPFLLFNDNGYDDVKYYTDYPTIYHLRKHLLETKEKADPRFIYLALHHMMKYRGHFLFEGQSFEAIDNIEDTFIELEHLVNVYVKEKEDTDNNAKNNALYQEIKNYLADNKVKNKDKKEYITDTFIKADYDNKYSKELAAAVLGYEFNVGIIVNDNSLTDEDGKALKAKFADAKYEEKEKKLSDTLGERYYIIETLKKIYSWKVLHSILGDNKYLSYAMVDKYEKHSEQLKALKYLFHKYTSQDEYSEFFHQEKNKEGKYIVNYANYIKGIKRLSNETNKKYNTKQQLYQSIKEKLGERAADDEVYKKILVEMEQETFLEKINNVDNSAIPYQLNLMEMDKILTQQGVYYKELRDNKELLLKMLTSKIPYYVGPLNNNNKGNRNFAWMTKKAGKENEKVYPWNVKDVVDIDVTAEDFITRMTNYCTYLPDEKVLPKESLLYQRYMLLEELSQIRIDGRKLSKEDRKAIIDDLFIGKGRVKVSDKDFKEYLNKVNYVKVNSKGYDVTGYQSDDGFACALSSYNKFRRILGYVDERNEKMIEDIIYWLTVFEDKDIVKRKMNKQYADKLSDEQLKKILKLKFKGWGRYSAKLLNGIKGDMGTTIIEMLEDADERFAYCDYCPNFMRIINKDEKIKQIIDDNRPIYDGTKDLLDVIQDMHTSPANRRGIWQTMKVIEEIIEYMGEKPQQIYIEFAREDDLKAKNKRTDSRKRVIDKALKKLKEEVVDEYNENVYKELKQYEKRLDEEKVYLYFMQNGKSLYTGEELNLNEPENLEIDHIIPYSLSDDNSLDNKALVLKKENQNKGNKIVKEAFPQSFSDSKMIDYWKNLKKAGLISEKKFNNLQKNNVEDILTKGFINRQLVETRQIVKSVANLILDYYNEQIDVIEVKASLSTSVRKMLTYEKKDNNGFWEENKDNCMFYKNRDMNDYHHAHDAYLANIIGMYIQKNYPHLQKELNYSQYRRVWRKYYENTKNNNGVNWFATLGKFSSNNEEADWYGQDIIAYMRKIFCYRDVLISKKVEENTGAFYSETKYPREDKAGSKLVPLKQGNNMRGANNLKELDTRKYGGYKGGEKAYFVLVKYCIEKALKKKVKKEYHMEFVEIPVYIARGIKNKDINLYDYVCDILNEANKNSVADVEILRNKVPKYQMIIGENGEEYYLVSATEVINSKQFVLGGANQQYNRLLNYIKYGKNDKWQYIQTELLDEQLIGLYNLLIAKIKDEYKGFSKEAVRIQENNSFDKLDVKDKKEFIAEMIKLVQPDSDYPYLGKYATGLSNRMGRKTGEKVGKKITLVDKSVTGLYERRTTFELEDDSSTKSR

SEQ ID NO: 20949 - protein, 1426 aa, unidentified
  REGION 1..1426: note = Cas Enzyme sequence
MYNIGLDIGTGSVGWCLTDENGYLLKVNRKGNNGNTYRNSAWGVRLFESADTAADCRIKRSTRRRYKRRRTRIIELRKIMSDMIMPIDPNFYARLDEAFLWNEDKSDKAKAPFLLFNDNGYDDVKYYTDYPTIYHLRKHLLETKEKADPRFIYLALHHMMKYRGHFLFEGQSFEAIDNIEDTFIELEHLVNVYVKEKEDTDNNAENNALYQEMKNYLADNKVKNKDKKEYITDTFIKADYDNKYSKELAAAVLGYEFNVGIIANDNSLTDEDGKALKAKFADAKYEEKEEKLSDTLGERYYIIETLKKIYSWKVLHSILGDNKYLSYAMVDKYEKHSEQLKALKYLFHTYTSQDEYSEFFHQEKNKEGKYIVNYANYIKGIKRLSNETNKKYNTKQQLYQSIKEKLGERAADDEVYKKILVEMEQETFLEKINNVDNSAIPYQLNLMEMDKILTQQGVYYKELRDNKELLLKMLSSKIPYYVGPLNNNSNGNRNFAWMTKKAGKENEKVYPWNVKDVVDIDVTAEDFITKMTNYCTYLPDEKVLPKESLLYQRYMLLEELSQIRIDGKKLSKEDRKAIINDLFIGKGRVKVSDKDFKEYLNKVNYVKANGKGYDVTGYQSDDGFACALSSYNKFRRILGHIDEQNEKMIEDIIYWITVFEDKDIVKRKINKQYADSLSAEQLKKILKLKFKGWGRYSVKLLNGIKGDMGTTIIEMLEDADERFAYCDYCPNFMQIINKDEKIKQIIDDNRPGYDGTKDLLDVIQDMHTSPANRRGIWQTMKVIEEIIEYMGEKPQQIYIEFAREDDPRAKNKRTDSRKRAIDKALKKLKEDVVDEYNENVYKELKQYEKRLDEEKVYLYFMQNGKDLYFPDKELNLDELEKLEIDHIIPYSLSDDDSLDNKALVLKGNNQNKGNKIVKEAFPQLFSNSGTVNYWKNLKKAGLISEKKYNNLQKNNVDDILTKGFINRQLVETRQIVKSVANLILDYYNEQIDVIEVKASLSTSVRKMLTYEKKDSNGFWEENKDNCMFYKNRDMNDYHHAHDAYLANIIGLYIQKNYPHLQKELNYSQYRRVWRKYYENTKNNNGVNWFATLGKFSSNNEEADWYGQDIIAYMRKIFCYRDVLISKKVEENTGAFYSETKYPREDKTDSKLVPLKQGDNMRGANNLKELDTRKYGGYKGGEKAYFVLVRYCTEKVLKKSVKKEYHMEFVEIPVYIARGIKNNDINLYDYVCDILNEANKNSVADVEILRNKVPKYQMIIGENGEEYYLVSATEVINSKQFVLGGANQQYNRLLNYIKYGKNDKWQYIQTELLDEQLIGLYNLLIAKIKDEYKGFSKEAVRIQENNSFDKLDVKDKKEFIAEMIKLVQPDSDYPYLGKYATGLSNRMGRKTGEKVGKKITLVDKSVTGLYERRTTFELEDDSSTKSC

SEQ ID NO: 20950 - protein, 1380 aa, unidentified
  REGION 1..1380: note = Cas Enzyme sequence
MEKQNYNIGLDIGTTSVGWAVVNPDNYKIIRKGNKSLWGVRLFEEAITAEARRNYRSTRRRYERRRERIKLLQKEFENEINKVDSKFYTKLKESFYNELDLERKTISLTKEEKQLIKEYNIKYPTIYHLRDKLINNTDKEDIRLIYLAIHHIIKYRGNFLYNGNFNIDNLDIKSKLKDIFENIYTYCEDFNLDIDSLNDNFYSNLEKSITLKSKNDKKVVTKDILDNKCDKNFINEFLKLISGNQFSIVKILNLDSEEDLKLSFKETTYDDKYSEIETLCGDKIIIIDELKNLYDMIFLKQLFESDNKSLSSLMVSKYNKHKEDLKFIKELFKYDEVIYKKMFKDKQIKDKNGDVTKEELCLYKQFVNNKMSYNDFKNILKKEFDKILKLNIKDDLKDKCTIKLEELENDNFLPRITDTDNGKYPYQLNRDELIKIIENQGKYYPFLLDKVNGEYKLVKLLSFKIPYYVGPLSNTTDKSNVKNKNSWLERKVNNVKITPYNFDEVVNKEASAEKFITRMISHCTYILDEYAIPNNSILYLKYKVMNELKQIKVNNEKIPNDLQHQIYEELFLKEESTITEKKFIDYLIKTNEYNMYPTLDVTGYSEDKKFANNMQSYIDFFGINGIFKDTNYNIVDAEEIIRWVTIFEDKDILETKLRDKYDKLSDNVIKKILLKKYKGWSNLSEKLLTDIFYKDKTTGINKSIMDLMYETNENFMQILNNKEYKFQKEIDKLNKIDNNTKINYSLVENLATSPSTKRGIYQALKVVDEIVDYMGYNPDNIMIEMARSDDKNKSRKDNKKDYIDKLYVKFKDEIKDYKRLKKELESIDRIDNDKLFLYFIQEGKSLYSGIPLDINNLEDYEIDHIIPRTLTKDNSIDNKALVLRKENQEKAASFVLPKEYIRGNLGWWQHLSKCNLISNKKLNNLKRTYYSDKDIEGFINRQLVETRQITKHVANILNNIYENTNVVYLHADLTSNYRDKYELFKYRDLNDYHHAHDAYLAAVLGEYKEKYLNISTDFNKLKILSKRLYEEKRYDELKYGYVINSIDNDMGTFDEKTGEILFDACLFNKTIEDTLYRNDILISKKTEIKTGEFYDETIYKKNSIKAKYSLKNDLSTNLYGGYNSYKYSYMKLIEYRKNNKIENMLIGIPILLVNNKNKESLINDYITKNLNCDNYKVIIEKIPFNIEVIYKEQLCSITGCGIGTSEIINATEFKLDRKSQEKYKYLLNYIFNNKYPKNKNSSLNNQEFISYYNNQFNILINDLFKDILDKMHKYYPLYDSFYQKLLLVLDSKEFEELPLNISAKEEKNKMISKVIVIKEIFKLLKYNSSNSNLVNLNKTTKFSDRIGRISGANVNHAIIINKSVTGLRIRKYEFPNSSNI

SEQ ID NO: 20951 - protein, 1186 aa, unidentified
  REGION 1..1186: note = Cas Enzyme sequence
LHHIIKYRGNFLHEGESLKTTGGVTEVLQQVLACNEFSGVREHIDNNMLVTLLSEKGVTRSDIAKKISELVTEQQYKKQAKAFASLVLGLKANLDELFNEPEYKELDAEIRSVEFSGTEYWEERDKYEPYLGESLFALDGCKTLYDSLLLSNIKPDGKYLSAAKVETFEAHHDQLEMLKDVLKKKKSLYNLVLRDDVKDLKNYITYIGKSKINKRCSREDFYKFLKQTIKDVPDSEDKSEIIKLMDLDLFLPLLRVRENGVIPYQIHKEELEKILAVSGKKYSFLNQRDALGFTVKEKVLKLLTFRIPYYVGPLNPAHKENGFAWVVRKAQGKVYPWNFEDKVDISASATAFIENLTNKCTYLIGEDVLPKYSLAYSKFSLLNELNNLRYDGKPLSYETKQDFIKDCFEKEHRKMTEKRIKEFLKHLGGTDGKGAFTGLDVDIKSDLKSYRDMVRILGDGFDETVAERIIRYVTLFGEAKKVLLSTLETEFGDDLSDTQKKQILKLQYRDWGRLSATFLKGIKGIAGDNPECSILECMEQQPLNLMEVLSSHNTYLAAIEEFNKERTEPTDVVDYKLVDDLYISPAVKRSVWQTLRILDEITKLRDSVPKKVFVEVARTNKAEKKKTTSRKDRLLQLYNSIKDDGRNWSQEIKAQDAGKFNSKKLFLYYTQQGRCMYSGQSIELNDLFSTKYDIDHIYPRSVTKDNSWDNLVLVKAELNREKKDIYPIEIDTQDKQRAFWKQLLDQGFISERKYERLVRTTPLTADELADFVNRQLVETNQSVKAVTNLLKRLYPDTTICYVKAENVSEFRQDRKFVKLRSLNEHHHAKDAYLNIVVGNVYHEKFTNNPRNFIKNARSDKKRPYSLNHMFEKLLQVGSKAIWNPDTDNRTVERMMHNNDVQVTRMLVEQKGALYDATVCKATVAKPESYAPLKSSDSALSDVKKYGGFTKIKNAYYSIFRFYKKNSKEFETHIVPIPVMRVAGLNSEADYVEYAETIMNKGKFDRASLVYKKLCINVLVRVNGQLYYLGGRTDNNICIDSALSLVLDFETVKKIKNIDKYITRVADNGNYEPNSESVNSNLNMEVYKALIEKMKQPIFSSLKTNRSADLEKEETITAFKKLSLLDQCKMLLEALNLLTHKKTTYGLRPIGVVASRSKMSMNITGLSEFTIITQSVTGLQEKEIRII

SEQ ID NO: 20952 - protein, 1174 aa, unidentified
  REGION 1..1174: note = Cas Enzyme sequence
MKKIVLGLDLGTNSIGFSLNEIFVEKEQTIFNELTSNSIIFSEYIKAEDRRKFRSSRRRNERKSRRNKNIRKLLHIFDFANKSIISEPIKYFNNLSKNQNPYTLRKDAVNGKKLSKNEFTFALYSIITRRGYSNQFKTEESKDDGVINSSISKNKEFYLKNKLSIPSLVLIDKKLKLEKDGYVNVAIRNKKDNYNNSLDRELWQEELEKLLESQKDNLELFDNITTFKLFKSKVINGVNENSLGIFEQRPLKSMEDMVGFCSFYNKYHENKQKRVSKSHISSIELTLRQRIENSILGNLIFNSKTGEIFTPSKEEIDNTVELWLKKPPTKTINAKNIFDKAGLKNIKIKTADKQDETVLDISLHFQLLEIFKATKLDIFGKDKNLYTNILEKIHYYVNKEQIFRKIEEIDDKNCLTTEIIDKLSKINKGTKDSYSSFSLLFIEQILAKMKEGKSYHDSLSDLGYFKKYLDVEAYEYLPPLNPSNDDIKWLEKNIENFKREHLFYQPLVSPNVKRVISILRRLINDLIKKYGKIDKIIIETARELNSEKEEKRIKESQAKSRKDIREAEQLLESNNYKLTNKNIERARLLIEQKSKCLYSGKSLTIEDALDETETEVEHFIPRSKIWINSYKNKILVLKKYNQDKGNSHPITFLKSKNQWEDFKERVKENINNKNKIVWLIDEKIINKNWEKENLEDRFLNDTRTATKIVSNYLEHYLYPKKNEYGKGESNDNVISVTGRAINELKRLWGVDKVQPQKEDKKKDRQTNYHHTVDAIVISLLNSSSKKALNDFFKQNENGFKTKEIIEKIKSRFPKTKNGQNLCDFIKEKVRQYENNEIYICPMMKKRDNVVGFKDGNIKLLWDEDKKDFYQLDKKTVDKNLLFDNNGKNVKDEEVNKRVDTLIDSLDLPKQNNIQKAILEYKNKLLETRTHIKNIELQIKDLKGNLPNKKDYEETSEILKIKERIETLNQKKEKQISIQDEPCFFLTKKGQKQIVRNIKVKTSSTTKADSIIITDKTHKNRVKRLTKEVYDELKQNNTPFVAKLNDTTLNVDLFNTEKGQIIGLNYFSSIANDIVPKINEKKAKFIKNYNDKVTIQKGDLLEIEYLKEEKRKYFVFNGGGNISLTKTGGAMNLLEVRTINSKNEKRLFVTLNNDTIAKKVNIDYQGNIFYEDFKK

SEQ ID NO: 20953 - protein, 1168 aa, unidentified
  REGION 1..1168: note = Cas Enzyme sequence
MKKVLGLDIGTNSIGFSLNEISIENGQTIFKELTSNSIIFSEYIKAEDRRAFRSSRRRNERKSRRNGIVRKLLSDFNLAKKSIVTKPIKYFNKLSKDKDPYILRQEAVNGKNLSKDDFTFSLYSIITRRGYSNQFKTEDSNDEGVINEAISQNKELYLKNELSIPSQVLLNKKFNLEKNGFTNIAIRNKKDNYNNSLDRNLWKEELEILLESQKENKELFETIEIYDSLKNKLINGVNENSKGVFEQRSLKSMEDMVGYCSFYNKFHRNPQKRVLKSHISSIELTIRQRIENSISGNLIFNDKTGEIFTPTKEQIDNTIELWLKRPPTKTINTKNIFDKTGLKNIKIETLNKQDETVLDIGIHVQLLEIFKKTDLDIFKTHKDLYSKILKKIFYFVNKEQILKEIKKIDEENLLNDETIKELSKVSKGIKDTYASFSLCFIEEILEKMKSGKNYHDSLADLGYFRKYLNMEPYSYLPPLNPSEKDLIWLEKNIENFKREHIFYQPLVSPNVKRVISILRRLINDLISQYGKIDKIIIETARELNSKTEEEQIKEAQANSRKEIKAAEKLLLSDNCELSKKNIERARLLIEQKSKCLYSGEPLTLEDALDEQKTEVEHFIPRSKIWINSYKNKILVLKKHNQDKSNTHPIAYLKSKNSWEEFTSRVKKELTNTSKIFWLTNEENINKNWEKENLEDRFLNDTRSATKIISNYLEHYLFPKQNEFGKGETNQNVIRVTGKAISELKRLWGVDKVQPKNEDDKKDRQTNYHHTIDAIIISLLNESAKKALNDFFKQNENGFKTKEILEKIKTRFPITSDGVNIVEFIKEKVKRYENNEIYICPVIKKRDNVVGFKDGNVKLYLDKEKEEFYQIDKKAIDKNLLFDNYGKDISDKEVNKKVEDLISHLDLPKQENIKNALLEYKNKLLITRENISNIKKEIIELKGALPNKKNYEDTEQTIAIKDKLFRLDELKKDNELLQNEPCFFITKKGLKQIVRNIKVKTSSASKADSLIITDKTQKDRLKRLSLDVYKELKEKDIPFVAKLNDTTLNVDLFNTSKGQVIGLNYFSSIRNNIPPKINEKKIALIKDYEDKITIQKGDILEIENLKESTKEYFIFNGGGNIAGSNNKLELKSLNRKEVKRIFMTLNKDTIARKVFINYQGDISYEEFKK

SEQ ID NO: 20954 - protein, 947 aa, unidentified
  REGION 1..947: note = Cas Enzyme sequence
TIEIYDSLKNKLINGVNENSKGVFEQRSLKSMEDMVGYCSFYNKFHRNPQKRVLKSHISSIELTIRQRIENSISGNLIFNDKTGEIFTPTKEQIDNTIELWLKRPPTKTINTKNIFDKTGLKNIKIETLNKQDETVLDIGIHVQLLEIFKKTDLDIFKTHKDLYSKILKKIFYFVNKEQILKEIKKIDEENLLNDETIKELSKVSKGIKDTYASFSLCFIEEILEKMKSGKNYHDSLADLGYFRKYLNMEPYSYLPPLNPSEKDLIWLEKNIENFKREHIFYQPLVSPNVKRVISILRRLINDLISQYGKIDKIIIETARELNSKTEEEQIKEAQANSRKEIKAAEKLLLSDNCELSKKNIERARLLIEQKSKCLYSGEPLTLEDALDEQKTEVEHFIPRSKIWINSYKNKILVLKKHNQDKSNTHPIAYLKSKNSWEEFTSRVKKELTNTSKIFWLTNEENINKNWEKENLEDRFLNDTRSATKIISNYLEHYLFPKQNEFGKGETNQNVIRVTGKAISELKRLWGVDKVQPKNEDDKKDRQTNYHHTIDAIIISLLNESAKKALNDFFKQNENGFKTKEILEKIKTRFPITSDGVNIVEFIKEKVKRYENNEIYICPVIKKRDNVVGFKDGNVKLYLDKEKEEFYQIDKKAIDKNLLFDNYGKDISDKEVNKKVEDLISHLDLPKQENIKNALLEYKNKLLITRENISNIKKEIIELKGALPNKKNYEDTEQTIAIKDKLFRLDELKKDNELLQNEPCFFITKKGLKQIVRNIKVKTSSASKADSLIITDKTQKDRLKRLSLDVYKELKEKDIPFVAKLNDTTLNVDLFNTSKGQVIGLNYFSSIRNNIPPKINEKKIALIKDYEDKITIQKGDILEIENLKESTKEYFIFNGGGNIAGSNNKLELKSLNRKEVKRIFMTLNKDTIARKVFINYQGDISYEEFKK

SEQ ID NO: 20955 - protein, 1168 aa, unidentified
  REGION 1..1168: note = Cas Enzyme sequence
MKRVLGLDLGTNSIGFALLEVEDKDGTIIFNELASNSITFSEYILAEDRRKFRSGRRRNDRTSRRKENVRKLLVYFNLASKNILNNPIEYFNNFTKICKEPYKLREEAINGKELSKDEFTFALYTIISRRGYSNLFATQDSEDEVKESELINSAIANNKNIYKNNKYALPSKVITLKKETLEKEGFINVAIRNKKDDYNNSLDRNLWQEELEKLLQSQKNNKELFCDIKNFNDFKDKLLNGINDNSLGVFEQRDLKSVEDMVGFCSFYNLYHKTPQKRVINSHIKAIEYVLRQRIENSIRGDLIFNKKTSEIVSISKENIEDTIDFWIKTPSSQKIDAKNIFKGIGLKDIKIKVSPKQDNTIQNIAVHKALLEIVDFQTLTKDEDFYSKLLETLHYFVSKEQIKNEIKKLNSKNILSDEQIEKIVSINKSTSSYLSFSLKFIDEILEKMRKDIDYNTSLTELGYFKRYTNMKAYNFLPPLNPSKDDIKWLEKNIPNFNPQELFYQPLVSPNVKRVISVLRKLINELISKYGKIDRIIIETARELNSKKDEEKLKKAQEQSRKEIKEAETILKANGKEASKKNILRVRLFNEQNSKCLYSGEPLSFDDALDENVTEVEHFIPRSRIWIDSYKNKILVLKKSNQDKLSQHPVLFLKSVAKWDKFIGRVNENIVNKDKKFWLTNENSIQKIWDNEKLEDRFINDTRSATKIAANYLEHYLFPKQNEHGKGETNENVIRVTGKAINELKRVWGVHKTIENIDGKKDRETNYHHTIDAIVIALLNNSSKKVLNDFFKQNENGFKTEAIKENLKNRFPISKKDGKTLFEFVKDKVDKYEKNEIYVCPFMKKKDNIRGFKDGNIKLMWDETLNDFAQIDKIEISKKLLLNKLGNDLKDEEVKENFNKIKKQLNLPKQNNIKIALEEYEKRLLEIRAKINSIKEEIKQEDNLLKANKKETESFETLQIKDKIECLKQEQKEFIKELELPCYFLTKDGKKQIVKSLNIKSNSRTKADIIIITDKKQKSRVKRLDKDIYESLKSSKTSFVVKLNANTLSIDLYNTSKGQVVGLNYFSSIKNNILPKISKGKIKLIKDYNDKIVISEGDILEIRDLKQNSINYYTSNGGGDVSNSNRIEVRTINKRSEVIRIQIAEYRIVRKVQINFFGEIIYEDFKKS

SEQ ID NO: 20956 - protein, 1107 aa, unidentified
  REGION 1..1107: note = Cas Enzyme sequence
MGYTVGLDIGVASVGVAVLDENDNIVEAVSNIFDEADTSNNKVRRTLREGRRTKRRQKTRIEDFKQLWETSGYIIPHKLHLNIIELRNKGLTELLSLDELYCVLLSMLKHRGISYLEDADDGEKGNAYKKGLAFNEKQLKEKMPCEIQLERMKKYGKYHGEFIIEINDEKEYQSNVFTTKAYKKELEKIFETQRCNGNKINTKFIEKYMEIYERKREYYIGPGNEKSRTDYGIYTTRTDEEGNFIDEKNIFGKLIGKCSVYPEEYRASSASYTAQEFNLLNDLNNLKINNEKLTEFQKKEIVEIIKDASSVNMRKIIKKVIDEDIEQYSGARIDKKGKEIYHTFEIYRKLKKELKTINVDIDSFTREELDKTMDILTLNTERESIVKAFDEQKFVYEENLIKKLIEFRKNNQRLFSGWHSFSYKAMLQLIPVMYEEPKEQMQLLTEMNVFKSKKEKYVNYKYIPENEVVKEIYNPVVVKSIRTTVKILNALIKKYGYPESVVIEMPRDKNSDDEKEKIDMNQKKNQEEYEKILNKIYDEKGIEITNKDYKKQKKLVLKLKLWNEQEGLCLYSGKKIAIEDLLNHPEFFEIDHIIPKSISLDDSRSNKVLVYKTENSIKGNDTPYHYLTRINGKWGFDEYKANVLELRRRGKIDDKKVNNLLCMEDITKIDVVKGFINRNLNDTRYASRVVLNEMQSFFESRKYCNTKVKVIRGSLTYQMRQDLHLKKNREESYSHHAVDAMLIAFSQKGYEAYRKIQKDCYDFETGEILDKEKWNKYIDDDEFDDILYKERMNEIRKKIIEVEEKVKYNYKIDKKCNRGLCNQTIYGTREKDGKIHKISSYNIYDDKECNSLKKMINSGKGSDLLMYNNDPKTYRDMLKILETYSSEKNPFVAYNKETGDYFRKYSKNHNGPKVEKVKYYSGQINSCIDISHKYGHAKNSKKVVLVSLNPYRTDVYYDNDTGKYYLVGVKYNHIKCVGNKYVIDSEIYNELLRKEGVLNSDENLEDLNSKNITYKFSLYKNDIIQYEKGGEYYTERFLSRIKEQKNLIETKPINKPNFQRKNKKGEWENTRNQIALAKTKYVGKLVTDVLGNCYIVNMEKFSLVVDK

SEQ ID NO: 20957 - protein, 1109 aa, unidentified
  REGION 1..1109: note = Cas Enzyme sequence
MYRIGLDVGIASVGWAVVDEDYSVVDLGVRLFDSADPSMNSERRTNRGTRRLLRRKGHRLILYDKFWNSYAPKVVGLKEYNPLLLRNKGIQSKLSIEELYVVLRNLLKHRGISYLDDALDENSSGTYQKALTKNAKELDKLLPCQIQLNRLNKHGKYRGDNVVNEKEGNEEITLSNVFTINGYINEIKEIFEVQKRHHSFINDDFINQYLEIFSSKRKYYIGPGNEKSRTDYGIYTTKVDEETGDFITDENIFEKLIGRCSVYKDKLRASIASYTAQEFNLLNDLNNLTINGRKLTEKEKREVIHEILESKRPDVKKIIKKVVKEEITNFSGARIDKSGKEIFHSFETYRKLRKEMEQYDIDLDKLSRDVIDEISYVLTINTEKDSIIKMLKKINTNLNEEVLDNLANFRKKNSKFFTKWHAFSRDIMLELMDDLYKTSKNQMELLTEIGHFKTSIEKFKDYNQIPVLPILEAVYNPVVKRSVNQSIKVLNAIISKYGYPQEIIIEMPRDKNDQEKTERIKKTQLKNEKELENIINEIKNQYGVIVSSEHFYQHKALKTKLRLWHEQKGICVYSGKPIAINQLLNNKELFEVDHIIPISISFDDSRNNKVLVYRSKNQKKGNRTPFMYLEQENRDWNYEKFTYYIEQLYKDKNISNKKKDNLLFKENITKQEVVQKFISRNLNDTRYASRIVLNTLQGYIKAHNHPTKIKVINGSFTSQLRNKLDLPKNREDSFNHHAIDAVIMCYSKMGLDKFEIINKDIIDYETGEIFDQQKFKQLNDETIYNSYLFYKKIMDMKIEIVKAERIVRYSYKVDKKVNRKLSNETIYGVREKENKEKYKISKVKNIYDRNGFEVFKKKLKEDKDGKSKLDDFLMYHHDKKTFESLLKVIKLYPDKANPFAAYREEYGEPIRKYSKKGNGPFVKSLKYYDGKIGSHIDISHKYGHKIGSKKVILDSLNPYRTDVYFRESDQSYHLAGIKYANFKFIKGKYKLDEEMYNKILIDEGILCEGQSYKNIDKYGFVFLFSLYKNDLILYEKNGEEKLERFLSRTMPNNKNYIETKPVESKKFEKPRNLVGLSKTKRIVKVNTDVLGNRYYSEKEKFNLEFTLDK

SEQ ID NO: 20958 - protein, 1350 aa, unidentified
  REGION 1..1350: note = Cas Enzyme sequence
MEQNYYLGLDMGTSSLGWAVTDEKYQLLRRKGKDLWGVRLFSEAETAADRRSHRVSRRRREREKARIAYLKEVFAEEINKKDPGFFQRLEDSKYYEEDKREHQPFALFADSGYTDKEYYKDFPTIFHLRKALLEADKDGKEYDVRLVYLAILNMFKHRGHFLNATLDEKSGGNLDEYIDKLYNDLYENFDIAIKKVDISEIKNILSSKDLSNTGRLEKLLDIFELSKSKNKRETEILKLVCGLKGKLSKIFGEDSFSEELVNFSMSFRDANYDEEIITLEDNLSEEYFEMVMNLKQIHDWSVLENIMNGQAYISQARVLAYEKHEKDLKILKSFFKKNSMTEYNKMFRQMNDNNYSSYVGSVNYKNESIRRGSKCNSEEFFKSILKAIKEWDDCEEKIYIEDEIEKGTFLPKQITTSNGVIPNQVHKKELKKILTNAEIYLPFLSSKDESGLTVSERIVEMFSFQIPYYVGPISYSLDEKATTHRNNVWSVRKESGRVYPWNFEKKIDIKKSSENFISNLINHCTYLNGESVLPKNSLLYEKFMVLNELNNLKVNEQKISVETKQDIYKKLFKKGKKVTAKAIVKYLKENGLVDNSDEPALTGIDGDFTNRLANYKKFLEIFETDTLTYEQEQIAENIIYYSTIYGDSKKFLEERIRELYGEVLNEKQIKRILGLKFKDWGRFSRELLELVGVEISTGEQCSIISKMWNDNYNFMELMSKARFTYVDEIEKRTKKIEKTLSDIQYEDLEELYISAPVKRMIWQTVLVLKELVEIIGYPPERIFVEMTRYTGAKERKDSRKSNLLSLYDNCKKEERDWKKEIKSRETSTYRSDKLYLYYTQKGKCMYCGEQIELENLFDKNLYDKDHIYPRHFVKDDSVQNNLVLSHKECNGEKEDIFPIKSSIRIAMRGMWNYLREGGFITQEKYNRLIRSEEFTDEELSNFIARQIVETGQGTKIITNILKQTFKQTDIVYVKPMNVTDFRHKFELLKCREVNEFHHAHDAYLNIVVGNVYYTKFTSNPMNFIKDYKKNPEKYRYHMDHMFKYPVARNGKTAWITKGGESIKMVRSAMNKNTPLVTRMNYEKHSRKKGGITDQNICSAKKAKVNSYLPIKTTEERLKNVERYGGYGSITIKYFFLVEHRKGKKKIRTIEGYPAYLNDSIENLEEYCVKVLGYEMPEIKLAKIKIKSLFKINGFYYYLNAKSGNRIVWGNAVQLKMGQEDVEYIRKLSKVNEEYISEQITCEKNVELYEKLVKKYSEGVYSKRAHAVTESLAKAKNKFEMLSIKDQVRVLLEMVNYSKDSVSKINLSKLGLSANAGECKINKEISVFEECKLINQSVTGLYENEIDLLTV

SEQ ID NO: 20959 - protein, 1377 aa, unidentified
  REGION 1..1377: note = Cas Enzyme sequence
METKFTYYLGLDMGTDSLGWAVTDSSYHILRAKGKDLWGVRLFPAAETSVDRRTYRVNRRRRQREVARIGALKELFADEIEKVDPGFFVRLDESKFHMEDRSENNKQKYGLFADKLFSDAEYYKKYPTIFHLRKELLESEEPHDVRLVYLALLNMFKHRGHFLNSSLQIEGENSNIAESYQMFVDTLKDEELDFPEQVSGERLQEIFRSSDSRKKKVENLLAEMNLSKKQKREIQFVNLICGLKGKLSELFPDKEYDEEQKKLAFSFRDSDYEDKENTIQELLDESEMNMIYAVKAVHDSGVLSGIMNGERYLSVARVASYEKHKKDLQILKDVLKKYDTKEYFEMFRNESAKSESYSAYVGSVKYHGTFRRGLSGGKQEDLYKHIKKVLGKFPQDDEGVTYILEEIETESFLPKQLTASNGVIPNQVHAREMLAILKHAELYLPFLQEKDDTGLSVSEKILKLFMFQIPYYVGPLGQEYKDKKGYNVWAERKEPGKIYPWNFEEKIDVKKSAEKFIGRMVRRCTYLSGEQALPKQSLLYEKFRVLNELNNLRIRGEKIPVSLKQEIYHDLFGDGKKVSMTRLTNYLLQNGVISSEEKDSCISGIDGGFHNSLSSVGKFKGVFGDTVHTDEHRKMIEDIIFWGTVFGDGKKLLKEKVEEVYGNQLTEAQKKRIFGFKFSGWGRLSKAFLTMEGASKDDEEIKGLIQAMWDTNCNLMELLSDRFTYKDKLNEMVTTAEKPLCEWKIEDLDEMYLSAPVKRMVWQTIRVVDEVQQIMGCPPKRIFVEMTRSDGEKGKRTVSRQKKLVDLYKALGKEGKIWSEELNNTPEGQFRIKKLYLYYLQMGKCMYTGESIELEPLMNDNHLYDIDHIYPRHFIKDDNISNNLVLVKKERNAHKSDSFPIEPEIRNKMMPFWKSLRKKGFLTEEKYNRLTRMSAFTDEEKAAFISRQLVETSQGTKAITQIFEQAFANSEIVFSKASVVSAFRQKFDCYKVRCVNNYHHAHDAYLNIVAGNTYRVKFTSNPLNFIKEAKKNPNSRENRYNMDKIFEWDVTRNGETAWVAQTKENPGTIQLVKKYLNKNSPLITKLAHEKHGGITQKVTIFSAKKAESGNTDAYIPVKMNDPRLSDVTKYGGVTTIAVAGYTLLEYKAGGKTVRSLEALPIYLGGSKNLTEEQMVEYFSNVLQQENKKKVVSDVNIRKKMIPMGALIKYNGFYYYLGGKTNADMYIRDAVQVCFAPKDMEYIKKVDKAVSNNDYSEKDNGVGTTVLTKEKNVSLYKNICEKYALTIFKKKKGTIKTIVQKGKEVFEHDLTIEEQCIVLRNLMLNFQTGDSVDLHLIKGSAATGTMKLNKKVSNAEELKLIDQSVTGVFSREIDLLTI

SEQ ID NO: 20960 - protein, 1377 aa, unidentified
  REGION 1..1377: note = Cas Enzyme sequence
METKFTYYLGLDMGTDSLGWAVTDSSYHILRAKGKDLWGVRLFPAAETSVDRRTYRVNRRRRQREVARIGALKELFADEIEKVDPGFFVRLDESKFHMEDRSENNKQKYGLFADKLFSDAEYYKKYPTIFHLRKELLESEEPHDVRLVYLALLNMFKHRGHFLNSSLQIEGENSNIAESYQMFVDTLTDEDLDFPEQVSGERLQEIFRSSDSRKKKVENLLAEMNLSKKQKREIQFVNLICGLKGKLSELFPDKEYDEEQKKIAFSFQDSDYEDKENTIQELLDESEMNMIYAVKAVHDSGVLSGIMNGERYLSVARVASYEKHKKDLQILKDVLKKYDTKEYFEMFRNESAKSESYSAYVGSVKYHGTFRRGLSGGKQEDLYKHIKKVLGKFPQDDEGVTYVLEEIETESFLPKQLTASNGVIPNQVHAREMLAILKHAELYLPFLQEKDDTGLSVSEKILKLFMFQIPYYVGPLGQEYKDKKGYNVWAERKEPGKIYPWNFEEKIDVKKSAEKFIGRMVRRCTYLSGEQALPKQSLLYEKFQVLNELNNLRIRGEKIPVSLKQEIYHDLFGDGKKVSMTRLTNYLLQNGVISSEEKDSCISGIDGGFHNSLSSVGKFKGVFGDTVHSDEHRKMIEDIIFWGTVFGDGKKLLKEKVEEVYGNQLTEAQKKRIFGFKFSGWGRLSKAFLTMEGASKDDGEIKGLIQAMWDTNCNLMELLSERFTYKDKLNEMVTTAEKPLCEWKIEDLDEMYLSAPVKRMVWQTIRVVDEVQQIMGCPPKRIFVEMTRSDGEKGKRTVSRQKKLVDLYKALGKEGKIWSEELNNTPEGQFRIKKLYLYYLQMGKCMYTGESIELEPLMNDNHLYDIDHIYPRHFIKDDNISNNLVLVKKERNAHKSDSFPIEPEIRNKMMPFWKSLRKKGFLTEEKYNRLTRMSAFTDEEKAAFISRQLVETSQGTKAITQIFEQAFANSEIVFSKASVVSAFRQKFDCYKVRCVNNYHHAHDAYLNIVAGNTYRVKFTSNPLNFIKEAKKNPNSRENRYNMDKIFEWDVTRNGETAWVAQTKENPGTIQLVKKYLNKNSPLITKLAHEKHGGITQKVTIFSAKKAESGNTDAYIPVKMNDPRLSDVTKYGGVTTIAVAGYTLLEYKAGGKTVRSLEALPIYLGGSKNLTEEQMVEYFSNVLQQENKKKVVSDVNIRKKMIPMGALIKYNGFYYYLGGKTNADMYIRDAVQVCFAPKDMEYIKKVDKAVSNNDYSEKDNGVGTTVLTKEKNVSLYKNICEKYALTIFKKKKGTIKTIVQKGKEVFEHDLTIEEQCIVLRNLMLNFQTGDSVDLHLIKGSAATGTMKLNKKVSNAEELKLIDQSVTGVFSREIDLLTI

SEQ ID NO: 20961 - protein, 1174 aa, unidentified
  REGION 1..1174: note = Cas Enzyme sequence
  REGION 1156..1159: note = misc_feature - Xaa can be any naturally occurring amino acid
METKFTYYLGLDMGTDSLGWAVTDSSYHILRAKGKDLWGVRLFPAAETSVDRRTYRVNRRRRQREVARIGALKELFADEIEKVDPGFFVRLDESKFHMEDRSENNKQKYGLFADKLFSDAEYYKKYPTIFHLRKELLESEEPHDVRLVYLALLNMFKHRGHFLNSSLQIEGENSNIAEAYQMFVDTLKDEELDFPEQVSGERLQEIFRSSDSRKKKVENLLAEMNLSKKQKREIQFVNLICGLKGKLSELFPDKEYDEEQKKIAFSFQDSDYEDKENTIQELLDESEMNMIYAVKAVHDSGVLSGIMNGERYLSVARVASYEKHKKDLQILKDVLKKYDIKEYFEMFRNESAKSESYSAYVGSVKYHGTFRRGLSGGKQEDLYKHIKKVLGKFPQDDEGVTYILEEIETESFLPKQLTASNGVIPNQVHAREMLAILKHAELYLPFLQKKDDTGLSVSEKILKLFMFQIPYYVGPLGQEYKDKKGYNVWAERKEPGKIYPWNFEEKIDVKKSAEKFIGRMVRRCTYLSGEQALPKQSLLYEKFQVLNELNNLRIRGEKIPVSLKQEIYHDLFGDGKKVSMTRLTNYLLQNGVISSEEKDSCISGIDGGFHNSLSSVGKFKGVFGDTVHTDEHRKMIEDIIFWGTVFGDGKKLLKEKVEEIYGNQLTEAQKKRIFGFKFSGWGRLSKAFLTMEGASKDDREIKGLIQAMWDTNCNLMELLSERFTYKDKLNEMVTTAEKPLCEWKIEDLDEMYLSAPVKRMVWQTIRVVDEVQQIMGCPPKRIFVEMTRSDGEKGKRTVSRQKKLVDLYKALGKEGKIWSEELNNTPEGQFRIKKLYLYYLQMGKCMYTGESIELEPLMNDNHLYDIDHIYPRHFIKDDNISNNLVLVKKERNAHKSDSFPIEPEIRNKMMPFWKSLRKKGFLTEEKYNRLTRMSAFTDEEKAAFISRQLVETSQGTKAITQIFEQAFANSEIVFSKASVVSAFRQKFDCYKVRCVNNYHHAHDAYLNIVAGNTYRVKFTSNPLNFIKEAKKNPNSRENRYNMDKIFEWDVTRNGETAWVAQTKENPGTIQLVKKYLNKNSPLITKLAHEKHGGITQKVTIFSAKKAESGNTDAYIPVKMNDPRLSDVTKYGGVTTIAVAGYTLLEYKAGGKTVRSXXXXEVWKLCQFIWVDQRI

SEQ ID NO: 20962 - protein, 1375 aa, unidentified
  REGION 1..1375: note = Cas Enzyme sequence
METKFTYYLGLDMGTDSLGWAVTDSSYHILRAKGKDLWGVRLFPAAETSVDRRTYRVNRRRRQREVARIGALKELFADEIEKVDPGFFVRLDESKFHMEDRSENNKQKYGLFADKLFSDAEYYKKYPTIFHLRKELLESEEPHDVRLVYLALLNMFKHRGHFLNSSLQIEGENSNIAESYQMFVDTLKDEELDFPEQVSGERLQEIFRSSDSRKKKVENLLAEINLSKKQKREIQFVNLICGLKGKLSELFPDKEYDEEQKKIAFSFRDSDYEDKENTIQELLDESEMNMIYAVKAVHDSGVLSGIMNGERYLSVARVASYEKHKKDLQILKDVLKKYDTKEYFEMFRNESTKSESYSAYVGSVKYHGTFRRGLSGGKQEDLYKHIKKVLGKFPQDDEGVTYILEEIETESFLPKQLTASNGVIPNQVHAREMLAILKHAEFYLPFLQEKDDTGLSVSEKILKLFMFQIPYYVGPLGQEYKDKKGYNVWAERKEPGKIYPWNFEEKIDVKKSAEKFIGRMVRRCTYLSGEQALPKQSLLYEKFQVLNELNNLRIRGEKIPVSLKQKIYHDLFGDGKKVSMTRLTNYLLQNGVISGEEKDSCISGIDGGFHNSLSSVGKFKGVFGDTLHTDEHRKMIEDIIFWGTVFGDGKKLLKEKVEEVYGNQLTEAQKKRIFGFKFSGWGRLSKAFLTMESASKDDGEIKGLIQAMWDTNCNLMELLSDRFTYKDKLNEMVTTAEKPLCEWKIEDLDEMYLSAPVKRMVWQTIRVVDEVQQIMGCPPKRIFVEMTRSDGEKGKRTVSRQKKLLDLYKALGKEGKTWSEELSNTSESQFRIKKLYLYYLQMGKCMYTGEAIELNQLMNDNHLYDIDHIYPRHFIKDDNISNNLVLVKKEKNAHKSDSFPIEPEIRNKMMPFWKSLRKKGFLTEEKYNRLTRMSAFTDEEKAAFISRQLVETSQGTKAITQIFEQAFANSEIVFSKASVVSAFRQKFDCYKVRCVNNYHHAHDAYLNIVAGNTYRVKFTSNPLNFVKEAKKNPNSRENRYNMDKIFEWDVTRNGETAWVAQSNENPGTIQLVKKYLNKNSPLITKMVYEKHGGITQKATIWSAKKAESGNTDAYIPVKMNDPRLADVTKYGGVTTIAVAGYTLLEYKAGGKTVRSLEALPIYLGGSKKLTEEQMVEYFSNVLQQENKEKVVSDVIIRKKMIPSGSLIKYNGFYYYLAGKTGDRIILISAVQLCLPMDTMLYIKKIEKACSTGNFEEKDKNGKQVLSKQQNEFVYELIIQKYQQSIFKKKVGAIGDTIIEKREKFAEISLEEQCKVLMQIFLNFQSGIGVELKIIEGGKKSGVTYLNKKVMNVQELKLIDQSVTGVFSREIDLLTI

SEQ ID NO: 20963 - protein, 926 aa, unidentified
  REGION 1..926: note = Cas Enzyme sequence
MANILQNAENYLPFLNEKDESGLTVSQRILKLFTFQIPYYVGPVSPKSEQNGGNGWVVRKADGKVLPWNINEKIDLKATSERFIERLIRNCTYISDEKVLPKASLEYEAFCVLNEINNLKIDGEKISVELKQEIYRELFQRGKKVTKKQLVNFLSCKGILKEEAQLSGIDNEINNSLSTYGKFKAIFGEKLEEDECRHMVEDIVRWCTIYGDSKSFLKEQLEERYADKISPENMKRIFGFKFKDWGRLSKEFLELSACDKSTGEKVSLIRTMWDTNYNLMELLHSENYTFDEALKEKQKKGVRLLQEMEPEDLDELYFSAPVKRMVWQTILIIREIEKVLGSSPKRLFIEMTRSDEEKGDKGRKDSRKKQLLDLYKNIKDESRDWKAEIEAADQKGWLRSKKVYLYYTQMGRCMYSGQPIDFEALMNDNIYDIDHIYPRHFVKDDNINNNLVLVDKRLNAHKSDTYPLEASIRFSTANIALWKRLLDVGLILPEKYRRLTGREAFTDEQKAGFIARQLVETSQGTKGVSDILKEMLPETEIVYSKASNVSEFRHQRGLQKSRLVNDFHHAHDAYLNIVVGNVYYVKFTKNPINFIRNEYARDAKTFNYNLSKMFDRDVARGEEIAWKAQTEEGAGTIVTVKKMLAKNTPLLTRFSFEGHGAIANETLYGASKAKKDGYIPLKSSDQRMLDVTKYGGFTSASTAYFFLVEHEVKGKNVRTLETVPVYEKDKIAQEPEELQRYCEQTLGLIHPSVRISRIKIQSLMRINGYNVHISGRTGNRITVRNAVSMCLGQNWIDYIHLLEKYREKQDMDEKITAAENIRLYDILTEKHTKAIYQKRLNPIGKKLIDAREKFEQLTVEKQSLVLLQILQATQIGIAVADLTLIGETANSGVMLFGKNITAFSECKLINQSVTGLFESSVDLLTV

SEQ ID NO: 20964 - protein, 1374 aa, unidentified
  REGION 1..1374: note = Cas Enzyme sequence
MGKKYYLGLDMGTNSVGWAVVDTDYKLLRAKGKDLWGVRLFEEAHTAAERRGYRVSRRRRSREIARIGMLKEFFADAIEAKDPGFFARIEESKFHKEERNEGNKQPYAIFADTGYTDKEYYEQYPTIFHLRKELLEKKEPHDVRLVYLAISNLYKRRGHFLDATLSENEETDSMVALLDGCISKMVDLEMEVPVNVDAIELEEVLGTKGVSRKRILESLCTMWGIDKKKKSLYALASLLCGMSCKMIDLFGEEVIDEEHKRIAVSFRDSRYEEIVSELQDVLGDDRFDLICVFKEIHDKGMLSNLMKGYDFLSQARVAIYEEHKLDLLMLKKVLKKYDAKEYENMFRIMKENNYSAYVGSVNSHDKIRRGGSKNREEFLKYVKKVVSNQTVFPSDDDDVCNILQRIEDDIFMPKQLTASNGVIPNQLHLREMSKILKNAENYLEFLKERDESGLTVSEKILQVYKFQIPYYVGPIPYCMSGTDDYNNLTKYHNVWAERKELGKVCPWNFEEKIDIKKSAENFIIRMVRHCSYLAGENALPKNSMLYEKFMVLDELNNLRINGEKLTVEQKQNIYHDLFGQGKKVNMKSLANYFVRNGIIQKDQAESAVSGIDGGFRASLSTVGKFYGIFGEAVYHDENVKAIEDIVFWGAVYGNDKKMLKEKINEKYKDKFSEQELKRILGFKFEGWGRLSRSFFELEGESTEDGVCRTFIQALWETNDNHMELMSSKYTYKEELEKKLQLVEKPLKEWNFEDLDDMYMSAPVKRMVWQTISIMKELEDVLGNGPERIFVEMAREEGEKNKRTISRKQKLIDLYKAIGKEGKEWCKEVEGMEEASFKNRKLYLYYLQMGKCIYTEQNIDLHTLLTSNTIYDIDHIYPQHYIKDDSLENNLVLALKDYNNNVKKDIVPLPTETRKNRRAYWEVLKNKGFISQEKFSRLTRNIGFTEEELAGFINRQLVETRQGTKSITQILKHAYPMSEIVFAKAGAVSEFRKKFDLLKVRCINNYHHAHDAYLNIVVGNTYFVKFTKNPYNFIKEVVKNPNKVENKYHMGQVFDWNVCRNGENAWIKDKTIDTVKAVLGKNSPLVTRYATEYHGGITQKVTIYKVSPEKKDSYIPVKMRDERLKDVTKYGGLRDVAISGYSLVEYKVDDNVVRSLESIPVYLGRVESLADETIVAYCQQMLQREYKKKIVSCIRICYKFIPSESLIRYNGYYYYLGGKTDRYIWVRSAIELCIDSKKAKYIKKIEKAIKSNSFEEKGHDGKRVLSVQSNIELWSWISNKFVTGIYAKQIGTIKGIIANSEEQFISLTLEQQCYVIYEIIKYINTSDMTDVALIGGSSKSGKMRISKKITDVREIVLVHQSVTGLYRAEVNLLTV

SEQ ID NO: 20965 - protein, 1208 aa, unidentified
  REGION 1..1208: note = Cas Enzyme sequence
ENEETDSMVALLDGCISKMVDLEMEVPVNVDAIELEEVLGTKGVSRKRILESLCTMWGIDKKKKSLYALASLLCGMSCKMIDLFGEEVIDEEHKRIAVSFRDSRYEEIVSELQDVLGDDRFDLICVFKEIHDKGMLSNLMKGYDFLSQARVAIYEEHKLDLLMLKKVLKKYDAKEYENMFRIMKENNYSAYVGSVNSHDKIRRGGSKNREEFLKYVKKVVSNQTVFPSDDDDVCNILQRIEDDIFMPKQLTASNGVIPNQLHLREMSKILKNAENYLEFLKERDESGLTVSEKILQVYKFQIPYYVGPIPYCMSGTDDYNNLTKYHNVWAERKELGKVCPWNFEEKIDIKKSAENFIIRMVRHCSYLAGENALPKNSMLYEKFMVLDELNNLRINGEKLTVEQKQNIYHDLFGQGKKVNMKSLANYFVRNGIIQKDQAESAVSGIDGGFRASLSTVGKFYGIFGEAVYHDENVKAIEDIVFWGAVYGNDKKMLKEKINEKYKDKFSEQELKRILGFKFEGWGRLSRSFFELEGESTEDGVCRTFIQALWETNDNHMELMSSKYTYKEELEKKLQLVEKPLKEWNFEDLDDMYMSAPVKRMVWQTISIMKELEDVLGNGPERIFVEMAREEGEKNKRTISRKQKLIDLYKAIGKEGKEWCKEVEGMEEASFKNRKLYLYYLQMGKCIYTEQNIDLHTLLTSNTIYDIDHIYPQHYIKDDSLENNLVLALKDYNNNVKKDIVPLPTETRKNRRAYWEVLKNKGFISQEKFSRLTRNIGFTEEELAGFINRQLVETRQGTKSITQILKHAYPMSEIVFAKAGAVSEFRKKFDLLKVRCINNYHHAHDAYLNIVVGNTYFVKFTKNPYNFIKEVVKNPNKVENKYHMGQVFDWNVCRNGENAWIKDKTIDTVKAVLGKNSPLVTRYATEYHGGITQKVTIYKVSPEKKDSYIPVKMRDERLKDVTKYGGLRDVAISGYSLVEYKVDDNVVRSLESIPVYLGRVESLADETIVAYCQQMLQREYKKKIVSCIRICYKFIPSESLIRYNGYYYYLGGKTDRYIWVRSAIELCIDSKKAKYIKKIEKAIKSNSFEEKGHDGKRVLSVQSNIELWSWISNKFVTGIYAKQIGTIKGIIANSEEQFISLTLEQQCYVIYEIIKYINTSDMTDVALIGGSSKSGKMRISKKITDVREIVLVHQSVTGLYRAEVNLLTV

SEQ ID NO: 20966 - protein, 997 aa, unidentified
  REGION 1..997: note = Cas Enzyme sequence
FLKYVKKVVSNQTVFPSDDDDVCNILQRIEDDIFMPKQLTASNGVIPNQLHLREMSKILKNAENYLEFLKERDESGLTVSEKILQVYKFQIPYYVGPIPYCMSGTDDYNNLTKYHNVWAERKELGKVCPWNFEEKIDIKKSAENFIIRMVRHCSYLAGENALPKNSMLYEKFMVLDELNNLRINGEKLTVEQKQNIYHDLFGQGKKVNMKSLANYFVRNGIIQKDQAESAVSGIDGGFRASLSTVGKFYGIFGEAVYHDENVKAIEDIVFWGAVYGNDKKMLKEKINEKYKDKFSEQELKRILGFKFEGWGRLSRSFFELEGESTEDGVCRTFIQALWETNDNHMELMSSKYTYKEELEKKLQLVEKPLKEWNFEDLDDMYMSAPVKRMVWQTISIMKELEDVLGNGPERIFVEMAREEGEKNKRTISRKQKLIDLYKAIGKEGKEWCKEVEGMEEASFKNRKLYLYYLQMGKCIYTEQNIDLHTLLTSNTIYDIDHIYPQHYIKDDSLENNLVLALKDYNNNVKKDIVPLPTETRKNRRAYWEVLKNKGFISQEKFSRLTRNIGFTEEELAGFINRQLVETRQGTKSITQILKHAYPMSEIVFAKAGAVSEFRKKFDLLKVRCINNYHHAHDAYLNIVVGNTYFVKFTKNPYNFIKEVVKNPNKVENKYHMGQVFDWNVCRNGENAWIKDKTIDTVKAVLGKNSPLVTRYATEYHGGITQKVTIYKVSPEKKDSYIPVKMRDERLKDVTKYGGLRDVAISGYSLVEYKVDDNVVRSLESIPVYLGRVESLADETIVAYCQQMLQREYKKKIVSCIRICYKFIPSESLIRYNGYYYYLGGKTDRYIWVRSAIELCIDSKKAKYIKKIEKAIKSNSFEEKGHDGKRVLSVQSNIELWSWISNKFVTGIYAKQIGTIKGIIANSEEQFISLTLEQQCYVIYEIIKYINTSDMTDVALIGGSSKSGKMRISKKITDVREIVLVHQSVTGLYRAEVNLLTV

SEQ ID NO: 20967 - protein, 1376 aa, unidentified
  REGION 1..1376: note = Cas Enzyme sequence
MGKNMYIGVDMGTSSDGVAVTDENYTLYRVKGKDLWTSRLFKEANTAAERRTNRVSRRRRQREIARMGILRELFSEEINKVDEGFFARLDESKYHIEDRVVKQKYALFVDKGYTDKEYYKEYPTIFHLRNELLHPQKNSYDVRLVYLAVANMFKHRGNFLNETLDIDKITANAVDVYSQLIEELDLYCIQMPVSIDIGKLINIIGENGISRSKRLENASKYLGITKKDKQSYEILKLICGLKGILYNIYGENVIDEENKKFSLSFTDSNYEDEETQAKDILGDEYFELIEIIKELYDIGVLSGIIKGHKFLSEARVELYEEHKKDLDMLQQVLKKYDKNAYDEMFRVMKEGNYSAYVGSVNARGKNKKIRRNVGEGKKGKNGRSQEAFYKYVKTTLKNYPDDDENIKNILFKIENETFMPKQLTASNGIIPNQLHAAELKAILTNAEKYLPFLLDKDESDLTVSQRILELFKFHIPYYVGPLGAAGKNVWAKRRKGEEKGRIYPWNFEKKIDTQEAAEEFIKRMVRHCSYIKGEHTLPKQSLLYEKFMVLNELNNLKINGTKPDVFVKQDIYENLFKTGKRVTLDKLKSYLYNNSFIDSKEVMITGIDGGFNSSLTSVGKFIGILGEDLFTDSNQAMVEQIIFWGTIYGSDKKFLKNRIEKEYKDRLTPKQIKRILGFKFNGWGKLSKRFLELKGSCECGECSIIQALWQTNHNLMELMSDQYDFKTNLMEVSEKTIKPLSEWTIDNLDDYYMSAPVKRMVWQTIKMLNEICELTGRIPDKIFVEMPREHENGNERKASRKKKLLDLYKAIKSEQKQWAEQMIAEIDKRDEADFRIKKLYLYYIQQGKCMYSGDTIDLDLLLKNNNIYDIDHIYPRHFIKDDSIDNNLVLVKKEINNHKSDKYPLESDIKKDMSGFWKYLCEKKFITKEKYNRLMRTDKFSAEEKAAFVNRQLVETGQGTKVITQILKQAFPDTQVVFVKARMVSDFRHEFGINKVRELNDTHHAKDAYLNIVVGNTYYTKFTNNPINFMKNAEKNPEDVQYKYNMDKIFRYNVIRNGETAWIADNGVTKQHVLKTINRNTVTITRKTEEVHGALSNKVTVWSSKLAKKNPDAYMPVKTTDEKACDVTKYGGITAIANSGYTLVEYNINGKMIRSIEALPVYLGRKNMLTEDKIKEYLHEKIRKEYKNKTVTDLKICILFIPQKSKVCVDGFNYYLGGVTGNSIYLSNAEPLYLSKEDEEYLRKIIKAVGKGYYEETDENGQIIITGERNMKFFNTLSSKLNNRPYNNNRWNIYKIMENKEEIFAGLSIEKQCYVINQIISWINSKTQNVDLSDIKGSSHSGTMTLNKKISECSQFELIYQSVTGMYEKRTDLLKL

SEQ ID NO: 20968 - protein, 1101 aa, unidentified
  REGION 1..1101: note = Cas Enzyme sequence
MGINIGLDIGIASVGLAVVDSDTGNVLETVADLFNCAEVSENVKRREFRQARRLKRRQHTRLEDFKKLWVGMGFIIPENINIYPIELKVRALRGEITMDELYVVLYSSLKHRGISYLDDFEGTVEGGSEYQKGIQINQQQLETKYPCEIQLERIKKYGAYRGNIIAEENGEKAVLSNVYTFSAYEKEIAAILDSQKKYHSELTNDFIEKYQKIFGRKRKYYEGPGSEKSRTDYGIYTTKIDESTGNYIKEDNIFEKLIGKCSVFPEEMRAAAASYSAQEFNLLNDLNNLTIGGRKLEEEEKRQIVETIKNSQRVNVEKIICTVSGENAETIEGARIKDDKHIYHSFEAYRKMKKALSEAGKNIEEYERAELDEIGRILTLNTEHESIEKELIDSGIGMSKEEIDSLINLRKEDGKPFSKWHSFSLKLLNILIPEMYEQPKEQMTLLSEMKLLKSSDELYKGLKYIPQEAMTNEIYNPVVVRSARIAVKALNAVIKKYGNPELVVIEMPRDKNDEEQKQRIKQEQSRNEKELKEIIDKIKSEYGIQVTSAHFRNHKQLALKLKLWNEQEGICLYSGKQIDINQLLTASDMYEIDHIIPLSISFNDSRNNKVLVYATENQEKGQTTPYKYLTMLHRGWGWNEYVAKVNELHRKKNINYKKVENLLFMKDITKIDVLKGFINRNLNDTRYASRVVLNTLQSFFRANETGTKVSVICGAYTSQMRKNMRLDKNREESFAHHAVDALLIVYSQMGYNTFRKLQGEFIDFETGEILNPEMWKENMTDEVYEKCLYGQEGQKWLEIRNNIKETEKHVKYWHKVDKKCNRALCNQTIYGTRNLDGGVYKISKIKDIRSIDGYKKFAEMIKKGKQNSFLMARNDPKTFASLLEICERYKDAKNPFVQYEKETEDWVRRYAKKNNGPKIVSLKYVDGEVNSCIDVSHKYGYERNSRKVILASLNPYRMDVYYNKNDSKYYLIGIKQSDVKFEAGKSVIDEEAYTRILQQEKMLQEGQGRADLEKLGYEFRLSFYRNNIIQYEKGGEIFTERFQSRTMPAQRNYIETKPVDRAKFNRQNLVGLGKTTSIKKVHVDILGNQYITEKEIFSFEC

SEQ ID NO: 20969 - protein, 1101 aa, unidentified
  REGION 1..1101: note = Cas Enzyme sequence
MGINIGLDIGIASVGLAVVDSDTGNVLETVADLFNCAEVSENVKRREFRQARRLKRRQHTRLEDFKKLWGAEGFIIPKNINLYSLELKVRALQEKITMDELYVVLYNSLKHRGISYLDDFEESTEGGSEYQKGIQINQQELETKYPCQIQLERFKKYGAYRGQIIVEENGDKTVLSNVYTFSAYKKEIDTILEAQSKYYPELTNDFIEKYQRIFSRKRKYYEGPGTEKSRTDYGIYTTRIDKSTGNYITEENIFEKLIGKCSVFPEEMRAAAASYSAQEFNLLNDLNNLTIGGRKLNEEEKRQIVETIKNSQRVNVEKIICTVSGENAETIEGARIKDDKHIYHSFEAYRKMKKALSEAGKNIEEYERAELDEIGRILTLNTEHESIEKELIDSGIGMSKEEIDSLINLRKEDGKPFSKWHSFSLKLLNILIPEMYEQPKEQMTLLSEMKLLKSADELYKGLKYIPQEAMTNEIYNPVVVRSARIAVKALNAVIKKYGNPELVVIEMPRDKNDEEQKQRIKQEQSRNEKELKEIIDKIKSEYGIQVTSAHFRNHKQLALKLKLWNEQEGICLYSGKQIDINQLLTASDMYEIDHIIPLSISFNDSRNNKVLVYATENQEKGQTTPYKYLTMLHRGWGWNEYVAKVNELHRKKNINYKKVENLLFMKDITKIDVLKGFINRNLNDTRYASRVVLNTLQSFFRANETGTKVSVICGAYTSQMRKNMRLDKNREESFAHHAVDALLIVYSQMGYNTFRKLQGEFIDFETGEILNPEMWKENMTDEVYEKCLYGQEGQKWLEIRNNIKETEKHVKYWHKVDKKCNRALCNQTIYGTRNLDGGVYKISKIKDIRSIDGYKKFAEMIKKGKQNSFLMARNDPKTFASLLEICERYKDAKNPFVQYEKETGDWVRRYAKKNNGPKIVSLKYVDGEVNSCIDVSHKYGYERNSRKVILASLNPYRMDVYYNKNDSKYYLIGIKQSDVKFEAGKSVIDEEAYTRILQQEKMLQEGQGRADLEKLGYEFRLSFYRNNIIQYEKGGEIFTERFQSRTMPAQRNYIETKPVDRAKFNRQNLVGLGKTTSIKKVHVDILGNQYITEKEIFSFEC

SEQ ID NO: 20970 - protein, 1101 aa, unidentified
  REGION 1..1101: note = Cas Enzyme sequence
MGINIGLDIGIASVGLAVVDSDTGNVLETAADLFNCAEVSENVKRREFRQARRLKRRQHIRLEDFKKLWGAEGFIIPKNINLYSLELKVRALQEKITMDELYVVLYNSLKHRGISYLDDFEESTEGGSEYQKGIQINQQELETKYPCQIQLERFKKYGAYRGQIIVEENGDKTVLSNVYTFSAYKKEIDTILEAQSKYYPELTNDFIEKYQKIFGRKRKYYEGPGSEKSRTDYGIYTTKIDESNGNYIKEDNIFEKLIGKCSVFPEEMRAAAASYSAQEFNLLNDLNNLTIGGRKLEEEEKRQIVETIKNSQRVNVEKIICTVSGENAETIEGARIKDDKHIYHSFEAYRKMKKALSEAGKNIEEYERAELDEIGRILTLNTEHESIEKELIDYGIGMSKEEIDSLINLRKEDGKPFSKWHSFSLKLLNILIPEMYEQPKEQMTLLSEMKLLKSSDELYKGLKYIPQEAMTNEIYNPVVVRSARIAVKALNAVIKKYGNPELVVIEMPRDKNDEEQKQRIKQEQSRNEKELKEIIDKIKSEYGIQVTSAHFRNHKQLALKLKLWNEQEGICLYSGKQIDINQLLTASDMYEIDHIIPLSISFNDSRNNKVLVYATENQEKGQTTPYKYLTMLHRGWGWNEYVAKVNELHRKKNINYKKVENLLFMKDITKIDVLKGFINRNLNDTRYASRVVLNTLQSFFRANETGTKVSVICGAYTSQMRKNMRLDKNREESFAHHAVDALLIVYSQMGYNTFRKLQGEFIDFETGEILNPEMWKENMTDEVYEKCLYGQEGQKWLEIRNNIKETEKHVKYWHKVDKKCNRALCNQTIYGTRNLDGGVYKISKIKDIRSIDGYKKFAEMIKKGKQNSFLMARNDPKTFASLLEICERYKDAKNPFVQYEKETGDWVRRYAKKNNGPKIVSLKYVDGEVNSCIDVSHKYGYERNSRKVILASLNPYRMDVYYNKNDSKYYLIGIKQSDVKFEAGKSVIDEEAYTRILQQEKMLQEGQGRADLEKLGYEFRLSFYRNNIIQYEKGGEIFTERFQSRTMPAQRNYIETKPVDRAKFNRQNLVGLGKTTSIKKVHVDILGNQYITEKEIFSFEC

SEQ ID NO: 20971 - protein, 1113 aa, unidentified
  REGION 1..1113: note = Cas Enzyme sequence
LQSKNEYEGDRIMGINIGLDIGIASVGLAVVDSDTGNVLETVADLFNCAEVSENVKRREFRQARRLKRRQHTRLEDFKKLWGAEGFIIPKNINLYSLELKVRALQEKITMDELYVVLYNSLKHRGISYLDDFEESTEGGSEYQKGIQINQQELETKYPCQIQLERFKKYGAYRGQIIVEENGDKTVLSNVYTFSAYKKEIDTILEAQSKYYPELTNDFIEKYQRIFSRKRKYYEGPGTEKSRTDYGIYTTRIDKSTGNYITEENIFEKLIGKCSVFPEEMRAAAASYSAQEFNLLNDLNNLTIGGRKLEEEEKRQIVETIKNSQRVNVEKIICTVSGENAETIEGARIKDDKHIYHSFEAYRKMKKALSEAGKNIEEYERAELDEIGRILTLNTEHESIEKELIDSGIGMSKEEIDSLINLRKEDGKPFSKWHSFSLKLLNILIPEMYEQPKEQMTLLSEMKLLKSADELYKGLKYIPQEAMTNEIYNPVVVRSARIAVKALNAVIKKYGNPELVVIEMPRDKNDEEQKQRIKQEQSRNEKELKEIIDKIKSEYGIQVTSAHFRNHKQLALKLKLWNEQEGICLYSGKQIDINQLLTASDMYEIDHIIPLSISFNDSRNNKVLVYATENQEKGQTTPYKYLTMLHRGWGWNEYVAKVNELHRKKNINYKKVENLLFMKDITKIDVLKGFINRNLNDTRYASRVVLNTLQSFFRANETGTKVSVICGAYTSQMRKNMRLDKNREESFAHHAVDALLIVYSQMGYNTFRKLQGEFIDFETGEILNPEMWKENMTDEVYEKCLYGQEGQKWLEIRNNIKETEKHVKYWHKVDKKCNRALCNQTIYGTRNLDGGVYKISKIKDIRSIDGYKKFAEMIKKGKQNSFLMARNDPKTFASLLEICERYKDAKNPFVQYEKETGDWVRRYAKKNNGPKIVSLKYVDGEVNSCIDVSHKYGYERNSRKVILASLNPYRMDVYYNKNDSKYYLIGIKQSDVKFEAGKSVIDEEAYTRILQQEKMLQEGQGRADLEKLGYEFRLSFYRNNIIQYEKGGEIFTERFQSRTMPAQRNYIETKPVDRAKFNRQNLVGLGKTTSIKKVHVDILGNQYITEKEIFSFEC

SEQ ID NO: 20972 - protein, 1370 aa, unidentified
  REGION 1..1370: note = Cas Enzyme sequence
MEKQEYYLGLDMGTSSVGWAVTNTKHELLRKKGKDMWGIREFDEANSAAERRTHRVDRRRRQRQLVRLGLLKSYFSEEIAKIDPDFFIRLENSKYFLEDKDERVRTKNGVFNDDDYKDVDYYRQYPTIFHLRKALLDLDHHGEKFDVRLVYLALANMFKHRGHFLLNAEGDALNTEQVDIVYQEILDRLENDYEIIIEHKSIQQVIDVLGSTDIGRKKKHEELQKLFGVGKKDKRVNEFLRCLCGLSVNAKLIFDENAEEKVTLCFNDFSYTDKISELMEQLTEEEYALIEQLKSIYDYAVLAGTLKGYDYLSCARVELYEKHKKDLKLLKALYRKYKTEEEYNRMFRSNTDGTYSAYVNSLNSTDAILNSNEVVEDSKYRRNMKKRKSEDIYATIKKAFKDITEDKDVSFVLEKIEKEQFLPKQLTGANGVIPNQVHKKEMERILQNAETYLPFLKDKDESGLTVSERIIQLFTFQLPYYVGPLGENSKTGWIVRKEKGAILPWNIHDKVDMSATSEAFIGNLIRTCTYIQGEKVMPKASLAYERYCVLNEINNLCIDGERIDTKLKQQIYKDCFMKGKRVSKKQLCSYLAAQNAIHSEEQLTGIDKNINNSLSSYGKMYAIFGERLKEDAILAAAEDIIYWGTIFGDSKKMLKQRLKKYVEEGIIDEKQLKRILGYKFKDWGRFSKSLLSLSGCDKSTGEIITLGQAMWEYSLNFMELINSEEFTFKEEMEKHTKVAMKQLSEFTYEDLEDSYFSVPVKRMIWQTLLVVREIEQVMGCAPKRIFVEMTRTEEEKGDKGRKESRGNQLLELYKSIKNTESHNWKEEIAAADKDGKLRSKKLFLYYMQMGRDMYTGEEIDLGRLYDDNLYDIDHIYPRHYVKDDSIMNNLVLVNRRANQDIKKDLYPIPEQIKANPKVRELWNALHKQKLITDEKYARLNSNTAFSEKQLGDFIARQLVETGQGTKGVADLLEQLFKNTVIVYAKASNVSDFRKDNGFLKSRLVNDFHHAQDAYLNIVVGNVYYTKFTKNPWNFIRKDYEHDKEKNRYNLARMFDWNVVRGSETAWLANGKDGAGTITTVRKMMQKNTPLLTRMNFEQHGSIANATLYSAKKAKSENYLPLKTADEKMSDVKKYGGYTSMSIAYYFIVHHKEGKKENVTIEALPLYCKDKVEREENGLEKYCEEVLGYGEVNIIRRKLKIQTLLEFNGYQVHLSGKTGNQLILRNAISLCLSTKWITYIKKLEKAVNIQIVEEVVTSEENIKLYNLLADKHANTVYSKRPNAYGEKLLADREAFIKLDLRQQCEVLLQILSLTKIGTTEANLLLIGESEHSGKILISKNLKASDRPAVISQSPCGLYEKKEWIFDKVVEK

SEQ ID NO: 20973 - protein, 1370 aa, unidentified
  REGION 1..1370: note = Cas Enzyme sequence
MEKQEYYLGLDMGTSSVGWAVTNTKYELLRKKGKDMWGIREFDEANSAAERRTHRVDRRRRQRQLVRLGLLKSYFSEEIAKIDPDFFIRLENSKYFLEDKDERVRTKNGVFNDDDYKDVDYYRQYPTIFHLRKALLDLDHHGEKFDVRLVYLALANMFKHRGHFLLNAEGDALNTEQVDIVYQEILDRLENDYEIIIEHKSIQQVIDVLGSTDIGRKKKHEELQKLFGVGKKDKRVNEFLRCLCGLSVNAKLIFDENAEEKVTLCFNDFSYTDKISELMEQLTEEEYALIEQLKSIYDYAVLAGTLKGYDYLSCARVELYEKHKKDLKLLKELYRKYKTEEEYNRMFRSNTDGTYSAYVNSLNSTDAILNSNEVVEDSKYRRNMKKRKSEDIYATIKKAFKDITEDKDVSFVLEKIEKEQFLPKQLTGANGVIPNQVHKKEMERILQNAETYLPFLKDKDESGLTVSERIIQLFTFQLPYYVGPLGENSKTGWIVRKEKGAILPWNIHDKVDMSATSEAFIGNLIRTCTYIQGEKVMPKASLAYERYCVLNEINNLCIDGERIDTKLKQQIYKDCFMKGKRVSKKQLCSYLAAQNAIHSEEQLTGIDKNINNSLSSYGKMYAIFGERLKEDAILAAAEDIIYWGTIFGDSKKMLKQRLKKYVEEGIIDEKQLKRILGYKFKDWGRFSKSLLSLSGCDKSTGEIITLGQAMWEYSLNFMELINSEEFTFKEEMEKHTKVAMKQLSEFTYEDLEDSYFSVSVKRMIWQTLLVVREIEQVMGCAPKRIFVEMTRTEEEKGDKGRKESRGNQLLELYKSIKNTESHNWKEEIAAADKDGKLRSKKLFLYYMQMGRDMYTGEEIDLGRLYDDNLYDIDHIYPRHYVKDDSIMNNLVLVNKRANQDIKKDLYPIPRQIKANPKVRELWDTLHKQKLITDEKYTRLTSNTAFTEKQLGDFIARQLVETGQGTKGVADLLEQLFKNTVIVYAKASNVSDFRKDNGFLKSRLVNDFHHAQDAYLNIVVGNVYYTKFTKNPWNFIRKDYEQDKEKNRYNLARMFDWNVVRGSETAWLANGKDGAGTITTVRKMMQKNTPLLTRMNFEQHGSIANATLYSAKKAKSENYLPLKTADEKMSDVKKYGGYTSMSIAYYFIVHHKEGKKENVTIEALPLYCKDKVEREENGLEKYCEEVLGYGEVNIIRRKLKIQTLLEFNGYQVHLSGKTGNQLILRNAISLCLSTKWITYIKKLKKAVNIQIVEEVVTSEENIKLYNLLADKHANTVYSKRPNAYGEKLLADREAFIKLDLRQQCEVLLQILSLTKIGTTEANLLLIGESEHSGKILISKNLKASDRPAVISQSPCGLYEKKEWIFDKVVEK

SEQ ID NO: 20974 - protein, 1370 aa, unidentified
  REGION 1..1370: note = Cas Enzyme sequence
MEKQEYYLGLDMGTSSVGWAVTNTKYELLRKKGKDMWGIREFDEAKSAAERRTHRINRRRRQRQLVRLGLLKSYFCEEIAKIDPNFFIRLENSKYFLEDKDERVRTKNGVFNDDNYKDVDYYREYPTIFHLRQALLDIDNTGEKFDVRLVYLALANMFKHRGHFLLNAEGDALNTEQVDLVYQEILDRLENDYEIIIEHKPIQQVTDILGSTDIGRKKKHEELQKLFEVAKKDKGANELLKCLCGLSVNAKLIFDENAEEKVTLRINDFSYTDKISELMEQLTEEEYALIEQLKSIYDYAILAGTLKGYDYLSCVRVELYEKHKKDLKLLKVLYRKYKTEEEYNRMFRSNTDETYSAYVNSFNSTDAILNSKGVVEGSKYRRNMNKRKTENIYATIKKAFKDITEDADVSYILEQIEKEQFLPKQLTGANGVIPNQVHKKEMERILKNAESYLPFLKDKDESGLTVSERIIRLFTFQIPYYVGPLGENSKTGWIVRKEKGAVLPWNINEKVDMSATSEAFIGNLIRTCTYIQGEKVMPKASLAYERYCVLNEINNLCIDGERIDTKLKQQIYKDCFMKGKQVTKKQLCSYLAAQNAIHSEEQLTGIDKNINNSLSSYGKMYAIFGERLKEDAILETAEDIIYWGTIFGDSKKMLKQRLKKYVKEGIIDENQLKRILGYKFKDWGRFSKALLTLSGCDKSTGEIITLGQAMWEYSLNFMELINSEEFTFKEELEKHTKVAMKQLSEFTYEDLADSHFSVPVKRMIWQTLLVVREIEQVMGCAPKRIFVEMTRTEEEKGEKGRKESRGNQLLELYKSIKNTDSHNWKEEIAAADKDGKLRIIPLFLYYMQMGRDMYTGEEIDLDRLYDKNLYDKDHIYPKCYVKDDSIMNNLVLVNKRANQDIKKDLYPIPEQIKANPKVRELWDTLHKQKLITDEKYARLTSNTAFTEKQLGDFIARQLVETEQGTKGVANLLEQLFKDTVIVYARASNVSDFRRENGFLKSRLVNDFHHAQDAYLNIVVGNVYYTKFTKNPWNFIRNEYEKDKEKNHYNLTRMFKWNVVRGSETAWIAETKDEKGTIATVRKMMQKNTPLLTRMNFEKHGGIADESLYSAKVAKPENYLPLKSADERMSDVKKYGGFTAAKVAYYFIVHHKEGKKENITIEALPLHCKDKVEREENGLEKYCEEVLGYGEVNIIRRKLKIQSLLEFNGYKVYLSGRSEERLILRNAMSLCLPTKWVTYIKKLEKAVDIKIIEEVITPENNIKLYDILADKHVNTVYAKRLNTFGKKLLDGREKFVLLGVEEQCEILLQVLRLSRIGTTVANLKKIGASDGSGEMKTSKNLKASDRPAVINQSPCGLYEKKEWIFDKIVEK

SEQ ID NO: 20975 - protein, 1365 aa, unidentified
  REGION 1..1365: note = Cas Enzyme sequence
MDVNKELGGKTMYYGGIDLGTSSVGWALTDVNYNLIRQKGKDLWGVRLFDEANTSQERRIHRVSRRRRAREVARIGMVKSYFAEAIEAVDAGFYQRLEESKYHRDEKASESKYAIFADDDFTDKEYYQKYPTIYHLRKKLLESDETQDVRLVYLAVLNLFKNRGHFLNSYIAEDGKEESFSELYSVFWNSIPEELAMVFPEVIDVQKVEEILSSKVYSRTVATEKLAEVLQVSKTNNKSSYEIVKMLCGLSGKLANIFAKEVLGEVYENKNLDFRGDSYEEIIGGLSEILPGEYIDMLECAKAVHDKGVLGSILKDYTYLSQARVAIYDKHAEDLRRLRVVVKKYCPECYDDYFRVMSIDNYSGYIGSVCSGKEKIRRGGHDAKKEAYKSFWKKTTELLSTMPEDDADVMYLKGELQKDTLLPKQKTKENSVIPNQVHLKELKKILSNVEGYLPFLKDVDESGLTVKERIIRLYQFQIPYYVGPLHINAGEEGNKWVVRKENGKVLPWNLEDKVDMAETRKAFIERMVRHCTYLSGKNVLPKGSLLYERFMVLNELNNVKVNGCKLPLEVKQQVYEELFAKGKKVTLKTFCTYLYNCGVIDKVDTEMISGIDGGFNHTLTSYARFCSVFGDKMKLYKYQKMAEELIFTATVYSNDKTLMKELIAKKYGNPEDEVYISKEQEKKILGFKWMDWGRLSKEFLELKGCSKEDGIEISLIQAMWECDCNLMEALSDKFTFGIKLLDMKEGREKLLSDFTYEDLQDSYLSAPVKRMTWQTILVLKELCHVMGEAPGKLFVEMPRTEGEKGKRTASRKQQLIELYKKCKEESHDWISEIDGYTEDQLRSKKLYLYYTQQGRCMYTGNAISLGDLLSNNGRYDIDHIYPRHFVKDDSLENNLVLVEKESNAYKSDTYPIDADTRNARYRLWKSLKDDDFISEEKYKRLTRSWEFSEEELAGFINRQIVETGQATKCVAHLLEELLPETEVVYVKAGNVSDFRREMNLLKTRSVNEFHHAQDAYLNIVVGNVYNTKFTKNPINFVVNYKKDSAKYRYHMCKMFEYDVKRDAVMAWTAGEKGSIVTVKKMMGKNTPLLTKRTYEAHGGIADQTLYSAKVANANNYIPLKAMDERMGDVTKYGGFSSVSGTYYFLVEHEKKKKVVRTIEQMPLYLKDALATSEEALRQYCVNRLGLQNPIIRLMKIPMKALVKRNGYWLRIAGRTGNQLYADNAVSMCLNLHWINYIYDMERFLEFGKTEDGKHSISYERNIQLYEEILEKHLNGIFSNKPNEIGNKLNNSHSAFEKLSIKEQVKVLLELLKATQYQNLRVEAKEIDLKMSPIKISNDVLGQDEFLLINQSVTGIYTSVIDLRTV

SEQ ID NO: 20976 - protein, 1341 aa, unidentified
  REGION 1..1341: note = Cas Enzyme sequence
MDKELDKKEPYSIGLDIGTGSIGWAVIDDDCKLRRYKHQNMWGAHLFKEADKAATRRSFRSSRRRLARRKRRITLLQQIFDDEIQKIDPHFYLRLSESMLHLGDKNSALELDANILFADHSFTDKSYREKYPTIYHLRSDLFHNTDRQDIRLVYLALHHIIKYRGNFLVEGGVDSVISSFDNQNLQKFMDFIGADERVAKEIKNILLDRSKSRSARKSAIDKQMQLTPSTKEAIKAVVGLKWDAGKLFEDSSLDAKGEFSSKDYEEQRDAIATAIGDENYELVATLESVYRWTVFSQFIRKDSCLSDIMIERYDNYHQDLSDLKALFHKFLSKDDYKSFFHGDTAEFELYNSHKSKNSIDDLYKSIRKRLGNIAKDDLRYQRFEKRAELGEFLARQRIRDNGAIPHQIHQYELEEIIDNQAQYYPFLAQNRDKIVSIFTFKLPYYIGPLKTGGNFAWSVKKKDGVIYPWNYDEMIDDEASAEKFIDRMRNHCTYLPDEEVLPKNSLLYQEYEVRNELKNITVNGERLGADVQNDIVDKLFTVVSSVTRKKLVDYLYENQIYDTDSLAIEGFSNEKGFNSSRKSYIDFTQKIGIKITPGNQQAVEEVIKWITLFEDKKILAKKIRREYGNIFNEEKISKILRLNYSGWGRLSRKLLDGITACVQGNELTVIETMRRYKHNFMQIVQSDQYEFKKVIDKILSANQCAEIIYDDIKNLAGSPGIKRALWRSVRTIDEIVDTIGYEPKLISIEMARNEGEKVSTNSRKSQLEKMYKELIGDDADYNKSVIKPQLAKYKEKLNKKKYYLYFLQNGKCAYTGKPLDIENDLRECEIDHIIPRSLTKDDSLDNTVLVIRNENQRKEDDYPVSSDIQKHMAVIWSLLKRAKLMSPTKFQRLTSKKQLSESRIASFVNRQLVETRQITKHLARMLHEKYQDSSTDIFTIRAGMGSEYRDCHDLPKSRDVNDFHHAKDAYLAVVIAQFIRRRHPKLEQKFTYGDYIKFKSKLLNSHDKHSFIIRAMDYDFTDEATGEVIWQRKTAYDVINRTMKYNDCLVTRKVEIGDNQFYDQTIYGKNSGKTMIARKIGLPVDKYGGYSGEKDAYCTAIHYINRGNPVYKIIGIPVQVYMQDKIKPGSISNYIQNKYKQATVLIPKIPLNQKIKYDGNEQFIVSSSEVTNAKQLKLPYDIEYAVAVALKLGDIPQVRVTEEQASSDDYLRYKRDRQIERKQKVIDGIEKFWDIYVDKLSDQYQQFGSIIERARLVCDKYRNLSTVDKIKLIRLALAATHANSSNANMKKDFPGLNLPSDFGRMRGKNLDPTRFTFVYESITGLHRRELNGETLRLEQDN

SEQ ID NO: 20977 - protein, 1341 aa, unidentified
  REGION 1..1341: note = Cas Enzyme sequence
MKQSYSIGLDIGTGSVGWAVINEDFSLRRHKHQNMWGANLFNEAQKAELRRSFRSSRRRFARRKRRITLLQQIFNNEICNVDPNFYLRLTESMLYIDDKSSSLDLDANILFSDHTFTDKTYREKYPTIYHLRSELFHNPEKQDTRLIYLALHHIIKYRGNFLIEGGVDGVISSFDSQNLQKFMEFIGAGDKEAKQIKSILLNQSQTRSARKSNIIQLLQPSADNKSIISEAVGAAIGLKWNAEKLFDDKSLEIKGEFSDKNYEDQRDDIAAAIGDDRYELIETLESVYQWTIFSQFIRKDSCLSDIMVEKYDAYRQDLSDLKGLFLDFLSKKEYKSFFHGDASKFDLYNKHKIDADDLYKSIKKHLGESAKDDARYQRFEKRAELGEFLSRQRIRDNGAIPHQIHQYELEKIIDNQAAHYPFLAQNRDKIISIFTFKLPYYIGPLKTGGDFAWSIKKKDGVIYPWNFNEIIDDEASAEEFIERMRNKCTYLPDKDVLPKNSLLYQEYECRNELKNVTVNGKRLSPDIQNRIIDELFTKEYSINYKKLAKYLYDNQIYDTSSLVISGTADDKSFMSSRKSYIDFTNKIGIEITPENKAAIEEVIKWITLFEDKKILSKKLQKYSDIFSKDQIDSILKLKYTGWGRLSGELLNGIAAHTRYGKMTVIEVMRQCSDNFMQIIQSDRYEFKKIIEDALLKDTTPEITYDDIKNLAASPGIKRALWRSIRIIDEIVDTIGYSPKLISIEMTRSEEEKVRTKNRYSQLEKMYKELYGKEYNKSDIKPQLENYKDCLDKKKYYLYFLQNGKSAYSGKKLDIENGLKDCEIDHILPRSLTKDDSLDNTVLVLREENQLKLDDYPISPDVQKKMLPIWMSLKNAKFMSQLKFQRLTSQKQLSDDQIYGFINRQLVETRQITKHLARMLTEKYKDSSTEVFTIRAGMSSEYRRIHDLPKCREVNDLHHAKDAYLAATLAQYVKVRYPKLDKEFIYGEYKKFKSDKKKNNREYGSFILSSMKYDFTNTNTGEIVWQGKSSCEIIDKTMKYNDCLITRKTEIGDNQFYDQTVYSKNSGKKMIARKAHLPVNRYGGYSGKKAAYFAVINYLKQSNKKESPATEIISIPTQIYTLEKTHPGSIDKYIQDNHKDAVVLLPKVPINQKIEYDGNEQFIVGSSEVTNAKQLKLPYDVEYAIAIALKRGVPRVTISEEQADEDDKLRDKRNRQIEKRNKVIDGINRFWKVYSDKLANQYQQFGEAGNNARNAAPEYDKLSIDDKIEVIKLVLVATSAGSGRVDMKGSEKNPKFPELGLPNSFGRMSGKTINPLNVTFVYESITGLHCRKINGKSLGHKR

SEQ ID NO: 20978 - protein, 1342 aa, unidentified
  REGION 1..1342: note = Cas Enzyme sequence
MKQSYSIGLDIGTGSVGWAVINEDFSLRRHKHQNMWGANLFNEAQKAELRRSFRSSRRRLARRKRRITLLQQIFNNEICNVDPNFYLRLTESMLYIDDKSSSLDLDANILFSDHTFTDKTYREKYPTIYHLRSELFHNPEKQDIRLIYLALHHIIKYRGNFLIEGGVDGVISSFDSQNLQKFMEFIGAGDKEAKQIKSIFLNQSQTRSARKSSIIQLLQPSTDSKNIISEAVGAAIGLKWNAEKLFDDKSLEIKGEFSDKNYEDQRDDIAAAIGDDRYELIETLESVYQWTIFSQFIRKDSCLSDIMVEKYDAYRQDLSDLKGLFRDFLSKKEYKSFFHGDASKFDLYNRHKIDADDLYKSIKKHLGESAKDDVRYQRFEKRAELGEFLSRQRIRDNGAIPHQIHQYELEKIIDNQATHYPFLAQNRDKLISIFTFKLPYYIGPLKTGGDFAWSIKKKDGVIYPWNFNEIIDDEASAEKFIERMRNKCTYLPDKDVLPKNSLLYQEYECRNELKNVTVNGKRLSPDIQNRIIDELFTKEYSVNYKKLAKYLYDNQIYDTSSLVITGTADDKSFMSSRKSYIDFTKKIGIEITPENKAAIEEVIKWITLFEDKKILSKKLQKYSDIFSKDQIDSILKLKYTGWGRLSGELLDGITAHTRYGKMTVIEVMRQCSDNFMQIIQSDRYEFKKIIEDALLKDATPEITYDDIKNLAASPGIKRALWRSVRIIDEIVDTIGYGPKLISIEMARSEEDKVRTKNRYSQLEKMYKELYGKEYNKSDIKPQLENYKDCLDKKKYYLYFLQNGKSAYSGKKLDIENGLKDCEIDHILPRSLTKDDSLDNTVLVLREENQLKLDDYPISPDVQKKMLPIWMSLKNAKFMSQLKFQRLTSQKQLSDDQIYGFINRQLVETRQITKHLARMLTEKYKDSSTEVFTIRAGMSSEYRRIHDLPKCREVNDLHHAKDAYLAATLAQYVKVRYPKLDKEFIYGEYKKFKSDKKKNREYGSFILSSMKYDFTNTNTGEIVWQGKSSCEIIDKTMKYNDCLITKKTETGDSQFYKQTIYSKKSTDPKPTIPIKANLPTNRYGGYSGVQAAYFAVINYLKQSNKKESPATEIISIPAQIYTLEKTHPGSIDKYIRDNYKDAVVLLPKIPINQKIEYDGNEQFIVGSSEVTNAKQLKLPYDIEYAIAIALKRGIPRVTISEEQADEDDKLRDKRNRQIEKRTKVIDGINRFWKVYSDKLANQYQQFRKAGDNARNAAPEYDKLSIDDKIEVIKLVLVATSAGSGRVDMKGSEKNPKFPELGLPNSFGRMSGKTIDPLNVTFVYESITGLHCRKLNGKSLGHKR

SEQ ID NO: 20979 - protein, 1341 aa, unidentified
  REGION 1..1341: note = Cas Enzyme sequence
MKQSYSIGLDIGTGSVGWAVINEDFSLRRHKHQNMWGVNLFNEAQKAELRRSFRSSRRRLARRKRRITLLQQIFNNEICNVDPNFYLRLTESMLYIDDKSSSLDLDANILFSDHTFTDKTYREKYPTIYHLRSELFHNPEKQDIRLIYLALHHIIKYRGNFLIEGGVDGVISSFDSQNLQKFMEFIGAGDKEAKQIKSILLNQSQTRSARKSNIIQLLQPSADNKSIISEAVGATIGLKWNAEKLFDDKSLEIKGEFSDKNYEDQRDDIAAAIGDDRYELIETLESVYQWTIFSQFIRKDSCLSDIMVEKYDAYRQDLSDLKGLFLDFLSKKEYKSFFHGDASKFDLYNKHKIDADDLYKSIKKHLGESAKDDARYQRFEKRAELGEFLSRQRIRDNGAIPHQIHQYELEKIIDSQAAHYPFLAQNRDKIISIFTFKLPYYIGPLKTGGDFAWSIKKKDGVIYPWNFNEIIDDEASAEKFIERMRNKCTYLPDKDVLPKNSLLYQEYECRNELKNVTVNGKRLSPDIQNRIIDELFTKEHSINYKKLAKYLYDNQIYDTSSLVISGTADDKSFMSSRKSYIDFTNKIGIEITPENKAAIEEVIKWITLFEDKKILSKKLQKYSDIFSKDQIDSILKLKYTGWGRLSSELLDGIAAHTRYGKMTVIEVMRQCSDNFMQIIQSDRYEFKKIIEDALLKDATPEITYDGIKNLAASPGIKRALWRSIRIIDEIVDTIGYSPKLISIEMARGEEEKVRTKNRYSQLEKMYKELYGKEYNKSDIKPQLENYKDCLDKKKYYLYFLQNGKSAYSGKKLDIENGLKDCEIDHILPRSLTKDDSLDNTVLVLREENQLKLDDYPISPDVQKKMLPIWMSLKNAKFMSQLKFQRLTSQKQLSDDQIYGFINRQLIETRQTTKHLARMLTEKYKNSSTEVFTIRAGMSSEYRRIHDLPKCREVNDLHHAKDAYLAATLAQYVKVRYPKLDKEFIYGEYKKFKSDKKKNNREYGSFILSSMKYDFTNTSTGEIVWQGKSSCEIIDKTMKYNDCLITKKTEIGDNQFYDQTVYSKNSGKKMIARKAHLPVNRYGGYSGKKAAYFAVINYLKPSGKKESPVTEIVSIPAQIYTLEKTHPGSIDKYIQDNYKDAVVLLPKVPINQKIEYDGNEQFIVGSSEVTNAKQLKLPYDIEYAIAVALKRGVPRVTISEEQADEDDKLRDKRNRQIEKRNKVIDGINRFWKVYSDKLANQYQQFGEAGNNARNAAPEYDKLSIDDKIEVIKLVLVATSAGSGRVDMKGSEKNPKFPELGLPNSFGRMSGKTINPLNVTFVYESITGLHCRKLNGKSLGHKR

SEQ ID NO: 20980 - protein, 1341 aa, unidentified
  REGION 1..1341: note = Cas Enzyme sequence
MKQSYSIGLDIGTGSVGWAVINEDFSLRRHKHQNMWGANLFNEAQKAELRRSFRSSRRRLARRKRRITLLQQIFNNEICNVDPNFYLRLTESMLYIDDKSSSLDLDANILFSDHTFTDKTYREKYPTIYHLRSELFHNPEKQDIRLIYLALHHIIKYRGNFLIEGGVDGVISSFDSQNLQKFMEFIGAGDKEAKQIKSILLNQSQTRSARKSNIIQLLQPSADNKNIISEAIGAAIGLKWNAEKLFDDKSLEIKGEFSDKNYEDQRDDIAAAIGDDRYELVETLESVYQWTIFSQFIRKDSCLSDIMVEKYDAYRQDLSDLKGLFRDFLSEKEYKSFFHGDTAKFEQYNAHKIDAKDLSDSIKKLLSESAKDDARYQRFEKRSELGEFLSRQRIRDNGAIPHQIHQYELEKIIDNQAAYYPFLAQNRDKIISIFTFKLPYYIGPLKTGGDFAWSIKKKDGVIYPWNFNEIIDDEASAEEFIERMRNKCTYLPDKDVLPKNSLLYQEYECRNELKNVTVNGKRLSPDIQNRIIDELFTKEYSVNYKKLAKYLYDNQIYDTSSLVISGTADDKSFMSSRKSYIDFTNKIGIEITPENKAAIEEVIKWITLFEDKKILSKKLQKYSDIFSKDQIDSILKLKYTGWGRLSSELLDGIAAHTRYGKMTVIEVMRQCSDNFMQIIQSDRYEFKKIIEDALLKDATPEITYDDIKNLAASPGIKRALWRSIRIIDEIVDTIGYGPKLISIEMARSEEDKIRTKNRYSQLEKMYKELYGKEYNKSDIKPQLENYKDCLDKKKYYLYFLQNGKSAYSGKKLDLENGLKDCEIDHILPRSLTKDDSLDNTVLVLREENQLKLDDYPISPDVQKKMLPIWMSLKNAKFMSQLKFQRLTSQKQLSDDQIYGFINRQLVETRQITKHLARMLTEKYKDSSTEVFTIRAGMSSEYRRIHDLPKCREVNDLHHAKDAYLAATLAQYVKVRYPKLDKEFIYGEYKKFKSDKKKNNREYGSFILSSMKYDFTDTNTGEIVWQGKSSCEIIDKTMKYNDCLITRKTEIGDNQFYDQTVYSKNSGKKMIARKAHLPVNRYGGYSGKKAAYFAVINYLKQSNKKESPATEIISIPTQIYTLEKTHPGSIDKYIQDNYKDAVVLLPKVPINQKIEHDGNEQFIVGSSEVTNAKQLKLPYDIEYAIAIALKRGVPRVTISEEQADEDDKLRDKRNRQIEKRNKVINGINRFWKVYSDKLANQYQQFGEAGNNARNAAPEYDKLSIDDKIEVVKLVLVATSAGSGRVDMKGSEKNPKFPELGLPNSFGRMSGKTINPLNITFVYESITGLHRRKLNGKSLGHKR

SEQ ID NO: 20981 - protein, 1335 aa, unidentified
  REGION 1..1335: note = Cas Enzyme sequence
MKQSYSIGLDIGTGSVGWAVINEDFSLRRHKHQNMWGANLFNEAQKAELRRSFRSSRRRLARRKRRITLLQQIFNNEICNVDPNFYLRLTESMLYIDDKSSSLDLDANILFSDHTFTDKTYREKYPTIYHLRSELFHNPEKQDIRLIYLALHHIIKYRGNFLIEGGVDGVISSFDSQNLQKFMEFIGAGDKEAKQIKSIFLNQSQTRSARKSSIIQLLQPSADSKNIISEAVGAAIGLKWNAEKLFDDKSLEIKGEFSDKNYEDQRDDIAAAIGDDRYELIETLESVYQWTIFSQFIRKDSCLSDIMVEKYDAYRQDLSDLKGLFRDFLSKKEYKSFFHGDASKFDLYNRHKIDADDLYKSIKKHLGESAKDDARYQRFEKRAELGEFLSRQRIRDNGAIPHQIHQYELEKIIDNQATHYPFLAQNRDKIISIFTFKLPYYIGPLKTGGDFAWSIKKKDGVIYPWNFNEIIDDEASAEEFIGRMRNKCTYLPDKDVLPKNSLLYQEYECRNELKNVTVNGKRLSPDIQNRIIDELFTKEYSVNYKKLAKYLYDNQIYDTSSLVITGTADDKSFMSSRKSYIDFTKKIGIEITPENKAAIEEVIKWITLFEDKKILSKKLQKYNDIFSKDQIDSILKLKYTGWGRLSSELLDGIAAHTRYGKMTVIEVMRQCSDNFMQIIQSDRYEFKKIIEDALLKDATPEITYDDIKNLAASPGIKRALWRSVRIIDEIVDTIGYGPKLISIEMARGEEEKVRTKNRYSQLEKMYKELYGKEYNKSDIKPQLENYKDCLDKKKYYLYFLQNGKSAYSGKKLDIENGLKDCEIDHILPRSLTKDDSLDNTVLVLREENQLKLDDYPISPDVQKKMLPIWMSLKNAKFMSQLKFQRLTSQKQLSDDQIYGFINRQLVETRQITKHLARMLTEKYKDSSTEVFTIRAGMSSEYRRIHDLPKCREVNDLHHAKDAYLAATLAQYVKVRYPKLDKEFIYGEYKKFKSDKKKNNREYGSFILSSMKYDFTNTNTGEIVWQGKSSCEIIDKTMKYNDCLITKKTEIGDNQFYDQTVYSKNSGKKMIARKAHLPVNRYGGYSGKKAAYFAVINYLKQSNKKESPATEIISIPTQIYTLEKTHPGSIDKYIQDNYKDAVVLLSKVPINQKIEYDGNEQFIVGGSEVTNAKQLKLPYNIEYAIAIALKRGVPRVTISEEQADEDDKLRDKRNRQIEKRAKVIDGINRFWKVYSNKLANQYQQFGKAGDNARNAAPEYDKLSIDDKIKAIKLALRATRAGSERADMQTNFPELKLPNGFGRMQETLDPAKLTFVYESITGLHRRKLDGKSLGHKR

SEQ ID NO: 20982 - protein, 1342 aa, unidentified
  REGION 1..1342: note = Cas Enzyme sequence
MKQSYSIGLDIGTGSVGWAVINEDFSLRRHKHQNMWGANLFNEAQKAELRRSFRSSRRRLARRKRRITLLQQIFNNEICNVDPNFYLRLTESMLYIDDKSSSLDLDANILFSDHTFTDKTYREKYPTIYHLRSELFHNPEKQDIRLIYLALHHIIKYRGNFLIEGGVDGVISSFDSQNLQKFMEFIGAGDKEAKQIKSIFLNQSQTRSARKSSIIQLLQPSTDSKNIISEAVGAAIGLKWNAEKLFDDKSLEIKGEFSDKNYEDQRDDIAAAIGDDRYELIETLESVYQWTIFSQFIRKDSCLSDIMVEKYDAYRQDLSDLKGLFRDFLSKKEYKSFFHGDASKFDLYNRHKIDADDLYKSIKKHLGESAKDDVRYQRFEKRAELGEFLSRQRIRDNGAIPHQIHQYELEKIIDNQATHYPFLAQNRDKLISIFTFKLPYYIGPLKTGGDFAWSIKKKDGVIYPWNFNEIIDDEASAEKFIERMRNKCTYLPDKDVLPKNSLLYQEYECRNELKNVTVNGKRLSPDIQNRIIDELFTKEYSVNYKKLAKYLYDNQIYDTSSLVITGTADDKSFMSSRKSYIDFTKKIGIEITPENKAAIEEVIKWITLFEDKKILSKKLQKYSDIFSKDQIDSILKLKYTGWGRLSGELLDGITAHTRYGKMTVIEVMRQCSDNFMQIIQSDRYEFKKIIEDALLKDATPEITYDDIKNLAASPGIKRALWRSVRIIDEIVDTIGYGPKLISIEMARSEEDKVRTKNRYSQLEKMYKELYGKEYNKSDIKPQLENYKDCLDKKKYYLYFLQNGKSAYSGKKLDIENGLKDCEIDHILPRSLTKDDSLDNTVLVLREENQLKLDDYPISPDVQKKMLPIWMSLKNAKFMSQLKFQRLTSQKQLSDDQIYGFINRQLVETRQITKHLARMLTEKYKDSSTEVFTIRAGMSSEYRRIHDLPKCREVNDLHHAKDAYLAATLAQYVKVRYPKLDKEFIYGEYKKFKSDKKKNREYGSFILSSMKYDFTNTNTGEIVWQGKSSCEIIDKTMKYNDCLITKKTETGDSQFYKQTIYSKKSTDPKPTIPIKANLPTNRYGGYSGVQAAYFAVINYLKQSNKKESPATEIISIPAQIYTLEKTHPGSIDKYIRDNYKDAVVLLPKIPINQKIEYDGNEQFIVGSSEVTNAKQLKLPYDIEYAIAIALKRGIPRVTISEEQADEDDKLRDKRNRQIEKRTKVIDGINRFWKVYSDKLANQYQQFRKAGDNARNAAPEYDKLSIDDKIEVIKLVLVATSAGSGRVDMKGSEKNPKFPELGLPNSFGRMSGKAIDPLNVTFVYESITGLHCRKLNGKSLGHKR

SEQ ID NO: 20983 - protein, 1336 aa, unidentified
  REGION 1..1336: note = Cas Enzyme sequence
MKQLYSIGLDIGTGSVGWAVINEDFSLRIHKHQNMWGANLFNEAQKAELRRSFRSSRRRLARRKRRITLLQQIFNNEICNVDPNFYLRLTESMLYIDDKSSSLDLDANILFSDHTFTDKTYREKYPTIYHLRSELFHNPEKQDIRLIYLALHHIIKYRGNFLIEGGVDGVISSFDSQNLQKFMEFIGAGDKEAKQIKSILLNQSQTRSARKSNIIQLLQPSADNKSIISEAVGAAIGLKWNAEKLFDDKSLEIKGEFSDKNYEDQRDDIAAAIGDDRYELIETLESVYQWTIFSQFIRKDSCLSDIMIEKYDAYRQDLSDLKGLFRDFLSEKEYKSFFHGDASKFDLYNKHKIDTDDLYKSIKKHLGESAKDDVRYQRFEKRAELGEFLSRQRIRDNGAIPHQIHQYELEKIIDNQAAHYSFLAQNRDKIISIFTFKLPYYIGPLKTGGDFAWSIKKKDGVIYPWNFNEIIDDEASAEEFIERMRNKCTYLPDKDVLPKNSLLYQEYECRNELKNVTVNGKRLSPDIQNRIIDELFTKEYSVNYKKLAKYLYDNQIYDTSSLVISGTADDKSFMSSRKSYIDFTNKIGIEITPENKAAIEEVIKWITLFEDKKILSKKLQKYSDIFSKDQIDSILKLKYTGWGRLSSELLDGIAAHTRYGKMTVIEVMRQCSDNFMQIIQSDRYEFKKIIEDALLKDATPEITYDDIKNLAASPGIKRALWRSIRITDEIVDTIGYGPKLISIEMARSEEDKVRTKNRYSQLEKMYKELYGKEYNKSDIKPQLENYKDCLDKKKYYLYFLQNGKSAYSGKKLDIENGLKDCEIDHILPRSLTKDDSLDNTVLVLREENQLKLDDYPISPDVQKKMLPIWMSLKNAKFMSQLKFQRLTSQKQLSDDQIYGFINRQLVETRQITKHLARMLTEKYKNSSTEVFTIRAGMSSEYRRIHDLPKCREVNDLHHAKDAYLAATLAQYVKVRYPKLDKEFIYGEYKKFKSDKKKNNREYGSFILSSMKYDFTNTNTGEIVWQSKSSCEIINKTMKYNDCLITRKTEIGDNQFYDQTVYGKNSGKKMIARKAHLPVNRYGGYSGRKAAYFAVINYLKQSNKKESPATEIISIPTQIYTLEKTHPGSIDKYIQDNYKDAVVLLSKVPINQKIEYDGNEQFIVGGSEVTNAKQLKLPYDVEYAIAIALKRGVPRVTISEEQADEDDKLRDKRNRQIEKRNKVIDGINRFWKVYSDKLANQYQQFGEAGNNARNAAPEYDKLSIDDKIRAIGMVLKATHAGSSRVNMSKEFPQLKLSSRFGRMDNKTLDPTKLTFVYESITGLHRRKLNGKSLGHKR

SEQ ID NO: 20984 - protein, 1335 aa, unidentified
  REGION 1..1335: note = Cas Enzyme sequence
MKQSYSIGLDIGTGSVGWAVINEDFSLRRHKHQNMWGANLFNEAQKAELRRSFRSSRRRLARRKRRITLLQQLFNNEICNVDPNFYLRLTESMLYIDDKSSSLDLDANILFSDHTFTDKTYREKYPTIYHLRSELFHNPEKQDIRLIYLALHHIIKYRGNFLIEGGVDGVISSFDSQNLQKFMEFIGAGDKEAKQIKSILLNQSQTRSARKSNIIQLLQPSADNKSIISEAVGAAIGLKWNAEKLFDDKPLEIKGEFSDKNYEDQRDDIAMAIGDDRYELIETLESVYQWTIFSQFIRKDSCLSDIMVEKYNAYRQDLSDLKGLFRDFLSKKEYKSFFHGDASKFDLYNNHKIDTDDLYKSIKKHLGESAKDDVRYQRFEKRAELGEFLSRQRIRDNGAIPHQIHQYELEKIIDNQAAHYPFLAQNRDKIISIFTFKLPYYIGPLKTGGDFAWSIKKKDGVIYPWNFNEIIDDEASAEKFIERMRNKCTYLPDKDVPPKNSLLYQEYECRNELKNVTVNGKRLSPDIQNRIIDELFTKEYSINYKKLAKYLYDNQIYNTSSLVISGTADDKSFMSSRKSHIDFTKKIGIEITQENKAAIEEIIKWITLFEDKKILAKKLQKYSDIFSKDQIDSILKLKYTGWGRLSSELLDGIAAHTRYGKMTVIEVMRQCSDNFMQIIQSDRYEFKKIIEDALLKDTNPEITYDDIKNLAASPGIKRALWRSIRIIDEIVDTIGYGPKLISIEMARSEEDKVRTKKRYSQLEKMYKELYGREYNKSDIKPQLENYKDCLDKKKYYLYFLQNGKSAYSGKKLDIENGLKDCEIDHILPRSLTKDDSLDNTVLVLREENQLKLDDYPISPDVQKKMLPIWMSLKNAKFMSQLKFQRLTSQKQLSDDQIYGFINRQLVETRQITKHLARMLTEKYKDSSTEVFTIRAGMSSEYRRIHDLPKCREVNDLHHAKDAYLAATLAQYVKVRYPKLDKEFIYGEYKKFKSDKKNNREYGSFILSSMKYDFTNTNTGEIVWQGKSSCEIIDKTMKYNDCLITRKTEIGDNQFYDQTVYSKNSGKKMIARKAHLPVNRYGGYSGKKAAYFAVINYLKPSGKKESPVTEIVSIPAQIYTLEKTHPGSIDKYIQDNYKDAVVLLPKVPINQKIEYDGNEQFIVGGSEVTNAKQLKLPYDIEYAIAIALKRGIPRVTISEEQADEDDKLRDKRNRQIEKRDKVTDGINRFWKVYSDKLANQYQQFKKAGDNARNAAPEYDKLSIDDKIRAIGMVLKATHAGSSRVNMSKEFPQLKLSSRFGRMDSETLDPAKLTFVYESITGLHRRKLNGKSLGHKR

SEQ ID NO: 20985 - protein, 1335 aa, unidentified
  REGION 1..1335: note = Cas Enzyme sequence
MKQSYSIGLDIGTGSVGWAVINEDFSLRRHKHQNMWGANLFNEAQKAELRRSFRSSRRRLARRKRRITLLQQLFNNEICNVDPNFYLRLTESMLYIDDKSSSLDLDANILFSDHTFTDKTYREKYPTIYHLRSELFHNPEKQDIRLIYLALHHIIKYRGNFLIEGGVDGVISSFDSQNLQKFMEFIGAGDKEAKQIKSILLNQSQTRSARKSNIIQLLQPSADNKSIISEAVGAAIGLKWNAEKLFDDKSLEIKGEFSDKNYEDQRDDIAAAIGDDRYELIETLESVYQWTIFSQFIRKDSCLSDIMIKKYDAYRQDLSDLKGLFRDFLSKKEYKSFFHGDASKFDLYNNHKIDTDDLYKSIKKHLGESAKDDVRYQRFEKRAELGEFLSRQRIRDNGAIPHQIHQYELEKIIDNQAAHYPFLAQNRDKIISIFTFKLPYYIGPLKTGGDFAWSIKKKDGVIYPWNFNEIIDDEASAEKFIERMRNKCTYLPDKDVPPKNSLLYQEYECRNELKNVTVNGKRLSPDIQNRIIDELFTKEYSITYKKLAKYLYDNQIYDTSSLVISGTADDKSFMSSRKSYIDFTKKIGIEITPENKTAIEEVIKWITLFEDKKILSKKLQKYSDIFSKDQIDSILKLKYTGWGRLSSELLDGIAAHTRYGKMTVIEVMRQCSDNFMQIIQSDRYEFKKIIEDALLKDTNPEITYDDIKNLAASPGIKRALWRSIRIIDEIVDTIGYGPKLISIEMARSEEDKVRTKKRYSQLEKMYKELYGREYNKSDIKPQLENYKDCLDKKKYYLYFLQNGKSAYSGKKLDIENGLKDCEIDHILPRSLTKDDSLDNTVLVLREENQLKLDDYPISPDVQKKMLPIWMSLKNAKFMSQLKFQRLTSQKQLSDDQIYGFINRQLVETRQITKHLARMLTEKYKNSSTEVFTIRAGMSSEYRRIHDLPKCREVNDLHHAKDAYLAATLAQYVKVRYPKLDKEFIYGEYKKFKSDKKNNREYGSFILSSMKYDFTNTNTGEIVWQGKSSCEIIDKTMKYNDCLITRKTEIGDNQFYDQTVYSKNSGKKMIARKAHLPVNRYGGYSGKKAAYFAVINYLKQSNKKESPATEIISIPTQIYTLEKTHPGSIDKYIQNNYKDAVVLLSKVPINQKIEYDGNEQFIVGSSEVTNAKQLKLPYDIEYAIAIALKRGVPRVTISEEQADQDDKLRDKRNRQIEKRDKVIDGINRFWKVYSDKLANQYQQFKKAGDNARNAAPEYDKLSIDDKIRAIGMVLKATHAGSSRVNMSKEFPQLKLSSRFGRMDSETLDPAKLTFVYESITGLHRRKLNGKSLGHKR

SEQ ID NO: 20986 - protein, 1342 aa, unidentified
  REGION 1..1342: note = Cas Enzyme sequence
MKQSYSIGLDIGTGSVGWAVINEDFSLRRHKHQNMWGANLFNEAQKAELRRSFRSSRRRLARRKRRITLLQQIFNNEICNVDPNFYLRLTESMLYIDDKSSSLDLDANILFSDHTFTDKTYREKYPTIYHLRSELFHNPEKQDIRLIYLALHHIIKYRGNFLIEGGVDGVISSFDSQNLQKFMEFIGAGDKEAKQIKSILLDQSQTRKSRKSSIIQLLQPSADNKSIISEAVGAAIGLKWNAEKLFDDKSLEIKGEFSDKNYEDQRDDIAAAIGDDRYELIETLESVYQWTIFSQFIRKDSCLSDIMIEKYDAYRQDLSDLKGLFRDFLPEKEYKSFFHGDASKFDLYNKHKIDADDLYKSIKKHLGESAKDDVRYQRFEKRAELGEFLSRQRIRDNGAIPHQIHQYELEKIIDNQATHYPFLAQNRDKLISIFTFKLPYYIGPLKTGGDFAWSIKKKDGVIYPWNFNEIIDDEASAEKFIERMRNKCTYLPDKDVLPKNSLLYQEYECRNELKNVTVNGKRLSPDIQNRIIDELFTKEYSVNYKKLAKYLYDNQIYDTSSLVITGTADDKSFMSSRKSYIDFTKKIGIEITPENKAAIEEVIKWITLFEDKKILSKKLQKYSDIFSKDQIDSILKLKYTGWGRLSGELLDGITAHTRYGKMTVIEVMRQCSDNFMQIIQSDRYEFKKIIEDALLKDATPEITYDDIKNLAASPGIKRALWRSVRIIDEIVDTIGYGPKLISIEMARSEEDKVRTKNRYSQLEKMYKELYGKEYNKSDIKPQLENYKDCLDKKKYYLYFLQNGKSAYSGKKLDIENGLKDCEIDHILPRSLTKDDSLDNTVLVLREENQLKLDDYPISPDVQKKMLPIWMSLKNAKFMSQLKFQRLTSQKQLSDDQIYGFINRQLVETRQITKHLARMLTEKYKDSSTEVFTIRTGMSSEYRRIHDLPKCREVNDLHHAKDAYLAATLAQYVKVRYPKLDKEFIYGEYKKFKSDKKKNREYGSFILSSMKYDFTNTNTGEIVWQGKSSCEIIDKTMKYNDCLITKKTETGDSQFYKQTIYSKKSTDPKPTIPIKANLPTNRYGGYSGVQAAYFAVINYLKQSNKKESPATEIISIPAQIYTLEKTHPGSIDKYIRDNYKDAVVLLPKIPINQKIEYDGNEQFIVGSSEVTNAKQLKLPYDIEYAIAIALKRGVPRVTISEEQADEDDKLRDKRNRQIEKRNKVINGINRFWKVYSDKLANQYQQFGEAGNNARNAAPEYDKLSIDDKIEVVKLVLVATSAGSGRVDMKGSEKNPKFPELGLPNSFGRMSGKTINPLNITFVYESITGLHRRKLNGKSLGHKR

SEQ ID NO: 20987 - protein, 1340 aa, unidentified
  REGION 1..1340: note = Cas Enzyme sequence
MKQPYSIGLDIGTNSVGWAVINEGFDLRKYKHQNMWGAHLFDEAQKAAIRRSFRSSRRRLARRKRRITLLQQLFDDEIQKIDPHFYLRLSESMLHLGDKNSALELDANILFADHSFTDKSYREKYPTIYHLRSDLFHNSKKQDIRLVYLALHHIIKYRGNFLVEGGVDNVISSFDNQNLQKFMDFIGADESMAKKVKAILLDRSLSRSVRKSDIIKLLRPTPDNKKVVSEAIGAVIGLKWNANKLFEDDSLEAKGEFSNKNYEEQRDEIAAAIGDDRYELVETLESVYQWTIFSQFIRKDSCLSDIMVEKYDDYRQDLSDLKSLFHEFLPKESYKSFFHGDTAEFEQYNKHKYSLEDLYKSIKNHLGNVAKEDPRYQRLEKRAELGEFLARQRIRDNGAIPHQIHQYELERIIDNQAQHYPFLAQNHDKIISIFTFKLPYYIGPLKTGGDFAWSVKKKDGVIYPWNFDEMIDDEASAEKFIDRMRNNCTYLPDEEVLPKNSLLYQEYEVRNELKNVTVNGKRLSSDIQNRIVDELFNKEPSVTHKKLIKYLYDNQIYNTTSLVISGTAKEKSFASSRKSYIDFTQKVGTPITPKNQQAIEEIIKWITLFEDKKILAKKLQKYSDIFNENQLRTILKLNYSGWGRLSCKLLDGITAHTRYGEMTVIETMRRCSDNFMQIIQSDQYEFKKIIDDILSLDQRTEITYDDIKNLAGSPGIKRALWRSVRIIDEIVDTIGYEPKLISIEMARNEDEKVRTKSRYNQLEKMYKDLYGKEYNKSDIKSQLADHKDKLDRKKYYLYFLQNGKCAYTGDPLDIENDLKDCEIDHILPRSLTKDDSLDNTVLVLRKENQRKLDDYPIVPDIQNRMRPIWTSLKNTKLMSQLKFQRLTSQKQLSEDRIAGFVNRQLVETRQITKHLARMLTEKYHDSSTEVFTIRAGMSSEYRRIHDLPKCREVNDLHHAKDAYLAAVLAQYVKIRYPKLDKTFIYGEYNKFKSTKRNITDSGSFILSSMKYDFTNTETGEIIWQSETTRDVIDRTMRYNDCLITRKTKIGDDQFYDQTIYGKSSGKTMIARKANLPVGKYGGYSGEKAAYFAAINYLKQVRNKNVSVNEIISIPVQIYTLSKTKPDAIDEYIRKNYKQATILLPKIPINQKIEYEGNEQFIVGSSEVTNAKQLKLPYDIEYAVAIALKQRIPHVTITEEQAANDNELQNKRNKQIEKRDKVIDGIEKFWGIYAEKLANQYQQFGNAGNSARNTLAEYTKLSLDDKIKVIGLVLRATHAGSDRVDMKGNEKKPVFPELGLPNSFGRMAGKSLDPTTLTFVYESITGLHCRKLDGKLLEQDQ

SEQ ID NO: 20988 - protein, 1334 aa, unidentified
  REGION 1..1334: note = Cas Enzyme sequence
MKQPYSIGLDIGTNSVGWAVINEDFSLCKYKHQNMWGANLFDKADDAATRRSFRSSRRRLARRKRRITLLQQIFDDEIQKVDPHFYLRLSESMLHLGDKNSALELDANILFADHSFTDKSYREKYPTIYHLRSSLFHDSEKQDIRLVYLALHHIIKYRGNFLIEGGVGNVISSFDSQNLQIFMEFIGADGSTAQKIKAILLDRSLSRSARKSDIINLLQPSSDKKRAVSEAVGAAIGLKWNANKLFEDDSLEAKGEFSNKNYEEQRDEIATAIGDDRYELVETLESVYQWTVFSQFIRKDSCLSDIMIEKYDAYRQDLSDLKALFHEFLPQKYKTFFHGDAAEFELYNNHKRNLDDLYKSIKKQLGEVAKDDPRYQRFEKQAELEEFLSRQRIRDNGAIPHQIHQYELERIIDNQAQYYPFLAQNRDKIISIFTFKLPYYIGPLKTGGDFAWSVKKKDGVIYPWNFDEMIDNEASAEQFIDRMRNHCTYLPDEEVLPKNSLLYQEYEVRNELKNMTVNGERLSSDIQNRIVDELFTKESSVTYKKFIKYLYDNQIYNTDSLVISGTAKDKSFTSSRKSYIDFTQKVGVSITPKNQRAIEEIIKWITLFEDKKILAKKLQKYSDIFDDNQLRAILKLNYSGWGRLSCELLDGITAHTPYGELTVIETMRSSKDNFMQIIQSDRYEFKKIIDDILSADQRTDIAYDDIKKLAGSPGVKRALWRSVRIVDEIVDTIGYEPKLISIEMARNEDEKVRTKSRYGQLEKMYKDLYGKEYTKSDIKSQLAKYKDKLDKKKYYLYFLQNGKCAYTGDPLDIENDLKDCEIDHILPRSLTKDDSLDNTVLVLRKENQRKLDDYPIAPDIQNHMRPIWTSLKNAKLMSQLKFQRLTSQKQLSEDRVAGFVNRQLVETRQITKHLARMLTEKYHDSSTEVFTIRAGMSSEYRRIHDLPKCREVNDLHHAKDAYLAAVLAQYVKIRYPKLDNAFIYGEYMKFKSKEQTDTDRSSFILASMNYDFTNTNTGKIIWQSKTTHDVIDRTMKYNDCLITKKTEIGDNQFYDQTIYGKNSGATMITRKANLPVDKYGGYSGRKAAYFMAIRYLKQVRNKDVFVNEIISVPTQIYTLEKTKPGSINEHLHNNYKQATVLLSKIPINQKIEYDGNEQFIVGSKEVTNAKQLKLPYDVEYAVAVALKQGIPQITITEEQAADDNKLQRKRNRQIERRDRVISGIERFWEIYTDKLTNQYQQFGSVVEKAKVTNNEYRAMPVEYKIKAIGLVLTATHAGSGRVDMKKSFPKLGLPDDFGRMKGKKLDPAKLTFVYESITGLHRRKLDGKTLEQGR

SEQ ID NO: 20989 - protein, 1342 aa, unidentified
  REGION 1..1342: note = Cas Enzyme sequence
MKQPYSVGLDIGTNSVGWAVINEGFDLRKYKHQNMWGAHLFDEAQKAATRRSFRSSRRRLARRKRRITLLQQLFDDEIQKIDPHFYLRLSESMLHLGDKNSALELDANILFADHSFTDKSYREKYPTIYHLRSDLFHNSKKQDIRLVYLALHHIIKYRGNFLVEGGVDNVISSFDNQNLQKFMDFIGADESMAKKVKAILLDRSLSRSVRKSDIIKLLRPTPDNKKVVSEAIGAVIGLKWNANKLFDDDSLEAKGEFSNKNYEEQRDEIAAVIGDDRYEIVETLESVYQWTIFSQFIRKDSCLSDIMVEKYDGYRQDLSDLKSLFREFLNENNYKSFFHGKKSSFELYNTHKKYLSENNNKITPLYKDIENILKNIAKDDPRYQRFEKRAELGEFLARQHIRDNGAIPHQIHQYELERIIDNQAQHYPFLAQNRAKIISIFTFKLPYYIGPLKTGGNFAWSVKKKDGVIYPWNFDEIIDDEASAEKFIDRMRNNCTYLPDEEVLPKNSLLYQEYEVRNELKNVTVNGERLSPDIQNRIVDELFAKEPSVTYKKLIKYLYDNQIFSTDSLVISGTAKEKSFASSRKSYIDFTQKVGVSITPKNQQAIEEVIKWITLFEDKKILTKKLQKYSDIFNENQLRTILKLSYSGWGRLSHKLLDGITAHTRYGEITVIETMRRCSDNFMQIIQSDQYEFKKIIDDILSLDQRTEITYDDIKNLAGSPGIKRALWRSVRIIDEIVDTIGYEPKLISIEMARNEDEKVRTSSRYSQLEKMYKDLYGKEYNESDIKSQLADYKDKLDRKKYYLYFLQNGKCAYTGEPLDIENDLKNCEIDHILPRSLTKDDSLDNTVLVLRKENQRKLDDYPIAPDVQKRMRPTWILLKRAKLISDVKFQRLTDPNQLPDDKISNFIKRQLVETRQITKHLARMLTEKYHDSSTEVFTIRAGMNSEYRRTHDLPKCREINDLHHAKDAYLAAVLAQYVKIRYPKLDKAFIYGEYMKFKSKKQTDADRSSFILTSMNYDFTDTDTGEIIWQGKTTHDVIDRTMHYNDCLITRKTEIGDNQFYDQTIYGKNSGKTMIARKADLPVDKYGGYSGRKPAYFMAINYLKQVRNKDISINEIISIPVQIYTLEKTKPGSIDEYIRNNYKQATILLPKIPINQKIEYESNEQFIVGSSEVTNAKQLKLPYDIEYAVAVALKRGIPRVTISEEQTKEDDNLRDKRAKQIEKRDKVISEIERFWEVYTDKLSSQYQQFGSAVEKAKAANSEYQAMSVEDKIKAIRLVLVATHAGSGRVDMKKNFLKLGLPDGFGRMKDKNLDPTKLTFVYESITGLHRRKLDGKSLRQGQ

SEQ ID NO: 20990 - protein, 1339 aa, unidentified
  REGION 1..1339: note = Cas Enzyme sequence
MKQSYSIGLDIGTNSVGWAVINESFDLRKYKHQNMWGAHLFDEAQKAATRRSFRSSRRRLARRKRRVTLIQQIFNDEIQKIDPHFYLRLSESMLHIGDKNSALELDANILFADHSFTDKSYREKYPTIYHLRSDLFHNSAKQDIRLVYLALHHIIKYRGNFLVEGGVDNVISSFDSQNLQTFMDFISADESVAKKVKAILLNRSLSRSTRKSAIIELLQPSPDNKKTISEAVGAVIGLKWNANKLFEDDSLEAKGEFSNKNYEEQRDEIATAIGDDRYGLVETLESVYQWTIFSQFIRKDSCLSDIMIEKYDAYRQDLSDLKALFHEFIPQKYKTFFHGDAAEFELYNNHKRNLNDLYKSIKKQLGEVAKDDPRYQRFEKRAELEEFLSRQRIRDNGAIPHQIHQYELERIIYNQAQYYPLLAQNRDKIISIFTFKLPYYIGPLKTGGNFAWSVKKKDGVIYPWNFDEIIDDEASAERFIDRMRNNCTYLPDEEVLPKNSLLYQEYEVRNELKNVTVNGERLSPDIQNRIVDELFTKESSVTYKKLIKYLYDNQIYNTDSLIISGTAKEKSFASSRKSYIDFTQKVGVAITPKNQQAIEEVIKWITLFEDKKILAKKLQKHSGIFNENQLRTILKLNYSGWGRLSRKLLDGITAHTPYGELTVIETMRRCSDNFMQIIQSDQYEFKKIIDDILSVNQRADITYDDIKNLAGSPGIKRALWRSVRIVDEIVDTIGYEPKLISIEMARNEDEKVRTKSRYSQLEKMYKELYGKEYTKSDIKSQLANYKDKLDRKKYYLYFLQNGKCAYTGDPLDIENDLRDSEIDHILPRSLTKDDSLDNTVLVLRKENQRKLDDYPIAPDIQNHMRPIWTSLKNAKLMSQLKFQRLTSQKQLSEDRVAGFVNRQLVETRQITKHLARMLTEKYHDSATEVFTIRAGMSSEYRRIHDLPKCREVNDLHHAKDAYLAAVLAQYIKIRYPKLDKAFVYGEYMKFKSKKQTNMDRSSFILASMSYDLTNKETGEIIWQSKITHDVIDRTMKYNDCLITKKNEIGDNQFYDQTIYGKNSGATMITRKANLPVDKYGGYSGRKAAYFMAIRYLKQVRNKDVFVNEIISVPTQIYTLEKTKPGSINEYIRNNYKQAKVLISKIPINQKIEHEGNEQFIVGSSEVTNAKQLKLPYNIEYAVAVALKQGIPRITITEEQATSDDELQNKRNKQIERRNKVINGVEKFWGIYAEKLANQYQQFGNAGPNAQSALAEYSELSLDDKIKVIGLVLRATHAGSDRVDMKGSENKPVFPELGLPNSFGRMAGKSLDPTKLTFVYESITGLHRRKLDGKSLGRDR

SEQ ID NO: 20991 - protein, 1335 aa, unidentified
  REGION 1..1335: note = Cas Enzyme sequence
MKQPYSIGLDIGTNSVGWAVINESFDLRKYKHQNMWGAHLFDEAQKAATRRSFRSSRRRLARRKRRVTLLQQIFNNEIQKVDPHFYLRLSESMLHLGDKNSALELDANILFADRSFTDKSYREKYPTIYHLRSDLFHNSAKQDIRLVYLAFHHIIKYRGNFLVEGGVDNVISSFDNQNLQKFMDFIDADESMARKVKAILLDRSLSRSVRKSDIIKLLQPTPDNKRIVSEAVGAAIGLKWNANKLFEDDSLEAKGEFSNKNYEERRDEIAAAIGDDRYELVETLESVYQWTIFSQFIRKDSCLSDIMVEKYDDYRQDLSDLKSLFHEFLPKESYKSFFHGDTAEFEQYNKHKYSLEDLYKSIKNHLGNVAKEDPRYQRFEKRAELGEFLARQRIRDNGAIPHQIHQYELERIIDNQAQHYPFLAQNRNKIISIFTFKLPYYIGPLKTGGNFAWSVKKKDGVIYPWNFDEMIDDEASAEKFIDRMRNNCTYLPDEEVLPKNSLLYQEYEVRNELKNVTVNGKRLSSDIQNRIVDELFNKEPSVTHKKLIKYLYDNQIYNTTSLVISGTAKEKSFASSRKSYIDFTQKVGTPITPKNQQAIEEIIKWITLFEDKKILAKKLQKYSDIFNENQLRTILKLNYSGWGRLSCKLLDGITAHTRYGEMTVIETMRRCSDNFMQIIQSDQYEFKKIIDDILSLDQRTEITYDDIKNLAGSPGIKRALWRSVKIIDEIVDIIGYEPKLISIEMARNEDEKVRTKSRYSQLEKMYKDLYGKEYNKSDIKSQLADHKDKLDRKKYYLYFLQNGKCAYTGDPLDIENDLKDCEIDHILPRSLTKDDSLDNTVLVLCKENQRKLDDYPIVPDIQNRMRPIWTSLKNAKLMSQLKFQRLTSQKQLSEDRIAGFVNRQLVETRQITKHLARMLTEKYHDSSTEVFTIRAGMSSEYRRIHDLPKCRKVNDLHHAKDAYLAAVLAQYVKIRYPKLDKTFIYGEYNKFKSTKRNITDSGSFILSSMKYDFTNTETGEIIWQSKTTRDVIDRTMRYNDCLITRKTKIGDDQFYDQTIYGKSSGKTMIARKANLPVGKYGGYSGEKAAYFAAINYLKQVRNKNVSVNEIISIPVQIYTLSKTKPDAIDEYIRKNYKQATILLPKIPINQKIEYEDNEQFIVGSSEVTNAKQLKLPYDIEYAVAIALKQGIPHITISEEQDKEDDNLRDKRAKQIEKRNKVTSGIERFWEVCTEKLSSQYQQFGGAVEKAKAANSEYQVMPMEDKIKAIDLVLAATHAGSGRVDMKKSFPKLQLPSDFGRMIGKNLDPTKITFIYESITGLHRRKLDGKSLRQGQ

SEQ ID NO: 20992 - protein, 1334 aa, unidentified
  REGION 1..1334: note = Cas Enzyme sequence
MKQPYSIGLDIGTNSVGWAVINEGFDLRKYKHQNMWGAHLFDEAQKAATRRSFRSSRRRLARRKRRITLLQQIFDNEMQKVDPHFYLRLSESMLHSCDKNSALELNANILFADRSFTDKSYREKYPTIYHLRSDLFHSSAKQDIRLVYLALHHLIKYRGNFLVEGGVDNVISSFDNQNLEKFIDFIGADESMAKKVKAILLDRSLSRSARKSDIINLLQPSPDNKRAVSEAVGAAIGLKWNANKLFEDDSLEVKEEFSNKNYEEQRDEIAAAIGDDRYELVETLESVYQWTIFSQFIRKDSCLSDIMVEKYDDYRQDLSDLKALFHEFLPQKYKTFFHGDAAEFELYNNHKRNLDDLYKSIKKQLGEVAKDDPRYQRFEKRAELGEFLARQRIRDNGAIPHQIHQYELERIIDNQAQYYPFLAQNRDKIISIFTFKLPYYIGPLKTGGDFAWSVKKKDGVIYPWNFDEIIDDEASAEKFIDRMRNNCTYLPDEEVLPKNSLLYQEYEVRNELKNVTVNGERLSSDVQNRTVDELFTKEPSVTYKKLIKYLYDNQIYNTDSLIISGTAKEKSFASSRKSYIDFTQKVGVSITPKNQQAIEEIIKWITLFEDKKILAKKLQKYSDIFDDNQLRAILKLNYSGWGRLSHKLLDGITAHTPYGELTVIETMRSSKDNFMQIIQSDRYEFKKIIDDILSANQHTEITYDDIKNLAGSPGIKRALWRSVRIIDEIVDTIGYEPKLISIEMARNEDEKVRTKSRYSQLEKMYKELYGKEYTKSDIKSQLADYKDKLDRKKYYLYFLQNGKCAYTGEPLDIENDLRDSEIDHILPRSLTKDDSLDNTVLVLRKENQRKLDDYPIASDVQNHMRPIWISLKNTKLMSQLKFQRLTNQKQLSEDRVAGFVNRQLVETRQITKHLARMLTEKYHNSSTEVFTIRAGMSSEYRRIHDLPKCREINDLHHAKDAYLAAVLAQYVKIRYPKLDNAFIYGEYMKFKSKRQTDTDRSSFILASMNYDLTNTETGEIIWQSKTTRDVIDRTMKYNDCLITKKTEIGDNQFYDQTIYGKNSGATMIARKANLPVDKYGGYSGRKAAYFTAINYLKQVRNKDVSVNEIVSVPAQIYTLEKTRSDSINEYISNNYKQATVLLPKIPINQKIEYDGNEQFVVGSSEVTNAKQLKLPYDIEYAVAIALKRRIPRVTISEEQAKEDDNLRDKRAKQIEKRDKVISGIERFWEVYTDKLSSQYQQFGNAVEKAKAASSKYQAMSVDDKIKVIGLVLVATHAGSGRVDMKKNFPKLQLPSDFGRMIGKNLDPTKLTFVYESITGLHRRKLDGKTLEQGR

SEQ ID NO: 20993 - protein, 1334 aa, unidentified
  REGION 1..1334: note = Cas Enzyme sequence
MKQPYSIGLDIGTNSVGWAVINEGFDLRKYKHQNMWGAHLFDEAQKAATRRSFRSSRRRLARRKRRITLLQQIFNDEIQKVDPHFYLRLSESMLHVGDKSSTLELDANILFTDHSFTDKSYREKYPTIYHLRSSLFHNSEKQDIRLVYLALHHIIKYRGNFLIEGGVDNVISSFDSQSLQTFMEFIGADDSTAQKIKATLLDRSLSRSARKSDIINLLQPSPDNKRAVSEAVGAAIGLKWNANKLFEDDSLEVKGEFSNKNYEEQRDEIATAIGDDRYELIETLESVYQWTVFSQFIRKDSCLSDIMIEKYDAYRQDLSDLKALFHESLPKKYKTFFHGDAAEFELYNNHKRNLDDLYKSIKKQLGEIAKDNPRYQRFEKRAELEEFLSRQRIRDNGAIPHQIHQYELEKIIDNQAQYYPLLAQNRNKIISIFTFKLPYYIGPLKTGGNFAWSVKKKDGVIYPWNFDEMIDDEASAEKFIDRMRNNCTYLPDEEVLPKNSLLYQEYEVRNELKNVTVNGERLSSDVQNRIVDELFTKEPSVTYKKLIKYLYDNQIYNTDSLIISGTAKEKSFASSRKSYLDFTNKIGIEITPKTQKAIEEVIKWITLFEDKKILAKKLQKYSDIFDNNQLRAILKLNYSGWGRLSHKLLNGITAHTPYGELTVIETMRSSKDNFMQIIQSDRYEFKKIIDDILSADQRTDIAYDDIKKLAGSPGIKRALWRSVRIIDEIVDTIGYEPKLISIEMARNEDEKVRTKSRYGQLEKMYKDLYGNAYTKSDIKSQLAEYKDRLDKKKYYLYFLQNGKCAYTGEPLDIENDLRDSEIDHILPRSLTKDDSLDNTVLVLRKENQRKLDDYPIAPDIQNHMRSIWTSLKNAKLMSQLKFQRLTSQKQLSEDRVAGFVNRQLVETRQITKHLARMLTEKYHDSATEVFTIRAGMSSEYRRIHDLPKCREVNDLHHAKDAYLAAVLAQYIKIRYPKLDKAFVYGEYMKFKSKKQTDTDRSSFILASMNYDFTDTNTGEIIWQSKTARNVIDRTMKYNDCLITKKTEIGDNQFYDQTIYGKNSGKTMIARKANLPVGKYGGYSGEKAAYFAAINYLKQVRNKDVSVNEIVSVPAQIYTLEKTRSDSINKYISNNYKQATVLLPKIPINQKIEYEGNEQFIVGSSEVTNAKQLKLPYDIEYAVAIALKRGIPRVTISEEQAKEDDNLRDKRAKQIKKRDKVISGIERFWKVYTDKLSSQYQQFGSAVEKAKAASSKYQAMSVDDKIKVIGLVLVATHAGSGRVDMKKNFPKLQLPSDFGRMIGKNLDPTKLTFVYESITGLHRRKLDGKTLEQGR

SEQ ID NO: 20994 - protein, 1342 aa, unidentified
  REGION 1..1342: note = Cas Enzyme sequence
MKQPYSIGLDIGTNGVGWAVINEGFDLRKYKHQNMWGAHLFDEAQKAATRRSFRSSRRRLARRKRRITLLQQIFDNEMQKVDPHFYLRLSESMLHVGDKNSTLELDANILFADRSFTDKSYREKYPTIYHLRSSLFHDSKKQDIRLVYLALHHLIKYRGNFLIEGGVDNVISSFDNQSLQAFMEFIGADDSMVQKIKAILLDRSLSRSARKSDIINLLQPSSDNKRAVSEAVGAAIGLKWNANKLFEDDSLEAKGEFSNKNYEEQRDEIAAAIGDDRYEIVEALESVYQWTIFSQFIRKDSCLSDIMVEKYDDYRQDLSDLKSLFREFLNENDYKSFFHGKKSSFELYNTHKKYLSENNNKITPLYKDIENILNNIAKDDPRYQRFEKRAELGEFLARQRIRDNGAIPHQIHQYELERIIDNQARYYPFLAQNRDKIISIFTFKLPYYIGPLKTGGDFAWSVKKKDGVIYPWNFDEMIDDEASAEQFINRMRNHCTYLPDEEVLPKNSLLYQEYEVRNELKSVTVNGERLSPDIQNRIVDELFTKELSVTYKKFIKYLYDNQIYNTDSLIISGTAKEKSFASSRKSYIDFMQKVGVSITPKNQQAIEEVIKWITLFEDKKILAKKLQKHSDIFNENQLRTILKLNYSGWGRLSRKLLDGITAHTPYGELTVIETMRSSKDNFMQIIQSNRYEFKKIIDDILSADQRTDIAYDDIKKLAGSPGIKRALWRSVRIIDEIVDTIGYEPKLISIEMARNEDEKVRTKSRYSQLEKMYKELYGKEYTKSDIKSQLADYKDKLDRKKYYLYFLQNGKCAYTGEPLDIENGLRDSEIDHILPRSLTKDDSLDNTVLVLRKENQRKLDDYPISPDIQNHMRPIWISLKNAKLMSQIKFQRLASQKQLSEDRVAGFVNRQLVETRQITKHLARMLTEKYHNSSTEVFTIRAGMSSEYRRIHDLPKCREVNDLHHAKDAYLAAVLAQYIKVRYPRLDKAFIYGEYMKFKSKKQTDADRSSFILSSMKYDFTNTETGEIIWQGKTAQDVIDRTMRYNDCLITRKTKIGDDQFYDQTIYGKSSGKTMIARKANLPVGKYGGYSGEKAAYFAAINYLKQVRNKDVSVNEIVSIPAQIYTLEKTRSDSINEYISNNYKQATVLLSKIPINQKIEYEGNEQFIVGSSEVTNAKQLKLPYDIEYAVAIALRQGIPRITISEEQAEKDNNLRNKRAKQIEKRDKVISGIERFWEVYTDKLSSQYQQFGNAVEKAKAANSNYQAMSVEDKIKVIRLVLMATHAGSGRVDMKKNFPKLQLPSDFGRMIGKNLDPTKLTFVYESITGLHRRKLDGKSLGQDQ

SEQ ID NO: 20995 - protein, 1106 aa, unidentified
  REGION 1..1106: note = Cas Enzyme sequence
MKCIATFDIGIASVGWAVIDKETEKVIESAYNIFPEATAAGNQIRRDMRQAKRLKRREKNRLKDFKKIWRKYGLLIPTVSRTDIVELKVKALHEKISLEELYLILYNYLKHRGISYLEDAEDDSVMGSSSYANGLKLNAKELEKKFPCEIQQYRLEAIGKYRGQTQSIDADGNKIDISNVFTISAYRKEIQQVFETQKMFHNELTEDLCDEYLLIFNRKRKYYEGPGNEKSRTDYGKYTTNLNEDGTYITEKNIFEKLIGKCSVYPEELRAAMASYTAQEFNLLNDLNNLTINGRKLDEKEKRDIVEKVKTSDSVNMRKIIADAIGEKIVEFYGARVDKSEKEIFHKFESYNKMRRALATVNVDIAKFSREELDEIGYILTINTDKEAMLEAFKYSDLNLEDTVRDCLIEIRKKSGSLFNKWHSFSLKIMNELIPEMYMQPKEQMTLLTEMGVMKGRKNEFVGLKYIPVDEASEEIFNPVVRRSVRITFKILNALLKKYKTFEEVVIEMPRDRNSDDEKKRISESQKVNEKEGKYIENKLISEYGIRLLPSDYASHKKLGLKLKLWNEQDGKSIYSGKTIPPQDLIDHPEYFEIDHIIPRSISFDDSRSNKVLVYKTENQDKGNQTPYYYLTHLNGTWTFEQYKAYVINLSKKKEYAISRKKVQNLLFCNDITKIDVVKGFINRNINDTCYASRVVLNTIQSFFDANEMKTKVKVIKGSYTHQMRVNMKLDKNRNESYTHHAVDAMLIGFSQLGYEAYRKLQGSFIDFETGEILDPAMWEKQMTDEVYVEYLYGKRWSNIRNEIIKAEKNVRYWYYVDHKSNRGLCNQTIRGTREYEGKTYKINKFDIRSKDGVKIFKKFALSEKESDREKLLVYRNDRKTFDDLVKIAKDYSDAANPFVQYEKETGDYVRKYAKKHNGPRIDKLKYIDGEVGACIDISHKYGYERESKKVVLENLVPYRMDVYYNATKELYYLVGVKQSDIKCEKGEYMIDEEAYIKTLIKERMLSLGQKIGDLQGLGFEFKLSFYRNDIIEYEKDGEIFRERFSSRTMPKARNYIETKPIDRAKFEKTDRKLVGLGKTKMIRKYRMDILGNCYLCENEEFSKKC

SEQ ID NO: 20996 - protein, 1104 aa, unidentified
  REGION 1..1104: note = Cas Enzyme sequence
MKYILALDIGIASVGWAVLDKESETVIEAGSNIFPEASAADNQLRRDMRGAKRNNRRLKTRINDFIKLWENNNLSIPQFKSTEIVGLKVRAITEEITLDELYLILYSYLKHRGISYLEDALDDTVSGSSAYANGLKLNAKELETHYPCEIQQERLNTIGKYRGQSQIINENGEVLDLSNVFTIGAYRKEIQRVFEIQKKYHPELTDEFCDGYMLIFNRKRKYYEGPGNEKSRTDYGRFTTKLDANGNYITEDNIFEKLIGKCSVYPDELRAAAASYTAQEYNVLNDLNNLTINGRKLEENEKHEIVERIKSSNTINMRKIISDCMGENIDDFAGARIDKSGKEIFHKFEVYNKMRKALLEIGIDISNYSREELDEIGYIMTINTDKEAMMEAFQKSWIDLSDDVKQCLINMRKTNGALFNKWQSFSLKIMNELIPEMYAQPKEQMTLLTEMGVTKGTQEEFAGLKYIPVDVVSEDIFNPVVRRSVRISFKILNAVLKKYKALDTIVIEMPRDRNSEEQKKRINDSQKLNEKEMEYIEKKLAVTYGIKLSPSDFSSQKQLSLKLKLWNEQDGICLYSGKTIDPNDIINNPQLFEIDHIIPRSISFDDARSNKVLVYRSENQKKGNQTPYYYLTHSHSEWSFEQYKATVMNLSKKKEYAISRKKIQNLLYSEDITKMDVLKGFINRNINDTSYASRLVLNTIQNFFMANDADTKVKVIKGSYTHQMRCNLKLDKNRDESYSHHAVDAMLIGYSELGYEAYHKLQGEFIDFETGEILRKDMWDENMSDEVYADYLYGKKWANIRNEVVKAEKNVKYWHYVMRKSNRGLCNQTIRGTREYDGKQYKINKLDIRTKEGIKVFTKLAFSKKDSDRERLLVYLNDRRTFDDLCKIYEDYSDAANPFVQYEKETGDIVRKYSKKHNGPRIDKLKYKDGEVGTCIDISHKYGFEKGSKKVILESLVPYRMDVYYKEENHSYYLIGVKQSDIKFEKGRNVIDEEAYARILVNEKMIQPGQSRADLENLGFKFKLSFYKNDIIEYEKDGKIYTERLVSRTMPKQRNYIETKPIDKAKFEKQNLVGLGKTKFIKKYRYDILGNKYSCSEEKFTSFC

SEQ ID NO: 20997 - protein, 1114 aa, unidentified
  REGION 1..1114: note = Cas Enzyme sequence
VNYTEKEKLFMKYILALDIGIASVGWAVLDKESETVIEAGSNIFPEASAADNQLRRDMRGAKRNNRRLKTRINDFIKLWENNNLSIPQFKSTEIVGLKVRAITEEITLDELYLILYSYLKHRGISYLEDALDDTVSGSSAYANGLKLNAKELETHYPCEIQQERLNTIGKYRGQSQIINEDGEVLDLSNVFTIDAYRKEIQKVFEIQKKYHSELTDEFCDGYMLIFNRKRKYYEGPGNEKSRTDYGRFTTKLDADGNYITEDNIFEKLIGKCSVYPDELRAAAASYTAQEYNVLNDLNNLTINGRKLEENEKHEIVERIKSSNTINMRKIISDCMGENIDDFAGARIDKSGKEIFHKFEVYNKMRKALLEIGIDISNYSREELDEIGYIMTINTDKEAMMEAFQKSWIDLSDDVKQCLINMRKTNGALFNKWQSFSLKIMNELIPEMYAQPKEQMTLLTEMGVTKGTQEEFAGLKYIPVDVVSEDIFNPVVRRSIRISFKIFNAVLKKYKALDTIVIEMPRDRNSEEQKKRINDSQKLNEKEMEYIEKKLAVTYGIKLSLSDFSSQKQLSLKLKLWNEQDGICLYSGKTIDPNDIINNPQLFEIDHIIPRSISFDDARSNKVLVYRSENQKKGNQTPYYYLTHSHSEWSFEQYKATVMNLSKKKEYAISRKKIQNLLYSEDITKMDVLKGFINRNINDTSYASRLVLNTIQNFFMANDADTKVKVIKGSYTHQMRCNLKLDKNRDESYSHHAVDAMLIGYSELGYEAYHKLQGEFIDFETGEILRKDMWDENMSDEVYADYLYGKKWANIRNEVVKAEKNVKYWHYVMRKSNRGLCNQTIRGTREYDGKQYKINKLDIRTKEGIKVFAKLAFSKKDSDRERLLVYLNDRRTFDDLCKIYEDYSDAANPFVQYEKETGDIVRKYSKKHNGPRIDKLKYKDGEVGACIDISHKYGFEKGSKKVILESLVPYRMDVYYKEENHSYYLVGVKQSDIKFEKGRNVIDEEAYARILVNEKMIQPGQSRADLENLGFKFKLSFYKNDIIEYEKDGKIYTERLVSRTMPKKRNYIETKPIDKAKFEKQNLVGLGKTKFIKKYRYDILGNKHSCSEEKFTSFC

SEQ ID NO: 20998 - protein, 1107 aa, unidentified
  REGION 1..1107: note = Cas Enzyme sequence
MKYILALDIGIASVGWAVLDKESETVIEAGSNIFPEASAADNQLRRDMRGAKRNNRRLKTRINDFIKLWEKNNLSIPQFKSTEIVGLKVHAITEEITLDELYLILYSYLKHRGISYLEDALDDTVSGSSAYANGLKLNAKELETHYPCEIQQERLNTIGKYRGQSQIINDNGEVLDLSNVFTIGAYRKEIQRVFEIQKKYHPELTDEFCDGYMLIFNRKRKYYEGPGNEKSRTDYGRFTTKLDANGNYITEDNIFEKLIGKCSVYPDELRAAAASYTAQEYNLLNDLNNLTINGRKLEENEKHEIVDCIKNSNTINMRKIISDCMGENIDDFAGARIDKSGKEIFHKFEVYNKMRKALLEIGIDISNYSREELDEIGYIMTINTDKEAMMEAFQKSWIDLSDDVKQCLINMRKTNGALFNKWQSFSLKIMNELIPEMYAQPKEQMTLLTEMGVTKGTQEEFAGLKYIPVDVVSEDIFNPVVRRSVRISFKILNAVLKKYKAIDTIVIEMPRDRNSEEQKKRINDSQKLNEKEMEYIEKKLAVTYGIKLSPSDFSSQKQLSLKLKLWNEQDGICLYSGKTIDPNDIINNPQLFEIDHIIPRSISFDDARSNKVLVYRSENQKKGNQTPYYYLTHSHSEWSFEQYKATVMNLSKKKEYAISRKKIQNLLYSEDITKMDVLKGFINRNINDTSYASRLVLNTIQNFFMANDADTKVKVIKGSYTHQMRCNLKLDKNRDESYSHHAVDAMLIGYSELGYEAYHKLQGEFIDFETGEILRKDMWDENMSDEVYADYLYGKKWANIRNEVVKAEKNVKYWHYVMRKSNRGLCNQTIRGTREYDGKQYKINKLDIRTKEGIKVFAKLAFSKKDSDRERLLVYLNDRRTFDDLCKIYEDYSDAANPFVQYEKETGDIVRKYSKKHNGPRIDKLKYKDGEVGSCIDISHKYGFEKGSKKVILESLVPYRMDVYYKEENHSYYLVGVKQSDIKFEKGRNVIDEEAYARILVNEKMIQPGQSRTDLENLGFKFKLSFYKNDIIEYEKDGKIYTERLVSRTKNQRNYIETKPIDRDKHENSKDGRKIIGLSKTKLVKKVRIDILGNKYSCSEEKFTNFC

SEQ ID NO: 20999 - protein, 1104 aa, unidentified
  REGION 1..1104: note = Cas Enzyme sequence
MKYILALDIGIASVGWAVLDKESETVIEAGSNIFPEASAADNQLRRDMRGAKRNNRRLKTRINDFIKLWEKNNLSIPQFKSTEIVGLKVRAITEEITLDELYLILYSYLKHRGISYLEDALDDTVSGSSAYDNGLKLNAKELETHYPCEIQQERLNTIGKYRGQSHIINENGEVLDLSNVFTIGAYRKEIQRVFEIQKKYHPELTDEFCDGYMLIFNRKRKYYEGPGNEKSRTDYGIFTTQLDANGDYIKKANIFEKLIGKCSVYPDELRAAAASYTAQEYNLLNDLNNLTINGRKLEENEKHKIVERIKNSNTINMRKIISDCMGENIDDFNGARIDESIFHKFEVYNKMRKALLKIGIDITDYSREELDKIGYIMTINTDKEALMEAFQESSIGLPEEVKQCLINMRKTNGALFNKWQSFSLKIMNKLIPEMYAQPKEQMTLLTEMGVTKGTREEFAGLKYIPVDVVSEDIFNPVVRRSVRISFKIFNAVLKKYKALDTIVIEMPRDRNLEEQKKRIKDSQKLNEKEMEYIEKKLAVTYGIKLSPSDFSSQKQLSLKLKLWNEQDGICLYSGKTIDPNDIINNHQLFEIDHIIPRSISFDDARSNKVLVYRSENQKKGNQTPYYYLNHSHGEWSFEQYKATVMNLSKKKEYAISRKKIQNLLYSDDITKMDVLKGFINRNINDTSYASRLVLNTIQNFFIANKADTKVKVIKGSYTHQMRCNLKLDKNRDESYSHHAVDAMLIGYSELGYEAYHKLQGEFIDFETGEILRKDMWDENMSDEVYADYLYGKKWANIRNEVVKAEKNVKYWHYVMRKSNRGLCNQTIRGTREYDGKQYKINKLDIRTKEGINVFSKLAFSKKDSDRERLLVYLNDRRTFDDLCKIYEDYSDAANPFVQYEKETGDIVRKYSKKHNGPRIDKLKYKDGQVGSCIDISHKYGFEKGSKKVILESLVPYRMDVYYKEENHSYYLVGVKQSDIKFEKGRNVIDEEAYARILVNEKMIQPGQSRTDLENLGFKFKLSFYKNDIIEYEKDGKIYTERLVSRTKNQRNYIETKPIDRDKHENSKDGRKIIGLSKTKLVKKVRIDILGNKYSCSEEKFTNFC

SEQ ID NO: 21000 - protein, 1104 aa, unidentified
  REGION 1..1104: note = Cas Enzyme sequence
MKYILALDIGIASVGWAVLDKESETVIEAGSNIFPEASAADNQLRRDMRGAKRNNRRLKTRINDFIKLWEKNNLSIPQFKSTEIVGLKVHAITEEITLDELYLILYSYLKHRGISYLEDALDDTVSGSSAYANGLKLNAKELETHYPCEIQQERLNTIGKYRGQSQIINDNGEVLDLSNVFTIGAYRKEIQRVFEIQKKYHPELTDEFCDGYMLIFNRKRKYYEGPGNEKSRTDYGRFTTKLDANGNYITEDNIFEKLIGKCSVYPDELRAAAASYTAQEYNVLNDLNNLTINGRKLEENEKHEIVERIKSSNTINMRKIISDCMGENIDDFAGARIDKSGKEIFHKFEVYNKMRKALLEIGIDISNYSREELDEIGYIMTINTDKEAMMEAFQKSWIDLSDDVKQCLINMRKTNGALFNKWQSFSLKIMNELIPEMYAQPKEQMTLLTEMGVTKGTQEEFAGLKYIPVDVVSEDIFNPVVRRSVRISFKILNAVLKKYKALDTIVIEMPRDRNSEEQKKRINDSQKLNEKEMEYIEKKLAVTYGIKLSPSDFSSQKQLSLKLKLWNEQDGICLYSGKTIDPNDIINNPQLFEIDHIIPRSISFDDARSNKVLVYRSENQKKGNQTPYYYLTHSHSEWSFEQYKATVMNLSKKKEYAISRKKIQNLLYSEDITKMDVLKGFINRNINDTSYASRLVLNTIQNFFMANDADTKVKVIKGSYTHQMRSNLKLDKNRDESYSHHAVDAMLIGYSELGYEAYHKLQGEFIDFETGEILRKDMWDENMSDDVYADYLYGKKWANIRNEVVKAEKNVKYWHYVMRKSNRGLCNQTIRGTREYDGKQYKINKLDIRTKEGIKVFAKLAFSKKDSDRERLLVYLNDRRTFDDLCKIYEDYSDAANPFVQYEKETGDIVRKYSKNHNGPRIDKLKYKDGEVGACIDISHKYGFEKGSKKVILESLVPYRMDVYYKEENHSYYLVGVKQSDIKFEKGRNVIDEEAYARILVNEKMIQPGQSRTDLENLGFKFKLSFYKNDIIEYEKDGKIYTERLVSRTMPKQRNYIETKPIDKAKFEKQNLVGLGKTKFIKKYRYDILGNKYSCSEEKFTSFC

SEQ ID NO: 21001 - protein, 1104 aa, unidentified
  REGION 1..1104: note = Cas Enzyme sequence
MKYILALDIGIASVGWAVLDKESETVIEAGSNIFPEASAADNQLRRDMRGAKRNNRRLKTRINDFIKLWEKNNLSIPQFKSTEIVGLKVHAITEEITLDELYLILYSYLKHRGISYLEDALDDTVSGSNAYANGLKLNAKELETHYPCEIQQERLNTIGKYRGQSQIINENGEVLDLSNVFTIGAYRKEIQRVFEIQKKYHPELTDEFCDGYMLIFNRKRKYYEGPGNEKSRTDYGRFTTKLDANGNYITEDNIFEKLIGKCSVYPDELRAAAASYTAQEYNVLNDLNNLTINGRKLEENEKHEIVERIKSSNTINMRKIISDCMGENIDDFAGARIDKSGKEIFHKFEVYNKMRKALLEIGIDISSYSREELDEIGYIMTINTDKEAMMEAFQKSWIDLSDDVKQCLINMRKTNGALFNKWQSFSLKIMNELIPEMYAQPKEQMTLLTEMGVTKGTQEEFAGLKYIPVDVVSEDIFNPVVRRSVRISFKILNAVLKKYKALDTIVIEMPRDRNSEEQKKRINDGQKLNEKEMEYIEKKLAVTYGIKLLPSDFSSQKQLSLKLKLWNEQDGICLYSGKTIDPNDIINNPQLFEIDHIIPRSISFDDARSNKVLVYRSENQKKGNQTPYYYLTHSHSEWSFEQYKATVMNLSKKKEYAISRKKIQNLLYSEDITKMDVLKGFINRNINDTSYASRLVLNTIQNFFMANDADTKVKVIKGSYTHQMRSNLKLDKNRDESYSHHAVDAMLIGYSELGYEAYHKLQGEFIDFETGEILRKDMWDENMSDDVYADYLYGKKWANIRNEVVKAEKNVKYWHYVMRKSNRGLCNQTIRGTREYDGKQYKINKLDIRTKEGIKVFAKLAFSKKDSDRERLLVYLNDRRTFDDLCKIYEDYSDAANPFVQYEKETGDIVRKYSKKHNGPRIDKLKYKDGEVGACIDISHKYGFEKGSKKVILESLVPYRMDVYYKEENHSYYLVGVKQSDIKFERGRNVIDEEAYARILVNEKMIQPGQSRADLENLGFKFKLSFYKNDIIEYEKDGKIYTERLVSRTMPKKRNYIETKPIDKAKFEKQNLVGLGKTKFIKKYRYDILGNKHSCSEEKFTSFC

SEQ ID NO: 21002 - protein, 1101 aa, unidentified
  REGION 1..1101: note = Cas Enzyme sequence
MKYILALDIGIASVGWAVLDKESETVIEAGSNIFPEASAADNQLRRDMRGAKRNNRRLKTRINDFIKLWENNNLSIPQFKSTEIVGLKVRAITEEITLDELYLILYSYLKHRGISYLEDALDDTVSGSSAYANGLKLNAKELETHYPCEIQQERLNTIGKYRGQSQIINENGEVLDLSNVFTIGAYRKEIQRVFEIQKKYHPELTDEFCDGYMLIFNRKRKYYEGPGNEKSRTDYGIFTTQLDANGDYIKKANIFEKLIGKCSVYPDELRAAAASYTAQEYNLLNDLNNLTINGRKLEENEKHEIVERIKNSNTINMRKIISDCMGENIDDFNGARIDESIFHKFEVYNKMRKALLKIGIDITDYSREELDKIGYIMTINTDKEALMEAFQESSIGLPEEVKQCLINMRKTNGALFNKWQSFSLKIMNKLIPEMYAQPKEQMTLLTEMGVTKGTREEFAGLKYIPVDVVSEDIFNPVVRRSVRISFKIFNAVLKKYKALDTIVIEMPRDRNLEEQKKRINDSQKLNEKEMEYIEKKLAVTYGIKLSPADFSSQKQLSLKLKLWNEQDGICLYSGKTIDPNDIINNPQLFEIDHIIPRSISFDDARSNKVLVYRSENQKKGNQTPYYYLNHSHGEWSFEQYKATVMNLSKKKEYAISRRKIQNLLYSDDITKMDVLKGFINRNINDTSYASRLVLNTIQNFFMANDADTKVKVIKGSYTHQMRCNLKLDKNRDESYSHHAVDAMLIGYSELGYEAYHKLQGEFIDFETGEILRKDMWDENMSDEVYADYLYEKKWANIRNEVVKAEKNVKYWHYVMRKSNRGLCNQTIRGTREYDGKQYKINKLDIRTKDGIKVFAKLAFSKKDSDRERLLVYLNDRRTFDDLCKIYEDYSDAANPFVQYEKDTGDIVRKYSKKHNGPRIDKLKYKDGEVGACIDISHKYGFEKGSKKVILESLVPYRMDVYYKEENHSYYLVGVKQSDIKFEKGRNVIDEEAYARILVNEKMIQPGQSRADLENLGFKFKLSFYKNDIIEYEKDGKIYTERLVSRTMPKQRNYIETKPIDKAKFEKQNLVGLGKTKFIKKYRYDILGNKYSCSEEKFTSFC

SEQ ID NO: 21003 - protein, 1362 aa, unidentified
  REGION 1..1362: note = Cas Enzyme sequence
MGNKNYYLGLDMGTSSVGWAVTDQNYQLLRKKGKDMWGIREFDEANSAADRRSHRIDRRRRQRQTARIGLLKEYFADAIMAVDENFFIRLENSKYFLEDKDQKLHSKNGIFDDDNYKDVDYYREYPTIFHLRKALLDLKGEGTVYDVRLVYLALLNMFKHRGHFLLSTENEELNTEQIDIAYQELIELVNRDYELGLECKPLEGVISIISDKETGRKRKHEAMVELFGIAKSNKKANEFLKCMCGLSVNANVILNPDAEEKVPLCFHDFSYTDKIPELMEQLGDTSYAVVEQMKIIYDYAILAGTLKGYDYLSLARVDAYEKHSQDLKCLKELYRKYKTPQEYDEMFHSNKDGTYSAYVNSLNSSDSTAESKKYRRNMKGRKAEDLYKTIQKAFKDNTEDSQVQYVFKQIEEEQFLPKQLTGANGIIPNQVHKKEMERILKNAENYLPFLKETDESKLTVSERILRLFSFQIPYYVGPLGKHSKTGWAVRSEEGSILPWNIEEKLDMKATSEKFIEHLIRSCTYISGEKVMPKASLAYERYCVLNEINNIRIDGERIETELKQRLYKECFCKGKRITRKQLCKFLEAQGAIQSAEQVTGIDITINNSLSSYGKMYAIFGEKLKEDKYRDIAEDIIYWGTIFADSRERFQSHLTKYVEQDILTESDVKRISGYKFKDWGRFSKALLELQGCDKSTGELISISQAMWENSLNFMELVNSDAFTFKEALEDKKKRAVSSLADFKYEDLEDYYFSSPVKRMVWQTILVVREIEQVMGCTPRRVFVEMTRNDEEKGDRGRKASRGNQLLEAYKNIKNTEIHNWKEEISAADSSGKLRSKKLYLYYMQMGRDMYTGEEIDLARLFDDNLYDIDHIYPRHYVKDDSIINNLVLVNKAANEHLKKDLYPIPQQIVTNPKVHELWSVLHRSKLISDEKYSRLMSRTPFTEKQMGDFIARQLVETSQGTKGVAELLKQLMSGMGTEIVYAKASNVSDFRNKNGFIKSRLVNDFHHAHDAYLNIVVGNVYYTKFTKNPWNFIQKDYARDKKKNHYNLDKMFTWDVVRGDETAWIAKTDKTEGTIATVRKVLSKNTPLMTRMNFEQHGEIANATLYSAKKAKSENYFALKTSDERMADVTKYGGYTSASIAYYFIVRHREGKKQNISIEGLPLYQKRAVEKTADGLEQYCSSKIGYENVEILCRKLKIQSLLEVNGYRMHLSGKTGNRLIMRNAMNLCISQDWVKYIKKLEKKAETDIQDKLISETANLELYDLLTEKHQSTVFARKPNPFGEKLKNGRTKFEELEVSKQCEVLHQILQLTQIGTTVANLTAIGESPNSGKILISKNMKETDNVKIICQSVTGLYEKEIQVYSL

SEQ ID NO: 21004 - protein, 1104 aa, unidentified
  REGION 1..1104: note = Cas Enzyme sequence
MKYILALDIGVASVGWAVLDKESESVLEAGSNIFPEASAAENQVRREMRQSRRIKRRQRTRLNDFNKLWEKYNFSIPQIKSNEIVDLKVKALREEISLDELYLILYSYLKHRGISYLEDAQDDSVSGTSAYANGLKVNAKALEKNYPCEIQKDRLQTVGKYRGQTQVTDDNGEIIDLSNVFTIGAYRKEIQKVLETQKGYHDKVTDEFCDEYIRIFNRKRKYYEGPGNEKSRTDYGRFTTKLDENGNHITEDNIFEKLIGKCSVYPEELRAAAASYTAQEFNLLNDLNNLTINGRKLEENEKHAIIEQVKTSNTVNMRKIIAGCMGESIEDFSGARIDKSGKELFHKFEVYNKMRKALAEIDIDINDFSREELDEIGYIMTINTDKEAMIEAFGKSWIDLTEDAMECLISLRKANGSLFGKWQSFSLKIMNELIPEMYIQPKEQMTLLTEMGVTKGTAEEFAGLNYIPVDAVSEEIFNPVVRRSVRISFKILNAVLKKYKVLDAVVIEMPRDRNSDEQKKRITDSQKMNEKEMEFIEKKLAVTYGIELSPADFSSQKQLTLKLKLWNEQDGMCLYSGKTIDPNDILNNPDLFEIDHIIPRSVSFDDARSNKVLVYRTENQKKGNQTPYFYLTHSNGTWTYEQFKATVINLSRKKEYSVSRKKVQNLLYSEDITKIEVLKGFINRNINDTSYASRVVLNTVQNFFKAKKADTKIKVIKGSYTHQMRCNMKLDKNRDESYSHHAVDAMLIGFSELGYEAYRKLQGEFIDFETGEILKRDMWDANMSDDVYADYLYGRKWANIRSEIVRAEKNVKFWYYVLRKSNRGLCNQTIRGTREYDGKQYKINKLDIRTKEGAAVFKKLALSKKESDRERLLVYLNDRKTFDHLVQICEDYRDAQNPFVQYEKETGDMVRKYARKHNGPRIDKLKYKDGEVGACIDISHKYGFEKGSRKVILESLVPYRMDVYYKEAEKSYYLVGVKQSDIKFENGVNVIDEEAYARTLLNEKMIEPGQSRMDLEERGYTFKLSFYKNDIIEYEKNGEIFRERLVSRTMPKQRNYIETKPIDRAAFEKRNLVGLSKTERIRKYRMDILGNWYPCEEEKFTKYC

SEQ ID NO: 21005 - protein, 1104 aa, unidentified
  REGION 1..1104: note = Cas Enzyme sequence
MRYIVAVDIGVASAGWAVIDKSSEMVIEAGSNIFPEASATNNQARRGMRQARRLKRRERTRLDDFKKLWEYHGLAIPQVKKNDIVGLKVKALYESISLDELYLILYSYLKHRGISYLEDVEDSSVSGSTAYANGLKLNAKELEKNFPCEIQKHRLENIGKYRGQIQIEDDQGEKLDLSNVFTIGAYTKEIQQILDTQKKYHAEIADEFCEKYLKIFTRKRKYYEGPGNEKSRTDYGKYTTRLKENGEYITEKNIFEKLIGKCSVYKDELRAASASYTAQEFNLLNDLNNLTVNGRKLEENEKHLIVDKVKTSNTINMRKIIADAMGEKIEEFYGARIDKSEKEIFHKFEVYNKMRKALAAIHVNIEEFSRDNLDEIGYILTINTDKEAMMEAFDNSRLELPGEIKNCLISLRKTNGALFSKWHSFSLKIMNELIPEMYRQPKEQMTLLTEMGVMTGQTDEFEKNKYIPVDVASEDIFNPVVRRSVRISFKILNALMKKYGTLDEVVIEMPRDRNSDEQKKWEKETQKKNEKEQEYIENKLATVYDIRLSSADFSSQKQLNLKLKLWNEQDGKCLYSGKIIEPEDLIKHSELFEIDHIIPRSISFDDSRSNKVLVYRTENQNKGNQTPYYYLTHTNSKWSFEQYKVLVMDLSKKKEYGLSKKKVRNLLYSEDITKADVLRGFINRNINDTSYAARVVLNTVQGYFRVKEMGTKVKVIRGSYTHQMRVNMKLDKDREKSYAHHAVDAMLIAFSQLGYEAYRKLQGEFIDFETGEILNSEKWKDQMSDEVYKQYLYRKKWSNIRNEITRAEKNVKYWYYVDHKSNRGLCNQKIRGTRVYDGKIYKINKLDIRTKEGAALFKKLAFSEKESDREKLLVYKNDKKTYEDLVRIMQDYSDSKNPFVQYEKETGDYVRKYAKKHNGPRIDKLKYTDGEVGSCIDISHKYGYEKGSRKVVLESLVPYRMDVYYKKEEQTYYLVGIKQSDVKCQKGEYVIDEDAYAINLVNEKMIQQGQKRSDLESLGFEFQLSFYKNDIIEYEKDGEIVRERFLSRTMPKVKNYIETKPIDRAKYEKQKLVGLGKTKRIRKYRMDILGNYYLCSREEFSKYC

SEQ ID NO: 21006 - protein, 1117 aa, unidentified
  REGION 1..1117: note = Cas Enzyme sequence
LEEDLITRRKNMQYIVAIDIGVASVGYAVIDKTSETVIEAGSNIFPEASATDNQERRGMRQARRLKRRERTRLDDFTKLWEYHGLAIPQVKKNDIVGLKVKALYESISLDEVYLILYSYLKHRGISYLEDVEDSSVSGSTAYANGLKLNAKELEKNFPCEIQKYRLENIGKYRGQIQIEDDQGEKLDLSNVFTIGAYTKEIQQILDTQKKYHAEIEDEFCEKYLKIFTRKRKYYEGPGNEKSRTDYGKYTTRLKENGEYITEKNIFEKLIGKCSVYKDELRAASASYTAQEFNLLNDLNNLTVNGRKLEENEKHLIVDKVKTSNTINMRKIIADAMGEKIEEFYGARIDKSEKEIFHKFEVYNKMRKALAAIHVNIEEFSRDDLDEIGYILTINTDKEAMMEAFDNSRLELPGEIKNCLISLRKTNGTLYSKWHSFSLKIMNELIPEMYRQPKEQMTLLTEMGVMKGQTDEFEKNKYIPVDVASEDIFNPVVRRSVRISFKILNALMKKYGTLDEVVIEMPRDRNSDEQKKWEKETQKKNEKEQEYIENKLATVYDIRLSSADFSSQKQLNLKLKLWNEQDGKCLYSGKIIEPEDLIKHSELFEIDHIIPRSISFDDSRSNKVLVYRTENQNKGNQTPYYYLTHTNSKWSFEQYKALVMDLSKKKEYGLSKKKVRNLLYSEDITKADVLRGFINRNINDTSYAARVVLNTVQGYFRAKEMGTKVKVIRGSYTHQMRVNMKLDKDREKSYAHHAVDAMLIAFSQLGYEAYRKLQGEFIDFETGEILNSEKWKDQMSDEVYKQYLYRKKWSNIRNEITRAEKNVKYWYYVDHKSNRGLCNQKIRGTRVYDGKIYKINKLDIRKKEGAALFKKLAFSEKESDREKLLVYKNDKKTYEDLVRIMQDYSDSKNPFVQYEKETGDYVRKYAKKHNGPRIDKLKYIDGEVGSCIDISHKYGYEKGSRKVVLESLVPYRMDVYYKKEEQTYYLVGIKQSDVKCQKGEYVIDEDAYAINLVKEKMIQQGQKRSDLESLGFEFQLSFYKNDIIEYEKDGKIVRERFLSRTMPKVKNYIETKPIDRAKYEWHDRKLVGLGKTKRIRKYRMDILGNYYLCNKEEFSKYC

SEQ ID NO: 21007 - protein, 1104 aa, unidentified; identical to SEQ ID NO: 16707
  REGION 1..1104: note = Cas Enzyme sequence

SEQ ID NO: 21008 - protein, 1104 aa, unidentified
  REGION 1..1104: note = Cas Enzyme sequence
MQYIVALDIGVASVGFAVIDKKTETVIEAGSNIFPEASATDNQMRRGMRQARRLTRRKRTRLDDFTKLWEEYEFAIPQVQENDIVGLKVKALRESISLDELYLILYNYLKHRGISYLEDAEDVSVSGTSAYANGLKLNAKELETNYPCEIQKQRLEQVGKYRGQIQIEDAQGEKLDLSNVFTIGAYTKEIQQVLCTQKNYHSEISDEFCEDYLEIFTRKRKYYEGPGNEKSRTDYGRFTTRLDENGDYITEKNIFEKLIGKCSVYKEELRAASASYTAQEFNLLNDLNNLTINGRKLEEHEKRIIIDKVKTSNTINMRKIIADVMGEKIEEFYGARIDKSEKEIFHKMEVYNKMRKTLAEIHVNIEEFSRENLDEIGYILTINTDKEAMMEAFEHANVKLSEEIKDCLISLRKTNGALFSKWHSFSLKIMKELIPEMYQQTKEQMTLLTEMGVMRGQTDKFEKNKYIPVDAADEDIFNPVVRRAVRISFKILNALMKKYGTLEEVVIEMPRDRNSEEQKKWEKERQKKNEKELAYIEKKLAAEYNILLSPTDFSNQKQLGLKLKLWNEQDGKCLYSGKTIEPEDLIKHSELFQIDHIIPRSISFDDSRNNKVLVYGEENQKKGNQTPYYYLIHANNQWSFEQYKALVMKLSKKKEYGISKKKVQNLLYSEDITKAEVLRGFINRNINDTGYAARVVLNTVQGYFRAKEINTKVKVIRGSYTYQMRVNMKLDKNREESYAHHAVDAMLIAFSQLGYEAYRKLQGEFIDFETGEILNAEKWNAQMSDEIYEQYLYGKKWSNIRTQITKAEKQVKYWYHVDHKSNRGLCNQTIRGTRTYEGKTYKINKLDIRTKEGAALFKKLAFSEKESDREKLLVYKNDKKTYENLIQIAQEYSDSNNPFVQYEKETGDCVRKYAKNHNGPRIDKLKYTDGEVGSCIDISHKYGYEKGSQKVVLESLVPYRMDVYYKKEEQTYYLVGIKQSDVKCDNGEYVIDEDAYAINLVREKMIQPGQKRGDLEALGFEFQLSFYKNDIIEYEKDGEIVRERFLSRTMPKVKNYIETKPIDRAKYEKQKLVGLSKTKMIRKYRMDILGNYYMCSRENFSKYC

SEQ ID NO: 21009 - protein, 1104 aa, unidentified; identical to SEQ ID NO: 21008
  REGION 1..1104: note = Cas Enzyme sequence

SEQ ID NO: 21010 - protein, 985 aa, unidentified
  REGION 1..985: note = Cas Enzyme sequence
DSSVSGSTAYANGLKLNAKELEKNFPCEIQKHRLENIGKYRGQIQIEDDQGEKLDLSNVFTIGAYAKEIQQILDTQKKYHAEIADEFCEKYLKIFTRKRKYYEGPGNEKSRTDYGKYTTRLAENGEYITEKNIFEKLIGKCSVYKDELRAASASYTAQEFNLLNDLNNLTVNGRKLEENEKHLIVDKVKTSNTINMRKIIADAMGEKIEEFYGARIDKSEKEIFHKFEVYNKMRKALAAIHVNIEEFSRDDLDEIGYILTINTDKEAMMEAFDNSRLELPGEIKNCLISLRKTDGALFSKWHSFSLKIMNELIPEMYRQPKEQMTLLTEMGVMKGQTDEFEKNKYIPVDVASEDIFNPVVRRSVRISFKILNALMKKYGTLDEVVIEMPRDRNSDEQRKWEKETQKKNEKEQEYIENKLATVYDIKLSSADFSSQKQLNLKLKLWNEQDGKCLYSGKIIEPEDLIKHSELFEIDHIIPRSISFDDSRNNKVLVYRTENQNKGNQTPYYYLTHANNKWSFEQYKALVMDLSKKKEYGLSKKKVQNLLYSEDITKADVLRGFINRNINDTSYAARVVLNTVQGYFRAKEMGTKVKVIRGSYTHQMRVNMKLDKDREKSYAHHAVDAMLIAFSQLGYEAYRKLQGEFIDFETGEILNSEKWKDQMSDGIYKQYLYGKKWSNIRNEITKAEKNVKYWYYVDHKSNRGLCNQKIRGTRVYDGKIYKINKLDIRTKEGVALFKKLAFSEKESDREKLLVYKNDKKTYEDLVQIMQDYSDSKNPFVQYEKETGDYVRKYAKKHNGPRIDKLKYTDGEVGSCIDISHKYGYGKGSRKVVLESLVPYRMDVYYKKEEQTYYLVGIKQSDVKCQKGEYVIDEDAYAINLVKEKMIQQGQKRSDLESLGFEFQLSFYKNDIIEYEKDGKIVRERFLSRTMPKVKNYIETKPIDREKYEGHDRKLVGLGKTKRIRKYRMDILGNYYLCNKEEFSKYC

SEQ ID NO: 21011 - protein, 1104 aa, unidentified
  REGION 1..1104: note = Cas Enzyme sequence
MQYIVALDIGVASVGFAVIDKKTETVIEAGSNIFPEASATDNQMRRGMRQARRLKRRKRTRLDDFTKLWEEYAFAIPQVQENDIVGLKVKALRESISLDELYLILYSYLKYRGISYLEDAEDTSLSGTSAYANGLKLNAKELETNYPCEIQKQRLEQVGKYRGQIQIEDAQGEKLDLSNVFTIGAYTKEIQQVLCTQKNYHSEISDEFCEDYLEIFTRKRKYYEGPGNEKSRTDYGRFTTRLDENGDYITEKNIFEKLIGKCSVYKEELRAASASYTAQEFNLLNDLNNLTINGRKLEEHEKRIIIDKVKTSNTINMRKIIADVMGEKIEEFYGARIDKSEKEIFHKMEVYNKMRKTLAEIHVNIEEFSRENLDEIGYILTINTDKEAMMEAFEHANVKLSEEIKDCLISLRKTNGALFSKWHSFSLKIMKELIPEMYQQPKEQMTLLTEMGVMRGQTDKFEKNKYIPVDAADEDIFNPVVRRAVRISFKILNALMKKYGTLEEVVIEMPRDRNSEEQKKWEKERQKKNEKELAYIEKKLAAEYNILLSPTDFSNQKQLGLKLKLWNEQDGKCLYSGKTIEPEDLIKHSELFQIDHIIPRSISFDDSRNNKVLVYGEENQKKGNQTPYYYLIHANNQWSFEQSKALVMKLSKKKEYGISKKKVQNLLYSEDITKAEVLRGFINRNINDTGYAARVVLNTVQGYFRAKEINTKVKVIRGSYTYQMRVNMKLDKNREESYAHHAVDAMLIAFSQLGYEAYRKLQGEFIDFETGEILNAEKWNAQMSDEIYEQYLYGKKWSNIRTQITKAEKQVKYWYHVDHKSNRGLCNQTIRGTRTYEGKTYKINKLDIRTKEGAALFKKLAFSEKESDREKLLVYKNDKKTYENLIQIAQEYSDSNNPFVQYEKETGDCVRKYAKNHNGPRIDKLKYTDGEVGSCIDISHKYGYEKGSQKVVLESLVPYRMDVYYKKEEQTYYLVGIKQSDVKCDNGEYVIDEDAYAINLVREKMIQPGQKRGDLEALGFEFQLSFYKNDIIEYEKDGEIVRERFLSRTMPKVKNYIETKPIDRAKYEKQKLVGLSKTKMIRKYRMDILGNYYMCSRENFSKYC

SEQ ID NO: 21012 - protein, 1106 aa, unidentified
  REGION 1..1106: note = Cas Enzyme sequence
MQYIVALDIGVASVGYAVIDKMSETVIEAGSNIFPEASAANNQVRRGMRQARRLKRRERTRLDDFKKLWEYHGLAIPQAKENDIVGLKVKALYESISLDEVYLILYSYLKHRGISYLEDAEDSSVSGSTAYANGLKLNAKELEKNFPCEIQKHRLENIGKYRGQIQIEDDQGEKLDLSNVFTIGAYAKEIQQILDTQKKYHAEIADEFCEKYLKIFTRKRKYYEGPGNEKSRTDYGKYTTRLAENGEYITEKNIFEKLIGKCSVYKDELRAASASYTAQEFNLLNDLNNLTVNGRKLEENEKHLIVDKVKTSNTINMRKIIADAMGEKIEEFYGARIDKSEKEIFHKFEVYNKMRKALAAIHVNIEEFSRDDLDEIGYILTINTDKEAMMEAFDNSRLELPGEIKNCLISLRKTDGALFSKWHSFSLKIMNELIPEMYRQPKEQMTLLTEMGVMKGQTDEFEKNKYIPVDVASEDIFNPVVRRSVRISFKILNALMKKYGTLDEVVIEMPRDRNSDEQRKWEKETQKKNEKEQEYIENKLATVYDIKLSSADFSSQKQLNLKLKLWNEQDGKCLYSGKIIEPEDLIKHSELFEIDHIIPRSISFDDSRNNKVLVYRTENQNKGNQTPYYYLTHANNKWSFEQYKALVMDLSKKKEYGLSKKKVQNLLYSEDITKADVLRGFINRNINDTSYAARVVLNTVQGYFRAKEMGTKVKVIRGSYTHQMRVNMKLDKDREKSYAHHAVDAMLIAFSQLGYEAYRKLQGEFIDFETGEILNSEKWKDQMSDGIYKQYLYGKKWSNIRNEITKAEKNVKYWYYVDHKSNRGLCNQTIRGTRVYDGKIYKINKLDIRTKEGVALFKKLAFSEKESDREKLLVYKNDKKTYEDLVQIMQDYSDSKNPFVQYEKETGDYVRKYAKKHNGPRIDKLKYTDGEVGSCIDISHKYGYGKGSRKVVLESLVPYRMDVYYKKEEQTYYLVGIKQSDVKCQKGEYVIDEDAYAINLVKEKMIQQGQKRSDLESLGFEFQLSFYKNDIIEYEKDGKIVRERFLSRTMPKVKNYIETKPIDREKYEGHDRKLVGLGKTKRIRKYRMDILGNYYLCNKEEFSKYC

SEQ ID NO: 21013 - protein, 1104 aa, unidentified
  REGION 1..1104: note = Cas Enzyme sequence
MQYIVALDIGVASVGFAVIDKKTETVIEAGSNIFPEASATDNQMRRGMRQARRLTRRKRTRLDDFTKLWEEYEFAIPQVQENDIVGLKVRALRESISLDELYLILYNYLKHRGISYLEDAEDVSVSGTSAYANGLKLNAKELETNYPCEIQKQRLEQVGKYRGQIQIEDAQGEKLDLSNVFTIGAYTKEIQQVLCTQKNYHSEISDEFCEDYLEIFTRKRKYYEGPGNEKSRTDYGRFTTRLDENGDYITEKNIFEKLIGKCSVYKEELRAASASYTAQEFNLLNDLNNLTINGRKLEEHEKRIIIDKVKTSNTINMRKIIADVMGEKIEEFYGARIDKSEKEIFHKMEVYNKMRKALAEIHVNIEEFSRENLDEIGYILTINTDKEAMMEAFEHANVKLSEEIKDCLISLRKTNGALFSKWHSFSLKIMKELIPEMYQQPKEQMTLLTEMGVMRGQMDKFEKNKYIPVDAADEDIFNPVVRRAVRISFKILNALMKKYGTLEEVVIEMPRDQNSEEQKKWEKERQKKNEKELAYIEKKLAAEYNILLSPTDFSNQKQLGLKLKLWNEQDGKCLYSGKTIEPEDLIKHSELFQIDHIIPRSISFDDSRNNKVLVYGEENQKKGNQTPYYYLIHANNQWSFEQYKALVMKLSKKKEYGISKKKVQNLLYSEDITKAEVLRGFINRNINDTGYAARVVLNTVQGYFRAKEINTKVKVIRGSYTYQMRVNMKLDKNREESYAHHAVDAMLIAFSQLGYEAYRKLQGEFIDFETGEILNAEKWNAQMSDEIYEQYLYGKKWSNIRTQITKAEKQVKYWYHVDHKSNRGLCNQTIRGTRTYEGKTYKINKLDIRTKEGAALFKKLAFSEKESDREKLLVYKNDKKTYENLIQIAQEYSDSNNPFVQYEKGTGDCVRKYAKNHNGPRIDKLKYTDGEVGSCIDISHKYGYEKGSQKVVLESLVPYRMDVYYKKEEQTYYLVGIKQSDVKCDNGEYVIDEDAYAINLVREKMIQPGQKRGDLEALGFEFQLSFYKNDIIEYEKDGEIVRERFLSRTMPKVKNYIETKPIDRAKYEKQKLVGLSKTKMIRKYRMDILGNYYMCSRENFSKYC

SEQ ID NO: 21014 - protein, 1104 aa, unidentified
  REGION 1..1104: note = Cas Enzyme sequence
MQYIVALDIGVASVGFAVIDKKTETVIEAGSNIFPEASATDNQMRRGMRQARRLKRRKRTRLDDFTKLWEEYAFAIPQVQETDIVGLKVKALRESISLDELYLILYSYLKYRGISYLEDAEDTSLSGTSAYANGLKLNAKELETNYPCEIQKQRLEQVGKYRGQIQIEDAQGEKLDLSNVFTIGAYTKEIQQVLCTQKNYHSEISDEFCEDYLEIFTRKRKYYEGPGNEKSRTDYGRFTTRLDENGDYITEKNIFEKLIGKCSVYKEELRAASASYTAQEFNLLNDLNNLTINGRKLEEHEKRIIIDKVKTSNTINMRKIIADVMGEKIEEFYGARIDKSEKEIFHKMEVYNKMRKTLAEIHVNIEEFSRENLDEIGYILTINTDKEAMMEAFEHANVKLSEEIKDCLISLRKTNGALFSKWHSFSLKIMKELIPEMYQQPKEQMTLLTEMGVMRGQTDKFEKNKYIPVDAADEDIFNPVVRRAVRISFKILNALMKKYGTLEEVVIEMPRDRNSEEQKKWEKERQKKNEKELAYIEKKLAAEYNILLSPTDFSNQKQLGLKLKLWNEQDGKCLYSGKTIEPEDLIKHSELFQIDHIIPRSISFDDSRNNKVLVYGEENQKKGNQTPYYYLTHANNEWSFDRYKAIVMDLSKKKEYGISKKKVQNLLYSEDITKAEVLRGFINRNINDTGYAARVVLNTVQGYFRAKEINTKVKVIRGSYTYQMRVNMKLDKNREESYAHHAVDAMLIAFSQLGYEAYRKLQGEFIDFETGEILNAEKWNAQMSDEIYEQYLYGKKWSNIRTQITKAEKQVKYWYHVDHKSNRGLCNQTIRGTRTYEGKTYKINKLDIRTKEGAALFKKLAFSEKESDREKLLVYKNDKKTYENLIQIAQEYSDSNNPFVQYEKETGDCVRKYAKNHNGPRIDKLKYTDGEVGSCIDISHKYGYEKGRQKVVLESLVPYRMDVYYKKEEQTYYLVGIKQSDVKCDNGEYVIDEDAYAINLVREKMIQPGQKRGDLEALGFEFQLSFYKNDIIEYEKDGEIVRERFLSRTMPKVKNYIETKPIDRAKYEKQKLVGLSKTKMIRKYRMDILGNYYMCSRENFSKYC

SEQ ID NO: 21015 - protein, 1106 aa, unidentified
  REGION 1..1106: note = Cas Enzyme sequence
MQYIVAIDIGVASVGYAVIDKMSETVIEAGSNIFPEASAANNQVRRGMRQARRLKRRERTRLDDFKKLWEYHGLAIPQAKENDIVGLKVKALYESISLDEVYLILYSYLKHRGISYLEDAEDSSVSGSTAYANGLKLNAKELEKNFPCEIQKHRLENIGKYRGQIQIEDDQGEKLDLSNVFTIGAYAKEIQQILDTQKKYHAEIADEFCEKYLKIFTRKRKYYEGPGNEKSRTDYGKYTTRLAENGEYITEKNIFEKLIGKCSVYKDELRAASASYTAQEFNLLNDLNNLTVNGRKLEENEKHLIVDKVKTSNTINMRKIIADAMGEKIEEFYGARIDKSEKEIFHKFEVYNKMRKALAAIHVNIEEFSRDDLDEIGYILTINTDKEAMMEAFDNSRLELPGEIKNCLISLRKTDGALFSKWHSFSLKIMNELIPEMYRQPKEQMTLLTEMGVMKGQTDEFEKNKYIPVDVASEDIFNPVVRRSVRISFKILNALMKKYGTLDEVVIEMPRDRNSDEQRKWEKETQKKNEKEQEYIENKLATVYDIKLSSADFSSQKQLNLKLKLWNEQDGKCLYSGKIIEPEDLIKHSELFEIDHIIPRSISFDDSRNNKVLVYRTENQNKGNQTPYYYLTHANNKWSFEQYKALVMDLSKKKEYGLSKKKVQNLLYSEDITKADVLRGFINRNINDTSYAARVVLNTVQGYFRAKEMGTKVKVIRGSYTHQMRVNMKLDKDREKSYAHHAVDAMLIAFSQLGYEAYRKLQGEFIDFETGEILNSEKWKDQMSDGIYKQYLYGKKWSNIRNEITKAEKNVKYWYYVDHKSNRGLCNQTIRGTRVYDGKIYKINKLDIRTKEGVALFKKLAFSEKESDREKLLVYKNDKKTYEDLVQIMQDYSDSKNPFVQYEKETGDYVRKYAKKHNGPRIDKLKYTDGEVGSCIDISHKYGYGKGSRKVVLESLVPYRMDVYYKKEEQTYYLVGIKQSDVKCQKGEYVIDEDAYAINLVKEKMIQQGQKRSDLEYLGFEFQLSFYKNDIIEYEKDGKIVRERFLSRTMPKVKNYIETKPIDREKYEGHDRKLVGLGKTKRIRKYRMDILGNYYLCNKEEFSKYC

SEQ ID NO: 21016 - protein, 1106 aa, unidentified
  REGION 1..1106: note = Cas Enzyme sequence
MQYIVALDIGVASVGYAVIDKMSETVIEAGSNIFPEASAANNQVRRGMRQARRLKRRERTRLDDFKKLWEYHGLAIPQAKENDIVGLKVKALYESISLDEVYLILYSYLKHRGISYLEDAEDSSVSGSTAYANGLKLNAKELEKNFPCEIQKHRLENIGKYRGQIQIEDDQGEKLDLSNVFTIGAYAKEIQQILDTQKKYHAEIADEFCEKYLKIFTRKRKYYEGPGNEKSRTDYGKYTTRLAENGEYITEKNIFEKLIGKCSVYKDELRAASASYTAQEFNLLNDLNNLTVNGRKLEENEKHLIVDKVKASNTINMRKIIADAMGEKIEEFYGARIDKSEKEIFHKFEVYNKMRKALAAIHVNIEEFSRDDLDEIGYILTINTDKEAMMEAFDNSRLELPGEIKNCLISLRKTDGALFSKWHSFSLKIMNELIPEMYRQPKEQMTLLTEMGVMKGQTDEFEKNKYIPVDVANEDIFNLVVRRSVRISFKILNALMKKYGTLDEVVIEMPRDRNSDEQKKWEKETQKKNEKEQEYIENKLATVYDIRLSSADFSSQKQLNLKLKLWNEQDGKCLYSGKIIEPEDLIKHSELFEIDHIIPRSISFDDSRNNKVLVYRTENQGKGNQTPYYYLTHANNKWSFEQYKALVMDLSKKKEYGLSKKKVQNLLYSEDVTKADVLRGFINRNINDTSYAARVVLNTVQGYFRAKEMGTKVKVIRGSYTHQMRVNMKLDKDREKSYAHHAVDAMLIAFSQLGYEAYRKLQGEFIDFETGEILNSEKWKDQMSDGIYKEYLYGKKWSNIRNEITKAEKNVKYWYYVDHKSNRGLCNQTIRGTRVYDGKIYKINKLDIRTKEGVALFKKLAFSEKESDREKLLVYKNDKKTYEDLVQIMQDYSDSKNPFVQYEKETGDYVRKYAKKHNGPRIDKLKYTDGEVGSCIDISHKYGYEKGSRKVVLESRVPYRMDVYYKKEEQTYYLVGIKQSDVKCQKGEYVIDEDAYAINLVNEKMIQQGQKRSDLESLGFEFQLSFYKNDIIEYEKDGKIVRERFLSRTMPKVKNYIETKPIDREKYEGHDRKLVGLGKTKRIRKYRMDILGNYYLCNKEEFSKYC

SEQ ID NO: 21017 - protein, 1104 aa, unidentified
  REGION 1..1104: note = Cas Enzyme sequence
MQYIVALDIGVASVGFAVIDKKTETVIEAGSNIFPEASATDNQMRRGMRQARRLTRRKRTRLDDFTKLWEEYEFAIPQVQENDIVGLKVKALRESISLDELYLILYNYLKHRGISYLEDAEDVSVSGTSAYANGLKLNAKELETNYPCEIQKQRLEQVGKYRGQIQIEDAQGEKLDLSNVFTIGAYTKEIQQVLCTQKNYHSEISDEFCEDYLEIFTRKRKYYEGPGNEKSRTDYGRFTTRLDENGDYITEKNIFEKLIGKCSVYKEELRAASASYTAQEFNLLNDLNNLTINGRKLEEHEKRIIIDKVKTSNTINMRKIIADVMGEKIEEFYGARIDKSEKEIFHKMEVYNKMRKTLAEIHVNIEEFSRENLDEIGYILTINTDKEAMMEAFEHANVKLSEEIKDCLISLRKTNGALFSKWHSFSLKIMKELIPEMYQQPKEQMTLLTEMGVMRGQTDKFEKNKYIPVDAADEDIFNPVVRRAVRISFKILNALMKKYGTLEEVVIEMPRDQNSEEQKKWEKERQKKNEKELAYIEKKLAAEYNILLSPTDFSNQKQLGLKLKLWNEQDGKCLYSGKTIEPEDLIKHSELFQIDHIIPRSISFDDSRNNKVLVYGEENQKKGNQTPYYYLIHANNQWSFEQYKALVMKLSKKKEYGISKKKVQNLLYSEDITKAEVLRGFINRNINDTGYAARVVLNTVQGYFRAKEINTKVKVIRGSYTYQMRVNMKLDKNREESYAHHAVDAMLIAFSQLGYEAYRKLQGEFIDFETGEILNAEKWNAQMSDEIYEQYLYGKKWSNIRTQITKAEKQVKYWYHVDHKSNRGLCNQTIRGTRTYEGKTYKINKLDIRTKEGAALFKKLAFSEKESDREKLLVYKNDKKTYENLIQIAQEYSDSNNPFVQYEKETGDCVRKYAKNHNGPRIDKLKYTDGEVGSCIDISHKYGYEKGSQKVVLESLVPYRMDVYYKKEEQTYYLVGIKQSDVKCDNGEYVIDEDAYAINLVREKMIQPGQKRGDLEALGFEFQLSFYKNDIIEYEKDGEIVRERFLSRTMPKVKNYIETKPIDRAKYEKQKLVGLSKTKMIRKYRMDILGNYYMCSRENFSKYC

SEQ ID NO: 21018 - protein, 1106 aa, unidentified
  REGION 1..1106: note = Cas Enzyme sequence
MQYIVALDMGVASVGYAVIDKMSETVIEAGSNIFPEASAANNQVRRGRRQARRLKRRERTRLDDFKKLWEYHGLAIPQAKENDIVGLKVKALYESISLDEVYLILYSYLKHRGISYLEDAEDSSVSGSTAYANGLKLNAKELEKNFPCEIQKHRLENIGKYRGQIQIEDDQGEKLDLSNVFTIGAYAKEIQQILDTQKKYHAEIADEFCEKYLKIFTRKRKYYEGPGNEKSRTDYGKYTTRLAENGEYITEKNIFEKLIGKCSVYKDELRAASASYTAQEFNLLNDLNNLTVNGRKLEENEKHLIVDKVKASNTINMRKIIADAMGEKIEEFYGARIDKSEKEIFHKFEVYNKMRKALAAIHVNIEEFSRDDLDEIGYILTINTDKEAMMEAFDNSRLELPGEIKNCLISLRKTDGALFSKWHSFSLKIMNELIPEMYRQPKEQMTLLTEMGVMKGQTDEFEKNKYIPVDVASEDIFNPVVRRSVRISFKILNELMKKYGTLDEVVIEMPRDRNSDEQRKWEKETQKKNEKEQEYIENKLATVYDIKLSSADFSSQKQLNLKLKLWNEQDGKCLYSGKIIEPEDLIKHSELFEIDHIIPRSISFDDSRNNKVLVYRTENQNKGNQTPYYYLTHANNKWSFEQYKALVMDLSKKKEYGLSKKKVQNLLYSEDITKADVLRGFINRNINDTSYAARVVLNTVQGYFRAKEMGTKVKVIRGSYTHQMRVNMKLDKDREKSYAHHAVDAMLIAFSQLGYEAYRKLQGEFIDFETGEILNSEKWKDQMSDGIYKQYLYGKKWSNIRNEITKAEKNVKYWYYVDHKSNRGLCNQTIRGTRVYDGKIYKINKLDIRTKEGVALFKKLAFSEKESDREKLLVYKNDKKTYEDLVQIMQDYSDSKNPFVQYEKETGDYVRKYAKKHNGPRIDKLKYTDGEVGSCIDISHKYGYEKGSRKVVLESLVPYRMDVYYKKEEQTYYLVGIKQSDVKCQKGEYVIDEDAYAINLVKEKMIQQGQKRSDLESLGFEFQLSFYKNDIIEYEKDGKIVRERFLSRTMPKVKNYIETKPIDREKYEGHDRKLVGLGKTKRIRKYRMDILGNYYLCNKEEFSKYC

SEQ ID NO: 21019 - protein, 1106 aa, unidentified
  REGION 1..1106: note = Cas Enzyme sequence
MQYIVALDIGVASVGYAVIDKTSETVIEAGSNIFPEASATDNQERRGMRQARRLKRRERTRLDDFTKLWEYHGLAIPQVKKNDIVGLKVKALYESISLDEVYLILYSYLKHRGISYLEDVEDSSVSGSTAYANGLKLNAKELEKNFPCEIQKYRLENIGKYRGQIQIEDDQGEKLDLSNVFTIGAYTKEIQQILDTQKKYHAEIEDEFCEKYLKIFTRKRKYYEGPGNEKSRTDYGKYTTRLKENGEYITEKNIFEKLIGKCSVYKDELRAASASYTAQEFNLLNDLNNLTVNGRKLEENEKHLIVDKVKTSNTINMRKIIADAMGEKIEEFYGARIDKSEKEIFHKFEVYNKMRKALAAIHVNIEEFSRDDLDEIGYILTINTDKEAMMEAFDNSRLELPGEIKNCLISLRKTNGTLYSKWHSFSLKIMNELIPEMYRQPKEQMTLLTEMGVMKGQTDEFEKNKYIPVDVASEDIFNPVVRRSVRISFKILNALMKKYGTLDEVVIEMPRDRNSDEQKKWEKETQKKNEKEQEYIENKLATVYDIRLSSADFSSQKQLNLKLKLWNEQDGKCLYSGKIIEPEDLIKHSELFEIDHIIPRSISFDDSRSNKVLVYRTENQNKGNQTPYYYLTHTNSKWSFEQYKALVMDLSKKKEYGLSKKKVRNLLYSEDITKADVLRGFINRNINDTSYAARVVLNTVQGYFRAKEMGTKVKVIRGSYTHQMRVNMKLDKDREKSYAHHAVDAMLIAFSQLGYEAYRKLQGEFIDFETGEILNSEKWKDQMSDEVYKQYLYRKKWSNIRNEITRAEKNVKYWYYVDHKSNRGLCNQKIRGTRVYDGKIYKINKLDIRKKEGAALFKKLAFSEKESDREKLLVYKNDKKTYEDLVRIMQDYSDSKNPFVQYEKETGDYVRKYAKKHNGPRIDKLKYIDGEVGSCIDISHKYGYEKGSRKVVLESLVPYRMDVYYKKEEQTYYLVGIKQSDVKCQKGEYVIDEDAYAINLVKEKMIQQGQKRSDLESLGFEFQLSFYKNDIIEYEKDGKIVRERFLSRTMPKVKNYIETKPIDRAKYEWHDRKLVGLGKTKRIRKYRMDILGNYYLCNKEEFSKYC

SEQ ID NO: 21020 - protein, 1117 aa, unidentified; identical to SEQ ID NO: 16705
  REGION 1..1117: note = Cas Enzyme sequence

SEQ ID NO: 21021 - protein, 1125 aa, unidentified
  REGION 1..1125: note = Cas Enzyme sequence
MNGLVLGLDIGIASVGVGILNKETGEIIHANSRIFPAATADSNVERRGFRQGRRLGRRKKHRSARLNNLFEEFGFITDFSAIPLNLNPYALRVKGLSEELTNEELFIALKNIIKRRGISYLDDASEDGETASNKYGKAVEENRKLLADKTPGQIQLERFEKYGQVRGDFTVVENGENHRLINVFSTSAYKKEAERILRRQQEFNVRISDEFIEAYLTILTGKRKYYHGPGNEKSRTDYGRFRTDGTTLDNIFGILIGKCTFYPDEYRAAKASYTAQEFNLLNDLNNLTVPTETKKLSPEQKRQIVEYARTAKTLGTPTLLKYIAKLVDGSIDDIKGYRIDKSDKPEMHTFDAYRKMRTLDLVNIDALSIETLDDLAHILTLNTESEGILEALNSKMPSTFTKEQIDELIQFRKKNSAVFGKGWHNFSLKLMNELISELYETSEEQMTILTRLGKQRSREISKRTKYIDEKELTEEIYNPVVAKSVRQAIKIINEATKRYGIFDNIVIEMARENNEEDAKKDYIKRQKANQDEKNASMEKAAFQYNGKKELPDSIFHGHKELATKIRLWHQQGERCLYTGKNISIRDLIHNPHQYEIDHILPLSLSFDDGLANKVLVLATANQEKGQRTPFQAIDSMDDAWSYREFKQYVRNSKSLSNKKKDYLLTEEDISKIEVKQKFIERNLVDTRYSSRVVLNTLQEFYKTNDFDTKISVVRGQFTSQLRRKWKIEKSRDTYHHHAVDALIIAASSQLRLWKKQNNPLISYKEGQFVDPETGEILSLTDDEYKELVFRPPYDYFVDTLKSKSFEDSILFSYQVDSKYNRKISDATIYGTRKAQLGKDKQEETYVLGKIKDIYSQKGYEDFIKRYNKDETQFLIYHKDPQTFEKVIEEILKTYPDKELNEKGKEIPCNPFEKYRQENGPIRKYSKKGKGPEIKILKYYDNKLGNHIDITPVNSQNQVVLQSLKPWRTDVYFNPRTSKYELMGLKYSDLRFEKGSGSYGISPEKYNKVKAKEGVNEDSEFKFTLYKNDLILIKDTETGEQQLFRYGSRNDTSKHYVELKPYEKAKFEGNQQLMNLLGTVAKGGQCLKGINKPNLSIYKVKTDVLGNKYFIKKEGDQPQLNFKKKF

SEQ ID NO: 21022 - protein, 1382 aa, unidentified
  REGION 1..1382: note = Cas Enzyme sequence
MENKQYYIGLDVGTNSVGWAVTDTSYNLLRAKGKDMWGARLFEKANTAAERRTKRTSRRRSEREKARKSMLKELFADEINKVDPSFFIRLEESKFFLDDRSENNRQRYALFNDATFTDKDYYKKYKTIFHLRSALINSDEKFDVRLVFLAILNLFSHRGHFLNASLKSDGEIQGMDIFYNDLYEACEEFEIDLPQISNIDNFEKILSQKGKSRTKILEELAEEMSISKKDKTKYAILKLICGMKIKVGDIYADEDIQDEDKKKDFGFRESNYEERALEVKEIIGDEYFDLVERAKSVHDMGLLSNIIGNSKYLCEARVEAYENHHEDLLKIKKLLKKYDKKAYTDMFRKMTDKNYSAYVGSVNSNIAKESRSVDKRKIEDLYKYIEDTALKNIPDDNKDKIQILEKIKLGEFLKKQLTASNGVIPNQLQSRELRAVLKKAESYLPFLKEKGEKNLTVSEMIIQLFEFQIPYYVGPLDKNPKKDNKANSWAKIKQGGRILPWNFEDKVDVKGSRKEFIEKMVRKCTYLSDEHTLPKQSLLYEKFMVLNEINNIKIDGEKISVEAKQKIYNDLFMKGKKVSQKDIKKELISLNIMDKDSVLSGTDTVCNAYLSSIGKFTGVFKEEINKQSIVDMIEDIIFLKTVYGDEKRFVKEEIVEKYGDEIDKDKIKRILGFKFSNWGNISKSFLELEGADVGTGEVRSIIQSLWETNFNLMELLSSRFTYMDELEKRVKKLEKPLSEWTIEDLDDMYLSSPVKRMIWQSMKIVDEIQTVIGYAPKRIFVEMTRSEGEKVRTKSRKDRLKELYNNIKEDSKQWVKELDAKDESYFRSKKMHLYYLQKGRCMYSGEVIELDKLMDDNLYDIDHIYPRSFVKDDSLDNLVLVKKEINNRKQNDPITLQIQASCQGFWKVLHEQGFISNEKYSRLTRKTQEFSDEEKLSFINRQIVETGQATKCMAQILQKSMGEDVDVVFSKARLVSEFRHKFDLFKSRLINDFHHANDAYLNIVVGNSYFVKFTRNPANFIKDARKNPDNPAYKYHMDRFFERDVKSKSEVAWIGQSEGNAGTIAKVKKTMAKNSPLITKKVEEGHGKITNETIVGVKEIIFGRKKVEKSDKTPKKPNVEAYRPIKINDSRLCNILRYGGRGSISSSGYCLVEYTKKKKTIRSLEAIPVYLGRKDILREEKLLEYLKNILNNEGKDTATDIRICIPFIPINSLIKIDGYLYYLGGKTGEQIYIYNAQQLKMKKEEAEYIRKIEKAVSLSKFDEIDREKNPVLTKEKNIELYDKIQDKIENTVYNKRLSSIEGILKEGKAKFVELDVEKQCKILNSILNNITNTMKVDLREIGGSVNSGTCRCSKNITNYKEFKLIQQSITGLYSCEKDMMTI

SEQ ID NO: 21023 - protein, 1382 aa, unidentified
  REGION 1..1382: note = Cas Enzyme sequence
MENKQYYIGLDVGTNSVGWAVTDTSYNLLRAKGKDMWGARLFDEAKTAVERRTKRTSRRRSEREKARKAMLKEFFADEINKVDPNFFIRLEESKFFLDDRSESNRQRYSLFNDATFTDKDYYEKYKTIFHLRKALINSDEEFDVRLVFLAILNLFSHRGHFLNASLKGDGDIQGMDVFYNDLYESCLEFEIDLPQISNTDNFEKILSQKGKSRTKILEELAEEMSIGKKDKIKYAILKLICGMKIKVADIYTDEDIQEEDKKKDFGFRESNYEERALEVKEIIGDEYFDLVERVKAVHDMGLLSNIIGKSKYLCEARVEAYENHHKDLQKIKELLKKYDKKVYTDMFRKMTDKNYSAYVGSVNSNIAKERRSVDNRKVEDLYEYIKKIALKNIPDDNEDKIEILKKIETGEFLKKQLTASNGVIPNQLQSRELRAILKKAENYLPFLKEKGEKNLTVSEMIIQLFEFQIPYYVGPLDKNPKKDNKANSWAKIKQGGRILPWNFEDKVDVKGSRKEFIEKMVRKCTYLSEEHSLPKQSLLYEKFMVLNEINNIKIDGEKISVEAKQKIYNDLFMKGKKVSQKDIKKELISLNIMDKDSVLSGTDTVCNAYLSSIGKFTGVFKEEINKQSIVDMIEDIIFLKTVYGDEKRFVKEEIVEKYGDRLDDVRLKRILGFKFSNWGNLSKSFLELEGADVGTGEVRSIIQSLWETNFNLMELLSSRFTYMDELEKRVKKLEKALNQWTIEDLDDMYLSSPVKRMIWQSMKIVDEIQTVIGYAPKRIFVEMTRSEGEKVRTKSRKDRLKELYNNIKEDSKQWVKELDAKDESYFRSKKMYLYYLQKGRCMYSGEVIELDKLMDDNLYDIDHIYPRSFVKDDSLDNLVLVKKEINNRKQNDPITPQIQASCQGFWKILHEQGFISNEKYSRLTRKTQEFSDEEKLSFINRQIVETGQATKCMAQILQKSMGEDVDVVFSKARLVSEFRHKFDLFKSRLINDFHHANDAYLNIVVGNSYFVKFTRNPANFIKDVRKNPDNPAYKYHMDRFFEKDVKSKNEVAWIGQSEGNAGTIAIVKKTMAKNSPLITKKVEEGHGSITNETIVGVKKIKFGRSKGEKTDKIPKKINVKAYQPIKTNDERLCNILRYGGRTSISTSGYCLVEYVKKKKTVRSLEAIPVYLGRKDSLTEEKLLNYFNYILNDGGKDSVSDIRICLPFIPMNSLIKINGYLYYLGGKTGEQIYIYNAQQLKMKKEEVEYIRKIEKAVSLSKFDEIDREKNPVLTEERNIDLYEKIQKKIEKTVYKHRLTSIENSLIDGKQKFVNLDFEKQCKILNSILYNLTKTFKADLRDIGGSENSGGCLCSKNINNYKEFKLIQQSITGLYSCEKDLMTI

SEQ ID NO: 21024 - protein, 1382 aa, unidentified
  REGION 1..1382: note = Cas Enzyme sequence
MENIQYYIGLDVGTNSVGWAVTDTSYNLLRAKGKDMWGARLFEKANTAAERRTKRTSRRRSEREKARKAMLKELFADEINKVDPSFFIRLEESKFFLDDRSENNRQRYTLFNDATFTDKDYYEKYKTIFHLRSDLINSDEKFDVRLVFLAILNLFSHRGHFLNASLKGDGDIQGMDVFYNDLYEACEEFEIDLPQISNIDNFEKILSQKGKSRTKILEELSEELSISKKEKIKYAILKLICGMKIKVADIYSDEDIQDEDKKKDFGFRESNYEERALEVKEIIGDEYFDLVERAKSVHDMGVLSNIIGNFKYLCEARVEAYDNHHKDLLKIKELLKKYDKKAYTDMFRKMTDKNYSAYVGSVNSNIAKERRSVDNRKIEDLYEYIKKIALKNISDDNEDKIEILKKIETGEFLKKQLTASNGVIPNQLQSRELRAILKKAESYLPFLKEKGEKNLTISEMIIQLFEFQIPYYVGPLDKNPKKDKNANSWAVIPSGGRILPWNFEDKVDVKASAEEFIKKMLRKCTYLSEEYTLPKQSLLYEKFMVLNEINNTKVDGEKISVEAKQRIYKDLFMKGKKVSQKAIKQELISLNIMNKDSVLSGIDTVCNAYLSSIAKFRGVFDEDVNNQSIIDMVEDIIFWGTIYSDEKKFVKEKIEEKYGDKIDKDKIKRILGFKFSNWGNLSKSFLELEGADVGTGEVRSIIQSLWETNFNLMELLSSRFTYMDELEKRVKKLEKALNQWTIEDLDDMYLSSPVKRMIWQSMKIVDEIQTVIGYASKRIFVEMTRSEGEKVRTKSRKDRLKELYNNIKEDSKQWVKELDAKDESYFRSKKMYLYYLQKGRCMYSGEVIELDKLMDDNLYDIDHIYPRSFVKDDSLDNLVLVKKEINNRKQNDPITPQIQASCQGFWKILHDQGFISNEKYSRLTRKTQEFSDEEKLSFINRQIVETGQATKCMAQILQKSMGEDVDVVFSKARLVSEFRHKFNLFKSRLINDFHHANDAYLNIVVGNSYFVKFTRNPANFIKDARKNPDNPAYKYHMDRFFERDVKSKSEVAWIGQSEGKAGTIAIVKKTMAKNSPLITKKVEEGHGKITNETIVGVKEIKFGRGKGEKSDKTPKKPNVEAYRPIKINDSRLCNILRYGGRGSISSSGYCLVEYTKKKKTIRSLEAIPVYLGRKDILREEKLLEYLKNILNNEGKDTATDIRICLLFIPMNSLIKIDGYLYYLGGKTGEQIYIYNAQQLKMKKEEVEYIRKIEKAVSLSKFDEIDREKNSVLTKEKNIELYDKIQDKIENTVYNKRLSSIEGILKEGKAKFVELDVEKQCKILNSVLNNITNTMKVDLREIGGSVNSGTCRCSKNITNYKEFKLIQQSITGLYSCEKDLMMI

SEQ ID NO: 21025 - protein, 1320 aa, unidentified
  REGION 1..1320: note = Cas Enzyme sequence
VDKFKEKNKQYKIGLDMGVASSGWAVSDENGDLLKFKHQPMWGVRLFNEGETAESRRNFRTTRRRLARRIQRGKWLRSILGPEIEKMDPDFFKRMKYSSWSSRDAERNEIGELFDNGAYCSGFYQKAFPTIFHLRKELATNPEKKDLRLVYLALHHIVKYRGNFLYDGEMSIHEGINLASILDDFFASSNQEESVSPEKFSSIKDTILKVVKDQACDKQQEIYNVMQRLLGDDSKKYCMEFAKAILGKKADFSILFPVTGAEEENKFKLSDEEKCDEFSSSLDGRLLTSFQLLKKIHSAYLLASILSAKITTLSDVYINYYESYKKDLHILKHLLKKYCAPDVYHTMFYGTNTKDATYAKYQKNNSGNSSYDELMKKIKDILKKIDDPEAEIDKQYCLSRIKDGSFLRKPKNNNNGAIPHQLQVEELKEILEKQKKYYPVLAENEMKIIQIASFRIPYYVGPLSTAATQYGWAVRKENGPVTPWNYSEKIDVMSSAEQFINNLTNSCQYLYGEDVIPKNSLLFSEYCLLNELNGIRMNGYRLGADVKQRLLTELFTRTKHVTKSTICKCLFQNGFAKQERGLDITGFQKKNEFASSLSSFIDFTSIFGNVNEKNQEMIENCILWITLFSDKSILRMKIKKNYPELSSETVTAICKLNYQGWGRFSRKLLVGIKTMNAEGELLSVMDILRTTNLTFMEILYDRRFSFQEIIEKENAPKQKDISLSRYDSVFPDTPISPSVKKTTWQGLKVIQEIVKIMGKEPKQIYIEFTRSEGKKGKRTINRYDALEKMYKRIKDNPDFQKCWDELTSEKEQYKEQNGPLSKMKLFLYFLQNGKCLYTEQHLEISNLNQYQIDHILPQAYIKDNSIDNLALVIQKENQRKKDSLLLNEDIITKETPYWDTLKKNGLLSTKKYNALIRTDVPDEEFDSFVSRQIVETSQAIKLMSGILKKVYPSTNIVGVKAGLSHDFRIANGLYKIRELNDYHHAHDAYIACQVGMFLTGQYGQIQKMENVKRDFFVAVANQHDELLNFKEGFVAWSMSRDYGNWCGSQVVAKVRKTLRYHQYFISRKTEESSGAFYNQKMLPVGEKEKTTVPSKEGRDPLIYGGYSGEQLAYFDIIEFMKGKKKVSKLVGIPIRITALERTKPDSIKKYLNDNYPGARILKERICKYQYVLYHEKDGTVNEYYIVSDGEVINARELLLPWRYVANLASFDKLDEIGKQELFQVLCAKMKEYPCYMKHAVILEKHVGDFGNLSSDWQKKCIRGLLCYMQANSSRFDFSDKKGLNWNDVPTNRLQFILNPEFIEFVDKSVTGMFERRYQIG

SEQ ID NO: 21026 - protein, 1364 aa, unidentified
  REGION 1..1364: note = Cas Enzyme sequence
MEKQEYYLGLDMGISSVGWAVTNTKYELLRKKGKDMWGIREFEEADSSAERRTHRVNRRRRQRQVARMGLLKEYFSDAIEKVDPNFFIRMENSKYFYEDKDERLSSKNGIFDDADYKDLDYYKDYPTIFHLRKALLDIEDTGKSYDVRLIYLALVNMFKHRGHFLLNTEGDALSSEQVNTTYQELLEILENNYDLSLESRDIKDVIDIISSADNGRKKKHEQILELFGVKKSDKRANELLKCLCGLSVNAKLIFDENYEEKVDLCFHDFSYTDKIPDLMEKLSEEEYSVVEQLKSIYDYSVLAGTLKGYDYLSCARVELYEKHCEDLKLLKALYRRYKTKEEYKDMFKSDKEGTYSAYVNSFNSSDSSVKIKKYRRNMKGRTVENLYATIKKAFKDNTDDKDVQSMMESIDKEQFLPKQLTGANGVIPNQVHKKEMERILKKAQNYLPFLNEKDESELTVSDRILRLFTFQIPYYVGPLGENSKTGWVVRREGGRVLPWNIDEKIDMSATSEAFIGNLIRKCTYLSDEKVMPKASLSYERYCVLNEINNICIDGERLDTELKQKIYTECFMKGKRVTRKQLCNYLVAQGYIKSDEQVTGIDININSSLSSYGKMFAIFGERLKEDVIRKIAEEIIYWGTIFSDSKKMFRKHLTKYVEQGILGESQVKRILGYKFKDWGRFSKALLTLQGIDKSTGELLSLENAMWEYSLNFMELINSDDFTFKDELENRRTAAIKSLSEFTYEDLEDTYFSVPVKRMIWQTILVVREVEQIMGYAPKKVFVEMARSEEEKGDKGRKDSRGTQLLELYKNIKNTENHDWKKEISEANESGKLRSKKLYLYYTQMGRDMYTGEEINIDMLYDDSMYDIDHIYPRHYVKDDSIVNNLVLVNRRANQDIKKDLYPIPDKIISNPKVQELWKMLHKQNLITDEKYKRLMSRSHFTEKQLGDFIARQLVETRQGTKGIAELLGQLFKDTEIVYAKATNVSDFRRDNGFVKSRLVNDFHHAQDAYLNIVVGNVYYTKFTKNPWKFIKKDFDKDRNKNGYNLAKMFDRDVVRGDDIAWIAAKDDRQGTIETVRKMMRKNTPLMTRMNFEQHGGIANATLYSAKKAKVENYIPLKSSDTKLGDVTKYGGFTSATISYYFVVHHKEGKKEITTIEALPLYCKNKVENEENGLLKYCEEVLGYGDVKILINKLKIQSLLEINGYQFHLSGKTGNQLILRNAMNLCVPEKWTAYIKKLEKLVVGHVKEQAITSEANIELYDLLTDKHLNSVYAKRPNAYGQKLVDDRGNFVNLNLESQCEAILQILQLTKIGNNETNLKLIGESEHSGKMRISKNLKVIDKPAIICQSVTGLYERKIYIFGEQLDK

SEQ ID NO: 21027 - protein, 1364 aa, unidentified
  REGION 1..1364: note = Cas Enzyme sequence
MEKQEYYLGLDMGISSVGWAVTNDKYELLRKKGKDMWGIREFEEADSSAERRTHRVNRRRRQRQVARMGLLKEYFSDAIEKVDSNFFIRMENSKYFFEDKDGRLSSKNGIFDDADYKDVDYYTEYPTIFHLRKALLDIEDTGKEYDVRLVYLALVNMFKHRGHFLLNTEGDALSSEQVNTTYQELLEILENNYDISLESRDIKDVIDIISSSDNGRKKKHEQILELFGVKKSDKRANELLKCLCGLSVNAKLIFDENYEEKVDLCFHDFSYTDKIPDLMEKLSEEEYYVVEQLKSIYDYSILAGTLKGYDYLSCARVELYEKHREDLKLLKALYRRYKTNEEYNDMFKSDKEGTYSAYVNSFNSSDSSVKIKKYRRNMKGRTIDNLYGTIKKAFKDNTDDKDVQSMMESIDKEQFLPKQLTGANGVIPNQVHKKEMERILKKAQNYLPFLKEKDESELTVSERILRLFTFQIPYYVGPLGENSKTGWVVRREGGRVLPWNIDEKIDMSATSEAFIGNLIRKCTYLSDEKVMPKASLSYERYCVLNEINNICIDGERLDTELKQKIYTECFMKGKRVTRKQICNYLVAQGCIKSDEQVTGIDINVNSSLSSYGKMFAIFGEHLKEDAIRKVAEEIIYWGTIFSDSKKMFRKHLTKYVEQGILGESQVKRILGYKFKDWGRFSKALLTLQGIDKSTGELLSLENAMWEYSLNFMELINSDDFTFKDELANRRTSAIKSLSEFTYEDLEDTYFSVPVKRMIWQTILVVREIEQIMGYAPKKVFVEMARSEEEKGDKGRKDSRGTQLLELYKNIKNTENHDWKKEISEANESGKLRSKKLYLYYTQMGRDMYTGEEINIDMLYDDSMYDIDHIYPRHYVKDDSIVNNLVLVNRRANQDIKKDLYPIPDKIISNPKVQELWKMLHKQNLITDEKYKRLMSRSPFTEKQLGDFIARQLVETRQGTKGIAELLGQLFKDTEIVYAKATNVSDFRRDNGFVKSRLVNDFHHAQDAYLNIVVGNVYYTKFTKNPWNFIKKDFDKDRNKNGYNLAKMFDRDVVRGDDTAWIASKKDTQGTIETVRKMMRKNTPLMTRMSFEQHGGIANATLYSAKKAKVENYIPLKSSDIRLSDVKKYGGFTSATVAYYFIVHHKEGKKENTTIEALPLYCKRKVENEENGLLKYCEEVLGYGDVKILFNKLKIQSLLDINGYQAHLSGKTGNQLTLRNAMNLCVPEKWTAYIKKLEKLVVGHVKEQEISSEANIELYDLLTDKHLNSVYAKRPNAYGQKLIDNRSRFVNLKPESQCEAILQILKLTKIGNNETNLKLIGESEHSGKMLISKNLKDTDKPAIICQSVTGLYERKIYIFDEQLDK

SEQ ID NO: 21028 - protein, 1364 aa, unidentified
  REGION 1..1364: note = Cas Enzyme sequence
MEKQEYYLGLDMGVSSVGWAVTNTKYELMRKKGKDMWGIREFEEADSSAERRTHRVNRRRRQRQVARMGLLKEYFSDAIEKVDPNFFIRMENSKYFFEDKDERLSSKNGIFDDADYKDVDYYTEYPTIFHLRKTLLDIDDTGKEYDVRLVYLALVNMFKHRGHFLLNTEGDALSSEQVNTTYQELLEVLENNYEISLENRDIKDVIDIISNRDSGRKKKHEQIMELFGVKKSDKRVKELLKCLCGLSVNAKLIFDENYEEKVDLCFHDFSYTDKIPDLMEKLSEEEYYVVEQLKSIYDYSVLAGTLKGYDYLSCARVELYEKHCEDLKLLKALYRRYKTKEEYKDMFKSDKEGTYSAYVNSFNSSDSSVKIKKYRRNMKGRTIDNLYATIKKAFKDNTDDKDVQSMMESIDKEQFLPKQLTGANGVIPNQVHKKEMERILKNAQNYLPFLKEKDESGLTVSERILRLFTFQIPYYVGPLGENSKTGWVVRREGGRVLPWNIDEKIDMSATSEAFIGNLIRKCTYLLDEKVMPKASLSYERYCVLNEINNICIDGERLDTELKQKIYTECFMKGKRVTKKQLCNYLVAQGCIKSDEQVTGIDINVNSSLSSYGKMFAIFGERLKEDVIRKIAEEIIYWGTIFSDSKKMFRKHLTKYVEQGILGESQVKRILGYKFKDWGRFSKALLTLQGIDKSTGELLSLENAMWEYSLNFMELINSDDFTFKDELANRRTAAIKSLSEFTYEDLEDTYFSVPVKRMIWQTILVVREIEQIMGYAPKKVFVEMARSEEEKGDKGRKDSRGDKLLELYKNVKNTENHDWKKEISEANESGKLRSKKLYLYYTQMGRDMYTGEEINIDMLYDDSMYDIDHIYPRHYVKDDSIVNNLVLVNRRANQDIKKDLYPIPDKIISNPKVQELWKMLHKQNLITDEKYKRLMSRSPFTEKQLGDFIARQLVETRQGTKGIAELLGQLFKGTEIVYAKATNVSDFRRDNGFVKSRLVNDFHHAQDAYLNIVVGNVYYTKFTKNPWNFIKKDFDKDRNKNGYNLAKMFDRDVVRGDDIAWIASKKDTQGTIETVRKMMRKNTPLMTRMSFEQHGGIAKGTMYSAKIVKEKNYIPVKSSDKKLSDVTKYGGFTAVTVAYYFIVRHKKGKKEITTIEALPLYCKDKVENETNGLATYCEDVLGYRNVKILFRKLKIQSLLEINGYQAHLSGKTGDQLTLRNAVNLCVPEKWIRYIKKLEKVDTSQIKEEMITAKKNCELYDLLIDKHLNTVYARKPTPNAKKLLDYRDNFLGLGLKQQCEAMLNILKLTSIGLTGTSLKLIGGDNDYGKMRISKNLDCSAKPAIICQSITGLYERKIYIFDDRSNK

SEQ ID NO: 21029 - protein, 1364 aa, unidentified
  REGION 1..1364: note = Cas Enzyme sequence
MEKQEYYLGLDMGISSVGWAVTNDKYELLRKKGKDMWGIREFEEADSSAERRTHRVNRRRRQRQVARMGLLKEYFSDAIEKVDSNFFIRMENSKYFFEDKDGRLSSKNGIFDDADYKDVDYYKDYPTIFHLRKALLDIEDTGKEYDVRLVYLALVNMFKHRGHFLLNTEGDALSSEQVNTTYQELLEVLENNYEISLESRDIKDIIDIISNQDNGRKKKHEQILELFGVKKSDKRAKELLKCLCGLSVNAKLIFDENYEEKVDLCFHDFSYTDKIPDLMEKLSEEEYSVVEQLKSIYDYSVLVGTLKGYDYLSCARVELYEKHFEDLKLLKALYRRYKTKEEYNDMFKSDKEGTYSVYVNSFNSSDSSVKIKKYRRNMKGRTIDNLYGTIKKAFKDNTDDKDVQSMMESIDKEQFLPKQLTGANGVIPNQVHKKEMERILKKAQNYLPFLKEKDESELTVSERILRLFTFQIPYYVGPLGENSKTGWVVRREGGRVLPWNIDEKIDMSATSEAFIGNLIRKCTYLSDEKVMPKASLSYERYCVLNEINNICIDGERLDTELKQKIYTECFMKGKRVTRKQICNYLVAQGCIKSDEQVTGIDINVNSSLSSYGKMFAIFGEHLKEDAIRKVAEEIIYWGTIFSDSKKMFRKHLTKYVEQGILGESQVKRILGYKFKDWGRFSKALLTLQGIDKSTGELLSLENAMWEYSLNFMELINSDDFTFKDELANRRTSAIKSLSEFTYEDLEDTYFSVPVKRMIWQTILVVREIEQIMGYAPKKIFVEMARSEEEKGDKGRKDSRGDKLLELYKNIKNTENHDWEKEISEANESGKLRSKKLYLYYTQMGRDMYTGEEINIDMLYDDSMYDIDHIYPRHYVKDDSIVNNLVLVNRRANQDIKKDLYPIPDKIISNLKVQGLWKMLHKQNLITDEKYKRLMSRSPFTEKQLGYFIARQLVETRQGTKGIAELLGQLFKDTEIVYAKATNVSDFRRDNGFVKSRLVNDFHHAQDAYLNIVVGNVYYTKFTKNPWNFIKKDFDKDRNKNGYNLAKMFDRDVVRGDDIAWIASKKDNQGTIETVRKMMRKNTPLMTRMSFEQHGGIAKGIMYSAKVVKEKNYIPVKSSDKKLSDVTKYGGFTAVTVAYYFIVSHKEGKKENTTIEALPLYCKNKVENEENGLLKYCEEVLGYGDVKILFNKLKIQSLLEINGYQVHLSGKTEGRLILRNAMNLCLPEKWISYIKKLEKLVAGNVKEQAITSEANIELYDLLTDKHLNSVYAKRPNAYGQKLVDDRSNFVNLKPESQCEAILQILQLTKIGNNETNLKLIGESEHSGKMRISKNLKDTDKPAIICQSVTGLYERKIYIFGEQLDK

SEQ ID NO: 21030 - protein, 1352 aa, unidentified
  REGION 1..1352: note = Cas Enzyme sequence
MTAFKYYLGLDMGTNSVGWAATDPGYRLLKAKGKDLWGIREFNEASGAVERRTHRISRRRRQREQVRIGILKDYFHDAICEVDPGFFQRLENSKYHEEDKDVEVRYKNNIFNDSNYTDKDYFNEYPTIYHLRNELISSTEKHDVRLVFLALLNMFKHRGHFLNAGLGENNGESNIDNAYFELTELLSELTEYHLSQDIDCKQIEAILSRRDMSRTHKAEELAGVLHVDLKNKPYKELIRGLCGLKFNACVVFPDVQSEEVTKLDICLSESTFDEKSDEIANIIGEDYFEIIMAMKEMFDIGSLASIMKGHNYLSQARVASYTKHKEDLKLLKEVIKKYCSKKEYDKFFNSDADGSYASYVGSYNSKNKERRVGNKRTSEELYKEIKKLLKDAQKEDENVQKILTSIENETFLPKQLTASNGVIPNQVHAREMKKILSNAENYLPFLTEKDETGLSVSERILKLFTFQIPYYVGPTSENSGKNGGNGWVVRREDGQVLPWNIDEKIDMKATSEAFISRMVRRCTYISGEQVLPKASLEYQSYCVLNEINNIKIDGERISVELKQDIYKAVFQKGKKVTKKQLCKYLHTRGIIETEEQVTGVDVSINNALTTYGKFKPIFGEDISKDSVQKMIEDIVFWCTVYGDSKKFLKDRIEEKYGNKLSEEQIKRILGFKFKDWGNLSKKFLELNGADTSTGESISIIRALWNNNLNLMELINSSLYNYKECLAEYQNTMLKTLSEIEAEDLNEYYFSAPVRRMIWQTILVIKELVKVLGCEPERIFVEMTRKPDEHKTRTSSRRNKFEELYKKVKDETTDWMQVIANAEEDGKIRSKKMYLYLTQKGRCMYTGKHIELDDLFDNNLYDIDHIYPRHFVKDDNIDNNLVLVCKEKNAHKSDHYPIEEEIFLSQKKMWLELRKSGFITEEKYNRLMDRNPFSDEQKAGFIARQLVETSQGTKGVANILRQLLPGSKIVYAKASNVSEFRCTRDDIQKSRLVNDFHHAHDAYLNIVVGNVYYVKFTQNPLNFIKKDYDKYKEDYNLSKMFDWDVKRNGEVAWIAQRKDGAAGTITTVKRMLSRNTPLMTRYSFDGKGGLTNETLYSAKKAKGEGYIPFKSSDDKMQDVTKYGGFTSVTGAYFFLVEHTEKKKRIRTIESVPVYLAQKIEQNPDELKKYCEEILGLIDADIRLKKIKIGSLIKRNGYFCYITGKTGNRLIVRNAVNLCLKNEWIKYISKLEKVKEKDAVDKIITKEKNEVLYSELIQKFKHGIFSKRPNPVGDKLEKDSEKFNNLSIKDQCAVLCQVLRMAAILGSECDMTLLGDSPNCGKMLISKKIGDEEIYLINQSVTGLYEKKINLHTV

SEQ ID NO: 21031 - protein, 1352 aa, unidentified; identical to SEQ ID NO: 21030
  REGION 1..1352: note = Cas Enzyme sequence

SEQ ID NO: 21032 - protein, 1240 aa, unidentified
  REGION 1..1240: note = Cas Enzyme sequence
MIITDKDYFNQYPTIYHLRRELLENTDKHDVRLVFLALLNMFKHRGHFLNSGLGENSGENNISNAYLELTSLLSELTPYNLNETIDCKKIEDLLSSKDMSRTRKAEGLAQILGVDYGNKPYKELIRGLCGLKFNAFVIFPEIQSDEVQKLDVCLSEASFDEKSDEIANIIGEDYFEIIMSMKEIYDIGSLAGIMKGHNYLSQARVTLYENHKEDLKILKDVIKKYCDKDEYDSFFNSDADGSYASYVGSYNSKIKQRRVGNKRSSEELYKTIKKILKNAPAEDVDVQSILKAIENETFLPKQLTASNGIIPNQVHAKEMKKILSNAESYLSFLNEKDETGLSVSEKILKLFTFQIPYYVGPTTEKSNKDGGNGWVVRKEEGQVLPWNINEKIDMKATSEAFISRMVRRCTYISDEPVLPKASLEYQSFCVLNEINNIKIDGERISVELKQDIYKDVFQKGKRVTKKQLCKYLHTRGVIEAEEQVAGIDITINNALTTYGKFKAIFGDDMSKDSVQKMVEDIVFWCTIYGDSKNFLKDRIEEKYGEKLTKEQIKRIVGFKFKDWGNLSKNFLELSGADVSTGESVSIIRALWNNNLNLMELINSRLYDYKDRLAEYQNTMIKTLSDIEAEDLDEYYFSAPVKRMVWQTILIIKELVKVLGCEPDRIFVEMTRRPDERKMRTASRRKKFEELYKKVKDEDVDWLKVIAHADETGNIRSKKMYLYLTQKGRCMYTGRHIELSDLFNNNLYDIDHIYPRHFVKDDNIDNNLVLVCKEKNAHKSDIYPLEDDIFTSQKNMWSELRRSGFITEEKYNRLIGRNSFTDEQKAGFIARQLVETSQGTKGVANILQQLLPESKIVYAKASNVSEFRNTRDIPKSRLINEFHHAHDAYLNIVVGNVYYVKFTQNPLNFIKNDYDRDKVKNNYNLSRMFDWDIKRNGEVAWIAQKEGGEAGTIVTVKKMLGRNTPLMTRYSFEGKGGLSNETLYSAKKAKEEGYIPFKASDEKLQDVTKYGGFTSVTCAYFFLVEHSEKKKRIRTIETVPLYLAQKIEQDPSELEKYCEQILGLIDFDIRVRKIKIGSLIKYHDYFFYVTGKTGQRLLLRNAVNMCLKKEWVKYISKLEKVRDKAVIDEIVTKEKSELLYLELLKKFKTSIFSNRPNPVGDKLDKSKDKFLNLDIEKQCIILCQILQLSSVLGSECDMTLLGESAHCGKMLISKKIGDEDIYLINQSVTGLYEKKINLRTV

SEQ ID NO: 21033 - protein, 1352 aa, unidentified
  REGION 1..1352: note = Cas Enzyme sequence
MTAFKYYLGLDMGTNSVGWAATDPEYRLLKAKGKDLWGIREFNEASGAVERRTHRISRRRRQREQVRIGILKDYFHDAICEVDPSFFQRLENSKYHEEDKDVEVRYKNNIFNDSNYTDKDYFNEYPTIYHLRNELISSTEKHDVRLVFLALLNMFKHRGHFLNAGLGENNGESNIDNAYFELTELLSELTEYHLSQDIDCKQIEAILSRRDMSRTHKAEELAGVLHVDLKNKPYKELIRGLCGLKFNACVVFPDVQSEEVTKLDICLSESTFDEKSDEIANIIGEDYFEIIMAMKEMFDIGSLASIMKGHNYLSQARVASYTKHKEDLKLLKEVIKKYCGKKEYDKFFNSDADGSYASYVGSYNSKKKERRVGNKRTSEELYKEIKKLLKDAQKEDENVQKILTSIENETFLPKQLTASNGVIPNQVHAREMKKILSNAENYLPFLTKKDETGLSVSERILKLFTFQIPYYIGPTSENSGKNGGNGWVVRREDGQVLPWNIDEKIDMKATSEAFISRMVRRCTYISGEQVLPKASLEYQSYCVLNEINNIKIDGERISVELKQDIYKAVFQKGKKVTKKQLCKYLHTRGIIETEEQVTGVDVSINNALTTYGKFKPIFGEDISKDSVQKMIEDIVFWCTVYGDSKKFLKDRIEEKYGNKLSEEQIKRILGFKFKDWGNLSKKFLELNGADTSTGESISIIRALWNNNLNLMELINSSLYNYKECLAEYQNTMLKTLSEIEAEDLNEYYFSAPVRRMIWQTILVIKELVKVLGCEPERIFVEMTRKPDEHKTRTSSRRNKFEELYKKVKDETTDWMQVIANAEEDGKIRSKKMYLYLTQKGRCMYTGKHIELDDLFDNNLYDIDHIYPRHFVKDDNIDNNLVLVCKEKNAHKSDHYPIEEEIFLSQKKMWLELRKSGFITEEKYNRLMDRNPFSDEQKAGFIARQLVETSQGTKGVANILRQLLPGSKIVYAKASNVSEFRHTRDDIPKSRLVNDFHHAHDAYLNIVVGNVYYVKFTQNPLNFIKKDYDKYKEDYNLSKMFDWDVKRNGEVAWIAQRKDGEAGTITTVKKMLSRNTPLMTRYSFEGKGGLANETLYSAKKAKGEGYIPFKSSDDKMQDVTKYGGFTSVTGAYFFLVEHTEKKKRIRTIESVPVYLAQKIEQNPDELKKYCEEILGLIDADIRLKKIKIGSLIKRNGYFCYITGKTGKQLIVRNAVNLCLKNEWIKYISKLEKVKEIDAVDKIITKEKNEVLYSELIQKFKHGIFSKRPNPVGDKLEKGSEKFSNLSIKEQCAVLCQILQLAAVLGSECDMTLLGESAHCGKMLISKKIGDEEIYLINQSVTGLYEKKINLHTV

SEQ ID NO: 21034 - protein, 1352 aa, unidentified
  REGION 1..1352: note = Cas Enzyme sequence
MTAFKYYLGLDMGTNSVGWAATDPGYRLLKAKGKDLWGIREFNEASGAVERRTHRISRRRRQREQVRIGILKDYFHDAICEVDPSFFQRLENSKYHEEDKDVEVRYKNNIFNDSNYTDKDYFNEYPTIYHLRNELISSTEKHDVRLVFLALLNMFKHRGHFLNAGLGENNGESNIDNAYFELTELLSELTEYHLSQDIDCKQIEAILSRRDMSRTHKAEELAGVLHVDLKNKPYKELIRGLCGLKFNACVVFPDVQSEEVTKLDICLSESTFDEKSDEIANIIGEDYFEIIMAMKEMFDIGSLASIMKGHNYLSQARVASYTKHKEDLKLLKEVIKKYCGKKEYDKFFNSDADGSYASYVGSYNSKNKERRVGNKRTSEELYKEIKKLLKDAQKEDENVQKILTSIENETFLPKQLTASNGVIPNQVHAREMKKILSNAENYLPFLTEKDETGLSVSERILKLFTFQIPYYVGPTSENSGKNGGNGWVVRREDGQVLPWNIDEKIDMKATSEAFISRMVRRCTYISGEQVLPKASLEYQSYCVLNEINNIKIDGERISVELKQDIYKAVFQKGKKVTKKQLCKYLHTRGIIETEEQVTGVDVSINNALTTYGKFKPIFGEDISKDSVQKMIEDIVFWCTVYGDSKKFLKDRIEEKYGNKLSEEQIKRILGFKFKDWGNLSKKFLELNGADTSTGESISIIRALWNNNLNLMELINSSLYNYKECLAEYQNTMLKTLSEIEAEDLNEYYFSAPVRRMIWQTILVIKELVKVLGCEPERIFVEMTRKPDEHKTRTSSRRNKFEELYKKVKDETTDWMQVIANAEEDGKIRSKKMYLYLTQKGRCMYTGKHIELDDLFDNNLYDIDHIYPRHFVKDDNIDNNLVLVCKEKNAHKSDHYPIEEEIFLSQKKMWLELRKSGFITEEKYNRLMDRNPFSDEQKAGFIARQLVETSQGTKGVANILRQLLPGSKIVYAKASNVSEFRCTRDDIQKSRLVNDFHHAHDAYLNIVVGNVYYVKFTQNPLNFIKKDYDKYKEDYNLSKMFDWDVKRNGEVAWIAQRKDGAAGTITTVKRMLSRNTPLMTRYSFDGKGGLTNETLYSAKKAKGEGYIPFKSSDDKMQDVTKYGGFTSVTGAYFFLVEHTEKKKRIRTIESVPVYLAQKIEQNPDELKKYCEEILGLIDADIRLKKIKIGSLIKRNGYFCYITGKTGKQLIVRNAVNLCLKNEWIKYISKLEKVKEKDAVDKIITKEKNEVLYSELIQKFKHGIFSKRPNPVGDKLEKDSEKFNNLSIKDQCAVLCQVLRMAAILGSECDMTLLGDSPNCGKMLISKKIGDEEIYLINQSVTGLYEKKINLHTV

SEQ ID NO: 21035 - protein, 1352 aa, unidentified
  REGION 1..1352: note = Cas Enzyme sequence
MTAFKYYLGLDMGTNSVGWAATDPEYRLLKAKGKDLWGIREFNEASGAVERRTHRISRRRRQREQVRIGILKDYFHDAICEVDPSFFRRLENSKYHEEDKDVEVRYKNNIFNDGNYTDKDYFNEYPTIYHLRNELISSTEKHDVRLVFLALLNMFKHRGHFLNAGLGENNGESNIDNAYFELTELLSELTEYHLSQDIDCKQIEAILSRRDMSRTHKAEELAGVLHVDLKNKPYKELIRGLCGLKFNACVVFPDVQSEEVTKLDICLSESSFDEKSDEIANIIGEDYFEIIMAMKEMFDIGSLASIMKGHNYLSQARVASYTKHKEDLKLLKEVIKKYCGKKEYDKFFNSDADGSYASYVGSYNSKNKERRVGNKRTSEELYKEIKKLLKDAPKEDENVQKILTSIENETFLPKQLTASNGVIPNQVHAREMKKILSNAENYLPFLTEKDETGLSVSERILKLFTFQIPYYVGPTSENSGKNGGNGWVVRREDGQVLPWNIDEKIDMKATSEAFISRMVRRCTYISGEQVLPKASLEYQSYCVLNEINNIKIDGERISVELKQDIYKAVFQKGKKVTKKQLCKYLHTRGIIETEEQVTGVDVSINNALTTYGKFKPIFGEDISKDSVQKMIEDIVFWCTVYGDSKKFLKDRIEEKYGNKLSEEQIKRILGFKFKDWGNLSKKFLELNGADTSTGESISIIRALWNNNLNLMELINSSLYNYKECLAEYQNTMLKTLSEIEAEDLNEYYFSAPVRRIIWQTILVIKELVKVLGCEPERIFVEMTRKPDEHKTRTSSRRNKFEELYKKVKDEATDWMQVIAKAEEDGKIRSKKMYLYLTQKGRCMYTGKHIELDDLFDKNLYDIDHIYPRHFVKDDNIDNNLVLVCKEKNAHKSDHYPIEEEIFLSQKKMWLELRKSGFITEEKYNRLMGRSPFSDEQKAGFIARQLVETSQGTKGVANILRQLLPGSKIVYAKASNVSEFRHTRDDIPKSRLVNDFHHAHDAYLNIVVGNVYYVKFTQNPLNYIKKDYDKYKEDYNLSKMFDWDVKRNGEVAWIAQRKDGEAGTITTVKRMLSRNTPLMTRYSFEGKGGLANETLCSAKKAKGEGYIPFKSSDDKMQDVTKYGGFTKVTGAYFFLVEHTEKKKRIRTIESVPVYLAQKIEQNPDELKKYCEEILGLVDADIRLKKIKIGSLIKRNGYFCYITGKTGNRLSVRNAVNLCLKNEWIKYISKLEKVKEKDAVDEIITKEKNEVLYSELIQKFKHGIFSKRPNPVEDKLEKGSEKFSNLSIKEQCAVLCQILQLAAVLGSECDMTLLGESAHCGKMLISKKIGDEEIYLLNQSVTGLYEKKINLHTV

SEQ ID NO: 21036 - protein, 1352 aa, unidentified
  REGION 1..1352: note = Cas Enzyme sequence
MTAFKYYLGLDMGTNSVGWAATDPEYRLLKAKGKDLWGIREFNEASGAVERRTHRISRRRRQREQVRIGILKDYFHDAICEVDPSFFRRLENSKYHEEDKDVEVRYKNNIFNDGNYTDKDYFNEYPTIYHLRNELISSTEKHDVRLVFLALLNMFKHRGHFLNAGLGENNGESNIDNAYFELTELLSELTEYHLSQDIDCKQIEAILSRRDMSRTHKAEELAGVLHVDLKNKPYKELIRGLCGLKFNACVVFPDVQSEEVTKLDICLSESSFDEKSDEIANIIGEDYFEIIMAMKEMFDIGSLASIMKGHNYLSQARVASYTKHKEDLKLLKEVIKKYCGKKEYDKFFNSDADGSYASYVGSYNSKNKERRVGNKRTSEELYKEIKKLLKDAPKEDENVQKILTSIENETFLPKQLTASNGVIPNQVHAREMKKILSNAENYLPFLTEKDETGLSVSERILKLFTFQIPYYVGPTSENSGKNGGNGWVVRREDGQVLPWNIDEKIDMKATSEAFISRMVRRCTYISGEQVLPKASLEYQSYCVLNEINNIKIDGERISVELKQDIYKAVFQKGKKVTKKQLCKYLHTRGIIETEEQVTGVDVSINNALTTYGKFKPIFGEDISKDSVQKMIEDIVFWCTVYGDSKKFLKDRIEEKYGNKLSEEQIKRILGFKFKDWGNLSKKFLELNGADTSTGESISIIRALWNNNLNLMELINSSLYNYKECLAEYQNTMLKTLSEIEAEDLNEYYFSAPVRRMIWQTILVIKELVKVLGCEPERIFVEMTRRPDEHKTRTSSRRNKFEELYKKVKDEATDWMQVIAKAEEDGKIRSKKMYLYLTQKGRCMYTGKHIELDDLFDKNLYDIDHIYPRHFVKDDNIDNNLVLVCKEKNAHKSDHYPIEEEIFLSQKKMWLELRKSGFITEEKYNRLMGRSPFSDEQKAGFIARQLVETSQGTKGVANILRQLLPGSKIVYAKASNVSEFRHTRDDIPKSRLVNDFHHAHDAYLNIVVGNVYYVKFTQNPLNFIKKDYDKYKEDYNLSKMFDWDVKRNGEVAWIAQRKDGEAGTITTVKRMLSRNTPLMTRYSFEGKGGLANETLCSAKKAKGEGYIPFKSSDDKMQDVTKYGGFTKVTGAYFFLVEHTEKKKRIRTIESVPVYLAQKIEQNPDELKKYCKEILGLVDADIRLKKIKIGSLIKRNGYFCYITGKTGNRLSVRNAVNLCLKNEWIKYISKLEKVKEKDAVDEIITKEKNEVLYSELIQKFKHGIFSKRPNPVEDKLEKGSEKFSNLSIKEQCAVLCQILQLAAVLGSECDMTLLGESAHCGKMLISKKIGDEEIYLLNQSVTGLYEKKINLHTV

SEQ ID NO: 21037 - protein, 1352 aa, unidentified
  REGION 1..1352: note = Cas Enzyme sequence
MTAFKYYLGLDMGTNSVGWAATDPEYRLLKAKGKDLWGIREFNEASGAVERRTHRISRRRRQREQVRIGILKDYFHDAICEVDPGFFRRLENSKYHEEDKDVEVRYKNNIFNDSNYTDKDYFNEYPTIYHLRNELISSTEKHDVRLVFLALLNMFKHRGHFLNAGLGENNGESNIDNAYFELTELLSELTEYHLSQDIDCKQIEAILSRRDMSRTHKAEELAGVLHVDLKNKPYKELIRGLCGLKFNACVVFPDVQSEEVTKLDICLSESTFDEKSDEIANIIGEDYFEIIMAMKEMFDIGSLASIMKGHNYLSQARVASYTKHKEDLKLLKEVIKKYCGKKEYDKFFNSDADGSYASYVGSYNSKNKERRVGNKRTSEELYKEIKKLLKDAQKEDENVQKILTSIENETFLPKQLTASNGVIPNQVHAREMKKILSNAENYLPFLTEKDETGLSVSERILKLFTFQIPYYVGPTSENSGKNGGNGWVVRREDGQVLPWNIDEKIDMKATSEAFISRMVRRCTYISGEQVLPKASLEYQSYCVLNEINNIKIDGERISVELKQDIYKAVFQKGKKVTKKQLCKYLHTRGIIETEEQVTGVDVSINNALTTYGKFKPIFGEDISKDSVQKMIEDIVFWCTVYGDSKKFLKDRIEEKYGNKLSEEQIKRILGFKFKDWGNLSKKFLELNGADTSTGESISIIRALWNNNLNLMELINSSLYNYKECLAEYQNTMLKTLSEIEAEDLNEYYFSAPVRRMIWQTILVIKELVKVLGCEPERIFVEMTRRPDEHKTRTSSRRNKFEELYKKVKDEATDWMQVIAKAEEDGKIRSKKMYLYLTQKGRCMYTGKHIELDDLFDKNLYDIDHIYPRHFVKDDNIDNNLVLVCKEKNAHKSDHYPIEEEIFLSQKKMWLELRKSGFITEEKYNRLMGRSPFSDEQKAGFIARQLVETSQGTKGVANILRQLLPGSKIVYAKASNVSEFRHTRDDIPKSRLVNDFHHAHDAYLNIVVGNVYYVKFTQNPLNFIKKDYDKYKEDYNLSKMFDWDVKRNGEVAWIAQRKDGEAGTITTVKKMLSRNTPLMTRYSFEGKGGLANETLYSAKKAKGEGYIPFKSSDDKMQDVTKYGGFTKVTGAYFFLVEHTEKKKRIRTIESVPVYFVQKIEKNPGELKKYCEEILGLVDADIRLKKIKIGSLIKRNGYFCYITGKTGNRLSVRNAVNLCLKNEWIKYISKLEKVKEKDTIDEIITKEKNEVLYSELIQKFKHCIFSKRPNPVGDKLEKGSEKFSNLSIKDQCAVLCQVLRMAAILGSECDMTLLGESSICGEMKISKKIGDEEIYLINQSVTGLYEKKINLHTV

SEQ ID NO: 21038 - protein, 1205 aa, unidentified
  REGION 1..1205: note = Cas Enzyme sequence
FLALLNMFKHRGHFLNAGLGENNGESNIDNAYFELTELLSELTEYHLSQDIDCKQIEAILSRRDMSRTHKAEELAGVLHVDLKNKPYKELIRGLCGLKFNACVVFPDVQSEEVTKLDICLSESTFDEKSDEIANIIGEDYFEIIMAMKEMFDIGSLASIMKGHNYLSQARVASYTKHKEDLKLLKEVIKKYCGKKEYDKFFNSDADGSYASYVGSYNSKNKERRVGNKRTSEELYKEIKKLLKDAQKEDENVQKILTSIENETFLPKQLTASNGVIPNQVHAREMKKILSNAENYLPFLTEKDETGLSVSERILKLFTFQIPYYVGPTSENSGKNGGNGWVVRREDGQVLPWNIDEKIDMKATSEAFISRMVRRCTYISGEQVLPKASLEYQSYCVLNEINNIKIDGERISVELKQDIYKAVFQKGKKVTKKQLCKYLHTRGIIETEEQVTGVDVSINNALTTYGKFKPIFGEDISKDSVQKMIEDIVFWCTVYGDSKKFLKDRIEEKYGNKLSEEQIKRILGFKFKDWGNLSKKFLELNGADTSTGESISIIRALWNNNLNLMELINSSLYNYKECLAEYQNTMLKTLSEIEAEDLNEYYFSAPVRRMIWQTILVIKELVKVLGCEPERIFVEMTRKPDEHKTRTSSRRNKFEELYKKVKDETTDWMQVIANAEEDGKIRSKKMYLYLTQKGRCMYTGKHIELDDLFDNNLYDIDHIYPRHFVKDDNIDNNLVLVCKEKNAHKSDHYPIEEEIFLSQKKMWLELRKSGFITEEKYNRLMDRNPFSDEQKAGFIARQLVETSQGTKGVANILRQLLPGSKIVYAKASNVSEFRCTRDDIQKSRLVNDFHHAHDAYLNIVVGNVYYVKFTQNPLNFIKKDYDKYKEDYNLSKMFDWDVKRNGEVAWIAQRKDGAAGTITTVKRMLSRNTPLMTRYSFDGKGGLTNETLYSAKKAKGEGYIPFKSSDDKMQDVTKYGGFTSVTGAYFFLVEHTEKKKRIRTIESVPVYLAQKIEQNPDELKKYCEEILGLIDADIRLKKIKIGSLIKRNGYFCYITGKTVNRLIVRNAVNLCLKNEWIKYISKLEKVKEKDAVDKIITKEKNEVLYSELIQKFKHGIFSKRPNPVGDKLEKDSEKFNNLSIKDQCAVLCQVLRMAAILGSECDMTLLGDSPNCGKMLISKKIGDEEIYLINQSVTGLYEKKINLHTV

SEQ ID NO: 21039 - protein, 1352 aa, unidentified
  REGION 1..1352: note = Cas Enzyme sequence
MTAFKYYLGLDMGTNSVGWAATDPEYRLLKAKGKDLWGIREFNEASGAVERRTHRISRRRRQREQVRIGILKDYFHDAICEVDPGFFRRLENSKYHEEDKDVEVRYKNNIFNDSNYTDKDYFNEYPTIYHLRNELISSTEKHDVRLVFLALLNMFKHRGHFLNAGLGENNGESNIDNVYFELTELLSELTEYHLSQDIDCKQIEAILSRRDMSRTHKAEELAGVLHVDLKNKPYKELIRGLCGLKFNACIVFPDVQSEEVTKLDICLSESTFDEKSDEIANIIGEDYFEIIMAMKEMFDIGSLASIMKGHNYLSQARVASYTKHKEDLKLLKEVIKKYCGKKEYDKFFNSDADGSYASYVGSYNSKNKERRVGNKRTSEELYKEIKKLLKDAQKEDGNVQKILTSIENETFLPKQLTASNGVIPNQVHAREMKKILSNAENYLPFLTEKDETGLSVSERILKLFTFQIPYYVGPTSENSGKNGGNGWVVRREDGQVLPWNIDEKIDMKATSEAFISRMVRRCTYISGEQVLPKASLEYQSYCVLNEINNIKIDGERISVELKQDIYKAVFQKGKKVTKKQLCKYLHTRGIIETEEQVTGVDVSINNALTTYGKFKPIFGEDISKDSVQKMIEDIVFWCTVYGDSKKFLKDRIEEKYGNKLSEEQIKRILGFKFKDWGNLSKKFLELNGADTSTGESISIIRALWNNNLNLMELINSSLYNYKECLAEYQNTMLKTLSEIEAEDLNEYYFSAPVRRMIWQTILVIKELVKVLGCEPERIFVEMTRRPDEHKTRTSSRRNKFEELYKKVKDEATDWMQVIAKAEEDGKIRSKKMYLYLTQKGRCMYTGKHIELDDLFDKNLYDIDHIYPRHFVKDDNIDNNLVLVCKEKNAHKSDHYPIEEEIFLSQKKMWLELRKSGFITEEKYNRLMGRSPFSDEQKAGFIARQLVETSQGTKGVANILRQLLPGSKIVYAKASNVSEFRHTRDDIPKSRLVNDFHHAHDAYLNIVVGNVYYVKFTQNPLNFIKKDYDKYKEDYNLSKMFDWDVKRNGEVAWIAQRKDGEAGTITTVKKMLSRNTPLMTRYSFEGKGGLANETLCSAKKAKGEGYIPFKSSDDKMQDVTKYGGFTKVTGAYFFLVEHTEKKKRIRTIESVPVYLAQKIEQNPDELKKYCEEILGLVDADIRLKKIKIGSLIKRNGYFCYITGKTGNRLSVRNAVNLCLKNEWIKYISKLEKVKEKDAVDEIITKEKNEVLYSELIQKFKHGIFSKRPNPVEDKLEKGSEKFSNLSIKEQCAVLCQILQLAAVLGSECDMTLLGESAHCGKMLISKKIGDEEIYLLNQSVTGLYEKKINLHTV

SEQ ID NO: 21040 - protein, 1352 aa, unidentified; identical to SEQ ID NO: 21033
  REGION 1..1352: note = Cas Enzyme sequence

SEQ ID NO: 21041 - protein, 1353 aa, unidentified
  REGION 1..1353: note = Cas Enzyme sequence
MATYKYYLGLDMGTNSVGWAVTDANYNLLKAKGKDLWGIREFNEASTAVERRTHRISRRRRQREQVRIGLLKDYFHDAIYEVDPDFFHRLTNSKYHMEDKDAEVRYKNNIFNDDNYTDKDYFNQYPTIYHLRRELLENTDKHDVRLVFLALLNMFKHRGHFLNSGLGENSGENNISNAYLELTSLLSELTPYNLNETIDCKKIEDLLSSKDMSRTRKAEGLAQILGVDYGNKPYKELIRGLCGLKFNAFVIFPEIQSDEVQKLDVCLSEASFDEKSDEIANIIGEDYFEIIMSMKEIYDIGSLAGIMKGHNYLSQARVTLYENHKEDLKILKDVIKKYCDKDEYDSFFNSDADGSYASYVGSYNSKIKQRRVGNKRSSEELYKTIKKILKNAPAEDVDVQSILKAIENETFLPKQLTTSNGIIPNQVHAKEMKKILSNAESYLSFLNEKDETGLSVSEKILKLFTFQIPYYVGPTTEKSNKDGGNGWVVRKEEGQVLPWNINEKIDMKATSEAFISRMVRRCTYISDEPVLPKASLEYQSFCVLNEINNIKIDGERISVELKQDIYKDVFQKGKRVTKKQLCKYLHTRGVIEAEEQVAGIDITINNALTTYGKFKAIFGDDMSKDSVQKMVEDIVFWCTIYGDSKNFLKDRIEEKYGEKLTKEQIKRIVGFKFKDWGNLSKNFLELSGADVSTGESVSIIRALWNNNLNLMELINSRLYDYKDRLAEYQNTMIKTLSDIEAEDLDEYYFSAPVKRMVWQTILIIKELVKVLGCEPDHIFVEMTRRPDERKMRTASRRKKFEELYKKVKDEDVDWLKVIAHADETGNIRSKKMYLYLTQKGRCMYTGRHIELSDLFNNNLYDIDHIYPRHFVKDDNIDNNLVLVCKEKNAHKSDIYPLEDDILTSQKNMWSELRRSGFITEEKYNRLIGRNSFTDEQKAGFIARQLVETSQGTKGVANILQQLLPESKIVYAKASNVSEFRNTRDIPKSRLINEFHHAHDAYLNIVVGNVYYVKFTQNPLNFIKNDYDRDKVKNNYNLSRMFDWDIKRNGEVAWIAQKEGGEAGTIVTVKKMLGRNTPLMTRYSFEGKGGLSNETLYSAKKAKEEGYIPFKASDEKLQDVTKYGGFTSVTCAYFFLVEHSEKKKRIRTIETVPLYLAQKIEQDPSELEKYCEQILGLIDFDIRVRKIKIGSLIKYHDYFFYVTGKTGQRLLLRNAVNMCLKKEWVKYISKLEKVRDKAVIDEIVTKEKSELLYLELLKKFKTSIFSNRPNPVGDKLDKSKDKFLNLDIEKQCIILCQILQLSSVLGSECDMTLLGESAHCGKMLISKKIGDEDIYLINQSVTGLYEKKINLRTV

SEQ ID NO: 21042 - protein, 1352 aa, unidentified
  REGION 1..1352: note = Cas Enzyme sequence
MTAFKYYLGLDMGTNSVGWAATDPEYRLLKAKGKDLWGIREFNEASGAVERRTHRISRRRKQREQVRIGILKDYFHDAICEVDPSFFQRLENSKYHEEDKDVEVRYKNNIFNDSNYTDKDYFNEYPTIYHLRNELISSTEKHDVRLVFLALLNMFKHRGHFLNAGLGENNGESNIDNAYFELTELLSELTEYHLSQDIDCKQIEAILSRRDMSRTHKAEELAGVLHVDLKNKPYKELIRGLCGLKFNACVVFPDVQSEEVTKLDICLSESTFDEKSDEIANIIGEDYFEIIMAMKEMFDIGSLASIMKGHNYLSQARVASYTKHKEDLKLLKEVIKKYCGKKEYDKFFNSDADGSYASYVGSYNSKNKERRVGNKRTSEELYKEIKKLLKDAQKEDENVQKILTSIENETFLPKQLTASNGVIPNQVHAREMKKILSNAENYLPFLTEKDETGLSVSERILKLFTFQIPYYVGPTSENSGKNGGNGWVVRREDGQVLPWNIDEKIDMKATSEAFISRMVRRCTYISGEQVLPKASLEYQSYCVLNEINNIKIDGERISVELKQDIYKAVFQKGKKVTKKQLCKYLHTRGIIETEEQVTGVDVSINNALTTYGKFKPIFGEDISKDSVQKMIEDIVFWCTVYGDSKKFLKDRIEEKYGNKLSEEQIKRILGFKFKDWGNLSKKFLELNGADTSTGESISIIRALWNNNLNLMELINSSLYNYKECLAEYQNTMLKTLSEIEAEDLNEYYFSAPVRRMIWQTILVIKELVKVLGCEPERIFVEMTRRPDEHKTRTSSRRNKFEELYKKVKDETTDWMQVIANAEEDGKIRSKKMYLYLTQKGRCMYTGKHIELDDLFDNNLYDIDHIYPRHFVKDDNIDNNLVLVCKEKNAHKSDHYPIEEEIFLSQKKMWLELRKSGFITEEKYNRLMDRNPFSDEQKAGFIARQLVETSQGTKGVANILRQLLPGSKIVYAKASNVSEFRCTRDDIPKSRLVNDFHHAHDAYLNIVVGNVYYVKFTQNPLNFIKKDYDKYKEDYNLSKMFDWDVKRNGEVAWIAQRKDGAAGTITTVKRMLSRNTPLMTRYSFDGKGGLTNETLYSAKKAKGEGYIPFKSSDDKMQDVTKYGGFTSVTGAYFFLVEHTEKKKRIRTIESVPVYLAQKIEQNPDELKKYCEEILGLIDADIRLKKIKIGSLIKRNGYFCYITGKTGNRLIVRNAVNLCLKNEWIKYISKLEKVKEKDAVDKIITKEKNEVLYSELIQKFKHGIFSKRPNPVGDKLEKDSEKFNNLSIKDQCAVLCQVLRMAAILGSECDMTLLGDSPNCGKMLISKKIGDEEIYLINQSVTGLYEKKINLHTV

SEQ ID NO: 21043 - protein, 1078 aa, unidentified
  REGION 1..1078: note = Cas Enzyme sequence
MENNGNISFGIDLGIASIGWSVLDLDNNIIKDKGIYLFTEAEKAENRRILRGTRRRKKRKKHREERIYEILKRKNIYLKNTVDSNLLEVRLKSLKEKIEMQDIINIIFYFSRHRGYIPFKDEDERKSEIVDELRNENYLACEIQNEIYKNNKQYRGDEYLMQHSDYMKELHEMLEEQSKYYSEIDEEFIQDIEDIINSKRKFWEGPGGPRENQLNKYGRYRTLDDLIEYNKNKNYHKYLFEDLIGNCSVYANEKKASAWNFYAECFNFYNDIVNLRIDGQDLDETNKNFFEVVSNNVYKLKAESIQNLKDVVLNSKSVNYNNLFRKIFNIDFDKIYGYKKNSEGNAEICKFEKIRSIKNKLEDEDMISELLSDMDAYNKAIYLIQVSPDRQTRYEILKDNLSNIYSEKLLTFLSNCNLENKYHSFSEKALKKYLELMQVNNENSSYIERNFESDINSDVEEELIRNYIGENIEKGNLKYINSKYVEDIVASPATKKSLRKAISIINKLFSKYGYPNYICVENTRDLLTEKKQKEYEAKTLENQSKRTNAKKKLKEQGYEENDTNIDKYILLDETNFKCAYCNKDITVANCEVEHILPRSITANDTFLNKTVSCSQCNGEKNNRTPYEYLMSIGMYSDYKERVIKNKKFVDEKKNNLLFEQNLNKYEKNFKNRNLNDTAYATNELANQLNIFKKAYLRNNYGEFLDFKVLKVPGQFTGIIRKKANLDKNRDLDYHHAVDATIVASIPKLKIGKLISMIQNEPDKYWKINNLNEYRESLYEDLYLNKDLKEDLLNTDFSNTRAVREVTKKATGPLFDANISKVIIKDDQYYKIEQIDNIYNIMPADFEKEFNQNKYFLCKDNNPELYDRLFKIVELYSNKSKKVNPFVEYCKENNVKDGEKFDYLKHGIRQSNNPNSSVVVRLRFLQKVNNPYIISNKKLIKSNRENKKEILLMYDSLKSYCTRVYRDIENGKLYFMPIYKIFIDNNSGEIRTDSDYYKKVYNECVKQDIEKLEKYMDIYNNEYVRFENKKGEVAEGLVSYYDKSNNKIEIKKTSKNITANTVKIEKIKSDVLGLYNLNF

SEQ ID NO: 21044 - protein, 1044 aa, unidentified
  REGION 1..1044: note = Cas Enzyme sequence
IYLFTEAEKAENRRILRGTRRRKKRKKHREERIYEILKRKNIYLKNTVDSNLLEVRLKSLKEKIEMQDIINIIFYFSRHRGYIPFKDEDERKSEIVDELRNENYLACEIQNEIYKNNKQYRGDEYLMQHSDYMKELHEMLEEQSKYYSEIDEEFIQDIEDIINSKRKFWEGPGGPRENQLNKYGRYRTLDDLIEYNKNKNYHKYLFEDLIGNCSVYANEKKASAWNFYAECFNFYNDIVNLRIDGQDLDETNKNFFEVVSNNVYKLKAESIQNLKDVVLNSKSVNYNNLFRKIFNIDFDKIYGYKKNSEGNAEICKFEKIRSIKNKLEDEDMISELLSDMDAYNKAIYLIQVSPDRQTRYEILKDNLSNIYSEKLLTFLSNCNLENKYHSFSEKALKKYLELMQVNNENSSYIERNFESDINSDVEEELIRNYIGENIEKGNLKYINSKYVEDIVASPATKKSLRKAISIINKLFSKYGYPNYICVENTRDLLTEKKQKEYEAKTLENQSKRTNAKKKLKEQGYEENDTNIDKYILLDETNFKCAYCNKDITVANCEVEHILPRSITANDTFLNKTVSCSQCNGEKNNRTPYEYLMSIGMYSDYKERVIKNKKFVDEKKNNLLFEQNLNKYEKNFKNRNLNDTAYATNELANQLNIFKKAYLRNNYGEFLDFKVLKVPGQFTGIIRKKANLDKNRDLDYHHAVDATIVASIPKLKIGKLISMIQNEPDKYWKINNLNEYRESLYEDLYLNKDLKEDLLNADFSNTRAVREVTKKATGPLFDANISKVIIKDDQYYKIEQIDNIYNIMPADFEKEFNQNKYFLCKDNNPELYDRLFKIVELYSNKSKKVNPFVEYCKENNVKDGEKFDYLKHGIRQSNNPNSSVVVRLRFLQKVNNPYIISNKKLIKSNRENKKEILLMYDSLKSYCTRVYRDIENGKLYFMPIYKIFIDNNSGEIRTDSDYYKKVYNECVKQDIEKLEKYMDIYNNEYVRFENKKGEVAEGLVSYYDKSNNKIEIKKTSKNITANTVKIEKIKSDVLGLYNLNF

SEQ ID NO: 21045 - protein, 937 aa, unidentified
  REGION 1..937: note = Cas Enzyme sequence
NNSLLPKQVTKDNSVIPYQIHLHELKIILSNASEYFAFLKETDDKGISVCDKIISIFKFRIPYYVGPINTAHEDAGFCWAEKKANEKVFPWNFSEVIDEEKSAEKFIRRMTNKCTYIYNADVLPKNSLLYSEFQVLNEINNLKINDEPISNDLKIKIFENLFMKEKKVTKKKLTNYLIANGYITNESSITGIDIELKNSLASYIDFKNILGNRANDRDMVENIIKWITLFGDSKRMLNERIEKEYGNIINQEEIVKLSNLKYKGWGRLSKELLCGIYDVDKETGELLNIISMMREKNDNLMQLLSSRYSYSDKISQINAQSIKQSNEISYEMVDELRLSPAVKRGIWQSLLILQELLKIMQHSPKKIFIEFARQEEKVKKRTLSRKESLIELYKNCKDQYAELVNDLETKTDFDLRNDRLYLYYTQLGRCMYTGESIDLFTLLRDTTSEIYDIDHIYPRSKMKDDSLENRVLVKKTANMQKGDNYPLPVSFMQQKALWNHLHNCKLIGDKKYNRLTSRKSLTDDDFANFIERQLVETRQSTKAFAELLKNIIPESDIVYVKANNVSEFRNNFEIVKVREINDLHHAKDAYLNIVVGNVYDVKFTRNPRNFIVNNSGKYNLRDLFKYDVKNQNCTAWKGGKEGTISTVKKTVEKNNILFTRYAYENKGEISDQQIMRKGKGQLPIKASDKRLHNIERYGGYNKASTAYFFLVEHGMKKERVRTIEFVPVYLAEEIEKDSDKLLRYCEENLNLVNPDIRIPKIKINALISYDGFLMHIKGRQNKHLIYANAQQLYIPKEYIKYLTIIYRNSDQVKSKKISVATAEKDFSNDMNIEIYDLLKDKLANSIYSKKMINQVKYLDKGRPTFITLTKMEQCEVIKKIIVLFKCVSGNTDLSLIGAGKSVGTLLTNKKLDANISLKIINKSITGVFSKEVDLNNI

SEQ ID NO: 21046 - protein, 970 aa, unidentified
  REGION 1..970: note = Cas Enzyme sequence
EDKKYILDKIERNELLPKAVSKQNGVIPYQLHLVELNKILSNAERYLPFLKKEDEYGTVSDKIRKLFTFRIPYYVGPLNGHSPFAWAVRKDENGHIYPWNFERKIDIEASAEEFIRRMTNKCTYLVKKDVLPKNSLLYTEFMVLNELNNVRIGSAQEKLPPGMKARVWERLFLKDKKITAKKMCSYLIREEHISKEEAAQISGIERDFKASLAPWIDMRKILGDNFTVSDSEKIIKDITLFGADKKMLRRRLKARFGYLEDCQVKELVRLPYQGWGRLSKEFLTQILPKAERDSTVLVDQETGEVMNIITALKKTDHNLMELLSGKFGYSAALSEVNTTSVSVCDKAISYKNIQDMRISPAVKRPLWQTLRVIKEIIHIMGKAPSRIFIEMARAEDEKKWKTVSRKDRLLDLYKKCKDEIRNWSADIKKLGEEIKELSDGQLRSDKLYLYYTQMGRSMYTGKPICLGSLMAGADYDIDHIYPRSATGDDSLDNRVLVERTENAKKGDHYPLSIEIQGGRAVFWKVLLDKGFISKEKYRRLTRKTLLTDDEKAGFIGRQLVETRQSTKAIAEILKKAFPETKIIYTKARNVSRFRQYAEFVKVRDMNDYHHAKDAYLNIVVGNAFYTKFTSNPIHFLSERNAVYSLNERTFYQFPIQRGSTMAWEPGDSGTMAVVRKWMDKNNILYTRMPFEEKGGLFDQNILKKGKGQVSLRARGALSDIQKYGGYNNATASYFMLVKAEKNGKTIYLLETVPLHLSGRLESIEDKINFCRELWHRDRKDYKNPVICIPKIYKQSLFEVDGFREHISAKTGNQFVMRNAEQLCLNAESAQIIKNVLKFNQRKQVQKELKVTVHDKITEENLINIFETFISKIQTSIYRNKFEASVGLMIKGKGTFIELSMEDKCKCIGEILHLFQCNPVLSDLQLIGGKKASGRIYMGKRFDGNKKVFLVLQSVTGFFEKKILLAPYEKK

SEQ ID NO: 21047 - protein, 1360 aa, unidentified
  REGION 1..1360: note = Cas Enzyme sequence
MKEINEYYLGLDMGEGSLGWAVTTPDYHVVKKAGKALWGVRLFESAKTGKERRVFRTGRRRIERRNRRIDFLQELFSEAVCEKDPGFYQRLNDSRLWEEDKTERQINSLFNDVDFTDKSYHKKFPTIYHLRQKLMEDSCEFDVRLVYLAIHHILKHRGHFLLENFEIREDGAVGFEEAMADLGNVLGQFLDRSLPVENNDACKEILKNRKLNKLEKLEQLGKLYDAGGDKSIKEIFRLIVGGTAHLAVIFCDETLKNTERGKISFEDAQYEEYKNDVQTILDDRFDVVAACETLHNWAILAELMGNYKYISDAKVAIFNEHRKDLTVLKRLLKRDSNVYTKMFRMAGKNSYSAYVGLCKIHGKKVPIEKACTQGDFAGEIKKIIKNFPDSEDKKYILDKIERNELLPKAVSKQNGVIPYQLHLVELNKILSNAERYLPFLKKEDEYGTVSDKIRKLFTFRIPYYVGPLNGHSPFAWAVRKDENGHIYPWNFERKIDIEASAEEFIRRMTNKCTYLVKKDVLPKNSLLYTEFMVLNELNNVRIGSAQEKLPPGMKARVWERLFLKDKKITAKKMCSYLIREEHISKEEAAQISGIERDFKASLAPWIDMRKILGDNFTVSDSEKIIKDITLFGTDKKMLRRRLKARFGYLEDCQVKELVRLPYQGWGRLSKEFLTQILPKAERDSTVLVDQETGEVMNIITALKKTDHNLMELLSGKFGYSAALSEVNTTSVSVCDKAISYKNIQDMRISPAVKRPLWQTLRVIKEIIHIMGKAPSRIFIEMARAEDEKKWKTVSRKDRLLDLYKKCKDEIRNWSADIKKLGEEIKELSDGQLRSDKLYLYYTQMGRSMYTGKPICLGSLMAGADYDIDHIYPRSATGDDSLDNRVLVERTENAKKGDHYPLSIEIQGGRAVFWKVLLDKGFISKEKYRRLTRKTLLTDDEKAGFIGRQLVETRQSTKAIAEILKKAFPETKIIYTKARNVSRFRQYAEFVKVRDMNDYHHAKDAYLNIVVGNAFYTKFTSNPIHFLSEKNAVYSLNERTFYQFPIQRGSTMAWEPGDSGTMAVVRKWMDKNNILYTRMPFEEKGGLFDQNILKKGKGQVSLRARGALSDIQKYGGYNNATASYFMLVKAEKNGKTIYLLETVPLHLSGRLESIEDKINFCRELWHRDRKDYKNPVICIPKIYKQSLFEVDGFREHISAKTGNQFVMRNAEQLCLNAESAQIIKNVLKFNQRKQVQKELKITVHDKITEENLINIFETFISKIQTSIYRNKFEASVGLMIKGKGTFIELSMEDKCKCIGEILHLFQCNPVLSDLQLIGGKKASGRIYMGKRFDGNKKVFLVLQSVTGFFEKKILLAPYEKK

SEQ ID NO: 21048 - protein, 1360 aa, unidentified
  REGION 1..1360: note = Cas Enzyme sequence
MKEINEYYLGLDMGEGSLGWAVTTPDYHVVKKAGKALWGVRLFESAKTAKERRVFRTGRRRIERRNRRIDFLQELFSEAVCEKDPGFYQRLNDSRLWEEDKTERQINSLFNDVDFTDKSYHKKFPTIYHLRQKLMEDSCEFDVRLVYLAIHHILKHRGHFLLENFEIREDGAVGFEEAMADLGNVLGQFLDRSLPVENNDACKEILKNRKLNKLEKLEQLGKLYDAGGDKSIKEIFRLIVGGTAHLAVIFCDETLKNTERGKISFEDAQYEEYKNDVQTILDDRFDVVAACETLHNWAILAELMGNYKYISDAKVAIFNEHRKDLTVLKRLLKRDSNVYTKMFRMAGKNSYSAYVGLCKIHGKKVPIEKACTQGDFAGEIKKIIKNFPDSEDKKYILDKIERNELLPKAVSKQNGVIPYQLHLVELNKILSNAERYLPFLKKEDEYGTVSDKIRKLFTFRIPYYVGPLNGHSPFAWAVRKDENGHIYPWNFERKIDIEASAEEFIRRMTNKCTYLVKKDVLPKNSLLYTEFMVLNELNNVRIGSAQEKLPPGMKARVWERLFLKDKKITAKKMCSYLIREEHISKEEAAQISGIERDFKASLAPWIDMRKILGDNFTVSDSEKIIKDITLFGTDKKMLRRRLKARFGYLEDCQVKELVRLPYQGWGRLSKEFLTQILPKAERDSTVLVDQETGEVMNIITALKKTDHNLMELLSGKFGYSAALSEVNTTSVSVCDKAISYKNIQDMRISPAVKRPLWQTLRVIKEIIHIMGKAPSRIFIEMARAEDEKKWKTVSRKDRLLDLYKKCKDEIRNWSADIKKLGEEIKELSDGQLRSDKLYLYYTQMGRSMYTGKPICLGSLMAGADYDIDHIYPRSATGDDSLDNRVLVERTENAKKGDHYPLSIEIQGGRAVFWKVLLDKGFISKEKYRRLTRKTLLTDDEKAGFIGRQLVETRQSTKAIAEILKKAFPETKIIYTKARNVSRFRQYAEFVKVRDMNDYHHAKDAYLNIVVGNAFYTKFTSNPIHFLSEKNAVYSLNERTFYQFPIQRGSTMAWEPGDSGTMAVVRKWMDKNNILYTRMPFEEKGGLFDQNILKKGKGQVSLRARGALSDIQKYGGYNNATASYFMLVKAEKNGKTIYLLETVPLHLSGRLESIEDKINFCRELWHRDRKDYKNPVICIPKIYKQSLFEVDGFREHISAKTGNQFVMRNAEQLCLNAESAQIIKNVLKFNQRKQVQKELKITVHDKITEENLINIFETFISKIQTSIYRNKFEASVGLMIKGKGTFIELSMEDKCKCIGEILHLFQCNPVLSDLQLIGGKKASGRIYMGKRFDGNKKVFLVLQSVTGFFEKKILLAPYEKK

SEQ ID NO: 21049 - protein, 1360 aa, unidentified; identical to SEQ ID NO: 20669
  REGION 1..1360: note = Cas Enzyme sequence

SEQ ID NO: 21050 - protein, 1360 aa, unidentified
  REGION 1..1360: note = Cas Enzyme sequence
MKEINEYYLGLDMGEGSLGWAVTTPDYHVVKKAGKALWGVRLFELAKTAKERRVFRTGRRRIERRNQRIDFLQELFSEAVCEKDPGFYQRLNDSRLWEEDKTERQINSLFNDVDFTDKSYHKKFPTIYHLRQKLMDDSCEFDVRLVYLAIHHILKHRGHFLLENFEIREDGAVGFEEAMADLGNVLGQFLDRSLPVENNDACKEILKNRKLNKLEKLEQLGKLYDAGGDKSIKEIFRLIVGGTAHLAVIFCDETLKNTERGKISFEDAQYEEYKNDVQTILDDRFDVVAACETLHNWAILAELMGNYKYISDAKVAIFNEHRKDLTVLKRLLKRDSNVYTKMFRMAGKNSYSAYVGLCKIHGKKVPIEKACTQGDFAGEIKKIIKNFPDSEDKKYILDKIERNELLPKAVSKQNGVIPYQLHLVELNKILSNAERYLPFLKKEDEYGTVSDKIRKLFTFRIPYYVGPLNGHSPFAWAVRKDGNGHIYPWNFERKIDIEASAEEFIRRMTNKCTYFVKKDVLPKNSLLYTEFMVLNELNNVRIGSAQEKLPPGMKARVWERLFLKDKKITAKKMCSYLIREEHISKEEAAQISGIERDFKASLAPWIDMRKILGDNFTVSDSEIIIKDITLFGADKKMLRRRLKARFGYLEDCQVKELVRLPYQGWGRLSKEFLTQILPKAERDSTVLVDQETGEVMNIITALKKTDHNLMELLSGKFGYSAALSEVNTTSVSVCDKAISYKNIQDMRISPAVKRPLWQTLRVIKEIIHIMGKAPSRIFIEMARAEDEKKWKTVSRKDRLLDLYKKCKDEIRNWSADIKKLGEEIKELSDGQLRSDKLYLYYTQMGRSMYTGKPICLGSLMAGADYDIDHIYPRSATGDDSLDNRVLVERTENAKKGDHYPLSIEIQGGRAVFWKVLLDKGFISKEKYRRLTRKTLLTDDEKAGFIGRQLVETRQSTKAIAEILKKAFPETKIIYTKARNVSRFRQYAEFVKVRDMNDYHHAKDAYLNIVVGNAFYTKFTSNPIHFLSEKNAVYSLNERTFYQFPIQRGSTMAWEPGDSGTMAVVRKWMDKNNILYTRMPFEEKGGLFDQNILKKGKGQVSLRARGALSDIQKYGGYNNATASYFMLVKAEKNGKTIYLLETVPLHLSGRLESIEDKINFCRELWHRDRKDYKNPVICIPKIYKQSLFEVDGFREHISAKTGNQFVMRNAEQLCLNAESAQIIKNVLKFNQRKQVQKELKITVHDKITEENLINIFETFISKIQTSIYRNKFEASVGLMIKGKGTFIELSMEDKCKCIGEILHLFQCNPVLSDLQLIGGKKASGRIYMGKRFDGNKKVFLVLQSVTGFFEKKILLAPYEKK

SEQ ID NO: 21051 - protein, 1360 aa, unidentified; identical to SEQ ID NO: 20665
  REGION 1..1360: note = Cas Enzyme sequence

SEQ ID NO: 21052 - protein, 1360 aa, unidentified
  REGION 1..1360: note = Cas Enzyme sequence
MKEINEYYLGLDMGEGSLGWAVTTPDYHVVKKAGKALWGVRLFESAKTAKERRVFRTGRRRIERRNRRIDFLQELFSEAVCEKDPGFYQRLNDSRLWEEDKTERQINSLFNDVDFTDKSYHKKFPTIYHLRQKLMDDSCEFDVRLVYLAIHHILKHRGHFLLENFEIREDGAVGFEEAMADLGNVLGQFLDRSLPVENNDACKEILKNRKLNKLEKLEQLGKLYDAGGDKSIKEIFRLIVGGTAHLAVIFCDETLKNTERGKISFEDAQYEEYKNDVQTILDDRFDVVAACETLHNWAILAELMGNYKYISDAKVAIFNEHRKDLTVLKRLLKRDSNVYTKMFRMAGKNSYSAYVGLCKIHGKKVPIEKACTQGDFAGEIKKIIKNFPDSEDKKYILDKIERNELLPKAVSKQNGVIPYQLHLVELNKILSNAERYLPFLKKEDEYGTVSDKIRKLFTFRIPYYVGPLNGHSPFAWAVRKDENGHIYPWNFERKIDIEASAEEFIRRMTNKCTYLVKKDVLPKNSLLYTEFMVLNELNNVRIGSAQEKLPPGMKARVWERLFLKDKKITAKKMCSYLIREEHISKEEAAQISGIERDFKASLAPWIDMRKILGDNFTVSDSEKIIKDITLFGADKKMLRRRLKARFGYLEDCQVKELVRLPYQGWGRLSKEFLTQILPKAERDSTVLVDQETGEVMNIITALKKTDHNLMELLSGKFGYSAALSEVNTTSVSVCDKAISYKNIQDMRISPAVKRPLWQTLRVIKEIIHIMGKAPSRIFIEMARAEDEKKWKTVSRKDRLLDLYKKCKDEIRHWSADIKKLGEEIKELSDGQLRSDKLYLYYTQMGRSMYTGKPICLGSLMAGADYDIDHIYPRSATGDDSLDNRVLVERTENAKKGDHYPLSIEIQGGRVVFWKVLLDKGFISKEKYRRLTRKTLLTDDEKAGFIGRQLVETRQSTKAIAEILKKAFPETKIIYTKARNVSRFRQYAEFVKVRDMNDYHHAKDAYLNIVVGNAFYTKFTSNPIHFLSEKNAVYSLNERTFYQFPIQRGSTMAWEPGDSGTMAVVRKWMDKNNILYTRMPFEEKGGLFDQNILKKGKGQVSLRARGALSDIQKYGGYNNATASYFMLVKAEKNGKTIYLLETVPLHLSGRLESIEDKINFCRELWHRDRKDYKNPVICIPKIYKQSLFEVDGFREHISAKTGNQFVMRNAEQLCLNAESAQIIKNVLKFNQRKQVQKELKITVHDKITEENLINIFETFISKIQTSIYRNKFEASVGLMIKGKGTFIELSMEDKCKCIGEILHLFQCNPVLSDLQLIGGKKASGRIYMGKRFDGNKKVFLVLQSVTGFFEKKILLAPYEKK

SEQ ID NO: 21053 - protein, 1360 aa, unidentified
  REGION 1..1360: note = Cas Enzyme sequence
MKEINEYYLGLDMGEGSLGWTVTTPDYHVVKKAGKALWGVRLFESAKTAKERRVFRTGRRRIERRNRRIDFLQELFSEAVCEKDPGFYQRLNDSRLWEEDKTERQINSLFNDVDFTDKSYHKKFPTIYHLRQKLMEDSCEFDVRLVYLAIHHILKHRGHFLLENFEIREDGAVGFEEAMADLGNVLGQFLDRSLPEENNDACKEILKNRKLNKLEKLEQLGKLYDAGGDKSIKEIFRLIVGGTAHLAVIFCDETLKNTERGKISFEDAQYEEYKNDVQTILDDRFDVVAACETLHNWAILAELMGNYKYISDAKVAIFNEHRKDLTVLKRLLKRDSNVYTKMFRMAGKNSYSAYVGLCKIHGKKVPIEKACTQGDFAGEIKKIIKNFPDSEDKKYILDKIERNELLPKAVSKQNGVIPYQLHLVELNKILSNAERYLPFLKKEDEYGTVSDKIRKLFTFRIPYYVGPLNGHSSFAWAVRKDENGHIYPWNFERKIDIEASAEEFIRRMTNKCTYLVKKDVLPKNSLLYTEFMVLNELNNVRIGSAQEKLPPGMKVRVWERLFLKDKKITAKKMCSYLIREEHISKEEAAQISGIERDFKASLAPWIDMRKILGDNFTVSDSEKIIKDITLFGADKKMLRRRLKARFGYLEDCQVKELVRLPYQGWGRLSKEFLTQILPKAERDSTVLVDQETGEVMNIITALKKTDHNLMELLSGKFGYSAALSEVNTTSVSVCDKAISYKNIQDMHISPAVKRPLWQTLRVIKEIIHIMGKAPSRIFIEMARAEDEKKWKTVSRKDRLLDLYKKCKDEIRNWSADIKKLGEEIEELSDGQLRSDKLYLYYTQMGRSMYTGKPICLGSLMAGADYDIDHIYPRSATGDDSLDNRVLVERTENAKKGDHYPLSIEIQGGRAVFWKVLLDKGFISKEKYRRLTRKTLLTDDEKAGFIGRQLVETRQSTKAIAEILKKAFPETKIIYTKARNVSRFRQYAEFVKVRDMNDYHHAKDAYLNIVVGNAFYTKFTSNPIHFLSERNAVYSLNERTFYQFPIQRGSTMAWEPGDSGTMAVVRKWMDKNNILYTRMPFEEKGGLFDQNILKKGKGQVSLRACGALSDIQKYGGYNNATASYFMLVKAEKNGKTIYLLETVPLHLSGRLESIEDKINFCRELWHRDRKDYKNPVICIPKIYKQSLFEVDGFREHISAKTGNQFVMRNAEQLCLNAESAQIIKNVLKFNQRKQVQKELKITVHDKITEENLINIFETFISKIQTSIYRNKFEASVGLMIKGKGTFIELSMEDKCKCIGEILHLFQCNPVLSDLQLIGGKKASGRIYMGKRFDGNKKVFLVLQSVTGFFEKKILLAPYEKK

SEQ ID NO: 21054 - protein, 1080 aa, unidentified
  REGION 1..1080: note = Cas Enzyme sequence
MLSYGIGLDIGIASVGWAVVALDNNELPYGIINMGSRIFDAAENPKDGASLALPRREARSMRRRLRRHRHRNERIRAMLVRRGILTQGSLDTLFDGQLEDIYALRVRALDQSVTAEEFARILIHLSQRRGFRSNRKAEASKEDGELLSAVSKNAERMRENGYRTAAEMFMKSEEYSEHKRNKGNSYISTVSRSMVEAEAKMIFAAQRSFGMSFASEETEGEYLSILLSQRSFDEGPGGDSPYGGNQIEKMIGKCTLEPDELRAAKASYSFEYFNLLTRINNIRIVEGGASVPLDNAQRALIVELAHKTEALDFAKLRKALELSPSQTFNLVYYRADETQEASERKQKFSFLKAYHELRRAFDKLSKGYINGMSREKRNAIAYALTAYKTEKSIRTGLENAGLTEDELNTALTIGSFSKFGHLSVKACDKLIPYLEQGMKYNDACAAAGYNFKAHDGEKRSRLLHITSDDMEPITSPVVRRAVSQTVKVINAIIRERGCSPTFVNIELAREMAKDFQERGRLKKEMDANASQNERVMEQIRELGKTQPTGQDLLKYLLWQEQDGRCAYSLKSIPIENLFDEGYAEIDHIIPYSISFDDSRRNKVLVLSKENREKSNRLPLQYLSGKRRDDFIVWVNTAVRDQKKRRNLLKEEISDADRGKFIERNLQDTKTMSSFLMNYLNDNLEFAPSDKRRKRVTAVNGAVTSYLRKRWGIRKLRANGDTHHAVDALVIACTTDSLIQRVSRYSRWHESSTVEVDPETGEVIERFPYPWPQFRKELEGRLTSDPMKNLRELNLPLYGDPEVPLRPLFVSRMPRRKVTGAAHKETIKSPAALDDGFLVVKKPLTELKLDKDGEISNYYMPQSDRLLYEALKRQLSAHGGDGKKAFTEPFHKPKSDGTPGPVVNKVKICEPSTMSVPILGGSGAADNDSMVRVDVFRVEGEGYYFVPIYVADTLKPELPNRACVGSKPYSKWKIMDDRDFIFSLYPNDLFKATSRKTLTLKLSQPDSTLPPEYCVKSELLYFKGADISTASFAAINHDNSYKVKGLGIKTLENLEKCTVDVLGTYHAVGKETRQPFYKKRG

SEQ ID NO: 21055 - protein, 1080 aa, unidentified
  REGION 1..1080: note = Cas Enzyme sequence
MLSYGIGLDIGIASVGWAVVALDNNELPYGIINMGSRIFDAAENPKDGASLALPRREARSMRRRLRRHRHRNERIRAMLVRRGILTQGSLDTLFDGQLEDIYALRVRALDQSVTAEEFARILIHLSQRRGFRSNRKAEASKEDGELLSAVSKNAERMRENGYRTAAEMFMKSEEYSEHKRNKGNSYISTVSRGMVEAEAKMIFAAQRSFGMSFASEETEGEYLSILLSQRSFDEGPGGDSPYGGNQIEKMIGKCTLEPDELRAAKASYSFEYFNLLTRINNIRIVEGGASVPLDNAQRALIVELAHKTEALDFAKLRKALELSPSQTFNLVYYRADETQEASERKQKFSFLRAYHELRRAFDKLSKGYINGMSREKRNAIAYALTAYKTEKSIRTGLENAGLTEDELNTALTIGSFSKFGHLSVKACDKLIPYLEQGMKYNDACAAAGYNFKAHDGEKRSRLLHITSDDMEPITSPVVRRAVSQTVKVINAIIRERGCSPTFVNIELAREMAKDFQERGRLKKEMDANASQNERVMEQIRELGKTQPTGQDLLKYLLWQEQDGRCAYSLKSIPIENLFDDGYAEIDHIIPYSISFDDSRRNKVLVLSKENREKSNRLPLQYLSGKRRDDFTVWVNTAVRDQKKRRNLLKEEISDVDRGKFIERNLQDTKTMSSFLMNYLNDNLEFAPSDKRRKRVTAVNGAVTSYLRKRWGIRKLRANGDTHHAVDALVIACTTDSLIQRVSRYSRWHESSTVEVDPETGEVIDRFPYPWPQFRKELEGRLTSDPMKNLRELNLPLYGDSEVPLRPLFVSRMPRRKVTGAAHKETIKSPAALDDGFLVVKKPLTELKLDKDGEISNYYMPQSDRLLYEALKRQLSAHGGDGKKAFTEPFHKPKSDGTPGPVVNKVKICEPSTMSVPILGGSGAADNDSMVRVDVFRVEGEGYYFVPIYVADTLKPELPNRACVAFKPYDQWKVMDDSNFIFSLYPNDLFKATSRKTLTLKLSQPDSTLPPEYCVKSELLYFKGADISSASFAAINHDNSYKARGIGIKTLENLEKYTVDVLGTYHAVGKETRQPFYKKRG

SEQ ID NO: 21056 - protein, 1341 aa, unidentified
  REGION 1..1341: note = Cas Enzyme sequence
NVLKFNGKSMWGIRLFDAAQTAAERRMFRTARRRVERRRWRLELLQELFQNEIEKKDPDFFQRMKDSALYPEDSKTGKPFALFCDKDLNDKLYYKQYPTIYHLRKALLTENSKFDIRLVYLAIHHILKHRGHFLFNGDFSNVTRFSFAFEQLQTCLCNELDMDFECNNVQKLSEILKDTHMSKNDKVKASVALFENSGDKKQLQAVIGLFCGAKKKLADVFLDETLNDTEMPSISIADKPYEELRPELESILAEKCCVIDYIKAVYDWAILADMLDGGEYGNRTYISVARVRQYEKHHDDLKKLKKLVRRYCKSEYKSFFSFAGTDNYCAYIGDDIETDDRKSVKKCKQEDFYKRIKGLLKKAIENGCPKDEVVEIIKDIDAQVFLPLQVTKDNGVIPHQVHEMELKQILKNAEKYYPFLCKKDEEGIVTSNKILQLFKFRIPYYVGPLNSRIGKNSWIVRRAEGKIYPWNFEEKVDLDKSEEGFIRRMTNPCTYMAGADVLPKYSLLYSEFMVLNELNNVRICGDKLSVEIKQIIIKDLFQRTRRVTVRKLCDKLKAEGVISRNSNQKDIDIKGIDQDLKSSMVSYIDFKNIFGKEIEKYSVQQMCERIIFLLTIHHDDKRRLQKRIRAEFTETQITDDQLQKVLRLNYQGWGRFSAEFLKELKGVDTETGEVFSIINALRKTDDNLMQLLSNRYTFSEELEKYNSNKRKKIEALTYDNIMEGIVASPAIKRSAWQAISIVMELSKIMGREPKRIFVEMARGPEEKKHTISRKNQLLELYKSVKDESRDWKTELETKTESDFRSIKLFLYYTQMGRCMYTGEPIDLDQLANTTIYDRDHIYPQSLTKDDSLNNLVLVKKVENANKGNGLISADIQKKMRGFWAELKKKGLISDEKFSRLTRTTPLSDDELAGFINRQLVETRQSSKIVADLFHQLYPTTQVVYVKAKIVSDFRHETLDMVKVRSLNDLHHAKDAYLNIVTGNVYYEKFSGNPLTWLRKNPDRNYSLNQMFNYDIVKKTKEGTSYVWKKGKDGSIAVVRRTMERNDILYTRQATENKNGGLFDQNIVSSKNKPFIPVKKGLDVNKYGGYKGITPAYFALIEFTDKKGSRHRLIEAVPLYLRADIDNDSNVLRDFYKNVLGLENPVVILNRIKKNSLLKVNGFLIHLRGTTGFSASQLKVQNAVEFSLPHHMEDYVKKLENYEKHIIAERGSKKISQIKITEWDGISKEKNLQLYDMFINKMENTIYKFRPANQVSNLKENREVFNSLAVEDQCSVLNQILMLFVCKPVTANLSLIKGSKNAGNMALSKIISNMRSAYLIHQSVTGLFEQKIDLLKVSSQKD

SEQ ID NO: 21057 - protein, 1101 aa, unidentified
  REGION 1..1101: note = Cas Enzyme sequence
MKNYYLGLDIGVASVGWAVVGEDYSVVEAGANLFPCADASKNEERRGFRQARRLKRRQKTRVNDFKKMWAQSGFDIPDQLDNDVLRLRIKGIGEKLTNKEIYTVLLYMLKHRGISYLEDALDEGQSSRSEYGRSLLHNQKELQMKLPCEIQFEKYRDYGAFRGDIKVKDEDGNKETYSNVFTTSAYRKELEKFFDTQKSFNSKIDDKFEKDYMSIFNRKREYYTGPGNEKSRTDYGIYTTQKDENGKYITEDNLFTKLIGKCSVYPEELRAAGASYTSQEFNALNDLNNLTINGRKLEQQEKEKIIETIKSSKVVNMKNIIKKVIGEDINSLKGARIDKQEKEIFHTFEVYRKMKKALLEVDIDIDSFSREELDKVAEIITINTEKEGIIKGFKNSEYQFDEAFIDVMANLRKNNSSLFNKWQSLSLKIMNELIPAMYETSKEQMALLTDMGVFKKKSSEFEEHKYIPVDLAVEDIYNPVVKRSVRVAIKIVNAIIKKYGYPSDVVIEMPRDKNDEEEKKRIQSVQKNNEKELSDIKSKIRAEYGIEIVDADFRKHKKLALKLKLWNEQNGKCPYSGKTIGIDELLSNEGMFEVDHIIPLSISYDDSRNNKVLVYRTENQDKGVQTPYMYLSGLNRDWDFDEFMSYVLELKKLGNIRQAKVNNFLFREDITKNDVLKGFINRNINDTTYASRTILNTLQSYFKTKECDTKVKVVRGSFTHQMRVNLRLGKNRDETYSHHAVDAMLICYSQMGYKAYRKFQDELFDIDNDVKIEKSVLDQLTTTSYKNNVLNDEYNLRWKNIRDNIEDAEKNVKYWHKVDTKVNRGLCNQTIYGTRNVDGENIKISKLDIYNNDGYKAFVNKINNGKEKEFLMYHNDPKTFETMMKIYEEYKDEKNAFVAYEQDTGDYFRKYSKKNNGPKIRMLKYYDGKVRSCIDISHKYGFEKGSQKVFLGQLNPYRTDVYFNSEDNNYILVGVKYSDIKVERDKYVLDRKKYIKELIREGVLKEGETIEHSKYKFVFSLYKNDIIEYEKDGNVYKERFLSRTMPAKKNYIETKPIDAPKFEGQNYVPLKKTKSISKIVKDILGNEYIQSPEKFEWEIDM

SEQ ID NO: 21058 - protein, 920 aa, unidentified
  REGION 1..920: note = Cas Enzyme sequence
LFDTQSKFNFEITPEFQGAYMKIFSRKREYYEGPGNEMSRTDYGIYTTKKGEDGKYITEKNIFEKLIGKCSIYPDQLRASGASYTAQEFNVLNDLNNLTINNRKLNEEEKRKIVDIIKESNSVNMRSIIKKVIKEDIEQFSGARVDKKEKEIYHTFEVYRKMKKALEAIDVDINVFSREELDQIGDILTLNTEKDGIIKAFENSEKNYSKEIIDTLVDLRKKNSSLFSKWHSFSFKAMENLIPDMYEQSKEQMQLLTEMEVFKQKTSKYNDYKYIPVEKVIEEIYNPVVVRSIRTTVKMINEAIKKYGYPENIVIEMPRDKNSAEEKEKVKKAQAKNEKEYESILKKIYDEYGIEITKADYRRQEKLPLKLKLWNEQSGKCLYSGKPISVEDILDNPQLFEIDHIIPKSISFDDSRNNKVLVYRAENQKKGNQTPYMYLSNLDREWNFDQYKNYVLEMKKKNGIANKKVQNFLFMEDINKIDVLKGFISRNLNDTRYASRVVLNELQSFFRAKEDCSTKVKVIRGSFTHQMRVNLRLEKNRDESYSHHAVDAMLIVFSQRGYDAYRKLQETCFDFETGEILNKEKWDECLEEDKYDQILYEAKWSKIKEEIQEAEKKVKYHYRVDKKCNRGLCNQTIYGTRMRNGEPYKICSFNIYDDKECAALLKMIEKGKESDILMYNNDIKTYQDMLKIIKEYSSEKNPFVAYNKETGDYFRKYSKKHNGPKIEKIKYYKEKVVSCIDISHKYGYEKGSKKVILGSLNPYRTDVFVNKTTGEYYLVGVKYNHIKCKGNLYVIDEESYNKLLLNAGAINEGETLKDLERLNIVYKFSLYKNDIIQYEKNGEFYTERFLSRTMEQKKNYIETKPIDKPFFKKVEKDGQISNKRNLVGLGKTKFVGKLVTDALGNEYKVEQEKFSLVVDN

SEQ ID NO: 21059 - protein, 1108 aa, unidentified
  REGION 1..1108: note = Cas Enzyme sequence
MKYDIGIDIGVASTGIAIVDEEGKVLEATSSLYSEADAASNVERRNFRDSRRTKRRQHTRIEDFKKLWNAYGYSIPESLDNNVIGLRNKGIIEKISMDQLYAVLLTMLKHRGISYLDDAIDETKSSNYAKGIALNQKELADKLPCEIQAERLEKYGKYRGDSIIKNGEEEEYHSNVFTISAYKKELEKLFDTQSKFNFEITPEFQEAYMKIFSRKREYYEGPGNEMSRTDYGIYTTKKGEDGKYITEENIFEKLIGKCSIYPDQLRASGASYTAQEFNVLNDLNNLTINNRKLNEEEKRKIVDIIKESNSVNMRSIIKKVIKEDIEQFSGARVDKKEKEIYHTFEVYRKMKKALEAIDVDINVFSREELDQIGDILTLNTEKDGIIKAFENSDKSYSKEIIDTLVGLRKKNSSLFSKWHSFSFKAMENLIPDMYEQSKEQMQLLTEMGVFKQKTSKYNDYKYIPVEKVIEEIYNPVVVRSIRTTVKMINEAIKKYGYPENIVIEMPRDKNSAEEKEKVKKAQAKNEKEYESILKKIYDEYGIEITKADYRRQEKLPLKLKLWNEQSGKCLYSGKPISVEDILDNPQLFEIDHIIPKSISFDDSRNNKVLVYRAENQKKGNQTPYMYLSHLDREWNFDQYKNYVLEMKKKNGIANKKVQNFLFMEDINKVDVLKGFISRNLNDTRYASRVVLNELQSFFRAKEDCSTKIKVIRGSFTHQMRVNLRLEKNRDESYSHHAVDAMLIVFSQRGYDAYRKLQETCFDFETGEILNKEKWDECLEEDKYDQILYEAKWSKIKEEIQEAEKKVKYHYRVDKKCNRGLCNQTIYGTRMRNGEPYKICSFNIYDDKECAALLKMIEKGKESDILMYNNDIKTYQDMLKIIKEYSSEKNPFVAYNKETGDYFRKYSKKHNGPKIEKIKYYKEKVVSCIDISHKYGYEKGSKKVILGSLNPYRTDVFVNKTTGEYYLVGVKHNHIKCKGNLYVIDEESYNKLLLNAGAINEGETLKDLERLNIVYKFSLYKNDIIQYEKNGEFYTERFLSRTMEQKKNYIETKPIDKPFFKKVEKDGQIKNKQNLVGLGKTKFVGKLVTDALGNEYKVEQEKFSLVVDN

SEQ ID NO: 21060 - protein, 1122 aa, unidentified
  REGION 1..1122: note = Cas Enzyme sequence
VKFVTNKRKNGGRNMKYDIGIDIGVASTGLAVVDEEGRVLEATSSLYTEADAAANVKRRDFRDGRRTKRRKHTRIEDFKNLWSDCGYIIPDKLDNNVIELRNRGIVEKISMDQLYAVLLSMLKHRGISYLDDAIDEAKGSNYAKGIALNQKELKNKLPCEIQAKRLEKYGKYRGDSTVKNGEEEEYHSNVFTTSAYRKELDKLLDTQIQFALGITSEFKEEYMKIFSRKREYYIGPGNEKSRTDYGIYTTRKDEDGKYVTEKNIFEKLIGKCSIYPDELRAAGASYSAQEFNVLNDLNNLTVNNRKLSEEEKRKIVATIKESNMVNMRSIIRKIIKEDIEQFSGARIDKKEKEIYHTFEVYRKMKKSFDAINIDINAFSREELDEFGRILTLNTEKAGIIKAFEATNQKYSDEVINVLVDLRKKNSSLFSKWHSFSLKAMIRLIPDMYVQSKEQMQLLTEMGVLKQKPSKYNDYKYIPVEKVIEEIYNPVVVRSIRTTVKMINEVIRKYGYPENIIIEMPRDKNSAEEKKKINEAQAKNEKEYEYILKKIQDEYGIEIIKADYRRQEKLPLKLKLWNEQNGKCLYSGRPISVESILNNPQLFEIDHIIPKSISFDDSRNNKVLVYRSENQEKGNQTPYMYLSRLNREWNFDSYKKYVLEMKKNNGISNKKVQNLLFMDDINKIDVLKGFISRNINDTRYASRVVLNELQAFFKAKENCTTKIKVIRGSFTHQMRVNLRLEKNRDESYSHHAVDAMLIVFSQRGYDAYRKLQETYMDFETGEILNEQKWKECLDEDKYDQILYEAKWSKIREEIQEAEKHVKYHYRVDKKCNRGLCNQTIYGTRTKNGEQYKICSFDIYNDKECKNLQKMIKAGKESDILMYHNDPKTYKDMLKIIKEYSSEKNPFVAYNKETGDYFRKYSKKHNGPKIEKIKYYKEKVVSCIDISHKYGHEKGSKKVILGSLNPYRTDVFVNKTTGEYYLVGIKYNHIKCKGDLYIIDEESYNKLLINAGAIKNGETLKDLERLNVSYRFSLYKNDIIQYEKNGKFYTERFLSRTKEQNKNYIETKPIEKPFFQKEGKNGEMENKQSLVGLGKTKFVGKLVTDVLGNVYEVKQEKFSLVIDN

SEQ ID NO: 21061 - protein, 1104 aa, unidentified
  REGION 1..1104: note = Cas Enzyme sequence
MQYIVALDIGVASVGFAVIDKKTETVIEAGSNIFPEASATDNQMRRGMRQARRLKRRKRTRLDDFTKLWEEYAFAIPQVQENDIVGLKVKALRESISLDELYLILYSYLKYRGISYLEDAEDTSLSGTSAYANGLKLNAKELETNYPCEIQKQRLEQVGKYRGQIQIEDAQGEKLDLSNVFTIGAYTKEIQQVLCTQKNYHSEISDEFCEDYLEIFTRKRKYYEGPGNEKSRTDYGRFTTRLDENGDYITEKNIFEKLIGKCSVYKEELRAASASYTAQEFNLLNDLNNLAINGRKLEEHEKRIIIDKVKTSNTINMRKIIADVMGEKIEEFYGARIDKSEKEIFHKMEVYNKMRKTLAEIHVNIEEFSRENLDEIGYILTINTDKEAMMEAFEHANVKLSEEIKDCLISLRKTNGALFSKWHSFSLKIMKELIPEMYQQPKEQMTLLTEMGVMRGQTDKFEKNKYIPVDAADEDIFNPVVRRAVRISFKILNALMKKYGTLEEVVIEMPRDQNSEEQKKWEKERQKKNEKELAYIEKKLAAEYNILLSPTDFSNQKQLGLKLKLWNEQDGKCLYSGKTIEPEDLIKHSELFQIDHIIPRSISFDDSRNNKVLVYGEENQKKGNQTPYYYLIHANNQWSFEQSKALVMKLSKKKEYGISKKKVQNLLYSEDITKAEVLRGFINRNINDTGYAARVVLNTVQGYFRAKEINTKVKVIRGSYTYQMRVNMKLDKNREESYAHHAVDAMLIAFSQLGYEAYRKLQGEFIDFETGEILNAEKWNAQMSDEIYEQYLYGKKWSNIRTQITKAEKQVKYWYHVDHKSNRGLCNQTIRGTRTYEGKTYKINKLDIRTKEGAALFKKLAFSEKESDREKLLVYKNDKKTYENLIQIAQEYSDSNNPFVQYEKETGDCVRKYAKNHNGPRIDKLKYTDGEVGSCIDISHKYGYEKGSQKVVLESLVPYRMDVYYKKEEQTYYLVGIKQSDVKCDNGEYVIDEDAYAINLVREKMIQPGQKRGDLEALGFEFQLSFYKNDIIEYEKDGEIVRERFLSRTMPKVKNYIETKPIDRAKYEKQKLVGLSKTKMIRKYRMDILGNYYMCSRENFSKYC

SEQ ID NO: 21062 - protein, 921 aa, unidentified
  REGION 1..921: note = Cas Enzyme sequence
  REGION 916..919: note = misc_feature - Xaa can be any naturally occurring amino acid
MQYIVALDIGVASVGFAVIDKKTETVIEAGSNIFPEASATDNQMRRGMRQARRLKRRKRTRLDDFTKLWEEYAFAIPQVQENDIVGLKVKALRESISLDELYLILYSYLKYRGISYLEDAEDTSLSGTSAYANGLKLNAKELETNYPCEIQKQRLEQVGKYRGQIQIEDAQGEKLDLSNVFTIGAYTKEIQQVLCTQKNYHSEISDEFCEDYLEIFTRKRKYYEGPGNEKSRTDYGRFTTRLDENGDYITEKNIFEKLIGKCSVYKEELRAASASYTAQEFNLLNDLNNLAINGRKLEEHEKRIIIDKVKTSNTINMRKIIADVMGEKIEEFYGARIDKSEKEIFHKMEVYNKMRKTLAEIHVNIEEFSRENLDEIGYILTINTDKEAMMEAFEHANVKLSEEIKDCLISLRKTNGALFSKWHSFSLKIMKELIPEMYQQPKEQMTLLTEMGVMRGQTDKFEKNKYIPVDAADEDIFNPVVRRAVRISFKILNALMKKYGTLEEVVIEMPRDQNSEEQKKWEKERQKKNEKELAYIEKKLAAEYNILLSPTDFSNQKQLGLKLKLWNEQDGKCLYSGKTIEPEDLIKHSELFQIDHIIPRSISFDDSRNNKVLVYGEENQKKGNQTPYYYLIHANNQWSFEQSKALVMKLSKKKEYGISKKKVQNLLYSEDITKAEVLRGFINRNINDTGYAARVVLNTVQGYFRAKEINTKVKVIRGSYTYQMRVNMKLDKNREESYAHHAVDAMLIAFSQLGYEAYRKLQGEFIDFETGEILNAEKWNAQMSDEIYEQYLYGKKWSNIRTQITKAEKQVKYWYHVDHKSNRGLCNQTIRGTRTYEGKTYKINKLDIRTKEGAALFKKLAFSEKESDREKLLVYKNDKKTYENLIQIAQEYSDSNNPFVQYEKETGDCVRKYAKXXXXKP

SEQ ID NO: 21063 - protein, 1104 aa, unidentified
  REGION 1..1104: note = Cas Enzyme sequence
MQYIVALDIGVASVGFAVIDKKTETVIEAGSNIFPEASATDNQMRRGMRQARRLKRRKRTRLDDFTKLWEEYAFAIPQVQENDIVGLKVKALRESISLDELYLILYSYLKYRGISYLEDAEDTSLSGTSAYANGLKLNAKELETNYPCEIQKQRLEQVGKYRGQIQIEDAQGEKLDLSNVFTIGAYTKEIQQVLCTQKNYHSEISDEFCEDYLEIFTRKRKYYEGPGNEKSRTDYGRFTTRLDENGDYITEKNIFEKLIGKCSVYKEELRAASASYTAQEFNLLNDLNNLAINGRKLEEHEKRIIIDKVKTSNTINMRKIIADVMGEKIEEFYGARIDKSEKEIFHKMEVYNKMRKTLAEIHVNIEEFSRENLDEIGYILTINTDKEAMMEAFEHANVKLSEEIKDCLISLRKTNGALFSKWHSFSLKIMKELIPEMYQQPKEQMTLLTEMGVMRGQTDKFEKNKYIPVDAADEDIFNPVVRRAVRISFKILNALMKKYGTLEEVVIEMPRDQNSEEQKKWEKERQKKNEKELAYIEKKLAAEYNILLSPTDFSNQKQLGLKLKLWNEQDGKCLYSGKTIEPEDLIKHSELFQIDHIIPRSISFDDSRNNKVLVYGEENQKKGNQTPYYYLIHANNQWSFEQSKALVMKLSKKKEYGISKKKVQNLLYSEDITKAEVLRGFINRNINDTGYAARVVLNTVQGYFRAKEINTKVKVIRGSYTYQMRVNMKLDKNREESYAHHAVDAMLIAFSQLGYEAYRKLQGEFIDFETGEILNAEKWNAQMSDEIYEQYLYGKKWSNIRTQITKAEKQVKYWYHVDHKSNRGLCNQTIRGTRTYEGKTYKINKLDIRTKEGAALFKKLAFSEKESDREKLLVYKNDKKTYENLIQIAQEYSDSNNPFVQYEKETGDCVRKYAKNHNGPRIDKLKYTDGEVGSCIDISHKYGYEKGSQKVVLESLVPYRMDVYYKKEEQTYYLVGIKQSDVKCDNGEYVIDEDAYAINLVREKMIQPGQKRGDLEALGFEFQLSFYKNDIIEYEKDGEIIRERFLSRTMPKVKNYIETKPIDRAKYEKQKLVGLSKTKMIRKYRMDILGNYYMCSRENFSKYC

SEQ ID NO: 21064 - protein, 1120 aa, unidentified
  REGION 1..1120: note = Cas Enzyme sequence
MEMNGKVLGLDIGISSIGVGIIDKETGEIVHSNSYLFSAANAENNKERRMFRGSRRSTRRKRHRVQRVEDLFEKYGMDIDISTIPLNVNPYEIRVRGLNNELTIEELFIALKNLVKRRGISYLDDVDDSKNISAYKKALEVNKNSLESKTPGQIQLERLENYGQLRGDFTVRDSNGQEIRIMNVFPTSAYQKEAECILRRQSEWNVCINDNFISEYIEILTGKRKYYVGPGNEKSRTDYGIFRKNGETWQNLFSILIGRCSYYPDEYRAAKASYSAQEYNLLNDLNNLIVPTETKKLSTNQKREIVEFVKSKEAVGAAEVLREVAKLVGCKKDEIKGYRVDSKGSAEVHTFEVYRVMKKYLASVEVDSLEKDTFDLLAHILTINTDKESITEAIRSDLQESFNEQQIEELVAFRKNHSNIFNKGWHNFSIKLLRELIPELYATSEEQMTILTRLGKRKREKKTRKTKFIDENLIVEEIYNPVVSKSVRQAIKIIKEATKRYGIFDEIVVEMARDKNEKDAKNRVKDIQKNNRDEKEAALLEAAREYHGKDKLPTSVYHDHKNLNLKIRLWYQQEKKCAYTGKTIKIKDLIHSKHLYEIDHILPLSLTFDDSISNKVLVLKTANQEKSQRTPYQSIDTMTSAWTYHEFKEYVKNNKKFSGKKKEYLLFEEDIIKYDVRSRFISRNLVDTRYASRVVLNALQDYYREKNAQTRVSVVRGQFTAQLRRAWGITKSRDTYHHHAVDAVIVAAASQLSLWKSKSNLLYKHSENLAVDLNTGEAWQVTEQEYKELVFSPPYKRLRETLNSNEFENSILFSYQVDTKTNRKVADATIYATRQVRLGKDREVTTYTLGKVKDIYSEEGWKGFLKQYKKDKTKFLLYHKDRKTWDCVIESIMETYYSREEEKKSHSNPFEKYKIENGPVRKYSKKGHGPIIKDLKYYSDKLGSHISITPEGSRNKVALLSIKPWRTDVYFNDQSKMYEIMGLKYSDLSFEKGTGEYKISRERYKEIKERDGVSRDAEFKFSLYRNNLILIKDSQSGEEQILRFHAKNESNMHYVELKPLNKARFEGEEPLISSLGKVAKSGQCLKGIQKPNLSLYKVITDVLGNKYIIKEEGDSPKRIG

SEQ ID NO: 21065 - protein, 1120 aa, unidentified
  REGION 1..1120: note = Cas Enzyme sequence
MEMNGKVLGLDIGISSIGVGIIDKETGEIVHSNSYLFSAANAENNKERRTFRGSRRSTRRKRHRVQRVEDLFEKYGMDIDISTIPLNVNPYEIRVRGLNNELTIEELFIALKNLVKRRGISYLDDVDDSKNISAYKKALEVNKNSLESKTPGQIQLERLENYGQLRGDFTVRDSNGQEIRIMNVFPTSAYQKEAECILRRQSEWNVCINDNFISEYIEILTGKRKYYVGPGNEKSRTDYGIFRKNGETWQNLFSILIGRCSYYPDEYRAAKASYSAQEYNLLNDLNNLIVPTETKKLSTNQKREIVEFVKSKEAVGAAEVLREVAKLVDCKKDEIKGYRVDSKGSAEVHTFEVYRVMKKYLESVEVDSLEKDTFDLLAHILTINTDKESITEAIRSDLQESFNEQQIEELVAFRKTHSNIFNKGWHNFSIKLLRELIPELYATSEEQMTILTRLGKRKREKKTRKTKFIDENLIVEEIYNPVVSKSVRQAIKIIKEATKRYGIFDEIVVEMARDKNEKDAKNRVKDIQKNNRDEKEAALLEAAREYHGKDKLPTSVYHDHKNLNLKIRLWYQQEKKCAYTGKTIKIKDLIHSKHLYEIDHILPLSLTFDDSISNKVLVLKTANQEKSQRTPYQSIDTMTSAWTYHEFKEYVKNNKKFSGKKKEYLLFEEDIIKYDVRSRFISRNLVDTRYASRVVLNALQDYYREKNAQTRVSVVRGQFTAQLRRAWGITKSRDTYHHHAVDAVIVAAASQLSLWKSKSNLLHKHSENLAVDLNTGEAWQVTEQEYKELVFSPPYKRLREILNSNEFENSILFSYQVDTKTNRKVADATIYATRQVRLGKDREVTTYTLGKVKDIYSEEGWKGFLKQYKKDKTKFLLYHKDRKTWDCVIESIMETYYSREEEKKSHSNPFEKYKLENGPVRKYSKKGHGPIIKDLKYYSDKLGSHISITPEGSRNKVALLSIKPWRTDVYFNDQSKMYEIMGLKYSDLSFEKGTGEYKISRERYKEIKERDGVSRDAEFKFSLYRNNLILIKDSQSGEEQILRFHAKNESNMHYVELKPLNKARFEGEEPLISSLGKVAKSGQCLKGIQKPNLSLYKVITDVLGNKYIIKEEGDSPKRIG

SEQ ID NO: 21066 - protein, 1129 aa, unidentified
  REGION 1..1129: note = Cas Enzyme sequence
MSNGKILGLDIGVASVGVGIIDAKTGNVIHANSRLFSAANAENNAERRGFRGARRLTRRKKHRVKRVRDLFEKYDISTDFRNLNLNPYELRVKGLTEQLTNEELFAALRTIAKRRGISYLDDAEDDSTGSSDYAKSIDENRRLLKTKTPGQIQLERLEKYGQLRGNFTVYDENGEAHRLINVFSTSDYKNEARKILETQSNYNKQITDEFIEDYIEILTQKRKYYHGPGNEKSRTDYGRFRTDGTTLENIFGILIGKCSFYPEEYRASKASYTAQEFNFLNDLNNLKVPTETGKLSTEQKEYLVDFAKKSKALGASKLLKEIAKIVDCSVDDIKGYRVDNKDKPDLHTFEPYRKLKFNLSSIDIDELSRETLDKLADILTLNTEREGIEDTIKRNLPSQFTEEQISEIVQIRKNQSSAFNKGWHSFSAKLMNELIPELYVTSEEQMTILTRLEKFKVNKKSSKNTKTIDEKEITDEIYNPVVTKSVRQTIKIINAAVKKYGDFDKIVIEMPRDKNAEDEKKFIDKKEKENKKEKDDSLKRAAFLYNGTDNLPDGVFHGNKELKTKIRLWYQQGERCLYSGKLISIHDLVHNSNKFEIDHILPLSLSFDDSLANKVLVYAWTNQEKGQKTPYQVIDSMDAAWSFREMKDYVLKQKRLGKKKREYLLTTENIDKIEVKKKFIERNLVDTRYASRVVLNSLQTALKELGKDTKVSVVRGQFTSQLRRKWNIDKSRETYHHHAVDALIIAASSQLKLWQKQENPMFESYGENQVVNKETGEILSISDDKYKELVFQPPYQGFVNTISSKGFEDEILFSYQVDSKFNRKVSDATIYSTRKAKLGKDKKDETYVLGKIKDIYSQDGFDTFIKRYKKDKTQFLMYQKDPLTWENVIEVILRDYPSEKLSEDGKKTVKCNPFEEYRRENGLICKYSKKGNGTPIKSLKYYDKKLGNCIDITPEKSKNRVVLRQISPWRADIYFNLETLKYELMGLKYSDLSFEKGTGKYHISQEKYDAIREKEGIGKKSEFKFTLYRNDLILIKDTLNNCERMLRFGSKNDTSKHYVELKPLEKGTFDSEEEILPVLGKVAKSGQFIKGLNKPNISIYKVRTDVLGNKFFIKKEGDKPKLDFKNNNK

SEQ ID NO: 21067 - protein, 943 aa, unidentified
  REGION 1..943: note = Cas Enzyme sequence
DYEKEARKILETQADYNKKITAEFIDDYVEILTQKRKYYHGPGNEKSRTDYGRFRTDGTTLENIFGILIGKCSFYPDEYRASKASYTAQEYNFLNDLNNLKVPTETGKLSTEQKEALVEFAKSTATLDPAKLLKEIAKILDCKVDEIKGYREDDKGKPDLHTFEPYRKLKFNLDSVNIDDLSREVLDKLADILTLNTEREGIEDAIKRNLPNQFTEGQISEIIKVRKSQSTAFNKGWHSFSAKLMNELIPELYATSDEQMTILTRLEKFKVNKKSSKNTKTIDEKEVTDEIYNPVVAKSVRQTIKIINAAVKKYGDFDKIVIEMPRDKNADDEKKFIDKRNKENKKEKDDALKRAAYLYNGTDKLPDEVFHGNKQLETKIRLWYQQGERCLYSGKPIPIQELVHNSNNFEIDHILPLSLSFDDSLANKVLVYAWTNQEKGQKTPYQVIDSMDAAWSFREMKDYVLKQKGLGKKKRDYLLTTENIDKIEVKKKFIERNLVDTRYASRVVLNSLQSALRELGKDTKISVIRGQFTSQLRRKWKIDKSRETYHHHAVDALIIAASSQLKLWEKQDNPMFVDYGNNQVVDKQTGEILSVSDDEYKELVFQPPYQGFVNTISSKGFEDEILFSYQVDSKYNRKVSDATIYSTRKAKIGKDKKEETYVLGKIKDIYSQNGFDTFIKKYNKDKTQFLMYQKDPLTWENVIEVILRDYPTTKKSEDGKNDVKCNPFEEYRRENGLVCKYSKKGKGTPIKSLKYYDTILKNTSGLDITPEISNNKVILQSLNPWRTDVYFNPITLKYELAGIRYCDLQYLKGGNYGLTEDKYKEILKKEGVTEESEFKFTLYKNDLILIKDAETNEKILLRFLSRSDLSCKNKVELKPYNKEKFSSGEFLISVIGTTPVRCTKTLSYKNISIYKVRTDVLGNKFFVKKEGDKPKLDFKNNKK

SEQ ID NO: 21068 - protein, 1129 aa, unidentified
  REGION 1..1129: note = Cas Enzyme sequence
MSNGKILGLDIGVASVGVGIIDAKTGNVIHANSRLFSAANAENNAERRGFRGARRLTRRKKHRVKRVRDLFEKYDISTDFRNLNLNPYELRVKGLTEQLTNEELFAALRTIAKRRGISYLDDAEDDSTGSSDYAKSIDENRRLLKTKTPGQIQLERLEKYGQLRGNFTVYDENGEAHRLINVFSTSDYKNEARKILETQSNYSKQITDEFIEDYIEILTQKRKYYHGPGNEKSRTDYGRFRTDGTTLENIFGILIGKCSFYPEEYRASKASYTAQEFNFLNDLNNLKVPTETGKLSTEQKEYLVDFAKKSKALGASKLLKEIAKIVDCSVDDIKGYRVDNKDKPDLHTFEPYRKLKFNLSSIDIDELSRETLDKLVDILTLNTEREGIEDTIKRNLPSQFTEEQISEIVQIRKNQSSAFNKGWHSFSAKLMNELIPELYVTSEEQMTILTRLEKFKVNKKSSKNTKTIDEKEITDEIYNPVVAKSVRQTIKIINAAVKKYGDFDKIVIEMPRDKNAEDEKKFIDKKEKENKKEKDDSLKRAAFLYNGTDNLPDGVFHGNKELKTKIRLWYQQGERCLYSGKLISIHDLVHNSNKFEIDHILPLSLSFDDSLANKVLVYAWTNQEKGQKTPYQVIDSMDAAWSFREMKDYVLKQKRLGKKKREYLLTTENIDKIEVKKKFIERNLVDTRYASRVVLNSLQTALKELGKDTKVSVVRGQFTSQLRRKWNIDKSRETYHHHAVDALIIAASSQLKLWQKQENPMFESYGENQVVNKETGEILSISDDKYKELVFQPPYQGFVNTISSKGFEDEILFSYQVDSKFNRKVSDATIYSTRKAKLGKDKKDETYVLGKIKDIYSQDGFDTFIKRYKKDKTQFLMYQKDPLTWENVIEVILRDYPSEKLSEDGKKTVKCNPFEEYRRENGLICKYSKKGNGTPIKSLKYYDKKLGNCIDITPEKSKNRVVLRQISPWRADIYFNLETLKYELMGLKYSDLSFEKGTGKYHISQEKYDAIREKEGIGKKSEFKFTLYRNDLILIKDTLNNCERMLRFGSKNDTSKHYVELKPLEKGTFDSEEEILPVLGKVAKSGQFIKGLNKPNISIYKVRTDVLGNKFFIKKEGDKPKLDFKNNNK

SEQ ID NO: 21069 - protein, 1333 aa, unidentified
  REGION 1..1333: note = Cas Enzyme sequence
MGKEYYLGLDIGTDSVGWAVCDTNYKIPKFKGNAMWGIRLFEKSNSAEERRGFRSSRRRTQRKRERLKLLEMLFDEEISKIDPAFFIKLRESNLYLEDKSTKIPYCVFSDENYTDKDFHRDYPTIYHLRNELIKSNKPHDVRLVYLALHHIIKNRGHFLFDYSYKNDKSGDFMPIYNDLKNYFYDNYEIELDCSDVDEFANTLKDKSKGKTKKNAEIAELFGVSKKYDKVLYSALSLLSGSSVKLFDIFDDEALKDVEKKSVSFSSGFDDNANDFQSYLGERFELLEKLKAVYDWAVLADILDGKEYISEAKVAIYEKHKIDLRTLKKYIKIYMPEKKSEIFNISSKDNNYVAYSKHIKTSSGTGVLNSTCTQEEFCAYLKKTLGICKDASYEEMFKEIENSTFMPKQVTKDNGVVPMQVNEKELVAILDNAKEYLPFLLNEDNDGKTVYDKIKALFEYRIPYYIGPLNTHSTKHWLIRSNEKIYPWNIEDVVDFDKSAEKFIEKLTSKCTYLPQYDVIPKHSLLYNKFCVLNELNNLKIDGEKISVQLKQDIYNDLFKKYYKVTNKKLCYYLKSRNIAFDEISGIDNDFKSSLKSYKDLVAYNLTDEQKEEIVKAITIFGDDKKLLKKRLKNEFGGCLSDDEIKKICKLKYTGWSKLSREFLTDVTAVYKETGELINIICALWETNYNLTSLLYSDEFCCDDKENKTFNDKINELNSFGNDKTLNQIVEELYVSPLVKRPIYQSLLITKELEKIMKCPPKKIFVEVARGAEEKKRTVSRRNKLLDLYKSCKNDYPLLFDELQNNTTDDELKSDKLYLYFTQFGKCMYTGENIDLDDLFNKNLYDIDHIYPQSKIKDDSLDNRVLVKKTTNAKKDNEYPLSSQIREKMTLHWKALLDKGLINKKKYERLVRNYPLSDEELSQFISRQLVETRQSTKAVANILEQLYPRPDTEIVYVKAALASEFRHQYDMLKCREVNDLHHAKDAYLNIVVGNAYNVKFTHNKANFIKGLQNNDKAYTVKLDSMLKHNIDGAWIADNNESLNIVKSTMNKNNIRYTRYAFEKKGGLFKVTILKKGNGQASIKKNDKRNSIEKYGGYNQVSSTYFSCVEHGKDNKRMISMFSVNLYDKNKYEENPIAYLIENYGLINPIIKVKKVKIQSCISFDNMLCHLGGKDSGGSQISYRPGVQLVLGYDNERYIRNVIRCAGGDLHLQTSKNEEDIVTTEKNIELFNLLIEKMKNNIYGVLYSNLGDKLYCSKEKFEKLDIVEQCNVIKNVLTILKNNASKGDLKSIGIKANGAIRLNNNISEIKNVKSIKLINQSVTGLFEQEIELLNL

SEQ ID NO: 21070 - protein, 1333 aa, unidentified; identical to SEQ ID NO: 20140
  REGION 1..1333: note = Cas Enzyme sequence

SEQ ID NO: 21071 - protein, 1167 aa, unidentified
  REGION 1..1167: note = Cas Enzyme sequence
NDKSGDFMPIYNELKNYFYDNYEIELDCSDVDEFANTLKDKSKGKTKKNAEIAELFGVSKKDDKVLYSALSLLSGSSVKLFDIFDDEALKDVEKKSVSFSSGFDDNANDFQSYLGERFELLEKLKAVYDWAVLADILDGKEYISEAKVAIYEKHKRHLRTLKKYIKIYMPEKKAEIFNISSKDNNYVAYSKHIKTSSGTGVLNSTCTQEEFCAYLKKTLGICKDASYEEMFKEIENSTFMPKQVTKDNGVVPMQVNEKELVAILDNAKEYLPFLLNEDNDGKTVYDKIKALFEYRIPYYIGPLNTLSTKSWLVRSNEKIYPWNIEDVVDFDKSAEKFIENLTSKCTYLPQYDVIPKHSLLYNKFCVLNELNNLKIDGEKISVQLKQDIYNDLFKKYYKVTNKKLCDYLKSRNIAFEEISGIDNDFKSSLKSYKDLVAYNLTDEQKEEIVKAITIFGDDKKLLKKRLKNEFGGCLSDDEIKKICKLKYTGWSKLSREFLTDVTAVYKETGELINIICALWETNYNLTSLLYSDEFCCDDKENKTFNDKINELNSFGSDKTLNQIVEELYVSPLVKRPIYQSLLITKELEKIMKCPPKKIFVEVARGAEEKKRTVSRRNKLLDLYKSCKNDYPLLFDELQNNTTDDELKSDKLYLYFTQFGKCMYTGENIDLDDLFNKNLYDIDHIYPQSKIKDDSLDNRVLVKKTTNAKKDNEYPLSSQIREKMTPHWKALLDKGLINKKKYERLVRNYPLSDEELSQFISRQLVETRQSTKAVANILEQLYPRPDTEIVYVKAALASEFRHQYDMLKCREVNDLHHAKDAYLNIVVGNAYNVKFTHNKANFIKGLQNNDKAYTVKLDSMLKHNIDGAWIADNNESLNIVESTMNKNNIRYTRYAFKQKGGLFDQNILKKGKGQVPIKANDKRNSIEKYGGYNRPSSSYFSLVKYFDKKGKKIIQLVPIDSFEEHIYQNTPERYVSEKIGCDCEILIPCIKYNACISIDGFRMHLSSKSGGGAQIVYKPAQQLILGYDNEKMIKGIEKLLQNGINDDIVKRYDISKENNLKLYCLIVDKLSNTLFKTKYEKIGNDLIKGKEKFETLDIEQQFYVINEILKILHCNVVTGDLKLIGGSGQAGAVLTNSALSNIKNVKSIKLINQSVTGLFEQEIELLNL

SEQ ID NO: 21072 - protein, 1345 aa, unidentified
  REGION 1..1345: note = Cas Enzyme sequence
MKNEKKSFGEYYLGIDAGTDSVGWAVTDGNYNVLKFHGKAMWGVRLFEEAQTAADRRAFRTARRRQGRKVQRTKLLQELFAEEICKKDSAFFIRMADSKYYAEDKTEPQQNALFNDVDYTDKDYHKEYPTVYHLRRAFIEGKDIRDPRLLYLAVHHIINNRGHFLFEGMDLSKVVDFETPFSVLKEYLREEDFGFDFSNIDADALKESLKTKQGITQKKKDLYKLLGKEKGTLKSVCDLLAGGSGIKLTDLFNDESLAGETPEKISLADSSIEDDRTALENILQDRIQLLDCLKAVYDWAILDEILSGSPYISFAKTQSYEKHKKDLALLKKTIKRLCPEKYKEVFKSPNTANNYCAYSGMCVINGKKTAIEKRTTASDFGKYIAKLLSSFDDPDAKDILRQIDAQTFMPKQRTGENSVLPYQVHKVELEKILGNAEMNFPFLLKKDDSNLTVKDKIIKLLTFRIPYYVGPLNDKHRNSGFCWIVRKNTEDTSRILPWEFEQKVDLYASAEQFINRMTNKCTYLVGEDVLPKDSLLYSKYSVLNELNNLKLNGEPLKQEDKENIIKEIYEKKNKVKIKDIANYYKRNGFDVKPDDFTGFHEELKSSLRSYNLFFSLRGEKLDESAVEEAIRAVVLFGNDKKMLSQRLRNIKNGFFSETEINRISGFKFSDWGRLSKKLLTGIKETGETFNIIEALRVTNKNLMQLLSSEFDFKKKIDEENEKINGGIPEFSYDALVKDSYASPAVKRSIWQVLTIAKEIEKITGHAPKKIFMETTREDREKKATKSRKKQLVELYKKCREETSELLKTLEKREDSELRNNALYLYYTQMGKCMYSGETIELEHLFDKNVYDIDHIYPQSKTKDDSLNNKVLVKKELNGQKSDRYPVPRDVLSPGIENHWKCLRSAGLISEEKYKRLTRRTNFSDTELSGFIARQLVETNQATKAAAEILKRVYPETRLVYSRASNVDVFKKRYDILKVREVNDYHHARDAYLNIVVGNVFDVKFTMNPLNFIKGGGTYSLNENMYDSDIRRGNNVALVAGNNGTIATVKKTCSKENILFTRYAFEQKGGLFDQQIMKKGKGQLPTKPSDPHMQGQTEQEWIDKYGGYNKLSGAYFCLVEYKDKGKTVRSIESVPLLVSAKIKNDPSELEKYLKQALGTEELSVRIREIKFNTLFNHNGFLMHITGRTGDQLVFKPALQLKANASDYAYIKKIVRFCEREKESKKAFTVSGFDGIEKDRNIELFDFFTKKLSSDIFMVHHEPTLKSLLANRNIFVDMSVEMQARTIYQILHIFRCNRMLADLTALQGAKSAGIVRMSKRISSKDKTMIINQSPTGLFENSVDLLTV

SEQ ID NO: 21073 - protein, 1349 aa, unidentified
  REGION 1..1349: note = Cas Enzyme sequence
MKNEKKSFGEYYLGIDAGTDSVGWAVTDENYNVLKFHGKAMWGVRLFEEAQTAADRRAFRTARRRQGRKVQRTKLLQELFAEEICKKDSAFFIRMADSKYYAEDKTEPQQNALFDDVDYTDKDYHKEYPTVYHLRRAFIEGKDIRDPRLLYLAVHHIINNRGHFLFEGMDLSKVVDFETPFSILKEYLREEDFGFDFSNIDADALKESLKNKQGITQKKKDLYKLLGKEKGTLKSVCDLLAGGSGIKLTDLFNDESLAGETPDKISLSDSSIEDDRTALENILQDRIQLLDCLKAVYDWAILDEILSGSPYISFAKTQSYEKHKKDLALLKKTIKRLCPEKYKEVFKSPNTANNYCAYSGMCVINGKKTAIEKRTTASDFGKYIAKLLSSFDDPDAKDILRQIDAQTFMPKQRTGENSVLPYQVHKVELEKILGNAEMNFPFLLKKDDSNLTVKDKIIKLLTFRIPYYVGPLNDKHRNSGFCWIVRKNTEDTSRILPWEFEQKVDLYASAEQFINRMTNKCSYLVGEDVLPKDSLLYSEYSVLNELNNLKLSGESLAQSDKAEIIDELYKKNNKVKIKDIANYYKRKGFEVKPDDFTGFHEELKSSLRSYNMFFNILRDRFDESAVEAAIKAIVLFGNDKKMLLQKLRSIKNGYFTEEEIKRMAGFKFSDWGRLSEKMLTGIYSVNKETGEAFNIIEALRTTDKNLMQLLSAELDFKKQIDAENEKINGGIPEFSYDALVKDCYASPAVKRSIWQVLTIAKEIEKITGHAPKKIFMETTREDREKKATKSRKKQLVELYKKCREETSELLKTLEKREDSELRNNALYLYYTQMGKCMYSGETIELEHLFDKNVYDIDHIYPQSKTKDDSLNNKVLVKKELNGQKSDRYPVPRDILSPGIENHWKCLRAAGLISEEKYKRLTRRTNFSDTELSGFIARQLVETNQATKAAAEILKRVYPETRLVYSRASNVDVFKKRYDILKVREVNDYHHARDAYLNIVVGNVFDVKFTMNPLNFIKGGGTYSLNENMYDSDIRRGSNVAWVAGNNGTIATVKKTCSKENILFTRYAFEQKGGLFDQQIMKKGKGQLPTKPSDPHMQGQTEQEWIDKYGGYNKLSGAYFCLVEYKDKGKIVRSIESVPLLVSAKIKNDPSDLEKYLKQALGTEELSVRIREIKFNTLFNHNGFLMHITGRQGNQLIFKPALQLKVNASDYAYIKKIVRFCEREKESKKAFTVSGFDGIEKDRNIELFDFFTKKLSSDIFMVHHAATLKSLLANRSIFVDMSVEMQARTIYQILHIFRCNRMLADLTALQGAKSAGTVLMSKKISLNDKIMIINQSPTGLFENSVDLLTV

SEQ ID NO: 21074 - protein, 1349 aa, unidentified
  REGION 1..1349: note = Cas Enzyme sequence
MKNEKKSFGEYYLGIDAGTDSVGWAVTDENYNVLKFHGKAMWGVRLFEEAQTAADRRAFRTARRRQGRKVQRTKLLQELFAEEICKKDSAFFIRMADSKYYSEDKTEPQQNALFNDVDYTDKDYHKEYPTVYHLRRAFIEGKDIRDPRLLYLAVHHIINNRGHFLFEGMDLSKVVDFETPFSILKEYLREEDFGFDFSNIDADALKESLKTKQGITQKKKDLYKLLGKEKGTLKSVCDLLAGGSGIKLTDLFNDESLAGETPDKISLSDSSIEDDRTALENILQDRIQLLDCLKAVYDWAILDEILSGSPYISFAKTQSYEKHKKDLALLKKTIKRLCPEKYKEVFKSPNTANNYCAYSGMCVINGKKTAIEKRTTASDFGKYIAKLLSSFDDPDAKDILRQIDAQTFMPKQRTGENSVLPYQVHKVELEKILGNAEMNFPFLLKKDDSNLTVKDKIIKLLTFRIPYYVGPLNDKHRNSGFCWIVRKNTEDTSRILPWEFEQKVDLYASAEQFINRMTNKCSYLVGEDVLPKDSLLYSEYSVLNELNNLKLSGESLAQSDKAEIIDELYKKNNKVKIKDIANYYKRKGFEVKPDDFTGFHEELKSSLRSYNMFFNILRDRFDESAVEAAIKAIVLFGNDKKMLLQKLRSIKNGYFTEEEIKRMAGFKFSDWGRLSEKMLTGIYSVNKETGEAFNIIEALRTTDKNLMQLLSAELDFKKQIDAENEKINGGIPEFSYDALVKDCYASPAVKRSIWQVLTIAKEIEKITGHAPKKIFMETTREDREKKATKSRKKQLVELYKKCREETSGLLKTLEKREDSELRNNALYLYYTQMGKCMYSGETIELEHLFDKNVYDIDHIYPQSKTKDDSLNNKVLVKKELNGQKSDRYPVPRDVLSPGIENHWKCLRAAGLISEEKYKRLTRRTNFSDTELSGFIARQLVETNQATKAAAEILKRVYPETRLVYSRASNVDVFKKRYDILKVREVNDYHHARDAYLNIVVGNVFDVKFTMNPLNFIKGGGTYSLNENMYDSDIRRGNNVAWVAGNNGTIATVKKTCSKENILFTRYAFEQKGGLFNQQIMKKGKGQLPTKPSDPHMQGQTEQEWIDKYGGYNKLSGAYFCLVEYKDKGKIVRSIESVPLLVSAKIKNDPSDLEKYLKQALGTEELSVRIREIKFNTLFNHNGFLMHITGRTGDQLVFKPALQMKVNATDYAYIKKIVRFCEREKESKKEFTVSGFDGIEKDRNIELFDFFTKKLSSDIFMVHHAATLKSLSESRNIFVDMSVEMQARTICQILHIFRCNRMLADLTALQGAKNAGTVLMSKKISPNDKTMIINQSPTGLFENSVDLLTV

SEQ ID NO: 21075 - protein, 1345 aa, unidentified
  REGION 1..1345: note = Cas Enzyme sequence
MKNEKKSFGEYYLGIDAGTDSVGWAVTDGNYNVLKFHGKAMWGVRLFEEAQTAADRRAFRTARRRQGRKVQRTKLLQELFAEEICKKDSAFFIRMADSKYYAEDKTEPQQNALFNDVDYTDKDYHKEYPTVYHLRRAFIEGKDIRDPRLLYLAVHHIINNRGHFLFEGMDLSKVVDFETPFSVLKEYLREEDFGFDFSNIDADALKESLKTKQGITQKKKDLYKLLGKEKGTLKSVCDLLAGGSGIKLTDLFNDESLAGETPEKISLADSSIEDDRTALENILQDRIQLLDCLKAVYDWAILDEILSGSPYISFAKTQSYEKHKKDLALLKKTIKRLCPEKYKEVFKSPNTANNYCAYSGMCVINGKKTAIEKRTTASDFGKYIAKLLSSFDDPDAKDILRQIDAQTFMPKQRTGENSVLPYQVHKVELEKILGNAEMNFPFLLKKDDSNLTVKDKIIKLLTFRIPYYVGPLNDKHRNSGFCWIVRKNTEDTSRILPWEFEQKVDLYASAEQFINRMTNKCTYLVGEDVLPKDSLLYSKYSVLNELNNLKLNGEPLKQEDKENIIKEIYEKKNKVKIKDIANYYKRNGFDVKPDDFTGFHEELKSSLRSYNLFFSLRGEKLDESAVEEAIRAVVLFGNDKKMLSQRLRNIKNGFFSETEINRISGFKFSDWGRLSKKLLTGIKETGETFNIIEALRVTNKNLMQLLSSEFDFKKKIDEENEKINGGIPEFSYDALVKDSYASPAVKRSIWQVLTIAKEIEKITGHAPKKIFMETTREDREKKATKSRKKQLVELYKKCREETSELLKTLEKREDSELRNNALYLYYTQMGKCMYSGETIELEHLFDKNVYDIDHIYPQSKTKDDSLNNKVLVKKELNGQKSDRYPVPRDVLSPGIENHWKCLRSAGLISEEKYKRLTRRTNFSDTELSGFIARQLVETNQATKAAAEILKRVYPETRLVYSRASNVDVFKKRYDILKVREVNDYHHARDAYLNIVVGNVFDVKFTMNPLNFIKGGGTYSLNENMYDSDIRRGNNVAWVAGNNGTIATVKKTCSKENILFTRYAFEQKGGLFDQQIMKKGKGQLPTKPSDPHMQGQTEQEWIDKYGGYNKLSGAYFCLVEYKDKGKTVRSIESVPLLVSAKIKNDPSELEKYLKQALGTEELSVRIREIKFNILFNHNGFLMHITGRTGDQLVFKPALQLKVNASDYAYIKKIVRFCEREKESKKAFTVSGFDGIEKDRNIELFDFFTKKLSSDIFMVHHEPTLKSLLANRNIFVDMSVEMQARTIYQILHIFRCNRMLADLTALQGAKSAGIVRMSKRISSKDKTMIINQSPTGLFENSVDLLTV

SEQ ID NO: 21076 - protein, 1318 aa, unidentified
  REGION 1..1318: note = Cas Enzyme sequence
MEEKKTIRPHSPYYIGLDVGTNSVGWAVTDPEYNVLRFKGNSMWGARLFEEAKPAADRRAARIARRRLERRKQRLLYLEDFFSAEIGKSDPLFFRRLHESALFPDDKTTGTGKYTLFNDPDFTDRDYLRRYPTVYHLRSELVHSSEPHDPRLVFLALHHIIKHRGHFLYETSENGDECPTVDAAMRELTEYLSAEMNVELGLEPEYFTILVDRNMRISQKKAALRAALGRSVQTEESGADIQALSDLLAGAKVKLAALYDDESLKNAEPASVALSDDLDAVFDALSSALGERVELLLAAKKVFDAARLSEMRGGEAYLCDAKVRQYEKNRADLRALKDYVREAAPDKYRSIFYKNAKFPNNYAAYSRYRSESGDKTCKQEDFCAFLKSVLPKPAAEHPFAPQYAQIEEKTFLPRLTGSENGIIPYQLHRLELRKILDNASAYLPFLLEEDEDGISVREKIEAVFSFRVPYYVGPLKGHWAARTGEKVHPWNFEKTVDLDASAAAFLKDLIGKCTYTGAPVLPKDSLLYSEFMLLNELNPLRLNGNELPVSVKQQLIEDLFKKENRRVTKKRILDYLVMHGYAAKTDEISGIDDPVKTRLRSYHDFAPLIPVLGEEAVEKIIEGTLVYSDDKRMLRRWLKKNFPALNEDDVRKICRLKYADWGRLSKEFLTELYSGADEQGEAQNILYFLRNTNLNLMQLLNDPEHANLPAAAEERRRARFGRDSLRSQLDEMYISPAVRRSIWQTLKIAEEIAHIRGGAPAKIFVEVARGEDKEKKGTRTKSRKEQLLELYKACERDSGELYEKLAATEESALRRDKLFLYYTQFGKCVYSGEPIDLETALRDDTTYDIDHIFPRSRIKDDSIENRVLVKSVLNREKTNTYPISQDIRSRMLPFWSMLHDKKMIGDKKFDRLKRNTELTDDELAAFVQRQLTETQQSTKALAQLLQEIYPEAEIVYSKAGNVSEFRQEFGLLKCREVNDLHHAKDAYLNIVVGNVYKTKFTDRFFLNIRKENYSLKKVFDWDTPGAWKADGTSIATVKKYMAKNNPIITRMPREEKGQLFNLNIMPAGLGQLPIKAGKPIEKYGGYNKLTGSYYCVVEHTEKKKRVRSIETVLLYARGLYESDPVKYCREILGLVDPVVVAPKIRINSLLQLDGFRLYPSGRTGNRIIYKHAYQLAIDAERERYIRNLTKYIERCAKIEYPATAFDGISAEENVALYNWFVERLESSAYGKLMQALLANLKASDETFKNMDILSQAKTLMEVLKAFKCDAQSSNLKDLCGKGSVGTILKNTSLQGVQSAYLIHQSPTGLYEYRTDLLH

SEQ ID NO: 21077 - protein, 1324 aa, unidentified
  REGION 1..1324: note = Cas Enzyme sequence
MEEKKTIRPHSPYYIGLDVGTNSVGWAVTDPEYNVLRFKGNSMWGARLFEEAKPAADRRAARIARRRLERRKQRLLYLEEFFSAEIGKSDPLFFRRLHESALFPDDKTAGTGKYTLFNDPDFTDRDYLRRYPTVYHLRSELVHSSEPHDPRLVFLALHHIIKHRGHFLYETSENGDECPTVDAAMQELTEYLSAEMNVELGLEPEYFTILTDRNMRISQKKAALRAALGRSVQTEESGADIQALSDLLAGAKVKLAALYDDESLKNAEPASVALSDDLDAAFDALSSALGERVELLLAAKKVFDAARLSEMRGGEAYLCDAKVRQYEKNHADLRALKDYVREAAPDKYRSIFYKNAKFPNNYAAYSRYRSESGDKTCKQEDFCAFLKSVLPKPAAEHPFAPQYAQIEEKTFLPRLTGSENGIIPYQLHRQELRKILDNASAYLPFLLEEDEDGISVREKIEAVFSFRVPYYVGPLKGRWAKRTEEAKRTGEKAYPWNFEKVVDLDASAAAFLKDLIGKCTYTGAPVLPKDSLLYSEFMLLNELNPLRLNGNELPVSVKQQLIEDLFKKENRRVTKKRILDYLVMHGYAAKTDEISGIDDPVKTRLRSYHDFAPLIPVLGEEAVEKIIEGTLVYSDDKRMLRRWLKKNFPALNEDDVRKICRLKYADWGRLSKEFLTELYSGADEQGEAQNILYFLRNTNLNLMQLLNDPEHANLPAAAEERRLARFGRDSLRSQLDEMYISPAVRRSIWQTLKIAEEIAHIRGGAPAKIFVEVARGEDKEKKGTRTKSRKEQLLELYKACEEDSGKLYDQLAATDESNLRKDKLFLYYTQFGKCMYSGEPIDLEAALRNDETYDIDHIFPRSHIKDDSIDNRVLVKRVLNREKTNTYPISQDIRSRMLPFWSMLHDKKMIGDKKYDRLKRNTELTEDELASFVQRQLTETQQSTKALAQLLKERYPESEIVYSKAGNISEFRQKFEMLKCREVNDLHHAKDAYLNIVVGNVYKTKFTDRFFLNIRKENYSLKKVFDWDTPGAWKADGTSIATVKKYMAKNNPIITRMPREEKGQLFNLNIMPAGLGQLPIKAGKPIEKYGGYNKLAGSYYCVVEHTEKKKRVRSIETVLLYARGLYESDPVKYCCEILGLVDPVVVAPKICIDALLELDGFRLYPSGRTGDMIVYKHGYPLAIDAERERYVRNLTKYIERCAKIEYPATAFDGISAEENVALYNWFVERLESSVYGKLMPALLSNLKSSAEAFEKMGILSQAKTLMEILKAFKCDAQNPNLKELCGKGLVGRIQKKAALQGFQSAYLINQSPTGLYEYRTDLLH

SEQ ID NO: 21078 - protein, 1330 aa, unidentified
  REGION 1..1330: note = Cas Enzyme sequence
MEEKKTIRPHSPYYIGLDVGTNSVGWAVTDPEYNVLRFKGNSMWGARLFEEAKPAADRRAARIARRRLERRKQRLLYLEEFFSAEIGKSDPLFFRRLHESALFPDDKTAGAEKYTLFNDPGFTDRDYLRRYPTVYHLRSELVHSSEPHDPRLVFLALHHIIKHRGHFLYETSENGDECPTVDASMQELTEYLSAEMNVELGLEPEYFTILTDRNMRISQKKAALRAALGRSVQTEESGADIQVLSDLLAGAKVKLAALYDDESLKNAEPASVALSDDLDAVFDALSSALGERVELLLAAKKVFDAARLSEMRGGEAYLCDAKVRQYEKNHADLRALKDYVREAAPDKYRSIFYKNAKFPNNYAAYSRYRSESGDKTCKQEDFCAFLKSALPKPAAEHPFAPQYAQIEEKTFLPRLTGSENGIIPYQLHRQELRKILDNASAYLPFLLEEDEDGISVREKIEAVFSFRVPYYVGPLKGRWAERTEEAKRTGEKAYPWNFEKVVDLDASAAAFLKDLIGKCTYTGAPVLPKDSLLYSEFMLLNELNPLRLNGNELPVSVKQQLIEDLFKKENRRVTKKRILDYLVMHGYAAKTDEISGIDDPVKTRLRSYHDFAPLIPVLGEEAVEKIIEGTLVYSDDKRMLRRWLKKNFPALNEDDVRKICRLKYADWGRLSKEFLTELYSGADEQGEAQNILYFLRNTNLNLMQLLNDPEHANLPAAAEERRRARFGRDSLRSQLDEMYISPAVRRSIWQTLKIAEEIAHIRGGAPEKIFVEVARGEDAAKKGKRTKSRKEQLLELYKACEEDSGKLYDQLAATDESNLRKDKLFLYYTQFGKCMYSGEPIDLEAALLNDETYDIDHIFPRSRIKDDSIENRVLVKSVLNREKTNTYPISQDIRSRMLPFWSMLHDKKMIGDKKYDRLKRNTELTEDELASFVQRQLTETQQSTKALAQLLKERYPESEIVYSKAGNISEFRQKFEMLKCREVNDLHHAKDAYLNIVVGNVYKTKFTDRFFLNIRKENYSLKEVFDWDTPGAWKADGTSIATVKKYMAKNNPIITRMPRETKGALFGLMPVSRENAKIPLKANKPAEKYGGYTGRVAAYFIVVEHAKGKKRIRTIEPVYIYAKEYFEKYPEEYCTGFLKLIAPKVICYKIYAGSIIEINGCRLELTGGSESTGDGRDIYNHTYQLVISGKESDYVKQVLKYLKRCQERRTEIPITPYDGVNREENIDLYKCFCNKLATSSYGQLFSDERKVLENNAEGFALLSVPAQCRVLSEILKIFICDAQKADLKELCGKAVGKRVRRSANISSCNSVFLIHQSPTGLYEYRTDLLH

SEQ ID NO: 21079 - protein, 1318 aa, unidentified
  REGION 1..1318: note = Cas Enzyme sequence
MEEKKTIRSHSPYYIGLDIGTNSVGWAVTDPEYNVLRFKGNSMWGARLFEEAKPAADRRAARIARRRLERRKQRLLYLEEFFSAEIGKSDPLFFRRLHESALFPDDKTTGTGKYTLFNDPDFTDRDYLRRYPTVYHLRSELVHSSEPHDPRLVFLALHHIIKHRGHFLYETSENGDECPTVDAAMRELTEYLSAEMNVELGLEPEYFTILVDRNMRISQKKAALRAALGRSVQTEESGADIQALSDLLAGAKVKLAALYDDESLKNAEPASVALSDDLDAVFDALSSALGERVELLLAAKKVFDAARLSEMRGGEAYLCDAKVRQYEKNHADLRELKDYVREAAPDKYRSIFYKNAKFPNNYAAYSRYRSESGDKTCKQEDFCAFLKSVLPKPAAEHPFAPQYAQIEEKTFLPRLTGSENGIIPYQLHRLELRKILDNASAYLPFLLEEDEDGISVREKIEAVFSFRVPYYVGPLKGHWAARTGEKVHPWNFEKTVDLDASAAAFLKDLIGKCTYTGAPVLPKDSLLYSEFMLLNELNPLRLNGNELPVSVKQQLIEDLFKKENRRVTKKRILDYLVMHGYAAKTDEISGIDDPVKTRLRSYHDFAPLIPVLGEEAVEKIIEGTLVYSDDKRMLRRWLKKNFPALNEDDVRKICRLKYADWGRLSKEFLTELYSGADEQGEAQNILYFLRNTNLNLMQLLNDPEHANLPAAAEERRHARFGRDSLRSQLDEMYISPAVRRSIWQTLKIAEEIAHIRGGAPAKIFVEVARGEDKEKKGTRTKSRKEQLLELYKACERDSGELYEKLAATEESALRRDKLFLYYTQFGKCMYSGEPIDLETALRDDTTYDIDHIFPRSRIKDDSIENRVLVKSVLNREKTNTYPISQEIRSRMLPFWSMLHDKKMIGDKKYDRLKRNTELTEDELASFVQRQLTETQQSTKALAQLLKERYPESEIVYSKAGNISEFRQKFEMLKCREVNDLHHAKDAYLNIVVGNVYKTEFTDRFFLNIRKENYSLKKVFDGDTPGAWKADGTSIATVKKYMAKNNPIITRMPREEKGQLFNLNIMPAGLGQLPIKAGKPIEKYGGYNKLAGSYYCVVEHTEKKKRVRSIETVLLYARGLYESDPVKYCREILGLVDPVVVAPKIRIDAFLELDGFRLYPSGRTGDRIIYKHAYQLAIDAERERYIRNLTKYIERCAKIEYPATAFDGISAEENVALYNWFVERLESSAYGKLMQALLANLKASDETFKNMDILSQAKTLMEILKAFKCDAQISNLKDLCGKGNVGKILKNASLQGFQSAYLIHQSPTGLYEYRTDLLH

SEQ ID NO: 21080 - protein, 1324 aa, unidentified
  REGION 1..1324: note = Cas Enzyme sequence
MEEKKTIRPHSPYYIGLDVGTNSVGWAVTDPEYNVLRFKGNSMWGARLFEEAKPAADRRAARIARRRLERRKQRLLYLEEFFSAEIGKSDPLFFRRLHESALFPDDKTTGTGKYTLFNDPDFTDRDYLRRYPTVYHLRSELVHSSEPHDPRLVFLALHHIIKHRGHFLYETSENGDECPTVDAAMQELTEYLSAEMNVELGLEPEYFTILTDRNMRISQKKAALRAALGRSVQTEESGADIQALSDLLAGAKVKLAALYDDESLKNADPASIALSDDLDAVFDALSSALGERVELLLAAKKVFDAARLSEMRGGEAYLCDAKVRQYEKNHADLRALKDYVREAAPDKYRNIFYKNAKFPNNYAAYSRYRSESGDKTCKQEDFCAFLKSVLPKPAAEHSFAPQYVQIEEKTFLPRLTGSENGIIPYQLHRQELRKILDNASAYLPFLLEEDEDGISVREKIEAVFSFRVPYYVGPLKGRWAERTEEAKRTGEKAYPWNFEKVVDLDASAAAFLKDLIGKCTYTGAPVLPKDSLLYSEFMLLNELNPLRLNGNELPVSVKQQLIEDLFKKENRRVTKKRILDYLVMHGYAAKTDEISGIDDPVKTRLRSYHDFAPLIPVLGEEAVEKIIEGTLVYSDDKRMLRRWLKKNFPALNEDDVRKICRLKYADWGRLSKEFLTELYSGADEQGEAQNILYFLRNTNLNLMQLLNDPEHANLPAAAEERRRARFGSNSLRSQLDEMYISPAVRRGIWQTLKISEEIAHIRGGAPAKIFVEVARGEDKEKKGTRTKSRKEQLLELYKACERDSGELYEKLAATEESALRRDKLFLYYTQFGKCMYSGEPIDLEAALRNDETYDIDHIFPRSRIKDDSIDNRVLVKRVLNREKTNTYPISQDIRSRMLPFWSMLHDKKMIGDKKYDRLKRNTELTDDELAAFVQRQLTETQQSTKALAQLLQEIYPEAEIVYSKAGNVSEFRQEFGLLKCREVNDLHHAKDAYLNIVVGNVYKTKFTDRFFLNIRKENYSLKKVFDWDTPGAWKADGTSIATVKKYMAKNNPIITRMPREEKGLLFKQTIMPAGLGQLPIKAGKPIEKYGGYNKLTGSYYCVVEHTEKKKRVRSIETVLLYARGLYESDPVKYCREILGLVDPVVVAPKIRIDALLELDGFRLYPSGRTGNEIVYKHGYPLAIDAGREKYIRNLTKYIERCAKIEYPATAFDGISAEENVALYNWFVERLESSVYGKLMPALLANLKSSAEAFEKMGILSQAKTLMEILKAFKCDAQNPNLKELCGKGLVGRIQKKAALQGFQSAYLINQSPTGLYEYRTDLLH

SEQ ID NO: 21081 - protein, 1324 aa, unidentified
  REGION 1..1324: note = Cas Enzyme sequence
MEEKKTIRPHSPYYIGLDVGTNSVGWAVTDPEYNVLRFKGNSMWGARLFEEAKPAADRRAARIARRRLERRKQRLLYLEEFFSAEIGKSDPLFFRRLHESALFPDDKTAGAGKYTLFNDPDFTDRDYLRRFPTVYHLRSELVHSSEPHDPRLVFLALHHIIKHRGHFLYETSENGDECPTVDAAMRELTEYLSAEMNVELGLEPEYFTILVDRNMRISQKKAALRAALGRSVQTEESGADIQALSDLLAGAKVKLAALYDDESLKNAEPASVALSDDLDAVFDALSSALGERVELLLAAKKVFDAARLSEMRGGEAYLCDAKVRQYEKNHADLRELKDYVREAAPDKYRSIFYKNAKFPNNYAAYSRYRSESGDKTCKQEDFCAFLKSVLPKPAAEHPFAPQYAQIEEKTFLPRLTGSENGIIPYQLHRLELRKILDNASAYLPFLLEEDEDGISVREKIEAVFSFRVPYYVGPLKGRWAERTEEAKRTGEKAYPWNFEKVVDLDASAAAFLKDLIGKCTYTGAPVLPKDSLLYSEFMLLNELNPLRLNGNELPVSVKQQLIEDLFKKENRRVTKKRILDYLVMHGYAAKTDEISGIDDPVKTRLRSYHDFAPLIPMLGEEAVEKIIEGTLVYSDDKRMLRRWLKKNFPALNEDDVRKICRLKYADWGRLSKEFLTELYSGADEQGEAQNILYFLRNTNLNLMQLLNDPEHTNLPAAAEERRLARFGSNSLRSQLDEMYISPAVRRSIWQTLKIAEEIAHIRGGAPAKIFVEVARGEDKEKKGTRTKSRKEQLLELYKACERDSGELYEKLAATEESALRRDKLFLYYTQFGKCMYSGEPIDLETALRDDTTYDVDHIFPRSRIKDDSIENRVLVKSVLNREKTNTYPISQDIRSRMLPFWSMLHDKKMIGDKKFDRLKRNTELTDDELASFVQRQLTETQQSTKALAQLLQEIYPEAEIVYSKAGNVSEFRQEFGLLKCREVNDLHHAKDAYLNIVVGNVYKTKFTDRFFLNIRKENYSLKKVFDWDTPGAWKADGTSIATVKKYMAKNNPIITRMPREEKGQLFNLNIMPAGLGQLPIKAGKPIEKYGGYNKLAGSYYCVVEHTEKKKRVRSIETVLLYARGLYESDPVKYCCEILGLVDPVVVAPKICIDALLELDGFRLYPSGRTGDMIVYKHGYPLAIDAERERYVRNLTKYIERCAKIEYPATAFDGISAEENVALYNWFVERLESSVYGKLMPALLSNLKSSAEAFEKMGILSQAKTLMEILKAFKCDAQNPNLKELCGKGLVGRIQKKAALQGFQSAYLINQSPTGLYEYRTDLLH

SEQ ID NO: 21082 - protein, 1324 aa, unidentified
  REGION 1..1324: note = Cas Enzyme sequence
MEEKKPIRPHSPYYIGLDVGTNSVGWAVTDPEYNVLRFKGNSMWGARLFEEAKPAADRRAARIARRRLERRKQRLLYLEEFFSAEIGKSDPLFFRRLHESALFPDDKTAGSGKYTLFNDPDFTDRDYLRRYPTVYHLRSELVHSSEPHDPRLVFLALHHIIKHRGHFLYETSENGDECPTVDAAMQELTEYLSAEMNVELGLEPEYFTILTDRNMRISQKKAALRAALGRSVQTEESGADIQALSDLLAGAKVKLAALYDDESLKNAEPASVALSDDLDAAFDALSSALGERVELLLAAKKVFDAARLSEMRGGEAYLCDAKVRQYEKNHAVLRALKDYVREAAPDKYRSIFYKNAKFPNNYAAYSRYRSESGDKTCKQEDFCAFLKSVLPKPAAEHPFASQYAQIEEKTFLPRLTGSENGIIPYQLHRQELRKILDNVSAYLPFLLEEDEDGISVREKIEAVFSFRVPYYVGPLKGRWAERTEEAKRTGEKAYPWNFEKVVDLDVSAAAFLKDLIGKCTYTGAPVLPKDSLLYSEFMLLNELNPLRLNGNELPVSVKQQLIEDLFKKENRRVTKKRILDYLVMHGYAAKTDEISGIDDPVKTRLRSYHDFAPLIPVLGEEAVEKIIEGTLVYSDDKRMLRRWLKKNFPALNEDDVRKICRLKYADWGRLSKEFLTELYSGADEQGEAQNIMYFLRNTNLNLMQLLNDPEHANLPAAAEERRRARFGRDSLRSQLDEMYISPAVRRSIWQTLKIAEEIAHIRGGAPAKIFVEVARGEDKEKKGTRTKSRKEQLLELYKACERDSGELYEKLAATEESALRRDKLFLYYTQFGKCMYSGEPIDLETALRDDTTYDIDHIFPRSRIKDDSIENRVLVKSVLNREKTNTYPISQDIRSRMLPFWSMLHDKKMIGDKKFDRLKRNTELTDDELAAFVQRQLTETQQSTKALAQLLQEIYPGAEIVYSKAGNVSEFRQEFGLLKCREVNDLHHAKDAYLNIVVGNVYKTKFTDRFFLNIRKENYSLKKVFDWDTPGAWKADGTSIATVKKYMAKNNPIITRMPREEKGQLFNLNIMPAGLGQLPIKAGKPIEKYGGYNKLAGSYYCVVEHTEKKKRVRSIETVLLYARGLYESDPVKYCREILGLVDPVVVAPKIRIDAFLELDGFRLYPSGRTGDRIIYKHAYQLAIDAERERYIRNLTKYIERCAKIEYPATAFDGISAEENVALYNWFVERLESSAYGKLMQALLANLKASDETFKNMDILSQAKTLMEILKAFKCDAQISNLKDLCGKGNVGKILKNASLQGFQSAYLIHQSPTGLYEYRTDLLH

SEQ ID NO: 21083 - protein, 1324 aa, unidentified
  REGION 1..1324: note = Cas Enzyme sequence
MEERGSNRINSPYYIGLDVGTNSVGWAVTDPEYNVLRFKGNSMWGARLFDEAKPAAERRMARVARRRLERRKQRLLYLEELFSAEIGKIDPLFFRRLHESALFLEDKTSGSGKYALFNDPDFTDRDYLRRYPTVYHLRSELVHSSEPHDPRLVFLALHHIIKHRGHFLYETSENGDECPTVDAAMQELTEYLSAEMNVELGLEPEYFTILTDRNMRISQKKAALRAALGRSVQTEESGADIQALSDLLAGAKVKLAALYDDESLKNAEPASVALSDDLDAVFDALSSALGERAELLLAAKKVFDAARLSEMRGGEAYLCDAKVRQYEKNHADLRALKDYVREAAPDKYRSIFYKNAKFPNNYAAYSRYHSESGDKTCKQEDFCVFLKSVLPKPAAEHPFAPQYAQIEEKTFLPRLTGSENGIIPYQLHRQELRKILDNASAYLPFLLEEDEDGISVREKIEAVFSFRVPYYVGPLKGRWAERTEEAKRTGEKAYPWNFEKVVDLDASAAAFLKDLIGKCTYTGAPVLPKDSLLYSEFMLLNELNPLRLNGNELPVSVKQQLIEDLFKKENRRVTKKRILDYLVMHGYAAKTDEISGIDDPVKTRLRSYHDFALLIPVLGEEAVEKIIEGTLVYSDDKRMLRRWLKKNFPALNEDDVRKICRLKYADWGRLSKEFLTELYSGADEQGEAQNILYFLRNTNLNLMQLLNDPEHANLPAAAEERRRARFGSNSLRSQLDEMYISPAVRRSIWQTLKIAEEIAHIRGDAPAKIFVEVARGEDKEKKGTRTKSRKEQLLELYKACERDSGELYEKLAATEESALRRDKLFLYYTQFGKCMYSGEPIDLETALRDDTTYDIDHIFPRSRIKDDSIENRVLVKSVLNREKTNTYPISQDIRSRMLPFWSMLHDKKMIGDKKYDRLKRNTELTDDELAAFVQRQLTETQQSTKALAQLLQEIYPEAEIVYSKAGNVSEFRQEFGLLKCREVNDLHHAKDAYLNIVVGNVYKTKFTDRFFLNIRKENYSLKKVFDWDTPGAWKADGTSIATVKKYMAKNNPIITRMPREEKGQLFNLNIMPAGLGQLPIKAGKPIEKYGGYNKLTGSYYCVVEHTEKKKRVRSIETVLLYARGLYESDPVKYCREILGLVDPVVVAPKIRINSLLQLDGFRLYPSGRTGNRIIYKHAYQLAIDAERERYIRNLTKYIERCAKIEYPATAFDGISAEENVALYNWFVERLESSAYGKLMQALLANLKASDETFKNMDILSQAKTLMEVLKAFKCDAQISNLKALCGKGSVGTILKNASLQGVQSAYLINQSPTGLYEYRTDLLH

SEQ ID NO: 21084 - protein, 1361 aa, unidentified
  REGION 1..1361: note = Cas Enzyme sequence
  SITE 1357: note = misc_feature - Xaa can be any naturally occurring amino acid
MEVGNYYLGIDAGTDSVGWAVTDNQYNVIRKKGKSLWGIRLFDGANTAQERRTFRALRRRNERKKQRINLLQELFCKEICKLDPNFFIRLRDSSLWSEDKEEKQIYSLFNDKNFNDRNYHNNYKTIYHLRADLIKNKEKHDARLVYLAIHHIMKNRGHFLFNGNIESVTSFENTFNEFKNCLLDELEINLECPSISEFENILKDRTFKGTQKCKKLKELCSIPSSDKKLDNIFKLISGLKADLSIIFEDESFKENEHNKISFADSNYEETREVLNSEIQEKTLIIDIFNIIYNWVILSDILSGGEYNGRLYLSIAKVNTYNKHSKDLKILKSVIKKYFPQKYTDIFASNKENNYCSYIGMYKSGGKKYSVKKCSDKPEEFYKTIKNIINKNTAEEISNDKDVQYILSEIENNSFLPLQINKNNGVIPYQANKIELESILKNAENYLPFLKEIDTECNKTTSEKIIDLFEFRIPYYVGPLNTSKGENAWMIRKEDGTIRPWNFEQKVDIDKTAAEFITRMTNQCTYLNNETVLPKYSLLYSEYTVLNEINNIRINGEKISVELKQDIFNSLFKNNKQVTCKKLLSHLNSNGYNLKKDDLSGFDGNFKSSLSSYIDLKNYIFGDNIDKLQIYNLAEKIILWITLYGDDSKLLKRVLQKNCSEQLNPEQIKKITKLKFKGWGRLSKAFLSELRGADRETGETMTIIKGLRNTQNNLMQLLSQNYTFTEECEKINSGYFINPNEISYDSIVKNIVASPSIKRSVWQTIQIVEEIQKVMGSKPRKIFVEMARGEEEKVRTTSRKQKLLDLYKNISDECAKGMYDEIYSKDESDFKNIRLYLYYTQMGCCMYSGKHIDLSQLSNTNIWDRDHIYPQSKTKDDSLDNLVLVYKSINSEKSDDIISPTIQNNMRTFWKLLFDRKFISEKKYHRLTRTTPLTDEELAGFINRQLVETRQSTKVMASIFKRIYPNTEIIYVKAKNVSDFRHRKDCENGVKVRELNDYHHAKDAYLNIVVGNVYSSKFTNNPLMWLKNNRNVKYSLNRMYDFNLTVNNENIWVVGNEGTQKTVNKYLGKNDILYTRYAMTNKGELFDQNPLKATGDKSKQTTLVPLKKGKEVWKYGGYNSITPSYFMLVESKDKKGNYIRTIETMPLYREKEFSKNEEFLLNYCKEVHKLKEPKIILKCIKKNSLLIVDGFPMHLKGSTGLQLKLQGAVQLILESDMVIYLKKLMKFVNENNINKNKLEVTPYMKLSAKENIKLYDIFIQKLTTGIYSKRPANPVEKLINARDIFIELTVKEQCIVLSEILHLFQCKPLTSANLVSINLKKTVGIIQIAKNITAKNVKLVHQSPTGIYEYTVDLNKIXVGVL

SEQ ID NO: 21085 - protein, 1356 aa, unidentified
  REGION 1..1356: note = Cas Enzyme sequence
MEVGNYYLGIDAGTDSVGWAVTDNQYNVIRKKGKSLWGIRLFDGANTAQERRTFRALRRRNERKKQRINLLQELFCKEICKLDPNFFIRLRDSSLWSEDKEEKQIYSLFNDKNFNDRNYHNNYKTIYHLRADLIKNKEKHDARLVYLAIHHIMKNRGHFLFNGNIESVTSFENTFNEFKNCLLDELEINLECPSISEFENILKDSTFKGTQKCKKLKELCSIPSSDKKLDNIFKLISGLKADLSIIFEDESFKENEHNKISFADSNYEETREVLNSEIQEKTLIIDIFNSIYNWVILSDILSGGEYNGGLYLSIAKVNTYNKHSKDLKILKSVIKKYFPQKYTDIFASNKENNYCSYIGMYKSGGKKYSVKKCSDKPEEFYKTIKNIINKNTAEEISNDKDVQYILSEIENNSFLPLQINKNNGVIPYQANKIELESILKNAENYLPFLKEIDTECNKTTSEKIIDLFEFRIPYYVGPLNTSKCENAWMIRKEDGTIRPWNFEQKVDIDKTAAEFITRMTNQCTYLNNETVLPKYSLLYSEYTVLNEINNIRINGEKISVELKQDIFNSLFKNNKQVTCKKLLSHLNSNGYNLKKDDLSGFDGNFKSSLSSYIDLKNYIFGDNIDKPQIYNLAEKIILWITLYGDDSKLLKRVLQKNCSEQLNPEQIKKITKLKFKGWGRLSKAFLSELRGADRETGETMTIIKGLRNTQNNLMQLLSQNYTFTEECEKINSGYFINPNEISYDSIVKNIVASPSIKRSVWQTIQIVEEIQEVMGSKPRKIFVEMARGEEEKVRTTSRKQKLLDLYKNISDECAKGMYDEIYSKDESDFKNIRLYLYYTQMGCCMYSGKHIDLSQLSNTNIWDRDHIYPQSKTKDDSLDNLVLVYKSINSEKSDDIISPTIQNNMRTFWKLLFDRKFISEKKYHRLTRTTPLTDEELAGFINRQLVETRQSTKVMASIFKRIYPNTEIIYVKAKNVSDFRHRKDCENGVKVRELNDYHHAKDAYLNIVVGNVYSSKFTNNPLMWLKNNRNVKYSLNRMYDFNLTVNNENIWVVGNEGTQKTVNKYLGKNDILYTRYAMTNKGELFDQNPLKATGDKSKQTTLVPLKKGKEVWKYGGYNSITPSYFMLVESKDKKGNYIRTIETMPLYREKEFSKNEEFLLNYCKEVHKLKEPKIILKCIKKNALLIVDGFPMHLKGSTGLQLKLQGAVQLILESDMVIYLKKLMKFVNENNINKNKLEVTPYMELSAKENIKLYDIFIQKLTTGIYSKRPANPVEKLINARDIFIELTVKEQCIVLSEILHLFQCKPLTSANLVSINLKKTVGIIQIAKNITAKNVKLVHQSPTGIYEYTVDLNKI

SEQ ID NO: 21086 - protein, 1380 aa, unidentified
  REGION 1..1380: note = Cas Enzyme sequence
MKEVQNDYYIGLDIGTNSVGWAVTDLQYNILRKKGKSMWGIRLFEEAKTAAERRVARTNRRRLQRQKQRIELLQEIFSEEISKVDDKFFIRLKDSSFVPEDKKENQTNSIFNDIKYKDKDYNDEFKTIYHLRKALIMGEKEYDVRLVYLAIHHMMKNRGHFLFDSNIANITSFDTTFSTFKICMEEEFGFSMEEIDEGEFEKILKNKSLSRTKKSENLLKICGVEKKDEVYRQFSEIIKLIIGLNCKVSVIFNSEAFEEIEHNKICFGSGNYDETRLALEDEIQEKAGIIDILQAVYNWTILSDILEGGEYNGKSYISIAKVGKYEKHHNDLKKLKELVKKYCTQEDYNDFFVSNEKDNYCAYIGKYMKNGKVKVENKKCSQEDFYKAVKKLLDKMNVDNDVDEAAVTSIKNDIESKTFLQKQVSKDNGVIPYQVNKIELECILENAKEYLPFLNEVDESCNLTNAEKIVKLFEYRIPYYVGPINTARGDNCWMIRNEGKEGERITPWNFNDVVDVDLSAEKFIKRMTNKCTYLSKEDVLPKYSLLYTEYMVLNEINNIKVKGVPLDDIDIKLRKGIYNELFKKEKRVSKKRIAEYIKSMGYDVAKEDISGVDVILTTSLSSYIELKKIFGDKLDTYSFKQVAEDIIKWITIYGDDQKMLKRVIKKHYESEITPEQLKQVCRLKIQGWGRLSEKLLTGLEGTNKDTDEITTIINELRNTNRNFMQIVASNDYTFAECIDDENMGYKVEEVTYDNIVKDVVASPAIKRAVWQTIQIVEEIKQVMGKAPVRIFVEMARGEEEKKRTISRKDKLLECYKEIDKECKTDWVDELNKIKDTELKSIKLFLYFTQMGKCMYTGKKIDISQLDNATIWDRDHIYPQSKVKDDSLDNLVLVARIENAKKSDGMLSPEIQYKMYGHWKYLKDKGLISEKKFNRLTRKEPFSDDELAGFISRQLVETRQSTKVVATLLNRIYGDTKVVYVKAGVTADFKNHKDSKTGERDYIHDVKVRSINDYHHAKDAYLNIVVGNVYFTKFTDNPYKWFKDRSGKRDENKYKYSLNRMFDFDLLEGENVVWKRGKDGTLKTVNEVLSRNDILYTRYAYCNKGLLFDQLPVKAPNNEEKAEKLVPAKKGRDTIKYGGYNSISPSHFMLVESKDKKGNFIRTIESVPLYLKEVFEKDNQKLIEYCINRYDLKEPRIVMPVIKKSSLLVINGFPMHLNGSTGKQLILQGAVQLCVSNEDAAYIKKLEKYADDNAKRKDKKELLKIDEYRGITKEQNKVIYEKFLEKLNNGIYTKRPANPRTKLESLEQKFEELEIEKQSILLMEVLNLFKCKPLTANMELIKDSKYLGKIQLSKNISSCKLAKLINQSPTGLYENVIDLLR

SEQ ID NO: 21087 - protein, 1361 aa, unidentified
  REGION 1..1361: note = Cas Enzyme sequence
  SITE 1357: note = misc_feature - Xaa can be any naturally occurring amino acid
MEVGNYYLGIDAGTDSVGWAVTDNQYNVIRKKGKSLWGIRLFDGANTAQERRTFRALRRRNERKKQRINLLQELFCKEICKLDPNFFIRLRDSSLWSEDKEEKQIYSLFNDKNFNDRNYHNNYKTIYHLRADLIKNKEKHDARLVYLAIHHIMKNRGHFLFNGNIESVTSFENTFNEFKNCLLDELEINLECPSISEFENILKDRTFKGTQKCKKLKELCSIPSSDKKLDNIFKLISGLKADLSIIFEDESFKENEHNKISFADSNYEETREVLNSEIQEKTLIIDIFNSIYNWVILSDILSGGEYNGGLYLSIAKVNIYNKHSKDLKILKSVIKKYFPQKYTDIFASNKENNYCSYIGMYKSGGKKYSVKKCSDKPEEFYKTIKNIINKNTAEEISNDKDVQYILSEIENNSFLPLQINKNNGVIPYQANKIELEAILKNAENYLPFLKEIDTECNKTTSEKIIDLFEFRIPYYVGPLNTSKGENAWMIRKEDGTIRPWNFEQKVDIDKTAAEFITRMTNQCTYLNNETVLPKYSLLYSEYTVLNEINNIRINGEKISVELKQDIFNSLFKNNKQVTCKKLLSHLNSNGYNLKKDDLSGFDGNFKSSLSSYIDLKNYIFGDNIDKPQIYNLAEKIILWITLYGDDSKLLKRVLQKNCSEQLNPEQIKKITKLKFKGWGRLSKAFLSELRGADRETGETMTIIKGLRNTQNNLMQLLSQNYTFTEECEKINSGYFINPNETSYDSIVKNIVASPSIKRSVWQTIQIVEEIQKVMGSKPRKIFVEMARGEEEKVRTTSRKQKLLDLYKNISDECAKGMYEEIYSKDESDFKNIRLYLYYTQMGCCMYSGKHIDLSQLSNTNIWDRDHIYPQSKTKDDSLDNLVLVYKSINSEKSDDIISPTIQNNMRTFWKLLFDRKFISEKKYHRLTRTTPLTDEELAGFINRQLVETRQSTKVMASIFKRIYPNTEIIYVKAKNVSDFKHRKDCENGVKVRELNDYHHAKDAYLNIVVGNVYSSKFTNNPLMWLKNNRNVKYSLNRMYDFNLTVNNENIWVVGNEGTQKTVNKYLGKNDILYTRYAMTNKGELFDQNPLKATGDKSKQTTLVPLKKGKEVWKYGGYNSITPSYFMLVESKDKKGNYIRTIETMPLYREKEFSKNEEFLLNYCKEVHKLKEPKIILKCIKKNALLIVDGFPMHLKGSTGLQLKLQGAVQLILESDMVIYLKKLMKFVNENNINKNKLEVTPYMKLSAEENIKLYDIFIQKLTTGIYSKRPANPVEKLINARDIFIELTVKEQCIVLSEILHLFQCKPLTSANLVSINLKKTVGIIQIAKNITAKNVKLVHQSPTGIYEYTVDLNKIXVGVL

SEQ ID NO: 21088 - protein, 1010 aa, unidentified
  REGION 1..1010: note = Cas Enzyme sequence
FGQDKYKEVFRKQEKVNNYAAYVGSDRNKSFAHASKDDFYKYLKSFVKDEEILKRIEDGTFLEKQRTNANGVIPYQVHKAELERILENASVNFPFLNEISDDVKIKDKIVMLLTFRIPYYVGPLNDLHAEKKFAWVKKYDGMKNVKITPWNFDKVVDKHASEDAFIDRMTNKCTYLIGEDVLPKQSLLYSEFAFLNELNNVTFKGQRLDKTARDAIVAFAKSQRCKITLKVIGKTLEKEGLIEKGEGVAENFAGIDGEIKSSFSTYRFFNSLFGNNMDTDMCEEIIKWFTVMGDASRAAERTQRKYKLSAEQTKKLKDLNCVGWGRLSRRFLDSEDIVTVTEDGELLTIIEAMRETGCNLMELMSKKYGFSNAVDRYNSEFICEDGVSYKTIENLYCSPSVKRAIWRTVCLAKEIEKVQGCPPKRVFIEMARGEDKDKKRTKSRKQQLLELYRSCKADVRDWITQNEISDLTGQIESTDDARFLSDKLYLYYMQMGRSAYSGKSIDIEDLFGKNICDIDHIYPQSKIKDDSIINNKVLCYKTENSTKQDIYPIAADIRKNMLSIWSLWHDKGLIGDEKLKRLTRYTALTQEELSDFINRQLVETRQSTKAVAQILKRLYPDADIVYSKASNVVDFKNHINKDSDNPLIVKVRELNDLHHAKDAYLNIVVGNVYYTKFNKDASVYFKNNGIDSYNMSKLFDGNVKNAWMPSMKEKIVTVVNKNTCRVVRFTSEGKGELFNATIKSKGANGKLIPLKRNCPLENIAKYGGYDNATTAYFALVRSIDKKGKMQLSIEAIPIYVDMLGKENVFDYLKNCVSLTNPQILIDNIKINSLLKLNGAYVWLRGKTNNSLTICNANQLILDRETAIYSKRIVSYLEKRKKNKAIEIDERYDKIDRKGNQMLYNTLVEKLMSRPYANISTLRKQSDFLVEKRDTFESLTLEEQCIVLNEILHLMQCNSALSNFELLKGVSKAGSLTCNKKLSANDECLLITQSPTGYYKDVKNLTSFYKQ

SEQ ID NO: 21089 - protein, 1313 aa, unidentified
  REGION 1..1313: note = Cas Enzyme sequence
MVGLDIGTASIGYAVTDMPGQLMKFKNKNMWGVRLFEEGETAAKRRGLRSVRRRYNRRKQRIALLQEMFAEEIGKLDPQFFIRLKEAYLWKEDRSITNLHILFDDADFTDREYYHKYKHIYELRDAMVKSKKKEDLRLVYLALHHIVKYRGNFLYEGQVFSDNAGYMCNNVENLLQVADEYYETSFATAKNIQHVSEILDNIRWSKKEKEEELKFLFKGDKSVGDCFNQIIKAILGYKADFAKIYDLGEEAKYSFAEKEREEINIDFADELANNLFEAMFALYSSITLATILKGEATISAGMIKRYEKHQNDLVTLKRLIRKEFPDKYKELFSEKEHKKSRGEVKADKPDMNYATYSQRYIRDDKANENLCKIITRILAEKKDILASINKDYEYCMTEMENKTFLQLLNTKENGAIPYQLHEKELLTIIDGQTPFYPFLRQVCEKIHKLVTFRVPYYVGPLNGIPDKDKSFDWATRTVTGQKVYPWNFDDVINCAASAETFITRMTNKCTYLPQQDVIPKNSLLYSEYEVLSELNKIRINSKQIKDISLKEKMVEELFANPKHAKVSREAFIKWLRCNKYHMLEPVNIEGFQKDGEFASYQKSRVDFKKIFGVVNESNREMIENIILWVTLFEDKTILENKIIQAYGDKISVEQIKQIKKLKYKGWSRLSRKLLIGLTYTDKHQEKQTIMSLMRGSNLNLMQIINDKDYGFNKYIEEATLEKISRTSVEDIVSGLATSPAVKKGINQALQVVAELVRVNKGVPKKIFLEFARDHEDSKRTSSRYKKLNIIYKEWGDNADNKEIIKELSDNQKNLDRRTLYLYFIQNGKCMYTGEPLDITALSTYEVDHIIPRSYIKDDSIDNLALVKKIENQTKGDNLLLSRSIIDKQKAYWNILLEKGLISQKKFKNLTSLIKEDDIKGFVQRQLVETRQIIKHVAQILKQFYPSTNIYAVRASLPSDIRKQYGLPKVREINDYHHAFDAYLAILAGKFIANCYPYWEDYIDYNEYKKYASERNFAQKQKNGYFVGRFSEVYDDQNTGEIVWNGKEILEYLRKVYGYKDCFISKKVEEITGEFYNQTLVRKAAKQPIKKGLDTEKYGGYSGETIAYSMVISYKKKGENIKKLIGIPTHVASLAKDNPTAIKTYLLNSGYEGYQILRDKINKFQFIEEKGQYYYLSSVKEVQNGYQMVLPVKIQNLIFEMVSGKYKEDDIDERLLEIYDSLQQKILKKYPGYETVSRKLVEKRNVFVNLEREKKIKIIPEILKITLANAQNGNLEILGLTKREGRKNAFCPKFDDLFFIDTSVTGLFERRTKV

SEQ ID NO: 21090 - protein, 1362 aa, unidentified
  REGION 1..1362: note = Cas Enzyme sequence
VTNSEYKLKKYKNNLMWGVHLFDEAKQSAERRSFRTARRRLDRRKQRIILLQEFFVRAVCEKDENFFRRLKESALLPEDAEHRTNNIFFDDPDYTDKDYFEEYPTIHHLICELMESKEPHDVRLVYLACVYLLAHRGHFLLPVSEDDISKVTEFEPLYESFYKALEEKLDEEPPFDRSADDFAEILKSHKTVSAKNKDFDKLLFGGKVKTYDNKNISYSALIKLLSGGTEKLSKFFANEEYTDLEKDSVCVRNADFGDTLEMLEGQIDELDFALLKSVKSLYDWSLLVDILEGKSLISEAKKDKYDEHRYDLDALKYLFREYLTKDDYNEMFKEVSGKQNYASYVYNAPSDKTRDSKYKKCNQEDFCKFTKKFLSKIKPNEKDKPCLDKLLEKCEQNSLCPKQVTTDNRVIPYQLYYVELKKILKNACGYLPFLNERDEYGTVADKILNIMKFRVPYYVGPLVDSKKSPNAWLVRKLDGKITPWNFTDMVNEDDSEKAFIRRMTCKCTYVAGQDVLPKYSLLYSKFSVLNEINNIKLNGEPISVQAKQEIYTELFERNKSRVSKKKIRDCLISHGYAADSDEVTGIDDIAKSALRSYHDFKKMLSNGILTEQQVEEIIEHITVTTDNIRLKKWLKTQFPMLADEDVKYITKLKYKDYGRLSRCFLEDVLPVDTKTGEAESDKNIITMLWETNENIMQLLSSKYRYSENIEHMNRQYYALPENHKSMSERLKDMYVPTAVRRAVTRTFDIVKELKKIQGRDPDKIFIEMARGTGETPKGKRTNSRKDQILEHWRGLDNKDINDLKKSGIWEHLDTIDDTKLRSDKYFLYFMQLGRCMYTEKPIPFEEVENEHKWNIDHIWPQAKIKDDSLDNKVLVSSNENGKKSDSYPISDDIRHSMAGLWHSLYKKGIISEKKYQRLTRSTPFTDDELSGFIARQLVETRQSTKAVATLLKEQFPNTEIVYVKAGLVSDFRQEMGMLKCREVNDLHHANDAYLNIVLGNVYNTRFTKDPLNFVKNNEKYSIKIFQKNSDGKKTGVMTRKVERGGEVAWDPETSFAIVRKMMSKNSIRYVRYAYMRKSGQNGGFFDQNPLRKGKGMVSIKHNLSIEKYGGYDNATISFFSLVSIKDFGVILLAVELLSANKFLKNISEAKEYAADKLSKELNVKIVPNDVTFPLNNRYNVVKINSVLELDGYRVMIAAKQNSSIKFVSNESLILSSQHMAYVKKITKFIEKRKQDKVCMINEFSGISSEDNIELYDVLVSKCNIKPFNIMYENLGIKLSDNRDNFIKKSVENQVLILSEMVRLFKTGRKTGVNLEEVGGRKNSGVKTLNTCLYKVKDYSNIFLVDQSPTGLIERKSPNLLDL

SEQ ID NO: 21091 - protein, 1382 aa, unidentified
  REGION 1..1382: note = Cas Enzyme sequence
VVDEKIFWGFDIGTDSVGWAVTNSEYKLKKYKNNLMWGVHLFDEAKQSAERRSFRTARRRLDRRKQRIILLQEFFVRAVCEKDENFFRRLKESALLPEDAEHRTNNIFFDDPDYTDKDYFEEYPTIHHLICELMESKEPHDVRLVYLACVYLLAHRGHFLLPVSEDDISKVTEFEPLYESFYKALEEKLDEEPPFDRSADDFAEILKSHKTVSAKNKDFDKLLFGGKVKTYDNKNISYSALIKLLSGGTEKLSKFFANEEYTDLEKDSVCVRNADFGDTLEMLEGQIDELDFALLKSVKSLYDWSLLVDILEGKSLISEAKKDKYDEHRYDLDALKYLFREYLTKDDYNEMFKEVSGKQNYASYVYNAPSDKTRDSKYKKCNQEDFFKFTKKFLSKIKPNEKDKPCLDKLLEKCEQNSLCPKQVTTDNRVIPYQLYYVELKKILKNACGYLPFLNERDEYGTVADKILNIMKFRVPYYVGPLVDSKKSPNAWLVRKLDGKITPWNFTDMVNEDDSEKAFIRRMTCKCTYVAGQDVLPKYSLLYSKFSVLNEINNIKLNGEPISVQAKQEIYTELFERNKSRVSKKKIRDCLISHGYAADSDEVTGIDDIAKSALRSYHDFKKMLSNGILTEQQVEEIIEHITVTTDNIRLKKWLKTQFPMLADEDVKYITKLKYKDYGRLSRCFLEDVLPVDTKTGEAESDKNIITMLWETNENIMQLLSSKYRYSENIEHMNRQYYALPENHKSMSERLKDMYVPTAVRRAVTRTFDIVKELKKIQGRDPDKIFIEMARGTGETPKGKRTNSRKDQILEHWRGLDNKDINDLKKSGIWEHLDTIDDTKLRSDKYFLYFMQLGRCMYTEKPIPFEEVENEHKWNIDHIWPQAKIKDDSLDNKVLVSSNENGKKSDSYPISDDIRHSMAGLWHSLYKKGIISEKKYQRLTRSTPFTDDELSGFIARQLVETRQSTKAVATLLKEQFPNTEIVYVKAGLVSDFRQEMGMLKCREVNDLHHANDAYLNIVLGNVYNTRFTKDPLNFVKNNEKYSIKIFQKNSDGKKTGVMTRKVERGGEVAWDPETSFAIVRKMMSKNSIRYVRYAYMRKSGQNGGFFDQNPLRKGKGMVSIKHNLSIEKYGGYDNATISFFSLVSIKDFGVILLAVELLSANKFLKNISEAKEYAADKLSKELNVKIVPNDVTFPLNNRYNVVKINSVLELDGYRVMIAAKQNSSIKFVSNESLILSSQHMAYVKKITKFIEKRKQDKVCMINEFSGISSEDNIELYDVLVSKCNIKPFNIMYENLGIKLSDNRDSFIKKSVENQVLILSEMVRLFKTGRKTGVNLEEVGGRKNSGVKTLNTCLYKVKDYSNIFLVDQSPTGLIERKSPNLLDL

SEQ ID NO: 21092 - protein, 1073 aa, unidentified
  REGION 1..1073: note = Cas Enzyme sequence
VANEKNYLGLDIGSNSVGWAITDEEYNLKKFKGNLMWGVHLFDEAQQSADRRAFRTARRRLDRRQQRIKLLQDFFAVEILKKDEKFFLRLKESALLPEDSENRKNNIFFDDDSYGDKEYFQEYPTIHHLIVELINNKEPHDVRLVYYACAYLLAHRGHFLFNVGKGNIEEITNFKPIYDNFYSALQDIDENPLFDKEAKAKDIEDILKQHIAITSKERALKQRLFDGRIPKTKESDDKDDGAITLAYDKLIKLISGGTVKLSELFYKEDYKELEKNSVCVKNADFDDTLEILTGQIDELHLSLLTRVKAMYDWSLLVDILHDHTMISESKVEIYDKHKKDLEELKYFVRAYLSKADYNEIFRVAGDKANYASYVYNRQNVIDKKVDSNFSHNDASHDRKSQEAFCKFLKPYLVKIESEVKDEDKERLAKLKKKCEDNELCPKQVTTNNRVIPYQLYYAELKKILENACKYLDFLNEKDEYGTVADKILSIMGFRIPYYAGPLVSSDRSKNAWMKRKAEGKIYPWNFKDMVDEESSENEFIRRMTCKCTYIAGADVLPKYSLLYSKFMVLNEINNIKVNGNPISVDVKQRLYKDKFVDCKAKVTKKRIADYFKSNGIYSGDIEISGIDDNIKSSLKSYHDFRHLMESNQLTENEVEDIIVHITVTTDTNRLKKWLKDKYGKLTSDDIKYISKLKYNDYGRLSRRFLEEVLPIDTKTGEAESDRNIITALWETNENIMQLLSSKYHYSEAIEKINRGYYDQHTDENTISKRMENMYLSPAVRRSVTRTLDIVKELKTILKKAPDKIFIEMARGEGKIPKGKRTESRRDQITKFLDESEVDNIDELRSNLGKADDGKLRSEKYFLYFMQLGKCAYTGKSISFDELEDNSKWNIDHIWPQAKIKDDSLDNKVLVDSNANGAKKDIYPIDENIRNKMKGFWYSLREKKLISDKKYQRLIRSTPFTEDELAGFIARQLVETRQSTKAVAELLKELCPESEIVYVKAGLVSEFRQEMDVLKCREINDLHHAKDAYLNIVMGNVYNTKFTNDPRNFIHKHLDMVVKPDCYCTCCHQRLRVV

SEQ ID NO: 21093 - protein, 1382 aa, unidentified
  REGION 1..1382: note = Cas Enzyme sequence
VVDEKIFWGLDIGTDSVGWAVTNSEYKLKKYKNNLMWGVHLFDEAKQSAERRSFRTARRRLDRRKQRIILLQEFFVRAVCEKDENFFRRLKESALLPEDAEHRTNNIFFDDPDYTDKDYFEEYPTIHHLICELMESKEPHDVRLVYLACVYLLAHRGHFLLPVSEDDISKVTEFEPLYESFYKALEEKLDDEPPFDRSADDFAEILKSHKTVSAKNKDFDKLLFGGKVKTYDNENISYSALIKLLSGGTEKLSKFFANEEYTDLEKDSVCVRNADFGDTLEMLEGQIDELDFALLKSVKSLYDWSLLVDILEGKSLISEAKKDKYDEHGYDLDALKYLFREYLTKDDYNEMFKEVSGKQNYASYVYNASSDKTRDSKYKKCSQKDFCKFTKKFLSKIKPNEKDKPCLDKLLEKCEQNSLCPKQVTTDNRVIPYQLYYVELKKILENACGYLPFLNERDEYGTVADKILSIMKFRVPYYVGPLVDSKKSPNAWLVRKLDGKITPWNFTDMVNEDDSEKAFIRRMTCKCTYVAGQDVLPKYSLLYSKFSVLNEINNIKLNGEPISVQAKQEIYTELFERNKSRVSKKKIRDCLISHGYAADSDEVTGIDDIAKSALRSYHDFKKMLSNGILTEQQVEEIIEHITVTTDNIRLKKWLKTQFPMLADEDVKYITKLKYKDYGRLSRCFLEDVLPVDTKTGEAESDKNIITMLWETNENIMQLLSSKYRYSENIEHMNRQYYALPENHKSMSERLKDMYVPTAVRRAVTRTFDIVKELKKIQGRDPDKIFIEMARGTGETPKGKRTNSRKDQILEHWHGLDNKDINDLKKSGIWEHLDTIDDAKLRSDKYFLYFMQLGRCMYTEKPIPFEEVENEHKWNIDHIWPQAKIKDDSLDNKVLVSSNENGKKSDSYPISDDIRHSMAGLWHSLYKKGLISEKKYQRLTRSTPFTDDELSGFIARQLVETRQSTKAVATLLKEQFPNTEIVYVKAGLVSDFRQEMGMLKCREVNDLHHAKDAYLNIVLGNVYNTRFTKDPLNFVKNNEKYSIKIFQKNSDGKKTGVMTRKVERGGEVAWDPETSFAIVRKMMSKNSIRYVRYAYMRKSGQNGGFFDQNPLRKGKGMVSIKHNLSIEKYGGYDNATISFFSLVSIKDFGVILLAVELLSANKFLKNISEAKEYAADKLSKELNVKIVPNDVAFPLNNRYNVVKINSVLELDGYRVMIAAKQNSSIKFVSNESLILSSQHMAYVKKITKFIEKRKQDKVCMINAFSGISSEDNIELYDVLVSKCNIKPFNIMYENLGIKLSDNRDNFIKKSVENQVLILSEMVRLFKTGRKTGVNLEEVGGRKNSGVKTLNTCLYKVKDYSNIFLVDQSPTGLIERKSPNLLDL

SEQ ID NO: 21094 - protein, 1032 aa, unidentified
  REGION 1..1032: note = Cas Enzyme sequence
MFKEVSGKQNYASYVYNAPSDKTRDSKYKKCNQEDFCKFTKKFLSKIKPNEKDKPCLDKLLEKCEQNSLCPKQVTTDNRVIPYQLYYVELKKILENACDYLPFLNERDEYGTVADKILSIMKFRVSYYVGPLVDRKKSPNAWLVRKLDGKITPWNFTDMVNEDESENAFIRRMTCKCTYVAGQDVLPKYSLLYSKFSVLNEINNIKLNGEPISVQAKQEIYTELFERNKSRVSKKKIRDCLISHGYAADSDEVTGIDDIAKSALRSYHDFKKMLSNGILTEQQVEEIIEHITVTTDNIRLKKWLKTQFTMLADEDVKYITKLKYKDYGRLSRCFLEDVLPVDTKTGEAESDKNIITMLWETNENIMQLLSSKYRYSENIEHMNRQYYALPENHKSMSERLKDMYVPTAVRRAVTRTFDIVKELKKIQGRDPDKIFIEMARGTGETPKGKRTNSRKDQILEHWHGLDNKDINALKKSGIWEHLDTIDDAKLRSDKYFLYFMQLGRCMYTEKPIPFEEVENEHKWNIDHIWPQAKIKDDSLDNKVLVDSNENGKKGDSYPVNPDIRKNMAKTWRVFYQKKRISEKKYQRLTRSAEFTYDELSGFIARQLVETRQSTKAVATLLKEQFPNTEIVYVKAGLVSDFRREMGMLKCREVNDLHHAKDAYLNIVLGNVYNTRFTKEPLNFVKNNEKYSIKIFQKNSDGKKTGVMTRKVERGGEVAWDPETSFAIVRKMMSKNSIRYVRYAYMRKSGQKGGFFNQNPLRKGKGMVSIKHNLSIEKYGGYDNATISFFSLVSIKDFGVILLAVELLSANKFLKNISEAKEYAADKLSKELNVKIVPNDVSFPLNNRYNVVKINSVLELDGYRVMIAAKQKSSIKFVSNESLILSSQHMAYVKKITKFIEKRKQDKVCMINAFSGISSEDNIELYDVLVSKCNIKPFNIMYENLGIKLSDNRDNFIKKSVENQVLILSEMVRLFKTGRKTGVNLEEVGGRKNSGVKTLNTCLYKVKDYSNIFLVDQSPTGLIERKSPNLLDL

SEQ ID NO: 21095 - protein, 1362 aa, unidentified
  REGION 1..1362: note = Cas Enzyme sequence
MIIHKKDNFYLGLDIGTDSIGWAVTDLKYNLLKYKGNAMWGSYCFDAANLAEERRSFRTAQRSLDRRQARINILQELFAEEIAKIDEKFFVRLKESALWADDKSTKSKYTFFNDKEYNDTDYHRQYPTIHHLIVSLMNADKPYDIRLLYIACAYILSHRGHFLIDVNKENIDEVTDFHNVYGGLMSCFSENAAAPWECSCEDFAEVMKRKLSVNKKKNEFRSLLWNGKKPVLDPNEEFLCKPDTLIDLISGAKCKLSDLFDNEEYKELENNFITLASADFDDILAQLRSSINESQAELLKQAKSVYDWALLVDILNGRKYISEAKVDIYDQHKKDVSFLKKIINKYLPQKYNEIFRNACDKSNYTSYSYNVTSFEKALPVNFKKCTQEDFCKYIKQIVSKINIEAEDKAGYDDMISRLENNSFCPKQVSGDNRVIPYQLYWNELKTMLEKAAGFFPFLNKSDRYCTIAEKILSLMEFRVPYYVGPLVSQNKSQFAWMVKRTEAPTEKIYPWNFDAIVDRDASEEAFIKRMTCKCTYCAGEDVLPKNSLLYSKFRVLNEINNIRINNIPITVECKQQIYTELFEKYRKVTLKRIKDFLISHGKIEKNDELSGIDINVKSSLDSYHDFKSLLSRNVLTEFDVEEIINRITFTQDKGRLKKWLKSNYKLSDDDLKYVSQLKYSDFGRLSKKLLTEYDDIKDGQKCNPNIIEMLWETNNNLMQLLSDKFSYSEQIKIDNAVYYSDKSQTLNEQLDEMYISNAVKRPIIRTIDIVKEIYGIMKNQPNKIFIEMARGANENQKNKRTVSRREQIKNLFEKFPESEIRELSEQLDSKTDSELRSEKLFLYFTQLGKCMYSGQVININELSSNKYNIDHIYPQSKTEDDSISNKVLVISVINDKKKDIYPLNEVDSDIQKKMTPFWTMLKEKELISKIKYDRLTRKTRFTDDELAGFINRQLVETRQSTKAVATLLGEMFPESEIVYVKAGLVSRFRQEYSIFKCRCANDLHHAKDAYLNIVMGNVYNVKFTKNPMNFIKSGENYTLNLKQMLKYDISRNNVFAWDKDNSIIAVKNTMNKNNIRFVRYSYIKKGELFDSNPMRKGKGQVPLKNGLDINKYGGYNKAAVAYYCLVKHTEKGKSQISLIPIELYRASQITTTEDLSVFCEKTLGLKNVVILLDGRKIKINTLFEIDGFRAYLSGKTGNSICFRGGMQLVLGSKWEEYVKRLSSFVEKYNEAVRMKITDYKITAFNKIDRKLNCELYDILKHKLTTTPYKVLMPTPSELLEKSRSLFEQLTPEEQSIALLHIIELFGCSSSGGCDLTLINGSKNTGILKMAMTLNSKRFSAIRIIDQSPTGLFEKRSENLLEL

SEQ ID NO: 21096 - protein, 1287 aa, unidentified
  REGION 1..1287: note = Cas Enzyme sequence
LPEDAEHRTNNIFFDDTDYTDKDYFEEYPTIHHLICELMESKEPHDVRLVYLACVYLLAHRGHFLLPVSEDDISKVTELEPLYESFYKALEEKLDEEPPFDRSADDFAEILKSHKTVSAKNKDFDKLLFGGKVKTYDNENISYSALIKLLSGGTEKLSKFFENEEYTDLEKDSVCVRNADFGDTLEMLEGQIDELDFALLKSEKSLYDWSLLVDILEGKSLISEAKKDKYDEHGYDLDALKYLFREYLTKDDYNEMFKEVSGKQNYASYVYNAPSDKTRDCKYKKCSQEDFCKFTKKFLSKIKPNEKDKPCLDKLLEKCEQNSLCPKQVTTDNRVIPYQLYYVELKKILENACGYLPFLNERDEYGTVADKILSIMKFRVPYYVGPLVDSKKSPNAWLVRKLDGKITPWNFTDMVNEDDSEKAFIRRMTCKCTYVAGQDVLPKYSLLYSKFSVLNEINNIKLNGEPISVQAKQEIYTELFERNKSRVSKKKIRDCLISHGYAADSDEVTGIDDIAKSALRSYHDFKKMLSNGILTEQQVEEIIEHITVTTDNIRLKKWLKTQFPMLADEDVKYITKLKYKDYGRLSRCFLEDVLPVDTKTGEAESDKNIITMLWETNENIMQLLSSKYRYSENIEHMNRQYYALPENHKSMSERLKDMYVPTAVRRAVTRTFDIVKELKKIQGRDPDKIFIEMARGTGETPKGKRTNSRKDQILEHWHGLDNKDINDLKKSGIWEHLDTIDDAKLRSDKYFLYFMQLGRCMYTEKPIPFEEVENEHKWNIDHIWPQAKIKDDSLDNKVLVSSNENGKKSDSYPISDDIRHSMAGLWHSLYKKGLISEKKYQRLTRSTPFTDDELSGFIARQLVETRQSTKAVATLLKEQFPNTEIVYVKAGLVSDFRQEMGMLKCREVNDLHHAKDAYLNIVLGNVYNTRFTKDPLNFVKNNEKYSIKIFQKNSDGKKTGVMTRKVERGGEVAWDPETSFAIVRKMMSKNSIRYVRYAYMRKSGQNGGFFDQNPLRKGKGMVSIKHNLSIEKYGGYDNATISFFSLVSIKDFGVILLAVELLSANKFLKNISEAKEYAADKLSKELNVKIVPNDVAFPLNNRYNVVKINSVLELDGYRVMIAAKQNSSIKFVSNESLILSSQHMAYVKKITKFIEKRKQDKVCMINAFSGISSEDNIELYDVLVSKCNIKPFNIMYENLGIKLSDNRDNFIKKSVENQVLILSEMVRLFKTGRKTGVNLEEVGGRKNSGVKTLNTCLYKVKDYSNIFLVDQSPTGLIERKSPNLLDL

SEQ ID NO: 21097 - protein, 1287 aa, unidentified; identical to SEQ ID NO: 17766
  REGION 1..1287: note = Cas Enzyme sequence

SEQ ID NO: 21098 - protein, 1384 aa, unidentified
  REGION 1..1384: note = Cas Enzyme sequence
MSFKENSKIYYGLDIGTDSVGWSTTNEKYELLRYKNNLMWGVSLFEAASLAEDRRGHRTQRRRYDRRQQRVALLGELFAKEILKTDPDFFLRLKESSLYPEDRTSKNVNTYFDDADFKDSDYFKMYPTVHHLIKELSESNKPHDVRLVYLACAFIVAHRGHFLNGADENNVQAVLDFDSSYCEFTDWFKSNDIEDNPFSESVKNEFSVILRKKIGITAKEREIKNLLFGTTKIPDCYKDEEYPIDIDVLIKFISGGKTNLAKLFRNPSYDELDIQTVEVGKADFADTIDLLASSMEDTDVPLLSAVKAMYDWSLLIDVLKGQKTISDAKVCEYEQHKSDLKALKYIVRKYLDRAQYDEIFRTAGEKPNYVSYSYNVTDVKLKQLPSNFKKKNSEEFCKYIKSKLEKIKPESDDEAVYNELIEKCNSKTLCPKQVTDENRVIPYQLYYHELSMILDKASAYLDFLNETEDGISVKQKILTLMKFRIPYFVGPLVKRNETDNVWIVRKAEGRIYPWNFENMVDFDKSEDGFIRRMTCKCTYLAGEDVLPKYSLLYSKYTVLNEINNIKVNGEKISPELKQDIFNELFMKTSRVTVKKITELLKRKGAFSEEKGDSLSGVDINIKSSLKSYLDFRRLLENGSLSENDVERIIERITVTTDKPRLVSWLKAEYSDLPAEDIRYISRLSYKDYGRLSAKLLTGCYELDTNTGEIGGRSIIDFMWAENINLMQILSDSYGYKSFIEEENKKYYMINPTGSIAQTLREMYVSPSVSRAIIRTMEIVKELRKITKKDPDKIFVEMARGGKPEEKGKRTSSRREQIEKLYDSAKAFVSDEDISHLRSQLGSLSDEQLRSEKYYLYFIQFGKCMYSGEAIDFSRLGDNHCYDIDHIFPQSKINDDSLHNKVLVKSQLNGEKSDDYPIKAEIRNKMHPLWKNLFYRDPKNPTDKVKYERLTRSTPFTEDELAGFIERQLVETRQSTKAVATLLKEMFPDSKIVYVKAGQVSEFRHDFDMLKCREINDLHHAKDAYLNIVIGNVHDVKFTSNPMNFVKNADKHYTIKVKETLKHKVSRNGETAWNPETDFDTVKRMMSKNSVRYVRYCYKRKGGFFNQNPDRAGNPDLARLKKDLDPVKYGGYNSKSISCFSLIKCTGVGAVIIPVELLCEKRYFSDDSFASEYAYSVLKNALPAKNIAKISIDDISFPLKRRPIKINTLFGFDGYRVNIRSKDSYHYFTISSAMAAIYSKDTSDYIKAVSSYIDKSDKGSKFKPGEAFDVLSNLKVYDEIAKKCISEPFSKINKLAEAGKKMEEGRDKFAELSIIEQMKTLLLLVDILKTGRINTCNLKPVGGVESYHTERMSAILKNTKYSDIRIIDQSPTGLYEKKSDNLLEL

SEQ ID NO: 21099 - protein, 1384 aa, unidentified
  REGION 1..1384: note = Cas Enzyme sequence
MSFKENSKIYYGLDIGTDSVGWSTTNEKYELLRYKNNLMWGVSLFEAASLAEERRGHRTQRRRYDRRQQRVALLGELFAKEILKTDPDFFLRLKESSLYPEDRTSKNVNTYFDDADFKDSDYFKMYPTVHHLIKELSESNKPHDVRLVYLACAFIVAHRGHFLNGADENNVQAVLDFDSSYCEFTDWFKSNDIEDNPFSESVKNEFSVILRKKIGITAKEREIKNLLFGTTKTPDCYKDEEYPIDIDVLIKFISGGKTNLAKLFRNPSYDELDIQTVEVGKADFADTIDLLASSMEDTDVPLLSAVKAMYDWSLLIDVLKGQKTISDAKVCEYEQHKSDLKALKYIVRKYLDRAQYDEIFRTAGEKPNYVSYSYNVTDVKLKQLPSNFKKKNSEEFCKYIKSKLEKIKPESDDEAVYNELIEKCNSKTLCPKQVTDENRVIPYQLYYHELSMILDKASAYLNFLNETEDGISVKQKILTLMKFRIPYFVGPLVKRNETDNVWIVRKAEGRIYPWNFENMVDFDKSEDGFIRRMTCKCTYLAGEDVLPKYSLLYSKYTVLNEINNIKVNGEKISPELKQDIFNELFMKTSRVTVKKITELLKRKGAFSEEKGDSLSGVDINIKSSFKSYLDFRRLLENGSLSENDVERIIERITVTTDKPRLVSWLKAEYSDLPAEDIRYISRLSYKDYGRLSAKLLTGCYELDTNTGEIGGRSIIDFMWAENINLMQILSDSYGYKSFIEEENKKYYMINPTGSIAQTLREMYVSPSVSRAIIRTMEIVKELRKITKKDPDKIFVEMARGGKPEEKGKRTSSRREQIEKLYNSAKAFVSDEDISHLRSQLGSLSDEQLRREKYYLYFIQFGKCMYSGEAIDFSRLGDNHCYDIDHIFPQSKINDDSLHNKVLVKSQLNGEKSDDYPIKAEIRNKMHPLWKNLFYRDPKNPADKVKYERLTRSTPFTEDELAGFIERQLVETRQSTKAVATLLKEMFPDSKIVYVKAGQVSEFRHDFDMLKCREINDLHHAKDAYLNIVIGNVHDVKFTSNPMNFVKNADKHYTIKVKETLKHKVSRNGETAWNPETDFDTVKRMMSKNSVRYVRYCYKRKGGFFNQNPDRAGNPDLARLKKDLDPVKYGGYNSKSISCFSLIKCTGVGAVIIPVELLCEKRYFSDDSFASEYAYSVLKNALPAKNIAKISIDDISFPLKRRPIKINTLFEFDGYRVNIRSKDSYHYFTISSAMAAIYSKDTSDYIKAVSSYIDKSDKGSKFKPGEAFDVLSNLKVYDEIAKKCISEPFSKISKLAEAGKKMEEGRDKFAELSIIEQMKTLLLLVDVLKTGRINTCNLKPVGGVESYHTERMSAILKNTKYSDIRIIDQSPTGLYEKKSDNLLEL

SEQ ID NO: 21100 - protein, 1384 aa, unidentified
  REGION 1..1384: note = Cas Enzyme sequence
MSFKENSKIYYGLDIGTDSVGWSTTNEKYELLRYKNNLMWGVSLFEAASLAEERRGHRTARRRLDRRQQRVALLGELFAKEILKTDPDFFLRLKESSLYPEDRTSKNVNTYFDDADFKDSDYFKMYPTVHHLIKELSESNKPHDVRLVYLACAFIVAHRGHFLNGADENNVQAVLDFDSSYCEFTDWFKSNDIEDNPFSESVKNEFSVILRKKIGITAKEREIKNLLFGNTKTPDCYKDEEYPIDIDVLIKFISGGKTNLAKLFRNPSYDELDIQTVEVGKADFADTIDLLASSMEDTDVPLLSAVKAMYDWSLLIDVLKGQKTISDAKVCEYEQHKSDLKALKYIVRKYLDRAQYDEIFRTAGEKPNYVSYSYNVTDVKLKQLPSNFKKKNSEEFCKYIKSKLEKIKPESDDEAVYNELIEKCNSKTLCPKQVTDENRVIPYQLYYHELSMILDKASAYLDFLNETEDGISVKQKILTLMKFRIPYFVGPLVKRNETDNVWIVRKAEGRIYPWNFENMVDFDKSEDGFIRRMTCKCTYLAGEDVLPKYSLLYSKYTVLNEINNIKVNGEKISPELKQDIFNELFMKTSRVTVKKITELLKRKGAFSEEKGDSLSGVDINIKSSLKSYLDFRRLLENGSLSENDVERIIERITVTTDKPRLVSWLKAEYSDLPAEDIRYISRLSYKDYGRLSAKLLTGCYELDTNTGEIGNRSIIDFMWAENINLMQILSDSYGYKSFIEEENKKYYMINPTGSIAQTLREMYVSPSVSRAIIRTMEIVKELRKITKKDPDKIFVEMARGGKPEEKGKRTSSRREQIEKLYDSAKAFVSDEDISHLRSQLGSLSDEQLRSEKYYLYFIQFGKCMYSGEAIDFSRLGDNHCYDIDHIFPQSKINDDSLHNKVLVKSQLNGEKSDDYPIKAEIRNKMHPLWKNLFYRDPKNPTDKVKYERLTRSTPFTEDELAGFIERQLVETRQSTKAVATLLKEMFPDSKIVYVKAGQVSEFRHDFDMLKCREINDLHHAKDAYLNIVIGNVHDVKFTSNPMNFVKNADKHYTIKVKETLKHKVSRNGETAWNPETDFDTVKRMMSKNSVRYVRYCYKRKGGFFNQNPDRAGNPDLARLKKDLDPVKYGGYNSKSISCFSLIKCTGVGAVIIPVELLCEKRYFSDDSFASEYAYSVLKNALPAKNIAKISIDDISFPLKRRPIKINTLFEFDGYRVNIRSKDSYHYFTISSAMAAIYSKDTSDYIKAVSSYIDKSDKGSKFKPGEAFDVLSNLKVYDEIAKKCISEPFSKISKLAEAGKKMEEGRDKFAELSIIEQMKTLLLLVDILKTGRINTCNLKPVGGVESYHTERMSAILKNTKYSDIRIIDQSPTGLYEKKSDNLLEL

SEQ ID NO: 21101 - protein, 1090 aa, unidentified
  REGION 1..1090: note = Cas Enzyme sequence
MEDTDVPLLSAVKAMYDWSLLIDVLKGQKTISDAKVCEYEQHKSDLKALKYIVRKYLDRALYDEIFRTAGEKPNYVSYSYNVTDVKLKQLPSNFKKKNSEEFCKYIKSKLEKIKPESDDEAVYNELIEKCNSKTLCPKQVTDENRVIPYQLYYHELSMILDKASAYLDFLNKTEDGISVKQKILTLMKFRIPYFVGPLVKRNETDNVWIVRKAEGRIYPWNFENMVDFDKSEDGFIRRMTCKCTYLAGEDVLPKYSLLYSKYTVLNEINNIKVNGEKISPELKQDIFNELFMKTSRVTVKKITELLKRKGAFSEEKGDSLSGVDINIKSSLKSYLDFRRLLENGFLSENDVERIIERITVTTDKPRLVSWLKAEYSDLPAEDIRYISRLSYKDYGRLSAKLLTGCYELDTNTSEIGGRSIIDFMWAENINLMQILSDSYGYKSFIEEENKKYYTINPTGSIAQTLREMYVSPSVSRAIIRTMEIVKELRKITKKDPDKIFVEMARGGKPEEKGKRTSSRREQIEKLYDSAKAFVSDEDISHLRSQLGSLSDEQLRSEKYYLYFIQFGKCMYSGEAIDFSRLGDNHCYDIDHIFPQSKINDDSLHNKVLVKSQLNGEKSDDYPIKAEIRNKMHLLWKNLFYRDPKNPTDKVKYERLTRSTPFTEDELAGFIERQLVETRQSTKAVATLLKEMFPDSKIVYVKAGQVSEFRHDFDMLKCREINDLHHAKDAYLNIVIGNVHDVKFTSNPMNFVKNADKHYTIKVKETLKHKVSRNGETAWNPETDFDTVKRMMSKNSVRYVRYCYKRKGELFDQQPKKAGNPDLAYRKKNLDPVKYGGYNSKSISCFSLIKCTGVGAVIIPVELLCEKRYFSDDSFASEYAYSVLKNALPAKNIAKISIDDISFPLKRRPIKISTLFEFDGYRVNIRSKDSYHYFTISSAMAAIYSKDTSDYIKAVSSYIDKSDKGSKFKPGEAFDVLSNLKVYDEIAKKCISEPFSKISKLAEAGKKMEEGRDKFAELSIIEQMKTLLLLVDILKTGRINTCNLKPVGGVESYHTERMSAILKNTKYSDIRIIDQSPTGLYEKKSDNLLEL

SEQ ID NO: 21102 - protein, 1384 aa, unidentified
  REGION 1..1384: note = Cas Enzyme sequence
MSFKENSKIYYGLDIGTDSVGWSTTNEKYELLRYKNNLMWGVSLFEAASLAEERRGHRTQRRRYDRRQQRVALLGELFAKEILKTDPDFFLRLKESALYPEDRTSKNVNTYFDDADFKDSDYFKMYPTVHHLIKELSESNKQHDVRLVYLACAFIVAHRGHFLNGADENNVQAVLDFDSSYCEFTDWFKSNDIEDNPFSESVKNEFSVILRKKIGITAKEKEIKNLLFGTTKTPDCYKDEEYPIDIDVLIKFISGGKTNLAKLFRNPSYDELDIQTVEVGKSDFADTIDLLASSMEDTDVPLLSAVKAMYDWSLLIDVLKGQKTISDAKVYEYEQHKSDLKALKYIVRKYLDRAQYDEIFRTAGEKPNYVSYSYNVTDVKLKQLPDNFKKKKSEDFCKYIKSKLEKIKPESDDEAVYNELIEKCNSKTLCPKQVTDENRVIPYQLYYHELSMILDKASAYLDFLNKTEEGISVKQKILTLMKFRIPYFVGPLVKRNETDNVWIVRKAEGRIYPWNFENMVDFDKSEDGFIRRMTCKCTYLAGEDVLPKYSLLYSKYTVLNEINNIKVNGEKISPELKQDIFNELFMKTSRVTVKKITELLMRKGAFSEEKGDSLSGVDINIKSSLKSYLDFRRLLENGSLSENDVERIIERITVTTDKPRLVSWLKAEYSDLPAEDIRYISRLSYKDYGRLSAKLLTGCYELDTNTGEIGGRSIIDFMWAENINLMQILSDSYGYKSFIEEENKKYYMINPTGSIAQTLREMYVSPSVSRAIIRTMEIVKELRKITKKDPDKIFVEMARGGKPEEKGKRTSSRREQIEKLFASAKEFVSDEDISHLRSQLGSLSDEQLRSEKYYLYFIQFGKCMYSGESIDFSRLGDNHCYDIDHIFPQSKINDDSLHNKVLVKSQLNGEKSDDYPIKTEIRNKMHPLWKNLFYRDPKNPTDKIKYERLTRSTPFTEDELAGFIERQLVETRQSTKAVATLLKEMFPDSKIVYVKAGQVSKFRHDFDMLKCREINDLHHAKDAYLNIVIGNVHDVKFTSNPMNFVKNADKHYTIKVKETLKHKVSRNGETAWNPETDFDMVKRMMSKNSVRYVRYCYKRKGGFFNQNPDRAGNPDLARLKKDLDPVKYGGYNSKSISCFSLIKCTGVGAVIIPVELLCEKRYFSDDSFASEYAYSVLKNALPAKNIAKISIDDISFPLKRRPIKINTLFEFDGYRVNIRSKDSYSVFKISSAMAAIYSKDTSDYIKAVSSYIDKSDKGSKFKPGEAFDVLSNLKVYDEIAQKCISEPFCKISKLAEAGKKMEEGRDKFAELSIIEQMKTLLLLVDILKTGRINTCNLKSVGGVESYHTERMSAILKNTKYSDIRIIDQSPTGLYEKKSDNLLEL

SEQ ID NO: 21103 - protein, 1384 aa, unidentified
  REGION 1..1384: note = Cas Enzyme sequence
MSFKENSKFYFGLDIGTDSVGWAVTDNLYKLYKYKNNLMWGVSLFEAASPAEDRRGHRTARRRLDRRQQRVALLRELFAKEILKTDPDFFLRLKESSLYPEDRTNKNVNTYFDDADFKDSDYFKMYPTVHHLIKELSESDKPHDVRLVYLACAFIVAHRGHFLNGADENNVQEVLDFNSSYCEFTDWFKSNDIEDNPFSESTENEFSVILRKKIGITAKEKEIKNLLFGTTKTPDCYKDEEYPVDIDVLIKFISGGKTNLAKLFRNPAYDELDIQTVEVGKADFADTIDLLASSMEDTDVPLLSAVKAMYDWSLLIDVLKGQKTISDAKVCEYEQHKSDLKALKHIVRKYLDKAQYDEIFRTAGEKPNYVSYSYNVTDVKLKRLPDKFKKTKSEEFCKYIKSKLEKIKPEPDDEAVYNELIEKCNSKTLCPKQVTDENRVIPYQLYYHELSMILDKASAYLDFLNETEDGISVKQKILTLMKFRIPYFVGPSVKRNETDNVWIVRKAEGRIYPWNFENMVDYDKSEDGFIRRMTCKCTYLAGEDVLPKYSLLYSRYTVLNEINNIKVKDVKISPELKQDIFNELFMKTSRVTVKKITELLKRKGAFSEENGDSLSGVDINIKSSLKSYLDFRRLLENGSLSESDVERIIERITVTTDKPRLISWLKTEYPALPAEDIRYISRLSYKDYGRLSAKMLTGCYELDMDTGEIGGRSIIDLMWAENINLMQIMSDSYGYKSFIEEENKKYYAINPTGSIAQTLREMYVSPSASRAIIRTMDIVKELRKIIKRDPDKIFVEMARGGKPEDKGKRTSSRREQIEKLFTSAKEFVSDEEISHLRSQLGSLSDEQLRSEKYYLYFTQFGKCVYSGEAIDFSRLGDNHCYDIDHIYPQSKVKDDSLHNKVLVKSQLNGEKSDDYPIKEQIRNKMHPIWKNLFYRDPKNPTDKIKYERLTRSTPFTEDELAGFIERQLVETRQSTKAVATLLKEMFPDSKIVYVKAGQVSEFRHDFDMLKCREINDLHHAKDAYLNVVVGNVHDVKFTSNPLNFVKNADKHYTIKIKETLKHKVARNGETAWNPETDFDTVKRMMSKNSVRYVRYCYKRKGELFKQQPKKAGNPDLAWLKKNLDPVKYGGYNSKSISCFSLIKCTGVGAVIIPVELLCEKRYFSDDSFASEYAYSVLKNALPAKNIAKISIDDISFPLKRRPIKINTLFEFDGYRVNIRSKDSYHYFTISSAMAAIYSKDTSDYIKAVSSYIDKSDKGSKFKPGEAFDVLSNLKVYDEIAKKCISEPFCKISKLAEAGKKMEEGRDKFAELSIIEQMKTLLLLVDILKTGRINTCNLKPVGGVESYHTERMSAILKNTKYSDIRIIDQSPTGLYEKKSDNLLEL

SEQ ID NO: 21104 - protein, 1346 aa, unidentified
  REGION 1..1346: note = Cas Enzyme sequence
MWGVSLFEAASLAEDRRDHRTQRRRYDRRQQRVALLGELFAKEILKTDPDFFLRLKESSLYPEDRTSKNVNTYFDDADFKDSDYFKMYPTVHHLIKELSESNKPHDVRLVYLACAFIVAHRGHFLNGADENNVQAVLDFDSSYCEFTDWFKSNDIEDNPFSESVKNEFSVIIRKKIGITAKEREIKNLLFGTTKTPDCYKDEEYPIDIDVLIKFISGGKTNLAKLFRNPSYDELDIQTVEVGKADFADTIDLLASSMEDTDVPLLSAVKAMYDWSLLIDVLKGQKTISDAKVCEYEQHKSDLKALKYIVRKYLDRALYDEIFRTAGEKPNYVSYSYNVTDVKLKQLPSNFKKKNSEEFCKYIKSKLEKIKPESDDEAVYNELIEKCNSKTLCPKQVTDENRVIPYQLYYHELSMILDKASAYLDFLNKTEDGISVKQKILTLMKFRIPYFVGPLVKRNETDNVWIVRKAEGRIYPWNFENMVDFDKSEDGFIRRMTCKCTYLAGEDVLPKYSLLYSKYTVLNEINNIKVNGEKISPELKQDIFNELFMKTSRVTVKKITELLKRKGAFSEEKGDSLSGVDINIKSSLKSYLDFRRLLENGFLSENDVERIIERITVTTDKPRLVSWLKAEYSDLPAEDIRYISRLSYKDYGRLSAKLLTGCYELDTNTSEIGGRSIIDFMWAENINLMQILSDSYGYKSFIEEENKKYYTINPTGSIAQTLREMYVSPSVSRAIIRTMEIVKELRKITKKDPDKIFVEMARGGKPEEKGKRTSLRREQIEKLYDSAKAFVSDEDISHLRSQLGSLSDEQLRSEKYYLYFIQFGKCMYSGEAIDFSRLGDNHCYDIDHIFPQSKINDDSLHNKVLVKSQLNGEKSDDYPIKAEIRNKMHLLWKNLFYRDPKNPTDKVKYERLTRSTPFTEDELAGFIERQLVETRQSTKAVATLLKEMFPDSKIVYVKAGQVSEFRHDFDMLKCREINDLHHAKDAYLNIVIGNVHDVKFTSNPMNFVKNADKHYTIKVKETLKHKVSRNGETAWNPETDFDTVKRMMSKNSVRYVRYCYKRKGELFDQQPKKAGNPDLAYRKKNLDPVKYGGYNSKSISCFSLIKCTGVGAVIIPVELLCEKRYFSDDSFASEYAYSVLKNALPAKNIAKISIDDISFPLKRRPIKISTLFEFDGYRVNIRSKDSYHYFTISSAMAAIYSKDTSDYIKAVSSYIDKSDKGSKFKPGEAFDVLSNLKVYDEIAKKCISEPFSKISKLAEAGKKMEEGRDKFAELSIIEQMKTLLLLVDVLKTGRINTCNLKPVGGVESYHTERMSAILKNTKYSDIRIIDQSPTGLYEKKSDNLLEL

SEQ ID NO: 21105 - protein, 1384 aa, unidentified
  REGION 1..1384: note = Cas Enzyme sequence
MSFKENSKIYYGLDIGTDSVGWSTTNEKYELLRYKNNLMWGVSLFEAASLAEDRRGHRTQRRRYDRRQQRVALLGELFAKEILKTDPDFFLRLKESSLYPEDRTSKNVNTYFDDADFKDSDYFKMYPTVHHLIKELSESNKPHDVRLVYLACAFIVAHRGHFLNGADENNVQAVLDFDSSYCEFTDWFKSNDIEDNPFSESVKNEFSVILRKKIGITAKEREIKNLLFGNTKTPDCYKDEEYPIDIDVLIKFISGGKTNLAKLFRNPSYDELDIQTVEVGKADFADTIDLLASSMEDTDVPLLSAVKAMYDWSLLIDVLKGQKTISDAKVCEYEQHKSDLKALKYIVRKYLDRAQYDEIFRTAGEKPNYVSYSYNVTDVKLKQLPSNFKKKNSEEFCKYIKSKLEKIKPESDDEAVYNELIEKCNSKTLCPKQVTDENRVIPYQLYYHELSMILDKASAYLDFLNETEDGISVKQKILTLMKFRIPYFVGPLVKRNETDNVWIVRKAEGRIYPWNFENMVDFDKSEDGFIRRMTCKCTYLAGEDVLPKYSLLYSKYTVLNEINNIKVNGEKISPELKQDIFNELFMKTSRVTVKKITELLKRKGAFSEEKGDSLSGVDINIKSSLKSYLDFRRLLENGSLSENDVERIIERITVTTDKPRLVSWLKAEYSDLPAEDIRYISRLSYKDYGRLSAKLLTGCYELDTNTGEIGGRSIIDFMWAENINLMQILSDSYGYKSFIEEENKKYYMINPTGSIAQTLREMYVSPSVSRAIIRTMEIVKELRKITKKDPDKIFVEMARGGKPEEKGKRTSSRREQIEKLYDSAKAFVSDEDISHLRSQLGSLSDEQLRSEKYYLYFIQFGKCMYSGEAIDFSRLGDNHCYDIDHIFPQSKINDDSLHNKVLVKSQLNGEKSDDYPIKAEIRNKMHPLWKNLFYRDPKNPTDKVKYERLTRSTPFTEDELAGFIERQLVETRQSTKAVATLLKEMFPDSKVVYVKAGQVSEFRHDFDMLKCREINDLHHAKDAYLNIVIGNVHDVKFTSNPMNFVKNADKHYTIKVKETLKHKVSRNGETAWNPETDFDTVKRMMSKNSVRYVRYCYKRKGGFFNQNPDRAGNPDLARLKKDLDPVKYGGYNSKSISCFSLIKCTGVGAVIIPVELLCEKRYFSDDSFASEYAYSVLKNALPAKNIAKISIDDISFPLKRRPIKINTLFEFDGYRVNIRSKDSYHYFTISSAMAAIYSKDTSDYIKAVSSYIDKSDKGSKFKPGEAFDVLSNLKVYDEIAKKCISEPFSKINKLAEAGKKMEEGRDKFAELSIIEQMKTLLLLVDVLKTGRINTCNLKPVGGVESYHTERMSAILKNTKYSDIRIIDQSPTGLYEKKSDNLLEL

SEQ ID NO: 21106 - protein, 1384 aa, unidentified
  REGION 1..1384: note = Cas Enzyme sequence
MSFKENSKFYFGLDIGTDSVGWAVTDNLYKLYKYKNNLMWGVSLFEAASPAEERRGHRTARRRLDRRQQRVALLRELFAKEILKTDPDFFLRLKESSLYPEDRTNKNVNTYFDDADFKDSDYFKMYPTVHHLIKELSESNKPHDVRLVYLACAFIVAHRGHFLNGADENNVQEVLDFNSSYCEFTDWFKSNDIEDNPFSESTENEFSVILRKKIGITAKEKEIKNLLFGTTKTPDCYKDEEYPIDIDVLIKFISGGKTNLAKLFRNPAYDELDIQTVEVGKADFADTIDLLASSMEDTDVPLLSAVKAMYDWSLLIDVLKGQKTISDAKVCEYEQHKSDLKALKHIVRKYLDKAQYDEIFRTAGEKPNYVSYSYNVTDVKLKRLPDKFKKTKSEEFCKYIKSKLEKIKPEPDDEAVYNELIEKCNSKTLCPKQVTDENRVIPYQLYYHELSMILDKASAYLDFLNETEDGISVKQKILTLMKFRIPYFVGPSVKRNETDNVWIVRKAEGRIYPWNFENMVDYDKSEDGFIRRMTCKCTYLAGEDVLPKYSLLYSRYTVLNEINNIKVKDVKISPELKQDIFNELFMKTSRVTVKKITELLKRKGAFSEENGDSLSGVDINIKSSLKSYLDFRRLLENGSLSESDVERIIERITVTTDKPRLISWLKAEYPALPAEDIRYISRLSYKDYGRLSAKMLTGCYELNMDTGEIGGRSIIDLMWAENINLMQIMSDSYGYKSFIEEENKKYYAINPTGSIAQTLREMYVSPSASRAIIRTMDIVKELRKIIKRDPDKIFVEMARGGKPEDKGKRTSSRREQIEKLFASAKEFVSDEEISHLRSQLGSLSDEQLRSEKYYLYFTQFGKCVYSGEAIDFSRLGDNHCYDIDHIYPQSKIKDDSLHNKVLVKSELNGEKSDDLIKPSIRREMHSLWKNLFYRDPKNPTDKIKYERLNRSTPFTEDELAGFIERQLVETRQSTKAVATLLKEMFPDSKIVYVKAGQVSEFRHDFDMLKCREINDLHHAKDAYLNVVVGNVHDVKFTSNPLNFVKNADKHYTIKIKETLKHKVARNGETAWNPETDFDTVKRMMSKNSVRYVHYCYKRKGELFKQQPKKAGNPDLAWLKKNLDPVKYGGYNSKSISCFSLIKCTGVGVVIIPVELLCEKRYFSDDSFASEYAYSVLKNALPAKNIAKISIDDISFPLKRRPIKINTLFEFDGYRVNIRSKDSYHYFTISSAMAAIYSKDTSDYIKAVSSYIDKSDKGSKFKPGEAFDVLSNLKVYDEIAKKCISEPFCKISKLAEAGKKMEEGRDKFAELSIIEQMKALLLLVDILKTGRINTCNLKPVGGVESYHTERMSAILKNTKYSDIRIIDQSPTGLYEKKSDDNLLEL

SEQ ID NO: 21107 - protein, 1378 aa, unidentified
  REGION 1..1378: note = Cas Enzyme sequence
VVDEKIFWGFDIGTDSVGWAVSNSEYKLKKYKNNLMWGVHLFDEAKQSAERRLFRTARRRLDRRKQRIILLKEFFVRAVCEKDENFFRRLKESALLPEDAEHRTNNIFFDDTDYTDKDYFEEYPTIHHLICELMESKEPHDVRLVYLACVYLLAHRGHFLLPVSEDDISKVTEFEPLYESFYKALEEKLDEEPPFDRSADDFAEILKSHKTVSAKNKDFDKLLFGGKVKTYDNENISYSALIKLLSGGTEKLSKFFENEEYTDLEKDSVCVRNADFGDTLEMLEGQIDELDFALLKSVKSLYDWSLLVDILEGKSLISEAKKDKYDEHGYDLDALKYLFREYLTKDDYNEMFKEVSGKQNYASYVYNAPSDKTRDCKYKKCSQEDFCKFTKKFLSKIKPNEKDKPCLDKLLEKCEQNSLCPKQVTTDNRVIPYQLYYVELKKILENACGYLPFLNERDEYGTVADKILSIMKFRVPYYVGPLVDSKKSPNAWLVRKLDGKITPWNFTDMVNEDDSEKAFIRRMTCKCTYVVGQDVLPKYSLLYSKFSVLNEINNIKLNGEPISVQAKQEIYTELFERNKSRVSKKKIRDCLISHGYATDSDEVTGIDDIAKSVLRSYHDFKKMLSNGILTEQQVEEIIEHITVTTDNIRLKKWLKTQFPMLADEDVKYITKLKYKDYGRLSRCFLEDVLPVDTKTGEAESEKNIIMMLWETNENIMQLLSSKYRYSENIEHMNRQYYALPENHKSMSERLKDMYVPTAVRRAVTRTFDIVKELKKIQGRDPDKIFIEMARGTGETPKGKRTNSRKDQILEHWHGLDNKDINDLKKSGIWEHLDTIDDAKLRSDKYFLYFMQLGRCMYTEKTIPFEEVENEHKWNIDHIWPQAKIKDDSLDNKVLVSSNENGKKSDSYPISDDIRHSMAGLWHSLYKKGLISEKKYQRLTRSTPFTDDELSGFIARQLVETRQSTKAVATLLKEQFPNTEIVYVKAGLVSDFRQEMGMLKCREVNDLHHAKDAYLNIVLGNVYNTRFTKDPLNFVKNNEKYSIKIFQKNSDGKKTGVMTRKVERGGEVAWDPETSFAIVRKMMSKNSIRYVRYAYMRKGGLFNQMPERKKAGLVERKSGLDTGKYGGYNNTTASHFAVVKCREKSVVVVPVETMFCNRFATDIEFAKAYVAQQLAEILSQEFSSENITFPFGQRIIKVNTMFEVDGFRCNLAQKSNKGKQLVLISACSLVLDKDTYAYMKKISSFIAKKKVNKSLVINSYTGITVEDNISAFDVLVEKMQSSPFKVFFHKIGTKVANGRDKFISLSVDEQTTALFYILMLLKTGRSTGCDLTLINESGQAGVLTLNSDFSKIKDKKTIYIIDQSPTGLIERKSLNLLDL

SEQ ID NO: 21108 - protein, 943 aa, unidentified
  REGION 1..943: note = Cas Enzyme sequence
  REGION 2..7: note = misc_feature - Xaa can be any naturally occurring amino acid
MXXXXXXILENACGYLPFLNERDEYGTVADKILSIMKFRVPYYVGPLVDSKKSPNAWLVRKLDGKITPWNFTDMVNEDDSEKAFIRRMTCKCTYVVGQDVLPKYSLLYSKFSVLNEINNIKLNGEPISVQAKQEIYTELFERNKSRVSKKKIRDCLISHGYATDSDEVTGIDDIAKSVLRSYHDFKKMLSNGILTEQQVEEIIEHITVTTDNIRLKKWLKTQFPMLADEDVKYITKLKYKDYGRLSRCFLEDVLPVDTKTGEAESDKNIIMMLWETNENIMQLLSSKYRYSENIEHMNRQYYALPENHKSMSERLKDMYVPTVVRRAVTRTFDIVKELKKIQGRDPDKIFIEMARGTGETPKGKRTNSRKDQILEHWHGLDNKDINDLKKSGIWEHLDTIDDAKLRSDKYFLYFMQLGRCMYTEKTIPFEEVENEHKWNIDHIWPQAKIKDDSLDNKVLVSSNENGKKSDSYPISDDIRHSMAGLWHSLYKKGLISEKKYQRLTRSTPFTDDELSGFIARQLVETRQSTKAVATLLKEQFPNTEIVYVKAGLVSDFRQEMGMLKCREVNDLHHAKDAYLNIVLGNVYNTRFTKDPLNFVKNNEKYSIKIFQKNSDGKKTGVMTRKVERGGEVAWDPETSFAIVRKMMSKNSIRYVRYAYMRKGGLFNQMPERKKAGLVERKSGLDTGKYGGYNNTTASHFAVVKCREKSVVVVPVETMFCNRFATDIEFAKAYVAQQLAEILSQEFSSENITFPFGQRIIKVNTMFEVDGFRCNLAQKSNKGKQLVLISACSLVLDKDTYAYMKKISSFIAKKKVNKSLVINSYTGITVEDNISAFDVLVEKMQSSPFKVFFHKIGTKVANGRDKFISLSVDEQTTALFYILMLLKTGRSTGCDLTLINESGQAGVLTLNSDFSKIKDKKTIYIIDQSPTGLIERKSLNLLDL

SEQ ID NO: 21109 - protein, 1386 aa, unidentified
  REGION 1..1386: note = Cas Enzyme sequence
VANEKIYLGLNIEPENISWAVANNDYQLCKYDKRLMWGVYNFDEAQLSEKRRTARSSRRRYKRRAGRVSLCQELFAKALYKKDKNFLLRISEGALTAEDAKHRKHYVLFEDANYTDKDYYTQYPTVHHLICELIKNKAPHDVRLVYLACSYLLAYRGHFFYSISEDNVGGITDFSPLYNNFYSSLTNLCGNVPFEKNKSEFEKIIRSKNSLTFKKKAFNELMFAGKAKNYDNDIISYSILNNFISGGKIKISKLFANEDYEDLETNEISTSVPDLSEMLEGKIDELQLAVINSVKAIYDWAMLIEILNGCSLISEAMVNKYNEHCNDLKKLKHIFIKYLPHEDYRTVFAEIGEKSNYESYVYNTPKDEERPKNYKKCTQEEFCKFTAKYLNQIKKVDEADQAILDELITKCVGSKLCPKLNTTDNRVVPYQLYYHELKLILENAKNYLAFLNEKDEYGTVADKILAIMKFKIPYFVGPLVPSEKSPNAWLERKAEGNIRPWNFKDLVDEDACEEKFIERMTGQCKYVAGQKVLAKHSILNCKYSVLNELNHIVLSNCKLSVEAKQAIYTELCLTSRNRVTKKKILSFLIKNGYAKLGTDIAGIDDIMRSSMQSYLDFEKNHYISDGVLSIEQADEIISRITISTDIRRLRKWISTEYPHLSAADVKYLSGLKYQDYGDVSKSFLEGIYPVNTETGEIESDKNIITMLWETNETIEQLLGTKYRYTESIEYANKELYGLSNGQATLQKSLADAYVPVAMQKATSKAIDIVKDLKRLQGKAPDKIFIRTAKDFADKPKGKNRKSKKEQILAAWGSLKDRDIEALDPGEMASLKKQLNDIDEGKLNLDKYYLYFMQLGRCMYSGAHIPFDELENSFTWNIDHIWPQAKVKDNSLDNKVLVDLTINTDKGKTYPIAKDIREAMADFWGQLYHEGLISDKKYQRLIRQSGFSKEELAGFILAQITETRQSTKAIVNLFREYFPDSTVIYLKNDFATDFRREMELPKHEIINNFDLAKDAYLNLVLGNVYTTRFTSNPLNFVENNRNYSLKMYQKRSDGSEVGMMMGKISEGNSVVWDPETSFNVVKRNYAINSVKCVRDAFRRKSGNNGGLFDNNPLRKGNGQTPKRKDLPVSKYGGYNCATISFYSLAVVKDVGPVLFAVELLFAKEFLKSVDFAKKYAAKKISAQIKSKIGADDVRFPFGQTPNIIKANALLELDGYRITLGGKTLDNIIVYSAESLFVASEALSYADKIGKVVNRRRFNKDYKISENIGLSAGGNSELYDYMAQKCTSKPFSVLYNKAGHFFEKSKEIFEQLSIEEQVTVLAEMIKLLTYGRKGTIDLKLLGGSANACIKSIPMNLYKMKGYSSLRLINQSPTGLIEYRSCNLLKLTY

SEQ ID NO: 21110 - protein, 1372 aa, unidentified
  REGION 1..1372: note = Cas Enzyme sequence
MNNEYFVGFDIGTNSVGAAVTDEKYHVLKFKGNAMWTSAVFESAQQSADRRLNRTARRRLDRSQQRRDLLQELIAPAITPVDPRFFDRIRESALWAEDKTTGSRFTYFSDEGYTDKQYHKEYPTIHHLICSLMNDPAPHDPRLVYIACSYMLTHRGHFLNEADKEKIDDVLDIRRVFNELCSWFTSYGIEVPFSCSPEEFGNVLTANRGVQDRTRAFYDLLFAGKKPKPSEDDQVDIDVLIKLISGGKIELSKLFLNEEYSELENNKIQLSDAGFDEKEPELRSELGDDFGLLAAAKNIYDWSLLTGVLGECRSISEAKVKTYEKHSDDLAALRRVVRKYHPDKYKEIFKKYVVGNYTSYSGNVKSAGKISEAKLKRCNQAEFCDYLKSKLKDVKPAPGDDECERILKEISEHTFCPRQVTTDNRVIPYQLYYTELKKVLENAKRYIPQLNVTDEYGSAADKILSLMTFRIPYYVGPLVKKNDSSNAWIVRRGEGRILPWNFDELVDKDKCEDEFIRRMTCKCTYIAGKNVLPKNSLLYCKFMVLNEINNIKINGERISVGDKQKIYTELFEKKRKVTVRDIRNLLTSEGRLKAGDTFGGIDITVKSSLKPQHDLKRLMAAGVITEADAEEIIERITCTTDVSRLRTWLGKFGLSAADAKYVSGLKYSDFGRLSREFLTEVNDVDPATGEVINPNIITMMWENNINLMELLSQKYSYRSQIESMNLEYYAANPLTLDERMSEMYIPSAVRRPVKRTIEMMKEYTHIMRKPPKRIFIEMARELTDLDNKGKRTSSRRNTLLEFFKKCPQDTTELRAQLEKKSDDELRSEKLYLYFAQLGKCMYSGESIDIERLGSKLYDVDHIFPQARVKDDSIENKVLVLSDLNGAKSDRYPINADIRNKMHSFWDKLHSIGLIGEKKYERLTRSTGFTDDELAGFISRQLVETRQSTKAVAALLAEEFPESEIVYVKAGLASQFRHEFGLLKCREINDLHHAKDAYLNIVMGNIYHVKFTKDPMNFVKEYRRKEQVFDLKIQSMLTHDAIRNGETAWIGDGTWLETVKKQMEKNNIRYVRYSFRRKGALFNLMPERKNPLLLPRKNGKNMVLPAEKYGGYNNTAASFFSLVKYHSAKGSGVVIIPVELIHAHRYEHDSSFAEEYALRVLADIVSLKKGDVLQSVEFPLGSRILKVNTLLDIDGFRANITGKDSGGKYFGISPAISLLVCNKDTVYIKRLLSVHERIVSCEKNKTVYHIKPEFDVITKERNLEIYNMLCNKINASPFCVILSNIGSTFNNGRTKFMTHELNDQVKALVNMIAVLKDGRAGVCDLELIGGSKNSARLRINAVLTNLKGYSSIRIIDQSPTGLYEKVSPNLLTL

SEQ ID NO: 21111 - protein, 906 aa, unidentified
  REGION 1..906: note = Cas Enzyme sequence
MTFRIPYYVGPLVKKNDSSNAWIVRRGEGRILPWNFDELVDKDKCEDEFIRRMTCKCTYIAGKNVLPKNSLLYCKFMVLNEINNIIINGERISVGDKQKIYTELFEKKRKVTVRDIRNLLTSEGRLKAGDTFGGIDITVKSSLKPQHDLKRLMAAGVITEADAEEIIERITCTTDVSRLRTWLGKFGLSAADAKYVSGLKYSDFGRLSREFLTEVNDVDPATGEVINPNIITMMWENNINLMELLSQKYSYRSQIESMNREYYAANPLTLDERMSEMYIPSAVRRPVKRTIEMMKEYTHIMCKPPKRIFIEMARELTDLDNKGKRTSSRRNTLLEFFKKCPQDTTELRAQLEKKSDDELRSEKLYLYFAQLGKCMYSGESIDIERLGSKLYDVDHIFPQARVKDDSIENKVLVLSDLNGAKSDRYPINADIRNKMHSFWDKLHSIGLIGEKKYERLTRSTGFTDDELAGFISRQLVETRQSTKAVAALLAEEFPESEIVYVKAGLASQFRHEFGLLKCREINDLHHAKDAYLNIVMGNIYHVKFTKDPMNFVKEYRRKEQVFDLKIQSMLTHDAIRNGETAWIGDGTWLETVKKQMEKNNIRYVRYSFRRKGALFNLMPERKNPSLLPRKNGKNMVLPAEKYGGYNNTAASFFSLVKYHSAKGSGVVIIPVELIHAHRYEHDSSFAAEYALRVLADIVSLKKGDVLQSVEFPLGSRILKVNTLLDIDGSRITISSKNSGGKRICVSLADSLIVSLQETVYIKKIHSISERITACEKDKIVYKIDFIHDKLSVKENISMYNMLCQKANSSPFNVLMPSVGELFSNGYEKFINSDINAQVKALTNMISVFKTGRSGGCDLTLIGGANNAVILRINSVLTNLKGIKSIRIIDQSPTGLYEKVSPNLLTL

SEQ ID NO: 21112 - protein, 1324 aa, unidentified
  REGION 1..1324: note = Cas Enzyme sequence
MGKEYYLGLDIGTDSVGWAVCDTNYKIPKFKGNAMWGIRLFEKSNSAEERRGFRSSRRRTQRKRERLKLLEMLFDEEISKIDPAFFIKLRESNLYLEDKSTKIPYCVFSDENYTDKDFHRDYPTIYHLRNELIKSNKPHDVRLVYLALHHIIKNRGHFLFDYSYKNDKSGDFMPIYNDLKNYFYDNYEIELDCSDVDEFANTLKDKSKGKTKKNAEIAELFGVSKKYDKVLYSALSLLSGSSVKLFDIFDDEALKDVEKKSVSFSSGFDDNANDFQSYLGERFELLEKLKAVYDWAVLADILDGKEYISEAKVAIYEKHKRDLKTLKKYIKIYMPEKKAEIFNISSKDNNYVAYSKHIKTSNGTGVLISTCTQEEFCAYLKKTLGICKDASYEEMFKEIENSTFMPKQVTKDNGVVPMQVNEKELVAILDNAKEYLPFLLNKDNDGKTVYDKIKALFEYRIPYYIGPLNTHSTKSWLVRSNEKIYPWNIEDVVDFDKSAEKFIENLTSKCTYLPQYDVIPKNSLLYNKFCVLNELNNLKIDGEKISVQLKQDIYNDLFKKYYKVTNKKLCDYLKSRNIAFDEISGIDNDFKSSLKSYKDLVAYNLTDEQKEEIVKAITIFGDDKKLLKKRLKNEFGGCLSDDEIKKICKLKYTGWSKLSREFLTDVTAVYKETGELINIICALWETNYNLTSLLYSDEFCCDDKENKTFNDKINELNSFGNDKTLNQIVEELYVSPLVKRPIYQSLLITKELEKIMKCPPKKIFVEVARGAEEKKRTVSRRNKLLDLYKSCKNDYPLLFDELQNNTTDDELKSDKLYLYFTQFGKCMYTGENIELGDLFNKNLYDIDHIYPQSKIKDDSLDNRVLVKKTTNAKKDNEYPLSSQIREKMTPHWKALLDKGLINKKKYERLVRNYPLSDEELSQFISRQLVETRQSTKAVANILEQLYPRPDTEIVYVKAALASEFRHQYDMLKCREVNDLHHAKDAYLNIVVGNAYNGKFTHNKANFIKGLQNNDKAYTVKLDSMLKHNIDGAWIADNNESLNIVKSTMNKNNIRYTRYAFEKKGGLFKVTILKKGNGQASIKKNDKRNSIEKYGGYNQVSSTYFSCVEHGKDNNRMISMFSVNLYDKNKYEENPIAYLIENYGLINPIIKVKKVKIQSCISFDNMLCHLGGKDSGGSQISYRPGVQLVLGYDNERYIRNVIRCAGGDLHLQTSKNEKDIVTAEKNIELFNLLIEKMKNNIYGVLYSNLGDKLYCSKEKFEKLDIVEQCNVIKNVLTILKNNASKGDLKSIGIKANGAIRLNNNISEIKKVKSIKLINQSVYRTF

SEQ ID NO: 21113 - protein, 1333 aa, unidentified
  REGION 1..1333: note = Cas Enzyme sequence
MGKEYYLGLDIGTDSVGWAVCDTNYKIPKFKGNAMWGIRLFEKSNSAEERRGFRSSRRRTQRKRERLKLLEMLFDKEISKLDPAFFIKLRESNLYLEDKSTKIPYCVFSDENYTDKDFHRDYPTIYHLRNELIKNNKPHDVRLVYLALHHIIKNRGHFLFDYSYKNDKSGDFMPIYNDLKNYFYDNYEIELDCSDVDEFANTLKDKSKGKTKKNAEIAELFGVSKKDDKVLYSALSLLSGSSVKLFDIFDDEALKDVEKKSVSFSSGFDDNANDFQSYLGERFELLEKLKAVYDWAVLADILDGKEYISEAKVAIYEKHKRDLKTLKKYIKIYMPEKKAEIFNISSKDNNYVAYSKHIKTSNGTGVLISTCTQEEFCAYLKKTLGICKDASYEEMFKEIENSTFMPKQVTKDNGVVPMQVNEKELVAILDNAKEYLPFLLNKDNDGKTVYDKIKALFEYRIPYYIGPLNTHSTKSWLVRSNEKIYPWNIEDVVDFDESAEKFIENLTSKCTYLPQYDVIPKHSLLYNKFCVLNELNNLKIDGEKISVQLKQDIYNDLFKKYYKITNKKLCDYLKSRNIAFDEISGIDNDFKSSLKSYKDLVAYNLTDEQKEEIVKAITIFGDDKKLLKKRIKNEFGDCLSDDEIKKICKLKYTGWSKLSREFLTDVTAVYKETGELINIICALWETNYNLTSLLYSNEFCCDDKENKTFNDKINELNSFGNDKTLNQIVEELYVSPLVKRPIYQSLLITKELEKIMKCPPKKIFVEVARGAEEKKRTVSRRNKLLDLYKSCKNDYPLLFDELQNNTTDDELKSDKLYLYYTQFGKCMYTGENIDLDDLFNKNLYDIDHIYPQSKIKDDSLDNRVLVKKTTNAKKDNEYPLSSQIREKMTPHWKALLDKGLINKKKYERLVRNYPLSDEELSQFISRQLVETRQSTKAVANILEQLYPRPDTEIVYVKAALASEFRHQYDMLKCREVNDLHHAKDAYLNIVVGNAYNVKFTHNKANFIKGLQNNDKAYTVKLDSMLKHNIDGAWIADNNESLNIVKSTMNKNNIRYTRYAFEKKGGLFKVTILKKGNGQASIKKNDKRNSIEKYGGYNQVSSTYFSCVEHGKDNKRMISMFSVNLYDKNKYEENPIAYLIENYGLINPIIKVKKVKIQSCISFDNMLCHLGGKDSGGSQISYRPGVQLVLGYDNERYIRNVIRCAGGDLHLQTSKNEKDIVTAEKNIELFNLLIEKMKNNIYGVLYSNLGDKLYCSKEKFEKLDIVEQCNVIKNVLTILKNNASKGDLKSIGIKANGAIRLNNNISEIKKVKSIKLINQSVTGLFEKEFELLNL

SEQ ID NO: 21114 - protein, 1333 aa, unidentified
  REGION 1..1333: note = Cas Enzyme sequence
MGKEYYLGLDIGTDSVGWAVCDTNYKIPKFKGNAMWGIRLFEKSNSAEERRGFRSSRRRTQRKRERLKLLEMLFDEEISKIDPAFFIKLRESNLYLEDKSKKIPYCVFSDENYTDKDFHRDYPTIYHLRNELIKNNKPHDVRLVYLALHHIIKNRGHFLFDYSYKNDKSGDFMPIYNDLKNYFYDNYEIELDCSDVDEFANTLKDKSKGKTKKNAEIAELFGVSKKDDKVLYSALSLLSGSSVKLFDIFDDEALKDVEKKSVSFSSGFDDNANDFQSYLGERFELLEKLKAVYDWAVLADILDGKEYISEAKVAIYEKHKRDLRTLKKYIKIYMPEKKAEIFNISSKDNNYVAYSKHIKTSSGTGVLNSTCTQEEFCAYLKKTLGICKDASYEEMFKEIENSTFMPKQATKDNGVVPMQVNEKELVAILDNAKEYLPFLLNKDNDGKTVYDKIKALFEYRIPYYIGPLNTHSSKSWLVRSNEKIYPWNIEDIVDFDKSAEKFIEKLTSKCTYLPQYDVIPKHSLLYNKFCVLNELNNLKINGEKISVQLKQDIYNDLFKKYYKVTNKKLCDYLKSRNIAFDEISGIDNDFKSSLKSYKDLVAYNLTDEQKEKIVKAITIFGDDKKLLKKRLKNEFGGCLSDDEIKKICKLKYTGWSKLSREFLTDVTAVYKETGELINIICALWETNYNLTSLLYSDEFCCDDKENKTFNDKINELNSFGSDKTLNQIVEELYVSPLVKRPIYQSLLITKELEKIMKCPPKKIFVEVARGAEEKKRTVSRRNKLLDLYKSCKNDYPLLFDELQNNTTDDELKSDKLYLYFTQFGKCMYTGENIDLGDLFNKNLYDIDHIYPQSKIKDDSLDNRVLVKKTTNAKKDNEYPLSSQIREKMTPHWKALLDKGLINKKKYERLVRNYPLSDEELSQFISRQLVETRQSTKAVANILEQLYPRPDTEIVYVKAALASEFRHQYDMLKCREVNDLHHAKDAYLNVVVGNAYNVKFTHNKANFIKGLQNNDKAYTVKLDSMLKHNIDGAWIADNNESLNIVKSTMNKNNIRYTRYAFEKKGGLFKVTILKKGNGQASIKKNDKRSSIEKYGGYNQISSTYFSCVEHGKDNKRMISMFSVNLYDKNKYEENPIAYLIENYGLINPIIKVKKVKIQSCISFDNMLCHLGGKDSGGSQISYRPGVQLVLGYDNERYIRNVIRCAGGDLHLQTSKNEEDIVTAEKNIELFNLLIEKMKNNIYGVLYSNLGDKLYCSKEKFEILDIVEQCNVIKNVLTILKNNASKGDLKSIGIKANGAIRLNNNISEIKNVKSIKLINQSVTGLFEKEFELLNL

SEQ ID NO: 21115 - protein, 1332 aa, unidentified
  REGION 1..1332: note = Cas Enzyme sequence
MGTEYYLGLDIGTDSVGWAVCDTDYKIPKFKGNAMWGIRLFEKSNSAEERRGFRSSRRRTQRKRERLKLLEMLFDEEISKLDPAFFIKLRESNLYLEDKSTKIPYCVFSDENYTDKDFHRDYPTIYHLRNELIKNNKPHDVRLVYLALHHIIKNRGHFLFDYSYKNDKSGDFMPIYNDLKNYFYDNYEIELDCSDVDEFANTLKDKSKGKTKKNAEIAELFGVSKKDDKVLYSALSLLSGSSVKLFDIFDDEALKDVEKKSVSFSSGFDDNANDFQSYLGERFELLEKLKAVYDWAVLADILDGKEYISEAKVAIYEKHKRDLRTLKKYIKIYMPEKKAEIFNISSKDNNYVAYSKHIKTSNGTGALISTCTQEEFCAYLKKTLGICKDASYEEMFKEIENSTFMPKQVTKDNGVVPMQVNEKELVAILDNAKEYLPFLLNKDNDGKTVYDKIKALFEYRIPYYIGPLNTHSTKSWLVRSNEKIYPWNIEDVVDFDKSAEKFIEKLTSKCTYLPQYDVIPKHSLLYNKFCVLNELNNLKIDGEKISVQLKQDIYNDLFKKYYKVTNKKLCYYLESRNIAFDEISGIDNDFKSSLKSYKDLVAYNLTDEQKEEIVKAITIFGDDKKLLKKRLKNEFGDCLSDDEIKKICKLKYTGWSKLSREFLTDVNAVYKETGEPINIICALWETNYNLTSLLYSDKFCCDDKENKTFNDKINELNSFGSDKTLNQIVEELYVSPLVKRPIYQSLLITKELEKIMKCPPKKIFIEVARGAEEKKRTVSRRNKLLDLYKSCKNDYPLLFDELQNNTTDDELKSDKLYLYFTQFGKCMYTGENIDLGDLFNKNLYDIDHIYPQSKIKDDSLDNRVLVKKTTNDKKDNEYPLSSQIREKMTPHWKALLDKGLIDKKKYERLVRNYPLSDEELSQFISRQLVETRQSTKAVANILEQLYPHPDTEIVYVKAALASEFRHQYDMLKCREVNDLHHAKDAYLNIVVGNAYNVKFTHNKANFIKGLQNNDKAYTVKLDSMLKHNIDGAWIADNNESLNIVKSTMNKNNIRYTRYAFKQKGGLFDQNILKKGKGQVPIKANDKRNSIEKYGGYNRPSSSYFSLVKYFDKKGKKIIQLVPIDSFEEHIYQNTPERYISEKIGCDCEILIPCIKYNSCISIDGFRMHLSSKSNGGATIVCKPSIQLVVGYENEKYIKGIVKSIETGFNADILKRYNINNDNNLILYDLLSYKIKNTIYKSKFEKVFICMSSGREKFILLDLDEQCYIINEILKILHCNVVTGDLKLLGGSGQSGTVTINSALSNIKNVKSIKLINQSVTGLFEQEIELLNL

SEQ ID NO: 21116 - protein, 1333 aa, unidentified
  REGION 1..1333: note = Cas Enzyme sequence
MGKEYYLGLDIGTDSVGWAVCDTNYKIPKFKGNAMWGIRLFEKSNSAEERRGFRSSRRRTQRKRERLKLLEMLFDEEISKIDPAFFIKLRESNLYLEDKSKKIPYCVFSDENYTDKDFHRDYPTIYHLRNELIKNNKPHDVRLVYLALHHIIKNRGHFLFDYSYKNDKSGDFMPIYNDLKNYFYDNYEIELDCSDVDEFANTLKDKSKGKTKKNAEIAELFGVSKKDDKVLYSALSLLSGSSVKLFDIFDDEALKDVEKKSVSFSSGFDDNANDFQSYLGERFELLEKLKAVYDWAVLADILDGKEYISEAKVAIYEKHKRDLRTLKKYIKIYMPEKKAEIFNISSKDNNYVAYSKHIKTSSGTGVLNSTCTQEEFCAYLKKTLGICKDASYEEMFKEIENSTFMPKQATKDNGVVPMQINEKELVAILDNAKEYLPFLLNKDNDGKTVYDKIKALFEYRIPYYIGPLNTHSSKSWLVRSNEKIYPWNIEDIVDFDKSAEKFIEKLTSKCTYLPQYDVIPKHSLLYNKFCVLNELNNLKINGEKISVQLKQDIYNDLFKKYYKVTNKKLCDYLKSRNIAFDEISGIDNDFKSSLKSYKDLVAYNLTDEQKEKIVKAITIFGDDKKLLKKRLKNEFGGCLSDDEIKKICKLKYTGWSKLSREFLTDVTAVYKETGELINIICALWETNYNLTSLLYSDEFCCDDKENKTFNDKINELNSFGSDKTLNQIVEELYVSPLVKRPIYQSLLITKELEKIMKCPPKKIFVEVARGAEEKKRTVSRRNKLLDLYKSCKNDYPLLFDELQNNTTDDELKSDKLYLYFTQFGKCMYTGENIDLGDLFNKNLYDIDHIYPQSKIKDDSLDNRVLVKKTTNAKKDNEYPLSSQIREKMTPHWKALLDKGLINKKKYERLVRNYPLSDEELSQFISRQLVETRQSTKAVANILEQLYPRPDTEIVYVKAALASEFRHQYDMLKCREVNDLHHAKDAYLNVVVGNAYNVKFTHNKANFIKGLQNNDKAYTVKLDSMLKHNIDGAWIADNNESLNIVKSTMNKNNIRYTRYAFEKKGGLFKVTILKKGNGQASIKKNDKRSSIEKYGGYNQISSTYFSCVEHGKDNKRMISMFSVNLYDKNKYEENPIAYLIENYGLINPIIKVKKVKIQSCISFDNMLCHLGGKDSGGSQISYRPGVQLVLGYDNERYIRNVIRCAGGDLHLQTSKNEEDIVTAEKNIELFNLLIEKMKNNIYGVLYSNLGDKLYCSKEKFEILDIVEQCNVIKNVLTILKNNASKGDLKSIGIKANGAIRLNNNISEIKNVKSIKLINQSVTGLFEKEFELLNL

SEQ ID NO: 21117 - protein, 1332 aa, unidentified
  REGION 1..1332: note = Cas Enzyme sequence
MGKEYYLGLDIGTDSVGWAVCDTDYKIPKFKGNAMWGIRLFEKSNSAEERRGFRSSRRRTQRKRERLKLLEMLFDEEISKIDPAFFIKLRESNLYLEDKSTKIPYCVFSDENYTDKDFHRDYPTIYHLRNELIKNNKPHDVRLVYLALHHIIKNRGHFLFDYSYKNDKSGDFMPIYNGLKNYFYDNYEIELDCSDVDEFANTLKDKSKGKTKKNAEIAELFGVSKKDDKVLYSALSLLSGSSVKLFDIFDDEALKDVEKKSVSFSSGFDDNANDFQSYLGERFELLEKLKAVYDWAVLADILDGKEYISEAKVAIYEKHKRDLRTLKKYIKIYMPEKKAEIFNISSKDNNYVAYSKHIKTSSGTGVLNSTCTQEEFCAYLKKTLGICKDASYEEMFKEIENSTFMPKQVTKDNGVVPMQVNEKELVAILDNAKEYLPFLLNKDNDGKTVYDKIKALFEYRIPYYIGPLNTHSTKHWLVRNNEKIYPWNIKEVVDFDKSAEKFIEKLTSKCTYLPQYDVIPKHSLLYNKFCVLNELNNLKIDGEKISVQLKQDIYNDLFKKYYKVTNKKLCDYLESRNIAFDEISGIDNDFKSSLKSYKDLVAYNLTDEQKEEIVKAITIFGDDKKLLKKRLKNEFGGCLSDDEIKKICKLKYTGWSKLSREFLTDVTAVYKETGELINIICALWETNYNLTSLLYSDEFCCDDKENKTFNDKINELNSFGNDKTLNQIVEELYVSPLVKRPIYQSLLITKELEKIMKCPPKKIFVEVARGAEEKKRTVSRRNKLLDLYKSCKNDYPLLFDELQNNTTDDELKSDKLYLYFTQFGKCMYTGENIDLGDLFNKNLYDIDHIYPQSKIKDDSLDNRVLVKKTTNAKKDNEYPLSSQIREKMTPHWKALLDKGLIGKKKYERLVRNYPLSDEELSQFISRQLVETRQSTKAVANILEQLYPRPDTEIVYVKAALASEFRHQYDMLKCREVNDLHHAKDAYLNIVVGNAYNVKFTHNKANFIKGLQNNDKAYTVKLDSMLKHNIDGAWIADNNESLNIVKSTMNKNNIRYTRYAFEQKGGLFDQNILKKGKGQVPIKANDKRNSIEKYGGYNRPSSSYFSLVKYFDKKGKKIIQLVPIDSFEEHIYQNTPERYVSEKIGCDCEILIPCIKYNACISIDGFRMHLSSKSNGGATIVCKPSIQLVVGYENEKYIKGIVKSIETGFNADILKRYNINSDNNLILYDLLSYKIKNTIYKSKFEKVFICMSSGREKFILLDLDEQCYIINEILKILHCNVVTGDLKLLGGSGQSGTVTINSALSNIKNVKSIKLINQSVTGLFEQEIELLNL

SEQ ID NO: 21118 - protein, 1332 aa, unidentified
  REGION 1..1332: note = Cas Enzyme sequence
MGEEYYLGLDIGTDSVGWAVCDTNYKIPKFKGNAMWGIRLFEKSNSAEERRGFRSSRRRTQRKRERLKLLEMLFDEEISKLDPAFFIKLRESNLYLEDKSTKIPYCVFSDENYTDKDFHRDYPTIYHLRNELIKNNKPHDVRLVYLALHHIIKNRGHFLFDYSYKNDKSGDFMPIYNELKNYFYDNYEIELDCSDVDEFANTLKDKSKGKTKKNAEIAELFGVSKKYDKVLYSALSLLSGSSVKLFDIFDDEALKDVEKKSVSFSSGFDDNANDFQSYLGERFELLEKLKAVYDWAVLADILDGKEYISEAKVAIYEKHKRDLRTLKKYIKIYMPEKKAEIFNISSKDNNYVAYSKHIKTSNGTGVLNSACTQEEFCAYLKKTLGICKDESYEEMFKEIENSTFMPKQVTKDNGVVPMQVNEKELVTILDNAKEYLPFLLNKDNDGKTVYDKIKALFEYRIPYYIGPLNTHSTKSWLVRSNEKIYPWNIEDVVDFDKSAEKFIENLTSKCTYLPQYDVIPKHSLLYNKFCVLNELNNLKIDGEKISVQLKQDIYNDLFKKYYKVTNKKLCDYLESRNIAFNEISGIDNDFKSSLKSYKDLTAYNLTDEQKEEIVKAITIFGDDKKLLKKRLKNEFGGCLSDDEIKKICKLKYTGWSKLSREFLTDVTAVYKETGELINIICALWETNYNLTSLLYSDEFCCDDKKNKTFNDKINELNSFGNDKTLNQIVEELYVSPLVKRPIYQSLLITKELEKIMKCPPKKIFVEVARGAEEKKRTVSRRNKLLDLYKSCKNDYPLLFDELQNNTTDDELKSDKLYLYFTQFGKCMYTGENIELGDLFNKNLYDIDHIYPQSKIKDDSLDNRVLVKKTTNAKKDNEYPLSSQIREKMTPHWKALLDKGLIDKKKYERLVRNYPLSDEELSQFISRQLVETRQSTKAVANILEQLYPRPNTEIVYVKAALASEFRHQYDMLKCREVNDLHHAKDAYLNIVVGNVYNVKFTHNKANFIKGLQNNDKAYTVKLDSMLKHNIDGAWIADNNESLNIVKSTMNKNNIRYTRYAFKQKGGLFDQNILKKGKGQVPIKANDKRNSIEKYGGYNRPSSSYFSLVKYFDKKGKKIIQLVPIDSFEEHIYQNTPERYISEKIGCDCEILIPCIKYNSCISIDGFRMHLSSKSNGGATIVCKPSIQLVVGYENEKYIKGIVKSIETGFNADILKRYNINNDNNLILYDLLSYKIKNTIYKSKFEKVFICISSGREKFILLDLDEQCYIINEILKILHCNVVTGDLKLLGGSGQSGTLTINSALSNIKNVKSIKLINQSVTGLFEQEIELLNL

SEQ ID NO: 21119 - protein, 1332 aa, unidentified
  REGION 1..1332: note = Cas Enzyme sequence
MGKEYYLGLDIGTDSVGWAVCDTDYKIPKFKGNAMWGIRLFEKSNSAEERRGFRSSRRRTQRKRERLKLLEMLFDEEISKIDPAFFIKLLESNLYLEDKSTKIPYCVFSDENYTDKDFHRDYPTIYHLRNELIKNNKPHDVRLVYLALHHIIKNRGHFLFDYSYKNDKSGDFMPIYNGLKNYFYDNYEIELDCSDVDEFANTLKDKSKGKTKKNAEIAELFGVSKKDDKVLYSALSLLSGSSVKLFDIFDDEALKDVEKKSVSFSSGFDDNANDFQSYLGERFEFLEKLKAVYDWAVLADILDGKEYISEAKVAIYEKHKRDLRTLKKYIKIYMPEKKAEIFNISSKDNNYVAYSKHIKTSSGTGVLNSTCTQEEFCAYLKKTLGICKDASYEEMFKEIENSTFMPKQVTKDNGVVPMQVNEKELVAILDNAKEYLPFLLNKDNDGKTVYDKIKALFEYRIPYYIGPLNTHSTKHWLVRNNEKIYPWNIKEVVDFDKSAEKFIEKLTSKCTYLPQYDVIPKHSLLYNKFCVLNELNNLKIDGEKISVQLKQDIYNDLFKKYYKVTNKKLCDYLESRNIAFDEISGIDNDFKSSLKSYKDLVAYNLTDEQKEEIVKAITIFGDDKKLLKKRLKNEFGGCLSDDEIKKICKLKYTGWSKLSREFLTDVTAVYKETGELINIICALWETNYNLTSLLYSDEFCCDDKENKTFNDKINELNSFGNDKTLNQIVEELYVSPLVKRPIYQSLLITKELEKIMKCPPKKIFVEVARGAEEKKRTVSRRNKLLDLYKSCKNDYPLLFDELQNNTTDDELKSDKLYLYFTQFGKCMYTGENIDLGDLFNKNLYDIDHIYPQSKIKDDSLDNRVLVKKTTNAKKDNEYPLSSQIREKMTPHWKALLDKGLIGKKKYERLVRNYPLSDEELSQFISRQLVETRQSTKAVANILEQLYPRPDTEIVYVKAALASEFRHQYDMLKCREVNDLHHAKDAYLNIVVGNAYNVKFTHNKANFIKGLQNNDKAYTVKLDSMLKHNIDGAWIADNNESLNIVKSTMNKNNIRYTRYAFEQKGGLFDQNILKKGKGQVPIKANDKRNSIEKYGGYNRPSSSYFSLVKYFDKKGKKIIQLVPIDSFEEHIYQNTPERYVSEKIGCDCEILIPCIKYNACISIDGFRMHLSSKSNGGATIVCKPSIQLVVGYENEKYIKGIVKSIETGFNADILKRYNINSDNNLILYDLLSYKIKNTIYKSKFEKVFICMSSGREKFILLDLDEQCYIINEILKILHCNVVTGDLKLLGGSGQSGTVTINSALSNIKNVKSIKLINQSVTGLFEQEIELLNL

SEQ ID NO: 21120 - protein, 1378 aa, unidentified; identical to SEQ ID NO: 20604
  REGION 1..1378: note = Cas Enzyme sequence

SEQ ID NO: 21121 - protein, 1378 aa, unidentified
  REGION 1..1378: note = Cas Enzyme sequence
VDNKKIFLGLDIGTNSVGWAVTDDEYRLRKFKNDLMWGVHLFDEAQQSADRRAFRTARRRLDRRKQRIALLQEFFAPEIIKKDPTFFIRLKESALLPQDREHRNSSIFFNDDNYTDKEYFSQFPTIHHLITELMKNDNPHDVRLVYLACSYILAHRGHFLFEVEKDDIESIKKFAPIYAEFIDTLNNICDSIPFDDNISELEEILRLRCTVSEKEKRLTALWFAGKKPSGDLCEGLRFDLLIKLLSGGKTKLEELFINDEYKDLEVSSVCAASADFGDILDSLAGVVTPEQFSLLSAVKKLNDWSLLVNILKNSDSISHSKIKEYEAHKKDLEMLKRIFRKYLNKTEYNSIFRDKEEKNKSYNAYINSPKNCSQEDFCKFVQTFIDKKKCEENDKQTLEYLKQKCADKTLCPKQVNTDNRVIPYQLYYHELKCILDNACIYLDFLNKRDRYGTVADKILSIMEFRIPYYVGPLVNHGDNPNAWMVRKSEGIIRPWNFDEMVDLDKSEVEFIKRMTCRCTYLAGEDVLAKNSLLYCKYTVLNEINNITVDGKKISVAAKQKIYNELFMKKRRVTVKMIGNLLHSCGEMTSEQKLGGIDLTIRSSLKSYHDFKSMLERKVLSETDAERIIERITVTTDMARLKSWLKQEYPSISSEDVKYISKLNYKDYGRLSRRLLENVYETDTNTGEVVNECNIITRLWETNDNLMQLLGSKYKYMERIKALNKEYYSDPKHSLTISDRLKEMYVPTAVRRSINRTLDVVNEIKSIAGKDPDKIFIEMARENDMTKKGVRTKSRREQIKALFEDAKKLSDMSAEIAHLEEKLSETDDGKLRSEKYYLYFTQLGRCMYTGHSIDFEKLGSDTYYNIDHIFPQAKIKDDSLENKVLVESEANGTKSDTYPIDKDIRDKMRGFWKSLHEKKLIGDKKLQRLIRSTPFSEDELAGFISRQLVETRQSTKAAAELLKELCPESEIVYVKAELASDFRHETDMLKCREINDLHHAKDAYLNIVMGNVYNAKFTKDPLNFIRSGEHYSLKMFKKNADGKTSGLLTHKVERNGTTVWDPAKSFDTVRKMMSKNSVRYVRYTYKRKGGLFNQMPESKKPGLIPRKKGLDPEKYGGYNNASVSTFGIIKCKNDIVIIPIEIMKEYKFFSDNKFAKQYALEKLENIYPQKKYQSLTCEDIIVPCIHYQDGSKRLPILKINSLLEVNGFRINLCSKDSGGKYMIVSGAESLICSYQDEKYIKSVCSYAAKTIDEKSLQYNGISYERNLDIYDLICQKCANGHFSKWKKFRDTSIVLNKKRDIFISLSLNEQICALKEIVNILKSGRSVYCDLSAIEESKQSCISKLGAVLTSIKNVSDIRIIDQSPTGLYEKKSVNLLEL

SEQ ID NO: 21122 - protein, 1327 aa, unidentified
  REGION 1..1327: note = Cas Enzyme sequence
MKNSNDDYYAGFDIGTDSVGYAVADTDYNLCKFKGNAMWGVDLFEESNSAAERRTLRSARRRGLRKRNRIEWLQMLFDEEISKVDNAFFQRLKESCLYLDDKSSNVPYAVFADGNYTDKEFHTDYPTIYHLRKELIKSSQPHDVRLVYLALHHIIKHRGHFLFDNMGADFESESSFETLFDDLKLYLKEEYEIEFECNDSLRFSEILKDKTLKKTAKSSESYKLFGYSKRNNPYETALIDLMCGRKVKFSDMFGDKSFDSEEVNGITFESGYDDNENTYRDLLQEKFELIEKAKAVYDWAILADILNGEKYISFAKVKTYEEHNSDLKMLKDFVKERCKSLYGEIFRITKDKLDNYTAYCGKYKENGRNGVIQYRTNQADFCKYLKKKFEKLDKTGYEEMFDKIENGTFMPKIVVKDNGVIPMQVNRSELKAILKNASTYLEFLNNKDENGISVSDKIVKIFEFRIPYYVGPLNNHSLKSWLVRSDEKVYPWNFDSVVDIEQSAENFINNLTSKCTYLPTKDVIPKNSILYSAFTVLNELNNLRLDGKKPDVSLKQAIFNDLFMTHKKVRRKDLLNYLKSEKGITPDITGIDGDFKSSMRSAIEMSQFNLTDSEKEDAIKAITVFGDDKKLLRKRLKRQLGSKLSDEDIMRISKLKYKDWGRLSKEFLTEVYNVDKNTGELQFNIIHALWQTNDNLMELLGSKYGFEQSRQNYLDGIQTGQSLEKMVENLYISPAVKRPVYQSLKIMHEINKIQGHAPKKIFVEMTRKDGVKGDKGRKESRKTKLVDLYKKCGEDSGELWESLEKTPDDEFKRDRLYFYYTQFGKCMYTGEPINLSELYNQNIYDVDHIFPRSKVKDDSLDNRVLVKKQVNAHKDNTYPLDSSIREKMKGFWHLLMDKGLISKKKYERLTRATPLSDSELSDFIARQIVETSQSTKAVASLFKELYPDTEIVYVKASTVSEFRHEYDFLKCREVNDFHHAKDAYLNIVVGNVYNERCTHNKSIFIKGLQIKTYSLNKMFSFNTPNAWSIDDNKSIKIVRKTMNKNNIRFTRYALTRNGGLFKMNPLKKGRGQAPLKQNSPLSDISKYGGYDKPTSSYFSFVKYEGKKGKEMRQLVAIDSYIKARYEANPEKYLSETLGLKNPVVLIPVVKYNACIEIDGFRMHISSKSNGGKTVVCKPAMQLTVSYDTEKYIRNIVKLNSKPENYNITELDKVSADENLKLFDILTSKMTDTILKVKFGSMGTKISAHRDAFEKLDVRKQCFVLAEILKIIHSNVLTGDLSFIGESKKSGVVSTNSVLSEVKGVKSIYLVHQSVTGLFEKKIDLLHM

SEQ ID NO: 21123 - protein, 1332 aa, unidentified
  REGION 1..1332: note = Cas Enzyme sequence
MKNFNNDYYTGFDIGTDSVGYAVADTDYNLCKFKGNAMWGVDLFEESNSAAERRTLRSARRRGLRKRNRIEWLQMLFDEEISKVDNAFFQRLKESCLYLDDKSSNVPYAVFADGNYTDKEFHTDYPTIYHLRKELIKSSQPHDIRLVYLALHHIIKHRGHFLFDNMGSDFESESSFETLFDDLKLYLKEEYEIEFECNDSLRFSEILKDKTLKKTAKSSESYKLFGYSKRNNPYETALIDLMCGRNVGFSDMFGDKSFDSEEVNGITFESGYDDNENTYRDLLQEKFEPIEKAKAVYDWAILADILNGEKYNGKKYISFAKVKTYEEHSSDLKMLKDFVKERCKSLYGEIFRITKDKLDNYTAYCGKYKENGRNGVIQYRTNQADFCKYLKKRFEKLDKTGYEEMFDKIENGTFMPKIVVKDNGIIPMQVNRSELKAILKNASTYLEFLNKKDENGISVSDKIVKIFEFRIPYYVGPLNNHSLKSWLVRSDEKIYPWNFDSVVDIEQSAENFINNLTSKCTYLPTKDVIPKNSILYSAFTVLNELNNLRLDGKKPDVSLKQAIFNDLFMTHKKVRRKDLLNYLKSEKGITPDITGIDGDFKSSMRSAIEMSQFNLTDSEKEDAIKAITVFGDDKKLLRKRLKRQLGSKLSDEDIMRISKLKYKDWGRLSKEFLTEVYNVDKNTGELQFNIIHALWQTNDNLMELLGSKYGFEQSRQNYLDGIQTGQSLEKMVENLYISPAVKRPVYQSLKIMHEINKIQGHAPEKIFVEMTRKDGVKGDKGRKESRKTKLVDLYKKCGEDSGELWESLEKTPDDEFKRDRLYFYYTQFGKCMYTGEPINLSELYNQNIYDVDHIFPRSKVKDDSLDNRVLVKKQVNAHKDNTYPLDSSIREKMKGFWYLLMDKGLISKKKYERLTRATELTDSELSDFIARQIVETSQSTKAVASLFKELYPDTEIVYVKASTVSEFRHEYDFLKCREVNDFHHAKDAYLNIVVGNVYNERCTHNKSIFIKGLQTKTYSLNKMFSFNTPNAWSIDDNKSIKIVRKTMNKNNIRFTRYALTRNGGLFKMNPLKKGSGQAPLKQNSPLSDISKYGGYDKPASSYFSFVKYEGKKGKEMRQLVAIDSYIKARYEANPEKYLSETLELKNPVVLIPVVKYNACIEIDGFRMHISSKSNGGKKIVYKPAMQLTVSYDTEKYVRNVVKLNSKPENYNVTELDKVSAEENVELFDILIFKMTDTILKVKFGDMGVKIASHRDAFEKLDVRKQCFVLAEILKIIHSNVVTGDLTLIDEAKKAGVVSTNSVLSEIKGVKSIYLVHQSVTGLFEKKIDLLHM

SEQ ID NO: 21124 - protein, 1327 aa, unidentified; identical to SEQ ID NO: 21122
  REGION 1..1327: note = Cas Enzyme sequence

SEQ ID NO: 21125 - protein, 1258 aa, unidentified
  REGION 1..1258: note = Cas Enzyme sequence
MLFDEEISKVDNAFFQRLKESCLYLDDKSSNVPYAVFADGNYTDKEFHTDYPTIYHLRKELIKSSQPHDIRLVYLALHHIIKHRGHFLFDNMGSDFESESSFETLFDDLKLYLKEEYEIEFECNDSLRFSEILKDKTLKKTAKSSESYKLFGYSKRNNPYETALIDLMCGRNVGFSDMFGDKSFDSEEVNGITFESGYDDNENTYRDLLQEKFEPIEKAKAVYDWAILADILNGEKYNGKKYISFAKVKTYEEHSSDLKMLKDFVKERCKSLYGEIFRITKDKLDNYTAYCGKYKENGRNGVIQYRTNQADFCKYLKKRFEKLDKTGYEEMFDKIENGTFMPKIVVKDNGIIPMQVNRSELKAILKNASTYLEFLNKKDENGISVSDKIVKIFEFRIPYYVGPLNNHSLKSWLVRSDEKIYPWNFDSVVDIEQSAENFINNLTSKCTYLPTKDVIPKNSILYSAFTVLNELNNLRLDGKKPDVSLKQAIFNDLFMTHKKVRRKDLLNYLKSEKGITPDITGIDGDFKSSMRSAIEMSQFNLTDSEKEDAIKAITVFGDDKKLLRKRLKRQLGSKLSDEDIMRISKLKYKDWGRLSKEFLTEVYNVDKNTGELQFNIIHALWQTNDNLMELLGSKYGFEQSRQNYLDGIQTGQSLEKMVENLYISPAVKRPVYQSLKIMHEINKIQGHAPEKIFVEMTRKDGVKGDKGRKESRKTKLVDLYKKCGEDSGELWESLEKTPDDEFKRDRLYFYYTQFGKCMYTGEPINLSELYNQNIYDVDHIFPRSKVKDDSLDNRVLVKKQVNAHKDNTYPLDSSIREKMKGFWHLLMDKGLISKKKYERLTRATELTDSELSDFIARQIVETSQSTKAVASLFKELYPDTEIVYVKASTVSKFRHKYDFLKCREVNDFHHAKDAYLNIVVGNVYNERCTHNKSIFIKGLQTKTYSLNKMFSFNTPNAWSIDDNKSIKIVRKTMNKNNIRFTRYALTRNGGLFKMNPLKKGSGQVSLKQNSPLSDISKYGGYDRPTSSYFSFVKYEGKKGKEMRRLVAIDSYIKARYEANPEKYLSENLGLKNPVVLIPVVKYNACIEIDGFRMHISSKSSGGKQIVYKPAMQLTVSYDTEKYIRNVVKLNSKPENYNITELDKVSADENLKLFDILTSKMTDTVLKVKFGDMGAKIISHRDAFEKLDIRKQCFVLAEILKIIHCNISEGNLRFIGGAKQSGSIKMSSVISGIKGVKSIYLVHQSVTGLFEKKIDLLHM

SEQ ID NO: 21126 - protein, 1327 aa, unidentified
  REGION 1..1327: note = Cas Enzyme sequence
MKNFNDDYYTGFDIGTDSVGYAVADTDYNLCKFKGNAMWGVDLFEESNSAAERRTLRSARRRGLRKRNRIEWLQMLFDEEISKVDNAFYQRLKESCLYLDDKSSNVPYAVFADGNYTDKEFHTDYPTIYHLRKELIKSSQPHDIRLVYLALHHIIKHRGHFLFDNMGSDFESESSFEALFDDLKLYLKEECEIEFECNDSLRFSEILKDKTLKKTAKSSESYKLFGYSKRNNPYETALIDLMCGRKVKFSDMFGDKSFDSEEVNGITFESGYDDNENTYRDLLQEKFELIEKAKAVYDWAIPADILNGEKYISFAKVKTYEEHSSDLKMLKDFVKERCKSLYGEIFRITKDKLDNYTAYCGKYKENGRNGVIQYRTNQADFCKYLKKKFEKLDKTGYEEMFDKIENGTFMPKIVVKDNGVIPMQVNRSELKAILKNASTYLEFLNKKDENGISVSDKIVKIFEFRIPYYVGPLNNHSLKSWLVRSDEKIYPWNFDGVVDIEQSADNFINNLTSKCTYLPTKDVIPKNSILYSAFTVLNELNNLRLDGKKPDVSLKQAIFNDLFMTHKKVRRKDLLNYLKSEKGVAFDITGIDGDFKSSMRSAIEMSQFNLTDSEKEDAIKAITVFGDDKKLLRKRLKRQLGSKLSDEDIMRISKLKYKDWGRLSKEFLTEVYNVDKNTGELQFNIIHALWQTNDNLMELLGSKYGFEQSRQNYLDGIQTGQSLEKMVENLYISPAVKRPVYQSLKIMHEINKIQGHAPKKIFVEMTRKDGVKGDKGRKESRKTKLVDLYKKCGEDSGELWESLEKTPDDEFKRDRLYFYYTQFGKCMYTGEPINLSELYNQNIYDVDHIFPRSKVKDDSLDNRALVKKQVNAHKDNTYPLDSSIREKMKGFWHLLMDKGLISKKKYERLTRVTPLSDSELSDFIARQIVETSQSTKAVASLFKELYPDTEIVYVKASTVSEFRHEYDFLKCREVNDFHHAKDAYLNIVVGNVYNERCTHNKSIFIEGLKTKAYSLNKMFSFNTPNAWSIDDNKSIKIVRKTMNKNNIRFTRYALTRNGGLFKMNPLKKGSGQVSLKQNSPLSDISKYGGYDKPTSSYFSFVKYEGKKGKEMRQLVAIDSYIKAQYEANPEKYLSETLGLKNPVVLIPVVKYNACIEIDGFRMHISSKSNGGKKIVYKPAMQLTVSYDTEKYIRNVVKLNSMPENYNITERDKVSADENLKLFDILIFKMTETILKVKFGDMGVKIASHRDTFEKLDVRKQCFVLAEILKIIHSNVVTGDLTLIDEAKKAGVVSTNSVLSEIKGVKSIYLVHQSVTGLFEKKIDLLHM

SEQ ID NO: 21127 - protein, 1330 aa, unidentified; identical to SEQ ID NO: 20095
  REGION 1..1330: note = Cas Enzyme sequence

SEQ ID NO: 21128 - protein, 1333 aa, unidentified
  REGION 1..1333: note = Cas Enzyme sequence
MKNFNNDYYTGFDIGTDSVGYAVADTDYNLCKFKGNAMWGVDLFEKSNSAAERRTLRSARRRGLRKRNRIEWLQMLFDEEISKVDNAFFQRLKESCLYLDDKSSNVPYAVFADGNYTDKEFHTDYPTIYHLRKELIKSSQPHDIRLVYLALHHIIKHRGHFLFDNMGSDFESESSFETLFDDLKLYLKEEYEIEFECNDSLRFSEILKDKTLKKTAKSSESYKLFGYSKRNNPYETALIDLMCGRNVGFSDMFGDKSFDSEEVNGITFESGYDDNENTYRDLLQEKFEPIEKAKAVYDWAILADILNGEKYNGKKYISFAKVKTYEEHSSDLKMLKDFVKERCKSLYGEIFRITKDKLDNYTAYCGKYKENGRNGVIQYRTNQADFCKYLKKRFEKLDKTGYEEMFDKIENGTFMPKIVVKDNGIIPMQVNRSELKAILKNASTYLEFLNKKDENGISVSDKIVKIFEFRIPYYVGPLNNHSLKSWLVRSDEKIYPWNFDSVVDIEQSAENFINNLTSKCTYLPTKDVIPKNSILYSAFTVLNELNNLRLDGKKPDVSLKQAIFNDLFMTHKKVRRKDLLNYLKSEKGITPDITGIDGDFKSSMRSAIEMSQFNLTDSEKEDAIKAITVFGDDKKLLRKRLKRQLGSKLSDEDIMRISKLKYKDWGRLSKEFLTEVYNVDKNTGELQFNIIHALWQTNDNLMELLGSKYGFEQSRQNYLDGIQTGQSLEKMVENLYISPAVKRPVYQSLKIMHEINKIQGHAPKKIFVEMTRKDGVKGDKGRKESRKTKLVDLYKKCGEDSGELWESLEKTPDDEFKRDRLYFYYTQFGKCIYTGEPINLSELYNQNIYDVDHIFPRSKVKDDSLDNRVLVKKQVNAHKDNTYPLDSSIREKMKGFWHLLMDKGLISKKKYERLTRATPLSDSELSDFIARQIVETSQSTKAVASLFKELYPDTEIVYVKASLVSEFRDESRGFGFLKCREVNDFHHAKDAYLNIVVGNVYNERCTHNKSIFIKGLQTKTYSLNKMFSFNTPNAWSIDDNKSIKIVRKTMNKNNIRFTRYALTRNGGLFKMNPLKKGSGQVSLKQNSPLSDISKYGGYDKPASSYFSFVKYEGKKGKEMRQLVAIDSYIKARYEANPEKYLSETFGLKKPVVLIPVVKRDACIEIDGFRMHISGKTGSRITFKPAMQITVSYDTEKYIRNVVKLNSKPENYNITELDKVSTDENIELFDILTYKMTDTVLKVKFGDMGAKIISHRDAFEKLDIRKQCFVLTEILKIIHCNAVLGNLTYIGEGSSSGRVGLNSVLSEVKGVKSVYLVHQSVTGLFEKKIDLLHM

SEQ ID NO: 21129 - protein, 1335 aa, unidentified
  REGION 1..1335: note = Cas Enzyme sequence
MKNFNDDYYAGFDIGTDSVGYAVADTDYNLCKFKGNAMWGVDLFEESNSAAERRILRSARRRGLRKRNRIEWLQMLFDEEISKVDNAFYQRLKESCLYLDDKSSNVPYAVFADGNYTDKEFHTDYPTIYHLRKELIKSSQPHDIRLVYLALHHIIKHRGHFLFDNMGSDFESESSFETLFDDLKLYLKEEYEIEFECNDSLRFSEILKDKTLKKTAKSSESYKLFGYSKRNNPYETALIDLMCGRNVGFSDMFGDKSFDSEEVNGITFESGYDDNENTYRDLLQEKFEPIEKAKAVYDWAILADILNGEKYNGKKYISFAKVKTYEEHSSDLKMLKDFVKERCKSLYGEIFRITKDKLDNYTAYCGKYKENGRNGVIQYRTNQADFCKYLKKRFEKLDKTGYEEMFDKIENGTFMPKIVVKDNGIIPMQVNRSELKAILKNASTYLEFLNKKDENGISVSDKIVKIFEFRIPYYVGPLNNHSLKSWLVRSDEKIYPWNFDSVVDIEQSAENFINNLTSKCTYLPTKDVIPKNSILYSAFTVLNELNNLRLDGKKPDVSLKQAIFNDLFMTHKKVRRKDLLNYLKSEKGITPDITGIDGDFKSSMRSAIEMSQFNLTDSEKEDAIKAITVFGDDKKLLRKRLKRQLGSKLSDEDIMRISKLKYKDWGRLSKEFLTEVYNVDKNTGELQFNIIHALWQTNDNLMELLGSKYGFEQSRQNYLDGIQTGQSLEKMVENLYISPAVKRPVYQSLKIMHEINKIQGHAPKKIFVEMTRKDGVKGDKGRKESRKTKLVDLYKKCGEDSGELWESLEKTPDDEFKRDRLYFYYTQFGKCMYTGEPINLSELYNQNIYDVDHIFPRSKVKDDSLDNRVLVKKQVNAHKDNTYPLDSSIREKMKGFWHLLMDKGLISKKKYERLTRATPLSDSELSDFIARQIVETSQSTKAVASLFKELYPDTEIVYVKASLVSEFRDESRGFGFLKCREVNDFHHAKDAYLNIVVGNVYNERCTHNKSIFIKGLQTKTYSLNKMFSFNTPNAWSIDDNMSIKIVRKTMNKNNIRFTRYALTRNGGLFKMNPLKKGSGQVSLKQNSPLSDISKYGGYDKPASSYFSFVKYEGKKGKEMRQLVAIDSYIKARYEANPEKYLSETLGLKNPVVLIPVVKYNACIEIDGFRMHISSKSNGGKKIVYKPAMQLTVSYDTEKYIRNVVKLNSMPENYNITERDKVSVDENLKLFDILIFKMTETILKVKFGDMGVKIASHRDAFEKLDVRKQCFVLAEILKIIHSNVVTGDLTLIDEAKKAGVVSTNSILSEIKGVKSIYLVHQSVTGLFEKRIDLLHM

SEQ ID NO: 21130 - protein, 1329 aa, unidentified
  REGION 1..1329: note = Cas Enzyme sequence
  REGION 603..606: note = misc_feature - Xaa can be any naturally occurring amino acid
MKNFNDDYYTGFDIGTDSVGYAVADTDYNLCKFKGNAMWGVDLFEESNSAAERRTLRSARRRGLRKRNRIEWLQMLFDEEISKVDNAFYQRLKESCLYLDDKSSNVPYAVFADGNYTDKEFHTDYPTIYHLRKELIKSSQPHDIRLVYLALHHIIKHRGHFLFDNMGSDFESESSFEALFDDLKLYLKEECEIEFECNDSLRFSEILKDKTLKKTAKSSESYKLFGYSKRNNPYETALIDLMCGRKVKFSDMFGDKSFDSEEVNGITFESGYDDNENTYRDLLQEKFELIEKAKAVYDWAILADILNGEKYISFAKVKTYEEHSSDLKMLKDFVKERCKSLYGEIFRITKDKLDNYTAYCGKYKENGRNGVIQYRTNQADFCKYLKKKFEKLDKTGYEEMFDKIENGTFMPKIVVKDNGVIPMQVNRSELKAILKNASTYLEFLNKKDENGISVSDKIVKIFEFRIPYYVGPLNNHSLKSWLVRSDEKIYPWNFDSVVDIEQSAENFINNLTSKCTYLPTKDVIPKNSILYSAFTVLNELNNLRLDGKKPDVSLKQAIFNDLFMTHKKVRRKDLLNYLKSEKGVAFDITGIDGDFKSSMRSAXXXXIEMSQFNLTDSEKEDAIKAITVFGDDKKLLRKRLKRQLGSKLSDEDIMRISKLKYKDWGRLSKEFLTEVYNVDKNTGELQFNIIHALWQTNDNLMELLGSKYGFEQSRQNYLDGIQTGQSLEKMVENLYISPAVKRPVYQSLKIMHEINKIQGHAPKKIFVEMTRKDGVKGDKGRKESRKTKLVDLYKKCGEDSGELWESLEKTPDDEFKRDRLYFYYTQFGKCMYTGEPINLSELYNQNIYDVDHIFPRSKVKDDSLDNRALVKKQVNAHKDNTYPLDSSIREKMKGFWHLLMDKGLISKKKYERLTRVTPLSDSELSDFIARQIVETSQSTKAVASLFKELYPDTEIVYVKASTVSEFRHEYDFLKCREVNDFHHAKDAYLNIVVGNVYNERCTHNKSIFIEGLKTKAYSLNKMFSFNTPNAWSIDDNKSIKIVRKTMNKNNIRFTRYALTRNGGLFKMNPLKKGSGQVSLKQNSPLSDISKYGGYDKPTSSYFSFVKYEGKKGKEMRQLVAIDSYIKAQYEANPEKYLSETLGLKNPVVLIPVVKYNACIEIDGFRMHISAKTGKQIIYKPAMQLTVSYDTEKYIRNVVKLNSKPENYNITELDKVSTDENIELFDILTYKMTGTVLKVKFGDMGAKIISHRDAFEKLDIRKQCFVLTEILKIIHCNAVLGNLTYIGEGSSSGRVGLNSVLSEVKGVKSIYLVHQSVTGLFEKKIDLLHM

SEQ ID NO: 21131 - protein, 1327 aa, unidentified
  REGION 1..1327: note = Cas Enzyme sequence
MKNFNDDYYAGFDIGTDSVGYAVADTDYNLCKFKGNAMWGVDLFEESNSAAERRTLRSARRRGLRKRNRIEWLQMLFDQEISKVDNAFYQRLKESCLYLDDKSSNVPYAVFADGNYTDKEFHTDYPTIYHLRKELIKSSQPHDVRLVYLALHHIIKHRGHFLFDNMGSDFESESSFETLFDDLKLYLKEEYEIEFECNDSLRFSEILKDKTLKKTAKSSESYKLFGYSKKNNPYETALIDLMCGRKVKFSDMFGDKSFDSEEVNGITFESGYDDNENTYRDLLQEKFELIEKAKAVYDWAILADILNGEKYISFAKVKTYEEHSSDLKMLKDFVKEKCKSLYGEIFRITKDKLDNYTAYCGKYKENGRNGVIQYRTNQADFCKYLKKKFEKLDKTGYEEMFDKIENGTFMPKIVVKDNGVIPMQVNRSELKAILKNASTYLEFLNKKDENGISVSDKIVKIFEFRIPYYVGPLNNHSLKSWLVRSDEKIYPWNFDSVVDIEQSAENFINNLTSKCTYLPTKDVIPKNSILYSAFTVLNELNNLRLDGKKPDVSLKQAIFNDLFMTHKKVRRKDLLNYLKCEKGITPDITGIDGDFKSSMRSAIEMSQFNLTDSEKEDAIKAITVFGDDKKLLRKRLKRQLGSKLSDEDIMRISKLKYKDWGRLSKEFLTEVYNVDKNTGELQFNIIHALWQTNDNLMELLGSKYGFEQSRQNYLDGIQTGQSLEKMVENLYISPAVKRPVYQSLKIMHEINKIQGHAPKKIFVEMTRKDGVKGDKGRKESRKAKLVDLYKKCGEDSGDLWESLEKTPDDEFKRDRLYFYYTQFGKCMYTGEPINLSELYNQNIYDVDHIFPRSKVKDDSLDNRVLVKKQVNAHKDNTYPLDSSIREKMKGFWHLLMDKGLISKKKYERLTRATELTDSELSDFIARQIVETSQSTKAVASLFKELYPDTEIVYVKASTVSEFRHEYDFLKCREVNDFHHAKDAYLNIVVGNVYNERCTHNKSIFIKGLQTKTYSLNKMFSFNTPNAWSIDDNKSIKIVRKTMNKNNIRFTRYALTRNGGLFKMNPLKKGSGQVSLKQNSPLSDISKYGGYDKPASSYFSFVKYEGKKGKEMRQLVAIDSYIKARYEANPEKYLSETLGLKNPVVLIPVVKYNACIEIDGFRMHISSKSNGGKKIVYKPAMQLTVSYDTEKYIRNVVKLNSKPENYNITELDKVSAEENVELFDILIFKMTDTILKVKFGDMGVKIASHRDTFEKLDVRKQCFVLAEILKIIHSNVVTGDLTLIDEAKKAGVVSTNSVLSEIKSVKSIYLVHQSVTGLFEKKIDLLNM

SEQ ID NO: 21132 - protein, 1327 aa, unidentified
  REGION 1..1327: note = Cas Enzyme sequence
MKNFNDDYYAGFDIGTDSVGYAVADTDYNLCKFKGNAMWGVDLFEESNSAAERRTLRSARRRGLRKRNRIEWLQMLFDEEISKVDNAFFQRLKESCLYLDDKSSNVPYAVFADGNYTDKEFHTDYPTIYHLRKELIKSSQPHDIRLVYLALHHIIKHRGHFLFDNMGSDFESESSFEALFDDLKLYLKEEYEIEFECNDSLRFSEILKDKTLKKTAKSSESYKLFGYSKRNNPYETALIDLMCGRKVKFSDMFGDKSFDSEEVNGITFESGYDDNENTYRDLLQEKFELIEKAKAVYDWAILADILNGEKYISFAKVKTYEEHNSDLKMLKDFVKERCKSLYGEIFRITKDKLDNYTAYCGKYKENGRNGVIQYRTNQADFCKYLKKKFEKLDKTGYEEMFDKIENGTFMPKIVVKDNGVIPMQVNRSELKAILKNASTYLEFLNKKDENGISVSDKIVKIFEFRIPYYVGPLNNHSLKSWLVRSDEKIYPWNFDSVVDIEQSAENFINNLTSKCTYLPTKDVIPKNSILYSAFTVLNELNNLRLDGKKPDVSLKQAIFNDLFMTHKKVRRKDLLNYLKSEKGVAFDITGIDGDFKSSMRSAIEMSQFNLTDSEKEDAIKAITVFGDDKKLLRKRLKRQLGSKLSDEDIMRISKLKYKDWGRLSKEFLTEVYNVDKNTGELQFNIIHALWQTNDNLMELLGSKYGFEQSRQNYLDGIQTGQSLEKMVENLYISPAVKRPVYQSLKIMHEINKIQGHAPKKIFVEMTRKDGVKGDKGRKESRKTKLVDLYKKCGEDSGELWESLEKTPDDEFKRDRLYFYYTQFGKCMYTGEPINLSELYNQNIYDVDHIFPRSKVKDDSLDNRVLVKKQVNAHKDNTYPLDSSIREKMKGFWHLLMDKGLISKKKHERLTRATTLSDSELSDFIARQIVETSQSTKAVASLFKELYPDTEIVYVKASTVSEFRHEYDFLKCREVNDFHHAKDAYLNIVVGNVYNERCTHNKSIFIEGLKNKAYSLNKMFSFNTPNAWSIDDNKSIKIVRKTMNKNNIRFTRYALTRNGGLFKMNPLKKGSGQVSLKQNSPLSDISKYGGYDKPASSYFSFVKYEGKKGKEMRQLVAIDSYIKAQYEANPEKYLSETLGLKNPVVLIPVVKYNACIEIDGFRMHISSKSNGGKTVVCKPAMQLTVSYDTEKYIRNIVKLNSKPENYNITELDKVSAEENLKLFDILTSKMTDTILKVKFGSMGVKIASHRDAFEKLDVRKQCFVLAEILKIIHSNVVTGDLSFIGESKKSGVVSTNSVLSEIKGVKSIYLVHQSVTGLFEKKIDLLHM

SEQ ID NO: 21133 - protein, 1325 aa, unidentified
  REGION 1..1325: note = Cas Enzyme sequence
MKNFNDDYYVGFDIGTDSVGHAVADTDYNLCKFKGNAMWGVDLFEESNSAAERRTLRSARRRGLRKRNRIEWLQMLFDEEISKVDNAFYQRLKESCLYLDDKSSNVPYAVFADGNYTDKEFHTDYPTIYHLRKELIKSSQPHDIRLVYLALHHIIKHRGHFLFDNMGSDFESESSFEALFDDLKLYLKEEYEIEFECNDSLRFSEILKDKTLKKTAKSSESYKLFGYSKRNNPYETALIDLMCGRKVKFSDMFGDKSFDSEEVNGITFESGYDDNENTYRDLLQEKFELIEKAKAVYDWAILADILNGEKYISFAKVKTYEEHSSDLKMLKDFVKERCKLLYGEIFRITKDKLDNYTAYCGKYKENGRNGVIQYRTNQADFCKYLKKKFEKLDKTGYEEMFDKIENGTFMPKIVVKDNGVIPMQVNRSELKAILKNASTYLEFLNNKDENGISVSDKIVKIFEFRIPYYVGPLNNHSLKFWLVRSNEKIYPWNFDSVVDIEQSAENFINNLTSKCTYLPTKDVIPKNSILYSAFTVLNELNNLRLDGKKPDVSLKQAIFNDLFMTHKKVRRKDLLNYLKSEKGVAFDITGIDGNFKSSMRSAIEMSQFNLTDSEKEDAIKAITVFGDDKKLLRKRLKRQLGSKLSDEDIMRISKLKYKDWGRLSKEFLTEVYNVDKNTGELQFNIIHALWQTNDNLMELLGSKYGFEQSRQNYLDGIQTGQSLEKMVENLYISPAVKRPVYQSLKIMHEINKIQGHAPKKIFVEMTRKDGVKGDKGRKESRKTKLVDLYKKCGEDSGELWKSIEKTPDDEFKRDRLYFYYTQFGKCMYTGEPINLSELYNQNIYDVDHIFPRSKVKDDSLDNRVLVKKQVNAHKDNTYPLDSSIREKMKGFWHLLMDKGLISKKKYERLTRATPLSDSELSDFIARQIVETSQSTKAVASLFKELYPDTEIVYVKASTVSEFRHEYDFLKCREVNDFHHAKDAYLNIVVGNVYNERCTHNKSIFIKGLQTKTYSLNKMFSFNTPNAWSIDDNKSIKIVRKTMNKNNIRFTRYALTRNGGLFKMNPLKKGSGQVSLKQNSPLSDISKYGGYDKPASSYFSFVKYEGKKGKEMRQLVAIDSYIKARYEANPEKYLSETLGLKNPVVLIPVVKYNACIEIDGFRMHISAKTGKQIIYKPAMQLTVSYDTEKYIRNVVKLNSKPENYNITELDKVSADENLKLFDILTYKMTDTVLKVKFGDMGVKIASHRDAFEKLDIRKQCFVLTEILKIIHCNAVLGNLTYIGEGSSSGRVGLNSVLSEIKGVKSIYLVHQSVTGLFEKKIDLLHM

SEQ ID NO: 21134 - protein, 1333 aa, unidentified; identical to SEQ ID NO: 21128
  REGION 1..1333: note = Cas Enzyme sequence

SEQ ID NO: 21135 - protein, 1327 aa, unidentified
  REGION 1..1327: note = Cas Enzyme sequence
MKNFNDDYYVGFDIGTDSVGYAVADTDYNLCKFKGNAMWGVDLFEESNSAAERRTLRSARRRGLRKRNRIEWLQMLFDEEISKVDNAFFQRLKESCLYLDDKSSNVPYAVFADGNYTDKEFHTDYPTIYHLRKELIKSSQPHDIRLVYLALHHIIKHRGHFLFDNMGSDFESESSFEALFDDLKLYLKEEYEIEFECNDSLRFSEILKDKTLKKTAKSSELYKLFGYSKRNNPYETALIDLMCGRKVKFSDMFGDKSFDSEEVNGITFESGYDDNENTYRDLLQEKFELIEKAKAVYDWAILADILNGEKYISFAKVKTYEEHSSDLKMLKDFVKERCKSLYDEIFRITKDKLDNYTAYCGKYKENGRNGVIQYRTNQADFCKYLKKKFEKLDKTGYEEMFDKIENGTFMPKIVVKDNGVIPMQVNRSELKAILKNASTYLEFLNKKDENGISVSDKIVKIFEFRIPYYVGPLNNHSLKFWLVRSDEKIYPWNFDSVVDIEQSAENFINNLTSKCTYLPTKDVIPKNSILYSAFTVLNELNNLRLDGKKPDVSLKQAIFNDLFMTHKKVRRKDLLNYLKSEKGVAFDITGIDGDFKSSMRSAIEMSQFNLTDSEKEDAIKAITVFGDDKKLLRKRLKRQLGSKLSDEDIMRISKLKYKDWGRLSKEFLTEVYNVDKNTGELQFNIIHALWQTNDNLMELLGSKYGFEQSRQNYLDGIQTGQSLEKMVENLYISPAVKRPVYQSLKIMHEINKIQGHAPKKIFVEMTRKDGVKGDKGRKESRKTKLVDLYKKCGEDSGELWESLEKTPDDEFKRDRLYFYYTQFGKCMYTGEPINLSELYNQNIYDVDHIFPRSKVKDDSLDNRVLVKKQVNAHKDNTYPLDSSIREKMKGFWHLLMDKGLISKKKYERLTRATELTDSELSDFIARQIVETSQSTKAVASLFKELYPDTEIVYVKASTVSEFRHEYDFLKCREVNDFHHAKDAYLNIVVGNVYNERCTHNKSIFIKGLQTKTYSLNKMFSFNTPNAWSIDDNKSIKIVRKTMNKNNIRFTRYALTRNGGLFKMNPLKKGSGQVSLKQNSPLSDISKYGGYDKPASSYFSFVKYEGKKGKEMRRLVAIDSYIKARYEANPEKYLSETLGLKNPVVLIPVVKYNACIEIDGFRMHISSKSNGGKKIVYKPAMQLTVSYDTEKYIRNVVKLNSMPENYNIKELDKVSADENLKLFDILTSKMTDIILKVKFGDMGVKIAAHRDAFEKLDVRKQCFVLAEILKIIHSNVVTGDLTLIDEAKKAGVVSTNSVLSEIKGVKSIYLVHQSVTGLFEKKIDLLNM

SEQ ID NO: 21136 - protein, 1324 aa, unidentified
  REGION 1..1324: note = Cas Enzyme sequence
DYYVGFDIGTDSVGYAVADTDYNLCKFKGNAMWGVDLFEESNSAAERRTLRSARRRGLRKRNRIEWLQMLFDEEISKVDNAFFQRLKESCLYLDDKSSNVPYAVFADGNYTDKEFHTDYPTIYHLRKELIKSSQPHDIRLVYLALHHIIKHRGHFLFDNMGSDFESESSFEALFDDLKLYLKEEYEIEFECNDSLRFSEILKDKTLKKTAKSSESYKLFGYSKRNNPYETALIDLMCGRKVKFSDMFGDKSFDSEEVNGITFESGYDDNENTYRDLLQEKFELIEKAKAVYDWAILADILNGEKYISFAKVKTYEEHNSDLKMLKDFVKERCKSLYGEIFRITKDKLDNYTAYCGKYKENGRNGVIQYRTNQADFCKYLKKKFEKLDKTGYEEMFDKIENGTFMPKIVVKDNGVIPMQVNRSELKAILKNASTYLEFLNKKDENGISVSDKIVKIFEFRIPYYVGPLNNHSQKSWLVRSDEKIYPWNFDSVVDIEQSAENFINNLTSKCTYLPTKDVIPKNSILYSAFTVLNELNNLRLDGKKPDVSLKQAIFNDLFMTHKKVRRKDLLNYLKSEKGVAFDITGIDGDFKSSMRSAIEMSQFNLTDSEKEDAIKAITVFGDDKKLLRKRLKRQLGSKLSDEDIMRISKLKYKDWGRLSKEFLTEVYNVDKNTGELQFNIIHALWQTNDNLMELLGSKYGFEQSRQNYLDGIQTGRSLEKMVENLYISPAVKRPVYQSLKIMHEINKIQGHAPKKIFVEMTRKDGVKGDKGRKESRKTKLVDLYKKCGEDSGDLWESLEKTPDDEFKRDRLYFYYTQFGKCMYTGEPINLSELYNQNIYDVDHIFPRSKVKDDSLDNRVLVKKQVNAHKDNTYPLDSSIREKMKGFWHLLMDKGLISKKKYERLTRATELSDSELSDFIARQIVETSQSTKAVASLFKELYPDTEIVYVKASLVSEFRDESRGFGFLKCREVNDFHHAKDAYLNIVVGNVYNERCTHNKSIFIKGLQTKIYSLNKMFSFNTPNAWSIDDNKSIKIVRKTMNKNNIRFTRYALTRNGGLFKMNPLKKGRGQAPLKQNSPLSDISKYGGYDKPTSSYFSFVKYEGKKGKEMRRLVAIDSYIKARYEANPEKYLSENLDLKNPVVLIPVVKYNACIEIDGFRMHISSKSNGGKKIVYKPAMQLTVSYDTEKYIRNVVKLNSKPENYNITELDKVSAEENVELFDILIFKMTDTILKVKFGDMGVKIASHRDTFEKLDVRKQCFVLAEILKIIHSNVVTGDLTLIDEAKKAGVVSTNSVLSEIKSVKSIYLVHQSVTGLFEKKIDLLNM

SEQ ID NO: 21137 - protein, 1327 aa, unidentified
  REGION 1..1327: note = Cas Enzyme sequence
MKNFNDDYYTGFDIGTDSVGYAVADTDYNLCKFKGNAMWGVDLFEESNSAAERRTLRSARRRGLRKRNRIEWLQMLFDEEISKVDNAFYQRLKESCLYLDDKSSNVPYAVFADGNYTDKEFHTDYPTIYHLRKELIKSSQPHDIRLVYLALHHIIKHRGHFLFDNMGSDFESESSFEALFDDLKLYLKEECEIEFECNDSLRFSEILKDKTLKKTAKSSESYKLFGYSKRNNPYETALIDLMCGRKVKFSDMFGDKSFDSEEVNGITFESGYDDNENTYRDLLQEKFELIEKAKAVYDWAILADILNGEKYISFAKVKTYEEHSSDLKMLKDFVKERCKSLYGEIFRITKDKLDNYTAYCGKYKENGRNGVIQYRTNQADFCKYLKKKFEKLDKTGYEEMFDKIENGTFMPKIVVKDNGVIPMQVNRSELKAILKNASTYLEFLNKKDENGISVSDKIVKIFEFRIPYYVGPLNNHSLKSWLVRSDEKIYPWNFDSVVDIEQSAENFINNLTSKCTYLPTKDVIPKNSILYSAFTVLNELNNLRLDGKKPDVSLKQAIFNDLFMTHKKVRRKDLLNYLKSEKGVAFDITGIDGDFKSSMRSAIEMSQFNLTDSEKEDAIKAITVFGDDKKLLRKRLKRQLGSKLSDEDIMRISKLKYKDWGRLSKEFLTEVYNVDKNTGELQFNIIHALWQTNDNLMELLGSKYGFEQSRQNYLDGIQTGQSLEKMVENLYISPAVKRPVYQSLKIMHEINKIQGHAPKKIFVEMTRKDGVKGDKGRKESRKTKLVDLYKKCGEDSGELWESLEKTPDDEFKRDRLYFYYTQFGKCMYTGEPINLSELYNQNIYDVDHIFPRSKVKDDSLDNRALVKKQVNAHKDNTYPLDSSIREKMKGFWHLLMDKGLISKKKYERLTRVTPLSDSELSDFIARQIVETSQSTKAVASLFKELYPDTEIVYVKASTVSEFRHEYDFLKCREVNDFHHAKDAYLNIVVGNVYNERCTHNKSIFIEGLKTKAYSLNKMFSFNTPNAWSIDDNKSIKIVRKTMNKNNIRFTRYAFTKNGELFKRKPLKKGRGQAPLKQNSPLSDISKYGGYDKPTSSYFSFVKYEGKKGKEMRRLVAIDSYIKARYEANPEKYLSETLGLKNPVVLIPVVKYNACIEIDGFRMHISSKSSGGKQIVYKPAMQLTVSYDTEKYIRNVVKLNSKPENYNITELDKVSTDENIELFDILTYKMTDTVLKVKFGDMGAKIISHRDAFEKLDVRKQCFVLAEILKIIHSNVVTGDLSFIGESKKSGVVSTNSVLSEVKGVKSIYLVHQSVTGLFEKKIDLLHM

SEQ ID NO: 21138 - protein, 1339 aa, unidentified
  REGION 1..1339: note = Cas Enzyme sequence
MKNFNDDYYAGFDIGTDSVGYAVADTDYNLCKFKGNAMWGVDLFEESNSAAERRILRSARRRGLRKRNRIEWLQMLFDEEISKVDNAFYQRLKESCLYLDDKSSNVPYAVFADGNYTDKEFHTDYPTIYHLRKELIKSSQPHDIRLVYLALHHIIKHRGHFLFDNMGSDFESESSFETLFDDLKLYLKEEYEIEFECNDSLRFSEILKDKTLKKTAKSSESYKLFGYSKRNNPYETALIDLICGRKVKFSDMFGDKSFDSEEVNGITFESGYDDNENTYRDLLQEKFELIEKAKAVYDWAILADILNGEKYNGKNYISFAKVKTYEEHSSDLKILKKFVKERCKPLYDEIFRITKDKLDNYTAYCGKYKENGKNGVIIYRPDVDPQDKFCKYLKKKFEKLDKTGYEEMFDKIENGTFMPKIVVKDNGVIPMQVNRSELKAILKNASTYLEFLNKKDENGISVSDKIVKIFEFRIPYYVGPLNNHSLKSWLVRSNEKIYPWNFDSVVDIEQSAENFINNLTSKCTYLPTKDVIPKNSILYSAFTVLNELNNLRLDGKKPDVSLKQAIFNDLFMTHKKVRRKDLLNYLKSEKGITPDITGIDGDFKSSMRSAIEMSQFNLTDSEKEDAIKAITVFGDDKKLLRKRLKRQLGSKLSDEDIMRISKLKYKDWGRLSKEFLTEIYNVDKNTGELQFNIIHALWQTNDNLMELLGSKYGFEQSRQNYLDGIQTGQSLEKMVENLYISPAVKRPVYQSLKIMHEINKIQGHAPKKIFVEMTRKDGVKGDKGRKESRKTKLVDLYKKCGEDSGELWESLEKTPDDEFKRDRLYFYYTQFGKCMYTGEPITLSELYNKNIYEVDHIFPRSKVKDDSLDNRVLVKKQVNAHKDNTYPLDSSIREKMKGSWHFLMDKGLISKKKYERLTRVTPLSDSELSDFIARQIVETSQSTKAVASLFKELYPDTEIVYVKASTVSEFRHEYDFLKCREVNDFHHAKDAYLNIVVGNVYNERCTHNKSIFIEGLKTKAYSLNKMFSFNTPNAWSIDDNKSIKIVRKTMNKNNIRFTRYAFTQNGGDQNNGGFFKRNLLKKGNGQVPVKQNSALSDIEKYGGYNKAYASYFSFIKYEDKNGKEMRRIVAINAYTHLLYEANPEKYLSETFGLKKPVVLIPVVKRDACIEIDGFRMHISGKTGSRITFKPAMQLTVSYDTEKYIRNVVKLNSKPENYNITELDKVSTDENIELFDILTYKMTDTVLKVKFGDMGVKIASHRDAFEKLDIRKQCFVLTEILKIIHCNAVLGNLTYIGEGSSSGRVGLNSVLSEVKGVKSIYLVHQSVTGLFEKKIDLLNM

SEQ ID NO: 21139 - protein, 1325 aa, unidentified
  REGION 1..1325: note = Cas Enzyme sequence
MKNFNNDYYAGFDIGTDSVGYAVADTDYNLCKFKGNAMWGVDLFEESNSAAERRTLRSARRRGLRKRNRIEWLQMLFDEEISKVDNAFFQRLKESCLYLDDKSSNVPYAVFADGNYTDKEFHTDYPTIYHLRKELIKSSQPHDIRLVYLALHHIIKHRGHFLFDNMGSDFENESSFEALFDDLKLYLKEEYEIEFECNDSLRFSEILKDKTLKKTAKSSESYKLFGYSKRNNPYETALIDLMCGRKVKFSDMFGDKSFDSEEVNGITFESGYDDNENTYRDLLQEKFELIEKAKAVYDWAILADILNGEKYISFAKVKTYEEHSSDLKMLKDFVKERCKSLYGEIFRITKDKLDNYTAYCGKYKENGRNGVIQYRTNQADFCKYLKKKFEKLDKTGYEEMFDKIENGTFMPKIVVKDNGVIPMQVNRSELKAILKNASTYLEFLNKKDENGISVSDKIVKIFEFRIPYYVGPLNNHSLKSWLVRSDEKIYPWNFDSVVDIEQSAENFINNLTSKCTYLPTKDVIPKNSILYSAFTVLNELNNLRLDGKKPDVSLKQAIFNDLFMTHKKVRRKDLLNYLKSEKGVAFDITGIDGDFKSSMRSAIEMSQFNLTDSEKEDAIKAITVFGDDKKLLRKRLKRQLGSKLSDEDIMRISKLKYKDWGRLSKEFLTEVYNVDKNTGELQFNIIHALWQTNDNLMELLGSKYGFEQSRQNYLDGIQTGQSLEKMVENLYISPAVKRPVYQSLKIMHEINKIQGHAPKKIFVEMTRKDGVKGDKGRKESRKTKLVDLYKKCGEDSGELWESLEKTPDDEFKRDRLYFYYTQFGKCMYTGEPINLSELYNQNIYDVDHIFPRSKVKDDSLDNRVLVKKQVNAHKDNTYPLDSSIREKMKGFWHLLMDKGLISKKKYERLTRATELTDSELSDFIARQIVETSQSTKAVASLFKELYPDTEIVYVKASTVSEFRHEYDFLKCREVNDFHHAKDAYLNIVVGNVYNERCTHNKSIFIEGLKTKAYSLNKMFSFNTPNAWSIDDNKSIKIVRKTMNKNNIRFTRYALTRNGGLFKMNPLKKGSGQVSLKQNSPLSDISKYGGYDKPTSSYFSFVKYEGKKGKEMRRLVAIDSYIKARYEANPEKYLSETLGLKNPVVLIPVVKYNACIEIDGFRMHISAKTGKQIIYKPAMQLTVSYDTEKYIRNVVKLNSKPENYNITELDKVSADENLKLFDILTYKMTDTVLKVKFGDMGVKIASHRDAFEKLDIRKQCFVLTEILKIIYCNAVLGNLTYIGEGSSSGRVGLNSVLSEVKGVKSIYLVHQSVTGLFEKKIDLLNM

SEQ ID NO: 21140 - protein, 1328 aa, unidentified
  REGION 1..1328: note = Cas Enzyme sequence
MKNFNDDYYAGFDIGTDSVGYAVADTDYNLCKFKGNAMWGVDLFEESNSAAERRTLRSARRRGLRKRNRIEWLQMLFDEEISKVDNAFFQRLKESCLYLDDKSSNVPYAVFADGNYTDKEFHTDYPTIYHLRKELIKSSQPHDIRLVYLALHHIIKHRGHFLFDNMGSDFESESSFETLFDDLKLYLKEEYEIEFECNDSLRFSEILKDKTLKKTAKSSESYKLFGYSKRNNPYETALIDLMCGRNVEFSDMFGDKSFDSEEVNGITFESGYDDNENTYRDLLQEKFEPIEKAKAVYDWAILADILNGEKYISFAKVKTYEEHSSDLKILKKFVKERCKPLYDEIFRITKDKLDNYTAYCGKYKENGKNGVIIYRPDVDPQDKFCKYLKKKFEKLDKTGYEEMFDKIENGTFMPKIVVKDNGIIPMQVNRSELKAILKNASTYLEFLNKKDENGISVSDKIVKIFEFRIPYYVGPLNNHSLKSWLVRSDEKIYPWNFDSVVDIEQSAENFINNLTSKCTYLPTKDVIPKNSILYSAFTVLNELNNLRLDGKKPDVSLKQAIFNDLFMTHKKVRRKDLLNYLKSEKGITPDITGIDGDFKSSMRSAIEMSQFNLTDSEKEDAIKAITVFGDDKKLLRKRLKRQLGSKLSDEDIMRISKLKYKDWGRLSKEFLTEVYNVDKNTGELQFNIIHALWQTNDNLMELLGSKYGFEQSRQNYLDGIQTGQSLEKMVENLYISPAVKRPVYQSLKIMHEINKIQGHAPKKIFVEMTRKDGVKGDKGRKESRKTKLVDLYKKCGEDSGELWESLEKTPDDEFKRDRLYFYYTQFGKCIYTGEPINLSELYNQNIYDVDHIFPRSKVKDDSLDNRVLVKKQVNAHKDNTYPLDSSIREKMKGFWHLLMDKGLISKKKYERLTRATPLSDSELSDFIARQIVETSQSTKAVASLFKELYPDTEIVYVKASTVSKFRHKYDFLKCREVNDFHHAKDAYLNIVVGNVYNERCTHNKSIFIKGLQTKKYSLNKMFSFNTPNAWSIDDNKSIKIVRKTMNKNNIRFTRYAFTKNGELFKRKPLKKGRGQAPLKQNSPLSDISKYGGYDRPTSSYFSFVKYEGKKGKEMRRLVAIDSYIKARYEANPEKYLSENLGLKNPVVLIPVVKYNACIEIDGFRMHISAKTDKRIQYKPAMQLTVSYDTEKYIRNIVKLNSKPENYNITELDKVSADENLKLFDILTSKMTDTILKVKFGDMGVKIASHRDAFEKLDVRKQCFVLAEILKIIHCNISEGNLRFIGGAKQSGSIKMSSVISGIKGVKSIYLVHQSVTGLFEKKIDLLHM

SEQ ID NO: 21141 - protein, 1330 aa, unidentified
  REGION 1..1330: note = Cas Enzyme sequence
MKNFNDDYYAGFDIGTDSVGYAVADTDYNLCKFKGNAMWGVDLFEESNSAAERRTLRSARRRGLRKRNRIEWLQMLFDEEISKVDNAFYQRLKESCLYLDDKSSNVPYAVFADGNYTDKEFHTDYPTIYHLRKELIKSSQPHDIRLVYLALHHIIKHRGHFLFDNMGSDFESESSFEALFDDLKLYLKEEYEIEFECNDSLRFSEILKNKTLKKTAKSSESYKLFGYSKKNNPYETALIDLMCGRKVKFSDMFGDKSFDSEEVNGITFESGYDDNENTYRDLLQEKFELIEKAKAVYDWAILADILNGEKYISFAKVKTYEEHSSDLKMLKDFVKERCKSLYGEIFRITKDKLDNYTAYCGKYKENGRNGVIQYRTNQADFCKYLKKKFEKLDKTGYEDMFDKIENGTFMPKIVVKDNGVIPMQVNRSELKAILKNASTYLEFLNNKDENGISVSDKIVKIFEFRIPYYVGPLNNHSLKSWLVRSDEKIYPWNFDSVVDIEQSAENFINNLTSKCTYLPTKDVVPKNSILYSAFTVLNELNNLRLDGKKPDVSLKQAIFNDLFMTHKKVRRKDLLNYLKSEKGVAFDITGIDGDFKSSMRSAIEMSQFNLTDSEKEDAIKAITVFGDDKKLLRKRLKRQLGSKLSDEDIMRISKLKYKDWGRLSKEFLTEVYNVDKNTGELQFNIIHALWQTNDNLMELLGSKYGFEQSRQNYLDGIQTGQSLEEMVENLYISPAVKRPVYQSLKIMHEINKIQGHAPKKIFVEMTRKDGVKGDKGRKESRKTKLVDLYKKCGEDSGELWESLEKTPDDEFKRDRLYFYYTQFGKCMYTGEPINLSELYNQNIYDVDHIFPRSKVKDDSLDNRVLVKKQVNAHKDNTYPLDSSIREKMKGFWHLLMDKGLISKKKYERLTRATELSDSELSDFIARQIVETSQSTKAVASLFKELYPDTEIVYVKASLVSEFRDESRGFGFLKCREVNDFHHAKDAYLNIVVGNVYNERCTHNKSIFIKGLQTKTYSLNKMFSFNTPNAWSIDDNKSIKIVRKTMNKNNIRFTRYALTRNGGLFKMNPLKKGSGQVSLKQNSPLSDISKYGGYDKPASSYFSFVKYEGKKGKEMRQLVAIDSYIKARYEANPEKYLSETIGLKNPVVLIPVVKYNACIEIDGFRMHISSKSGGGRQIVYKPAMQLTVSYDTEKYIRNVVKLNSKPENYNITELDKVSADENLKLFDILTSKMTDTILKVKFGDMGVKIASHRDVFEKLDVRKQCFVLAEILKIIHSNVVTGDLSFIGESKKSGVVSTNSVLSEVKGVKSIYLVHQSVTGLFEKKIDLLNM

SEQ ID NO: 21142 - protein, 1325 aa, unidentified
  REGION 1..1325: note = Cas Enzyme sequence
MKNFNDDYYVGFDIGTDSVGHAVADTDYNLCKFKGNAMWGVDLFEESNSAAERRTLRSARRRGLRKRNCIEWLQMLFDEEISKVDNAFFQRLKESCLYLDDKSSNVPYAVFADGNYTDKEFHTDYPTIYHLRKELIKSSQPHDVRLVYLALHHIIKHRGHFLFDNMGSDFESESSFETLFDDLKLYLKEEYEIEFECNDSLRFSEILKDKTLKKTAKSSESYKLFGYSKRNNPYETALIDLMCGRKVKFSDMFGDKSFDSEEVNGITFESGYDDNENTYRDLLQEKFELIEKAKAVYDWAILADILNGEKYISFAKVKTYEEHNSDLKMLKDFVKERCKSLYGEIFRITKDKLDNYTAYCGKYKENGRNGVIQYRTNQADFCKYLKKKFEKLDKTGYEEMFDKIENGTFMPKIVVKDNGVIPMQVNRSELKAILKNASTYLEFLNKKDENGISVSDKIVKIFEFRIPYYVGPLNNHSLKSWLVRSDEKIYPWNFDSVVDIEQSAENFINNLTSKCTYLPTKDVIPKNSILYSAFTVLNELNNLRLDGKKPDVSLKQAIFNDLFMTHKKVRRKDLLNYLKSEKGVAFDITGIDGDFKSSMRSAIEMSQFNLTDSEKEDAIKAITVFGDDKKLLRKRLKRQLGSKLSDEDIMRISKLKYKDWGRLSKEFLTEVYNVDKNTGELQFNIIHALWQTNDNLMELLGSKYGFEQSRQNYLDGIQTGQSLEKMVENLYISPAVKRPVYQSLKIMHEINKIQGHAPKKIFVEMTRKDGVKGDKGRKESRKTKLVDLYKKCGEDSGELWESLEKTPDDEFKRDRLYFYYTQFGKCMYTGEPINLSELYNQNIYDVDHIFPRSKVKDDSLDNRVLVKKQVNAHKDNTYPLDSSIREKMKGFWHLLMDKGLISKKKYERLTRATELTDSELSDFIARQIVETSQSTKAVASLFKELYPDTEIVYVKASTVSEFRHEYDFLKCREVNDFHHAKDAYLNIVVGNVYNERCTHNKSIFIEGLKTKAYSLNKMFSFNTPNAWSIDDNKSIKIVRKTMNKNNIRFTRYALTRNGGLFKMNPLKKGSGQVSLKQNSPLSDISKYGGYDKPTSSYFSFVKYEGKKGKEMRRLVAIDSYIKARYEANPEKYLSETLGLKNPVVLIPVVKYNACIEIDGFRMHISAKTGKQIIYKPAMQLTVSYDTEKYIRNVVKLNSKPENYNITELDKVSADENLKLFDILTYKMTDTVLKVKFGDMGVKIASHRDAFEKLDIRKQCFVLTEILKIIHCNAVLGNLTYIGEGSSSGRVGLNSVLSEVKGVKSIYLVHQSVTGLFEKKIDLLNM

SEQ ID NO: 21143 - protein, 1325 aa, unidentified
  REGION 1..1325: note = Cas Enzyme sequence
MKNFNDDYYVGFDIGTDSVGYAVADTDYNLCKFKGNAMWGVDLFEESNSAAERRTLRSARRRGLRKRNRIEWLQMLFDEEISKVDNAFFQRLKESCLYLEDKSSNVPYAVFADSNYTDIEFHTDYPTIYHLRKELIKSSQPHDIRLVYLALHHIIKHRGHFLFDNMGSDFESESSFEALFDDLKLYLKEEYEIEFECNDSLRFSEILKDKTLKKTAKSSESYKLFGYSKRNNPYETALIDLMCGRKVKFSDMFGYKSFDSEEVNGITFESGYDDNENTYRDLLQEKFELIEKAKAVYDWAILADILNGEKYISFAKVKTYEEHNSDLKMLKDFVKERCKSLYGEIFRITKDKLDNYTAYCGKYKENGRNGVIQYRTNQADFCKYLKKKFEKLDKTGYEEMFDKIENGTFMPKIVVKDNGVIPMQVNRSELKAILKNASTYLEFLNKKDENGISVSDKIVKIFEFRIPYYVGPLNNHSQKSWLVRSDEKIYPWNFDSVVDIEQSAENFINNLTSKCTYLPTKDVIPKNSILYSTFTVLNELNNLRLDGKKPDVSLKQAIFNDLFMTHKKVRRKDLLNYLKSEKGITPDITGIDGDFKSSMRSAIEMSQFNLTDSEKEDAIKAITVFGDDKKLLRKRLKRQLGSKLSDEDIMRISKLKYKDWGRLSKEFLTEVYNVDKNTGELQFNIIHALWQTNDNLMELLGSKYGFEQSRQNYLDGIQTGQSLEKMVENLYISPAVKRPVYQSLKIMHEINKIQGHAPKKIFVEMTRKDGVKGDKGRKESRKTKLVDLYKKCSEDSGELWESLEKTPDDEFKRDRLYFYYTQFGKCMYTGEPINLSELYNQNIYDVDHIFPRSKVKDDSLDNRVLVKKQVNAHKDNTYPLDSSIREKMKGFWHLLMDKGLISKKKYERLTRATELTDSELSDFIARQIVETSQSTKAVASLFKELYPDTEIVYVKASTVSEFRHEYDFLKCREVNDFHHAKDAYLNVVVGNVYNERCTHNKSIFIEGLKTKAYSLNKMFSFNTPNAWSIDDNKSIKIVRKTMNKNNIRFTRYALTRNGGLFKMNPLKKGSGQVSLKQNSPLSDISKYGGYDKPASSYFSFVKYEGKKGKEMRQLVAIDSYIKARYEANPEKYLSENLGLKNPVVLIPVVKYNACIEIDGFRMHISAKTGKQIIYKPAMQLTVSYDTEKYIRNVVKLNSKPENYNITELDKVSADENLKLFDILTSKMTDTILKVKFGDMGVKIASHRDAFEKLDIRKQCFVLTEILKIIHCNAVLGNLTYIGEGSSSGRVGLNSVLSEVKGVKSIYLVHQSVTGLFEKKIDLLHM

SEQ ID NO: 21144 - protein, 1325 aa, unidentified; identical to SEQ ID NO: 20077
  REGION 1..1325: note = Cas Enzyme sequence

SEQ ID NO: 21145 - protein, 1327 aa, unidentified
  REGION 1..1327: note = Cas Enzyme sequence
MKNFNDDYYAGFDIGTDSVGYAVADTDYNLCKFKGNAMWGVDLFEESNSAAERRTLRSARRRGLRKRNRIEWLQMLFDQEISKVDNAFFQRLKESCLYLEDKSSNVPYAVFADSNYTDKEFHTDYPTIYHLRKELIKSSQPHDIRLVYLALHHIIKHRGHFLFDNMGSDFESESSFEALFDDLKLYLKEEYEIEFECNDSLRFSEILKDKTLKKTAKSSESYKLFGYSKRNNPYETALIDLMCGRKVKFSDMFGDKSFDSEEVNGITFDSGYDDNENTYRDLLQEKFELIEKAKAVYDWAILADILNGEKYISFAKVKTYEEHSSDLKILKDFVKERCKSLYGEIFRITKDKLDNYTAYCGKYKENGRNGVIQYRTNQADFCKYLKKKFEKLDKTGYEEMFDKIENGTFMPKIVVKDNGVIPMQVNRSELKAILKNASTYLEFLNKKDENGISVSDKIVKIFEFRIPYYVGPLNNHSLKFWLVRSDEKIYPWNFDSVVDIEQSAENFINNLTSKCTYLPTKDVIPKNSILYSAFTVLNELNNLRLDGKKPDVSLKQAIFNDLFMTHKKVRRKDLLNYLKSEKGVTPDITGIDGDFKSSMRSAIEMSQFNLTDSEKEDAIKAITVFGDDKKLLRKRLKRQLGSKLSDEDIMRISKLKYKDWGRLSKEFLTEVYNVDKNTGELQFNIIHALWQTNDNLMELLGSKYGFEQSRQNYLDGIQTGQSLEKMVENLYISPAVKRPVYQSLKIMHEINKIQGHAPKKIFVEMTRKDGVKGDKGRKESRKTKLVDLYKKCGEDSGELWESLEKTPDDEFKRDRLYFYYTQFGKCMYTGEPINLSELYNQNIYDVDHIFPRSKVKDDSLDNRVLVKKQVNAHKDNTYPLDSSIREKMKGFWHLLMDKGLISKKKYERLTRATPLSDSELSDFIARQIVETSQSTKAVASLFKELYPDTEIVYVKASTVSEFRHEYDFLKCREVNDFHHAKDAYLNIVVGNVYNERCTHNKSIFIKGLQTKTYSLNKMFSFNTPNAWSIDDNKSIKIVRKTMNKNNIRFTRYALTRNGGLFKMNPLKKGSGQVSLKQNSPLSDISKYGGYDKPASSYFSFVKYEGKKGKEMRQLVAIDSYIKARYEANPEKYLSETLGLKNPVVLIPVVKYNACIEIDGFRMHISSKSNGGKTVVCKPAMQLTVSYDTEKYIRNIVKLNSKPENYNITELDKVSAEENLKLFDILTSKMTDTILKVKFGCMGTKILAHRDAFEKLDVRKQCFVLAEILKIIHSNVVTGDLSFIGESKKSGVVSTNSVLSEVKGVKSIYLVHQSVTGLFEKKIDLLHM

SEQ ID NO: 21146 - protein, 1325 aa, unidentified; identical to SEQ ID NO: 15483
  REGION 1..1325: note = Cas Enzyme sequence

SEQ ID NO: 21147 - protein, 1330 aa, unidentified
  REGION 1..1330: note = Cas Enzyme sequence
MKNFNDDYYAGFDIGTDSVGYAVADTDYNLCKFKGNAMWGVDLFEESNSAAERRIFRSARRRGLRKRNRIEWLQMLFDEEISKVDNAFYQRLKESCLYLDDKSSNVPYAVFADGNYTDKEFHTDYPTIYHLRKELIKSSQPHDIRLVYLALHHIIKHRGHFLFDNMGSDFESESSFEALFDDLKLYLKEEYEIEFECNDSLRFSEILKDKTLKKTAKSSESYKLFGYSKRNNPYETALIDLMCGRKVKFSDMFGDKSFDSEEVNGITFESGYDDNENTYRDLLQEKFELIEKAKAVYDWAILADILNGEKYISFAKVKTYEEHSSDLKMLKDFVKERCKSLYGEIFRITKDKLDNYTAYCGKYKENGRNGVIQYRTNQADFCKYLKKKFEKLDKTGYEEMFDKIENGTFMPKIVVKDNGVIPMQVNRNELKAILKNASTYLEFLNKKDENGISVSDKIVKIFEFRIPYYVGPLNNHSLKSWLVRSDEKIYPWNFDSVVDIEQSAENFINNLTSKCTYLPTKDVIPKNSILYSAFTVLNELNNLRLDGKKPDVSLKQAIFNDLFMTHKKVRRKDLLNYLKSEKGITPDITGIDGDFKSSMRSAIEMSQFNLTDSEKEDAIKAITVFGDDKKLLRKRLKRQLGSKLSDEDIMRISKLKYKDWGRLSKEFLTEVYNVDKNTGELQFNIIHALWQTNDNLMELLGSKYGFEQSRQNYLDGIQTGQSLEKMVENLYISPAVKRPVYQSLKIMHEINKIQCHAPKKIFVEMTRKDGVKGDKGRKESRKTKLVDLYKKCGEDSGELWESLEKTPDDEFKRDRLYFYYTQFGKCMYTGEPINLSELYNQNIYDVDHIFPRSKVKDDSLDNRVLVKKQVNAHKDNTYPLDSSIREKMKGFWHLLMDKGLISKKKYERLTRVTPLSDSELSDFIARQIVETSQSTKAVASLFKELYPDTEIVYVKASLVSEFRDESRGFGFLKCREVNDFHHAKDAYLNIVVGNVYNERCTHNKSIFIKGLQTKTYSLNKMFSFNTPNAWSIDDNKSIKIVRKTMNKNNIRFTRYALTRNGGLFKMNPLKKGSGQVSLKQNSPLSDISKYGGYDKPTSSYFSFVKYEGKKGKEMRQLVAIDSYIKAQYEANPEKYLSETLGLKNPVVLIPVVKYNACIEIDGFRMHISSKSNGGKKIVYKPAMQLTVSYDTEKYIRNVVKLNSMPENYNITERDKVSADENLKLFDILIFKMTETILKVKFGDMGVKIASHRDTFEKLDVRKQCFVLAEILKIIHSNVVTGDLTLIDEAKKAGVVSTNSVLSEIKGVKSIYLVHQSVTGLFEKKIDLLHM

SEQ ID NO: 21148 - protein, 1327 aa, unidentified
  REGION 1..1327: note = Cas Enzyme sequence
MKNFNDDYYTGFDIGTDSVGYAVADTDYNLCKFKGNAMWGVDLFEESNSAAERRTLRSARRRGLRKRNRIEWLQMLFDEEISKVDNAFYQRLKESCLYLDDKSSNVPYAVFADGNYTDKEFHTDYPTIYHLRKELIKSSQPHDIRLVYLALHHIIKHRGHFLFDNMGSDFESESSFEALFDDLKLYLKEECEIEFECNDSLRFSEILKDKTLKKTAKSSESYKLFGYSKRNNPYETALIDLMCGRKVKFSDMFGDKSFDSEEVNGITFESGYDDNENTYRDLLQEKFELIEKAKAVYDWAILADILNGEKYISFAKVKTYEEHSSDLKMLKDFVKERCKSLYGEIFRITKDKLDNYTAYCGKYKENGRNGVIQYRTNQADFCKYLKKKFEKLDKTGYEEMFDKIENGTFMPKIVVKDNGVIPMQVNRSELKAILKNASTYLEFLNKKDENGISVSDKIVKIFEFRIPYYVGPLNNHSLKSWLVRSDEKIYPWNFDSVVDIEQSAENFINNLTSKCTYLPTKDVIPKNSILYSAFTVLNELNNLRLDGKKPDVSLKQAIFNDLFMTHKKVRRKDLLNYLKSEKGVAFDITGIDGDFKSSMRSAIEMSQFNLTDSEKKDAIKAITVFGDDKKLLRKRLKRQLGSKLSDEDIMRISKLKYKDWGRLSKEFLTEVYNVDKNTGELQFNIIHALWQTNDNLMELLGSKYGFEQSRQNYLDGIQTGQSLEKMVENLYISPAVKRPVYQSLKIMHEINKIQGHAPKKIFVEMTRKDGVKGDKGRKESRKTKLVDLYKKCGEDSGELWESLEKTPDDEFKRDRLYFYYTQFGKCMYTGEPINLSELYNQNIYDVDHIFPRSKVKDDSLDNRALVKKQVNAHKDNTYPLDSSIREKMKGFWHLLMDKGLISKKKYERLTRVTPLSDSELSDFIARQIVETSQSTKAVASLFKELYPDTEIVYVKASTVSEFRHEYDFLKCREVNDFHHAKDAYLNIVVGNVYNERCTHNKSIFIEGLKTKAYSLNKMFSFNTPNAWSIDDNKSIKIVRKTMNKNNIRFTRYAFTKNGELFKRKPLKKGRGQAPLKQNSPLSDISKYGGYDKPTSSYFSFVKYEGKKGKEMRRLVAIDSYIKARYEANPEKYLSETLGLKNPVVLIPVVKYNACIEIDGFRMHISSKSSGGKQIVYKPAMQLTVSYDTEKYIRNVVKLNSKPENYNITELDKVSTDENIELFDILTYKMTDTVLKVKFGDMGAKIISHRDAFEKLDVRKQCFVLAEILKIIHSNVVTGDLSFIGESKKSGVVSTNSVLSEVKGVKSIYLVHQSVTGLLEKKIDLLHM

SEQ ID NO: 21149 - protein, 1330 aa, unidentified
  REGION 1..1330: note = Cas Enzyme sequence
MKNFNNDYYAGFDIGTDSVGYAVADTDYNLCKFKGNAMWGVDLFEESNSAAERRTLRSARRRGLRKRNRIEWLQMLFDEEISKVDNAFYQRLKESCLYLDDKSSNVPYAVFADGNYTDKEFHTDYPTIYHLRKELIKSSQPHDIRLVYLALHHIIKHRGHFLFDNMGSDFENESSFEALFDDLKLYLKEEYEIEFECNDLLRFSEVLKDKTLKKTAKSSESYKLFGYSKKNNPYETALIDLMCGRKVKFSDMFGDKSFDSEEVNGITFESGYDDNENTYRDLLQEKFELIEKAKAVYDWAILADILNGEKYISFAKVKTYEEHSSDLKMLKDFVKERCKSLYGEIFRITKDKLDNYTAYCGKYKENGRNGVIQYRTNQADFCKYLKKKFEKLDKTGYEEMFDKIENGTFMPKIVVKDNGVIPMQVNRSELKAILKNASTYLEFLNKKDENGISVSDKIVKIFEFRIPYYVGPLNNHSLKSWLVRSDEKIYPWNFDSVVDIEQSAENFINNLTSKCTYLPTKDVIPKNSILYSVFTVLNELNNLRLDGKKPDVSLKQAIFNDLFMTHKKVRRKDLLNYLKSEKGITPDITGIDGDFKSSMRSTIEMSQFNLTDSEKEDAIKAITVFGDDKKLLRKRLKRQLGSKLSDEDIMRISKLKYKDWGRLSKEFLTEVYNVDKNTGELQFNIIHALWQTNDNLMELLGSKYGFEQSRQNYLDGIQTGQSLEKMVENLYISPAVKRPVYQSLKIMHEINKIQGHAPKKIFVEMTRKDGVKGDKGRKESRKTKLVDLYKKCGEDSGELWESLEKTPDDEVKRDRLYFYYTQFGKCMYTGEPINLSELYNQNIYDVDHIFPRSKVKDDSLDNRVLVKKQVNAHKDNTYPLDSSIREKMKGFWHLLMDKGLISKKKYERLTRATELTDSELSDFIARQIVETSQSTKAVASLFKELYPDTEIVYVKASLVSEFRDESRGFGFLKCREVNDFHHAKDAYLNIVVGNVYNERCTHNKSIFIKGLQTKTYSLNKMFSFNTPNAWSIDDNKSIKIVRKTMNKNNIRFTRYALTRNGGLFKMNPLKKGRGQAPLKQNSPLSDISKYGGYDKPASSYFSFVKYEGKKGKEMRQLVAIDSYIKARYEANPEKYLSETLGLKNPVVLIPVVKYNACIEIDGFRMHISSKSNGGKKIVYKPAMQLTVSYDTEKYIRNVVKLNSMPENYNITERDKVSTDENLKLFDILIFKMTETILKVKFGDMGVKIASHRDAFEKLDVRKQCFVLAEILKIIHSNVVTGDLTLIDEAKKAGVVSTNSVLSEIKGVKSIYLVHQSVTGLFEKKIDLLHM

SEQ ID NO: 21150 - protein, 1327 aa, unidentified
  REGION 1..1327: note = Cas Enzyme sequence
MKNFNDDYYTGFDIGTDSVGYAVADTDYNLCKFKGNAMWGVDLFEESNSAAERRTLRSARRRGLRKRNRIEWLQMLFDEEISKVDNAFYQRLKESCLYLDDKSSNVPYAVFADGNYTDKEFHTDYPTIYHLRKELIKSSQPHDIRLVYLALHHIIKHRGHFLFDNMGSDFESESSFEALFDDLKLYLKEECEIEFECNDSLRFSEILKDKTLKKTAKSSESYKLFGYSKRNNPYETALIDLMCGRKVKFSDMFGDKSFDSEEVNGITFESGYDDNENTYRDLLQEKFELIEKAKAVYDWAILADILNGEKYISFAKVKTYEEHSSDLKMLKDFVKERCKSLYGEIFRITKDKLDNYTAYCGKYKENGRNGVIQYRTNQADFCKYLKKKFEKLDKTGYEEMFDKIENGTFMPKIVVKDNGVIPMQVNRSELKAILKNASTYLEFLNKKDENGISVSDKIVKIFEFRIPYYVGPLNNHSLKSWLVRSDEKIYPWNFDSVVDIEQSAENFINNLTSKCTYLPTKDVIPKNSILYSAFTVLNELNNLRLDGKKPDVSLKQAIFNDLFMTHKKVRRKDLLNYLKSEKGVAFDITGIDGDFKSSMRSAIEMSQFNLTDSEKEDAIKAITVFGDDKKLLRKRLKRQLGSKLSDEDIMRISKLKYKDWGRLSKEFLTEVYNVDKNTGELQFNIIHALWQTNDNLMELLGSKYGFEQSRQNYLDGIQTGQSLEKMVENLYISPAVKRPVYQSLKIMHEINKIQGHAPKKIFVEMTRKDGVKGDKGRKESRKTKLVDLYKKCGEDSGELWESLEKTPDDEFKRDRLYFYYTQFGKCMYTGEPINLSELYNQNIYDVDHIFPRSKVKDDSLDNRALVKKQVNAHKDNTYPLDSSIREKMKGFWHLLMDKGLISKKKYERLTRVTPLSDSELSDFIARQIVETSQSTKAVASLFKELYPDTEIVYVKASTVSEFRHEYDFLKCREVNDFHHAKDAYLNIVVGNVYNERCTHNKSIFIEGLKTKAYSLNKMFSFNTPNAWSIDDNKSIKIVRKTMNKNNIRFTRYALTRNGGLFKMNPLKKGSGQVSLKQNSPLSDISKYGGYDKPASSYFSFVKYEGKKGKEMRQLVAIDSYIKARYEANPEKYLSENLGLKNPVVLIPVVKYNACIEIDGFRMHISSKSSGGKQIVYKPAMQLTVSYDTEKYIRNIVKLNSMPENYNIKELDKVSTDENLKLFDILTSKMTDTILKVKFGDMGVKIASHRDAFEKLDVRKQCFVLAEILKIIHSNVVTGDLSFIGESKKSGVVSTNSVLSDVKGVKSIYLVHQSVTGLFEKKIDLLNI

SEQ ID NO: 21151 - protein, 1327 aa, unidentified
  REGION 1..1327: note = Cas Enzyme sequence
MKNFNDDYYTGFDIGTDSVGYAVADTDYNLCKFKGNAMWGVDLFEESNSAAERRTLRSARRRGLRKRNRIEWLQMLFDEEISKVDNAFYQRLKESCLYLDDKSSNVPYAVFADGNYTDKEFHTDYPTIYHLRKELIKSSQPHDIRLVYLALHHIIKHRGHFLFDNMGSDFESESSFEALFDDLKLYLKEECEIEFECNDSLRFSEILKDKTLKKTAKSSESYKLFGYSKRNNPYETALIDLMCGRKVKFSDMFGDKSFDSEEVNGITFESGYDDNENTYRDLLQEKFELIEKAKAVYDWAILADILNGEKYISFAKVKTYEEHSSDLKMLKDFVKERCKSLYGEIFRITKDKLDNYTAYCGKYKENGRNGVIQYRTNQADFCKYLKKKFEKLDKTGYEEMFDKIENGTFMPKIVVKDNGVIPMQVNRSELKAILKNASTYLEFLNKKDENGISVSDKIVKIFEFRIPYYVGPLNNHSLKSWLVRSDEKIYPWNFDSVVDIEQSAENFINNLTSKCTYLPTKDVIPKNSILYSAFTVLNELNNLRLDGKKPDVSLKQAIFNDLFMTHKKVRRKDLLNYLKSEKGVAFDITGIDGDFKSSMRSAIEMSQFNLTDSEKEDAIKAITVFGDDKKLLRKRLKRQLGSKLSDEDIMRISKLKYKDWGRLSKEFLTEVYNVDKNTGELQFNIIHALWQTNDNLMELLGSKYGFEQSRQNYLDGIQTGQSLEKMVENLYISPAVKRPVYQSLKIMHEINKIQGHAPKKIFVEMTRKDGVKGDKGRKESRKTKLVDLYKKCGEDSGELWESLEKTPDDEFKRDRLYFYYTQFGKCMYTGEPINLSELYNQNIYDVDHIFPRSKVKDDSLDNRVLVKKQVNAHKDNTYPLDSSIREKMKGFWHLLMDKGLISKKKYERLTRATPLSDSELSDFIARQIVETSQSTKAVASLFKELYPDTEIVYVKASTVSEFRHEYDFLKCREVNDFHHAKDAYLNIVVGNVYNERCTHNKSIFIKGLQTKTYSLNKMFSFNTPNAWSIDDNKSIKIVRKTMNKNNIRFTRYALTRNGGLFKMNPLKKGSGQVSLKQNSPLSDISKYGGYDKPASSYFSFVKYEGKKGKEMRQLVAIDSYIKARYEANPEKYLSETLGLKNPVVLIPVVKYNACIEIDGFRMHISSKSNGGKKIVYKPAMQLTVSYDTEKYIRNVVKLNSKPENYNITELDKVSAEENVELFDILIFKMTDTILKVKFGDMGVKIASHRDTFEKLDVRKQCFVLAEILKIIHSNVVTGDLTLIDEAKKAGVVSTNSVLSEIKSVKSIYLVHQSVTGLFEKKIDLLNM

SEQ ID NO: 21152 - protein, 1335 aa, unidentified
  REGION 1..1335: note = Cas Enzyme sequence
MKNFNNDYYVGFDIGTDSVGYAVADTDYNLCKFKGNAMWGVDLFEESNSAAERRTLRSARRRGLRKRNRIEWLQMLFDEEISKVDNAFFQRLKESCLYLDDKSSNVPYAVFADGNYTDKEFHTDYPTIYHLRKELIKSSQPHDIRLVYLALHHIIKHRGHFLFDNMGSDFENESSFEALFDDLKLYLKEEYEIEFECNDSLRFSEILKDKTLKKTAKSSESYKLFGYSKRNNPYETALIDLMCGRKVKFSDMFGDKSFDSEEVNGITFESGYDDNENTYRDLLQEKFELIEKAKAVYDWAILADILNGEKYISFAKVKTYEEHNSDLKILKKFFKERCKPLYDEIFRITKDKLDNYTAYCGKYKENGRNGVIQYRTNQADFCKYLKKKFDKIDKTGYEEMFDKIENGTFMPKIVVKDNGVIPMQVNRSELKAILKNASTYIEFLNKKDENGISVSDKIVKIFEFRIPYYVGPLNNHSLKSWLVRSDEKIYPWNFDSVVDIEQSAENFINNLTSKCTYLPTKDVIPKNSILYSAFTVLNELNNLRLDGKKPDVSLKQAIFNDLFMTHKKVRRKDLLNYLKSEKGITPDITGIDGDFKSSMRSAIEMSQFNLTDSEKEDAIKAITVFGDDKKLLRKRLKRQLGSKLSDEDIMRISKLKYKDWGRLSKEFLIEVYNVDKNTGELQFNIIHALWQTNDNLMELLGSKYGFEQSRQNYLDGIQTGQSLEKMVENLYISPAVKRPVYQSLKIMHEINKIQGHAPKKIFVEMTRKDGVKGDKGRKESRKTKLVDLYKKCGEDSGELWESLEKTPDDEFKRDRLYFYYTQFGKCMYTGEPINLSELYNQNIYDVDHIFPRSKVKDDSLDNRVLVKKQVNAHKDNTYPLDSSIREKMKGSWHFLMDKGLISKKKYERLTRVTELTDSELSDFIARQIVETSQSTKAVASLFKELYPDTEIVYVKASTVSEFRHEYDFLKCREVNDFHHAKDAYLNIVVGNVYNERCTHNKSIFIKGLQTKKYSLNKMFSFNTPNAWSIDDNKSIKIVRKTMNKNNIRFTRYALTRNGGLFKMNPLKKGSGQVSLKQNSPLSDISKYGGYDKPASSYFSFVKYEGKKGKEMRQLVAIDSYIKARYEANPEKYLSENLGLKNPVVLIPVVKYNACIEIDGFRMHISSKSNGGKKIVYKPAMQLTVSYDTEKYIRNVVKLNSMPENYNITEHDKVSADENIELFDILTSKMTDTILKVKFGDMGVKIASHRDAFEKLDVRKQCFVLAEILKIIHSNVVTGDLTLIDEAKKAGVVSTNSVLSEIKGVKSIYLVHQSVTGLFEKKIDLLNMQVIRKEDI

SEQ ID NO: 21153 - protein, 950 aa, unidentified
  REGION 1..950: note = Cas Enzyme sequence
QADFCKYLKKKFEKLDKTGYEEMFDKIENGTFMPKIVVKDNGVIPMQVNRSELKAILKNASTYLEFLNKKDENGISVSDKIVKIFEFRIPYYVGPLNNHSLKFWLVRSDEKIYPWNFDSVVDIEQSAENFINNLTSKCTYLPTKDVIPKNSILYSAFTVLNELNNLRLDGKKPDVSLKQAIFNDLFMTHKKVRRKDLLNYLKSEKGVAFDITGIDGDFKSSMHSAIEMSQFNLTDSEKEDAIKAITVFGDDKKLLRKRLKRQLGSKLSDEDIMRISKLKYKDWGRLSKEFLTEVYNVDKNTGELQFNIIHALWQTNDNLMELLGSKYGFEQSRQNYLDGIQTGQSLEKMVENLYISPAVKRPVYQSLKIMHEINKIQGHAPKKIFVEMTRKDGVKGDKGRKESRKTKLVDLYKKCGEDSGELWESLEKTPDDEFKRDRLYFYYTQFGKCMYTGEPINLSELYNQNIYDVDHIFPRSKVKDDSLDNRVLVKKQVNAHKDNTYPLDSSIREKMKGFWHLLMDKGLISKKKYERLTRATELTDSELSDFIARQIVETSQSTKAVASLFKELYPDTEIVYVKASTVSEFRHEYDFLKCREVNDFHHAKDAYLNIVVGNVYNERCTHNKSIFIKGLQTKTYSLNKMFSFNTPNAWSIDDNKSIKIVRKTMNKNNIRFTRYALTRNGGLFKMNPLKKGSGQVSLKQNSPLSDISKYGGYDKPASSYFSFVKYEGKKGKEMRQLVAIDSYIKARYEANPEKYLSETLGLKNPVVLIPVVKYNACIEIDGFRMHISSKSNGGKTVVCKPAMQLTVSYDTEKYIRNIVKLNSKPENYNITELDKVSAEENLKLFDILTSKMTDTILKVKFGCMGTKILAHRDAFEKLDVRKQCFVLAEILKIIHSNVVTGDLSFIGESKKSGVVSTNSVLSEVKGVKSIYLVHQSVTGLFEKKIDLLHM

SEQ ID NO: 21154 - protein, 1327 aa, unidentified
  REGION 1..1327: note = Cas Enzyme sequence
MKNFKDDYYAGFDIGTDSVGYAVADTDYNLCKFKCNAMWGVDLFEESNSAAERRTLRSARRRGLRKRNRIEWLQMLFDEEISKVDNAFFQRLKESCLYLDDKSSNVPYAVFADGNYTDKEFHTDYPTIYHLRKELIKSSQPRDIRLVYLALHHIIKHRGHFLFDNMGSDFESESSFEALFDDLKFYLKEEYEIEFECNDSLRFSEILKDKTLKKTAKSSESYKLFGYSKRNNPYETALIDLMCGRKVKFSDMFGDKSFDSDEVNGITFESGYDDNENTYRDLLQEKFELIEKAKAVYDWAILADILNGEKYISFAKVKTYEEHSSDLKILKDFVKERCKSLYGEIFRITKDKLDNYTAYCGKYKENGRNGVIQYRTNQMDFCKYLKKKFEKLDKTGYEEMFDKIENGTFMPKIVVKDNGVIPMQVNRSELKAILKNASTYLEFLNNKDENGISVSDKIVKIFEFRIPYYVGPLNNHSLKFWLVRSDEKIYPWNFDSVVDIEQSAENFINNLTSKCTYLPTKDVIPKNSILYSAFTVLNELNNLRLDGKKPDVSLKQAIFNDLFMTHKKVRRKDLLNYLKSEKGVAFDITGIDGDFKSSMHSAIEMSQFNLTDSEKEDAIKAITVFGDDKKLLRKRLKRQLGSKLSDEDIMRISKLKYKDWGRLSKEFLTEVYNVDKNTGELQFNIIHALWQTNDNLMELLGSKYGFEQSRQNYLDGIQTGQSLEKMVENLYISPAVKRPVYQSLKIMHEINKIQGHAPKKIFVEMTRKDGVKGDKGRKESRKTKLVDLYKKCGEDSGELWESLEKTPDDEFKRDRLYFYYTQFGKCMYTGEPINLSELYNQNIYDVDHIFPRSKVKDDSLDNRVLVKKQVNAHKDNTYPLDSSIREKMKGFWHLLMDKGLISKKKYERLTRATPLSDSELSDFIARQIVETSQSTKAVASLFKELYPDTEIVYVKASTVSEFRHEYDFLKCREVNDFHHAKDAYLNIVVGNVYNERCTHNKSIFIKGLQTKTYSLNKMFSFNTPNAWSIDDNKSIKIVRKTMNKNNIRFTRYALTRNGGLFKMNPLKKGSGQVSLKQNSPLSDISKYGGYDKPASSYFSFVKYEGKKGKEMRQLVAIDSYIKARYEANPEKYLSETLGLKNPVVLIPVVKYNACIEIDGFRMHISSKSNGGKTVVCKPAMQLTVSYDTEKYIRNIVKLNSKPENYNITELDKVSAEENLKLFDILTSKMTDTILKVKFGCMGTKILAHRDAFEKLDVRKQCFVLAEILKIIHSNVVTGDLSFIGESKKSGVVSTNSVLSEVKGVKSIYLVHQSVTGLFEKKIDLLHM

SEQ ID NO: 21155 - protein, 1325 aa, unidentified
  REGION 1..1325: note = Cas Enzyme sequence
MKNFNDDYYTGFDIGTDSVGYAVADTDYNLCKFKGNAMWGVDLFEESNSAAERRTLRSARRRGLRKRNRIEWLQMLFDEEISKVDNAFFQRLKESCLYLDDKSSNVPYAVFADGNYTDKEFHTDYPTIYHLRKELIKSSQPHDVRLVYLALHHIIKHRGHFLFDNMGSDFESESSFETLFDDLKLYLKEEYEIEFECNDSLRFSEILKDKTLKKTAKSSESYKLFGYSKRNNPYETALIDLMCGRKVKFSDMFGDKSFDSEEVNGITFESGYDDNENTYRDLLQEKFELIEKAKAVYDWAILADILNGEKYISFAKVKTYEEHNSDLKMLKDFVKERCKSLYGEIFRITKDKLDNYTAYCGKYKENGRNGVIQYRTNQADFCKYLKKKFEKLDKTGYEEMFDKIENGTFMPKIVVKDNGVIPMQVNRSELKAILKNASTYLEFLNKKDENGISVSDKIVKIFEFRIPYYVGPLNNHSLKSWLVRSDEKIYPWNFDSVVDIEQSAENFINNLTSKCTYLPTKDVIPKNSILYSAFTVLNELNNLRLDGKKPDVSLKQAIFNDLFMTHKKVRRKDLLNYLKSEKGVTPDITGIDGDFKSSMRSAIEMSQFNLTDSEKEDAIKAITVFGDDKKLLRKRLKRQLGSKLSDEDIMRISKLKYKDWGRLSKEFLTEVYNVDKNTGELQFNIIHALWQTNDNLMELLGSKYGFEQSRQNYLDGIQTGQSLEKMVENLYISPAVKRPVYQSLKIMHEINKIQGHAPKKIFVEMTRKDGVKGDKGRKESRKTKLVDLYKKCGEDSGELWESLEKTPDDEFKRDRLYFYYTQFGKCMYTGEPINLSELYNQNIYDVDHIFPRSKVKDDSLDNRVLVKKQVNAHKDNTYPLDSSIREKMKGFWHLLMDKGLISKKKYERLTRATELTDSELSDFIARQIVETSQSTKAVASLFKELYPDTEIVYVKASTVSEFRHEYDFLKCREVNDFHHAKDAYLNIVVGNVYNERCTHNKSIFIKGLQTKTYSLNKMFSFNTPNAWSIDDNKSIKIVRKTMNKNNIRFTRYALTRNGGLFKMNPLKKGSGQVSLKQNSPLSDISKYGGYDKPASSYFSFVKYEGKKGKEMRRLVAIDSYIKARYEANPEKYLSETLGLKNPVVLIPVVKYNACIEIDGFRMHISAKTDKRIQYKPAMQLTVSYDTEKYIRNVVKLNSKPENYNITELDKVSADENLKLFDILTSKMTDTILKVKFGDMGVKIASHRDAFEKLDVRKQCFVLAEILKIIHCNILEGDLTFIGGAKQSGSIKMSSVISGIKGVKSIYLVHQSVTGLFEKKIDLLHM

SEQ ID NO: 21156 - protein, 1330 aa, unidentified
  REGION 1..1330: note = Cas Enzyme sequence
MKNFNDDYYAGFDIGTDSVGYAVADTDYNLCKFKGNAMWGVDLFEESNSAAERRTLRSARRRGLRKRNRIEWLQMLFDEEISKVDNAFYQRLKESCLYLDDKSSNVPYAVFADGNYTDKEFHTDYPTIYHLRKELIKSSQPHDIRLVYLALHHIIKHRGHFLFDNMGADFESESSFETLFDDLKLYLKEEYEIEFECNDSLRFSEILKDKTLKKTAKSSESYKLFGYSKRNNPHETALIDLMCGRKVKFSDMFGDKSFDSEEVNGITFESGYDDNENTYRDLLQEKFELIEKAKAVYDWAILADILNGEKYNGKNYISFAKVKTYEEHSSDLKMLKDFVKERCKSLYGEIFRITKDKLDNYTAYCGKYKENGRNGVIQYRTNQADFCKYLKKKFETLDKTGYEEMFDKIENGTFMPKIVVKDNGVIPMQVNRSELKAILKNASTYLEFLNKKDENGISVSDKIVKIFEFRIPYYVGPLNNHSLKSWLVRSDEKIYPWNFDSVVDIEQSAENFINNLTSKCTYLPTKDVIPKNSILYSVFTVLNELNNLRLDGKKPDVSLKQAIFNDLFMTHKKVRRKDLLNYLKSEKGVAFDITGIDGDFKSSMRSAIEMSQFNLTDSEKEDTIKAITVFGDDKKLLRKRLKRQLGSKLSDEDIMRISKLKYKDWGRLSKEFLTEVYNVDKNTGELQFNIIHALWQTNDNLMELLGSKYGFEQSRQNYLDGIQTGQSLEKMVENLYISPAVKRPVYQSLKIMREINKIQGHAPKKIFVEMTRKDGVKGDKGRKESRKTKLVDLYKKCGEDSGELWESLEKTPDDEFKRDRLYFYYTQFGKCMYTGEPINLSELYNQNIYDVDHIFPRSKVKDDSLDNRALVKKQVNAHKDNTYPLDSSIREKMKGFWHLLMDKGLISKKKYERLTRATKLTDSELSDFIARQIVETSQSTKAVASLFKELYPDTEIVYVKASTVSEFRHEYDFLKCREVNDFHHAKDAYLNIVVGNVYNERCTHNKSIFIEGLKTKAYSLNKMFSFNTPNAWSIDDNKSIKIVRKTMNKNNIRFTRYAFTKNGELFKRKPLKKGRGQAPLKQNSPLSDISKYGGYDKPTSSYFSFVKYEGKKGKEMRRLVAIDSYIKARYEANPEKYLSETLGLKNPVVLIPVVKYNACIEIDGFRMHISAKTGKQIIYKPAMQLTVSYDTEKYIRNVVKLNSKPENYNITERDKVSTDENIELFDILISKMTDTILKVKFGSMGTKISAHRDAFEKLDVRKQCFVLAEILKIIHSNVVTGDLSFIGESKKSGVVSTNSVLSEIKGVKSIYLVHQSVTGLFEKKIDLLNM

SEQ ID NO: 21157 - protein, 1327 aa, unidentified; identical to SEQ ID NO: 21131
  REGION 1..1327: note = Cas Enzyme sequence

SEQ ID NO: 21158 - protein, 1327 aa, unidentified
  REGION 1..1327: note = Cas Enzyme sequence
MKNFNDDYYVGFDIGTDSVGYAVADTDYNLCKFKGNAMWGVDLFEESNSAAERRTLRSARRRGLRKRNRIEWLQMLFDEEISKVDNAFFQRLKESCLYLDDKSSNVPYAVFADGNYTDKEFHTDYPTIYHLRKELIKSSQPHDIRLVYLALHHIIKHRGHFLFDNMGSDFESESSFEALFDDLKLYLKEEYEIEFECNDSLRFSEILKDKTLKKTAKSSELYKLFGYSKRNNPYETALIDLMCGRKVKFSDMFGDKSFDSEEVNGITFESGYDDNENTYRDLLQEKFELIEKAKAVYDWAILADILNGEKYISFAKVKTYEEHSSDLKMLKDFVKERCKSLYDEIFRITKDKLDNYTAYCGKYKENGRNGVIQYRTNQADFCKYLKKKFEKLDKTGYEEMFDKIENGTFMPKIVVKDNGVIPMQVNRSELKAILKNASTYLEFLNKKDENGISVSDKIVKIFEFRIPYYVGPLNNHSLKFWLVRSDEKIYPWNFDSVVDIEQSAENFINNLTSKCTYLPTKDVIPKNSILYSAFTVLNELNNLRLDGKKPDVSLKQAIFNDLFMTHKKVRRKDLLNYLKSEKGVAFDITGIDGDFKSSMRSAIEMSQFNLTDSEKEDAIKAITVFGDDKKLLRKRLKRQLGSKLSDEDIMRISKLKYKDWGRLSKEFLTEVYNVDKNTGELQFNIIHALWQTNDNLMELLGSKYGFEQSRQNYLDGIQTGQSLEKMVENLYISPAVKRPVYQSLKIMHEINKIQGHAPKKIFVEMTRKDGVKGDKGRKESRKTKLVDLYKKCGEDSGELWESLEKTPDDEFKRDRLYFYYTQFGKCMYTGEPINLSELYNQNIYDVDHIFPRSKVKDDSLDNRVLVKKQVNAHKDNTYPLDSSIREKMKGFWHLLMDKGLISKKKYERLTRATELTDSELSDFIARQIVETSQSTKAVASLFKELYPDTEIVYVKASTVSEFRHEYDFLKCREVNDFHHAKDAYLNIVVGNVYNERCTHNKSIFIKGLQTKTYSLNKMFSFNTPNAWSIDDNKSIKIVRKTMNKNNIRFTRYALTRNGGLFKMNPLKKGSGQVSLKQNSPLSDISKYGGYDKPASSYFSFVKYEGKKGKEMRRLVAIDSYIKARYEANPEKYLSETLGLKNPVVLIPVVKYNACIEIDGFRMHISSKSNGGKKIVYKPAMQLTVSYDTEKYIRNVVKLNSMPENYNIKELDKVSADENLKLFDILTSKMTDTILKVKFGDMGVKIAAHRDAFEKLDVRKQCFVLAEILKIIHSNVVTGDLTLIDEAKKAGVVSTNSVLSEIKGVKSIYLVHQSVTGLFEKKIDLLNM

SEQ ID NO: 21159 - protein, 1325 aa, unidentified
  REGION 1..1325: note = Cas Enzyme sequence
MKNFNNDYYAGFDIGTDSVGYAVADTDYNLCKFKGNAMWGVDLFEESNSAAERRTLRSARRRGLRKRNRIEWLQMLFDEEISKVDNAFFQRLKESCLYLDDKSSNVPYAVFADGTYTDKEFHTDYPTIYHLRKELIKSSQPHDIRLVYLALHHIIKHRGHFLFDNMGSDFESESSFEALFDDLKLYLKEEYEIEFECNDSLRFSEILKDKTLKKTAKSSESYKLFGYSKRNNPYETALIDLMCGRKVKFSDMFGDKSFDSEEVNGITFESGYDDNENTYRDLLQEKFELIEKAKAVYDWAILADILNGEKYISFAKVKTYEEHNSDLKMLKDFVKERCKSLYGKIFRITKDKLDNYTAYCGKYKENGRNGVIQYRTNQADFCKYLKKKFEKLDKTGYEEMFDKIENGTFMPKIVVKDNGVIPMQVNRSELKAILKNASTYLEFLNKKDENGISVSDKIVKIFEFRIPYYVGPLNNHSLKSWLVRSDEKIYPWNFDSVVDIEQSAENFINNLTSKCTYLPTKDVIPKNSILYSAFTVLNELNNLRLDGKKPDVSLKQAIFNDLFMTHKKVRRKDLLNYLKSEKGVAFDITGIDGDFKSSMRSAIEMSQFNLTDSEKEDAIKAITVFGDDKKLLRKRLKRQLGSKLSDEDIMRISKLKYKDWGRLSKEFLTEVYNVDKNTGELQFNIIHALWQTNDNLMELLGSKYGFEQSRQNYLDGIQTGQSLEKMVENLYISPAVKRPVYQSLKIMHEINKIQGHAPKKIFVEMTRKDGVKGDKGRKESRKTKLVDLYKKCGEDSGELWESLEKTPDDEFKRDRLYFYYTQFGKCMYTGEPINLSELYNQNIYDVDHIFPRSKVKDDSLDNRVLVKKQVNAHKDNTYPLDSSIREKMKGFWHLLMDKGLISKKKYERLTRATELTDSELSDFIARQIVETSQSTKAVASLFKELYPDTEIVYVKASTVSEFRHEYDFLKCREVNDFHHAKDAYLNIVVGNVYNERCTHNKSIFIEGLKTKAYSLNKMFSFNTPNAWSIDDNKSIKIVRKTMNKNNIRFTRYALTRNGGLFKMNPLKKGSGQVSLKQNSPLSDISKYGGYDKPASSYFSFVKYEGKKGKEMRQLVAIDSYIKARYEANPEKYLSETLGLKNPVVLIPVVKYNACIEIDGFRMHISAKTGKQIIYKPAMQLTVSYDTEKYIRNVVKLNSKPENYNITELDKVSTDENLKLFDILTYKMTDTVLKVKFGDMGAKIIYHRDAFEKLDIRKQCFVLTEILKIIHCNAVLGNLTYIGEGSSSGRVGLNSVLSEVKGVKSIYLVHQSVTGLFEKKIDLLHM

SEQ ID NO: 21160 - protein, 1116 aa, unidentified
  REGION 1..1116: note = Cas Enzyme sequence
LKKTAKSSESYKLFGYSKRNNPYETALIDLMCGRKVKFSDMFGDKSFDSEEVNGITFESGYDDNENTYRDLLQEKFELIEKAKAVYDWAILADILNGEKYISFAKVKTYEEHNSDLKMLKDFVKERCKSLYGEIFRITKDKLDNYTAYCGKYKENGRNGVIQYRTNQADFCKYLKKKFEKLDKTGYEEMFDKIENGTFMPKIVVKDNGVIPMQVNRSELKAILKNASTYLEFLNNKDENGISVSDKIVKIFEFRIPYYVGPLNNHSLKSWLVRSDEKVYPWNFDSVVDIEQSAENFINNLTSKCTYLPTKDVIPKNSILYSAFTVLNELNNLRLDGKKPDVSLKQAIFNDLFMTHKKVRRKDLLNYLKSEKGITPDITGIDGDFKSSMRSAIEMSQFNLTDSEKEDAIKAITVFGDDKKLLRKRLKRQLGSKLSDEDIMRISKLKYKDWGRLSKEFLTEVYNVDKNTGELQFNIIHALWQTNDNLMELLGSKYGFEQSRQNYLDGIQTGQSLEKMVENLYISPAVKRPVYQSLKIMHEINKIQGHAPKKIFVEMTRKDGVKGDKGRKESRKTKLVDLYKKCGEDSGELWESLEKTPDDEFKRDRLYFYYTQFGKCMYTGEPINLSELYNQNIYDVDHIFPRSKVKDDSLDNRVLVKKQVNAHKDNTYPLDSSIREKMKGFWHLLMDKGLISKKKYERLTRATPLSDSELSDFIARQIVETSQSTKAVASLFKELYPDTEIVYVKASTVSEFRHEYDFLKCREVNDFHHAKDAYLNIVVGNVYNERCTHNKSIFIKGLQIKTYSLNKMFSFNTPNAWSIDDNKSIKIVRKTMNKNNIRFTRYALTRNGGLFKMNPLKKGRGQAPLKQNSPLSDISKYGGYDKPTSSYFSFVKYEGKKGKEMRQLVAIDSYIKARYEANPEKYLSETLGLKNPVVLIPVVKYNACIEIDGFRMHISSKSNGGKTVVCKPAMQLTVSYDTEKYIRNIVKLNSKPENYNITELDKVSADENLKLFDILTSKMTDTILKVKFGSMGTKISAHRDAFEKLDVRKQCFVLAEILKIIHSNVLTGDLSFIGESKKSGVVSTNSVLSEVKGVKSIYLVHQSVTGLFEKKIDLLHM

SEQ ID NO: 21161 - protein, 1330 aa, unidentified
  REGION 1..1330: note = Cas Enzyme sequence
MKNFNDDYYTGFDIGMDSVGYAVADTDYNLCKFKGNAMWGVDLFEESNSAAERRTLRSARRRGLRKRNRIEWLQMLFDEEISKVDNAFFQRLKESCLYLDDKSSNVPYAVFADGNYTDKEFHTDYPTIYHLRKELIKSSQPHDIRLVYLALHHIIKHRGHFLFDNMGSDFESESSFETLFDDLKLYLKEEYEIEFECNDSLRFSEILKDKTLKKTAKSSESYKLFGYSKRNNPYETALIDLMCGRKVKFSDMFGDKSFDSEEVNGITFESGYDDNENTYRDLLQEKFALIEKAKAVYDWAILADILNGEKYISFAKVKTYEEHSSDLKMLKDFVKERCKSLYGEIFRITKDKLDNYTAYCGKYKENGKNGVIIYRPDVDPQDKFCKYLKKKFEKLDKTGYEEMFDKIENGTFMPKIVVKDNGVIPMQVNRSELKAILKNASTYLEFLNNKDENGISVSDKIVKIFEFRIPYYVGPLNNHSLKSWLVRSDEKIYPWNFDSVVDIEQSAENFINNLTSKCTYLPTKDVIPKNSILYSAFTVLNELNNLRLDGKKPDVSLKQAIFNDLFMTHKKVRRKDLLNYLKSEKGVAFDITGIDGDFKSSMRSAIEMSQFNLTDSEKEDAIKAITVFGDDKKLLRKRLKRQLGSKLSDEDIMRISKLKYKDWGRLSKEFLTEVYNVDKNTGELQFNIIHALWQTNDNLMELLGSKYGFEQGRQNYLDGIQTGQSLEKMVENLYISPAVKRPVYQSLKIMHEINKIQGHAPKKIFVEMTRKDGVKGDKGRKESRKTKLVDLYKKCGEDSGELWESLEKTPDDEFKRDRLYFYYTQFGKCMYTGEPINLSELYNQNIYDVDHIFPRSKVKDDSLDNRVLVKKQVNAHKDNTYPLDSSIREKMKGFWHLLMDKGLISKKKYERLTRATELTDSELSDFIARQIVETSQSTKAVASLFKELYPDTEIVYVKASTVSEFRHEYDFLKCREVNDFHHAKDAYLNIVVGNVYNERCTHNKSIFIKGLQTKTYSLNKMFSFNTPNAWSIDDNKSIKIVRKTMNKNNIRFTRYALTRNGGLFKMNPLKKGSGQVSLKQNSPLSDISKYGGYDKPASSYFSFVKYEGKKGKEMRQLVAIDSYIKARYEANPEKYLSETLGLKNPVVLIPVVKYNACIEIDGFRMHISSKSNGGKKIVYKPAMQLTVSYDTEKYIRNVVKLNSMPENYNITERDKVSTDENIELFDILIFKMTDTILKVKFGDMGVKIASHRDAFEKLDVRKQCFVLAEILKIIHSNVVTGDLILINEAKKAGVVSTNSVLSEIKGVKSIYLVHQSVTGLFEKKIDLLHM

SEQ ID NO: 21162 - protein, 1325 aa, unidentified
  REGION 1..1325: note = Cas Enzyme sequence
MKNFNNDYYAGFDIGTDSVGYAVADTDYNLCKFKGNAMWGVDLFEESNSAAERRTLRSARRRGLRKRNRIEWLQMLFDEEISKVDNAFFQRLKESCLYLDDKSSNVPYAVFADGNYTDKEFHTDYPTIYHLRKELIKSSQPHDIRLVYLALHHIIKHRGHFLFDNMGSDFENESSFEALFDDLKLYLKEEYEIEFECNDSLRFSEILKDKTLKKTAKSSESYKLFGYSKRNNPYETALIDLMCGRKVKFSDMFGDKSFDSEEVNGITFESGYDDNENTYRDLLQEKFELIEKAKAVYDWAILADILNGEKYISFAKVKTYEEHSSDLKMLKDFVKERCKSLYGEIFRITKDKLDNYTAYCGKYKENGRNGVIQYRTNQADFCKYLKKKFEKLDKTGYEEMFDKIENGTFMPKNVVKDNGVIPMQVNRSELKAILKNASTYLEFLNKKDENGISVSDKIVKIFEFRIPYYVGPLNNHSLKSWLVRSDEKIYPWNFDSVVDIEQSAENFINNLTSKCTYLPTKDVIPKNSILYSAFTVLNELNNLRLDGKKPDVSLKQAIFNDLFMTHKKVRRKDLLNYLKSEKGVAFDITGIDGDFKSSMRSAIEMSQFNLTDSEKEDAIKAITVFGDDKKLLRKRLKRQLGSKLSDEDIMRISKLKYKDWGRLSKEFLTEVYNVDKNTGELQFNIIHALWQTNDNLMELLGSKYGFEQSRQNYLDGIQTGQSLEKMVENLYISPAVKRPVYQSLKIMHEINKIQGHAPKKIFVEMTRKDGVKGDKGRKESRKTKLVDLYKKCGEDSGELWESLEKTPDDEFKRDRLYFYYTQFGKCMYTGEPINLSELYNQNIYDVDHIFPRSKVKDDSLDNRVLVKKQVNAHKDNTYPLDSSIREKMKGFWHLLMDKGLISKKKYERLTRATELTDSELSDFIARQIVETSQSTKAVASLFKELYPDTEIVYVKASTVSEFRHEYDFLKCREVNDFHHAKDAYLNIVVGNVYNERCTHNKSIFIEGLKTKAYSLNKMFSFNTPNAWSIDDNKSIKIVRKTMNKNNIRFTRYALTRNGGLFKMNPLKKGSGQVSLKQNSPLSDISKYGGYDKPTSSYFSFVKYEGKKGKEMRRLVAIDSYIKARYEANPEKYLSETLGLKNPVVLIPVVKYNACIEIDGFRMHISAKTGKQIIYKPAMQLTVSYDTEKYIRNVVKLNSKPENYNITELDKVSADENLKLFDILTYKMTDTVLKVKFGDMGVKIASHRDAFEKLDIRKQCFVLTEILKIIHCNAVLGNLTYIGEGSSSGRVGLNSVLSEVKGVKSIYLVHQSVTGLFEKKIDLLNM

SEQ ID NO: 21163 - protein, 1325 aa, unidentified
  REGION 1..1325: note = Cas Enzyme sequence
MKNFNDDYYTGFDIGTDSVGYAVADTDYNLCKFKGNAMWGVDLFEESNSAAERRTLRSARRRGLRKRNRIEWLQMLFDEEISKVDNAFYQRLKESCLYLDDKSSNVPYAVFADGNYTDKEFHTDYPTIYHLRKELIKSSQPHDIRLVYLALHHIIKHRGHFLFDNMGSDFESESSFEALFDDLKLYLKEECEIEFECNDSLRFSEILKDKTLKKTAKSSESYKLFGYSKRNNPYETALIDLMCGRKVKFSDMFGDKSFDSEEVNGITFESGYDDNENTYRDLLQEKFELIEKAKAVYDWAILADILNGEKYISFAKVKTYEEHSSDLKMLKDFVKERCKSLYGEIFRITKDKLDNYTAYCGKYKENGRNGVIQYRTNQADFCKYLKKKFEKLDKTGYEEMFDKIENGTFMPKIVVKDNGVIPMQVNRSELKAILKNASTYLEFLNKKDENGISVSDKIVKIFEFRIPYYVGPLNNHSLKSWLVRSDEKIYPWNFDSVVDIEQSAENFINNLTSKCTYLPTKDVIPKNSILYSAFTVLNELNNLRLDGKKPDVSLKQAIFNDLFMTHKKVRRKDLLNYLKSEKGVAFDITGIDGDFKSSMRSAIEMSQFNLTDSEKEDAIKAITVFGDDKKLLRKRLKRQLGSKLSDEDIMRISKLKYKDWGRLSKEFLTEVYNVDKNTGELQFNIIHALWQTNDNLMELLGSKYGFEQSRQNYLDGIQTGQSLEKMVENLYISPAVKRPVYQSLKIMHEINKIQGHAPKKIFVEMTRKDGVKGDKGRKESRKTKLVDLYKKCGEDSGELWESLEKTPDDEFKRDRLYFYYTQFGKCMYTGEPINLSELYNQNIYDVDHIFPRSKVKDDSLDNRALVKKQVNAHKDNTYPLDSSIREKMKGFWHLIMDKGLISKKKYERLTRVTPLSDSELSDFIARQIVETSQSTKAVASLFKELYPDTEIVYVKASTVSEFRHEYDFLKCREVNDFHHAKDAYLNIVVGNVYNERCTHNKSIFIEGLKTKAYSLNKMFSFNTPNAWSIDDNKSIKIVRKTMNKNNIRFTRYALTRNGGLFKMNPLKKGSGQVSLKQNSPLSDISKYGGYDKPTSSYFSFVKYEGKKGKEMRQLVAIDSYIKAQYEANPEKYLSETLGLKNPVVLIPVVKYNACIEIDGFRMHISAKTGKQIIYKPAMQLTVSYDTEKYIRNVVKLNSKPENYNITELDKVSTNENIELFDILTYKMTDTVLKVKFGDMGAKIISHRDAFEKLDIRKQCFVLTEILKIIHCNAVLGNLTYIGEGSSSGRVGLNSVLSEVKGVKSIYLVHQSVTGLFEKKIDLLHM

SEQ ID NO: 21164 - protein, 1325 aa, unidentified
  REGION 1..1325: note = Cas Enzyme sequence
MKNFNDDYYTGFDIGTDSVGYAVADTDYNLCKFKGNAMWGVDLFEESNSAAERRTLRSARRRGLRKRNRIEWLQMLFDEEISKVDNAFFQRLKESCLYLDDKSSNVPYAVFADGNYTDKEFHTDYPTIYHLRKELIKSSQPHDIRLVYLALHHIIKHRGHFLFDNMGSDFESESSFETLFEDLKLYLKEEYEIEFECNDSLRFSEILKDKTLKKTAKSSESYKLFGYSKRNNPYETALIDLMCGRKVKFSDMFGDKSFDSEEVNGITFESGYDDNENTYRDLLQEKFELIEKAKAVYDWTILADILNGEKYISFAKVKTYEEHSSDLKILKKFVKERCKSLYGEIFRITKDKLDNYTAYCGKYKENGRNGVIQYRTNQADFCKYLKKKFEKLDKTDYEEMFDKIENGTFMPKIVVKDNGVIPMQVNRSELKAILKNASTYLEFLNKKDENGISVSDKIVKIFEFRIPYYVGPLNNHSLKSWLVRSDEKIYPWNFDSVVDIEQSAENFINNLTSKCTYLPTKDVIPKNSILYSAFTVLNELNNLRLDGKKPDVSLKQAIFNDLFMTHKKVRRKDLLNYLKSEKGITPDITGIDGDFKSSMRSAIEMSQFNLTDSEKEDAIKAITVFGDDKKLLRKRLKRQLGSKLSDEIIMRISKLKYKDWGRLSKEFLTEVYNVDKNTGELQFNIIHALWQTNDNLMELLGSKYGFEQSRQNYLDGIQTGQSLEKMVENLYISPAVKRPVYQSLKIMHEINKIQGHAPKKIFVEMTRKDGVKGDKGRKESRKTKLVDLYKKCGEDSGELWESLEKTPDDEFKRDRLYFYYTQFGKCMYTGEPINLSELYNQNIYDVDHIFPRSKVKDDSLDNRVLVKKQVNAHKDNTYPLDSSIREKMKGFWHLLMDKGLISKKKYERLTRATELTDSELSDFIARQIVETSQSTKAVASLFKELYPDTEIVYVKASTVSEFRHEYDFLKCREVNDFHHAKDAYLNIVVGNVYNERCTHNKSIFIEGLKTKAYSLNKMFSFNTPNAWSIDDNKSIKIVRKTMNKNNIRFTRYAFTKNGELFKRKPLKKGRGQAPLKQNSPLSDISKYGGYDKPTSSYFSFVKYEGKKGKEMRRLVAIDSYIKAQYEANPEKYLSETLGLKNPVVLIPVVKYNACIEIDGFRMHISAKTDKRIQYKPAMQLTVSYDTEKYIRNVVKLNSEPENYNITELDKVSADENLKLFDILTSKMTDTILKVKFGDMGVKIASHRDAFEKLDVRKQCFVLAEILKIIHCNILEGDLTFIGGAKQSGSIKMSSAISGIKGVKSIYLVHQSVTGLFEKKIDLLHM

SEQ ID NO: 21165 - protein, 1338 aa, unidentified
  REGION 1..1338: note = Cas Enzyme sequence
MKNFNDDYYVGFDIGTDSVGYAVADTDYNLCKFKGNAMWGVDLFEESNSAAERRTLRSARRRGLRKRNRIEWLQMLFDEEISKVDNAFYQRLKESCLYLDDKSSNVPYAVFADGNYTDKEFHTDYPTIYHLRKELIKSSQPHDIRLVYLALHHIIKHRGHFLFDNMGSDFESESSFEALFDDLKLYLKEEYEIEFECNDSLRFSEILKDKTLKKTAKSSESYKLFGYSKRNNPYETALIDLMCGRKVKFSDMFGDKLFDSEEVNGITFESGYDDNENTYRDLLQEKFEPIEKAKAVYDWAILADILNGEKYNGKKYISFAKVKTYEEHSSDLKMLKKFVKERCKPLYDEIFRITKDKLDNYTAYCGKYKENGKNGVIIYRPDVDPQDKFCKYLKKKFEKLDKTGYEEMFDKIENGTFMPKIVVKDNGIIPMQVNRSELKAILKNASTYLEFLNKKDENGISVSDKIVKIFEFRIPYYVGPLNNHSLKFWLVRSDEKIYPWNFDSVVDIEQSAENFINNLTSKCTYLPTKDVIPKNSILYSAFTVLNELNNLRLDGKKPDVSLKQAIFNDLFMTHKKVRRKDLLNYLKSEKGITPDITGIDGDFKSSMRSAIEMSQFYLTNSEKEDAIKAITVFGDDKKLLRKRLKRQLGSKLSDEDIMRISKLKYKDWGRLSKEFLTEVYNVDKNTGELQFNIIHALWQTNDNLMELLGSKYGFEQSRQNYLDGIQTGQSLEKMVENLYISPAVKRPVYQSLKIMHEINKIQGHAPKKIFVEMTRKDGVKGDKGRKDSRKTKLVDLYKKCGEDSGELWESLEKTPDDEFKRDRLYFYYTQFGKCMYTGEPINLSELYNQNIYDVDHIFPRSKVKDDSLDNRVLVKKQVNAHKDNTYPLDSSIREKMKGFWHLLMDKGLISKKKYERLTRATELTDSELSDFIARQIVETSQSTKAVASLFKELYPNTEIVYVKASLVSEFRNESRGFGFLKCREVNDFHHAKDAYLNIVVGNVYNERCTHNKSIFIKGLQTKTYSLNKMFSFNTPNAWSIDDNKSIKIVRKTMNKNNIRFTRYALTRNGGLFKMNPLKKGSGQVSLKQNSPLSDISKYGGYDKPTSSYFSFVKYEGKKGKEMRRLVAIDSYIKARYEANPEKYLSETLGLKNPVVLIPVVKYNACIEIDGFRMHISSKSGGGRQIVYKPAMQLTVSYDTEKYIRNVVKLNSKPENYNITELDKVSADENLKLFDILTSKMTETILKVKFGDMGVKIASHRDAFEKLDVRKQCFVLAEILKIIHCNILEGDLTFIGGAKQSGSIKMSSAISGIKGVKSIYLVHQSVTGLFEKKIDLLHM

SEQ ID NO: 21166 - protein, 1084 aa, unidentified
  REGION 1..1084: note = Cas Enzyme sequence
MCGRKVKFSDMFGDKSFDSEEVNGITFESGYDDNENTYRDLLQEKFELIEKAKAVYDWAILADILNGEKYISFAKVKTYEEHSSDLKMLKDFVKERCKSLYGEIFRITKDKLDNYTAYCGKYKENGRNGVIQYRTNQADFCKYLKKKFEKLDKTGYEEMFDKIENGTFMPKIVVKDNGVIPMQVNRSELKAILKNASTYLEFLNKKDENGISVSDKIVKIFESRIPYYVGPLNNHSLKSWLVRSDEKIYPWNFDSVVDIEQSAENFINNLTSKCTYLPTKDVIPKNSILYSAFTVLNELNNLRLDGKKPDVSLKQAIFNDLFMTHKKVRRKDLLNYLKSEKGVAFDITGIDGDFKSSMRSAIEMSQFNLTDSEKEDAIKAITVFGDDKKLLRKRLKRQLGSKLSDEDIMRISKLKYKDWGRLSKEFLTEVYNVDKNTGELQFNIIHALWQTNDNLMELLGSKYGFEQSRQNYLDGIQTGQSLEKMVENLYISPAVKRPVYQSLKIMHEINKIQGHAPKKIFVEMTRKDGVKGDKGRKESRKTKLVDLYKKCGEDSGELWESLEKTPDDEFKRDRLYFYYTQFGKCMYTGEPINLSELYNQNIYDVDHIFPRSKVKDDSLDNRVLVKKQVNAHKDNTYPLDSSIREKMKGFWHLLMDKGLISKKKYERLTRATELTDSELSDFIARQIVETSQSTKAVASLFKELYPDTEIVYVKASTVSEFRHEYDFLKCREVNDFHHAKDAYLNIVVGNVYNERCTHNKSIFIEGLKTKAYSLNKMFSFNTPNAWSIDDNKSIKIVRKTMNKNNIRFTRYALTRNGGLFKMNPLKKGSGQVSLKQNSPLSDISKYGGYDKPTSSYFSFVKYEGKKGKEMRRLVAIDSYIKARYEANPEKYLSETLGLKNPVVLIPVVKYNACIEIDGFRMHISAKTGKQIIYKPAMQLTVSYDTEKYIRNVVKLNSKPENYNITELDKVSADENLKLFDILTYKMTDTVLKVKFGDMGVKIASHRDAFEKLDIRKQCFVLTEILKIIHCNAVLGNLTYIGEGSSSGRVGLNSVLSEVKGVKSIYLVHQSVTGLFEKKIDLLNM

SEQ ID NO: 21167 - protein, 1327 aa, unidentified
  REGION 1..1327: note = Cas Enzyme sequence
MKNFNDDYYAGFDMGTDSVGYAVADTDYNLCKFKGNAMWGVDLFEESNSAAERRTLRSARRRGLRKRNRIEWLQMLFDKEISKVDNAFFQRLKESCLYLDDKSSNVPYAVFADGNYTDKEFHTDYPTIYHLRKELIKSSQPHDIRLVYLALHHIIKHRGHFLFDNMGSDFESESSFEALFDDLKLYLKEEYEIEFECNDSLRFSEILKDKTLKKTAKSSESYKFFGYSKRNNPYETALIDLMCGRKVKFSDMFGDKSFDSEEVNGITFESGYDDNENTYRDLLQEKFELIEKAKAVYDWAILADILNGEKYISFAKVKTYEEHSSDLKMLKDFVKERCKSLYDEIFRITKDKLDNYTAYCGKYKENGRNGVIQYRTNQADFCKYLKKKFEKLDKTGYEEMFDKIENGTFMPKIVVKDNGVIPMQVNRSELKAILKNASTYLEFLNKKDENGISVSDKIVKIFEFRIPYYVGPLNNHSKKSWLARSDEKIYPWNFESVVDIEQSAENFINNLTSKCTYLPTKDVIPKNSILYSAFTVLNELNNLRLDGKKPDVSLKQAIFNDLFMTHKKVRRKDLLNYLKSEKSVAFDITGIDGDFKSSMRSAIEMSQFNLTDSEKEDAIKAITVFGDDKKLLRKRLKRQLGSKLSDEDIMRISKLKYKDWGRLSKEFLTEVYNVDKNTGELQFNIIHALWQTNDNLMELLGSKYGFEQSRQNYLDGIQTGQSLEKMVENLYISPAVKRPVYQSLKIMHEINKIQGHAPKKIFVEMTRKDGVKGDKGRKESRKTKLVDLYKKCGEDSGELWESLEKTPDDEFKRDRLYFYYTQFGKCMYTGEPINLSELYNQNIYDVDHIFPRSKVKDDSLDNRVLVKKQVNAHKDNTYPLDSSIREKMKGFWHLLMDKGLISKKKYERLTRATELTDSELSDFIARQIVETSQSTKAVASLFKELYPDTEIVYVKASTVSEFRHEYDFLKCREVNDFHHAKDAYLNIVVGNVYNERCTHNKSIFIKGLQTKTYSLNKMFSFNTQNAWSIDDNKSIKIVRKTMNKNNIRFTRYALTRNGGLFKMNPIKKGSGQVSLKQNSPLSDISKYGGYDKPASSYFSFVKYEGKKGKEMRQLVAIDSYIKARYEANPEKYLSETLGLKNPVVLIPVVKYNACIEIDGFRMHVSSKSNGGKTVVCKPAMQLTVSYDTEKYIRNIVKLNSKPENYNITELDKVSADENVKLFDTLISKMTDTILKVKFGSMGTKISAHRDAFEKLDVRKQCFVLAEILKIIHSNVVTGDLSFIGESKKSGVVSTNSVLSEVKGVKSIYLVHQSVTGLFEKKIDLLHM

SEQ ID NO: 21168 - protein, 1327 aa, unidentified
  REGION 1..1327: note = Cas Enzyme sequence
MKNFNDDYYVGFDIGTDSVGYAVADTDYNLCKFKGNAMWGVDLFEESNSAAERRTLRSARRRGLRKRNRIEWLQMLFDEEISKVDNAFFQRLKESCLYLDDKSSNVPYAVFADGNYTDKEFHTDYPTIYHLRKELIKSSQPHDIRLVYLALHHIIKHRGHFLFDNMGSDFESESSFEALFDDLKLYLKEEYEIEFECNDSLRFSEILKDKTLKKTAKSSELYKLFGYSKRNNPYETALIDLMCGRKVKFSDMFGDKSFDSEEVNGITFESGYDDNENTYRDLLQEKFELIEKAKAVYDWAILADILNGEKYISFAKVKTYEEHSSDLKMLKDFVKERCKSLYDEIFRITKDKLDNYTAYCGKYKENGRNGVIQYRTNQADFCKYLKKKFEKLDKTGYEEMFDKIENGTFMPKIVVKDNGVIPMQVNRSELKAILKNASTYLEFLNKKDENGISVSDKIVKIFEFRIPYYVGPLNNHSLKFWLVRSDEKIYPWNFDSVVDIEQSAENFINNLTSKCTYLPTKDVIPKNSILYSAFTVLNELNNLRLDGKKPDVSLKQAIFNDLFMTHKKVRRKDLLNYLKSEKGVAFDITGIDGDFKSSMRSAIEMSQFNLTDSEKEDAIKAITVFGDDKKLLRKRLKRQLGSKLSDEDIMRISKLKYKDWGRLSKEFLTEVYNVDKNTGELQFNIIHALWQTNDNLMELLGSKYGFEQSRQNYLDGIQTGQSLEKMVENLYISPAVKRPVYQSLKIMHEINKIQGHAPKKIFVEMTRKDGVKGDKGRKESRKTKLVDLYKKCGEDSGELWESLEKTPDDEFKRDRLYFYYTQFGKCMYTGEPINLSELYNQNIYDVDHIFPRSKVKDDSLDNRVLVKKQVNAHKDNTYPLDSSIREKMKGFWHLLMDKGLISKKKYERLTRTTELTDSELSDFIARQIVETSQSTKAVASLFKELYPDTEIVYVKASTVSEFRHEYDFLKCREVNDFHHAKDAYLNIVVGNVYNERCTHNKSIFIKGLQTKTYSLNKMFSFNTPNAWSIDDNKSIKIVRKTMNKNNIRFTRYALTRNGGLFKMNPLKKGSGQVSLKQNSPLSDISKYGGYDKPASSYFSFVKYEGKKGKEMRRLVAIDSYIKARYEANPEKYLSETLGLKNPVVLIPVVKYNACIEIDGFRMHISSKSNGGKKIVYKPAMQLTVSYDTEKYIRNVVKLNSMPENYNIKELDKVSADENLKLFDILTSKMTDTILKVKFGDMGVKIAAHRDAFEKLDVRKQCFVLAEILKIIHSNVVTGDLTLIDEAKKAGVVSTNSVLSEIKGVKSIYLVHQSVTGLFEKKIDLLNM

SEQ ID NO: 21169 - protein, 1332 aa, unidentified
  REGION 1..1332: note = Cas Enzyme sequence
MKNFNDDYYAGFDIGTDSVGYAVADTDYNLCKFKGNAMWGVDLFEESNSAAERRTLRSARRRGLRKRNRIEWLQMLFDEEISKVDNAFYQRLKESCLYLDDKSSNVPYAVFADGNYTDKEFHTDYPTLYHLRKELIKSSQPHDIRLVYLALHHIIKHRGHFLFDNMGSDFESESSFETLFDDLKLYLKEEYEIEFECNDSLRFSEILKDKTLKKTAKSSESYKLFGYSKRNNPYETALIDLMCGRNVGFSDMFGDKSFDSEEVNGITFESGYDDNENTYRDLLQEKFEPIEKAKAVYDWAILADILNGEKYNGKKYISFAKVKIYEEHSSDLKMLKDFVKERCKSLYGEIFRITKDKLDNYTAYCGKYKENGRNGVIQYRTNQADFCKYLKKKFEKLDKTGYEEMFDKIENGTFMPKIVVKDNGIIPMQVNRSELKAILKNASTYLEFLNKKDENGISVSDKIVKIFEFRIPYYVGPLNNHSLKSWLVRSDEKIYPWNFDSVVDIEQSAENFINNLTSKCTYLPTKDVIPKNSILYSAFTVLNELNNLRLDGKKPDVSLKQAIFNDLFMTHKKVRRKDLLNYLKSEKGITPDITGIDGDFKSSMRSAIEMSQFNLTDSEKEDAIKAITVFGDDKKLLRKRLKRQLGSKLSDEDIMRISKLKYKDWGRLSKEFLTEVYNVDKNTGELQFNIIHALWQTNDNLMELLGSKYGFEQSRQNYLDGIQTGQSLEKMVENLYISPAVKRPVYQSLKIMHEINKIQGHAPKKIFVEMTRKDGVKGDKGRKESRKTKLVDLYKKCGEDSGELWESLEKTPDDEFKRDRLYFYYTQFGKCMYTGEPITLSELYNKNIYEVDHIFPRSKVKDDSLDNRVLVKKQVNAHKDNTYPLDSSIREKMKGFWHLLMDKGLISKKKYERLTRATELSDSELSDFIARQIVETSQSTKAVASLFKELYPDTEIVYVKASTVSEFRHEYDFLKCREVNDFHHAKDAYLNIVVGNVYNERCTHNKSIFIKGLQTKTYSLNKMFSFNTPNAWSIDDNKSIKIVRKTMNKNNIRFTRYALTRNGGLFKMNPLKKGSGQVSLKQNSPLSDISKYGGYDRPTSSYFSFVKYEGKKGKEMRRLVAIDSYIKARYEANPEKYLSENLGLKNPVVLIPVVKYNACIEIDGFRMHISSKSSGGKQIVYKPAMQLTVSYDTEKYIRNVVKLNSKPENYNITELDKVSADENLKLFDILTSKMTDTVLKVKFGDMGAKIISHRDAFEKLDIRKQCFVLAEILKIIHCNISEGNLRFIGGAKQSGSIKMSSVISGIKGVKSIYLVHQSVTGLFEKKIDLLHM

SEQ ID NO: 21170 - protein, 1332 aa, unidentified
  REGION 1..1332: note = Cas Enzyme sequence
MKNFNNDYYTGFDIGTDSVGYAVADTDYNLCKFKGNAMWGVDLFEESNSAAERRTLRSARRRGLRKRNRIEWLQMLFDEEISKVDNAFFQRLKESCLYLDDKSSNVPYAVFADGNYTDKEFHTDYPTIYHLRKELIKSSQPHDIRLVYLALHHIIKHRGHFLFDNMGSDFESESSFETLFDDLKLYLKEEYEIEFECNDSLRFSEILKDKTLKKTAKSSESYKLFGYSKRNNPYETALIDLMCGRNVGFSDMFGDKSFDSEEVNGITFESGYDDNENTYRDLLQEKFEPIEKAKAVYDWAILADILNGEKYNGKKYISFAKVKTYEEHSSDLKMLKDFVKERCKSLYGEIFRITKDKLDNYTAYCGKYKENGRNGVIQYRTNQADFCKYLKKKFEKLDKTGYEEMFDKIENGTFMPKIVVKDNGVIPMQVNRSELKAILKNASTYLEFLNNKDENGISVSDKIVKIFEFRIPYYVGPLNNHSLKSWLVRSDEKVYPWNFDSVVDIEQSAENFINNLTSKCTYLPTKDVIPKNSILYSAFTVLNELNNLRLDGKKPDVSLKQAIFNDLFMTHKKVRRKDLLNYLKSEKGITPDITGIDGDFKSSMRSAIEMSQFNLTDSEKEDAIKAITVFGDDKKLLRKRLKRQLGSKLSDEDIMRISKLKYKDWGRLSKEFLTEVYNVDKNTGELQFNIIHALWQTNDNLMELLGSKYGFEQSRQNYLDGIQTGQSLEKMVENLYISPAVKRPVYQSLKIMHEINKIQGHAPKKIFVEMTRKDGVKGDKGRKESRKTKLVDLYKKCGEDSGELWESLEKTPDDEFKRDRLYFYYTQFGKCMYTGEPITLSELYNKNIYEVDHIFPRSKVKDDSLDNRVLVKKQVNAHKDNTYPLDSSIREKMKGFWHLLMDKGLISKKKYERLTRATELSDSELSDFIARQIVETSQSTKAVASLFKELYPDTEIVYVKASTVSEFRHEYDFLKCREVNDFHHAKDAYLNIVVGNVYNERCTHNKSIFIKGLQTKTYSLNKMFSFNTPNAWSIDDNKSIKIVRKTMNKNNIRFTRYALTRNGGLFKMNPLKKGSGQVSLKQNSPLSDISKYGGYDRPTSSYFSFVKYEGKKGKEMRRLVAIDSYIKARYEANPEKYLSENLGLKNPVVLIPVVKYNACIEIDGFRMHISSKSSGGKQIVYKPAMQLTVSYDTEKYIRNVVKLNSKPENYNITELDKVSADENLKLFDILTSKMTDTVLKVKFGDMGAKIISHRDAFEKLDIRKQCFVLAEILKIIHCNISEGNLRFIGGAKQSGSIKMSSVISGIKGVKSIYLVHQSVTGLFEKKIDLLHM

SEQ ID NO: 21171 - protein, 1333 aa, unidentified; identical to SEQ ID NO: 20080
  REGION 1..1333: note = Cas Enzyme sequence

SEQ ID NO: 21172 - protein, 1330 aa, unidentified
  REGION 1..1330: note = Cas Enzyme sequence
MKNFNDDYYVGFDIGTDSVGYAVADTDYNLCKFKGNAMWGADLFEESNSAAERRTLRSARRRGLRKRNRIEWLQMLFDEEISKVDNAFYQRLKESCLYLDDKSSNVPYAVFADGNYTDKEFHTDYPTIYHLRKELIKSSQPHDIRLIYLALHHIIKHRGHFLFDNMGSDFESESSFEALFDDLKLYLKEEYEIEFECNDSLRFSEILKDKTLKKTAKSSESYKLFGYSKRNNPYETALIDLMCGRKVKFSDMFGDKSFDSEEVNGITFESGYDDNENTYRDLLQEKFELIEKAKAVYDWAILADILNGEKYISFAKVKTYEEHSSDLKMLKDFVKERCKSLYGEIFRITKDKLDNYTAYCGKYKENGRNGVIQYRTNQADFCKYLKKKFEKLDKTGYEEMFDRIENGTFMPKIVVKDNGVIPMQVNRSELKAILKNASTYLEFLNNKDENGISVSDKIVKIFEFRIPYYVGPLNNHSLKFWIVRSDEKIYPWNFDSVVDIEQSAENFINNLTSKCTYLPTKDVIPKNSILYSAFTVLNELNNLRLDGKKPDVSLKQAIFNDLFMTHKKVRRKDLLNYLKSEKGITPDITGIDGDFKSSMRSAIEMSQFNLTDSEKEDAIKAITVFGDDKKLLRKRLKRQLGSKLSDEDIMRISKLKYKDWGRLSKEFLTEVYNVDKNTGELQFNIIHALWQTNDNLMELLGSKYGFEQSRQNYLDGIQTGQSLEKMVENLYISPAVKRPVYQSLKIMHEINKIQGHAPKKIFVEMTRKDGVKGDKGRKESRKTKLVDLYKKCGEDSGELWESLEKTPDDEFKRDRLYFYYTQFGKCMYTGEPINLSELYNQNIYDVDHIFPRSKVKDDSLDNRVLVKKQVNAHKDNTYPLDSSIRAKMKGFWHLLMDKGLISKKKYERLTRATELTDSELSDFIARQIVETSQSTKAVASLFKELYPNTEIVYVKASLVSEFRDESRGFGFLKCREVNDFHHAKDAYLNIVVGNVYNERCTHNKSIFIKGLQTKTYSLNKMFSFNTSNAWSIDDNKSIKIVRKTMNKNNIRFTRYALTRNGGLFKMNPLKKGSGQVSLKQNSPLSDISKYGGYDKPASSYFSFVKYEGKKGKEMRQLVAIDSYIKARYEANPEKYLSENLGLKNPVVLIPVVKYNACIEIDGFRMHISSKSNGGKKIVYKPAMQLTVSYDTEKYIRNVVKLNSMPENYNITERDKVSTDENIELFDILIFKMTDTILKVKFGDMGVKIASHRDAFEKLDVRKQCFVLAEILKIIHSNVVTGDLTLIDEAKKAGVVSTNSVLSEIKGVKSIYLVHQSVTGLFEKKIDLLHM

SEQ ID NO: 21173 - protein, 1314 aa, unidentified
  REGION 1..1314: note = Cas Enzyme sequence
MENYYLGLDLGTDSIGWAVTDKNYNIPKFKGNSMWGIRLLEGGNTAVERREFRSSRRRLERNKYRLNCLAMLFNEEISKKDIAFFQRLKDSALYDGDKNVSGKYSLFNDPDYTDKDYYKKYPTIYHLRKELIESVEPHDVRLVFLALHHIIKNRGHFLFDNDDLGKNGNFDFTAIFTELNEYIKSNSNYESEGFSCNDLKPVEDIIKNSSLTSSKKKEALIKEFALNKKVDVFEVAIVTLLSGATAKAKDLFNTDKYDDTEGKSICFKSGYDDKATTYESVFGENFELIEKLKAIYDWAILADILNGKEYISYAKVDTYEKHKRDLKLLKEYVKAYVPEKYSHIFNENSDKVSNYLSYSGYSSKNPVMKKCDQETFCDFLRKQLPKELLDEKYAQMYKEIETSSFMPKAVTKDNSVIPMQLNRAELEAILSNAKNYLPFLADRDSSGKTVSEKIIDIFKYRIPYYVGPLNKHSEKSWLVRTDEKIYPWNFENVVDADNSAEKFINNLTSKCTYLPKEDVIPKNSLLYSAFTVLNEINNIKIDGEEISVEIKQGIYKDLFEKSNKVKVFDLKKYLASNGYMNIEITGIDTTIKGSLKPFIDLQNIDLSYSDKEEIIKSVTIFGDDKKLLKNRLKRLYGDRLTADDIKKISKLKYTGWSRLSEKLLTGIEAVLPSTGEYTNIIHALWETNNNLMQLLSSNYDFRKKIDEENGDSTFTSLREEIDNLYVSPKIKRPIYQAMQIVEEIVKIQGHDPKKIFIEVARDEGEKKRTVSRKQKLIELYKYCKKDEQKLYEQLCNTDENDFRRDALYLYYTQLGKCMYTGKPIELSEIYNNNIYDIDHIFPRSKIKDDSLNNRVLVLKAENAKKGNIYPINSSIRNNMLPFWKTLFDKGLISKEKFERLVRNQPLTDEELSSFVSRQLVETRQSTKAVAQLLKKRYHDTAVEYIKASLVSDFRQENDFVKSRDVNDFHHAKDAYLNIVVGNVYTVRSHLAHFIDNVQSGKWSVNKMFDYTTNGAWIVENNKSINIVKSNMAKNNIRFTRYAFKQTGGLFDQNPLKKGLGQVPRKKDMDIDKYGGYNKPSSAYFAFVEYKNSKGEIVRSFEPVDLYAEKEYIRNPQEFIKRKLGVDYVKIIIPCVKYNALISINGFRMHISSKSSGGANLICKPAVQLVVSQEQEKYIKKISSYLAKCAELRKEKEITSFDGITEKDNTDLYETLKHKTNHTIYNVKFSKLANILIDKQCEFEGLSLYEQCYILMQIINILHANVMSGDLSAIGEAKKSGVTTISNKMQPSYKTVKLINQSISGLFEQEIDLLK

SEQ ID NO: 21174 - protein, 1314 aa, unidentified
  REGION 1..1314: note = Cas Enzyme sequence
MENYYLGLDLGTDSIGWAVTDKNYNIPKFKGNSMWGIRLLEGGNTAVERREFRSSRRRLERNKYRLNCLEMLFNEEISKKDIAFFQRLKDSALYDGDKNVSGKYSLFNDPDYTDKDYYKKYPTIYHLRKELIESVEPHDVRLVFLALHHIIKNRGHFLFDNDDLGKNGNFDFTAIFTELNEYIKSNSNYESEGFSCNDLKPVEDIIKNSSLTSSKKKEALIKEFALNKKVDVFEVAIVTLLSGATAKAKDLFNTDKYDDTEGKSICFKSGYDDKATTYESVFGENFELIEKLKAIYDWAILADILNGKEYISYAKVDTYEKHKRDLKLLKEYVKAYVPEKYSHIFNENSDKVSNYLSYSGYSSKNPVMKKCDQETFCDFLRKQLPKELLDEKYAQMYKEIETSSFMPKAVTKDNSVIPMQLNRAELEAILSNAKNYLPFLADRDSSGKTVSEKIIDIFKYRIPYYVGPLNKHSEKSWLVRTGEKIYPWNFENVVDADNSAEKFINNLTSKCTYLPKEDVIPKNSLLYSAFTVLNEINNIKIDGEEISVELKQGIYKDLFEKSNKVKVFDLKKYLASNGYMNIEITGIDTTIKGSLKPFIDLQNIDLSYSDKEEIIKSVTIFGDDKKLLKNRLKRLYGDRLTADDIKKISKLKYTGWSRLSEKLLTGIEAVLPSTGEYTNIIHALWETNDNLMQLLSSNYDFRKKIDEENGDSTFTSLREEIDNLYVSPKIKRPIYQAMQIVEEIVKIQGHDPKKIFIEVARDESEKKRTVSRKQKLIELYKYCKKDEQKLYEQLCNTDENDFRRDALYLYYTQLGKCMYTGKPIELSEIYNNNIYDIDHIFPRSKIKDDSLNNRVLVLKAENAKKGNIYPINSSIRNNMLPFWKTLFDKGLISKEKFERLVRNQPLTDEELSSFVSRQLVETRQSTKAVAQLLKKRYHDTAVEYIKASLVSDFRQENDFVKSRDVNDFHHAKDAYLNIVVGNVYTVRSHLAHFIDNVQSGKWSVNKMFDYTTNGAWIVENNKSINIVKSNMAKNNIRFTRYAFKQTGGLFDQNPLKKGLGQVPRKKDMDIDKYGGYNKPSSAYFAFVEYKNSKGEIVRSFEPVDLYAEKEYIRNPQEFIKRKLGVDYVKIIIPCVKYNALISINGFRMHISSKSSGGANLICKPAVQLVVSQGQEKYIKKISSYLAKCAELRKEKEITSFDGITEKDNADLYEALKHKTNHTIYNVKFSKLANILIDKQCEFEGLSLYEQCYILMQIINILHANVMSGDLSAIGEAKKSGVTTISNKMQPSYKTVKLINQSISGLFEQEIDLLK

SEQ ID NO: 21175 - protein, 1314 aa, unidentified
  REGION 1..1314: note = Cas Enzyme sequence
MENYYLGLDLGTDSIGWAVTDKNYNIPKFKGNSMWGIRLLEGGNTAVERREFRSSRRRLERNKYRLNCLEMLFNEEISKKDIAFFQRLKDSALYDGDKNVSGKYSLFNDPDYTDKDYYKKYPTIYHLRKELIESVEPHDVRLVFLALHHIIKNRGHFLFDNDDLGKNGNFDFTAIFTELNEYIKSNSNYESEGFSCNDLKPVEDIIKNSSLTSSKKKEALIKEFALNKKVDVFEVAIVTLLSGATAKAKDLFNTDKYDDTEGKSICFKSGYDDKATTYESVFGENFELIEKLKAIYDWAILADILNGKEYISYAKVDTYEKHKRDLKLLKEYVKAYVPEKYSHIFNENSDKVSNYLSYSGYSSKNPVMKKCDQETFCDFLRKQLPKELLDEKYAQMYKEIETSSFMPKAVTKDNSVIPMQLNRAELEAILSNAKNYLPFLADRDSSGKTVSEKIIDIFKYRIPYYVGPLNKHSEKSWLVRTGEKIYPWNFENVVDADNSAEKFINNLTSKCTYLPKEDVIPKNSLLYSAFTVLNEINNIKIDGEEISVELKQGIYKDLFEKSNKVKVFDLKKYLASNGYMNIEITGIDTTIKGSLKPFIDLQNIDLSYSDKEEIIKSVTIFGDDKKLLKNRLKRLYGDRLTADDIKKISKLKYTGWSRLSEKLLTGIEAVLPSTGEYTNIIHALWETNDNLMQLLSSNYDFRKKIDEENGDSTFTSLREEIDNLYVSPKIKRPIYQAMQIVEEIVKIQGHDPKKIFIEVARDESEKKRTVSRKQKLIELYKYCKKDEQKLYEQLCNTDENDFRRDALYLYYTQLGKCMYTGKPIELSEIYNNNIYDIDHIFPRSKIKDDSLNNRVLVLKAENAKKGNIYPINSSIRNNMLPFWKTLFDKGLISKEKFERLVRNQPLTDEELSSFVSRQLVETRQSTKAVAQLLKKRYHDTAVEYIKASLVSDFRQENDFVKSRDVNDFHHAKDAYLNIVVGNVYTVRSHLAHFIDNVQSGKWSVNKMFDYTTNGAWIVENNKSINIVKSNMAKNNIRFTRYAFKQTGGLFDQNPLKKGLGQVPRKKDMDIDKYGGYNKPSSAYFAFVEYKNSKGEIVRSFEPVDLYAEKEYIRNPQEFIKRKLGVDYVKIIIPCVKYNALISINGFRMHISSKSSGGANLICKPAVQLVVSQEQEKYIKKISSYLAKCAELRKEKEIMSFDGITEKDNADLYEALKHKTNHTIYNVKFSKLANILIDKQCEFEGLSLYEQCYILMQIINILHANVMSGDLSAIGEAKKSGVTTISNKMQPSYKTVKLINQSISGLFEQEIDLLK

SEQ ID NO: 21176 - protein, 1314 aa, unidentified
  REGION 1..1314: note = Cas Enzyme sequence
MENYYLGLDLGTDSIGWAVTDKNYNIPKFKGNSMWGIRLLEGGNTAVERREFRSSRRRLERNKYRLNCLEMLFNEEISKKDIAFFQRLKDSALYDGDKNVSGKYSLFNDPDYTDKDYYKKYPTIYHLRKELIESVEPHDVRLVFLALHHIIKNRGHFLFDNDDLGKNGNFDFTAIFTELNEYIKSNSNYESEGFSCNDLKPVEDIIKNSSLTSSKKKEALIKEFALNKKVDVFEVAIVTLLSGATAKAKDLFNTDKYDDTEGKSICFKSGYDDKATTYESVFGENFELIEKLKAIYDWAILADILNGKEYISYAKVDTYEKHKRDLKLLKEYVKAYVPEKYSHIFNENSDKVSNYLSYSGYSSKNPVMKKCDQETFCDFLRKQLPKELLDEKYAQMYKEIETSSFMPKAVTKDNSVIPMQLNRAELEAILSNAKNYLPFLADRDSSGKTVSEKIIDIFKYRIPYYVGPLNKHSEKSWLVRTGEKIYPWNFENVVDADNSAEKFINNLTSKCTYLPKEDVIPKNSLLYSAFTVLNEINNIKIDGEEFSVELKQGIYKDLFEKSNKVKVFDLKKYLASNGYMNIEITGIDTTIKGSLKPFIDLQNIDLSYSDKEEIIKSVTIFGDDKKLLKNRLKRLYGDRLTADDIKKISKLKYTGWSRLSEKFLTGIEAVLPSTGEYTNIIHALWETNDNLMQLLSSNYDFRKKIDEENGDSTFTSLRKEIDNLYVSPKIKRPIYQAMQIVEEIVKIQGHDPKKIFIEVARDEGEKKRTVSRKQKLIELYKYCKKDEQKLYEQLCNTDENDFRRDALYLYYTQLGKCMYTGKPIELSEIYNNNIYDIDHIFPRSKIKDDSLNNRVLVLKAENAKKGNIYPINSSIRNNMLPFWKTLFDKGLISKEKFERLVRNQPLTDEELSSFVSRQLVETRQSTKAVAQLLKKRYHDTAVEYIKASLVSDFRQENDFVKSRDVNDFHHAKDAYLNIVVGNVYTVRSHLAHFIDNVQSGKWSVNKMFDYTTNGAWIVENNKSINIVKSNMAKNNIRFTRYAFKQTGGLFDQNPLKKGLGQVPRKKDMDIDKYGGYNKPSSAYFAFVEYKNSKGEIVRSFEPVDLYAEKEYIRNPQEFIKRKLGVDYVKIIIPCVKYNALISINGFRMHISSKSSGGANLICKPAVQLVVSQEQEKYIKKISSYLAKCAELRKEKEITSFDGITEKDNADLYEALKHKTNHTIYNVKFSKLANILIDKQCEFEGLSLYEQCYILMQIINILHANVMSGDLSAIGEAKKSGVTTISNKMQPSYKTVKLINQSISGLFEQEIDLLK

SEQ ID NO: 21177 - protein, 1314 aa, unidentified
  REGION 1..1314: note = Cas Enzyme sequence
MENYYLGLDLGTDSIGWAVTDKNYNIPKFKGNSMWGIRLLEGGNTAVERREFRSSRRRLERNKYRLNCLEMLFNEEISKKDIAFFQRLKDSALYDGDKNVSGKYSLFNDPDYTDKDYYKKYPTIYHLRKELIESVEPHDVRLVFLALHHIIKNRGHFLFDNDDLGKNGNFDFTAIFTELNEYIKSNSNYESEGFSCNDLKPVEDIIKNSSLTSSKKKEALIKEFALNKKVDVFEVAIVTLLSGATAKAKDLFNTDKYDDTEGKSICFKSGYDDKATTYESVFGENFELIEKLKAIYDWAILADILNGKEYISYAKVDTYEKHKRDLKLLKEYVKAYVPEKYSHIFNENSDKVSNYLSYSGYSSKNPVMKKCDQETFCDFLRKQLPKELLDEKYAQMYKEIETSSFMPKAVTKDNSVIPMQLNRAELEAILSNAKNYLPFLADRDSSGKTVSEKIIDIFKYRIPYYVGPLNKHSEKSWLVRTGEKIYPWNFENVVDADNSAEKFINNLTSKCTYLPKEDVIPKNSLLYSAFTVLNEINNIKIDGEEISVELKQGIYKDLFEKSNKVKVFDLKKYLASNGYMNIEITGIDTTIKGSLKPFIDLQNIDLSYSDKEEIIKSVTIFGDDKKLLKNRLKRLYGDRLTADDIKKISKLKYTGWSRLSEKLLTGIEAVLPSTGEYTNIIHALWETNDNLMQLLSSNYDFRKKIDEENGDSTFTSLREEIDNLYVSPKIKRPIYQAMQIVEEIVKIQGHDPKKIFIEVARDESEKKRTVSRKQKLIELYKYCKKDEQKLYEQLCNTDENDFRRDALYLYYTQLGKCMYTGKPIELSEIYNNNIYDIDHIFPRSKIKDDSLNNRVLVLKAENAKKGNIYPINSSIRNNMLPFWKTLFDKGLISKEKFERLVRNQPLTDEELSSFVSRQLVETRQSTKAVAQLLKKRYHDTAVEYIKASLVSDFRQENDFVKSRDVNDFHHAKDAYLNIVVGNVYTVRSHLAHFIDNVQSGKWSVNKMFDYTTNGAWIVENNKSINIVKSNMAKNNIRFTRYAFKQTGGLFDQNPLKKGLGQVPRKKDMDIDKYGGYNKPSSAYFAFVEYKNSKGEIVRSFEPVDLYAEKEYIRNPQEFIKRKLGVDYVKIIIPCVKYNALISINGFRMHISSKSSGGANLICKPAVQLVVSQEQEKYIKKISSYLAKCAELRKEKEITSFDGITEKDNADLYEALKHKTNHTIYNVKFSKLANILIDKQCEFEGLSLYEQCYILMQIINILHANVMSGDLSAIGEAKKSGVTTISNKMQPSYKTVKLINQSISGLFEQEIDLLK

SEQ ID NO: 21178 - protein, 1334 aa, unidentified
  REGION 1..1334: note = Cas Enzyme sequence
MGKEYYLGLDIGTDSVGWAVCDTDYKIPKFKGNAMWGIRLFEKSNSAEERRGFRSSRRRTQRKRERLKLLEMLFDEEISKIDPAFFIKLRESNLYLEDKSTKIPYCVFSDENYTDKDFHRDYPTIYHLRNELIKNNKPHDVRLVYLALHHIIKNRGHFLFDYSYKNDKSGDFMPIYNDLKNYFYDNYEIELDCSDVDEFSNTLKDKSKGKTKKNTEIAELFGVSKKDDKVLYSALSLLSGSSVKLFDIFDDEALKDVEKKSVSFSSGFDDNANDFQSYLGERFELLEKLKAVYDWAVLADILDGKEYISEAKVAIYEKHKRDLRTLKKYIKIYMPEKKAEIFNISSKDNNYVAYSKHIKTSSGTGVLNSTCTQEEFCAYLKKTLGICKNASYEEMFKEIENSTFMPKQVTKDNGVVPMQVNEKELVAILDNAKEYLPFLLNKDNDGKTVYDKIKALFEYRIPYYIGPLNTHSTKSWLVRSNEKIYPWNIEDVVDFDKSAEKFIEKLTSKCTYLPQYDVIPKHSLLYNKFCVLNELNNLKIDGEKISVQLKQNIYNDLFKKYYKVTNKKLCDYLKSRNITFDEISGIDNDFKSSLKSYKDLVAYNLTDEQKEEIVKAITIFGDDKKLLKKRLKNEFGDCLSDDEIKKICKLKYTGWSKLSREFLTDVTAVYKETGELINIICALWETNYNLTSLLYSDEFCCDDKENKTFNDKINELNSFGYDKTLNQIVEELYVSPLVKRPIYQSLLITKELEKIMKCPPKKIFVEVARGAEEKKRTVSRRNKLLDLYKSCKNDYPLLFDELQNNTTDDELKSDKLYLYFTQFGKCMYTGENIELGDLFNKNLYDIDHIYPQSKIKDDSLDNRVLVKKTTNAKKDNEYPLSSQIREKMTPHWKALLDKGLINKKKYERLVRNYPLRDEELSQFISRQLVETRQSTKAVANILEQLYPRPDTEIVYVKAALASEFRHQYDLLKCREVNDLHHAKDAYLNIVVGNAYNVKFTHNKANFIKGLQNNDKAYTVKLDSMLKHNIDGAWIADNNESLNIVKSTMNKNNIRYTRYAFTKHGKFFDATIQKKNGIGSVALKENSPRNNISKYGGYTQIGVSYFGIAKIAKKKCDDIVIFPVYIYNEKEYTKAPLDYAKMVTNKNVSEILIKKLKIDSLLSIDSYKVFVSGNGDSARFSYKPYSQLMIEPYYEKYLKRAFKYLDNCKKNKRELPISNYDGISEEMNMEIYKCLYKKMELPAYVFSFYDYGTKLKDKFVDFSKLKTYEQLCVLEAIVKTMKSDTVVGDIKKQLGISFSGFRNSKVFNLKKNTSLKIINQSVTGLFEREIDLLNL

SEQ ID NO: 21179 - protein, 1332 aa, unidentified
  REGION 1..1332: note = Cas Enzyme sequence
MGEEYYLGLDIGTDSVGWAVCNTDYKIPKFKGNAMWGIRLFEKSNSAEERRGFRSSRRRTQRKRERLKLLEMLFDEEISKIDPAFFIKLRESNLYLEDKSTKIPYCVFSDENYTDKDFHRDYPTIYHLRNELIKNNNPHDVRLVYLALHHIIKNRGHFLFDYSYKNDKSGDFMPIYNDLKNYFYDNYEIELDCSDVDEFANTLKDKSKGKTKKNAEIAELFGVSKKYDKVLYSALSLLSGSSVKLFDIFDDEALKDVEKKSVSFSSGFDDNANDFQSYLGERFELLEKLKAVYDWAVLADILDGKEYISEAKVAIYEKHKRDLRTLKKYIKIYMPEKKAEIFNISSKDNNYVAYSKHIKTSSGTGVLNSTCTQEEFCAYLKKTLGICKDASYEEMFKEIENSTFMPKQVTKDNGVVPMQVNEKELVAILDNAKEYLPFLLNKDNDGKTVYDKIKALFEYRIPYYIGPLNTHSTKHWLVRNNEKIYPWNIKEVVDFDKSAEKFIEKLTSKCTYLPQYDVIPKHSLLYNKFCVLNELNNLKINGEKISVQLKQDIYNDLFKKYYKVTNKKLCDYLESRNIAFEEISGIDNDFKSSLKSYKDLVAYNLTDEQKEEIVKAITIFGDDKKLLKKRLKNEFGDCLSDDEIKKICKLKYTGWSKLSREFLTDVTAVYKETGELINIICALWETNYNLTSLLYSDEFCCDDKENKTFNDKINELNSFGNDKTLNQIVEELYVSPLVKRPIYQSLLITKELEKIMKCPPKKIFVEVARGAEEKKRTVSRRNKLLDLYKSCKNDYPLLFDELQNNTTDDELKSDKLYLYFTQFGKCMYTGENIDLGDLFNKNLYDIDHIYPQSKIKDDSLDNRVLVKKTTNAKKDNEYPLSSQIREKMTPHWKALLDKGLINKKKYERLVRNYPLSDEELSQFISRQLVETRQSTKAVANILEQLYPRPDTEIVYVKAALASEFRHQYDMLKCREVNDLHHAKDAYLNIVVGNAYNVKFTHNKANFIKGLQNNDKAYTVRLDSMLKHNIDGAWIADNNESLNIVKSTMNKNNIRYTRYAFKQKGGLFDQNILKKGKGQVPIKVNDKRNSIEKYGGYNRPSSSYFSLVKYFDKKGKKIIQLVPIDSFEEHIYQNTPERYISEKIGCDCEILIPCIKYNSCISIDGFRMHLSSKSNGGATIVCKPSIQLVVGYENEKYIKGIVKSIETGFNADILKRYNINNDNNLILYDLLSYKIKNTIYKSKFEKVFICMSSGREKFILLDLDEQCYIINEILKILHCNVVTGDLKLLGGSGQSGTVTINSALSNIKNVKSIKLINQSVTGLFEQEIELLNL

SEQ ID NO: 21180 - protein, 1332 aa, unidentified
  REGION 1..1332: note = Cas Enzyme sequence
MGKEYYLGLDIGTDSVGWAVCDTDYKIPKFKGNAMWGIRLFEKSNSAEERRGFRSSRRRTQRKRERLKLLEMLFDEEISKIDPAFFIKLRESNLYLEDKSTKIPYCVFSDENYTDKDFHRYYPTIYHLRNELIKNNKPHDVRLVYLALHHIIKNRGHFLFDYSYKNDKSGDFMPIYNELKNYFYDNYEIELDCSDVDEFANTLKDKSKGKTKKNAEIAELFGVSKKDDKVLYSALSLLSGSSVKLFDIFDDEALKDVEKKSVSFSSGFDDNANDFQSYLGERFELLEKLKAVYDWAVLADILDGKEYISEAKVAIYEKHKRHLRTLKKYIKIYMPEKKAEIFNISSKDNNYVAYSKHIKTSSGTGVLNSTCTQEEFCAYLKKTLGICKDASYEEMFKEIENSTFMPKQVTKDNGVVPMQVNEKELVAILDNAKEYLPFLLNEDNDGKTVYDKIKALFEYRIPYYIGPLNTLSTKSWLVRSNEKIYPWNIEDVVDFDKSAEKFIENLTSKCTYLPQYDVIPKHSLLYNKFCVLNELNNLKIDGEKISVQLKQDIYNDLFKKYYKVTNKKLCDYLKSRNIAFEEISGIDNDFKSSLKSYKDLVAYNLTDEQKEEIVKAITIFGDDKKLLKKRLKNEFGGCLSDDEIKKICKLKYTGWSKLSREFLTDVTAVYKETGELINIICALWETNYNLTSLLYSDEFCCDDKENKTFNDKINELNSFGSDKTLNQIVEELYVSPLVKRPIYQSLLITKELEKIMKCPPKKIFVEVARGAEEKKRTVSRRNKLLDLYKSCKNDYPLLFDELQNNTTDDELKSDKLYLYFTQFGKCMYTGENIDLDDLFNKNLYDIDHIYPQSKIKDDSLDNRVLVKKTTNAKKDNEYPLSSQIREKMTPHWKALLDKGLINKKKYERLVRNYPLSDEELSQFISRQLVETRQSTKAVANILEQLYPRPDTEIVYVKAALASEFRHQYDMLKCREVNDLHHAKDAYLNIVVGNAYNVKFTHNKANFIKGLQNNDKAYTVKLDSMLKHNIDGAWIADNNESLNIVESTMNKNNIRYTRYAFKQKGGLFDQNILKKGKGQVPIKANDKRNSIEKYGGYNRPSSSYFSLVKYFDKKGKKIIQLVPIDSFEEHIYQNTPERYVSEKIGCDCEILIPCIKYNACISIDGFRMHLSSKSGGGAQIVYKPAQQLILGYDNEKMIKGIEKLLQNGINDDIVKRYDISKENNLKLYCLIVDKLSNTLFKTKYEKIGNDLIKGKEKFETLDIEQQFYVINEILKILHCNVVTGDLKLIGGSGQAGAVLTNSALSNIKNVKSIKLINQSVTGLFEQEIELLNL

SEQ ID NO: 21181 - protein, 1087 aa, unidentified
  REGION 1..1087: note = Cas Enzyme sequence
  REGION 505..508: note = misc_feature - Xaa can be any naturally occurring amino acid
VLYSALSLLSGSSVKLFDIFDDEALKDVEKKSVSFSSGFDDNANDFQSYLGERFELLEKLKAVYDWAVLADILDGKEYISEAKVAIYEKHKRHLRTLKKYIKIYMPEKKAEIFNISSKDNNYVAYSKHIKTSSGTGVLNSTCTQEEFCAYLKKTLGICKDASYEEMFKEIENSTFMPKQVTKDNGVVPMQVNEKELVAILDNAKEYLPFLLNEDNDGKTVYDKIKALFEYRIPYYIGPLNTLSTKSWLVRSNEKIYPWNIEDVVDFDKSAEKFIENLTSKCTYLPQYDVIPKHSLLYNKFCVLNELNNLKIDGEKISVQLKQDIYNDLFKKYYKVTNKKLCDYLKSRNIAFEEISGIDNDFKSSLKSYKDLVAYNLTDEQKEEIVKAITIFGDDKKLLKKRLKNEFGGCLSDDEIKKICKLKYTGWSKLSREFLTDVTAVYKETGELINIICALWETNYNLTSLLYSDEFCCDDKENKTFNDKINELNSFGSDKTLNQIVEELYXXXXKIMKCPPKKIFVEVARGAEEKKRTVSRRNKLLDLYKSCKNDYPLLFDELQNNTTDDELKSDKLYLYFTQFGKCMYTGENIDLDDLFNKNLYDIDHIYPQSKIKDDSLDNRVLVKKTTNAKKDNEYPLSSQIREKMTPHWKALLDKGLINKKKYERLVRNYPLSDEELSQFISRQLVETRQSTKAVANILEQLYPRPDTEIVYVKAALASEFRHQYDMLKCREVNDLHHAKDAYLNIVVGNAYNVKFTHNKANFIKGLQNNDKAYTVKLDSMLKHNIDGAWIADNNESLNIVESTMNKNNIRYTRYAFKQKGGLFDQNILKKGKGQVPIKANDKRNSIEKYGGYNRPSSSYFSLVKYFDKKGKKIIQLVPIDSFEEHIYQNTPERYVSEKIGCDCEILIPCIKYNACISIDGFRMHLSSKSGGGAQIVYKPAQQLILGYDNEKMIKGIEKLLQNGINDDIVKRYDISKENNLKLYCLIVDKLSNTLFKTKYEKIGNDLIKGKEKFETLDIEQQFYVINEILKILHCNVVTGDLKLIGGSGQAGAVLTNSALSNIKNVKSIKLINQSVTGLFEQEIELLNL

SEQ ID NO: 21182 - protein, 1255 aa, unidentified
  REGION 1..1255: note = Cas Enzyme sequence
ISKIDPAFFIKLRESNLYLEDKSTKIPYCVFSDENYTDKDFHRDYPTIYHLRNELIKNNKPHDVRLVYLALHHIIKNRGHFLFDYSYKNDKSGDFMPIYNDLKNYFYDNYEIELDCSDVDEFANTLKDKSKGKTKKNAEIAELFGVSKRDDKVLYSALSLLSGSSVKLFDIFDDEALKDVEKKSVSFSSGFDDNANDFQSYLGERFELLEKLKAVYDWAVLADILDGKEYISEAKVAIYEKHKRDLRTLKKYIKIYMPEKKAEIFNISSKDNNYVAYSKHIKTSSGTGVLNSTCTQEEFCAYLKKTLGICKDASYEEMFKEIENSTFMPKQVTKDNGVVPMQVNEKELVAILDNAKEYLPFLLNKDNDGKTVYDKIKALFEYRIPYYIGPLNTHSTKHWLIRSNEKIYPWNIEDVVDFDKSAEKFIEKLTSKCTYLPQYDVIPKHSLLYNKFCVLNELNNLKIDGEKISVQLKQDIYNDLFKKYYKVTNKKLCDYLKSRNIAFDEISGIDNDFKSSLKSYKDLVAYNLTDKQKEEIVKAITIFGDDKKLLKKRLKNEFGDCLSDDEIKKICKLKYTGWSKLSREFLTDVTAVYKETGELINIICALWETNYNLASLLYSDKFCCDDKENKTFNDKINELNSFGNDKTLNQIVEELYVSPLVKRPIYQSLLITKELEKIMKCPPKKIFVEVARGAEEKKRTVSRRNKLLDLYKSCKNDYPLLFDELQNNTTDDELKSDKLYLYFTQFGKCMYTGENIDLGDLFNKNLYDIDHIYPQSKIKDDSLDNRVLVKKTTNAKKDNEYPLSSQIREKMTPHWKALLDKGLINKKKYERLVRNYPLSDEELSQFISRQLVETRQSTKAVANILEQLYPRPDTEIVYVKAALASEFRHQYDMLKCREVNDLHHAKDAYLNIVVGNAYNVKFTHNKANFIKGLQNNDKAYTVKLDSMLKHNIDGAWIADNNESLNIVKSTMSKNNIRYTRYAFKQKGGLFDQNILKKGKGQVPIKANDKRNSIEKYGGYNRPSSSYFSLVKYFDKKGKKIIQLVPIDSFEEHIYQNTPEKYVSEKIGCDCEILIPCIKYNACISIDGFRMHLSSKSGGGAQIVYKPAQQLILGYDNEKMIKGIEKLLQNGINDDIVKRYDISKENNLKLYCLIVDKLSNTLFKTKYEKIGNDLINGKEKFETLDIEQQFYVINEILKILHCNVVTGDLKLIGGSGQAGAVLTNSALSNIKNVKSIKLINQSVTGLFEQEIELLNL

SEQ ID NO: 21183 - protein, 1333 aa, unidentified
  REGION 1..1333: note = Cas Enzyme sequence
MGKEYYLGLDIGTDSVGWAVCDTNYKIPKFKGNAMWGIRLFEKSNSAEERRGFRSSRRRTQRKRERLKLLEMLFDEEISKIDPAFFIKLRESNLYLEDKSTKIPYCVFSDENYTDKDFHRDYPTIYHLRNELIKSNKPHDVRLVYLALHHIIKNRGHFLFDYSYKNDKSGDFMPIYNDLKNYFYDNYEIELDCSDVDEFANTLKDKSKGKTKKNAEIAELFGVGKKDDKVLYSALSLLSGSSVKLFDIFDDEALKDVEKKSVSFSSGFDDNANDFQSYLGERFELLEKLKAVYDWAVLADILDGKEYISEAKVAIYEKHKRDLRTLKKYIKIYMPEKKSEIFNISSKDNNYVAYSKHIKTSSGTGVLNSTCTQEEFCAYLKKTLGICKDASYEEMFKEIENSTFMPKQVTKDNGVVPMQVNEKELVAILDNAKEYLPFLLNEDNDGKTVYDKIKALFEYRIPYYIGPLNTHSTKHWLVRSNEKIYPWNIEDVVDFDKSAEKFIENLTSKCTYLPQYDVIPKHSLLYNKFCVLNELNNLKINGEKISVQLKQDIYNDLFKKYYKVTNKKLCDYLKSRNIDFDEISGIDNDFKSSLKSYKDLVAYNLTDEQKEKIVMAITIFGDDKKLLKKRLKNEFGGCLSDDEIKKICKLKYTGWSKLSREFLTDVTAVYKETGELINIICALWETNYNLTSLLYSNEFCCDDKENKTFNDKINELNSFGSDKTLNQIVEELYVSPLVKRPIYQSLLITKELEKIMKCPPKKIFVEVARGAEEKKRTVSRRNKLLDLYKSCKNDYPLLFDELQNNTTDDELKSDKLYLYFTQFGKCMYTGENIDLGDLFNKNLYDIDHIYPQSKIKDDSLDNRVLVKKTTNAKKDNEYPLSSQIREKMTPHWKALLDKGLIDKKKYERLVRNYPLSDEELSQFISRQLVETRQSTKAVANILEQLYPRPDTEIVYVKAALTSEFRHQYDMLKCREVNDLHHAKDAYLNIVVGNAYNVKFTHNKANFINGLQNNDKAYTVKLDSMLKHNIDGAWIADNNESLNIVKSTMNKNNIRYTRYAFEKKGGLFKVTILKKGNGQASIKKNDKRNSIEKYGGYNQVSSTYFSCVEHGKDNKRMISMFSVNLYDKNKYEENPIEYLIENYGLINPIIKVKKIKIQSCISFDNMLCHLGGKDSGGSQISYRPGVQLVLGYDNERYIRNVIRCAGGDLHLQTSKNEEDIVTTEKNIELFNLLIEKMKNNIYGVLYSNLGDKLYCSKEKFEKLDIVEQCNVIKNVLTILKNNASKGDLKSIGIKANGAIRLNNNISEIKNVKSIKLINQSVTGLFEQEIELLNL

SEQ ID NO: 21184 - protein, 1333 aa, unidentified
  REGION 1..1333: note = Cas Enzyme sequence
MGKEYYLGLDIGTDSVGWAVCDTNYKIPKFKGNAMWGIRLFEKSNSAEERRGFRSSRRRTQRKRERLKLLEMLFDEEISKIDPAFFIKLRESNLYLEDKSTKIPYCVFSDENYTDKDFHRDYPTIYHLRNELIKNNKPHDVRLVYLALHHIIKNRGHFLFDYSYKNDKSGDFMPIYNDLKNYFYDNYEIELDCSDVDEFANILKDKSKGKTKKNAEIAELFGVSKKDDKVLYSALSLLSGSSVKLFDIFDDEALKDVEKKSVSFSSGFDDNANDFQSYLGERFELLEKLKAVYDWAVLADILDGKEYISEAKVAIYEKHKRDLRTLKKYIKIYMPEKKAEIFNISSKDNNYVAYSKHIKTSSGTGVLNSTCTQEEFCTYLKKTLGICKDASYEEMFKEIENSTFMPKQVTKDNGVVPMQVNEKELVAILDNAKEYLPFLLNEDNDGKTVYDKIKALFEYRIPYYIGPLNTHSTKHWLVRSNEKIYPWNIEDVVDFDKSAEKFIEKLTSKCTYLPQYDVIPKHSLLYNKFCVLNELNNLKIDGEKISVQLKQDIYNDLFKKYYKVTNKKLCDYLKSRNIAFDEISGIDNDFKFSLKSYKDLVAYNLTDEQKEEIVKAITIFGDDKKLLKKRLKNEFGDCLSDDEIKKICKLKYTGWSKLSREFLTDVTAVYKETGELINIICALWETNYNLASLLYSDEFCCDDKENKTFNDKINELNSFGNDKTLNQIVEELYVSPLVKRPIYQSLLITKELEKIMKCPPKKIFVEVARGAEEKKRTVSRRNKLLDLYKSCKNDYPLLFDELQNNTTDDELKSDKLYLYFTQFGKCMYTGENIDLGDLFNKNLYDIDHIYPQSKIKDDSLDNRVLVKKTTNAKKDNEYPLSSQIREKMTPHWKALLDKGLIDKKKYERLVRNYPLSDEELSQFISRQLVETRQSTKAVANILEQLYPRPDTEIVYVKAALTSEFRHQYDMLKCREVNDLHHAKDAYLNIVVGNAYNVKFTHNKANFIKGLQNNDKAYTVKLDSMLKHNIDGAWIADNNESLNIVKSTMNKNNIRYTRYAFEKKGGLFKVTILKKGNGQASIKKNDKRNSIEKYGGYNQVSSTYFSCVEHGKDNKRMISMFSVNLYDKNKYEENPIAYLIENYGLINPIIKVKKVKIQSCISFDNMLCHLGGKDSGGSQISYRPGVQLVLGYDNERYIRNVIRCAGGDLHLQTSKNEEDIVTAEKNIELFNLLIEKMKNNIYGVLYSNLGDKLYCSKEKFEKLDIVEQCNVIKNVLTILKNNASKGDLKSIGIKANGAIRLNNNISEIKNVKSIKLINQSVTGLFEQEIELLNL

SEQ ID NO: 21185 - protein, 1330 aa, unidentified
  REGION 1..1330: note = Cas Enzyme sequence
MEQGTKRGDYYLGLDMGTDSVGWAVTDMDYRIPKFKGNAMWGVRLFDESNTAEERRLFRISRRRTQRRRERLDLLEMLFDGPVSTKDPAFFQRLRESDLYAEDKTTNTPFAVFADTDYTDTDYHRQFPTIYHLRNALLHEDGPYDVRLVFLAVHHIIKNRGHFLFDSLGEAQNFGSIYGAFRDYLQEEYECAVECTDEKAFGAVLKDKSLSKSRKTAAAAELFGVTKKSAPQLYACLALACGATVKLKDLFNDDTLAEAEKPSIAFTGSYEDNEPEYQSLLEERFDLVVRIKALYDWAILDEILAGHQYLCEAKVATYEQHKTDLQRLKTYVKTYRSELYKKIFKLSSKDDNYVAYSGHIKENGHTGVLEKTCNQEAFCAYLKKTLGDNGDPAYADMFAAIENGTFMPKQVSKDNGVIPMQLQKKELEGILDRAQRYLPFLTEKDETGLTVREKIISLCEHRIPYYVGPLNKHSKKAWIVRKEGKIYPWNFDQVVDLDRSAEAFIENLTSKCTYLPQYDVIPKYSLLYTKFMVLNELNNLTLDGQRVEVKLKQEIYRDLFEKRGKVTGKGLKNYLQSRGIAYEVMGGFDENFKASLKPWQDLAPYDLTYDEKEEVVRLITIFGDDKKLLKKRLRDLFGDRLTETERGKLARLKYTGWSRLSREFLTQVACTDKNTGEVTNIISALWDTNLNLMQLLYSEDYMPTFGEQVAACNQFDKDVSLRQMVEDLYVSPKVKRPIYQSLLIAREIEKIQKCPPKKIFIEVARGEEKKERKKSRKAQLLELYQSCKKEYADLYAQLEGTEEDRLRSDKLYLYYTQMGRCMYTGEHIDLNSLLSGNVYDIDHIFPRSKVKDDSLNNRVLVKKVDNAKKTDVYPLDRETQAKMHGFWQLLLSKNLISKVKYQRLIRTTPLTDEELGAFISRQLVETRQSTKAVAQIMEQLYDKEQTEIVYVKAALASDFRHTYDMLKCREVNDFHHAKDAYLNVVVGNVYNVRCTHNLRNFIRGLQENGPRGYSMNAMFKWDIPGAWVAEGGELQKTQTKSLEVVKQMMAKNNIRYTRYAFCQHGGLFDQMPVKKGKGQIPLKQDGPKSDMAKYGAYNRAMSKYFALVSYSDKKGKEVRQLVPIDAVTEKAYLADPDGYVSSYVGAPAKVLIPCVKYNACLSFDGFRMHISQKSGNQLGYKPAMQLVVSYEQEEYVRNITKYLSQNKDRPLNKYDGISAEENVALFDALVDKMSNSILSLRFGDMGAKIANKREVFCALTPEEQCVVLAEVLKILHDNVMMGDLTLIGLAKNAGKLQTNVKLSEIKGVTSVKLIHQSITGLFEQQVELLP

SEQ ID NO: 21186 - protein, 1110 aa, unidentified
  REGION 1..1110: note = Cas Enzyme sequence
LGKIIEICNKNISKSDKKDELIKCFDYLQEEKSLITNVIKSMLGYTFDINKIFETNINKNKISFSQDIENEEEIKTSINENIEIYNAIYTIYSWYILQDILKGKTYISEAFISKYNQYSEDLKLLKKVYKTYFKDEYNNMFRKEGKYNYVAYDGKNSGEAYKKCKPEEFFNQLKKKMEKLPDDYNLKEEITNRIKDNNFLVKINVKDNGAIPHQLHQIELEKILENQSKYYNTLKENKENILKLFSFRIPYFVGPLAKGHSKWAWVIRKSEEKVRPWNFEETIDIDATAEKFINRMTNKCTYILNEDVIPKQSLLYSKFCVLNELNNIKINDRKISKDMKNLIIEELFKKKKKVTSKMLINLLKTEGIEVSSITGLSDGNNFNSNMEAYIDMKEIFGKVDETNIEKCEKLIYWITVFEEKKILQRKIEKEYKDISSKQIEELIKRKYKGWSRLSKKLLVGLKSYDNNESIMEKLENTKLNFMQIINEKSFGFKEQLEKLMPKPQGKITHKDIEEIPTSPANKRAIWQTICVVNEIVKIMKKEPKNIYIEFARSEENNKKMKDKRAEKLLKIYTNIEKQVQELKNYNPGVYKELKKHQTDKTLAEKMYLYFIQNGKCMYSGKPLNIDELDKYEVDHIIPMSYKYIDSLDNKALVIREENQRKSDNLLLEDNIINSRQEWWKSLLDNGLISQTKYYRLIKRKLLETKDETIQFIERQIVETRQITKYVTNLLSNSYNSKIYAIRAELVTLFRKKYEIYKNRGVNNYHHAHDAYILSCIGNILDKEWHGLEEFRYNEHIKNYLKDNKTKKEKHGMIIGFINNRIDIEKVKKTINYKDCFIRRMLEEETGEFYNQTLYSPKEKPNIPLKKNRVANNYGGYKGENKAYYTILSYTNTKGEKEYELIGIPIQVSYMIKNKKMTLEEYIKNNFLPKEYTEFKILKSKILKNQEYLDKNNEKMRFCSDVEIRASQELIINEKMSKLIYLMNNEKTNSTDKEIEELEEGYMYMFQYLLEKLRTQYKIFETIYKKLLEKQSEFETLEEKDKKATINGLIDLMNQGQGNLTAIGLTDREGRKSGQKFKTERLLNMTFICKSVTGMYERRYTINGLENNCNK

SEQ ID NO: 21187 - protein, 1389 aa, unidentified
  REGION 1..1389: note = Cas Enzyme sequence
MKKTYLGLDIGTNSVGWALTNENYELIHLRGKSAWGVHMFDEANTAKERRNYRSTRRRKARIKRRINLLQDLFAAEMAKVDPLFFTRLNNSTFFSEDKDKALLGKKDSLFSDKNFTDKDFYKNEKTKTIYHLQKLLIDDKNTKYDLRFIYLAIHHLIKYRGHFHFEGQNINIDEFGKNQIKEGFEIINDYLSMNNLTTFVFSADKIIGFEKIVENERGINNTKKALKDLFNTKEKIVVNILDFIANGKVKLKKIFDNLELQEEENFEIDFSVEDFETQYVEAEAIIGEEHIVLIDAVKQLNDYLVVARLMNGEKFVAHAMVKKYNKHKEDLRKLKKIIKENCSQEQYDTFFKAADQENNYPAYIGMTKIRGARHKIKKLEKPSEINKFFRNINEIIKNIHSDSANNIREEIEKGIFLPRITSVENSQIPHQFNAYQLEIILNNSAKHYPFLNKKEEGLTLKEKIIKLLTFRVPYYVGPLSDKHQIDSKKGGFSWIVRKSNKEVLPWNLDKVIDLEKTAEQFILKMTNKCSYLIGEDVLPKQSLLYEEYNLLNHFNVIRINGERLSKVEKEALIENIAKKRVNVTYQTIAKYFDNRLKKDVTITGIDEEMKLSLSSFHKFNKIFPGRINNEPQNAKLMRNLEKIVFLGTIYSSQVDFTNRLKSDKEFNKFFSTEEISKMANLRFKGWGSFSRLLLTGFDELSKSNDKVITYQDEKTGNELSIIEIMREEPLNFNEVLFHEKYQFSKLISEFNHEGDSELSVDELIDNYYVSPAVRRSIRRTLKIVDEVIATNNGIIPDKIFVEVTREDEKTRKGKGRTDSRLEKMRNIYKKAIKDAEEFRVLLDEISKDDKNDDYLRPKKMYLYYLQNGKCAYTGEPLNLKDASIDHIIPRSLVKDDSFDNLVLVKDTVTNQRKTDEYPLNFDIIQKQKPLWLKLKRNGLMSNVKYEKLTRTRELTAEDFEGFVNRQLVITNQANKAIAEILKTKYGVSTIVYSKASNVTDFRQKFNLIKGREINNAHHAHDAYLNIVVGNYFNTRFGARYYYRDDKKFKWNPKTAFNFNVGGCWDKDKDLGTVKKMLNRRDILFTRMPIIETGQFYNQKASKAGDNLIPIKEKGPLSDTTKYGGYSDKKTAYFAIIEHTAGNKRERIFIPIPVIINQKIIQKQTTLVEYLKTQLKLVEPNIIYSPIPINTIVKRGQSLQFISGVQGSGATHLIVRNMIEPYFDDLTFEYLCLINKYFERKAAAKVTNEDEQLSRENIEKIQVIFSFNEKEKTRKNDRLRYITRDKNEKAFECLIKQIEKPIYEKSFGSRREKILENMEKFYDLKLVRQVEIIRAFHEFLKTGVPAIKIKLEELGVKSGTLTMSYKLEDMTIVKQSITGLYQKEIHIKEV

SEQ ID NO: 21188 - protein, 1148 aa, unidentified
  REGION 1..1148: note = Cas Enzyme sequence
  SITE 18: note = misc_feature - Xaa can be any naturally occurring amino acid
  SITE 370: note = misc_feature - Xaa can be any naturally occurring amino acid
MAKKINIGLDMGIGSVGXSVVNAEEFDGKESENSAASRREKRSSRRMHRRSRLRLDTLLKKFEKYGFLKSVDDFKKIKDHQFTNMAELKQYALTNPISLEQMMLILYHGLKKRGSFNLKQDPDFIKKILEDNKIKEEDLTREELDQKVAELSKELPSEMQLKLLNENGKINGSDNRFDHKMFKKELEQIIKFQQENGKINLPDQFVIDFFKLFDAKREYWQGPSKGNVNSPSLFSWQTGEGSKKDQEVFYGRLIGKDSYDRNEPRAPKKGMYAALFNLLNDLNNLKLVGINRQSNKITKEEKETIIKSLFPKNKVENLTIKKLSKFFDCKEDEILGYRVEGTKRTPIFTKFEGLNDIFNNLKKASLDTSXLTYENINLIDQIILILTKGQDLDIVENNLKELFKENDFLFAEKMAKELSILTSKYSGSHALSNKTILKVYDLMLNEPLNSQEAFKRSNIKKEYKLNDKFNSLKDMKYIPVLEEEINNLFISPVVKRTLIQTLKVLRAIQIEFKDYEIDSIIIELAREKNSEDERKYITFIQEQNKKTNDKIAKLLGVNSINDIEGKLLAKISLLLEQDGKCIYCGRNIELDDLIEYSDKYEIDHIIPESISYNTKRDNLVLVHSSENNAKGNKTAYQYIISDKSKIKFADFLALIDDVYNKAMKADPTKIKYFQQKIINLTTSIDLENDENARLKFVNRNLVDTRYATTEIYAYLDDLRHLLKDNPLGKVKLKVLNGAHTDFIKGVIFHLPKKNRDDFRHHGIDAITIAYSDIIDQELFKSRREYGAKDATKILSDKYLELRAREKILDYPYHFSKKSNTNFNRQLTNDTLYSFKNINGEFKQMGKVNLTATDPGTMKILASMFDDNAKEHKISLLELYDSRTFEHLKKIYRSYPIGYTYKVSFKNKKNETVEKEEKIKNPFLYFKTHENQKITLQKNIKNPEKNPEIKTLRYYGDNMGKLLDVSHKYDVDTNKTKVGFTSLKPIRLDLYRHKVTKKYKIFPVNISVIKTMNEKEIIIDEFKYLEMISDKKYGYNINLNEFEKVLELFPRGTTIRITSQDLKYNKDIFEVVGSPNIGKLEINYIDHRGNDKNGDPKRIIVAVGTLSNIEKINTNILGTKNNFVEKEEFLIKDKKNLAYSEMEEYNKNV

SEQ ID NO: 21189 - protein, 1158 aa, unidentified
  REGION 1..1158: note = Cas Enzyme sequence
  SITE 24: note = misc_feature - Xaa can be any naturally occurring amino acid
  SITE 217: note = misc_feature - Xaa can be any naturally occurring amino acid
  SITE 236: note = misc_feature - Xaa can be any naturally occurring amino acid
  SITE 247: note = misc_feature - Xaa can be any naturally occurring amino acid
  SITE 320: note = misc_feature - Xaa can be any naturally occurring amino acid
  SITE 386: note = misc_feature - Xaa can be any naturally occurring amino acid
  SITE 431: note = misc_feature - Xaa can be any naturally occurring amino acid
  SITE 607: note = misc_feature - Xaa can be any naturally occurring amino acid
  SITE 758: note = misc_feature - Xaa can be any naturally occurring amino acid
MDKNKSEKIKVNVGLDMGIGSVGXAVVNADHFEIIDAGVRLFPEAAKEASNSAASRREKRSSRRMHRRARLRLDTLKELFVEFNLLDDAKDFDELKNTDFPSMAALKQYALTEPISTEQMMLILYHTLKKRGSFNIKEDLLDDIIKENKANGIELTNEELNAKVEELKKKLPSEYQLENFEKNGIIKGSDNRFPHEGFEKELQQIFDKQNELGNREXSEDFQAKYFQIFNRKRDYXEGPNKPSSFSXQVPGDKRATQQEFYDRLIGMDTFNRKEPRTAKKGMYANLFNLLNDLNNLTISDEPNREQNKLTKSEKEKIVNXLFEHPKNKTRNLTLKELAKLLDCNPDHIEGYRVEGTGKSQKANFTKFDGLNDIFKSLTKAELDKTXLTYANLALIDDVIVALTTAQDVEGAQASLEKLYDANKISFSPTAXNKIAKELSILAPKYSGSHALSRKTILVVLDDMFDKPMNSQQIFKEMGIKKQYQFDFSKNEKYIPVLADEINNLFISPVVKRTLIQTLKVLREIQIEFKDYEIETISIELAREKNSDEEKKYIQFIQDLNKQNNEKIIKFLGVDSIDQVPKNALIKLSLLMEQDNKCMYCGQELDPXKVVNYPDDYEVDHIIPESISFNSKRENLVLVHNSENNAKGNMTAYQYINSPQSKLPYRKFAELVNEVYSKQIAKEPNSAKQLRQKIYYLTTDFNFGDEKNSKPKFVNRNLVDTRYATTEVYNYLNDLRQKLVDNPLNHVKLKVLNGSHTDXIKRAIFQLPPKDRNDFRHHAMDAITIAYADKIDQEFYKLTNKFGAKEAMELEKENYDGIRSQILDFDYHFSRKTNQNFNRQLSNDTLYSFKEYDGEFHQMMKANLTTNNKGEIAVLTRIFDKNSPKHLVSPLEIYDPKTFAYLQTIYQGYPIGETYMAKQFNKKTNEFYDKEAKIINPFLYFTGQLKQKIYLQKNTKNPEKNPEIKSIRYYGNTMGKVLDVSHKYSVNQNKTKIGFTSLKPLRLDLYRDKNTGVYKILSINVNFARKINDKKIEIDDYKYLEALKNSKISLENYEKVLELFPRGTTIRITSKNEKYINQEFEVVGSAHDGKIEVDYIHRKKTEEEPTQIELAVSQLSLIEKVHVNILGTKRKYISKEIFDAKKVPNSLEFKQDKSYNKSV

SEQ ID NO: 21190 - protein, 1158 aa, unidentified
  REGION 1..1158: note = Cas Enzyme sequence
  SITE 24: note = misc_feature - Xaa can be any naturally occurring amino acid
  SITE 217: note = misc_feature - Xaa can be any naturally occurring amino acid
  SITE 236: note = misc_feature - Xaa can be any naturally occurring amino acid
  SITE 247: note = misc_feature - Xaa can be any naturally occurring amino acid
  SITE 320: note = misc_feature - Xaa can be any naturally occurring amino acid
  SITE 386: note = misc_feature - Xaa can be any naturally occurring amino acid
  SITE 431: note = misc_feature - Xaa can be any naturally occurring amino acid
  SITE 607: note = misc_feature - Xaa can be any naturally occurring amino acid
  SITE 758: note = misc_feature - Xaa can be any naturally occurring amino acid
MDKNKSEKIKVNVGLDMGIGSVGXAVVNADHFEIIDAGIRLFPEAAKEASNSAASRREKRSSRRMHRRARLRLDTLKDLFVEFNLLDDVKDFDKLKNTAFPSMAALKQHALKEPISAEEMMLILYHTLKKRGSFNIKEDLLDDIIKENKANGIELTNEELNAKVEELSHKLPSEYQLENFEKNGIIKGSDNRYPHEGFKKELEEIFKKQNEFGILDXSEDFQAKYFEIFKRKREYXEGPNKPSAFSXQVSGDKEATQQEFYDRLIGMDTFNRKEPRTAKKGMYANLFNLLNDLNNLTISDEPNREQNKLTRIEKEKIVNXLFEHPKNKTRNLTLKELAKLLDCNPDHIEGFRVEGTGKNQKANFTKFDGLNDIFKSLNKAGLDTTXLTYDNLSLIDDIIVALTKAQDVEGAQTSLEKLYTTDKLPFSPTAXNAIAKELSILAPNYSGSHALSKKTILIVLEDMFDEPLNSQQIFKEQGIKKEYQFDFSKNEKYIPVLATEINNLFISPVVKRTLIQTLKVLREIQIEFRDYEIETISIELARERNSDDERKYIQFIQDLNKQNNAEIIKFLGVDSIDQVPKNALIKLSLLREQDNKCMYCGQELDPXKVVNYPDDYEVDHIIPESISFNSKRENLVLVHNAENNAKGNMTAYQYVNSPKSKLSYRKFVELVNEVYSKQIAKEPNSAKQLRQKIYYLTTDFNFGDEKNSKPKFVNRNLVDTRYSTTEVYNYLNDLREKLVDNPLNHVKLKVLNGSHTDXIKRTVFQLPPKDRNDFRHHAMDAITIAYADKIDQEFYKLTNKFGAKEAMELEKENYDGVRSQILDFDYHFSRKTNQNFNRQLSNDTLYSFKEYDGEFHQMMKVNLTTNNKGEIAILTRIFDKNSPKHLVSPLEIYDPKTFTYLQTIYQSYPIGETYTAKQFNKKTNEFYDKEAKIINPFLFFTGHLNQKIYLQKNSKNPEKNPEVKAVRYYGNKMGKVLDISHKYSVNQNKIKIGFTSLKPLRLDLYRDKHTKIYKIITINANLAKKINDKTIELDEMAYLNALNENKISLEDYEKVLELFPRGTTVRLTSKNGNYINEIFEVVGSPMDGTIEVDYIHRRKYDDEAARIVLSVSQLSSIEKVHTNILGTKRKFIQKEPFNLEKNGNSIAINKAESYNKSV

SEQ ID NO: 21191 - protein, 1154 aa, unidentified
  REGION 1..1154: note = Cas Enzyme sequence
  SITE 19: note = misc_feature - Xaa can be any naturally occurring amino acid
  SITE 231: note = misc_feature - Xaa can be any naturally occurring amino acid
  SITE 247: note = misc_feature - Xaa can be any naturally occurring amino acid
  SITE 381: note = misc_feature - Xaa can be any naturally occurring amino acid
  SITE 602: note = misc_feature - Xaa can be any naturally occurring amino acid
MSKKKINIGLDLGIGSVGXAVVNAEEFEIIDAGVRLFPEAGKESENSAASRREKRSSRRMHRRSRLRLDTLLKYFVKYGFLNEVNDFYKIKQHRFASIAELKQYALTNPISLNEMMILLYHSVKKRGVFNFKQDVLENKMKDKKTGEIELSSDDLEKELEEKSKKLPSELQIKNFEENGKITGSDNRFPHEMFKKELEQIISFQKENGRVKLPEEFVNDFFVLFSRKREYXEGPSRGNSQSKSLFSXQTGKGPQKDQEEFYDRLIGKDSYDRSQPRAPKKGMYAALFNLLNDLNNLNLSGINRENSKITKEEKMKVIESLFPKTKVENLTLKKLAKILECEEKEIEGYRIEGTKKVALFTKFEALNDIFNTLKKVGLDTSXLSYENRDLIDEVIVILTKSQDIVAAEDRLSIFFRENNFEFASKMAKQLSVLTSKNNGSHALSNKTILKVYDIMLNEPLNSQLVFKENNILKDYKFNFSNEAKYIPVLEEEINNLFISPVVKRTLIQALKVLRAIQIEFRDYEIDSISIELAREKNSEDERKYITLVQELNKKANDKIANLLGLENVDEIPGKLLAKLSLYLEQDSKCVYCGRAIDLEDLKXSPEKYEIDHIIPESISFNTKRDNLVLVHSTENNDKKNLTAYHYINSDKSKLNYSEFLTLINRIYDQQIQADKTKTKQLRQKIANLTNSTDFENDENSRLAFVNRNLVDTRYATSEIYAYLDELRHNLKNSPLNNVKLKVLNGSHTDFIKRSIFHLPTKNRNDFRHHGIDAITIAYSDIITQDIRKTSRKNKDENAVKLVSQKYDGARAQILDHDYHFSKKTNTNFNRQLSNDTLYSFKKYDGEFRQMMKVNLTDVDPGTMNILKNMFSNEADSKNHVVSLIELHDSETFNYLKKIYNAYPIGHPYKVQYKNSKGEISEREEKIRNPFLYFKIHENQKIYLQKNTKNPEKNPEIKSIRYYGNKIGKLLDVSEKYNVDATKTKIGFTSLKPIRLDLYQNKLTNKYKIFPVNARVIKAVNEKEIIIDDFKYRDMVSSKSEGFNINLNEFEKVLELFPRGTTVRITSQDLKYDNEVFEVVGSGHIGKIELDFINKRKDPADKIRIEVAVGTLTKIEKVHTNILGTKRKYITKENFPNRKIQKSIEVINEKEYNKNV

SEQ ID NO: 21192 - protein, 1381 aa, unidentified
  REGION 1..1381: note = Cas Enzyme sequence
LSIQQSIIQNEGKGNNMNKNYYLGLDIGTNSVGWAVTDENYNLCRFRGKDMWGIRLFESAEPASDRRLKRSGRRRLRRRNQRIKLLQEIFAKEISNIDETFFIRLNESKLHMDDKSVKEKHPLFIDEAYNDVHYYGEYPTIYHLRKELIVNEEPHDARLVYLAIHHILKTRGHFLIEGNLGEAKDFNIAFDKLCYALKEDLGWENNAENAKEQIKNILTDKNKVKSDKVKEIKECLNTNDSILSKTEIKRQNIITDIIFKLIVGNKGDIEKLFALEKKSLTKGSFSFAESNYEEDVRPDMEAEIPNFIHIIDLIKGVYDWRVLVEILQGEDYISNAKVSQYEKHKNNLKNIKKLIHENFGREVYKNLFVDNNNKSYSGYIGAANKNCKKITVKKNSKDDFFKELRKKLEEIEEDGYGYVMAQELLEAEKIEDILPLQRSKSNGVIPNQIHKAELVKILDNAAKYMPFLNEKDSDGISNKEKIISIFEFRIPYFIGPLSDRHRKQGSHNWMVRKDGENGRIYPWNIKKIVDYNKSNEAFIQRMTNKCTYLVGEDVLPKNSLLYSKYMVLNELNNLKIRGNKVSVKIKQNLYNDLFKNRAKVTGKMVLEYLKKDLPDLQKEDLSGFDSDFHTSLKSYMDFKKQIFPEGLDKSETQNMVEDIIRWITIYGDDSKMIKRVIEKEYPDKLTEEQLKKVCRFRYSGWGNFSKKFLKGIEGTDVDTGETFNLISAMWQTNENLMQLLSGRFTFTEEIERENNKVTEKIEKISYEELVDTMYVSPITKRAIWQTIQISEEIKKVIGCPPEKIFVEMARGGGEKGNRTVSRKKTLAELYKSCKADVRYLAEKLNEFEDRDLNSMKLYLYFTQLGKCMYTGEAIDLDELMKKNSRWDRDHIYPQSKIKDDSIDNLVLVNKTVNSHKSNDILDGEIQNKMVGYWKSLLEKGFISKKKYDRLTRKGEFSEEELAGFISRQIVETRQSSKAVAELLKRINEDAEIVYVKAALASNFRKKPLNMLKSRRLNDYHHGKDAYLNIVVGNVYNAKFTSNPIHWFKRNKNTNYSLNKIFNFDIKRGDKVIWEKCTEDEDGIGHGGTIDRVREIMGQDNLLYTEYTFCGKGEIFNANPISKDNKNINISLKSGLDPRKYGGYNGAGTSYFAQIEFDGKKGERVKNIIGVPIYIANQLSHNRKAFEDYCKEVKGFKNVKILVPKIKKNTLMLIDGFPMRIRGENEKNLEFRGGIQLILDTTNMETLRVIEKYLEKSKGDKEHRINEKLDKISHESINKLYDALLDKLSGIYAKRPANPISTLRKNREKIIDLKEGLYDKVILVNEVVNLLRCDSENKANLSFVGGSKLAGSMTVNKNTVGKSKLEIINQSVTGLFENRKEI

SEQ ID NO: 21193 - protein, 982 aa, unidentified
  REGION 1..982: note = Cas Enzyme sequence
KNIIKTWDECETKDYIINEIDKGTFLPKQLTSENGVIPNQVHKKELKQILKNASQYLEFLNEKDSTGYTISEKIVKLFEFQIPYFVGPINFKVGESENSKHRHNMWSVRKEAGAVYPWNFEEKIDIKKSSEKFIENLVNHCTYLNDEKVLPKNSLLYEKFTVLNELNNLKINGIKMSVSLKQQIFNELFKTGKKVTGKKVIEFLKKEGIVDNDGNVEISGIDGDFNNKLSNYKKFLDIFEVDTLTYEQEQMAEKIIYYSTIYGDSRKFLKEKIEEEYGDNLSEKQLKRILGMKFKDWGKLSKELLMLEGAEKGANNEIGTYKTIISRMWDENYNFMELVGNDNFTYAGDIQKKTKVIEKTLSTIEYEDLDELYISAPVRRMVWQTILVLKELEETLGCAPKKIFVEMTRDGKVAKERTQSRKNKFLDLYKACKNEDRDWKGELESKGEAEFRIKKVYLYYTQKGRCMYSGEQIDLDKLLTDNNEYDIDHIYPRHFVKDDSIENNLVLVKKQINAHKSDTYPLEEEIRSKRHIMWKILKDGNFITAEKYNRLMRNEPFSDEERANFINRQIVETGQGTKVIAELFKQTFPESKIVYVKAGNVSDFRHKFNLIKCRNVNDFHHANDAYLNIVVGNVYNTKFTDNAMNYIKNYKKDPKKYEYHLNKLFDYPVSRNGENAWVTNGGESINTVKKIMAKNTPLVTKMNYEAHGGIADQTIYSADEARKAKGVGYISVKSSDEKISDTLKYGGMKKFTGAYFILIEYLKKGKKVRSLEAMPLYLKKQLDTNEKIEKYFEKQYGYKEVKVRFNKIKMYSLIKVNGFYLYLTGRSGNKLFVSNAVQLALSTEEVEYVRNITKANEKDLSTEKIMKDNIISEQKNIELYDRLTDKHLNKVFSKRPNPVGEKLAEWREKFVQLAIKEQIYILIQIIQLSQLSNMGADLISIGGVKKTGVATLNKVISDKEEFKLINQSVTGLYENEIDLLTV

SEQ ID NO: 21194 - protein, 929 aa, unidentified
  REGION 1..929: note = Cas Enzyme sequence
LNNLTVKEPNENTDSDGKLTTEIKKKIIEVGKTADGQFGLTQIVKLIGTKKEHIKGFRVNKSDKAIIHTLSGYRKFRKTLAEVEIEANYLPIEFFDKVADILTLNSEKSEVRKQLEKNDFEFKNIENFDKIKDIIIEQNKDLLVDGRATWHGFSYKTLNMLIPELENTSEEQMSILTHLGYMKPDNEKYKGKGLKNIPSKSITDEIYNPVVAKSVREAINVFNAISKRVGAENIEHVVIELPRDDNADDEKRKLQKFQKEQETEKSKADDEILQKLLISSEALKAEYRKKKKLSIKVRFWYQQECLCPYCGKNIEAKDLIYQNDSFEIDHIIPISVSFDDSQNNKVLVHTSCNQAKEKQTPIGWINNGGGFGQPVTEYKAKVLANKHYNKAKKDNLLSEVDLNNLEVRQGFIARNLNDTRYASRVVLNEFYAFFKSYNLPTKVKVVRGKWTSQMRKKWDYKTLEKTRDTHHHHAIDASIIASFPILKNFDKVVKLIDVDKETGEILKDREAVKIAKEQELLVQMPVVTNEIYEKEFRDLYNSPLFKQVTDANDITNPDNPVKFSHKVNKKANRAVANQTIYSAQTFENIQRSLTENDEVIERREVQTLILDKISDIYAYDISGPKVAGYKKFKELYDKEIESKVLPESSIFLMRRNDIKTFEKLEQIMKDYSEFEEISQSDGKVKKINVSPFELYRREHDYITKYTRKDNGLLGNGAPIKSLKFYSSAVFIEDKKAEQPEKSKGKLDITPKNARVGKRVFLDSLELWRTDLYFNVEKDKYEFLFLRQSDLKQAPHNKITIPNDVYDYRKRACKVSDNSEFIMSLYRGEQIELSFKKDFSKQRHKFLFWSGGSDSSGQKWELKPVAKSQFIKGEPEPIYGMDEEGNNIKLFTVNGQWLVAMSGFSDIRKINTDILGTSYYVNKEKLKLDI

SEQ ID NO: 21195 - protein, 1137 aa, unidentified
  REGION 1..1137: note = Cas Enzyme sequence
MYNIGLDIGIASVGWAVIENESGSIVDLGVRLFSSRNADNNAERREKRSSRRLIRRRVTRLSDAKKVLSKAGFVQENMYNHVSPYEIRVRGLESKLEKGEIYRAVTHIVKRRGISYLDEDSLDAKSEGQSFKDEVTRNARLLQEFTPGQIQLKRLKEGGKVRTGYNDQNEYQLNIFTVGAYAKELERILTKQQEFYPEITTEFIQAFVRQGTGEEAGLIYRKRPYYHGPGNAANNSQYGRWAHYHENGMPANNIFDQLIGKDLIGEIRASGISLSAQKFNLLNDLNNLTINREESKLSTAEKNMILQYLMNDEVKTFGPKNLAKLLELEMKDIRGWRVDKNDKPQIHNMGPYRTWKNVFAESGIELGDLPIDTVDAIAKIITLNTDLDAVEQTIALELPDADPKLKAAILDKFHQLKVKGSNATWHSFSSKLIGILIPELINTSEEQNTIIERLKIKPELRNKFANLPHIPVEDITDEIFNPTASKSVRQALRVFNQLIDRYGKENIENVVIEMPRDKNEDDQKKVIADIQKNNEKRKNDGKNYFIAKSGWTEEQFEANIRKGRFAAKLNYYYEQDGRCAYSGAPIPPEDLLNEKTEIDHIIPLSISLDDSINNKVLVTSTANQVKAQRSPKQAFDESGAAMGQTWDEFKAWVLDRKYKKYKRQLLLFEGDIFNPETRNKFVARNLNDTRYASREVLNAIQSFFSGSENHTKVQVVNGSFTHTLRKKWGNVMEKSRDTHHHHAVDAVLCAATPGIRVDKFKFVEGQDGVPYMLDQDTGELIKYHEYKKLSLYNRSTYTPKWDNFIEQLTPTRLFPRIKFSHQVDRKANRKISDATLYSTRVIENVMVKSGKEVKTEESYIIGKIKDIYSVEGWKAFDKNKEKLLMKEIDPKTYEKLIEISTQYPAKVEVQDQSGKTKSIDISPFKRYCEDNDVPYVTKYSKKGKGPAIKSLKYYDKKLGTHINITKDEIGRDIDKTNHNKQVVLLSTNPWRTDVYYEPSDRSYRLLGIKYNHLKFSGEKYGIPRNLYENLKDEEGISRNAEFRFSLYRKDGIQITNGEDTIEGLFHSRTMETKNYFEMKPIEKSTWDKNEYLSFFGNAGASGRFRKGLKKNFVLRKFYTDYVGKRYFVDQEKLTGII

SEQ ID NO: 21196 - protein, 1332 aa, unidentified
  REGION 1..1332: note = Cas Enzyme sequence
MGKEYYLGLDIGTDSVGWAVCDADYKIPKFKGNAMWGIRLFEKSNSAEERRGFRSSRRRTQRKRERLKLLEMLFDEEISKIDPAFFIKLRESNLYLEDKSTKIPYCVFSDENYTDKDFHRDYPTIYHLRNELIKNNKPHDVRLVYLALHHIIKNRGHFLFDYSYKNDKSGDFMPIYNDLKNYFYDNYEIELDCSDVDEFANTLKDKSKGKTKKNAEIAELFGVSKKDDKVLYSALSLLSGSSVKLFDIFDDESLKDVEKKSVSFSSGFDDNANDFQSYLGERFELLEKLKAVYDWAVLADILDGKEYISEAKVAIYEKHKRDLRTLKKYIKIYMPEKKAEIFNISSKDNNYVAYSKHIKTSSGTGVLNSTCTQEEFCAYLKKTLGICKDASYEEMFKEIENSTFMPKQVTKDNGVVPMQVNEKELVAILDNAKEYLPFLLNKDNDGKTVYDKIKALFEYRIPYYIGPLNTHSTKHWLVRSNEKIYPWNIEDVVDFDKSAEKFIEKLTSKCTYLPQYDVIPKHSLLYSKFCVLNELNNLKIDGEKISVQLKQDIYNDLFKKYYKVTNKKLCDYLKSRNIAFDEISGIDNDFKSSLKSYKDLVAYNLTDEQKEEIVKAITIFGDDKKLLKKRLKNEFGDCLSDDEIKKICKLKYTGWSKLSREFLTDVTAVYKETGELINIICALWETNYNLTSLLYSDEFCCDDKENKTFNDKINELNSFGNDKTLNQIVEELYVSPLVKRPIYQSLLITKELEKIMKCPPKKIFVEVARGAEEKKRTVSRRNKLLDLYKSCKNDYPLLFDELQNNTTDDELKSDKLYLYFTQFGKCMYTGENIDLGDLFNKNLYDIDHIYPQSKIKDDSLDNRVLVKKTTNAKKDNEYPLSSQIREKMTPHWKALLDKGLIDKKKYERLVRNYPLSDEELSQFISRQLVETRQSTKAVANILEQLYPRPDTEIVYVKAALASEFRHQYDMLKCREVNDLHHAKDAYLNIVVGNAYNVKFTHNKANFIKGLQNNDKAYTVRLDSMLKHNIDGAWIADNNESLNIVKSTMNKNNIRYTRYAFKQKGGLFDQNILKKGKGQVPIKANDKRNSIEKYGGYNRPSSSYFSLVKYFDKKGKKIIQLVPIDSFEEHIYQNTPERYVSEKIGCDCEILIPCIKYNACISIDGFRMHLSSKSNGGATIVCKPSIQLVVGYENEKYIKGIVKSIETGFNADILKRYNINNDNNLILYDLLSYKIKNTIYKSKFEKVFICMSSGREKFILLDLNEQCYIINEILKILHCNVVTGDLKLLGGSGQSGTVTTNSALSNIKNVKSIKLINQSVTGLFEKEIELLNL

SEQ ID NO: 21197 - protein, 1134 aa, unidentified
  REGION 1..1134: note = Cas Enzyme sequence
MTDRISLGLDIGVASVGFSVLNIDQGKVVELGARLFNARIAEGNTGISGRRSSRGSRRLLNRKRQRRQDVAKLFEKFGLIDSYDKDDFSITFNTNSNPYKLRVKGLSEKLTKQELSESLYKIIKHRGISYDLKDADAEIEDSDYSSSLQENTRELQNKTPGEIQLERLIKFGEVRGKIEIDDETENQRVLLNVFPTKAYEQEAKRIIIMQRKFYPDILTDEFENEYCTILTRKRDYFVGPGNEKSRTDYGIYKTNGRTLDNLFEELIGHDKIYPDELRASAASYTAQLFNVLNDLNNLRILSYEDEKLTQADKEKIIDTLKNNVTTITMVSLIRKITGCEKDDIKGYRTDEKDRPQISSMAIYRKVHKILLKDGIDIGNWPIAFIDELSFILTLNTENGEIRKQIINRLQPKYDFINDELIQKIIDNKSSFDISTNNKWHRFSIKTMNQLVPVMIERPVEQMTLLNELGLIRKNTKRFEGNKYLPYRRIAKDIYNPVASKAVREALKIVNAVMKKYDHIDYLVVEMPRDKNLDEEKKKITDFQKKNRVEKDKAFNSFVMAIGDEEKVKVALSKNRELRMRMNLWYQQNEHDPYNGQTIKAIDLIENSKNFQIDHIIPQSVSMDDGINNKTLCFDSMNQDKGKKTPFEFLNEGHGQGWDKFKATILSNPKFNKYKRQNYLFAENVHDIETRKRFIARNLVDTRYSSRVVLNSLQEFFNEKNDGTKVTVIRGKFTSNMRKHWDINKTRDTFHHHAIDASIIAATPFLNMWKKSGTIFPSKVSEDSIDIETGEILEDKQFDKIMYQQPYNGFVDDIKSIDDRVKFSHQVDKKMNRKVSNATIYSTRMGRLAKDKKETEYVIAKIDNIYSVEGYKRFKNIFEKDKTKFLLYRYDPKSFSKLEEIVGKYSDKKELVKNNNEVKVIEVSPFELYRCNHGKVKKYSKNGKGPVIKSLKYMDQKLGTHIDITPTEVKNKHVVLQKISPWRTDVYLNHKNNEYEIMGIKYSDLKFNAGGKYGIKKDRYLEIKNQEKISENSEFLFTLYKKDRIMIRNKLTNEQVEMLFSSRNMSNDNYAEIKPIDRFAYDKSGVNIPIYGMAKEQIKKRLIPKNHKIWKVNTNILGDPYYIEKESENPQNILD

SEQ ID NO: 21198 - protein, 954 aa, unidentified
  REGION 1..954: note = Cas Enzyme sequence
MKKILSLDLGRGETKNSTGYAVINNNGVDNKEIIAYGSIIKYVGDNKKRRAMRLGRNRLKHKRQLKKSIKNLLIKTFNIKEDFYIHNGDVDFYNAFKNSYKVKIELEQLARILYYSFHHRGYIESRKFDVIDEKENENENEEENLKKKEENKIKEKISVVKNEMGDKNIGEFLYDKFVNENRVRGELCFDNKTIKNNIKNIILKQKEYYPNIITKTFVNKILTKLSQRRPLPSFKNMIGFCSFEENKKRCKKASFEFQEFRILQQLNNLRIDNKELTKEQFDLLYNNLSKKSKMTKDKILKLFGYKKNININLEEITGNTINSTMINNFGEDWWNNVKDKEKVVQDLVSIRSLKCLYKRGIIYFNSDKEKASKFSKINLEVGYSDLSLSAINKLIKEIKNGCGYSTAVKNIYGDLFYKKIEINDKTTIYDNKFSRLRNEYTDYNIQSSMAQCLSLFKKNKPDCVYIESTREEKKKKNRNKNKRNTENKTNKEINDEIVNKLKRDFGITTPKGKDIERYQLCEEMNHVCAYCGDIISFTSSEIDHIYPRKRYYDNSFTNKAICCSKCNLEKGIRTVYEAWGNDEKRMNIIKSRFEKNCGKYSEKTRRVLNKDFNDMSFEFTNANLNGTAKMAMANFKMFCMIFGCNFAGFDINGVQRVILINPNMTASIRRNLHIVKDRGWYSHHAQDAVIMGLIDKNNFNDILNFKVNSIAKYKEQIKGIQNDAEIYHKYNGKVNCQLHEETLYGLIEKNKCFIHKNIENLTPSMVEQIIDDKIKEELLNKLNECKKSGKNLGEKGVILGLSERDEGFFESRKIAGKIVKRVKILQNETPLKMTDKNNIIKYVKTGGNHHLEIFDDGGNIDTKMVTSFEANQRRKNKLKIFNFNNDKNYIGSYKTGDIFEFDGEKLKTKSMTFIKSSGQIIVKFDNVKYMTEKNKCEKQISSKEDLRQWLKHKI

SEQ ID NO: 21199 - protein, 1412 aa, unidentified
  REGION 1..1412: note = Cas Enzyme sequence
MEKNYYLGLDIGTNSCGWAVSDEDYNLLKAKGNKLWGVRLFDPANSAEERRLKRASRRNLVRRKLKLDWLKEIFKPEIDKVDKNMLDRINYSNLWEEDKLYFNKNLKSKDSLFFGEIDGKKYTDKNYFDEYPTIYHLRKELLSKPAKDVRHLYLAVHNIIKRRGHFLYEGSFFDNDRLLFLLADLIEFIGSMDYESIEMINLKKPNEEVESSIMNILLKNAGIRQTKLEFNSIFEAKNKAEKAIIASFVDGKINLKDVLKKDTETELKLNFNDEDFESKLDQIKGELDDDELIFISKLNVIFSTILLKKILGNNNYLCESMVDIFDEHKRQLKFFKQFIKDYYKKEYFKIFRDAQDKTKKSQEKFVNYVLYVNGDIYNGHKRVIGLNESSRDKESFYKFVKTILSKPTQNQEYDENDYESRKLQILEWIENDVFLRKQRTKANAVFPNKLYERELKKILEVSAQKYEFLNNVDELGISNKDKILKILTFRVPYFVGPIGNSENGWAKRDKTIDYKPWNFEKMINLDDAEDAFIANMTNKCTYLKTEDVLPMQSILYSAFRVLNEINNLTIDGNKITVPLKQQIFIELFARRQKVSVKMLKDFLVANNYFSNEEIKEISIGGIDKEFANNFASFSRLAMSHNFALKFVRDNIDVFEKVIKYHTIISDKTRLEKRIKREFSEILNDAQIKELKGLNFQGWGRLSQKFLQGLYFVNKITGEKTNIIGEMWNTNQNLQEILFNSSYTLAEELEKYSEQKKDDIVYNDVQELYCSPAVKRSVWQAIKIIKELKNTLGGFPSKIFVEVTRDDDQKGEQGRKLSRKNNLLKLYESKDFLVTIKKLSIDIEELMNELNKIDNTTLRSEKLYLYFLQLGRCAYSGEKINIEDIANEHLYDVDHIIPQSKLKDDSINNKVLVKTEYNLAKLDTYPIFTIHPEWVEKQKSFWKMLVKLELMSKEKYNRLVRTNDLSEDELAGFIARQLVETSQSAKAVIDLLKTMIPQNCKIVYSKARFVSEFRNKFDIYKSRIVNDLHHCKDAYLNIVVGNVLNSRFTDDPRNFYKVKNKNSRLTRNIKKLFNDDSIIYASNSDKIVWNGKTDIKKVKDVCLKNDCLVTQMSYTKLNGMYYDETRYKSKKNNPAQNELFELKGDKNNPLSNTERYGGYNKLKIAYYMLVESERKGEKIKTIEAVPIIIYQRYKNDEDINVKILEYLSKESKLVNAKILIERINIKSVLKIDSGYYLLAGKTGDSFILHNANQWNISNEDILYVKALEKYAELKAKKSDGHLVEIENKVVLSKPSKQNNTEIALFRDKNIELFNLIINQLSKPIYAGMALGTTLKSKLQQYKDDFVNATVITQAQMLNGILLGISTGAASADLSLFGDGKIIGKIILSKNITGKNIKLIKESSTGLYYQEERL

SEQ ID NO: 21200 - protein, 1112 aa, unidentified
  REGION 1..1112: note = Cas Enzyme sequence
IFSTILLKKILGNNNYLCESMVDIFDEHKRQLKFFKQFIKDYYKKEYFKIFRDAQDKTKKSQEKFVNYVLYVNGDIYNGHKRVIGLNESSRDKESFYKFVKTILSKPTQNQEYDENDYESRKLQILEWIENDVFLRKQRTKANAVFPNKLYERELKKILEVSAQKYEFLNNVDELGISNKDKILKILTFRVPYFVGPIGNSENGWAKRDKTIDYKPWNFEKMINLDDAEDAFIANMTNKCTYLKTEDVLPMQSILYSAFRVLNEINNLTIDGNKITVPLKQQIFIELFARRQKVSVKMLKDFLVANNYFSNEEIKEISIGGIDKEFANNFASFSRLAMSHNFALKFVRDNIDVFEKVIKYHTIISDKTRLEKRIKREFSEILNDAQIKELKGLNFQGWGRLSQKFLQGLYFVNKITGEKTNIIGEMWNTNQNLQEILFNSSYTLAEELEKYSEQKKDDIVYNDVQELYCSPAVKRSVWQAIKIIKELKNTLGGFPSKIFVEVTRDDDQKGEQGRKLSRKNNLLKLYESKDFLVTIKKLSIDIEELMNELNKIDNTTLRSEKLYLYFLQLGRCAYSGEKINIEDIANEHLYDVDHIIPQSKLKDDSINNKVLVKTEYNLAKLDTYPIFTIHPEWVEKQKSFWKMLVKLELMSKEKYNRLVRTNDLSEDELAGFIARQLVETSQSAKAVIDLLKTMIPQNCKIVYSKARFVSEFRNKFDIYKSRIVNDLHHCKDAYLNIVVGNVLNSRFTDDPRNFYKVKNKNSRLTRNIKKLFNDDSIIYASNSDKIVWNGKTDIKKVKDVCLKNDCLVTQMSYTKLNGMYYDETRYKSKKNNPAQNELFELKGDKNNPLSNTERYGGYNKLKIAYYMLVESERKGEKIKTIEAVPIIIYQRYKNDEDINVKILEYLSKESKLVNAKILIERINIKSVLKIDSGYYLLAGKTGDSFILHNANQWNISNEDILYVKALEKYAELKAKKSDGHLVEIENKVVLSKPSKQNNTEIALFRDKNIELFNLIINQLSKPIYAGMALGTTLKSKLQQYKDDFVNATVITQAQMLNGILLGISTGAASADLSLFGDGKIIGKIILSKNITGKNIKLIKESSTGLYYQEERL

SEQ ID NO: 21201 - protein, 1343 aa, unidentified
  REGION 1..1343: note = Cas Enzyme sequence
MVTKKEYNIGLDIGTTSVGWSVVEANNQKVMRKGNKALWGVRLFDEATTAESRRIQRSTRRRYDRRRERIKLLQEEFKQEIDKIDKDFLRKLQESKYQESDKNNKSIILTKEEKKELKDYQNKYKTIYHLREELINNQEKKDIRLVYLAIHHIIKYRGNFLYQNSNFNTDNLDIKEQLKELFALLYNNIQALGIPDEYTEIINFDKLEHDLLNNSKNDTKALLKEDLEDIINRNFSIEFGKLMVGNKGNLNKLLMIEGNKIEISFSGTDYDDRYDEYQSVLGENIDILDILKQIYDCIFLKKIFKGNQNTSISSLMVKYYNKHREDLYFLKDLFRENRKIYNKMFRTGKDLCVYEKYITNKIDYDEFRKEINKLLAELFDCEANINQDLIDKYTLDIKVKIENGEFLPRITTTDNGKYPYQLNKSELIKIIENQGKYYPFLLEKTNDNKTYKLVKLLEFRIPYYVGPLVSSKKSKNAWLERRIDNVKITPYNFDEVVDKEKTAEEFIRRMMSHCSYLLNEYALANNSILYSKYKVMNELKQIRINDRKIELNFQQILLTEFFEKTTGTITGKKFKNFLVSSGQYSMDCGELRITGYSAENKFANNMQSYIDFFGENGIFENTSYDIEDAEKIIEWITIFDDKDILENKIRDNYKKLNESQIQQILRKKYSGWGSLSKKLLTTKYYKDKETELYKSILDLMEETDENFMQIINNDKYNFQQMIQEFNNIEDDKKLNYKLVESLATSPATKRGIYQSLKVVEEIVDYIGYEPKNIVIEMARSNEDKVRKDTKKEYIKKLYDGCKDSIENYKKLKHELDSHEITSQRLFLYFIQEGKCLYSGETLNIEDIENQSLYEIDHIIPRTLIKDDSIDNKALVKRECNQNKSANYVLPREYRNINQKKWWKHLKDNGLMSAKKFHNLIREKYIDEDINGFINRQLVETRQITKHVANILKSYHKKSNVIYLKAELSHNYREKYDLFKFRDINDYHHAHDAYLAAVLGEYKENFMKKKINFEMVKELNSKIIEMNEGKRKSLRYGFVINSLDENLSDIVCKISENLIDKETGEILFDAHSFNKKVEDTLYRNDIIISRKTEVKTGRFYKETIYKKGIGTINIKSNMPSELYGGYSNTITKNLMLIKYNDNQKKIIGLPMAIAARNNSNEIDMFIKSQINLKKNSTYEIVKDVIPFETEILYNDQNVFIKGYGVVNKNCEISNALQLKIKKSKMCKWKYALQYILNNKKQYLSDAENYSDEIIDFLVNLDIYPLFKKELDKIKNKLEFGSLNLDQKKKIIIELFKMYHCNSVNANLTEFGLGDRIGRMSGNNITSGTIISKSVTGIWESQYEF

SEQ ID NO: 21202 - protein, 1146 aa, unidentified; identical to SEQ ID NO: 16669
  REGION 1..1146: note = Cas Enzyme sequence

SEQ ID NO: 21203 - protein, 1353 aa, unidentified
  REGION 1..1353: note = Cas Enzyme sequence
MKKTGKIKNSVLQETHYNVGLDIGTSSVGYAVVDADTGKVLVFKKKNMLGGRLFNKGETAKATRVNRSTRRRYDRRRERIKLLRCLMWEMVDEKDPDFFARLDEGFLMREDKTIQSKSILFNDKNYTDKDYYKEYATIYHLRKELFENDEQKDIRLVYLALHHLIKYRGHFLYEGQNFQEINNDINELFVRLYEQLAENCQYKCEIHNNQIEEIVEILKDTKQTKSEKKEVLKPVITKTMRETEKKAAQEIVNAILGKKINFNILFGVDTIIDNEDKALKLSFAEEKYDEQEDYIYEQLQEKAEILDTLKEIYSWFALQDILKGEKTVASAMVKKYEKHKKNLKILRNAVRKYCTPEEYKNFFIEKITDTKKLKKSVNYVNYIGADGRGNTENLYNEIKKLLEDKDNADKDIQYILKEIDAENFLPLLRTKENISIPYQLTVLEAARIIDNQGKYYPQLSANKDKILSIIEFRIPYYVGPMNTKNRNERFSWACRKEGKQEEKIYPWNWKDIIDEDKTAARFIERMRNTCTYLPGEDVLPRYSLLYSEFVMLNELNKIKVNGKFIEHDMKQKMIEGLFKKQKNVTEKSLINYLKKMNYMNTDQYEIEGYQKEKAFASSLASYIDFTRIFGEIHSGNRQMIEEIIEWLTLFEEKSIVKRQIQNKYGTQVTAQQLEAVSKLRYKGWGNCSAKLLKGLKTTIDGDKASIIDILNTTNYNFMQIITSKKYEFAKQIEEYNEDNTMTDITIEDISRLHGSPAIKKGIWQTVKVMNELVQIMGHEPDNIFIEFARGEDDKVRTKKRSAQIDKGYKKWKKEFKGEKFSTEVEKELKNKKYKDRLNEEKMYLYFLQNGKCMYSGETLDIDKLPLYHIDHILPQTYTTDDSIENKVLVLGIENENKADNLLISQKIRNDRKVFWNYLYECGLMGEKKYKNLTRSAIGEGEIKGFINRQLVETRQIIKNVTQLFTQRYANSNVLAVRSGLSSNYREKYGLYKSREINDFHHAHDAFLAVRIGMFLTKRFPGMEKDLIYDAFLRYRSKQNKSSLLKSKHGYLMTFFDEVQCDENGVVIWNPDEDKAYIKSVLYSGNCQISRKKEELTGKFYNETIYPAGSGDLIPLKKNLSVEKYGGYLVKQSAYFIAVQDENGKKIVGIPIHIKELEKTQSGAIDAYIKKELKTTSYRVLKDKICKYQEIIVNGNTMYLTAADEVINAKQFFFGDHYYDLYEALLKCLADKVPEDEKDQYDEKLVEVYNYIISKAERQYREYESAFEKIKQAVDFSMLSYDDKIGYLKEIFKITKASASCADITKYCPKDSEIKGITEIGRKKKYTFNSRKGKRNIIFVDKSVTGLYERRYTL

SEQ ID NO: 21204 - protein, 1269 aa, unidentified
  REGION 1..1269: note = Cas Enzyme sequence
DEKDPDFFARLDEGFLMREDKTIQSKSILFNDKNYTDKDYYKEYATIYHLRKELFENDEQKDIRLVYLALHHLIKYRGHFLYEGQNFQEINNDINELFVHLYEQLAENCQYNCEIHNNQIEEIVEILKDTKQTKSEKKEVLKPVITKTMRETEKKAAQEIVNAILGKKINFNILFGVDTIIDNEDKALKLSFAEEKYDEQEDYIYEQLQEKAEILDTLKEIYSWFALQDILKGEKTVASAMVKKYEKHKKDLKILRNAVRKYCTPEEYKNFFIEKITDTKKLKKSVNYVNYIGADGRGNTENLYNEIKKLLEDKDNADKDIQYILKEIDAENFLPLLRTKENISIPYQLTVLEAARIIDNQGKYYPQLSANKDKILSIIEFRIPYYVGPMNTKNRNERFSWACRKEGKQEEKIYPWNWKDIIDEDKTAARFIERMRNTCTYLPGEDVLPRYSLLYSEFVMLNELNKIKVNGKFIEHGMKQKMIEGLFKKQKNVTEKSLINYLKKMNYMNTDQYKIEGYQKEKAFASSLASYIDFTRIFGEIHSGNRQMIEEIIEWLTLFEEKSIVKRQIQNKYGTQVTAQQLEAVCKLRYKGWGNCSAKLLKGLKTTIDGDKASIIDILNTTNYNFIQIITNKKYEFAKQIDEYNEDNTMTDITIEDISRLHGSPAIKKGIWQTVKVMNELVQIMGHEPDNIFIEFARGEDDKVRTKNRSAQIDRSYKKWKKEFKGEGFSTEVEKELKNKKYKDRLNEEKMYLYFLQNGKCMYSGETLDIDKLSLYHIDHILPQIYTTDDSIENKVLVLGIENENKADNLLISQKIRNDRKEFWRYLYECGLMGEKKYKNLTRNAIGEGEIKGFINRQLVETRQIIKNVTQLFTQRYANSNVLAVRAGLSSNYREKYGLYKSREINDFHHAHDAFLAVRIGMFLTKRFPGMEKDLIYDAFLRYRSKQNKSSLLKSKHGYLMTFFDEVQCDENGVVIWNPDEDKAYIKSVLYSGNCQISRKKEELTGKFYNETIYPAGSGDLIPLKKNLSVEKYGGYLGKQNAYYVAVQDENGKKQKKIIGIPIYVKELEKTQPGAIDAYIKKQLNTISYRILKDNICKYQEIIVNGNAMYLTGAKEKKNEMSNAKQFFFGDHYYNLYETLLKCFADKVPEDEKDQYDEKLVEVYNYIISKAERQYREYESAFEKIKQAVDFSMLSYDDKIGYLKEIFKITKASASCADITKYCSKDSEIKGITEIGRKKKYTFNSRKGKRNIIFVDKSVTGLYERRYTL

SEQ ID NO: 21205 - protein, 1356 aa, unidentified
  REGION 1..1356: note = Cas Enzyme sequence
MKKTGKIKNSVLQETHYNVGLDIGTSSVGYAVVDADTGKVLVFKKKNMLGGRLFNEGETAKATRVKRSTRRRYDRRRERIKLLRCLMWEMVDEKDPDFFARLDEGFLMREDKTIQSKSILFNDKNYTDKDYYKKYATIYHLRKELFENDEQKDIRLVYLALHHLIKYRGHFLYEGQNFQEINNDINELFVRLYEQLAENCQYKCEIHNNQIEEIVEILKDTKQTKSEKKEVLKPVITKTMRETEKKAAQEIVNAILGKKINFNILFGVDTIIDNEDKALKLSFAEEKYDEQEDYIYEQLQEKAEILDTLKEIYSWFALQDILKGEKTVASAMVKKYEKHKKDLKILRNAVRKYCTPEEYKNFFIEKITDTKKLKKSVNYVNYIGADGRGNTENLYNEIKKLLEDKDNADKDIQYILKEIDAENFLPLLRTKENISIPYQLTVLEAARIIDNQGKYYPQLLANKDKILSIIEFRIPYYVGPMNTKNRNERFSWACRKEGKQEEKIYPWNWKDIIDEDKTAARFIERMRNTCTYLPGEDVLPRYSLLYSEFVMLNELNKIKVNGKFIEHDMKQKMIEGLFKKQKNVTEKSLINYLKKMNYMNTDQYEIEGYQKEKAFASSLASYIDFTRIFGEIHSGNRQMIEEIIEWLTLFEEKSIVKRQIQNKYGTQVTAQQLEAVSKLRYKGWGNCSAKLLKGLKTTIDGDKASIIDILNTTNYNFMQIITSKKYEFAKQIEEYNEDNTMTDITIEDISRLHGSPAIKKGIWQTVKVMNELVQIMGHEPDNIFIEFARGEDDKVRTKNRSAQIDKGYKKWKKEFKGEKFSTEVEKELKNKKYKDRLNEEKMYLYFLQNGKCMYSGETLDIDKLPLYHIDHILPQTYTTDDSIENKVLVLGIENENKADNLLISQKIRNDRKVFWNYLYECGLMGEKKYKNLTRSAIGEGEIKGFINRQLVETRQIIKNVTQLFTQRYANSNVLAVRSGLSSNYREKYGLYKSREINDFHHAHDAFLAVRIGMFLTKRFPGMEKDLIYDAFLRYRSKQNKSSLLKSKHGYLMTFFDEVQCDENGVVIWNPDEDKAYIKSVLYSGNCQISRKKEELTGKFYNETIYPAGSGDLIPLKKNLSVEKYGGYLGKQSAYFAAVQDENGKKQKKIIGIPIYIKELEKTQPGTINAYLKKELNTTAYRMLKDKIYKYQEIIVNGNDLYITGESEVINAKQFFFGEHYYYLYEVLLKCLADKVPEDEKTKYEEKLVEVYNYILSKAERQYKEYASAFAKIKQAVDFSKLSYEDKIGCLKEILNITGANAGCADMRKYCPKDSKIKGIDRIGRKNGYTFKMNSTNNSIVFVDKSVTGLYERRYTL

SEQ ID NO: 21206 - protein, 1356 aa, unidentified
  REGION 1..1356: note = Cas Enzyme sequence
MKKTGKIKNSVLQETHYNVGLDIGTSSVGYAVVDADTGKVLVFKKKNMLGGRLFNEGETAKATRVKRSTRRRYDRRRERIKLLRCLMWEMVDEKDPDFFARLDEGFLMREDKTIQSKSILFNDKNYTDKDYYKKYATIYHLRKELFENDEQKDIRLVYLALHHLIKYRGHFLYEGQNFQEINNDINELFVRLYEQLAENCQYKCEIHNNQIEEIVEILKDTKQTKSEKKEVLKPVITKTMRETEKKAAQEIVNAILGKKINFNILFGVDTIIDNEDKALKLSFAEEKYDEQEDYIYEQLQEKAEILDTLKEIYSWFALQDILKGEKTVASAMVKKYEKHKKDLKILRNAVRKYCTPEEYKNFFIEKITDTKKLKKSVNYVNYIGADGRGNTENLYNEIKKLLEDKDNADKDIQYILKEIDAENFLPLLRTKENISIPYQLTVLEAARIIDNQGKYYPQLSANKDKILSIIEFRIPYYVGPMNTKNRNERFSWACRKEGKQEEKIYPWNWKDIIDEDKTAARFIERMRNTCTYLPGEDVLPRYSLLYSEFVMLNELNKIKVNGKFIEHDMKQKMIEGLFKKQKNVTEKSLINYLKKMNYMNTDQYEIEGYQKEKAFASSLASYIDFTRIFGEIHSGNRQMIEEIIEWLTLFEEKSIVKRQIQNKYGTQVTAQQLEAVSKLRYKGWGNCSAKLLKGLKTTIDGDKASIIDILNTTNYNFMQIITSKKYEFAKQIEEYNEDNTMTDITIEDISRLHGSPAIKKGIWQTVKVMNELVQIMGHEPDNIFIEFARGEDDKVRTKNRSAQIDKGYKKWKKEFKGEKFSTEVEKELKNKKYKDRLNEEKMYLYFLQNGKCMYSGETLDIDKLPLYHIDHILPQTYTTDDSIENKVLVLGIENENKADNLLISQKIRNDRKVFWNYLYECGLMGEKKYKNLTRSAIGEGEIKGFINRQLVETRQIIKNVTQLFTQRYANSNVLAVRSGLSSNYREKYGLYKSREINDFHHAHDAFLAVRIGMFLTKRFPGMEKDLIYDAFLRYRSKQNKSSLLKSKHGYLMTFFDEVQCDENGVVIWNPDEDKAYIKSVLYSGNCQISRKKEELTGKFYNETIYPAGLGDLIPLKKNLSVEKYGGYSGKQSAYFAAVQDENGKKQKKIIGIPIYIKELEKTQPGTINAYLKKELNTTAYRMLKDKIYKYQEIIVNGNDLYITGESEVINAKQFFFGEHYYYLYEVLLKCLADKVPEDEKTKYEEKLVEVYNYILSKAERQYKEYASAFAKIKQAVDFSKLSYEDKIGCLKEILNITGANAGCADMRKYCPKDSKIKGIDRIGRKNGYTFKMNSTNNSIVFVDKSVTGLYERRYTL

SEQ ID NO: 21207 - protein, 1353 aa, unidentified
  REGION 1..1353: note = Cas Enzyme sequence
MKKTGKIKNSVLQETHYNVGLDIGTSSVGYAVVDADTGKVLVFKKKNMLGGRLFNKGETAKATRVNRSTRRRYDRRRERIKLLRCLMWEMVDEKDPDFFARLDEGFLMREDKTIQSKSILFNDKNYTDKDYYKEYATIYHLRKELFENDEQKDIRMVYLALHHLIKYRGHFLYEGQNFQEINNDINELFVRLYEQLAENCQYKCEIHNNQIEEIVEILKDTKQTKSEKKEVLKPVITKTMRETEKKAAQEIVNAILGKKINFNILFGVDTIIDNEDKALKLSFAEEKYDEQEDYIYEQLQEKAEILDTLKEIYSWFTLQDILKGEKTVASAMVKKYEKHKKDLKILRNAVRKYCTPEEYRNFFIEKTTNTKKLNYVNYIGADGRGNTENLYNEIKKLLEDKDNVDKDIQYILKEIDAENFLPLLRTKENISIPYQLTVLEAARIIDNQGKYYPQLSANKDKILSIIEFRIPYYVGPMNTKNRNERFSWACRKEGKQEEKIYPWNWKDIIDEDKTAARFIERMRNTCTYLPGEDVLPRYSLLYSEFVMLNELNKIKVNGKFIEHGMKQKMIEGLFKKQKNITEKSLINYLKKMNYMNTDQYKIEGYQKEKAFASSLASYIDFTRIFGEIHSGNRQMIEEIIEWLTLFEEKSIVKRQIQNKYGTQVTAQQLEAVCKLRYKGWGNCSAKLLKGLKTTIDGDKDSIIDILNTTNYNFMQIITSKKYEFAKQIEEYNEDNTMTDITIEDISRLHGSPAIKKGIWQTVKVMNELVQIMGHEPDNIFIEFARGEDDKVRTKTRSAQIDKGYKKWKEEFKGEGFSTEVEKELKNKKYKDRLNEEKMYLYFLQNGKCMYSRDKTLDIDKLPLYHIDHILPQTYTPDDSIENKVLVLGIENENKADNLLISQKIRNDRKEFWRYLYECGLMGEKKYKNLTRSAIGEGEIKGFINRQLVETRQIIKNVTQLFTQRYANSNVLAVRAELSSNYREKYGLYKSREINDFHHAHDAFLAVRIGMFLMKRFPGMEKDLIYDAFLRYRSKQNKSSLLKSKYGYLMTFFDEVQCDENGVVIWNPDEDKAYIKSVLYSGNCQISRKKEELTGKFYNETIYPAGSGDLIPLKKNLSVEKYGGYSGKQNAYYVAVQDENGKKQKKIIGIPIYVKELEKTQPGAIDAYIKKQLNTISYRILKDKICKYQEIIVNGNDLYITGESEVINAKQFFFGEHYYYLYEVLLKCLADKVPEDEKTKYEEKLVEVYNYILSKAERQYKEYASAFAKIKQAVDFSKLSYEDKIGCLKEILNITGANAGCADMRKYCPKDSKIKGIDRIGRKNGYTFKMNSTNNSIVFVDKSVTGLYERRYTL

SEQ ID NO: 21208 - protein, 1362 aa, unidentified
  REGION 1..1362: note = Cas Enzyme sequence
MKKTGKIKNSVLQETHYNVGLDIGTSSVGYAVVDADTGKVLVFKKKNMLGGRLFNEGETAKATRVNRSTRRRYDRRRERIKLLRCLMWEMVDEKDPDFFARLDEGFLMREDKTIQSKSILFNDKNYTDKDYYKEYATIYHLRKELFENDEQKDIRLVYLALHHLIKYRGHFLYEGQNFQEINNDINELFVRLYEQLAENCQYKCEIHNNQIEEIVEILKDTKQTKSEKKEVLKPVITKTMRETEKKAAQEIVNAILGKKINFNILFGVDTIIDNEDKALKLSFAEEKYDEQEDYIYEQLQEKAEILDTLKEIYSWFALQDILKGEKTVASAMVKKYEKHKKDLKILRNVVRKYCTPEEYKNFFIEKITDTKKLKKSVNYVNYIGADGRGNTENLYNEIKKLLEDKDNADKDIQYILKEIDAENFLPLLRTKENISIPYQLTVLEAARIIDNQGKYYPQLSANKDKILSIIEFRIPYYVGPMNTKNRNERFSWACRKEGKQEEKIYPWNWKNIIDEDKTAARFIERMRNTCTYLPGEDVLPRYSLLYSEFVMLNELNKIKVNGKFIEHGMKQKMIEGLFKKQKNVTEKSLINYLKKMNYMNTDQYKIEGYQKEKAFASSLASYIDFTRIFGEIHSGNRQMIEEIIEWLTLFEEKSIVKRQIQNKYRTQVTAQQLEAVCKLRYKGWGNCSAKLLKGLKTTIDGDKASIIDILNTTNYNFMQIITSKKYEFAKQIEEYNEDNTMTDITIEDISRLHGSPAIKKGIWQTVKVMNELVQIMGHEPDNIFIEFARGEDDKVWTKNRSAQIDRSYKKWKKEFKGEGFSTEVEKELKNKKYKDRLNEEKMYLYFLQNGKCMYSGETLDIDKLSLYHIDHILPQTYTTDDSIENKVLVLGIENENKADNLLISQKIRNDRKEFWRYLYECGLMGEKKYKNLTRNAIGEGEIKGFINRQLVETRQIIKNVTQLFTQRYANSNVLAVRAGLSSNYREKYGLYKSREINDFHHAHDAFLAVRIGMFLTKRFPGMEKDLIYDAFLRYRSKQNKSSLLKSKHGYLMTFFDEVQCDENGVVIWNPDEDKAYIKSVLYSGNCQISRKKEELTGKFYNETIYPAGSGDLIPLKKNLSVEKYGGYLGKQNAYYVAVQDENGKKQKKIIGIPIYVKELEKTQPGAIDAYIKKQLNTISYRILKDNICKYQEIIVNGNAMYLTGAKEKKNEMSNAKQFFFGDHYYNLYETLLKCFADKVPEDEKEEYDKKMIEVYNYIIAKGERQYKECAFAFEKIKQALDFPMLSYNDKIDCLREILKITQANSTCANIKKYCKQSANVTGTERVGRIERVINIDDSKRNKSVAVFVDKSVTGLYERRYTL

SEQ ID NO: 21209 - protein, 1353 aa, unidentified
  REGION 1..1353: note = Cas Enzyme sequence
MKKTGKIKNSVLQETHYNVGLDIGTSSVGYAVVDADTGKVLVFKKKNMLGGRLFNKGETAKATRVNRSTRRRYDRRRERIKLLRCLMWEMVDEKDPDFFARLDEGFLMREDKTIQSKSILFNDKNYTDKDYYKEYATIYHLRKELFENDEQKDIRLVYLALHHLIKYRGHFLYEGQNFQEINNDINELFVHLYEQLAENCQYNCEIHNNQIEEIVEILKDTKQTKSEKKEVLKPVITKTMRETEKKAAQEIVNAILGKKINFNILFGVDTIIDNEDKALKLSFAEEKYDEQEDYIYEQLQEKAEILDTLKEIYSWFALQDILKGEKTVASAMVKKYEKHKKDLKILRNAVRKYCTPEEYRNFFIEKTTNTKKLNYVNYIGADGRGNTENLYNEIKKLLEDKDNVDKDIQYILKEIDAENFLPLLRTKENISIPYQLTVLEAARIIDNQGKYYPQLSANKDKILSIIEFRIPYYVGPMNTKNRNERFSWACRKEGKQEEKIYPWNWKDIIDEDKTAARFIERMRNTCTYLPGEDVLPRYSLLYSEFVMLNELNKIKVNGKFIEHGMKQKMIEGLFKKQKNITEKSLINYLKKMNYMNTDQYKIEGYQKEKAFASSLASYIDFTRIFGEIHSGNRQMIEEIIEWLTLFEEKSIVKRQIQNKYGTQVTAQQLEAVCKLRYKGWGNCSAKLLKGLKTTIDGDKASIIDILNTTNYNFIQIITNKKYEFAKQIDEYNEDNTMTDITIEDISRLHGSPAIKKGIWQTVKVMNELVQIMGHEPDNIFIEFARGEDDKVRTKNRSTQIDRSYKKWKKEFKGEKFSTEVEKELKNKKYKDRLNEEKMYLYFLQNGKCMYSGETLDIDKLSLYHIDHILPQTYTTDDSIENKVLVLGIANENKADNLLISQKIRNDRKAFWHYLYECGLMGEKKYKNLTRNAIGEGEIKGFINRQLVETRQIIKNVTQLFTQRYANSNVLAVRAGLSSNYREKYGLYKSREINDFHHAHDAFLAVRIGMFLTKRFPGMEKDLIYDAFLRYRSKQNKSSLLKSKYGYLMTFFDEVQCDENGVVIWNPDEDKAYIKSVLYSGNCQISRKKEELTGKFYNETIYPAGSGDLIPLKKNLSVEKYGGYLGKQSAYYVAVQDENGKKQKKIIGIPIYVKELEKTQPGAIDAYIKKELKITSYRMLKDKICKYQEIIVNGNELYLTSAKEVINAKQFFFGEYYYNLYEALLKCLADKVPGDEKDKYDEKLVEVYNYIISKAEIQYKEYKSAFEKIKQAVDFSILSYEDKIGCLKEVLKITGADAECADITKYCPKDSEIKGISRIGRKNNYTFKMDNNGKDNMIFVDKSVTGLYERRYTL

SEQ ID NO: 21210 - protein, 1356 aa, unidentified
  REGION 1..1356: note = Cas Enzyme sequence
MKKTGKIKNSVLQETHYNVGLDIGTSSVGYAVVDVDTGKVLVFKKKNMLGGRLFNEGETAKATRVKRSTRRRYDRRRERIKLLRCLMWEMVDEKDPDFFARLDEGFLMREDKTIQSKSILFNDKNYTDKDYYKKYATIYHLRKELFENDEQKDIRLVYLALHHLIKYRGHFLYEGQNFQEINNDINELFVRLYEQLAENCQYKCEIHNNQIEEIVEILKDTKQTKSEKKEVLKPVITKTMRETEKKAAQEIVNAILGKKINFNILFGVDTIIDNEDKALKLSFAEEKYDEQEDYIYEQLQEKAEILDTLKEIYSWFALQDILKGEKTVASAMVKKYEKHKKDLKILRNAVRKYCTPEEYKNFFIEKITDTKKLKKSVNYVNYIGADGRGNTENLYNEIKKLLEDKDNADKDIQYILKEIDAENFLPLLRTKENISIPYQLTVLEAARIIDNQGKYYPQLSANKDKILSIIEFRIPYYVGPMNTKNRNERFSWACRKEGKQEEKIYPWNWKDIIDEDKTAARFIERMRNTCTYLPGEDVLPRYSLLYSEFVMLNELNKIKVNGKFIEHDMKQKMIEGLFKKQKNVTEKSLINYLKKMNYMNTDQYEIEGYQKEKAFASSLASYIDFTRIFGEIHSGNRQMIEEIIEWLTLFEEKSIVKRQIQNKYGTQVTAQQLEAVSKLRYKGWGNCSAKLLKGLKTTIDGDKASIIDILNTTNYNFMQIITSKKYEFAKQIEEYNEDNTMTDITIEDISRLHGSPAIKKGIWQTVKVMNELVQIMGHEPDNIFIEFARGEDDKVRTKNRSAQIDKGYKKWKKEFKGEKFSTEVEKELKNKKYKDRLNEEKMYLYFLQNGKCMYSGETLDIDKLPLYHIDHILPQTYTTDDSIENKVLVLGIENENKADNLLISQKIRNDRKVFWNYLYECGLMGEKKYKNLTRSAIGEGEIKGFINRQLVETRQIIKNVTQLFTQRYANSNVLAVRSGLSSNYREKYGLYKSREINDFHHAHDAFLAVRIGMFLTKRFPGMEKDLIYDAFLRYRSKQNKSSLLKSKHGYLMTFFDEVQCDENGVVIWNPDEDKAYIKSVLYSGNCQISRKKEELTGKFYNETIYPAGLGDLIPLKKNLSVEKYGGYSGKQSAYFAAVQDENGKKQKKIIGIPIYIKELEKTQPGTINAYLKKELNTTAYRMLKDKIYKYQEIIVNGNDLYITGESEVINAKQFFFGEHYYYLYEVLLKCLADKVPEDEKTKYEEKLVEVYNYILSKAERQYKEYASAFAKIKQAVDFSKLSYEDKIGCLKEILNITGANAGCADMRKYCPKDSKIKGIDRIGRKNGYTFKMNSTNNSIVFVDKSVTGLYERRYTL

SEQ ID NO: 21211 - protein, 1392 aa, unidentified
  REGION 1..1392: note = Cas Enzyme sequence
MSNKSYSIGLDIGTNSVGWAVITDDYKVPSKKMKVLGNTDKHFIKKNLIGALLFDEGTTAEDRRLKRTARRRYTRRKNRLRYLQEIFSEEMSKVDSSFFHRLDDSFLVPEDKRGSKYPIFATLAEEKEYHKKFPTIYHLRKHLADSKEKTDLRLIYLALAHMIKYRGHFLYEESFDIKNNDIQKIFNEFISIYDNTFEGSSLSGQNAQVEAIFTDKISKSAKRERVLKLFPDEKSTGLFSEFLKLILGNQADFKKHFDLEEKAPLQFSKDTYDEDLENLLGQIGDDFADLFLVAKKLYDAILLSGILTVKDLSTKAPLSASMIERYENHQKDLAALKRFIQNNLQEKYDEVFSDQSKDGYAGYINGKTTQEAFYKYIKNLLSKFEGADYFLDKIEREDFLRKQRTFDNGSIPHQIHLQEMNAIIRRQGEHYPFLQENKEKIEKILTFRIPYYVGPLARGNCDFAWLTRNSDQAIRPWNFEEIVDQASSAEEFINKMTNYDLYLPEEKVLPKHSLLYETFAVYNELTKVKFIAEGLRDYQFLDSGQKKQIVNQLFKEKRKVTEKDIIQYLHNIDGYDGIELKGIEKQFNASLSTYHDLLKIIKDKAFMDDAKNEAILENIIHTLTIFEDREMIKQRLAQYDSLFDEKVIKALTRRHYTGWGKFSAKLINGICDKKTGKTILDYLIDDGYSNRNFMQLINDDGLSFKDIIQKAQVVGKTNDMKQVVQELPGSPAIKKGILQSIKLVDELVKVMSHAPESIVIEMARENQTTARGKKNSQQRYKRIEDALKNLAPGLDSNILKEYPTDNIQLQNDRLFLYYLQNGKDMYTGKPLDINQLSDYDIDHIIPQAFIKDDSLDNRVLTSSKENRGKSDNVPCLEVVEKVKVFWQQLLDSNLISERKFNNLTKAERGGLDERDKVGFIKRQLVETRQITKHVAQILDARFNTKVTEKDKKNRTVKIITLKSNLVSNFRKEFRLYKVREINDYHHAHDAYLNAVVAKAILKKYPKLEPEFVYGDYQKYDLKRYISKSKDPKEVQKATEKYFFYSNLLNFFKEEVHYADGTIVKRENIEYSNDTGEIAWNKEKDFATIKKVLSLPQVNIVKKTEIQTHGLDRGKPRGLFNSNPSPKPSEDSKENLVPIKQGLDPRKYGGYAGISNSYAVLVKAIIEKGAKKQQKTVLEFQGISILDKINFEKNKKNYLLEKGYIKILSTIILPKYSLFEFPDGTRRRLASILSTNNKRGEIHKGNELVIPEKYTTLLYHAKNINKALEPEHLEYVEKHRNDFAKLLEYVLNFNDKYVGALKNGERIRQAFIDLETVDIEKLCFSFIGPRNSKNAGLFELTSQGSASDFEFLGVKIPRYRDYTPSSLLNATLIHQSITGLYETRIDLSKLGED

SEQ ID NO: 21212 - protein, 1370 aa, unidentified
  REGION 1..1370: note = Cas Enzyme sequence
MKEYSIGLDQGVASIGFVGIDDQNHVMRAKGKNVIGARLFDEGESAAERRGFRTTRRRLNHRKWRLRFLREIFEPHINPVDESFFMRLKESSISPKDSRKHFSGDILFNDKSDQEFYHEYPTIYHLRSALMTQKRKFDIREIYLAIHHIVKYRGHFLEEGSADAFQVGNLDLNDKFKNLNELFQRFDPDQPFQLRLDNLEAVKEILINKDMSAADRQRQLTPKIYIHTEDKNIEKQFKAIATEVLKVVVGNKAKFDVIANVNLDKETKKLWSFTLDSDGVDEKLAKISDQLSEDAQEVIEILKNLFSLVRLANNLPDGMGLSESMKEKYQAHALHLKKLKKLMNQMADKEKAENLQKAYDGYIDGRDSKPLPADSFYSEVKKNLDDSADSQEILKLIESDEFMPKQRSKENGWIPHQLQQKELDAIIENQKDFYPWLAELNPNPDKTRQRIAKYKLDELVTFRIPYYVGPLVSPNGHNKTEAKFSWMVRKDNTGNITPWNFDQKVDRAESASKFISRMTTMDTYLLGEDVLPAHSMIYQKYEVLNELNKIRINDKKIEIDLKQKVYRNLFETRPVVTIKDLKNYLAGEGGFGDKPEISGLSDEKKFLSGLTTYHDFVKVFGRDLVRDPEKQGDLEKIIKWSTVFEDQNIYKEKLNTMAWLTEDEKNQLVINRYRGWGKLSKKLLVDLRDGSNHNQNNVLDNLWNSNDNFMQIQSRNDFAEMIAVENKVALKDASSIEDVIDDMYTSPQNKKAIRQMIRVVKDIQKAFGKAPKRIFVEFAREDQINPRRSIQRQRQVELAYKKVVQEILVNNSVRAELKAKIAEKQKFHDRLFLYFMQGGIDIYTGKRINIDRLSAYDIDHILPRAFIFDNSLDNRVLTSKKTNREKSDSLPRDLFGQKMGNKWLAMKDNGLISKAKYDRLTMNPTTMSAHSQQGFINRQLVETRQVIKLSVELLANEFADEETEIIAVKAGLTHQMREDFGLIKNRDVNDYHHAFDAYLTAFVGQYLLKRYPKLRSYFVYGEFKKFSQKDVKLRSFNFLHNLRDVKPVIDAETGEILWDKEKDIAYIKHLFAYKKILVSREVTEKNAELFNQTLYKATDDKKSGKGSKMLIRAKNKRPTELYGGYTGKTSGFMALVKLIKRKKITYRIAGIPTAELPKLLNLESDSDKGRKRVYDVLMSQFESKTDEFKVIVPKIRYHQLVLDDGNLFFIGSHMEKHNAVQLVLSDSALASIPGSHSLPKNLDRSPDHILKGLDDAYDEIVSAMEKYFQLYDASKFKLDETKKIYQNLPVRDTYKDGKVIETGQQTILSRIVQALHANATRTDLSVLKLSSSFGRFNQRSGIELSKDAQLIYQSPTGLFERRVRIEELDK

SEQ ID NO: 21213 - protein, 1378 aa, unidentified
  REGION 1..1378: note = Cas Enzyme sequence
MKNKDYSIGLDIGTSSIGFAVVDENNHVMRVKGKNAIGVRLFDEGKPAADRRAFRTTRRRLSRRRWRLKLLREIFDSYITPVDEAFFIRLKESNLSPKDSKKQYSGDILFNDRSDKDFYTKYPTIYHLRNALMTEHQRFDIREIYLAIHHIVKFRGHFLNATPANNFQVGKLDLDQKFEDLNDIYQRVFPDDSIEFRIDNLEQIKAVLLDSKRSRSDRQRSLVDDVYQTSEDKEVEKQNKAVATEVLKAILGNKAKLNIIANVEVDKEAAKEWTITFDSESIDDDLAKIDGQMTDDGRAIVEILRSLYSGITLSAIVPENHTLSQAMVAKYDLHKKHLTLLKKLINSMTDTKKAKNLRAAYDGYVDGVKGKVLTQDEFYKQIQSNLDESVEASEIQTYIDQDIFMPKQRTKANGSIPHQLQQQELDQIIENQKEYYPWLAELNPNPDKKRQQLAKYKLDELVTFRVPYYVGPMITAEAQKKQSGAEFAWMIRKESGNITPWNFDQKVDRMATANQFIKRMTTTDTYLLGEDVLPAQSLLYQRFEVLNELNKIRIDRKPISVELKQQIFNDLFKKFKNVTIKHLQDYLVAQGQYSKRPLIEGLADEKRFNSGLSTYNDFCGIFGAKLVDENDRQADLEKIIEWSTIFEDKKIYRAKLNDLAWLTDEQKDKLATKRYQGWGRLSSKLLIGLQNSEHRNIMDLLWIGNENFMQIQADSDFAKLIKDANQNALQNNDSQDVINDLYTSPQNKKAIRQILLVVHDIQNAMHGQAPTKIHVEFAKGEERNPRRSVQRQRQVEAAYEKASNELVGANVREELKDAITNKRDFKDRLFLYFMQGGVDMYSGEPINIDNLSRYDIDHILPQAFVKDDSLNNRVLTDAEKNRRKSDAVPNELFGAKMRVTWERMKEQGLISKGKYRNLTMNPENINKYTENGFINRQLVETRQVIKLAVNILADEYKENTQIISVKADLSHQMREDFELLKNRDVNDYHHAFDAYLAAFMGNYLLKRYPKLRSYFVYGDFKKFTQKEIKLRRFNFIYDLKHEDQVIDKETGEILWNKNEDIAYIRHLFAYKKILISHEVSERRGALYNQTVYKASDDKASGQGSKKLIPIKSDKPTEIYGGYTGRTLAYMTIVKVTKGKKISYKVVGVPTAVLAKMAGVRQGSQEEQDKLYGVLKPQFTHQKENKKTGEITETVDKFDIIVPKVKYQQLVNDNGQLFMIGSDTLPYNAEQLVLSKESVQTINNPGIKDEGSDEESENKKLDNVYDEIVLCMNKYFPLYDNRGFRNSITNGKNKFLKLPIKNIYKNGKLINVGKREVINRILQGLHANASVTDLSNLGIKSPFGFLQKGAGLSLSGEAQLIHQSATGLFEHRVQLNKIK

SEQ ID NO: 21214 - protein, 1391 aa, unidentified
  REGION 1..1391: note = Cas Enzyme sequence
MKEIKDYIIGLDIGTNSCGYVVTDKQNNILKLKGKTAIGARLFKEGEAAADRRAFRTTRRRLARRRWRLSLLEEIFDEEMNKVDPSFFRRLKESDYSPKDRRKQFNSIVFESSEADKAFYEKYPTIYHLRNALMHDNQKHDLREIFLAVHHIVKYRGNFLREDSVKAFKAAKFTLQGEDGIGPVDKLNDLLKEIYIEAAPELATDNLSKIEDIIKDKKLYKQDKLKQIANLLPKAVDSKDKAKLNKDIAKQVANALMGYMFRLDTLFSFTDVDVKDYKLKFSDANIDESLDALTSLLTDAQIEFVLELQSIYNTIVLNEIVPDGMSLSESMVKKYDDHKKDLKLYKEYIDSLSDQKKAKQLEAAYALYVNYRKADLLAAKKLFEKKKIGDKKFVDVISNFEVFGKFVSDNLDDSELANKIKARLDLGEFLPKQRTNQNGVIPYQLHQVELTQILEKQGKYYPFLITPNPVESHRNNAPYEISELVSFRVPYYVGPLIDNQSIKDKQNKNKFAWMVRQKQGQITPWNFEEMVDTTESANQFIKRMTRKDTYLLAEDVLPKSSLIYQKFMILDELNRIKIDGKKLTSKLKHDIFEKLFKKQKSINLDNLKNYLLAEGNIPGLIEGLSDGINFNNSFSTYIDYRNIFGDEIDNPNKQADFEKMIEWSTVFEDRKIFKRKLKEITWLTPEQIKQVSSKRYSGWGRLSKKLLTQITDENGVNILQRLWNEPETLTEVLANPVIKRKISEANSLFVQINKVENILDDAYTSPQNKKAIRQVIRVVDDIIAAAHGKKPSQIAIEFARSSQNKAKVPDTRKKQLDKIYNKISSEILDSSIKNELKNLKSNKYLSKDKLFLYFKQMGRDAYTGDKLSLDQLQNYDIDHIFPRSFIKDDSLDNRVLTQKPINAKKSDYGIPALEFGNKYVPDLGITVKEMWKLWQENGLISKSKLINLCTNPKKIGSKRASGFINRQLVETSQVIKLVAIILQAEFPDTEIIEVKALQNTTLRESFHLYKNRSVNDYHHAIDAYLTTIVGNYLYQVYPKLRPYFVYGQFKKFNQEKNIDILKRLKNFNFLRQLIFNTDDNIYISGTKEIVFNKKDIIHKLETAYGYKYMNISRECYQETSSLFNQTLYAHNSSVKNSLIPKKKGLPTEIYGGYSGNKDSFFVLVKIVKKRTNLYRIVGIPTRELAKLNSSNNYNQALNKIVESKLCLKETESFKILIKRLLYGTLIVDNGQKFRIGSFKEKHNVQQLVLQLKSMKYIKFYIDGGQNYFTDVERKKLEKQDRDKCLLYVFDDIMNVVNKRFTLFDMSKYEKDGDSLREKFNCLDFNDKVSILSDLLKAFHANSDRTSITKLKITNLGRHQAGKNGITLTTNAQIIYQSPTGLFERRIKIKDL

SEQ ID NO: 21215 - protein, 1391 aa, unidentified
  REGION 1..1391: note = Cas Enzyme sequence
MKEIKDYIIGLDIGTNSCGYVVTDKQNNILKLKGKTAIGARLFKEGEAAADRRAFRTTRRRLARRRWRLSLLEEIFDEEMNKVDPSFFRRLKESDYSPKDRRKQFNSIVFESSEADKAFYEKYPTIYHLRNALMHDNQKHDLREIFLAVHHIVKYRGNFLREDSVKVFKAAKFTLQGEDGIGPVDKLNDLLKEIYIEAAPELATDNLSKIEDIIKDKKLYKQDKLKQIANLLPKAVDSKDKAKLNKDIAKQVANAWMGYMFRLDTLFSFTDVDVKDYKLKFSDANIDESLDALTSLLTDAQIEFVLELQSIYNTIVLNEIVPDGMSLSESMVKKYDDHKKDLKLYKEYIDSLSDQKKAKQLEAAYALYVNYRKADLLAAKKLFEKKKIGDKKFVDVISNFEVFGKFVSDNLDDSELANKIKARLDLGEFLPKQRTNQNGVIPYQLHQVELTQILEKQGKYYPFLITPNPVESHRNNAPYEISELVSFRVPYYVGPLIDNQSIKDKQNKNKFAWMVRQKQGQITPWNFEEMVDTTESANQFIKRMTRKDTYLLAEDVLPKSSLIYQKFMILDELNRIKIDGKKLTSKLKHDIFEKLFKKQKSINLDNLKNYLLAEGNIPGLIEGLSDGINFNNSFSTYIDYRNIFGDEIDNPNKQADFEKMIEWSTVFEDRKIFKRKLKEITWLTPEQIKQVSSKRYSGWGRLSKKLLTQITDENGVNILQRLWNEPETLTEVLANPVIKRKISEANSLFVQINKVENILDDAYTSPQNKKAIRQVIRVVDDIIAAAHGKKPSQIAIEFARSSQNKAKVPDTRKKQLDKIYNKISSEILDSSIKNELKNLKSNKYLSKDKLFLYFKQMGRDAYTGDKLSLDQLQNYDIDHIFPRSFIKDDSLDNRVLTQKPINAKKSDYGIPALEFGNKYVPDLGITVKEMWKLWQENGLISKSKLINLCTNPKKIGSKRASGFINRQLVETSQVIKLVAIILQAEFPDTEIIEVKALQNTTLRESFHLYKNRSVNDYHHAIDAYLTTIVGNYLYQVYPKLRPYFVYGQFKKFNQEKNIDILKRLKNFNFLRQLIFNTDDNIYISGTKEIVFNKKDIIHKLETAYGYKYMNISRECYQETSSLFNQTLYAHNSSVKNSLIPKKKGLPTEIYGGYSGNKDSFFVLVKIVKKRTNLYRIVGIPTRELAKLNSSNNYNQALNKIVESKLCLKETESFKILIKRLLYGTLIVDNGQKFRIGSFKEKHNVQQLVLQLKSMKYIKFYIDGGQNYFTDVERKKLEKQDRDKCLLYVFDDIMNVVNKRFTLFDMSKYEKDGDSLREKFNCLDFNDKVSILSDLLKAFHANSDRTSITKLKITNLGRHQAGKNGITLTTNAQIIYQSPTGLFERRIKIKDL

SEQ ID NO: 21216 - protein, 1312 aa, unidentified
  REGION 1..1312: note = Cas Enzyme sequence
MNKVDPSFFRRLKESDYSPKDRRKQFNSIVFESSEADKAFYEKYPTIYHLRNALMHDNQKHDLREIFLAVHHIVKYRGNFLREDSVKAFKAAKFTLQGEDGIGPVDKLNDLLKEIYIEAAPELATDNLSKIEDIIKDKKLYKQDKLKQIANLLPKAVDSKDKAKLNKDIAKQVANALMGYMFRLDTLFSFTDVDVKDYKLKFSDANIDESLDALTSLLTDAQIEFVLELQSIYNTIVLNEIVPDGMSLSESMVKKYDDHKKDLKLYKEYIDSLSDQKKAKQLEAAYALYVNYRKADLLAAKKLFEKKKIGDKKFVDVISNFEVFGKFVSDNLDDSELANKIKARLDLGEFLPKQRTNQNGVIPYQLHQVELTQILEKQGKYYPFLITPNPVESHRNNAPYEISELVSFRVPYYVGPLIDNQSIKDKQNKNKFAWMVRQKQGQITPWNFEEMVDTTESANQFIKRMTRKDTYLLAEDVLPKSSLIYQKFMILDELNRIKIDGKKLTSKLKHDIFEKLFKKQKSINLDNLKNYLLAEGNIPGLIEGLSDGINFNNSFSTYIDYRNIFGDEIDNPNKQADFEKMIEWSTVFEDRKIFKRKLKEITWLTPEQIKQVSSKRYSGWGRLSKKLLTQITDENGVNILQRLWNEPETLTEVLANPVIKRKISEANSLFVQINKVENILDDAYTSPQNKKAIRQVIRVVDDIIAAAHGKKPSQIAIEFARSSQNKAKVPDTRKKQLDKIYNKISSEILDSSIKNELKNLKSNKYLSKDKLFLYFKQMGRDAYTGDKLSLDQLQNYDIDHIFPRSFIKDDSLDNRVLTQKPINAKKSDYGIPALEFGNKYVPDLGITVKEMWKLWQENGLISKSKLINLCTNPKKIGSKRASGFINRQLVETSQVIKLVAIILQAEFPDTEIIEVKALQNTTLRESFHLYKNRSVNDYHHAIDAYLTTIVGNYLYQVYPKLRPYFVYGQFKKFNQEKNIDILKRLKNFNFLRQLIFNTDDNIYISGTKEIVFNKKDIIHKLETAYGYKYMNISRECYQETSSLFNQTLYAHNSSVKNSLIPKKKGLPTEIYGGYSGNKDSFFVLVKIVKKRTNLYRIVGIPTRELAKLNSSNNYNQALNKIVESKLCLKETESFKILIKRLLYGTLIVDNGQKFRIGSFKEKHNVQQLVLQLKSMKYIKFYIDGGQNYFTDVERKKLEKQDRDKCLLYVFDDIMNVVNKRFTLFDMSKYEKDGDSLREKFNCLDFNDKVSILSDLLKAFHANSDRTSITKLKITNLGRHQAGKNGITLTTNAQIIYQSPTGLFERRIKIKDL

SEQ ID NO: 21217 - protein, 1406 aa, unidentified
  REGION 1..1406: note = Cas Enzyme sequence
VTKVKGDYMVGLDIGTNSCGWVATDMKNNILRLHGKTAIGSHLFEEGQPAADRRGFRTTRRRLNRRKWRLNLLQEIFDPYMTKVDPYFFARLRESGLSPLDKNKRFSSIIFPTAEEDQQFHQQYPTIYHLRNALMIEDRQFDLRLVYLAIHHIVKYRGNFLQATSVKDFEPSKIDVQAFLQKLNNAFADMGEDEAIQFAEQNADQIEQILRADDIFKKDKQSKISKLLVKFPADGQLSKSDQKELEKKYKAAANAVSTAIFGYKTKIEDIFNLEIPKEDKKDWEFKFTDTDADDKLAALSEKLTEKQQTVIAIVEELFGAITLSEIVDEGMTLSQSMINNYDQHRQDLHLLKTVISNQRGTDNAKKLQAAYDLYVNNRHASLLKAKKLLKSNGVLSIDDFNKIVTANLDDSESALKIKNEIDLGIFMPKQRTNQNGVIPFQLHQRELDQIIAKQGKYYPFLQESNPVSEHLNQAPYKLDELVRFRVPYYVGPMIAPKQSNDQQTQANQNFAWMVRRKDGQITPWNFDEQVDRMESANRFIKRMTTKDTYLLGEDVLPKHSLLYQKFEVLNELNNIRINGSRISFSDKQDVYKKLFKDDKSASVSVKHLTDYLKIEKHLPFVEIKGLANEAKFNSSLATYHELRKMGVFDLELDDPKYRTDFENIIEWATIFEDRSIYQQKLQTVSWLKPEQIKALTRLNHYQGWGRLSKKLLLDIHDSNGQNIMEQLWDSQKNFMQIVKEPDFVAQINAHNQQTAQEHGMEAILADAYTSPANKKAIRQVMKVVNDITRAASGKAPRQIAIEFARDAEKKPRLSTQRGRKLQQIYSKLSDEFVSEAMKQNLDQATDSRQLAHDKYFLYFMQLGRDAYSGKPINFDEIETKYQIDHILPQAFIKDDSLDNRVLVASELNNAKSDQVPVQLYAHKKVPGSNLTVRGLWDKWLDLKLISNRKHNNLLTDPTKINKYQKSGFIQRQLVETSQIIKLVSTILQEEYPDSEIIVVKASYNHDLRERLNLYKSRSVNDYHHAIDAYLSTICANFLYQVYPKLRPFFVYGQFKKFKSDPELEKDIIRQQRTFNFIWPLLKKEDPSDPGREIIHLNARSDGPVIFNRQTDIFAKLERAYNFKYMLLSRETSSREQEMFKMTLYPRSDRDTAKSRNLIPKAKNMPTSIYGGYSNNSDAYMAIVEINKKKGKEYRVIGVPMRALSKLKKAEKENCYDEVLTEVLRPIVMFDKNGKAKRSIQGFKVVKGRVLYKQPIKDGDKKFMLGSSTYVYNDKQLTLSDETMRIVTGNFTRDEDQDVSLVKAFDELTDKVNKYLPLYDINGFRNKLIAGRDKFIELSLEDKKKVIEEILVGLHDNPAVGNAKSIGIKTPFGFMQMKSGVVLSSDAELIYQSPTGLFEKKVRISDL

SEQ ID NO: 21218 - protein, 1341 aa, unidentified
  REGION 1..1341: note = Cas Enzyme sequence
MNSRQQDYIIGLDIGTNSVGWAVTDSHYNLLHFKKKDLWGVRLFKGADTAKARRVFRSTRRIYRRRHNRLKWLNEIFSKELYRVDKSFLTRMNSSWISKKDKTRKRDKYNLFIDENFTDSEYYKKYPTIFHLRKRLIEDTSKADIRLVYLAIHNIIKYRGNFNYENKKFDISHIAGGLSPALEDLSNLLHLFGIEFTNKDNSKKISSILIKDEGTKKRIDDIFETMRLDKDSKKNTRQVLNLILGNKSDLNIIFSINLDKDNSKLSLSDGDIESSLEKFQSLLTEDQFKVITTANEIYSTIILNKILDDKSKYISFAKVKQYENHKDDLAILKTMWNNPKNKEISQTAKQAYKDYLDKNKYGRQELYLDLKKFFKVAKPENLATDTLKKIENEKYLLKQRSTDNAVIPFQLNKYELEEIIDNQSKYYPFLLEDKEKLISLLSFRIPYYVGPLQSNNNKFAWMERKAKGNIRPWNFDDLVDREKSSNKFIKRMTGTDTFLIGEPVLPKNSLIYQKYEVLNELNNIRVITNEYENPLGEKLTVEIKQQAYDELFKKYKTVKTKTMIDWLKFKGFYVAPRISGLSQPDQFNSNLDTYIDMKGIFESNFVDNPDNLNQLEELIEWLTVFEDKKILSEKLNNSSYNYTDKQINKLSNIRYKGWGKLSLESLTQIKTNSNLKDDKSILDLMWETKNNFIQIFHNNKYEFEKKFEDYNLGKNSELDTSELIDDIHTSPALKRGIKQSLLLVNEIVKFMGHNPSHIFVEVTRESSKKEITDSRYKRLTKIYSTLKNKSNEIIDDQKEYIIPSKKLEKELGKYGTQLSNEKYMLYFLQNGHSLYSPKSFNINDLSNYEVDHIIPRSYIPDNSLENKALVFSGENQNKSDSLLLTQEIINKNINRWQYMLDHGMMGPKKFKNLTRTKITENDQKGFINRQLVQTSQIIKQVINILNLQFKDSETICLQSKANLSTSLRAAFSGEKKDFHFKHPEFVKNRDVNDLHHAQDAYLACLLGIYCLHEFPTDEMLLVQKKYKEFFSKTKESFRKNGKLPDSDANGFIISPMIKGTKHFTRDDFKKVSNIFKYKQCNITNKPTFGKGQFYKQTIYSPKEKKNLVPLNERLDSTIYGGYTNQETAYTDIIRINKKSYKLIKIPIEIAKKISKNKINPHEWIRSNVEPKRPFEIIKERVPKGQLTYSKTNGYLSIVSGSEIENAQQLFLSYESIALLTILKKSDAIKHNQILAFYDKDILNNIFLEILGKMKKFYPFYDNERKFLEKSYDSFKDAIIEDKINTLFELLKMLHAISGDATFEFNNISKDRFGRKRSMNIKNTDLIYKSPTGLYESKFHID

SEQ ID NO: 21219 - protein, 1050 aa, unidentified
  REGION 1..1050: note = Cas Enzyme sequence
MNRSYGLGLSIGIGTVSYTVLSQIKDTNNIIDNDVRIEDIGVRMFETGETPDHKNSLNQDRRSYRASRRLIRRRKHRKERVKHFLERIQFINYDKYRTWKKNFNPNIFQLKYDGLSKKLSPEEIFAIIIHFCNHRGYKDFYEEDATTINEKERGKIKTALSNFEKIYKDNGYISVSEMILKDPIFLGKGNYPDYHNHAIKNKQDNIEPRFFLIKREYLRKELINILKKQQQYYSKLTDKRINFICDNIVFIQRDFEDGPGDKKDSTRKYMGFLDSIGNCIYYKNEKRAFRTTIISDIYSLINQLSQVYFIDKNTEEISFSKEAANEIIDYVLINASLTEKDLKNILKKYDLILNKPGNLKLKINDCLKALKILKNTLEKCGYDYTSLIKEEQFNLEQPSKLQKLCILLSKNITPKRRILALQKAGYNKELQQEMIRKNFSSTANVSEKYMIQAIEAFKHGENYGNFQARMFKDKYNNITKKEKHLLLPSLTLKDDEDIVKNVVVFKAINETRKVINALIRKYGSFKYINILASDELGHSIQERKRIVKMQNKNRKETQNIRTKILELGLKKEDEITTQDIQRYKLYQQQNGIDLYTGSIIPENEILGTNYEIDYIVPFSLILDDTLNNKVLTKISINRITKNTKLPLQFLENEALDFYKKTVTTLFNKGKISSKKYNYLLLPILNEEILSEWKSRNLNDTRYICKFITNYISSNLIFDSNKKKNVYAIKAPIISKMRKIWLNKKTWGAKELDKTNNLYHAVNALVAANLTPAYVEIVYDNIRLQQIYREHHKTISNEYIDYLNKSINKMQKYYGFSIEYSQKLLRSLGKVPAILKNIWAEADIRLADNTMEYYKDIDDERFRQNICSFYQDKEFAESVQKVIVSYKSYKKFQGKITDDNPLPLSKNKSSYIKKMNNILNANKYYCIEVYKTIDNTINLRGIRFIDLIRKKGKLQLVIDNPIDYKHHIMYLFKNDYVKVYKNNKLLFKGYYKSVGNINQNILMFKIDNSSINTLKFIGKQYNIKKYDVNILGKLGGEIKCSVPFMFHKGNN

SEQ ID NO: 21220 - protein, 1424 aa, unidentified
  REGION 1..1424: note = Cas Enzyme sequence
MYNIGLDIGTGSVGWCLTDENGYLLKVNRKGNNGNTYRNSAWGVRLFESADTAADCRIKRSTRRRYNRRRTRIIELRKIMSDMIMPIDPNFYARLDEAFLWNEDKSDKAKAPFLLFNDKEYNDKKYYEDFKTIYHLRKYLINTTNKVDARLIYLALHHMMKYRGHFLYEGQTFESIDNVEDVFVELNNLVNAYIKECEDKDGNEYNDVYREIKKCLADNEIKNKDKKELIAAMFMRADYSKKYSKEVAVAILGYEFNVGIIVGENELTGEDNKPLKTKFSDANYEEQEENISSVLGEKYSIIEALKKIYSWKVLHGILGDNTYISSAMVAKYNIHKQQLSELKQLFHKYASQDEYSDFFHKEKDKSGNYIVNYANYIKGIKRLTNKDNKNYSAKQQLYISIRKILDDRALKDETYQKILKEMEEETFLEKINNVDNSAIPYQLNLMEMDKILTQQGVYYKELKDNKEQLLKMLISKIPYYVGPLNNHNKGNRNFAWMTRKTGKESEKLYPWNVKGVVDIDVTAEDFITRMTNYCTYLPNEKVLPKESLLYQKYMLLEELSQIKIDDNKLSKEDRKAIINDLFIGERRAKVSDKNFKEYLNKINYVKINDKGYDVTGYQSDDGFACALSSYNKFRRVLGYVDERNEKMIEDIIYWLTVFEDKDIVKRKINKQYPDRLTDEQLKKILKLKFKGWGRFSRKFLAGIKGDMGTTIIDMLEDADDRFLYCNYCPNLMQIINKDEKIKQIIDDNRPRYDGTEDLLDVIQDMHTSPANRRGIWQTMKAIEEIIEYMGEKPQQIYIEFAREDDPKAKNKRADSRKRAIDKALKKLKEDVVDEYNEKVYKELKQYEKRLDEEKVYLYFMQNGKSLYTGKELNLNEPENLEIDHIIPYSLSDDDSLDNKALVLKKENQNKGNKIVKEAFTQSFSDSEMMDYWKNLKKAGLISEKKYNNLQKNNVDDILTKGFINRQLVETRQIVKSVANLILDYYNEQIDVIEVKASLSTSVRKMLTYEKKDNNGFWIENKDNCMFYKNRDMNDYHHAHDAYLANIIGLYIQKNYPRLQKELNYSQYRRIWRKYYENTKNNNGVNWFATLGKFSSNNEEADWYGQDIIAYMRKIFCYRDVLISKKVEENTGAFYSETKYPREDKAGSKLVPLKQGNNMRGANNLKELDTRKYGGYKGGEKAYFVLVKYCIEKALKKSVKKEYHMEFVEIPVYIARGIKNNDINLYDYVCDILNEANKNSVADVEILRNKVPKYQMIIGENGEEYYLVSATEVINSKQFVLGGANQQYNRLLNYIKYGKNDKWQYIQTELLDEQLIGLYNLLIAKIKDEYKGFSKEAVRIQENNSFDKLDVKDKKEFIAEMIKLVQPDSDYPYLGKYATGLSNRMGRKTGEKVGKKITLVDKSVTGLYERRTTFELEDDSSTKSC

SEQ ID NO: 21221 - protein, 1424 aa, unidentified
  REGION 1..1424: note = Cas Enzyme sequence
MYNIGLDIGTGSVGWCLTDENGYLLKVNRKGNNGNTYRNSAWGVRLFESADTAADCRIKRSTRRRYNRRRTRIIELRKIMSDMIMPIDPNFYARLDEAFLWNEDKSDKAKAPFLLFNDKEYNDKKYYEDFKTIYHLRKYLINTTNKVDARLIYLALHHMMKYRGHFLYEGQTFESIDNVEDVFVELNNLVNAYIKECEDKDGNEYNDVYREIKKCLADNEIKNKDKKELIAAMFMRADYSKKYSKEVAVAILGYEFNVGIIVGENELTGEDNKPLKTKFSDANYEEQEENISSVLGEKYSIIEALKKIYSWKVLHGILGDNTYISSAMVAKYNIHKQQLSELKQLFHKYASQDEYSDFFHKEKDKSGNYIVNYANYIKGIKRLTNKDNKNYSAKQQLYISIRKILDDRALKDETYQKILKEMEEETFLEKINNVDNSAIPYQLNLMEMDKILTQQGVYYKELKDNKEQLLKMLTSKIPYYVGPLNNHNKGNRNFAWMTRKTGKESEKLYPWNVKGVVDIDVTAEDFITRMTNYCTYLPNEKVLPKESLLYQKYMLLEELSQIKIDDNKLSKEDRKAIINDLFIGERRAKVSDKNFKEYLNKINYVKINDKGYDVTGYQSDDGFACALSSYNKFRRVLGYVDERNEKMIEDIIYWLTVFEDKDIVKRKINKQYPDRLTDEQLKKILKLKFKGWGRFSRKFLAGIKGDMGTTIIDMLEDADDRFLYCNYCPNLMQIINKDEKIKQIIDDNRPRYDGTEDLLDVIQDMHTSPANRRGIWQTMKAIEEIIEYMGEKPQQIYIEFAREDDPKAKNKRADSRKRAIDKALKKLKEDVVDEYNEKVYKELKQYEKRLDEEKVYLYFMQNGKSLYTGKELNLNEPENLEIDHIIPYSLSDDDSLDNKALVLKKENQNKGNKIVKEAFTQSFSDSEMMDYWKNLKKAGLISEKKYNNLQKNNVDDILTKGFINRQLVETRQIVKSVANLILDYYNEQIDVIEVKASLSTSVRKMLTYEKKDNNGFWIENKDNCMFYKNRDMNDYHHAHDAYLANIIGLYIQKNYPRLQKELNYSQYRRIWRKYYENTKNNNGVNWFATLGKFSSNNEEADWYGQDIIAYMRKIFCYRDVLISKKVEENTGAFYSETKYPREDKAGSKLVPLKQGNNMRGANNLKELDTRKYGGYKGGEKAYFVLVKYCIEKALKKSVKKEYHMEFVEIPVYIARGIKNNDINLYDYVCDILNEANKNSVADVEILRNKVPKYQMIIGENGEEYYLVSATEVINSKQFVLGGANQQYNRLLNYIKYGKNDKWQYIQTELLDEQLIGLYNLLIAKIKDEYKGFSKEAVRIQENNSFDKLDVKDKKEFIAEMIKLVQPDSDYPYLGKYATGLSNRMGRKTGEKVGKKITLVDKSVTGLYERRTTFELEDNSSTKSR

SEQ ID NO: 21222 - protein, 1425 aa, unidentified
  REGION 1..1425: note = Cas Enzyme sequence
MYNIGLDIGTGSVGWCLTDENGYLLKVNRKGNNGNTYRNSAWGVRLFESADTAADCRIKRSTRRRYNRRRTRIIELRKIMSDMIMPIDPNFYARLDEAFLWNEDKSDKAKAPFLLFNDKEYNDKKYYEDFKTIYHLRKYLINTTNKVDARLIYLALHHMMKYRGHFLYEGQTFESIDNVEDVFVELNNLVNAYIKECEDKDGNEYNDVYREIKKCLADNEIKNKDKKELIAAMFMRADYSKKYSKEVAVAILGYEFNVGIIVGENELTGEDNKPLKTKFSDANYEEQEENISSVLGEKYSIIEALKKIYSWKVLHGILGDNTYISSAMVAKYNIHKQQLSELKQLFHKYASQDEYSDFFHKEKYKSGNYIVNYANYIKGIKRLTNKDNKNYSAKQQLYISIRKILDDRALKDETYQKILKEMEEETFLEKINNVDNSAIPYQLNLMEMDKILTQQGVYYKELKDNKEQLLKMLTSKIPYYVGPLNNHNKGNRNFAWMTRKTGKESEKLYPWNIKDVVDIDVTAEDFITRMTNYCTYLPDEKVLPKESLLYQRYMLLEELSQIRIDGKKLSKEDRKAIIDDLFIGKGRVKVSDKDFKEYLNKVNYVKVNGKGYDVTGYQSDDGFACALSSYNKFRRILGHIDEQNEKMIEDIIYWLTVFEDKDIVKRKINKQYPDRLTDEQLKKILKLKFKGWGRFSRKFLAGIKGDMGTTIIDMLEDADDRFLYCNYCPNLMQIINKDEKIKQIIDDNRPRYDGTEDLLDVIQDMHTSPANRRGIWQTMKAIEEVIEYMGEKPQQIYIEFAREDDPKAKNKRADSRKRAIDKALKKLKEDVVDEYNENVYKELKQYEKRLDEEKVYLYFMQNGKDLYFPDKELNLDELEKLEIDHIIPYSLSDDDSLDNKALVLKGNNQNKGNKIVKEAFPQLFSNSGTVNYWKNLKKAGLISEKKYNNLQKNNVDDILTKGFINRQLVETRQIVKSVANLILDYYNEQIDVIEVKASLSTSVRKMLTYEKKDSNGFWEENKDNCMFYKNRDMNDYHHAHDAYLANIIGMYIQKNYPHLQKELNYSQYRRVWRKYYENTKNNNGVNWFATLGKFSSNNEEADWYGQDIIAYMRKIFCYRDVLISKKVEENTGAFYSETKYPREDKAGSKLVPLKQGNNMRGANNLKELDTRKYGGYKGGEKAYFVLVKYCIEKALKKSVKKEYHMEFVEIPVYIARGIKNNDINLYDYVCDILNEANKNSVADVEILRNKVPKYQMIIGENGEEYYLVSATEVINSKQFVLGGANQQYNRLLNYIKYGKNDKWQYIQTELLDEQLIGLYNLLIAKIKDEYKGFSKEAVRIQENNSFDKLDVKDKKEFIAEMIKLVQPDSDYPYLGKYATGLSNRMGRKTGEKVGKKITLVDKSVTGLYERRTTFELEDDSSTKSY

SEQ ID NO: 21223 - protein, 1335 aa, unidentified
  REGION 1..1335: note = Cas Enzyme sequence
MSIVKNRGKIKYYIGVDIGTNSVGWAVIDENGYLLNKGKHHLWGSRLFDQAQTAQNRRNYRSSRRRYNKRKERIRLLQMIMSDMVLEVDSSFFIRLEKTTFLDKEDKKAILKDNYKMNYNLFCDEDYNDKKYFKDYPTIYHLRKKLCESDEKADPRLIYLALHHIVKYRGNFLYEGQELHLEPSNKEEDLKILFDILGKNNDTVYDISEEQIQFILKTVVENISKTAKVDECMSQLKLNSEDKKIVKEFMRGLVGNKFNVSKLYMHEDLQFDDEDLKLQFSDKSYEEKITEYENVLEEKMEFIDLMQRFYSWIELSKIVGSDSQHASISGAMVNIYESHREDLRTLKEVMLKIGKKEYDEMFKPTSKNVVNYYNYVNPVACSGDKTDGFYKYVKKAIEKSDDSRKDAIIQKIANETYMLKQTSKNNAYIPYQMQKDELIKILDHQEKYYPVLKENRDKIISILEFRIPYYYGPLDGNKQFGWLIKKKGKENERILPWNHQEIVDVQETAAQFIKKLTNYCTYLPIEKVMPQKSLTCSMYEVLSEVNKIRIDGKLLPIDTKNRLIEDLFFKRKTVKEKDLINWLKQNQLTVGEITGYQKEKAFSSSLAPWIDFKEIFDEINDSNYDLIEKIIEDMTIFNEGSILKERLKKAYNLDQNKVKKIMKLKYSGWSRLSKKLINGIRADNKFGSSVSILDVMKESHMTLMEIINDQDLGFKQIIEKENFKNETGSFEYEDIENLAGSPALKRGIWQTLQVIEEIKNYMGHEPKNIYIEFAREEQEKVRTTTRVKKLKSIYNDIKNQLDVHGKEVYSNLNKQDEKSSIEKRLYLYYTQLGKCMYSGESLGIDKLSNYEIDHIFPRTLTSDDSLDNLVLVKKKENQRKLDDLVLPLEIRNKMEVFWKKLYDNGLITQTKYYRLMRDEFRRDQIDKFINRQLVETRQIIKHVANIIENHYEDTKVFTVRANLSHEFREKYGIYKNRNVNDFHHAHDAYIACIIGRYIQIRFPGLEAKYVYGQYMQNVKKTKNNIDKENHGFIINSMKYECIDEDTGEVIWNPERILDYIKCFNYRDVYITKKLDTNNDKLFDVKILKNDKNSLKGETFAKIPVNKLRKDIHKYGGFSSLKNDIVAVEGKKGKKIERKVVNLPILLRNASTEEQQNYIMENNAYSDVKIIKKIKKNQLIEIDGICYYLRSADELDTAYQLILSRDDNEMVYCIDRAIQTNDFSYFDNKKENIDKLYKLICNKMIENYPKYKKKVYEFIKEREEDFFELDNSQKCIVIFEMIRVMKRGEQYINIPFEPYNLKNDRKGRLNGQSILLDNTYFYDVSITGIYSKKYKL

SEQ ID NO: 21224 - protein, 1253 aa, unidentified
  REGION 1..1253: note = Cas Enzyme sequence
MSDMVLEVDPSFFIRLEKTTFLDKEDKKAILKDNYKMNYNLFCDEDYNDKKYFKDYPTIYHLRKKLCESDEKADPRLIYLALHHIVKYRGNFLYEGQELHLESSNKEEDLKILFDILGKNNDTVYDFSEEQIQFILKTVVENISKTAKVDECMSHLKLNSEDKKIVKEFMRGLVGNKFNVSKLYMHEDLQFDDEDLKLQFSDKSYEEKIIEYENVLEEKMEFIDLMQQFYSWIELSKIVGSDSQHVSISDAMVNIYVNHKEDLKALKEMMLKIGKKEYDEMFKPTSKSIVNYYNYVNPVACSGDKTDGFYKYVKKAIEKSDDSRKDEILQKIANETYMLKQTSKNNAYIPYQMQKDELIKILDHQEKYYPVLKENRDKIISILEFRIPYYYGPLDGNKQFGWLIKKKGKENERILPWNHQEIVDVQETAAQFIKKLTNYCTYLPIEKVMPQKSLTCSMYEVLSEVNKIRIDGKLLPIDTKNRLIEDLFFKRKTVKEKDLINWLKQNQLTVGEITGYQKEKAFSSSLAPWIDFKEIFDEINDSNYDLIEKIIEDMTIFNEGSILKERLKKAYNLDQNKIKKIMKLKYSGWSRLSKKLINGIRADNKFGSSVSILDVMKESHMTLMEIINDQDLGFKQIIEKENFKNETGSFEYEDIENLAGSPALKRGIWQTLQVIEEIKNYMGHEPKNIYIEFAREEQEKVRTTTRVKQLKSIYNDIKNQLDVHGKEVYSNLNKQDEKSSIEKRLYLYYTQLGKCMYSGESLDIDKLSNYEIDHIFPRTLTSDDSLDNLVLVKKKENQRKLDDLVLPLEIRNKMEVFWKKLYDNGLITQTKYYRLMRDEFRRDQIDKFINRQLVETRQIIKHVANIIENHYEDTKVFTVRANLSHEFREKYEIYKNRNVNDFHHAHDAYIACIIGRYIQIRFPGLEAKYVYGQYMQNVKKTKNNIDKENHGFIINSMKYECIDEDTGEVIWNPERILDYIKCFNYRDVYITKKLDTNNRELFNVTILPNDKNSEKGKTKATIPVNKLRSNVRKYGGFSGLQSDIVAIEGKKGKKIDRRLINLPILLRYVSIEDQCKYIMENNKYSDVKIIKKIKKNQLIEIDGGLYYLSSATELVNAHQLILNNKENEIIFEINNAMIKNDYSYFENREIEITKLYNLLCDKMKKYYPKYKGIYEKILTKNIDFNILEIDLKCRVILEVLKILKAGAINGNLKFEPYNMTDREGRLSKQSIHLDNTYFYDVSITGIYSKKYKL

SEQ ID NO: 21225 - protein, 1312 aa, unidentified
  REGION 1..1312: note = Cas Enzyme sequence
VQNGFLGITVSSEQVGWAVTNPKYELERASRKDLWGVRLFDKAETAEDRRMFRTNRRLNQRKKNRIHYLRDIFHEEVNQKDPNFFQQLDESNFCEDDRTVEFNFDTNLYKNQFPTVYHLRKYLMETKDKPDIRLVYLAFSKFMKNRGHFLYKGNLGEVMDFENSMKGFCESLEKFNIDFPTLSDEQVKEVRDILCDHKIAKTVKKKNIITITKVKSKTAKAWIGLFCGCSVPVKVLFQDIDEEIVTDPEKISFEDASYDDYIANIEKGVGIYYEAIVSAKMLFDWSILNEILGDHQLLSDAMIAEYNKHHDDLKRLQKIIKGTGSRELYQDIFINDVSGNYVCYVGHAKTMSSADQKQFYTFLKNRLKNVNGISSEDAEWIDTEIKNGTLLPKQTKRDNSVIPHQLQLREFELILDNMQEMYPFLKENREKLLKIFNFVIPYYVGPLKGVVRKGESTNWMVPKKDGVIHPWNFDEMVDKEASAECFISRMTGNCSYLFNEKVLPKNSLLYETFEVLNELNPLKINGEPISVELKQRIYEQLFLTGKKVTKKSLTKYLIENGYDKDIELSGIDNEFHSNLKSHIDFEDYDNLSDEEVEQIILRITVFEDKQLLKDYLNREFVKLSEDERKQICSLSYKGWGNLSEMLLNGITVTDSNGVEVSVMDMLWNTNLNLMQILSKKYGYKAEIEHYNKEHEKTIYNREDLMDYLNIPPAQRRKVNQLITIVKSLKKTYGVPNKIFFKISREHQDDPKRTSSRKEQLKYLYKSLKSEDEKHLMKELDELNDHELSNDKVYLYFLQKGRCIYSGKKLNLSRLRKSNYQNDIDYIYPLSAVNDRSMNNKVLTGIQENRADKYTYFPVDSEIQKKMKGFWMELVLQGFMTKEKYFRLSRENDFSKSELVSFIEREISDNQQSGRMIASVLQYYFPESKIVFVKEKLISSFKRDFHLISSYGHNHLQAAKDAYITIIVGNVYHTKFTMDPAIYFKNHKRKDYDLNRLFLENISRDGQIAWESGPYGSIQTVRKEYAQNHIAVTKRVVEVKGGLFKQMPLKKGHGEYPLKTNDPRFGNIAQYGGYTNVTGSYFVLVESMEKGKKRISLEYVPVYLHERLEDDPGHKLLKEYLVDHRKLNHPKILLAKVRKNSLLKIDGFYYRLNGRSGNALILTNAVELIMDDWQTKTANKISGYMKRRAIDKKARVYQNEFHIQELEQLYDFYLDKLENGVYKNRKNNQAELIHNEKEQFMELKTEDQCVLLTEIKKLFVCSPMQADLTLIGGSKHTGMIAMSSNVTKADFAVIAEDPLGLRNKVIYSHKGEK

SEQ ID NO: 21226 - protein, 1433 aa, unidentified
  REGION 1..1433: note = Cas Enzyme sequence
MISGCPLFELVYLLILLQFNIKKRLCQHFKLNRNEVFVMNANREMAYYIGIDMGTGSVGMAITDENYNLLKVKGQDYWFVREFETANTQIKRRIHRISKRRLRRHQARVALIRSYFAEEILKNDPLFFIRQDNSKYYLEDKDSVLKTKDCLFADYNYHDKNYYKDYPTIFHLRQAFIKDTVKDDENHTRYARLLYLAIINMFEHRGHFLLNSVSEDINKEMVKDAGEGFTLYLQERIKEIKSVSYSDILDVLVENNISRSEKKERIVELFGIEKSCKNGTEIIRCLCGLEANVAIMFNLNNIENKLKIEVSKDDYEDKLAEVQPLVDEESFELLSQIKQLYDYSQLQSILKGYKEKEDGEDKYLSDVRVELYEKHKADLKLLKKVYKRDLDTKGKICEGKNIQRGSKYNFMFRSGKDGTYSAYTNSLNSFCSKTIENKYRRNMKNRDRASLYDTIKKDLNGIENDDVKKILRDIETEQFLPKQITGENGVIPNQIHAKELKAILKNAEKHLPFLTEKDDSGLTVSERIILLFTYCIPYYIGPVGKDSRTGWASIKEEGQIFPWNIEQKIDVDKTSEEFITRLIKTCTYLSNEKVVPKQSLVYERYCVLNEINNIKIRGKRIDPQLKQEIFKELYIGSKCGKKVTRKNLCQYLVNKGAIEEDSEISGIDKDLNTYMSSYGKMYQIFGDKIKRDDIKEVAEEIIYYGTIYGGAKEMFKKKIEQYVSENILDEAQMNRILGFKFKDWARLSKKFLYLEGYDKGNQNQLTTLMQALWDYNLNTMELMNSPMFTFKETLEKQKNEMEKVLCDFEYEDLDEYYFSAPVKRMVWQTIACLKEVVQIMGHNPKRIFIEMPRADEEKGEQGRKASRKNRLLSLYEEIEDERPWKKEIENAAESGRLNSKRMYLYYLQMGKDAYTGEDIDIEDLFDNSKYDIDHIYPRSLTDDNSLENNLVLVSATINQNVKKNDYPIPYDKIRGNSKVRELWYFLHKKNFMNDEKYNRLMSDVPLTQEQLAGYIARQLVETAQGTKGIADIIKSVIPDADIIYSKAKNVSDFRKRYGMLKSRLTNDFHHAKDAYLNVVVGNVYFTKFTQNPRKYIKDENDIENKKYNYNLSKMYDKDVIRNGKVAWIAQNGKKAGTIQTIKKVMDRNTPIITRQAFEQRGELYDLQPISKHKAKKENYVPIKATNEKMKDVTKYGGFTSLNPAYFVFVEYGSAKKRQRCFAVVHSYWASSIKNKEDLVTHLKDRGYENPIVIADKIKKNSLIKYNGYFLYIVGMDARKQVEFSNATSMCLNNNFIQYIQKIEKANTLIAEAKKRRPYIDESITAERNIALYNELKKKHLDSIFKNHPKGIGSVLESGEGAFVQLSLEQQIGILYSIIQFSSFKKGTFSLALIGGPKEVGRIRISGNMPKARELKLIHYSVTGMYKKEINLLD

SEQ ID NO: 21227 - protein, 1309 aa, unidentified
  REGION 1..1309: note = Cas Enzyme sequence
MKYSIGLDIGTTSVGWACVNENNELLQYLNKCAFGVREFEAAQTAETTRQKRQMRRRYNRRKKRIQLLQELFIDYVPKNFFVEKTNQHFWRNENQFENRALSQVLKQLRINLKEIPTIYHLRKSLIEGPKQDIRLIYLAIHNLTKYRGHFLNTGRWTQKNQGFDFKVECSEVATSYAEMNGLELPHLDFDKIQTIFEDTETVRKDKQKKLEELSSKSFTPLWQFLLGLSVNAEKLFIESENRAHYKVINLKLVLGSEELDEARENLSELENQFVDEVYVLYQQILLKDLLQGHECVAFSKVASYEKYQEDLKWFKKMINEANDEKLYRRFFITSKSALTAYKKTPDKQNKEKLCLLDQYNFSIKDKDTVLTAMTKLLEKSAIKHHTTLIENIREGTFLARQKGTHNAAIPNQNSIYEIEKILTNQQQYYDFITEEFIEKVVEIVSFRIPYYIGPLAKNNQSKFAWLERAKENEHITPATFHDLVNESATAEQFIKRMTNKCTYLQSEDVLPKQSLLYQYFEVLNELNAIQIRPKDAVSHSKYRLPVEAKKCVIEFGFKEYKTMTHKRLIQLLKEHQFDYLLGEEYEVFGTQQEGRFTSSLKSYIDFKGLFENSSVPFDEIMIERLIEWLTIFNEKNIIKKKIKENYPKFPTVMIERVLKKNFVGWGSLSKELLDGLILNDGKTVIEKMFDSTLTFREVLGVKNSNLEELIKQKNHSKRQTKKIAYSDVQELAGSPALKRGIWQAVKVVEELTAIFGEPTHIMLEVAREEGTKKRTQSRLMKFKTVVDGLGKDEQVLKKELQPYLKQPEAKFKDNRFYLYLLQQGKCAYSGKSLNIHQLLNYEIDHIYPRSFVKDDSLDNLVLVEKFYNQQKGGFKMPLECMSASECARMRGIWKSWFDKGFMNQNKFTRLCKPTFSELDREQFIARQLVETRQIIKNVGVLLEERFSDTTVHLVKAPIISKFRKTLEIPKLRDFNNKHHAIDALLNALLINHAINHYGENIFAFSFKDKERSKKLAQVAQKRNGFFLFNSFLSEQINSAISKKKLSSREFVEEVYYKVPWQTTKKIGNSDEMFFDETLYSPKTKQPKYESSKASKGVYDSVKNASTAVIKFTEKNKKKEVEKIELVNLTVLEEKQWSHLQDDEKAMKLICRQYPNKKIISASWVTNLFKYQKFIWQGQLFYLAAVKELHLAKQFVLPNTLLDAYLKADDQTSIEELQKIYLMIAEEMFTQYPIFAEGQMPNKVITFAEAIENLEQFKKEMLEIFKTTANNATRSDKLGSRLTRTVPATDIKLVYESITGLKVRKPKALR

SEQ ID NO: 21228 - protein, 1309 aa, unidentified
  REGION 1..1309: note = Cas Enzyme sequence
MKYSIGLDIGTTSVGWACVNENNELLQYLNKCAFGVREFEAAQTAETTRQKRQMRRRYNRRKKRIQLLQELFIDYVPKNFFVEKTNQHFWRNENQFENRALSQVLKQLRINSKEIPTIYHLRKSLIEGPKQDIRLIYLAIHNLTKYRGHFLNTGRWTQKNQGFDFKVECSEVATSYAEMNGLELPHLDFDKIQTIFEDTETVRKDKQKKLEELSSKSFTPLWKFLLGLSVNAEKLFIESENRAHYKVINLKLVLGSEELDEARENLSELENQFVDEVYVLYQQILLKDLLQGHECVAFSKVASYEKYQEDLKWFKKMINEANDEKLYRRFFITSKSALTAYKKTPDKQNKEKLCLLDQYNFSIKDKDTVLTAMTKLLEKSAIKHHTTLIENIREGTFLARQKGTHNAAIPNQNSIYEIEKILTNQQQYYDFITEEFIEKVVEIVSFRIPYYIGPLAKNNQSKFAWLERAKENEHITPATFHDLVNESATAEQFIKRMTNKCTYLQSEDVLPKQSLLYQYFEVLNELNAIQIRPKDAVSHSKYRLPVEAKKCVIEFGFKEYKTMTHKRLIQLLKEHQFDYLLGEEYEVFGTQQEGRFTSSLKSYIDFKGLFENSSVPFDEIMIERLIEWLTIFNEKNIIKKKIKENYPKFPTVMIERVLKKNFVGWGSLSKELLDGLILNDGKTVIEKMFDSTLTFREVLGVKNSNLEELIKQKNHSKRQTKKIAYSDVQELAGSPALKRGIWQAVKVVEELTAIFGEPTHIMLEVAREEGTKKRTQSRLMKFKTVVDGLGKDEQVLKKELQPYLKQPEAKFKDNRFYLYLLQQGKCAYSGKSLNIHQLLNYEIDHIYPRSFVKDDSLDNLVLVEKFYNQQKGGFKMPLECMSASEGARMRGIWKSWFDKGFMNQNKFTRLCKPTFSELDREQFIARQLVETRQIIKNVGVLLEERFSDTTVHLVKAPIISKFRKTLEIPKLRDFNNKHHAIDALLNALLINHAINHYGENIFAFSFKDKERSKKLAQVAQKRNGFFLFNSFLSEQINSAISKTKLSSREFVEEVYYKVPWQTTKKIGNSDEMFFDETLYSPKTKQPKYESSKASKGVYDSVKNASTAVIKFTEKNKKKEVEKIELVNLTVLEEKQWSHLQDDEKAMKLICRQYPNKKIISASWVTNLFKYQKFIWQGQLFYLAAVKELHLAKQFVLPNTLLDAYLKADDQTSIEELQKIYLMIAEEMFTQYPIFAEGQMPNKVITFAEAIENLEQFKKEMLEIFKTTANNATRSDKLGSRLTRTVPATDIKLVYESITGLKVRKPKALR

SEQ ID NO: 21229 - protein, 1199 aa, unidentified
  REGION 1..1199: note = Cas Enzyme sequence
AYRKQFPTVYHLRKYLMETKEKPDIRLVYLAFSKFMKNRGHFLYKGSLGEIMKFETSMNGFCELMQKSKINFPTLSETQICEIRDILSDHRMTKSVKKKKVISLTGAESNAEKSWIGLFCGCSVSVNTLYLDLDEEIISDQEKICFEDATYDDYADNIEKSVGSYYDLIISAKIIYDWSILHEILGDHQLLSDAKIAEYDKHHKDLKRLQRIIKKTGDQNLYQDIFIREIVGNYTSYVGRGKSIKNADQKQFYTFLKSRLKNVENIADEDREWIETEMKEGTLIPKLSKRDNSVIPHQLQLKEFVMILDNLQEMYPFLKENREKLLAIFNFVIPYYVGPFKGVERDEQKTNWMVPKKEGRIYPWNFDEMVNKEASAECFISRMTGNCSYLFNEKVLPKNSLLYESFEVLNELNPLKINGEPISVKLKQRIYEQLFLTGKKVTKKSLTKYLIKNGYGEDIELSGIDNEFHSNLKSHIDFEDYEQLSDEEVEQIILRITVFEDKQLLKDYLDREFSKLSEDERKQIASLSYKGWGNLSEMLLTGITVTDPDGVEVSVMNMLWNTNLNLMQILSKQYGYKTEIELYNAEHEKDIYNRKDLMKHLNIPVVQRRKINQLITVAKAVKHTYGVPEKVFFKVSREHQNDPKRTVSRKEQLKSLYKGCKDNDAKQLMKELEGLEGHELSNDKVYLYFLQKGRCIYTGKRLNLLQIRKSNYQNDIDYIYPLAAVIDRSLNNKVLTGVSENRADKYTYFPIDPKIQTNMKSFWMELVMQGFMTKEKYYRLTRENDFSKNELTSFIEREIANDQQSGRMIAAILQYYFPKSEIVFVKETQILNFKKDFRLLSSYGYNHFQSAKDAYLAIVTGNAYHVKFTMNPARFFKDHERSDYDLGQLFLQNIERNGQVAWISGPYGSIQTVREMYGKNSVRVTKRVVEIKGQLHEQQPVRKGHGQFPLKTSEKKLHDISKYGGYSSVTGSYFTLVEYEEKGKKKRSIEYIPLYMHDRLEKDPGHKLLKEFLSNDRKIQDPKILIAKIRKHTLLKVDGFSYRLSGRAGNNLILINAVELIMDDWSAKTANKVTRFMKRRAMDRNARVYQYEFHIQELEHLYDFYLDKLENGIYKYRKNNQAELIRNGKDKFMELKTEEQCMLLSEIQKLFICASLSADLTLIGGKKNSGGIKISSNVTNRQIEIISEDPLGLSLSVLC

SEQ ID NO: 21230 - protein, 1306 aa, unidentified
  REGION 1..1306: note = Cas Enzyme sequence
VKNSFLGITVSSDQIGWAITNPKYELECASRKDLWGVRLFDKAETAENRRLFRSSRRMKERKKKRLQYTQDIFQKEIEQTDPNFFQQLKENRFHKDDRTIEFNFDIDAYRKQFPTVYHLRKYLMETKEKPDIRLVYLAFSKFMKNRGHFLYKGSLGEIMKFETSMNGFCELMQKSKINFPTLSETQICEIRDILSDHRMTKSVKKKKIISLTGAESNAEKSWIGLFCGCSVSVNTLYLDLDEEIISDQEKICFEDATYDDYADNIEKSVGSYYDLIISAKIIYDWSILHEILGDHQLLSDAKIAEYDKHHKDLKRLQRIIKKTGDQNLYQDIFVREIVGNYTSYVGRGKSIKNADQKQFYTFLKSRLKNVENIADEDREWIETEMKEGTLIPKLSKRDNSVIPHQLQLKEFVMILDNLQEMYPFLKENREKLLAIFNFVIPYYVGPFKGVERDEQKTNWMVPKKEGRIYPWNFDEMVNKEASAECFISRMTGNCSYLFNEKVLPKNSLLYESFEVLNELNPLKINGEPISVKLKQRIYEQLFLTGKKVTKKSLTKYLIKNGYGEDIELSGIDNEFHSNLKSHIDFEDYEQLSDEEVEQIILRITVFEDKQLLKDYLDREFSKLSEDERKQIASLSYKGWGNLSEMLLTGITVTDPDGVEVSVMNMLWNTNLNLMQILSKQYGYKTEIDLYNAEHEKDIYNRKDLMKHLNIPVVQRRKINQLITVAKAVKHTYGVPEKVFFKVSREHQNDPKRTVSRKEQLKSLYKGCKDNDAKQLMKELEGLEGHELSNDKVYLYFLQKGRCIYTGKRLNLLQIRKSNYQNDIDYIYPLAAVIDRSLNNKVLTGVSENRADKYTYFPIDPKIQTNMKSFWMELVMQGFMTKEKYYRLTRENDFSKNELTSFIEREIANDQQSGRMIAAILQYYFPKSEIVFVKETQILNFKKDFRLLSSYGYNHFQSAKDAYLAIVTGNAYHVKFTMNPARFFKDHKRSDYDLGQLFLQNIERNGQVAWISGPYGSIQTVREMYGKNSVRVTKRVVEIKGQLHEQQPVRKGHGQFPLKTSEKKLHDISKYGGYSSVTGSYFTLVEYEEKGKKKRSIEYIPLYMHDRLEKDPGHKLLKEFLSNDRKIQDPKILIAKIRKHTLLKVDGFSYRLSGRAGNNLILINAVELIMDDWSAKTANKVTRFIKRRAMDRNARVYQYEFHIQELEHLYDFYLDKLENGIYKYRKNNQAELIRNGKDKFMELKTEEQCMLLSEIQKLFICASLSADLTLIGGKKNSGGIKISSNVTNRQIEIISEDPLGLSLGVLC

SEQ ID NO: 21231 - protein, 1113 aa, unidentified
  REGION 1..1113: note = Cas Enzyme sequence
ATYEVLKAVAGQSFKPCLILNDPELNDEELKKLSFSFKDDVTEPMEKLEASIDPEYMELFYQMKKLHDAGLLSNIMRGQNYLSFARVNEYEKHKEDLRILKDYIGKYLPDHYDEMFREMKDGNYSAYVGSTNDGEKKRRNVKGNKRDDLYDTIKKLLKNSPEHIQKDYILSEIEKETFLPKQLTSANGVIPNQVHATELKAILNAAEKDFEFLREKDETGFNVSEKILKLFTFQIPYYVGPLNGKSSHAWVERSYDEKVYPWNFEKVVDTRKTSEKFIERMVRHCTYLKGERVLPKTSLLYERFMVLNELNNLKVNEEKITVEQKQMIFNDLFLSGKKVTGTRLTNYIIDQGWMDKNSTISGFDGDFKNTMTSYGKLYGIFGEDLKKDSVRKMAEDIIFWGTIYGDDKKFYASVLDEHLSDVLGKKELQRLKGMKFKDWGNLSREFLELSGCSKEDGELLPLIEMMWNTNYNLMELMSERFTYRDELKKRVEETRNHLKDFGIEDLEGMYLSAPVKRMVWQTYLVLKEVTDVIGYAPKRIFVEMTRNDGEKNTRTVSRKKQLEELYKACKKDEFAKELYEELKGTDERSLRQKKLYLYYTQKGRCMYTGEVIELSDLMNQNLYDIDHIYPRHFVKDDSIHNNLVLVRKEVNNHKQDRYPIEDSIFYSQKDMWKSLYDQKFITAEKYKRLTSRTPFTEEQMAGFINRQLVETAQGTKALAETMKNLFDSTEIVYVKSGLVADFRHDTKMYKSRLVNDFHHAQDAYLNVVVGNTYHIKFTKDPKNFIHSYLQNTENEKYHMDKVFRYDVSRNGETAWIARGENKTIKTVETVMKRNTPLLTRMNFEAHGAFYDETRYGKDAAKEDTYVPLKTNDERLKDILKYGGFNKAAGAYFFLVEHTEKKKRIRTLEVMPIYLKNKYGYSKEAMELYCKEELGLVDPDVRITKIKYQSLLKINGYLVHLSGKSGNKLVLRNAVSMILDHRWINYSKKLENISEKGYVEKEITAENNVEFYRILTNKMTQSIFAKRPNYMGEKLQKRMEDFVRLNIEDQAKVLLQILNLTKIGTVKADLTTIGESANAGVMTSAKKISECQQFSLIHQSSAGLFETEIDLLTV

SEQ ID NO: 21232 - protein, 1178 aa, unidentified
  REGION 1..1178: note = Cas Enzyme sequence
LIRLNQLLEEKLDLSFTWVKPAEVEMIIGDRNLSRSTKAEKLCSLYGIEKKQKQQVAIIKTICGLKGDPSIIFNIELEEKVPVEFSSFGYDEKEPEFQAAVGDEYFEIIEAMKTVYSIGALSSIMKGFEYLSDARVSDYEKHGEDLKLLKSAVRKYAKPQVYDKLFRSEENGSYSAYVNSVSFDKLYATGEKSKHRRNMKGRSRDEFYKNVKNILKSAPENEDVLYIRREIELETFMPKQLTASNGIIPYQVHEKELKVILKNAEGYLPFLLSVDESGLSVSERILKLFSFQIPYYVGPITEDSAKYNGNGWVIRKSEGPVLPWSIDEKIDLKRTSEEFISRMVRRCTYISGEQVMPKSALMYEKYCVLNEINNLKIDGERIPVELKQEIFDGLFKKGKKVTRKKLAEFLLCRGIIVDESQISGIDSTINNSLSSYGKFHAIFGDEIDTDAGIKKVEDIIFWCTVYGDSKHFLVQNIQERFPEVSKEQIKKITGIKFKDWGRFSKEFLQMQGIDKSTGECVSLINALWETQHNLMELLHSEDFTFAEVLAEKQQKKLSSLTELTFENLNDYYFSAPVKKMIWQTFAIIKEISQIMGKEPDNIFIEMTRSEGEKGDAGRKNSRKKELLERYKNIKDDVQNWKQFIEDADEGGLLRSKKMYLYITQMGRDMYTGERINLDELFTQNMYDIDHIYPRHFVKDDSIHNNLVLVRKVDNAHKSDTYPLETGIRNNPKVKELWYMLRSKDLISEEKYRRLSGHKEFTEEQKAEFIARQIVETGQATKGVADLLKETMPQTEIVYAKAGNVSDFRKKYSLLKSRAVNDFHHAHDAYLNIVVGNVYLTKFTKNPRWFIQKEHTSGVDYHLSNMFNKDIIRNGYCAWKASTEGNSGTIETVRAMLSKNTPLITRKSFIGHGGIADQTLYSHRKAKDTGYIPLKASDERLQDVKKYGGFSSVSTAYFFLVEHEVKGKMVRTIETLPIIYADKIEKNSESLNWYCEEVLKLKNHSIRVAKIGMQSLIKLNGYYVHITGKTGNQIILRNAVSLCLKQPWINYIKKIEKYQEQQIMDKDITVERNIALYDELIKKHNSSIFKKRPNAIVDKLCVGRESFIALEITEQVKVLFEILKLTMLGSLTADLTLVKASANTGKMLMSKEISKNEGIALIHQSVTGIFENSIDLLTV

SEQ ID NO: 21233 - protein, 1148 aa, unidentified; identical to SEQ ID NO: 4783
  REGION 1..1148: note = Cas Enzyme sequence

SEQ ID NO: 21234 - protein, 1148 aa, unidentified
  REGION 1..1148: note = Cas Enzyme sequence
  SITE 18: note = misc_feature - Xaa can be any naturally occurring amino acid
  SITE 233: note = misc_feature - Xaa can be any naturally occurring amino acid
  SITE 253: note = misc_feature - Xaa can be any naturally occurring amino acid
  SITE 262: note = misc_feature - Xaa can be any naturally occurring amino acid
  SITE 620: note = misc_feature - Xaa can be any naturally occurring amino acid
  SITE 1001: note = misc_feature - Xaa can be any naturally occurring amino acid
  SITE 1088: note = misc_feature - Xaa can be any naturally occurring amino acid
  SITE 1139: note = misc_feature - Xaa can be any naturally occurring amino acid
MSNKINIGLDIGVTSVGXSIIDNNYKIIDMGVRLFDDPANPNDGTLGNEKRRTARSIRRQIRRTKLRKHDLISFLVENNFGSECEIQNIIENFDITKYGFDHPAQLKQKALTNKITKEELIFILFHYIHHRGSFNLTESDLKEGKIKINKNNTYPSIQMVEFFKKNKYFTYRNINDEIFLNIHWQNEIKKALETQECDNEFIDKYLEIFKRTREFNKGPGSEKSPTKYGLYQXQYNKNTCKWEITNNGYKNLXDRTIGKCTXYKNENRGLKNSPCAEVFNLFNDINNIYLLNDNDKKLSEKVKHKIFCKLSDSFFSDKSVYLSRKLICNILNEENIDNKYKCEDICGCRTEGKDKVIFTKLENYYILGRYLRKYNKNFNNNNLNALNVNFLKECDDLFKELASEHDIIKRIEILSNRDELKKLSKDENEKIIKKMNGLSSSHSLSTKAMFEFIEYCIKHLDKSINQQQFYIDIIKNKIEPNSNTTENISKYLKHGMFDNEILSPTVRRAFNQTILVFNKILKVYRKKYDIDNIIIELPRDKNSHEQKKKIDKLNKENKDLILKAIGNETSVNYEKLSIKQKNRLKLWYQQEKKDIYDNQIINFNDVITGKNLDEDHIIPXSISHDNSINNKVLTKSINNSNKNNLTPYLWLSKSNRYNNFKKNVNDLYSKKLINEEKMKNLLYEKNPLDDIFHFIGRNLADTRYIAALILQQFKNFFDNNNNYKNVKIKVVRGAITTFARYNLFIDKHQNKKTLLPKDRDLYCHHAIDASIICFLGMNSKINQMLNYYHMKCMSSNNNIVIDKDTHKMINKMTGEIVNLDQLYDMQQINDFSKELSKYNDTNDSFKNRVHFSRGIISKNNVALSDETIYSYNDKQKIYYSQLDLIKEKTSTLNKYFSDENSKKTCKLLIKKYDYCLFEKLKNIYLNYSQTNKMDKNTDSLDNNPFISYMINEYKIDHPKFIQIENQKIKKLRLINKIESEKIILPCHNNKAIIKSLNCLYXRIYKNNKNKFIIFPINAKVVKNITKYNNTYLKIDDEKLYDKLSFENIDEKNKYINIYRGTILINKKNNDIFYICGGIPSQNKFELKXLNAINAKHQILKNNKPPIRYLLTINPLTTDFDIAQIDPLGRIYNRYGFDDXDKLITIYNR

SEQ ID NO: 21235 - protein, 1409 aa, unidentified
  REGION 1..1409: note = Cas Enzyme sequence
MSIINFQRSRLMETQTSNQLITSHLKDYPKQDYFVGLDIGTNSVGWAVTNTSYELLKFHSHKMWGSRLFEEGESAVTRRGFRSMRRRLERRKLRLKLLEELFADAMAQVDSTFFIRLHESKYHYEDKTTGHSSKHILFIDEDYTDQDYFTEYPTIYHLRKDLMENGTDDIRKLFLAVHHILKYRGNFLYEGATFNSNAFTFEDVLKQALVNITFNCFDTNSAISSISNILMESGKTKSDKAKVIERLVDTYTVFDEVNTPDKPQKEQVKEDKKTLKAFANLVLGLSANLIDLFGSVEDIDDDLKKLQIVGDTYDEKRDELAKVWGDEIHIIDDCKSVYDAIILMSIKEPGLTISQSKVKAFDKHKEDLVILKSLLKLDRNVYNEMFKSDKKGLHNYVHYIKQGRTEETSCSREDFYKYTKKIVEGLADSKDKEYILNEIELQTLLPLQRIKDNGVIPYQLHLEELKVILDKCGPKFPFLHTVSDGFSVTEKLIKMLEFRIPYYVGPLNTHHNIDNGGFSWAVRKQAGRVTPWNFEEKIDREKSAEAFIKNLTNKCTYLLGEDVLPKSSLLYSEFMLLNELNNVRIDGKPLAQGVKQDLIDSIFKQDHKKMTKNRIELFLKDNNYITKKHKPEITGLDGEIKNDLTSYRDMVRILDKNFDVSMAEEIITDITIFGESKKMLRQTLRNKFGSQLNNETIKKLSKLRYRDWGRLSKKLLKGIDGCDKAGNGASKTIIELMCNDSYNLMELLGDKFSFMECIEAENAKLTQGQVVNPHDIIDELALSPAVKRAVWQALRIVDEVAHIKKALPSRIFVEVARTNKSEKKKKDSRQKRLSDLYSAIKKDDVLQSGLQDKEFGALKSGLSNYDDVALRSKKLYLYYTQMGRCAYTGNIIDLNQLNTDNYDIDHIYPRSLTKDDSFDNLVLCERTANAKKSDTYPIDNTIQTKQKSFWAFLKHQGFISERKYERLTRIAPLTADDLSGFIARQLVETNQSVKATTTLLRRLYPDIDVVFVKAENVSDFRHNNNFIKVRSLNHHHHAKDAYLNIVVGNVYHEKFTRNFRLFFKTNGANRTYNLAKMFNYDVICTNAQDGKAWNVKTSMNTVKKMMASNDVRVTRRLLEQSGALADATIYKASVAAKAKDGAYIGMKTKSTVFADVTKYGGMTKIKNAYSIIVQYTGKKGEEIKEIVPLPIYLINRNATDIELIDYVKSVIPKAKDISIKYRKLCINQLVKVNGFYYYLGGKTNDKIYIDNAIELVVPHDIATYIKLLDKYDLLRKENKTLKASSITTSIYNINTSTVVSLSNKVGIDVFDYFMSKLRTPLYMKMKGNKVDELSSTGRSKFIKMTLEEQSIYLLEVLNLLTNSKTTFDVKPLGITGSRSTIGVKIHNLDEFKIINESITGLYSNEVTIV

SEQ ID NO: 21236 - protein, 1365 aa, unidentified
  REGION 1..1365: note = Cas Enzyme sequence
MKEKMEYYLGLDMGTNSVGWAVTDKEYRLMRAKGKDLWGVRLFERANTAEERRAYRINRRRRQREVARIGILKELFADEIAKVDANFFARLDDSKYYLDDRQENNKQKYAIFADKDYTDKEYFSQYPTIFHLRKELIMSDQPHDVRLIYLALLNMFKHRGHFLNKTLGTSESSESFFDMYQRLAVCADEEGIKLPETVDLKKLEQILGARGCSRKATLEHISEIMGINKKNKPVYSLMQMICGLDTKMIDLFGQKIDEEHKKISLSFRTSNYEEMAEEVRNTIGDDAFELILTAKEMHDFGLLAEIMKGYSYLSEARVAVYEEHRKDLAKLKAVFKQYDHKAYDEMFRIMKNGTYSAYVGSVNSFGKIERRTVKTSREELLKNIKKILIGFPEDDATVQEFLGKIDSDTLLQKQLTASNGVIPNQVHAKEMKVILKNAEKYLPFLSERDETGLSVSEKIIALFTFTIPYYVGPLGQQHLGKECAHGWVERKEKGTVYPWNFEQKVDLKASAEHFIERMVKHCTYLSDEQALPKQSLLYEKFQVLNELNNLKIRGEKISVELKQQIYRDVFEHTGKKVSMKQLENYLKLNGLLEKDEKDAVTGIDGGFHSYLSSLGKFIGILGEEAHYDKNQNMMEKIIFWGTVYGQDKKFLRERLSEVYGDRLSKEQIRRITGMKFEGWGRLSKEFLLLEGAFREEGEIRTLIRSLWETNENLRGLLSERYTYSEEVREKTLECEKSLSEWTIEDLEGMYLSAPVKRMVWQTLLIVKELEKVLGCDPRRIFVEMAREDAEKGRRTESRKQKLQNLYKAIKKEEIDWKKEIDEKTEQAFRSKKLYLYYLQKGRCMYTGESIRFEDLMNDNLYDIDHIYPRHFVKDDSLEQNLVLVKKEKNAHKSDVFPIEADIQKKMSPFWKELKERGFISEEKYMRLTRRYGFSEEEKADFINRQLVETRQGTKSITEILGQAFPNVDIIFSKASNVSEFRHIYGLYKVRSINDFHHAHDAYLNIVVGNTYHVKFTKNPLNFIREAEKNPQNAENKYNMNRMFDWTVKRGNETAWIASSDKEAGSIKIVKAILAKNTPLVTKRCAEAHGGITRKATIWNKHKAAGSGYIPVKMNDARLLDVTKYGGLTSVSASGYTLLEYDVKGKKIRSLEAIPIYLGRVSELTNEAILKYFEKVLIEENKGKEITELRICKKFIPRESLVRYNGYYYYLGGKSVEQIVLKNATQMAYSEEETCYIKKIEKAIEKTYYEEVDKNKNVILTKTRNNAMYDKYQNSIYQNQSGAMKNSIIEKRNEFLTLSLEKQCRILKALVEYFRTGDIIDLRELGGSSQAGKVAMNKKIMGASELVLISQSPTGLFQQEIDLLKI

SEQ ID NO: 21237 - protein, 1369 aa, unidentified
  REGION 1..1369: note = Cas Enzyme sequence
MKEKMEYYLGLDMGTNSVGWAVTDKEYRLMRAKGKDLWGVRLFERANTAEERRAYRINRRRRQREVARIGILKELFADEIAKVDANFFARLDDSKYYLDDRQENNKQKYAIFADKDYTDKEYFSQYPTIFHLRKELIMSDQPHDVRLIYLALLNMFKHRGHFLNKTLGTSESLESFFDMYQRLAVCADGEGIKLPETVDLKKLEQILGARGCSRKATLEHISEIMGINKKNKPVYSLMQMICGLDTKMIDLFGQKIDEEHKKISLSFRTSNYEEMAEEVRNTIGDDAFELILTAKEMHDFGLLAEIMKGYSYLSEARVAVYEEHRKDLAKLKAVFKQYDHKAYDEMFRIMKNGTYSAYVGSVNSFGKIERRTVKTSREELLKNIKKILTGFPEDDATVQEFLGKIDSDTLLQKQLTASNGVIPNQVHAKEMKVILKNAEKYLPFLSERDETGLSVSEKIIALFTFTIPYYVGPLGQQHLGKECAHGWVERKEKGTVYPWNFEQKVDLKASAEHFIERMVKHCTYLSDEQALPKQSLLYEKFQVLNELNNLKIRGEKISVELKQQIYQDVFEHTGKKVSMKQLENYLKLNGLLEKDEKDAVTGIDGGFHSYLSSLGKFIGILGEEAHYGKNQNMMEKIIFWGTVYGQDKKFLRERLSEVYGDRLSKEQIRRITGMKFEGWGRLSKEFLLLEGASREEGEIRTLIRSLWETNENLMGLLSERYTYSEEVREKTLECEKSLSEWTIEDLEGMYLSAPVKRMVWQTLLIVKELEKVLGCAPRRIFVEMAREDAEKGRRTESRKQKLQNLYKAIKKEEIDWKKEIDEKTEQAFRSKKLYLYYLQKGRCMYTGESIRFEDLMNDNLYDIDHIYPRHFVKDDSLEQNLVLVKKEKNAHKSDVFPIEADIQKKMSPFWKELKERGFISEEKYMRLTRRYGFSEEEKAGFINRQLVETRQGTKSITEILGQAFPDVDIIFSKASNVSEFRHIYGLYKVRSINDFHHAHDAYLNIVVGNTYHVKFTKNPLNFIREAEKNPQNAENKYNMNRMFDWTVKRGNETAWIASSDKEAGSIKIVKAILAKNTPLVTKRCAEAHGGITRKATIWNKNKAAGSGYIPVKMNDARLLDVTKYGGLTSVSASGYTLLEYDVKGKKIRSLEAIPIYLGRVSELTNEAILKYFEKVLIEENKGKEIIELRICKKFIPRESLVRYNGYYYYLGGKSVEQIVLKNATQMAYSEEETCYIKKIEKAIEKTYYEEVDKNKNVILTKTRNNAMYDKFIIKYQNSIYQNQSGAMKNSIIGKRNEFLTLSLEKQCRILKALVEYFRTGDIIDLRELGGSSQAGKVAMNKKIMGASELVLISQSPTGLFQQEIDLLKI

SEQ ID NO: 21238 - protein, 1135 aa, unidentified
  REGION 1..1135: note = Cas Enzyme sequence
KTLKAFANLVLGLTANLIDLFGSVEDIDDDLKKLQIVGDTYDEKRDELAKVWGDEIHIIDDCKSVYDAIILMSIKEPGLTISQSKVKAFDKHKEDLVILKSLLKSDRNVYYEMFKSDKKGLHNYVHYIKQGRREETSCSREDFYKYTKKIVEGLADSEEKEYILNEIELQTLLPLQRIKDNGVIPYQLHLEELKVILDKCGPRFPFLHTVSDGFSVAEKLIKMLEFRIPYYVGPLNTHHNVDNGGFAWAVRKQAGRVTPWNFEEKIDREKSAAAFIKNLTNKCTYLFGEDVLPKSSLLYSEFMLLNELNNVRIDGKPLAQGVKQHLIDSIFKQDHKKMTKNRIELFLKDNNYITKKHKPEITGLDGEIKNDLTSYRDMVRILGNNFDVSMAEEIITDITIFGESKKMLRETLRNKFGSQLNDETIKKLSKLRYRDWGRLSKKLLNGIDGCDKGGNGIPETIIELMRNDSYNLMELLGDKFSFMECIEEENAKLTQGQVVNPHDIIDELALSPAVKRAVWQALRIVDEVAHIKKALPSRIFVEVARTNKSEKKKKDSRQKRLSDLYSAIKKDDVLQRGLLQDQEFGALKFGLSNYDDAALRSKKLYLYYTQMGRCAYTGNTIDLNLLNTDNYDIDHIYPRSLTKDDSFDNLVLCERTANAKKSDTYPIDNTIQTKQKSFWAFLKHQGLISERKYERLTRIAPLTADDLSGFIARQLVETNQSVKATTTLLRRLYPEIDVVFVKAENVTDFRHDNNFIKVRLLNHHHHAKDAYLNIVVGNVYHEKFTRNFRLFFKKNGANRTYNLAKMFNYDVKCTNPQDGKAWDKQTSMDTVKKMMASNDVRVTRRVYEQKGQLADINLTKASKVKADIYLPIKGNDLIMSQNTKYGGYSDIKNAYYTIIEYSDKKNDSTKSFLPIPIFIATKNLTNQALLEYINTVLPKANNIRIIYKKVYNDQLLKIDGFNYYLGGRSNDRFCIDNAIQLVVPLEMQFYIKLVEKFTAIISENKNSILKASSVKSRNPINNQVENITLEYTQKLFDYLVSKFNETIYTKMRGNKSTDIDSVGRRQFIKLSLEERCKALAEILNIFTNMNKKLSLSSINVSASRKVVNFKISSLNEFKIINESITGLYSNEVTII

SEQ ID NO: 21239 - protein, 913 aa, unidentified
  REGION 1..913: note = Cas Enzyme sequence
MSIINFRRRGLMEMQTSKQLISSHLKEYPIKDYFVGLDIGTSSVGWAVTNKLYELLKFRSHKMWGSRLFDEGESAVGRRSFRSIRRRLERRKLRLKLLEELFADAMAQVDPTFFIRLHESKHHYEDKTTSHSSKHILFIDKNYTDQDYFKEYPTIYHLRAELMKSGTDDIRKLFLAVHHILKYRGNFLYEGATFDSNASTLDDVLKQALENITFNCFDCNSAISSIGQILMETGKTKSDKAKAIERLVDTYITTDTEDSSSKIQKEQVKEDKKRLKAFANLVLGLSASLTDLFGSVEELDDDLKKLQITGDTYDDKRDELAKAWGDEIHIIDDCKSVYDAIILMSIKEPGLTISESKIKAFNKHKEDLVILKSLLKTDRSIYNAMFKADEKGLHNYVHYIKQGRKEETSCNREDFYKYTKKIVEGLPDSKDKAYILSEIELQTLLPLQRIKDNGVIPYQLHLEELKTILDTCKSKFPFLNEVADGYSVAEKLIKMLEFRIPYYVGPLNTYHNVNNGGFAWAVRKASGRVTPWNFDDKIDREKSAAAFIKNLTNKCTYLLGEDVLPKSSLLYSEFMLLNELNNIRIDGKPLETAVKEHLIEAVFKQDHKKMTKNRIEQFLKDNNYIPKKHKPDITGLDGEIKNDLTSYRDMVRILGIDFDRSMAEDIIMDITIFGESKKMLRETLRNKFASRLDNEAIKKLSKLRYRDWGRLSKKLLNGIEGCDKAGDGTPKTIIKLMRNFSYNLMELLGDKFSFMERIQELNDELTRGQVVDPHDIIDELGLSSAVKRAVWQALRIVDEVIHIKKALPSRIFVEVTRSNKAEKKKKDSRQKRLSDLYAAIKKDEALLSGLKDTEFDGLKLGLANYDDAALRSKKLYLYYTQMGRCAYTGNIIDLNLLYSSSFSKLNPDKLYLL

SEQ ID NO: 21240 - protein, 1407 aa, unidentified
  REGION 1..1407: note = Cas Enzyme sequence
MSIINFQRSRLMETQTSNQLITSHLKDYPKQDYFVGLDIGTNSVGWAVTNTSYELLKFHSHKMWGSRLFEEGESAVTRRGFRSMRRRLERRKLRLKLLEELFADAMAQVDSTFFIRLHESKYHYEDKTTGHNSKHILFIDEDYTDQDYFTEYPTIYHLRKDLMENGTDDIRKLFLAVHHILKYRGNFLYEGATFNSNAFTFEDVLKQALVNITFNCFDTNSAISSISNILMESGKTKSDKAKAIERLVDTYTVFDEVNTPDKPQKEQVKEDKKTLKAFANLVLGLSANLIDLFGSVEDIDDDLKKLQIVGDTYDEKRDELAKVWGDEIHIIDDCKSVYDAIILMSIKEPGLTISQSKVKAFDKHKEDLVILKSLLKLDRNVYNEMFKSDKKGLHNYVHYIKQGRTEETSCSREDFYKYTKKIVEGLADSKDKEYILNEIELQTLLPLQRIKDNGVIPYQLHLEELKVILDKCGPKFPFLHTVYDGFSVTEKLIKMLEFRIPYYVGPLNTHHNIDNGGFSWAVRKQAGRVTPWNFEEKIDREKSAAAFIKNLTNKCTYLFGEDVLPKSSLLYSEFMLLNELNNVRIDGKALAQGVKQHLIDSIFKQDHKKMTKNRIELFLKDNNYITKKHKPEITGLDGEIKNDLTSYRDMVRILGNNFDVSMAEDIIIDITIFGESKKMLRQTLRNKFGSQLNDETIKKLSKLRYRDWGRLSKKLLKGIDGYDKAGNGAPKTIIELMRNDSYNLMEILGDKFSFMECIEEENAKLTQGQVVNPHDIIDELALSPAVKRAVWQALRIVDEVAHIKKALPSRIFVEVARTNKSEKKKKDSRQKRLSDLYSAIKKDDVLQSGLQDKEFGALKSGLANYDDAALRSKKLYLYYTQMGRCAYTGNIIDFNQLNTDNYDIDHIYPRSLTKDDSFDNLVLCERTANAKKSDIYPIDNTIQMKQRSFWAFLKHQGLISERKYERLTRIAPLTADDLSGFIARQLVETNQSVKATTTLLRRLYPDIDVVFVKAENVTDFRHDNNFIKVRSLNHHHHAKDAYLNIVVGNVYHEKFTRNFRLFFKKNGANRTYNLAKMFNYDVICTNAQDGKAWNKDTSMDTVKKMMASNDVRVTRRLLEQSGALADATIYKASVAAKAKDGAYIGMKTKSSVFADVTKYGGMTKIKNAYSIIVQYTGKKDEKIKEIVPLPIYLINRNTTDVDLIDYVKSVIPQAKDISIKYRKLCINQLVKINGFYYYLGGKTSNSICIDNGIQVLFSPEFEVYIKLIDKFYIMQKSNLNIDIKNVSTFNPQNNQQVFITVEDNIKLYDYFIDKLNSNIYQKMKGNKVNDLISIGRDRFIELPINIQCVLLLEILNMLTNMKTTYDIKLLGFSTSRTKIALKISNLNEFKIINESITGLYSNEVTIV

SEQ ID NO: 21241 - protein, 1395 aa, unidentified
  REGION 1..1395: note = Cas Enzyme sequence
METQTSNQLITSHLKDYPKQDYFIGLDIGTNSVGWAVTNTSYELLKFHSHKMWGSRLFEEGESAVTRRGFRSMRRRLERRKLRLKLLEELFADAMAQVDSTFFIRLHESKYHYEDKTTGHSSKHILFIDEDYTDQDYFTEYPTIYHLRKDLMENGTDDIRKLFLAVHHILKYRGNFLYEGATFNLNAFTFEDVLKQALVNITFNCFDTNSAISSISNILMESGKTKSDKAKAIERLVDTYTVFDEVNTPDKPQKEQVKEDKKTLKAFANLVLGLSANLIDLFGSVEDIDDDLKKLQIVGDTYDEKRDELAKVWGDEIHIIDDCKSVYDAIILMSIKEPGLTISQSKVKAFDKHKEDLVILKSLLKLDRNVYNEMFKSDKKGLHNYVHYIKQGRTEETSCSREDFYKYTKKIVEGLADSKDKEYILNEIELQTLLSLQRIKDNGVIPYQLHLEELKVILDKCGPKFPFLHTVSDGFSVTEKLIKMLEFRIPYYVGPLNTHHNIDNGGFSWAVRKQAGRVTPWNFEEKIDREKSAAAFIKNLTNKCTYLFGEDVLPKSSLLYSEFMLLNELNNVRIDGKALAQGVKQHLIDSIFKQDHKKMTKNRIELFLKDNNYITKKHKPEITGLDGEIKNDLTSYRDMVRILGNNFDVSMAEDIITDITIFGESKKMLRQTLRNKFGSQLNDETIKKLSKLRYRDWGRLSKKLLKGIDGCDKAGNCAPKTIIELMRNDSYNLMELLGDKFSFMECIEEENAKLTQGQVVNPHDIIDELALSPAVKRAVWQALRIVDEVAHIKKALPSRIFVEVARTNKSEKKKKDSRQKRLSDLYSAIKKDDVLQSGLQDKEFGALKSGLANYDDAALRSKKLYLYYTQMGRCAYTGNIIDLNQLNTDNYDIDHIYPRSLTKDDSFDNLVLCERTANAKKSDTYPIDNTIQMKQKSFWAFLKHQGLISERKYERLTRILPLTADDLSGFIARQLVETNQSVKATTTLLRRLYPDIDVVFVKAENVSDFRHDNNFIKVRSLNHHHHAKDAYLNIVVGNVYHEKFTRNFRLFFKKNGANRTYNLAKIFNYDVICTNAQDGKAWNKDTSMDTVKKMMASNDVRVTRRVYEQKGQLADINLTKASKVKADIYLPIKGNDLIMSQNTKYGGYSDIKNAYYTIIEYSDKKNNSIKSFLPIPIFIATKNLTNQALLEYINTVLPKANNIRIIYKKVYNDQLLRIDGFNYYLGGRSNDRFCIDNAIQLIVPLEMQFYIKLVEKFTAIISENKNIKLKASSVKSRNPINNQVENITLEYSQKLFDYLVSKFNEPIYTKMRGNKSTDIDSVGRRQFTKLSLEERCKTLAEMLNIITNMNKKLSLSNINVSASRKVVNFKISSLNEFKIINESITGLYSNEVTIV

SEQ ID NO: 21242 - protein, 1395 aa, unidentified
  REGION 1..1395: note = Cas Enzyme sequence
METQTSNQLITSHLKDYPKQDYFVGLDIGTNSVGWAVTNTSYELLKFHSHKMWGSRLFEEGESAVTRRGFRSMRRRLERRKLRLKLLEELFADAMAQVDSTFFIRLHESKYHYEDKTTGHNSKHILFIDEDYTDQDYFTEYPTIYHLRKDLMENGTDDIRKLFLAVHHILKYRGNFLYEGATFNSNTFTFEDVLKQALVNITFNCFDTNSAISSISNILMESGKTKSDKAKAIERLVDTYTVFDEVNTPDKPQKEQVKEDKKTLKAFANLVLGLSANLIDLFGSVEDIDDDLKKLQIVGDTYDEKRDELAKVWGDEIHIIDDCKSVYDAIILMSIKEPGLTISQSKVKAFDKHKEDLVILKSLLKLDRNVYNEMFKSDKKGLHNYVHYIKQGRTEETSCSREDFYKYTKKIVEGLADSKDKEYILNEIELQTLLPLQRIKDNGVIPYQLHLEELKVILDKCGPKFPFLHTVSDGFSVTEKLIKMLEFRIPYYVGPLNTHHNIDNGGFSWAVRKQAGRVTPWNFEEKIDREKSAAAFIKNLTNKCTYLFGEDVLPKSSLLYSEFMLLNELNNVRIDGKALAQGVKQHLIDSIFKQDHKKMTKNRIELFLKDNNYITKKHKPEITGLDGEIKNDLTSYRDMVRILGNNFDVSMAEDIITDITIFGESKKMLRQTLRNKFGSQLNDETIKKLSKLRYRDWGRLSKKLLKGIDGCDKAGNCAPKTIIELMRNDSYNLMELLGDKFSFMECIEEENAKLTQGQVVNPHDIIDELALSPAVKRAVWQALRIVDEVAHIKKALPSRIFVEVARTNKSEKKKKDSRQKRLSDLYSAIKKDDVLQSGLQDKEFGALKSGLANYDDAALRSKKLYLYYTQMGRCAYTGNIIDLNQLNTDNYDIDHIYPRSLTKDDSFDNLVLCERTANAKKSDTYPIDNTIQMKQKSFWAFLKHQGLISERKYERLTRILPLTADDLSGFIARQLVETNQSVKATTTLLRRLYPDIDVVFVKAENVSDFRHDNNFIKVRSLNHHHHAKDAYLNIVVGNVYHEKFTRNFRLFFKKNGANRTYNLAKIFNYDVICTNAQDGKAWNKDTSMDIVKKMMASNDVRVTRRVYEQKGQLADINLTKASKVKADIYLPIKGNDLIMSQNTKYGGYSDIKNAYYTIIEYSDKKNNSIKSFLPIPIFIATKNLTNQALLEYINTVLPKANNIRIIYKKVYNDQLLRIDGFNYYLGGRSNDRFCIDNAIQLIVPLEMQFYIKLVEKFTAIISENKNIKLKASSVKSRNPINNQVENITLEYSQKLFDYLVSKFNEPIYTKMRGNKSTDIDSVGRRQFTKLSLEERCKTLAEMLNIITNMNKKLSLSNINVSASRKVVNFKISSLNEFKIINESITGLYSNEVTIV

SEQ ID NO: 21243 - protein, 1396 aa, unidentified
  REGION 1..1396: note = Cas Enzyme sequence
MEMQTSKQLISSHLKEYPIKDYFVGLDIGTSSVGWAVTNKLYELLKFRSHKMWGSRLFDEGESAVGRRSFRSIRRRLERRKLRLKLLEELFADAMAQVDPTFFMRLRESKYHYEDKTTGHSSKHILFIDKDYTDQDYFKEYPTIYHLRAELMKSGTDDIRKLFLAVHHILKYRGNFLYEGATFDSNASTLDDVLKQALENITFNCFDCNSAISSIGQILMDAGKTKSDKAKAIERLVDTYIATDTEDISSKTQKEQVKEDKKRLKAFANLVLGLSASLTDLFGSVEELDDDLKKLQITGDTYDDKRDELAKAWGDEVHIIDDCKSVYDAIILMSIKEPGLTISESKVKAFNKHKEDLVILKSLLKTDRSIYNAMFKADEKGLHNYVHYIKQGRKEETSCNREDFYKYTKKVVEGLPDSKDKEYILSEIELQTLLPLQRIKDNGVIPYQLHLAELKAILKTCGPKFPFLNEVADGYSVAEKLIKMLEFRIPYYVGPLNTYHNVDKGGFAWAVRKASGRVTPWNFDDKIDREKSAAAFIKNLTNKCTYLLGEDVLPKSSLLYSEFMLLNELNNIRIDGKPLETAVKEHLIEAVFKQDHKKMTKNRIEQFLKDNNYIPKKHKPDITGLDGEIKNDLTSYRDMVRILGANCDRSMAEDIIMDITIFGESKKMLRETLRNKFASHLDDETIKKLSKLRYRDWGRLSKKLLNGVEGCDKAGDGTPETIIELMRNFSYNLMELLGDKFSFMERIQEINDKLTEGQVVDPQDIIDELALSPAVKRAVWQALRIVDEVIHIKKALPSRIFVEVTRSNKTEKKKKGSRQKRLSDLYAAIKKDEALLSGLKDTEFDGLKSGLANYDDAALRSKKLYLYYTQMGRCAYTGEVIELSQLNTDNYDIDHIYPRSLTKDDSFDNLVLCKRTANAQKSDTYPIAEKIQKAQKPFWTFLKQQGLISERKYERLTRNIPLAADDLSGFIARQLVETNHSVKAATTLPRRLYPKIDVVFVKAENVTDFRHDNNFIKVRSLNHHHHAKDAYLNIVVGNVYHEKFTRNFRAFFKKNGANRTYNLAKMFNYDVTCTNAKDGKAWDVKTSMNIVKKMMDSNDVRVTKRLLEQSGALADATVYKATVAAKAKDGAYIGMKTKSSVFADVTKYGGMTKIKNAYSIIVQYIGKKGEVVKEIVPLPIYLTNRNTTDQDLIDYVASITPEAKDISIIYRKLCINQLVKVNGFYYYLGGKTSNSICIDNAIQVLLSNEFLIYAKLLDKVNTLRKSDPSINIQNISTLSPFAKEQISITINDNLKFYDYLVEKLNSNIYIKMKGNKACDLIDIGREKFKGIDVSSQCILLLEILNMLTNMKTTYDIKLLGFSTSRTKIALKVSILDEFKIINQSITGLYSSEITIV

SEQ ID NO: 21244 - protein, 1396 aa, unidentified
  REGION 1..1396: note = Cas Enzyme sequence
MEMQTSKQLISSHLKEYPIKDYFVGLDIGTSSVGWAVTNKLYELLKFRSHKMWGSRLFDEGESAVGRRSFRSIRRRLERRKLRLKLLEELFADAMAQVDPTFFMRLRESKYHYEDKTTGHSSKHILFIDKDYTDQDYFKEYPTIYHLRAELMKSGTDDIRKLFLAVHHILKYRGNFLYEGATFDSNASTLDDVLKQALENITFNCFDCNSAISSIGQILMDAGKTKSDKAKAIERLVDTYIATDTEDISSKTQKEQVKEDKKRLKAFANLVLGLSASLTDLFGSVEELDDDLKKLQITGDTYDDKRDELAKAWGDEVHIIDDCKSVYDAIILMSIKEPGLTISESKVKAFNKHKEDLVILKSLLKTDRSIYNAMFKADEKGLHNYVHYIKQGRKEETSCNREDFYKYTKKVVEGLPDSKDKEYILSEIELQTLLPLQRIKDNGVIPYQLHLAELKAILKTCGPKFPFLNEVADGYSVAEKLIKMLEFRIPYYVGPLNTYHNVDKGGFAWAVRKASGRVTPWNFDDKIDREKSAAAFIKNLTNKCTYLLGEDVLPKSSLLYSEFMLLNELNNIRIDGKPLETAVKEHLIEAVFKQDHKKMTKNRIEQFLKDNNYIPKKHKPDITGLDGEIKNDLTSYRDMVRILGANCDRSMAEDIIMDITIFGESKKMLRETLRNKFASHLDDETIKKLSKLRYRDWGRLSKKLLNGVEGCDKAGDGTPETIIELMRNFSYNLMELLGDKFSFMERIQEINDKLTEGQVVDPQDIIDELALSPAVKRAVWQALRIVDEVIHIKKALPSRIFVEVTRSNKTEKKKKGSRQKRLSDLYAAIKKDEALLSGLKDTEFDGLKSGLANYDDAALRSKKLYLYYTQMGRCAYTGEVIELSQLNTDNYDIDHIYPRSLTKDDSFDNLVLCKRTANAQKSDTYPIAEKIQKAQKPFWTFLKQQGLISERKYERLTRNIPLAADDLSGFIARQLVETNHSVKAATTLLRRLYPKIDVVFVKAENVTDFRHDNNFIKVRSLNHHHHAKDAYLNIVVGNVYHEKFTRNFRAFFKKNGANRTYNLAKMFNYDVTCTNAKDGKAWDVKTSMNIVKKMMDSNDVRVTKRLLEQSGALADATVYKATVAAKAKDGAYIGMKTKSSVFADVTKYGGMTKIKNAYSIIVQYIGKKGEVVKEIVPLPIYLTNRNTTDQDLIDYVASITPEAKDISIIYRKLCINQLVKVNGFYYYLGGKTSNSICIDNAIQVLLSNEFLIYAKLLDKVNTLRKSDPSINIQNISTLSPFAKEQISITINDNLKFYDYLVEKLNSNIYIKMKGNKACDLIDIGREKFKGIDVSSQCILLLEILNMLTNMKTTYDIKLLGFSTSRTKIALKVSILDEFKIINQSITGLYSSEITIV

SEQ ID NO: 21245 - protein, 1398 aa, unidentified
  REGION 1..1398: note = Cas Enzyme sequence
METQTSNQLITSHLKNYPKQDYFVGLDIGTNSVGWAVTNKSYELLKFHSHKMWGSRLFEEGESAVTRRGFRSMRRRLERRKLRLKLLEELFADAMAQVDSTFFIRLHESKYHYEDKTTGHSSKHILFIDDDYTDQDYFTEYPTIYHLRKDLMENGTDDIRKLFLAVHHILKYRGNFLYEGATFNSNAFTFEDVLKQALVNITFNCFDTNSAISSISNILMESGKTKSDKAKVIERLVDTYTVFDEVNAPDKPQKEQVKEDKKTLKAFANLVLGLSANLIDLFGSVEDIDDDLKKLQIVGDTYDEKRDELAKVWGDEIHIIDDCKSVYDAIILMSIKEPGLTISQSKVKAFDKHKEDLVILKSLLKLDRNIYNEMFKSDKKGLHNYVHYIKQGRIEETSCSREDFYKYTKKIVEGLADSKDKEYILNEIELQTLLPLQRIKDNGVIPYQLHLEELKVILDKCGPKFPFLHTVSDGFSVTEKLIKMLEFRIPYYVGPLNTHHNIDNGGFSWAVRKQAGRVTPWNFEEKIDREKSAAAFIKNLTNKCTYLFGEDVLPKSSLLYSEFMLLNELNNVRIDGKALAQGVKQHLIDSIFKQDHKKMTKNRIELFLKDNNYITKKHKPEITGLDGEIKNDLTSYRDMVRILGNNFDVSMAEDIITDITIFGESKKMLRQTLRNKFGSQINDETIKKLSKLRYRDWGRLSKKLLKGIDGCDKAGNGAPKTIIELMRNDSYNLMELLGDKFSFMECIEEENAKLTQGQVVNPHDIIDELALSPAVKRAVWQALRIIDEVVHIKKALPSRIFVEVARTNKSEKKKKDSRQKRLSDLYSAIKKDDVLQSGLQDKEFGALKSGLANYDDAALRSKKLYLYYTQMGRCAYTGNIIDLNQLNTDNYDIDHIYPRSLTKDDSFDNLVLCERTANAKKSDIYPIDNRIQTKQKPFWAFLKHQGLISERKYERLTRILPLTADDLSGFIARQLVETNQSVKATTTLLRRLYPDIDVVFVKAENVSDFRHDNNFIKVRSLNHHHHAKDAYLNIVVGNVYHEKFTRNFRLFFKKNGANRTYNLAKMFNYDVKCTNTQGGKAWDVKTSMNTVKKMMASNDVRVTRRLLEQSGALADATIYKASVAAKAKDGAYIGMKTKSSVFADVTKYGGMTKIKNAYSIIVQYTGKKGEEIKEIVPLPIYLINRNATDIELIDYVKSIIPKAKDISIKYRKLCINQLVKVNGFYYYLGGKTNDKIYIDNAIELVVPHDIATYIKLLDKYDLLRKENKTLKASSITTSIYNINTSTVVSLSNKVGIDVFDYFMSKLRTPLYMKMKGNKVDELSSTGRSKFIKMTLEEQSIYLLEVLNLLTNSKTTFDVKPLGITGSRSTIGVKIHNLDEFKIINESITGLYSNEVTIV

SEQ ID NO: 21246 - protein, 1407 aa, unidentified
  REGION 1..1407: note = Cas Enzyme sequence
MSIINFQRSRLMETQTSNQLITSHLKDYPKQDYFVGLDIGTNSVGWAVTNTSYELLKFHSHKMWGSRLFEEGESAVTRRGFRSMRRRLERRKLRLKLLEELFADAMAQVDSTFFIRLHESKYHYEDKTTGHNSKHILFIDEDYTDQDYFTEYPTIYHLRKDLMENGTDDIRKLFLAVHHILKYRGNFLYEGATFNSNAFTFEDVLKQALVNITFNCFDTNSAISSISNILMESGKTKSDKAKAIERLVDTYTVFDEVNTPDKPQKEQVKEDKKTLKAFANLVLGLSANLIDLFGSVEDIDDDLKKLQIVGDTYDEKRDELAKVWGDEIHIIDDCKSVYDAIILMSIKEPGLTISQSKVKAFDKHKDDLVILKSLLKLDRNVYNEMFKSDKKGLHNYVHYIKQGRTEETSCSREDFYKYTKKIVEGLADSKDKEYILNEIELQTLLPLQRIKDNGVIPYQLHLEELKVILDKCGPKFPFLHTVSDGFSVTEKLIKMLEFRIPYYVGPLNTHHNIDNGGFSWAVRKQAGRVTPWNFEEKIDREKSAAAFIKNLTNKCTYLFGEDVLPKSSLLYSEFMLLNELNNVRIDGKALAQGVKQHLIDSIFKQDHKKMTKNRIELFLKDNNYITKKHKPEITGLDGEIKNDLTSYRDMVRILGNNFDVSMAEDIIIDITIFGESKKMLRQTLRNKFGSQLNDETIKKLSKLRYRDWGRLSKKLLKGIDGYDKAGNGAPKTIIELMRNDSYNLMEILGDKFSFMECIEEENAKLTQGQVVNPHDIIDELALSPAVKRAVWQALRIVDEVAHIKKALPSRIFVEVARTNKSEKKKKDSRQKRLSDLYSAIKKDDVLQSGLQDKEFGALKSGLANYDDAALRSKKLYLYYTQMGRCAYTGNIIDLNQLNTDNYDIDHIYPRSLTKDDSFDNLVLCERTANAKKSDIYPIDNTIQMKQRSFWAFLKHQGLISERKYERLTRIAPLTADDLSGFIARQLVETNQSVKATTTLLRRLYPDIDVVFVKAENVTDFRHDNNFIKVRSLNHHHHAKDAYLNIVVGNVYHEKFTRNFRLFFKKNGANRTYNLAKMFNYDVICTNAQDGKAWNKDTSMDTVKKMMASNDVRVTRRLLEQSGALADATIYKASVAAKAKDGAYIGMKTKSSVFADVTKYGGMTKIKNAYSIIVQYTGKKDEKIKEIVPLPIYLINRNTTDVDLIDYVKSVIPQAKDISIKYRKLCINQLVKINGFYYYLGGKTSNSICIDNGIQVLFSPEFEVYIKLIDKFYIMQKSNLNIDIKNVSTFNPQNNQQVFITVEDNIKLYDYFIDKLNSNIYQKMKGNKVNDLISIGRDRFIELPINIQCVLLLEILNMLTNMKTTYDIKLLGFSTSRTKIALKISNLNEFKIINESITGLYSNEVTIV

SEQ ID NO: 21247 - protein, 1332 aa, unidentified
  REGION 1..1332: note = Cas Enzyme sequence
MQKNYTIGLDIGTNSVGWAVMKDDYTLIRKRMKVLGNTDIKKIKKNFWGVRLFDEGETAKETRLKRGTRRRYQRRRNRLIYLQDIFQQPMLAIDENFFHRLDDSFFVPDDKSYDRHPIFGSLEEEVAYHNTYPTIYHLRKHLADNPEKADLRLVYTALAHIVKYRGHFLIEGELNTENTSISETFEQFLDTYNEIFKAELTGEVDKVEDILKSKESRTQKYEQIIKLFPSENKTGMFGQFIKFIVGNKAKFKTIFDLEEDQDFQLPDENYEENLNELLAMTDDVFLDAFMAAKNVYDAVEMSAIISTDTGNSKAVLSNQMINFYDEHKVDLAQLKQFFKTHLPDKYYECFNDPSKNGYAGYIDGKTNQEEFDRYIKKVIKTVKSDEKDYFLDKIDREVFLRKQRSFYNSVIPHQIHLQEMQAILDRQSQYYSFLAENRDKIESLVTFRIPYYVGPLTASDQSEFAWMERQSDEPIRPWNFDEIVNKERSAEKFIERMTNMDTYLLEEKVLPKRSLLYQTFEVYNELTKVRYTNEQGKTEKLNRQQKTEIIETLFKQKNRVREKDIANYLEQYGYVDGTDIKGIEDKFNASLSTYNDLAKIDGAKAYLDDPEYADMWEDIIKILTVFEDKAMRKKQLQTYSDTLSPDILKKLERKHYTGWGRFSKKLINGLRDEGSNKTILDYLKSDEGSSGPTNRNFMQLIRDNTLSFKKKIEDAQTIEDTTHIYDTVADLPGSPAIKKGIRQALKIVEEIIDIIGYEPENIVVEMARESQTTKKGKDLSKERLEKLTEAIKEFDGPTDIKVKDLKNENLRNDRLYLYYLQNGRDMYTNEPLDINNLSKYDIDHIIPQSFTTDNSIDNKVLVSRTKNQGNKSDGVPSINIVHKMKPFWRQLHKAGLISERKLKNLTKAEHGGLTEADKAHFLNRQLVETRQITKHVANLLDSQYNTAEEQRINIVLLKSSMTSRFRREFEMYKVREINDYHHAHDAYLNAVVAITIMKVYPNLKQQFVYGQYKKTSMFKEEKATARKYFYSNITKFFKKEKVVNEETGEILWDTEKHISIIKRVLSWKQMNIVKKVEKQKGQLWKETIHPKGDSDTLIPIKKGMDPQKYGGTNNISESYAVAIKQIVGKKKKIKSELISIPIVDQKAYEQHPTAYLEEAGYNNPTVLHELFKYQLFELEDGSRRMIASAKEFQKGNQMVLPLELVELLYHANRYDKVKFPDSIEYVHDNLAKFDDLLEYVIDFSNKYINADKNVQKIQKIYKEHGTEDVELTVESFVNLMTFTAMGAPATFKFYGESITRSRYTSITEFRGSTLIFQSITGLYEMRYKLEDN

SEQ ID NO: 21248 - protein, 1380 aa, unidentified
  REGION 1..1380: note = Cas Enzyme sequence
MKQILKKVQGYNIGLDIGTNSVGWVVTDENANLLQFRKKNMWGARLFEKGDTAQGRRLSRSTRRRYDRRRQRIHYLQEMLATMVLPIDESFFIRLNEAFLWKEDKSVQSDYILFADKQFTDRDFYKQFKTIYHLRKFLLDTKEKADPRFIYLALHHMIKYRGNFLYQGQSFDVVENVQESFRVLLEEMYEQLGKEWEYGEHFDDIQRILENTTIGKKSKQEQIAAILTEQYGNKKLANEVTRACLGYSFDLTVVMENENLLDESGKKIKISFSDSKYEEQELELQNRLEEKFAVIEALKRIYNWLVLKDTLRGKKYISEAMVNKYEAHHEDLVKLKRLFRTYLSTEEYSCFFRKEKQKDKYISNYVNYRKGAERCSKEKLYKAIHELFDTVAKDDVVYQEIVEKMDQGEFLTKQNEVSNAYIPYQCNEVEMKRILKQQGEFYPELKENADKILQLLLFRIPYYVGPLVDEKQSKFAWMKRRTGMEQVKIYPWNFEQVVDIDQTAEAFITRMTNYCTYLPEEKVLPKQSLLYSEYELLQELNKIKINGKFSLETRNKIIEQLFKKQKKVTEKQLKKWLVREQYCTTKVTEKMVKLDENVYYITGFQKENEFASSLTSYIDFTKILGEITERNRKMIEEIIYWLTVFEEKSIVKRKIQKKYGNEINDKQLAQILKLNYSGWGRFSEKFLNGIKGFDRQGQKKTIMELLREDSRLLNIMQIINNEEMGFCKIIEANQKKLYGNENLLDVVQELHGSPAIKRGIWQSLKIVEEIISIMGGVPQNIFIEFAREDDDRVRTNSRVKQIERLYKKFKEEVNDFNEHAANELKEKRYQNRIDEEKVFLYFMQNGKSLYSGVTLDIDRLNEYEVDHIIPRTLVKDDSLENKALVLKGENQQKGEGLIPHEWQNRQKEVWKKLLSCGLMGKKKYANLCKESFGNEKEQKHFIARQIVETRQIIKQVANILAQYYQGVNVAAVKASLGSELRENYIIEKKDDNGFFMENKSYTMLKSRKINDFHHAQDAYLACAVGLYIKAAFPKYEKEIDYEGYRKYYQKKNQQKDGVRNEKRQFFSYVMSRFSEQIVDKETGEILWDGTQKLAYIKKIFGYRDCLITKKLEENTGEFYKQTINAKPEKGKENNTKLLPIKKGLSVEKYGGYQGGEAAYSCLVRYQQGRKTKVSMEKISVIIAKKIAEKEVSLDRYLKEKLGVEEIVILRKKVMKNQLIEDGDGNRFYLTAATEVVNAKQFILDGKHQHLLRTIAIMEKGEYYGYRLDELEKSMDELYAYYRMKIQQQYPAYESIVKKIVESHVYESLHVEEKIKAVQEKGKFLIQLLRLTEANAECIDLKTISDGRLADRIGRKNHYTIKEGIKFIDQSITGLYERYMT

SEQ ID NO: 21249 - protein, 1380 aa, unidentified
  REGION 1..1380: note = Cas Enzyme sequence
MKQILKKVQGYNIGLDIGTNSVGWVVTDENANLLQFRKKNMWGARLFEKGDTAQGRRLSRSTRRRYDRRRQRIHYLQEMLATMVLPIDESFFIRLNEAFLWKEDKSVQRDYILFADKQFTDRDFYKQFKTIYHLRKFLLDTKEKADPRFIYLALHHMIKYRGNFLYQGQSFDVVENVQESFRVLLEEMYEQLGKEWEYGEHFDDIQRILENTTIGKKSKQEQIAAILTEQYGNKKLANEVTRACLGYSFDLTVVMENENLLDESGKKIKISFSDSKYEEQELELQNRLEEKFAVIEALKRIYNWLVLKDTLRGKKYISEAMVNKYEAHHEDLVKLKRLFRTYLSTEEYSCFFRKEKQKDKYISNYVNYRKGAERCSKEKLYKAIHELFDTVAKDDVVYQEIVEKMDQGEFLTKQNEVSNAYIPYQCNEVEMKRILKQQGEFYPELKENADKILQLLLFRIPYYVGPLVDEKQSKFAWMKRRTGMEQVKIYPWNFEQVVDIDQTAEAFITRMTNYCTYLPEEKVLPKQSLLYSEYELLQELNKIKINGKFSLETRNKIIEQLFKKQKKVTEKQLKKWLVREQYCTTKVTEKMVKLDENAYYITGFQKENEFASSLTSYIDFTKILGEITERNRKMIEEIIYWLTVFEEKSIVKRKIQKKYGNEINDKQLAQILKLNYSGWGRFSEKFLNGIKGFDRQGQKKTIMELLREDSRLLNIMQIINNEEMGFCKIIEANQKKLYGNENLLDVVQELHGSPAIKRGIWQSLKIVEEIISIMGGVPQNIFIEFAREDDDRVRTNSRVKQIERLYKKFKEEVNDFNEHAANELKEKRYQNRIDEEKVFLYFMQNGKSLYSGVTLDIDRLNEYEVDHIIPRTLVKDDSLENKALVLKGENQRKGEGLIPHEWQNRQKEVWKKLLSCGLMGKKKYANLCKESFGNEKEQKHFIARQIVETRQIIKQVANILAQYYQGVNVAAVKASLGSELRENYTIEKKDDNGFFMENKSYTMLKSRKINDFHHAQDAYLACAVGLYIKAAFPKYEKEIDYEGYRKYYQKKNQQKDGVRNEKRQFFSYVMSRFSEQIVDKETGEILWDGTQKLAYIKKIFGYRDCLITKKLEENTGEFYKQTINAKPEKGKENNTKLLPIKKGLSVEKYGGYQGGEAAYSCLVRYQQGRKTKLSLEKISVIIAKKIAEKEVSLDRYLKEKLGVEEIVILRKKVMKNQLIEDSDGNRFYLTAATEVVNAKQFILDGKHQHLLRTIAIMEKGEYYGYRLDELENSMDELYAYYRMKIQQQYPAYESIVKKIVESHVYESLHVEEKIKAVQEKGKFLIQLLRLTEANAECIDLKTISDGRLADRIGRKNHYTIKEGIKFIDQSITGLYERYMT

SEQ ID NO: 21250 - protein, 1331 aa, unidentified
  REGION 1..1331: note = Cas Enzyme sequence
MGGKRMKKDYTIGLDIGTNSVGYSVITDDYKLIAKKMKVFGNTDKKTIKKNFWGVRLFDSGETAQETRMKRTSRRRTSRRKNRLCYIQELFKPEIDKFDSNFFYRLNESFLTEEDAKFDKHPIFGTLEEEVSFHQNFPTIYHLRKYLADTDEQADLRFVYLAIAHIVKYRGNFLIEGELNTENHSVKELSKNFIQIYNQALNNLENFQEVDKSVDFSNELVAQLNKTERMENVLKLFPNEKGTGTLAQFIRLIVGNQANFKKVFQLEEDHKIQFSEDDYEENLENLLAIIGDEYSDVFVIAQKLYQAVLLDGILTVGEEKTKARLSAAMIKRYEDHAEDLKALKLFVREKMPDRYKEVFNDVDKDGYAGYIDGKTKEEQFYKYLKNLLSNVDGSEYFLQKIDQENFLRKQRTYDNGVIPHQIHAEELNAIIKRQEKYYPFLKENHKKIEQIFKVRIPYYVGPLAKNKEQSRFSWNIRNTDDAVRPWNLDEVINKDASAIAFIERMTIKDIYLGENVLPRHSLMYEKFTIFNELTKVTYSDDRGMYQKFSASEKIDIFNKLFKQDRKVTRKKLENYLVNELAISSPSVKGIEEQFNANFGTYLDLKKFDELAPYLDNEEFQDVLEEIVKILTVFEDRMMIQNQLAQLPLELSPKTIKSLSRKKYTGWGRLSAKLINGIKDKQTGKTILDFLIEDETDSILINRNFMQLINDDILTYKKIIEDNQPFQEKMSVEDIVMNLSGSPAIKKGILQSLKIVDELVKIMGYTPKNIVVEMARENQTTGRGKLNSKPRLKGIENGLKAFSDSVLKENPTDNRQLQNDRLYLYYLQNGKDMYTGKPLDIDHLSDYDIDHIIPQSFITDNSIDNRVLTTSKANRGKSDNVPSEEVVSKMEYSWRKLLKEKLISERKFANLTKRKLTDNDKAGFISRQLVETRQITKNVANILDSRFNTDSSNREVQVITLKSSLVSEFRKTFHLYKVREINDLHHAHDAYLNAVVAISLLKVYPQLKPEFVYGEYGKNSIHEKNKATVKKQIYSNIMRFFSKEDVLCNEDGEILWNKKQAIAQITKTLGKHQVNVVKKVEVQKGGFYDQNILKKGKYKKIYNIKRNLSGEKYGGYVKPTNSLSIILKERKKKKILGITILDKQKYDENPKQFLDEKGFKNAELISKLRKYTLYETKDGTMRMVSSEKEAVKANQLILSSELTTMVYHIKEYKNKESSISKVFIENNLDLLKKLSTELIEFAVKYIKKPLVIEEIKQMVDHCSDKTKLELAESLFNMLFFIHSGSSTEFVFMGKKISRDRLRYQSISDVFNSEIIHQSITGLYETRIRLAED

SEQ ID NO: 21251 - protein, 1336 aa, unidentified
  REGION 1..1336: note = Cas Enzyme sequence
MTKDYTIGLDIGTNSVGWAVLTDDYQLMKRKMSVHGNTEKKKIKKNFWGARLFDEGQTAEFRRTKRTNRRRLARRKYRLSKLQDLFAEELCKQDDCFFVRLEESFLVPEEKQYKPASIFPTLEEEKEYYQKYPTIYHLRQKLVDSTEKEDLRLVYLALAHLLKYRGHFLFEGDLDTENTSIEESFRVFLEQYGKQSDQPLIVHQPVLTILTDKLSKTKKVEEILKYYPTEKINSFFAQCLKLIVGNQANFKRIFDLEAEVKLQFSKETYEEDLESLLEKIGDEYLDIFLQAKKVHDAILLSEIISSTVKHTQAKLSSGMVERYERHKADLAKFKQFVKENVPQKATFFFKDTTKNGYAGYIKGKTTQEEFYKFVKKELSGVGGSEPFLEKIDQETFLLKQRTYTNGVIPHQVHLIELKAIIDQQKKHYPFLEEAGPKIIALFKFRIPYYVGPLAKEQEASSFAWIERKTAEKINPWNFSEVVDIEKSAMRFIQRMTKQDTYLPTEKVLPKNSLLYQKYMIFNELTKVSYKDERGVKQYFSGDEKQQIFKQLFQKERGKITVKKLQNFLYTHYHIENAQIFGIEKAFNASYSTYHDFMKLAKTNQKAMQEWLEQPEMEPIFEDIVKILTIFEDRQMIKHQLSKYQEVFGEKLLKEFARKHYTGWGRFSAKLIHGIRDRKTNKTILDYLINDDDVPANRNRNLMQLINDEHLSFKEEIAKATVFSKHKSLVDVIQDLPGSPAIKKGIWQSLKIVEELIAIIGYKPKNIVIEMARENQKTHRTKPRLKALENGLKQIGSTLLKEQPTDNKALQKERLYLYYLQNGRDMYTGEPLEIENLHQYEVDHIIPRSFIVDNSIDNKVLVARKQNQKKRDDVPKKQIVNEQRIFWNQLKEAKLISPKKYAYLTKIELTPEDKARFIQRQLVETRQITKHVANILHQSFNQEEEGTDCDGVQIITLKATLTSQFRQTFGLYKVREINPHHHAHDAYLNGFIANVLLKRYPKLAPEFVYGKYVKYSLARENKATAKKEFYSNILNFLESDEPFCDENGEIYWEKSHHLPRIKKVLSSHQVNVVKKVEQQKGGFYKETVNSKEKPDKLIERKNNWDVTKYGGFGSPVIAYAIAFVYAKGKTQKKTKAIEGITIMEQAAFEKDPTTFLKDKGFPQVTEFIKLPKYTLFEFDNGRRRFLASHKESQKGNPFILSDQLVTLLYHAQHYDKITYQESFDYVNTHLSDFSAILTEVLAFAEKYTLADKNIERIQELYEENKYGEISMIAQSFLQLLQFNAIGAPADFKFFGVTIPRKRYTSLTEIWDATIIYQSVTGLYETRIRMGDLWAGEQ

SEQ ID NO: 21252 - protein, 1370 aa, unidentified
  REGION 1..1370: note = Cas Enzyme sequence
MTKKNYSIGLDIGTNSVGWAVITDDYKVPAKKMKVLGNTDKKYIKKNLLGALLFDSGETAEATRLKRTARRRYTRRKNRLRYLQEIFAEEMTKVDESFFYRLDESFLTTDEKDFERHPIFGNKAEEDAYHQKFPTIYHLRNYLADSSEKADLRLVYLALAHMIKYRGHFLIEGKLNAENTDVQKLFTDFVGVYDRTFDDSHLSEITVDVASTLTEKISKSRRLENLIKYYPTEKKNTLFGNLIALALGLQPNFKMNFKLSEDAKLQFSKDTYEEDLEELLGKIGDDYADLFTSAKNLYDAILLSGILTVDDNSTKAPLSASMIKRYVEHHEDLEKLKEFIKANKSELYHDIFKDKNKNGYAGYIENGVKQDEFYKYLKNTLSKIDGSDYFLDKIEREDFLRKQRTFDNGSIPHQIHLQEMHAILRRQGDYYPFLKEKQDRIEKILTFRIPYYVGPLVRKDSRFAWAEYRSDEKITPWNFDKVIDKEKSAEKFITRMTLNDLYLPEEKVLPKHSHVYETYAVYNELTKIKYVNEQGKESFFDSNMKQEIFDHVFKENRKVTKEKLLNYLNKEFPEYRIKDLIGLDKENKSFNASLGTYHDLKKILDKAFLDDKVNEEVIEDIIKTLTLFEDKDMIHERLQKYSDIFTANQLKKLERRHYTGWGRLSYKLINGIRNKENNKTILDYLIDDGSANRNFMQLINDDTLPFKQIIQKSQVVGDVDDIEAVVHDLPGSPAIKKGILQSVKIVDELVKVMGDNPDNIVIEMARENQTTNRGRSQSQQRLKKLQSSLKELGSNILNEEKPSYIEDKVENSHLQNDQLFLYYIQNGKDMYTGDELDIDHLSDYDIDHIIPQAFIKDDSIDNRVLTSSAKNRGKSDDVPSLDIVRARKAEWVRLYKSGLISKRKFDNLTKAERGGLTEADKAGFIKRQLVETRQITKHVAQILDARFNTEHDENDKVIRDVKVITLKSNLVSQFRKDFEFYKVREINDYHHAHDAYLNAVVGTALLKKYPKLASEFVYGEYKKYDIRKFITNSSDKATAKYFFYSNLMNFFKTKVKYADGTVFERPIIETNADGEIAWNKQIDFEKVRKVLSYPQVNIVKKVETQTGGFSKESILPKGDSDKLIPRKTKKVYWDTKKYGGFDSPTVAYSVFVVADVEKGKAKKLKTVKELVGISIMERSFFEENPVEFLENKGYHNIREDKLIKLPKYSLFEFEGGRRRLLASASELQKGNEMVLPGYLVELLYHAHRADNFNSTEYLNYVSEHKKEFEKVLSCVEDFANLYVDVEKNLSKIRAVADSMDNFSIEEISNSFINLLTLTALGAPADFNFLGEKIPRKRYTSTKECLTATLIHQSITGLYETRIDLSKLGEE

SEQ ID NO: 21253 - protein, 1130 aa, unidentified
  REGION 1..1130: note = Cas Enzyme sequence
MTNGKILGLDIGIASVGVGIIEAKTGKVVHANSRLFSAANAENNTERRGFRGSRRLNRRKKHRVKRVRDLFEKHEIVTDFRNLNLSPYELRVKGLTEQLTNEELFAALRTISKRRGISYLDDAEDDSTGSTDYAKSIDENRRLLKNKTPGQIQLERLEKYGQLRGNFTVYDENGEAHRLINVFSTSDYEKEARKILETQADYNKKITAEFIDDYVEILTQKRKYYHGPGNEKSRTDYGRFRTDGTTLENIFGILIGKCNFYPDEYRASKASYTAQEYNFLNDLNNLKVPTETGKLPTEQKESLVEFAKNTATLGPSKLLKEIAKILDCKVDEIKGYREDDKGKPDLHTFEPYRKLKFNLESINIDDLSREVIDKLADILTLNTEREGIEDAIKRNLPNQFTEEQISEIIKVRKSQSTAFNKGWHSFSAKLMNELIPELYATSDEQMTILTRLEKFKVNKKSSKNTKTIDEKEVTDEIYNPVVAKSVRQTIKIINAAVKKYGDFDKIVIEMPRDKNADDEKKFIDKRNKENKKEKDDALKRAAYLYNSSDKLPDEVFHGNKQLETKIRLWYQQGERCLYSGKPIPIHDLVHNSNNFEIDHILPLSLSFDDSLANKVLVYDWANQEKGQKTPYQVIDSMDAAWSFREMKDYVLKQKGLGKKKRDYLLTTENIDKIEVKKKFIERNLIDTRYASRVVLNSLQSALRELCKDTKVSVIRGQFTSQLRRKWKIDKSRETYHHHAVDALIIAASSQLKLWEKQDNLMFIDYGNNQVVDKETGEILSVSDDEYKELVFQPPYQGFVNTISSKGFEDEILFSYQVDSKYNRKVSDATIYSTRKAKIGKDKKEETYVLGKIKDIYSQNGFDTFIKKYNKDKTQFLMYQKDPLTWENVIEVILRDYPTTKKSEDGKNDVKCNPFEEYRRENGLICKYSKKGKGTPIKSLKYYDKKLGNCIDITPEESRNKVILQSINPWMADVYFNPETLKYELMGLKYSYLSFEKGTGKYHISQEKYDAIKEKEGIGKKSEFKFTLYRNDLILIKDTASGEQEIYRFLSRTMPNVNHYAELKPYDKEKFDGGQELMEVFGKVANGGQCLKSLNKSNISIYKVRTDVLGNKYFVKKEGDKPKLNFKNNKK

SEQ ID NO: 21254 - protein, 1255 aa, unidentified
  REGION 1..1255: note = Cas Enzyme sequence
  REGION 1..4: note = misc_feature - Xaa can be any naturally occurring amino acid
XXXXHTIFGTLQEEKEYHKQFPTIYHLRKQLADSSQKADIRLIYLALAHIIKYRGHFLFEGDLKSENKDVQHLFNDFVEMFDKTVEGSYLSENLPNVADVLVEKVSKSRRLENILHYFPNEKKNGLFGNFLALALGLQPNLKTNFELAEDAKIQFSKETYEEDLEEILGKIGDDYADLFIATKSLYDGILLAGILSTTDSTTKAPLSSSMVNRYKEHQKDLALLKEFIRQNLSDSYKEVFNDKLKDGYAGYIEGKTTQENFYRFIKKAIEKIEGSDYFIDKIDREDFLRKQRTFDNGSIPHQIHLQEMHAIIRRQAEFYPFLAKNQDKIEKILTFRIPYYVGPLARGKSEFAWLNRKSDEKIRPWNFDEMVDKETSAENFITRMTNYDQYLPDQKVLPKHSLLYEKFAVYNELTKVKYVTEQGKSFFFDANMKQEIFDGTFKVYRKVTKEKLMDFLGKEFDEFRIVDLLGLDKDNKSFNASLGTYHDLKKIVSKDLLDNPENEDILENVVLTLTLFEDREMIRKRLEKYKDVLTEVQRKKLERRHYTGWGRLSAKLINGIRDKVTRKTILDYLIDDGTSNRNFMQLINDDTLSFIDEIRLAQGSGEAEDYRAEVQNLAGSPAIKKGILQSLKIVDELIEVMGYDPEHIVVEMARENQFTNQGLRNSQQRYKKIENAIKNLDSNLNSKILKEYPTNNQALQNDRLFLYYLQNGKDMYTDEELDIDQLSNYDIDHIIPQAFIKDDSLDNKVLTKSAKNRGKSDDVPSLEIVHKKKNFWKQLLDSQLISQRKFDNLTKAERGGLTNEDKARFIQRQLVETRQITKHVARILDTRFNTKLDEAGNRIRNPKVNIITLKSSLVSQFRKDYQLYKVREINNYHHAHDAYLNAVVATALLKKYPQLAPEFVYGDYPKYNSYKSRKTATEKVLFYSNIMNFFKRVLVYAKTGEVRIRPVIEVNKETGEIVWDKKSDFRTIRKVLSYPQVNVVKKVEMQTGGFSKESTLPHGDSDKLIPRKTEKFYLDTKKYGGFDSPTIAYSVLLIADIEKGKAKKLKRVKELIGITIMERMAFERNPIEFLGHKGYKNILEKNIIKLPKYSLFELENGRRRLLASAKELQKGNEMILPPHLVTLLYHSSNIHKITEPIHLNYVNKNKHEFKELLRHISDFSTRYILAQDRLSKIEELYDKNDGDDISDLTSSFVNLLTFTAIGAPAKFKFLGSDIDRKRYTSIAEILEATLIHQSVTGLYETRIDLSKLGGD

SEQ ID NO: 21255 - protein, 1283 aa, unidentified
  REGION 1..1283: note = Cas Enzyme sequence
VYLAIHHIIKYRGNFLYQKDFNIDDSSDISEKLTQLSEYLKENFGFDGDELDPKQQKIVAIIKQTDKSRSTRRSEIEALFEFSKTNKVIFSEIIKMILGLNADVKKIFADLEDKLGIEFSGKYEDKRDDIAIVLGDDRMEFINLLEAIYNWGVLQSVLKGEGSVSQAMINKYDAYAADLKFIKDLFREKLYRVDYKTFFKSKKDNKGETLYYTKYTTSGYDYKKFIKDFETYFIKATDGFGYSYDNFKKDTSGNKSPEKIVEAINRFARQFSSEYAQKFIERLNNGEAFSKQRMSDNGAIPYQLHKNELIKIIENQGKYYPELLEKIDNGDGKQEYKIVRLLEHRIPYYVGPLQTKNQNNSNFAWMKSRADGNITPFNFYQKVDKIASAEAFIDNLTNNCTYLPDKPVLPRHSLLFSEFVVRNELKNLKIEGKRIPIELENEIFNELFLQNKKVTRKMLIDLLKCENFVPLVNNSNPEIEGMAQSSCFTATMQSYVDLTKKVGLSVELEINSPSYLMAENLIKWITVFEDKGILREKIEKEYGDKLTPEQIFNICKLNYGGWARLSRELLTTIKDNTDNSIIDLMREGQDNFMQIISKPPIKKKLQEKLEKYVNDHSELDVIDDIPASPSLKRGIRQAKKLVDEIIELRGGQKPVKIYIEMARGGEEGKRKDNRKRQLEKLHNSIEINNSYCGADELKRIKKELEEWEEIDKEKRYLYFLQLGKCAYSGKPINLDTISQECEVEHILPQSMIKDDSLDNKVLVYRKFNQDKSGDYPLDPEIRQSQTGLWRYWLDNKLISDVKFARLIKTKEKFEADKLSGGFIKRQLVETRQISKHVAALFNKIYGSESDVDVVEPVKAGIASEFRDKFDLPKSRTINDFHHAKDAYLNAVLGQYLISKFPNRSRSALYSRYMSFKKDLTKNASARKQRNDRELSFILSGIGRKEDMNCKTGEIIDGEARVATIRRTMMFNDCSVTRMTEIKTNGELYNATVYKHQNGAKAKIPRKDNLPVEKYGGHTSDKAAYMAAVEQIDADNKKKRLIIKVPIRIVLLAHNNDALLSELMKQELGVKELRIIKSPIPKYQVIKTKDGSMLMLTSQADAGNVKQLRLPYDVENKYTKLQKLISGFDDFNTPEFAQNMYYKLPEYVNRAGKSGDYYYELKNNALENIITFLNSFYRILFDKISSHVPFYGKKMIDKIDAFYEVFANYDVSKQDILKQKVIFLEEMLKLVQANAKYSEFEKLDISKGYFKSGTGYITMKTFYLDDIEFYDYSITGLKVKKTKL

SEQ ID NO: 21256 - protein, 1338 aa, unidentified
  REGION 1..1338: note = Cas Enzyme sequence
MKKPYSIGLDIGTNSVGWAVTRDDHDLIRRRMKINGDYDKGSMKKNFWGVRLFDEGITAEDRRVNRTTRRRLRRRKNRVHYLQSFFLDEMKKVDENFFHRLTESFIVPVDKDHDRHPVFGTMEEDIAYHNQFPTIYHLRKYLADTDEQADLRLVYLALAHIIKFRGHFLIEGELSTEHASNDAVGETFKAFLHQYNQAFHLQPDDTYINPIPEDVSVEAELTAKVSKSRKAESVLHKVETEKSNGTFHQFLKLIVGNQGNFKKSFSLDEDRKLDMGKEEYEEDVESLLAEIGEDYRELFLAAKDVHDAIELSGILDGAEPHTKAPLSSSMIARYDEHKQDLQVLKTLIKAELPDRYFDIFRNKAKDGYAGYIEGKTTEESFYKFMKKELSKVDGAEALLKKIDEERFLRKQRTYDNGVIPHQIHLHELKIIIEKQGQFYPFLLDNKEKIESLLTFRIPYYVGPLAKGQSEFAWIEREGGEAVRPWNIKNEVNLVGSAEKFIEKMTNSDTYLPDEKVLPKHSLLLQKFNVLNELTKVQYVDDQGQRRNFSSEEKQDIYTLFKKHRTVSLKIFEDFLKNDYQLDHPKVQGIEKKFNASLKTYHDLLKLGISRDTLDNETNADRFEDLVKILTVFEDREMIRKQLEAFSDLFDQTTLKKLERRHYTGWGRLSAKLINGIKDERTQKTILDYLIEDDGPKKNINRNFMQLINADDLSFKKTIEEARLNLESNDLKDAVDQIPGSPAIKKGILQSLKIVDEIVEIMGYEPEAIVIEMARENQTTSQGQRNAKERLNNVEGALKELKSDLLKRHPVAQDMLKNDRLYLYYLQNGRDMYTNQELDINKLSSYDIDHIIPRSFTTDNSIDNRVLVSSKSNRGKSDNVPNKDVVQKMKSYWTSLYRSKLISKRKFDNLTKAERGGLTDDDKAGFIKRQLVETRQITKHVASILHQRYNNPELDEPAVKIVTLKSSLTSQFRQAFGLYKVREINDYHHAHDAYLNAVVARILMSVYPQLIPDFVYGEYRKTSAFKENKATAKKQFYTNLIERFSKEDKLPDENGEIAWDKARDLAKINQVLSYRQMNVVKKVEVQTGNFSKATVQPKGNSNKLIPRKNDWDTKKYGGFDSPNVAYSVIFTYEKGKQKKLIKDIIGITIMDQQLFEADQVAFLENKGYSNPHVAFKLPKYTLFELENKRRRLLASANEAQKGNQMVLSHHLVTLLYHCRRYIDSSFKNADHEAYVENHKEQFKSLLDEVLNFSHQYTLAKANDKKITEVFDKSFEQASAQELATAFINLMDYNKMGAPSAFTFFETKIDRKRYTSVKELLDATIIFQSVTGLYETRKEV

SEQ ID NO: 21257 - protein, 1432 aa, unidentified
  REGION 1..1432: note = Cas Enzyme sequence
MKKDYTIGLDIGTNSVGWAVIDDAFNVLDVNKKVKVIKNGKTRGKKRPTKMWGVRLFEEGDVAADTRLKRGTRRRLKRRHERLRYLQIIFATEMAKVDPNFFYRLTESFLWLDDRKVEQTKYSLFRTEKEEKAYYEQFPTIYHLRRHVMKHEVDDLRLIYLAMHHILKFRGNFLYQDKDDFNADNIDIKAGLKALFEVFNDVENNLGFEFDMALLDDAQDILKNKQWSKSKKAFELKETFSHSDNSDKNKQKQVVELFKMIVGNKGTFVNLFAKDDYKEIEQKDIKLSDATATEKFDKAIAENGFTDVEQDILVKINAVYEATILANILTKPTISESMIEKYDNHAEDLKIFKKFVKDNFDDKKFVEMFKANIDGNYASYVKGFDKGNKRDYATQEKFYTFVRKFLESKKAELSENDIYQDILNKIELETFLPKQRMFKNGAIPFQIHAKELRTIIKQQQTKFPFLAEIVTVGDEENRHQEYKIETLMKFRIPYYVGPLTPANEGEIGKKKSDKSRFSWMQSTGEKITPWNFDQVVDKDASAVEFIQRMTNFDTYLPEEKVLPQHSLLYQEYTVYNELMISGYYDEQNKRQYFDGATRQKIVRDLFQKQKSVTQKDMQNWLYNNQFTSSEHAKLFGIDTAVKSSKFNTKLATYIDLTKIVSADLIDNNLDFFDKLVEFQTVFEDNKVLKRQITKHNAKNNNLLNDEQIKKLAKKHYTGWGRLSRKLLDGIQDNGKSIMDYLRTANYNQNFMSLIEDDSKIFKSEIEKAQHHDFDDFSYESLVSPIAGSPAIKRGIWQSLQIVKEISDMMTYPPSRIVVEMARDNQTSRRSKPRLQQLKEKRADFVQELVKLDETQNFDSERVFLYYLQNGKDMYTGEALSLTELNLYEVDHIIPQTYIKDDSIDNKVLVKRTSNQVKGGDVPSSDVVSDMKHYWQTLLDANMISRRKFANLTKEKFSEKDKQGFISRQLVETRQITKNVAQILNHYFDGETTEILTPKASLSSQFRKGLVYLNKEELSENDLQTYLANGGEIVDGKYVAVKLHDGFYKVREINDYHHAHDAYLNAVVANYLYHTFSEEKRKVLVYGQHISRDERKALGKYATTRKGNFRQFLTPMIEEKWLNLETGEIVWERDQSLETINKVLECKQINIVKKTEEQKGEFSKQERLKKGKASVAFKEGWSVEKYGGLSSETSAFAVPISYEKGKTKKKRVHELISVTIREKSAFEKDSQAFVESKLNPVRITETGEIIKKNNAENIKILSQPLKKYQLFEFEDGRKRLLASPKEAQKGNQIAYSREFTEFLYHANRYDEMKHKESFDFVNAHQEKFGEILNFILGKAEKYNLSNKKINDKLKDIIENIDDYAVVDLSQAIAGFVNVLSAGTTNLGSTLKDIKGPVGDSARVRYTSTADTDIFNATLIHQSITGLYETRIKL

SEQ ID NO: 21258 - protein, 1356 aa, unidentified
  REGION 1..1356: note = Cas Enzyme sequence
MIKLFCKLLNLGGCFMNKPYSIGLDIGTNSVGWAVITDDYKVPSKKMKVEGNTDKKYIKKNLLGALLFEGGETAKETRMKRGQRRRYTRRRNRLLYLQEIFKSEIDKVDPNFFMRLEESFLWPDDKQGSKHPIFGTLKEELEYHETFPTIYHLRKELADSDTKADIRLVYLALAHIIKYRGHFLFEKVDPKNANLKGNFSKFVDIYNEVFDDDKDSSVEVESILVAKSTKSKKIEDIIKLYPGLKKGDFFAKFISLAVGTSVSFQKEFELENECKLQIPRESFEEDLEGLQGQIPDEYFEVLYSAKALYDSILLSSMLSDISGTEAPLSSSMVRRFTEHKEDLERLKRFFKSHPTYDYNSFFNDNTKPYYAGYIDGKTSQVEFYKAVKKFFEKDNDAHWIIDKIDQEDFLRKQRTFDNGAIPHQIHLAELKAIIEKQKKYYPFLEKEAERIEIILTFRIPYYVGPLSNGHSKFGWIVRRGNEAIKPWNLEEQIDKGATAEQFITRMTNRCTYLPSENVLPKHSLLYEKFMIFNELTKIRYVLENNKHFAVDNEMKIKIFEMLFKKTRKVTEKQLLAFFDKEYPDFHITKVMGLDRKKPQFNSSYATYHDLKKIVSQEYLDNPENAEEIEDIIQTLTLFEDCEIIREKLSEYKDHFTKEQLKKLERRHYTGWGQLSKKLICGIRDKQTHKTIMEFLEDDGYTNRNLMQLLTADELSFAKEIKDASSIDTTQSLRELVQEIPGSPAIKKGIHQSLKIVEEIRRVMGYDPENIVIEMAREAQTTAEGERRSRERMRSLEKALAEFEGKVNVSLPKENKLLTNKRLYLYYLQNGKDIYTSADLDINLLSTYDIDHIIPQSFIKDDSLDNIALTTREDNRGKLDNVPSSEVVRKMKGYWQQLLKAGLMSDRKYNNLTKAERGGLTEDDKKVFIRRQLVETRQITKHVARILDERFNHEKNESGEPIRKVRVITLKSKLVSDFRKKFELYKVREINDFHHAHDAYLNAIVGTLLLKKYPKLESEFVYGAFKKLTTRQTYEKATRRFLFYSNILNFLNGPLEERVTEDGEMIWDNDKDLPIVRNILNIPQVNIVKKIERVEKGPLYKETIHPREVKDDSKLISIKRDLPTKKYGGYKEPLEAYSLLVAFEEMVKGTKKISRKVVKIPIKDIVLVEKDVIGYLNGKGINNTIGIFKIYKNSLFEFENGRRRLLSSATELQKGNTFYLSKEFIPLLYNCSKYVDEGEYKYDKYISEHKTLFEPLFERIMSFVDSYIQKPKVSDRLRKVFNTRFSESNNLEIAKSFVNLLTITNLGASSTFVFFGEEITRNNYRYNSSKEHANGILVLQALTGLYETRIDLSKFGE

SEQ ID NO: 21259 - protein, 1350 aa, unidentified
  REGION 1..1350: note = Cas Enzyme sequence
MNKPYSIGLDIGTNSVGWAVITDNYKVPSKKIKVEGNTDKKYIKKNLLGALLFEGGETAKETRTKRGQRRRYTRRRNRLLYLQEMFKSEMDKVDPNFFMRLEESFLWPEDKQGSKHPIFGTVNEEVEYHKAFPTIYHLRKELADSDAKADIRLVYLALAHIIKYRGHFLFEKVDPKNANLKGNFSKFVEVYNEVFDDDKDCSVEVESILGVKSTKSKKIEDILKLYPGLKKADLFAKFISLAVGISVSFQKEFELENECKLQIPKESFEEDLDGLQGQIPDEFFEVLFAAKALYDSILLSSILTDISGTNAPLSSSMIRRFKEHKEDLEQLKRFFKSHSNYDYNSFFNDNTKPYYAGYIDGKTSQVEFYKAVKKLFEKDHDANWIIDKIDREDFLRKQRTFDNGAIPHQIHLAELKAIIEKQKKYYPFLEKEADRIESILTFRIPYYVGPLSNGHSKFGWVVRKGNEAIKPWNLEEQIDKGETAERFINRMTNRCTYLPSENVLPKHSLLYEKFMVFNELTKIRYVLENNKHFAVDTEMKMKIFEMLFKKNRKVTEKQLLAFFDKEYPDFHITKVMGLDRKKPEFNSSYATYHDLKKIVSQEYLDNPENADAIEDIIHTLTLFEDREIIREKLSVYKDYFTREQLKKLERRHYTGWGKLSKKLICGIRDKQTHKTIMEFLEDDGFTNRNLMQLVTADELSFAKEIKDASSIDTTLSLRELVQEIPGSPAIKKGIHQSLKIVEEIRRVMGYDPENIVIEMAREAQTTAEGERRSRERMRILEKALGEFEGKVNVSLPKENKLLSNNRLYLYYLQNGKDIYSGADLDINLLSTYDIDHIIPQSFIKDDSLDNIVLTTSEDNRGKLDNVPSPEVVRKMKGYWQQLLKAKLISDRKYNNLTKAERGGLTEEDKKTFIRRQLVETRQITKHVARILDERFNHEKNESGEPIRKVRVITLKSKLVSDFRKKFELYKVREINDFHHAHDAYLNAVVGTLLLKKYPKLESEFVYGAFKKVTTRQIYEKATRRYLFYSNILNFLNGPLEDRVTEDGELIWDNNKDLPNIKKWLYVPQVNVVKKTEVQTVGQNGGLFDNNIVPRTKIKNPEKYVEIKKNKGLDVTKYGGYSGETIAYSVFVVGKRKAKNGKIKAVKELVGITVRNQKQYEKNKLEYLLNLGFEEINLSLLFEFPKYTLFQMEDGRKRMLASSTELQKANMFYFEEKFVKLLYHAKNISDDNSKVHEEYLSEHRNEFLSLFKIIIEFSKKYIVKDKVEQKLVNAVEKDFESASINQLSESFVNLLEYVNRGPASQFDFLGVVINRENLRYQTVTECLNAIVCFESITGLYETRIDLSKFGE

SEQ ID NO: 21260 - protein, 1382 aa, unidentified
  REGION 1..1382: note = Cas Enzyme sequence
MNKPYSIGLDIGTNSVGWAVITDNYKVPSKRMKVEGNSDKDYIKRNLLGTLEFDAGNTAKYTRQQRGLGRRTERRTNRVAYLRDIFDDEVRRIDPNFFARLDESFKVPEDKVFSKYSLFGNKKEDMAFHSKYKTIYHLRKKLSDSDEKEDIRLIYLALVHIIKYRGHFLFEQIDPKNVNLKENFSIFVSGYNDAFDDNYDGTVDVDSILTEKVSRSKKVERVLELYPGVKKNSLFAKFINLVVGNKVNFQKEFGLDNECKLQISEDTFNEDLDALQGLISDEYFEVFYAAKAVYDSMLLSTIVKDISDTNALLSASMIRRYEEHHEDLKKLKLFFKNNPKLNYNEFFNDESKDYYAGYINGKTKEADFYSNTKTLLENVEGAEWILEKIEREDFLRKQRTYDNGAIPHQFHLEELKAIIEKQKKYYPFLEENSKRIESILTFRIPYFVGPLSNGNSRFGWVVRNGNEKIRPWNWENQVDKVATAEQFIIRMTNRCTYFPDEKVLPKHSLLYEKFMVFNELTKIRYVLENNAHYAVSAEMKKDIFEKLFKKYRTVTEKQLLAFFDKEYPDFHIVKVLGLDKKNKNFNSSYGTYHDLKKIMPRDYLDDPKNEQEIEEIISILTLFQDREIIRERLSNYRDSFSKEVLRKLERRHYKGWGRLSKKLLCGIRDRQTQKNIMEFLEDDGYTNRNLMQLINDKNLSFANQIALENSVDIDSSLEALVKEIPGSPAIRKGIYQSIKIVEEICRVMGYDPESIVIEMAKGPETTAKGEARSSKRLDKLGEAFKDFKGDQKVELPTDNKMLANNRVYLYYLQNGKDMYTGEDLDIGNLSNYDIDHIIPQSFMKDDSIDNIVLTSSKNNRGKSDNVPSDEVVQRMRGFWKQLLNAGLISERKFYNLTKGKLTEKDKAGFIRRQLVETRQITKHVARILDARFNVRRDDNDKVIRDVNIVLLKSNLVTQFREAFGLYKIREINGFHHAHDAYLNAVVSKAILRKYPKLSSEFVYGDYQVYDVFDLIAKTKDTQKYGKATAKYFFYSNLLNFFKSEIKLADGQIIKRPEVEICNETGEIVWNKKTDLETVRKVLSLPQVNVVKKTEIQTHGITKGKQKGLFNATLSPKPAPNSKENLIPAKRNLDPRKYGGYAGISNSYAILVHAVVEKGKRKTLTDVIEFQGISIMEKEEFEKDEIAFLLNKGYKEIKSILKLPKYSLFELKNGSRRMLASILSTNNKRGEIHKGNQLWLPEKYIKLLYHAKNIKNKENTKHREYVEKHVNELKELVYFVLDFNSRFVDAKKNGELILNELQNWDENDVDKLVESIIAPGKESKKGIFELTAAGSASDFDFLDKKIPRYRDYYPSALLDAVLIRQSITGLYETRIDLSKLGEE

SEQ ID NO: 21261 - protein, 1350 aa, unidentified
  REGION 1..1350: note = Cas Enzyme sequence
MNKPYSIGLDIGTNSVGWAVITDNYKVPSKKIKVEGNTDKKYIKKNLLGALLFEGGETAKETRTKRGQRRRYTRRRNRLLYLQEMFKSEMDKVDPNFFMRLEESFLWPEDKQGSKHPIFGTVKEELEYHEAFPTIYHLRKELADSDAKADIRLVYLALAHIIKYRGHFLFEKVDPKNANLKGNFSKFVEVYNEVFDDDKDCSVEVESILGVKSTKSKKIEDILKLYPGLKKADLFAKFISLAVGISVSFQKEFELENECKLQIPKESFEEDLDGLQGQIPDEFFEVLFAAKALYDSILLSSILTDISGTNAPLSSSMIRRFKEHKEDLEQLKRFFKSHSNYDYNSFFNDNTKPYYAGYIDGKTSQVEFYKAVKKLFEKDHDANWIIDKIDREDFLRKQRTFDNGAIPHQIHLAELKAIIEKQKKYYPFLEKEADRIESILTFRIPYYVGPLSNGHSKFGWVVRKGNEAIKPWNLEEQIDKGETAERFINRMTNRCTYLPSENVLPKHSLLYEKFMVFNELTKIRYVLENNKHFAVDTEMKMKIFEMLFKKNRKVTEKQLLAFFDKEYPDFHITKVMGLDRKKPEFNSSYATYHDLKKIVSQEYLDNPENADAIEDIIHTLTLFEDREIIREKLSVYKDYFTREQLKKLERRHYTGWGKLSKKLICGIRDKQTHKTIMEFLEDDGFTNRNLMQLVTADELSFVKEIKDASSIDTTLSLRELVQEIPGSPAIKKGIHQSLKIVEEIRRVMGYDPENIVIEMAREAQTTAEGERRSRERMRILEKALGEFEGKVNVSLPKENKLLSNNRLYLYYLQNGKDIYSGADLDINLLSTYDIDHIIPQSFIKDDSLDNIVLTTSEDNRGKLDNVPSPEVVRKMKGYWQQLLKAKLISDRKYNNLTKAERGGLTEEDKKTFIRRQLVETRQITKHVARILDERFNHEKNESGEPIRKVRVITLKSKLVSDFRKKFELYKVREINDFHHAHDAYLNAVVGTLLLKKYPKLESEFVYGAFKKVTTRQIYEKATRRYLFYSNILNFLNGPLEDRVTEDGELIWDNNKDLPNIKKWLYVPQVNVVKKTEVQTVGQNGGLFDNNIVPRTKIKNPEKYVEIKKNKGLDVTKYGGYSGETIAYSVFVVGKRKAKNGKIKAVKELVGITVRNQKQYEKNKLEYLLNLGFEEINLSLLFEFPKYTLFQMEDGRKRMLASSTELQKANMFYFEEKFVKLLYHAKNISDDNSKVHEEYLSEHRNEFLSLFKIIIEFSKKYIVKDKVEQKLVNAVEKDFESASINQLSESFVNLLEYVNRGPASQFDFLGVVINRENLRYQTVTECLNAIVCFESITGLYETRIDLSKFGE

SEQ ID NO: 21262 - protein, 1382 aa, unidentified
  REGION 1..1382: note = Cas Enzyme sequence
MNKPYSIGLDIGTNSVGWAVITDNYKVPSKKMKVEGNSDKDYIKRNLLGTLEFDAGNTAKYTRQQRGLGRRTERRNNRVAYLRDIFHDEVRRIDPNFFARLDESFKVPEDKVFSKYSLFGNKKEDMAFHSKYKTIFHLRKKLSDSDEKEDIRLIYLALVHIIKYRGHFLFEQIDPKNVNLKENSSIFVSGYNDAFDDNYDGTVDVDSILTEKVSRSKKVERVLELYPGVKKNSLFAKFINLVVGNKVNFQKEFGLDNECKLQISEETFNEDLDALQGLIPDEYFEVFYAAKAVYDSMLLSTIVKDISDTNALLSASMIRRYEEHHEDLKKLKLFFKNNPKLNYNEFFNDESKDYYAGYINGKTKEADFYSNTKTLLENVEGAEWILEKIEREDFLRKQRTYDNGAIPHQFHLEELKAIIEKQKKYYPFLEENSKRIESILTFRIPYFVGPLSNGNSRFGWVVRNGNEKIRPWNWENQIDKVATAEQFIIRMTNRCTYFPDEKVLPKHSLLYEKFMVFNELTKIRYVLENNAHYAVSAEMKKNIFEKLFKKYRTVTEKQLLAFFDKEYPDFHIVKVLGLDKKNKNFNSSYGTYHDLKKIMPRDYLDDPKNEQEIEEIISILTLFQDREIIRERLSNYGDRLSKEVLRKLERRHYKGWGRLSKKLLCGIRDKQTQKNIMEFLEDDGYTNRNLMQLINDKNLSFANQIALENSVDIDSSLEALVKEIPGSPAIRKSIYQSIKIVEEICRVMGYDPESIVIEMAKGPETTAKGEARSSKRLDKLGEAFKDFKGNQKVELPTDNKMLANNRVYLYYLQNGKDMYTGEDLDIGNLSNYDIDHIIPQSFMKDDSIDNIVLTSSKNNRGKSDNVPSDEIVQRMRGLWKQLLNAGLISERKFYNLTKGKLTEKDKAGFIRRQLVETRQITKHVARILDARFNVRRDDNDKVIRDVNIVLLKSNLVTQFREAFGLYKIREINGFHHAHDAYLNAVVSKAILRKYPKLSSEFVYGDYQVYDVFDLIAKSKDTQKYGKATAKYFFYSNLLNFFKSEIKLADGQIIKRPEVEICNETGEIVWDKKTDMETVRKVLSLPQVNVVKKTEIQTHGITKGKQKGLFNATLSPKPAPNSKENLIPAKRNLDPRKYGGYAGISNSYAILVHAVIEKGKRKTLTDVIEFQGISIMEKEEFEKDEIAFLLNKGYKEIKSILKLPKYSLFELKNGSRRMLASILSTNNKRGEIHKGNQLWLPEKYIKLLYHAKNIKNKENTKHREYVEGHVNELKELVYFVLEFNSRFVDAKKNGELILNELQNWDENDVDKLVESIIAPGKESKKGIFELTAAGSASDFDFLDKKIPRYRDYSPSALLDAVLMRQSITGLYETRIDLSKLGEE

SEQ ID NO: 21263 - protein, 1341 aa, unidentified
  REGION 1..1341: note = Cas Enzyme sequence
MNKPYSIGLDIGTNSVGWAVITDDYKVPSKKMKVEGNTDKKYIKKNLLGALLFEGGETAKETRMKRGQRRRYTRRRNRLLYLQEIFKSEIDKVDPNFFMRLEESFLWPDDKQGSKHPIFGTLKEELEYHETFPTIYHLRKELADSDTKADIRLVYLALAHIIKYRGHFLFEKVDPKNANLKGNFSKFVDIYNEVFDDDKDSSVEVESILVAKSTKSKKIEDIIKLYPGLKKGDFFAKFISLAVGTSVSFQKEFELENECKLQIPRESFEEDLEGLQGQIPDEYFEVLYSAKALYDSILLSSMLSDISGTEAPLSSSMVRRFTEHKEDLERLKRFFKSHPTYDYNSFFNDNTKPYYAGYIDGKTSQVEFYKAVKKFFEKDNDAHWIIDKIDQEDFLRKQRTFDNGAIPHQIHLAELKAIIEKQKKYYPFLEKEAERIEIILTFRIPYYVGPLSNGHSKFGWIVRRGNEAIKPWNLEEQIDKGATAEQFITRMTNRCTYLPSENVLPKHSLLYEKFMIFNELTKIRYVLENNKHFAVDNEMKIKIFEMLFKKTRKVTEKQLLAFFDKEYPDFHITKVMGLDRKKPQFNSSYATYHDLKKIVSQEYLDNPENAEEIEDIIQTLTLFEDREIIREKLSEYKDHFTKEQLKKLERRHYTGWGQLSKKLICGIRDKQTHKTIMEFLEDDGYTNRNLMQLVTADELSFAKEIKDASSIDTTQSLRELVQEIPGSPAIKKGIHQSLKIVEEIRRVMGYDPENIVIEMAREAQTTAEGERRSRERMRSLEKALAEFEGKVNVSLPKENKLLTNKRLYLYYLQNGKDIYTGADLDINLLSTYDIDHIIPQSFIKDDSLDNIALTTREDNRGKLDNVPSSEVVRKMKGYWQQLLKAGLMSDRKYNNLTKAERGGLTEDDKKVFIRRQLVETRQITKHVARILDERFNHEKNESGEPIRKVRVITLKSKLVSDFRKKFELYKVREINDFHHAHDAYLNAIVGTLLLKKYPKLESEFVYGAFKKLTTRQTYEKATRRFLFYSNILNFLNGPLEERVTEDGEMIWDNDKDLPIVRNILNIPQVNIVKKIERVEKGPLYKETIHPREVKDDSKLISIKRDLPTKKYGGYKEPLEAYSLLVAFEEMVKGTKKISRKVVKIPIKDIVLVEKDVIGYLNGKGINNTIGIFKIYKNSLFEFENGRRRLLSSATELQKGNTFYLSKEFIPLLYNCSKYVDEGEYKYDKYISEHKTLFEALFERIMSFVDSYIQKPKVSDRLRKVFNTRFSESNNLEIAKSFVNLLTITNLGASSTFVFFGEEITRNNYRYNSSKEHANGILVLQALTGLYETRIDLSKFGE

SEQ ID NO: 21264 - protein, 1350 aa, unidentified
  REGION 1..1350: note = Cas Enzyme sequence
MNKPYSIGLDIGTNSVGWAVITDNYKVPSKKIKVEGNTDKKYIKKNLLGALLFEGGETAKETRTKRGQRRRYTRRRNRLLYLQEMFKSEMDKVDPNFFMRLEESFLWPEDKQGSKHPIFGTVKEELEYHEAFPTIYHLRKELADSDAKADIRLVYLALAHIIKYRGHFLFEKVDPKNANLKGNFSKFVEVYNEVFDDDKDCSVEVESILGVKSTKSKKIEDILKLYPGLKKADLFAKFISLAVGISVSFQKEFELENECKLQIPKESFEEDLDGLQGQIPDEFFEVLFAAKALYDSILLSSILTDISGTNAPLSSSMIRRFKEHKEDLEQLKRFFKSHSNYDYNSFFNDNTKPYYAGYIDGKTSQVEFYKAVKKLFEKDHDANWIIDKIDREDFLRKQRTFDNGAIPHQIHLAELKAIIEKQKKYYPFLEKEADRIESILTFRIPYYVGPLSNGHSKFGWVVRKGNEAIKPWNLEEQIDKGETAERFINRMTNRCTYLPSENVLPKHSLLYEKFMVFNELTKIRYVLENNKHFAVDTEMKMKIFEMLFKKNRKVTEKQLLAFFDKEYPDFHITKVMGLDRKKPEFNSSYATYHDLKKIVSQEYLDNPENADAIEDIIHTLTLFEDREIIREKLSVYKDYFTREQLKKLERRHYTGWGKLSKKLICGIRDKQTHKTIMEFLEDDGFTNRNLMQLVTADELSFAKEIKDASSIDTTLSLRELVQEIPGSPAIKKGIHQSLKIVEEIRRVMGYDPENIVIEMAREAQTTAEGERRSRERMRILEKALGEFEGKVNVSLPKENKLLSNNRLYLYYLQNGKDIYSGADLDINLLSTYDIDHIIPQSFIKDDSLDNIVLTTSEDNRGKLDNVPSPEVVRKMKGYWQQLLKAKLISDRKYNNLTKAERGGLTEEDKKTFIRRQLVETRQITKHVARILDERFNHEKNESGEPIRKVRVITLKSKLVSDFRKKFELYKVREINDFHHAHDAYLNAVVGTLLLKKYPKLESEFVYGAFKKVTTRQIYEKATRRYLFYSNILNFLNGPLEDRVTEDGELIWDNNKDLPNIKKWLYVPQVNVVKKTEVQTVGQNGGLFDNNIVPRTKIKNPEKYVEIKKNKGLDVTKYGGYSGETIAYSVFVVGKRKAKNGKIKAVKELVGITVRNQKQYEKNKLEYLLNLGFEEINLSLLFEFPKYTLFQMEDGRKRMLASSTELQKANMFYFEEKFVKLLYHAKNISDDNSKVHEEYLSEHRNEFLSLFKIIIEFSKKYIVKDKVEQKLVNAVEKDFESASINQLSESFVNLLEYVNRGPASQFDFLGVVINRENLRYQTVTECLNAIVCFESITGLYETRIDLSKFGE

SEQ ID NO: 21265 - protein, 1365 aa, unidentified
  REGION 1..1365: note = Cas Enzyme sequence
MIKLFCKLLKLGGYFMNKPYSIGLDIGTNSVGWAVITDNYKVPSKKIKVEGNTDKKYIKKNLLGALLFEGGETAKETRTKRGQRRRYTRRRNRLLYLQEMFKSEMDKVDPNFFMRLEESFLWPEDKQGSKHPIFGTVKEELEYHEAFPTIYHLRKELADSDSKADIRLVYLVLAHIIKYRGHFLFEKVDPKNANLKGNYSKFVEVYNEVFDDDKDSSVEVESILGAKSTKSKKIEDILKLYPGLKKADFFAKFISLAVGTSVSFQKEFELENECKLQIPKESFEEDLEGLQGQIPDEFFEVLYAAKALYDSILLSSILTDISGTNAPLSSSMIRRFKEHKEDLEQLKRFFKSHSTYDYNSFFNDNTKPYYAGYIDGKTSQVEFYKAVKKLFEKDNDANWIIDKIDREDFLRKQRTFDNGAIPHQIHLAELKAIIEKQKKYYPFLEKEADRIESILTFRIPYYVGPLSNGHSKFGWVVRKGNEAIKPWNLEEQIDKGETAERFITRMTNRCTYLPSENVLPKHSLLYEKFMVFNELTKIRYVLENNKHFAVDTEMKMKIFEMLFKKNRKVTEKQLLAFFDKEYPDFHITKVMGLDRKKPEFNSSYATYHDLKKIVSQEYLDNPENADAIEDIIHTLTLFEDREIIREKLSVYKNHFTREQLKKLERRHYTGWGKLSKKLICGIRDKQTHKTIMEFLEDDGYTNRNLMQLVTADELSFAKEIKDASSIDTTLSLRELVQEIPGSPAIKKGIHQSLKIVEEIRRIMGYDPENIMIEMAREAQTTAEGERRSRERMKNLEKALGEFEGKVNVSLPKENKLLSNNRLYLYYLQNGKDIYSGADLDINLLSTYDIDHIIPQSFIKDDSLDNIVLTTSEDNRGKLDNVPSLEVVRKMKGYWQQLLKAKLISDRKYNNLTKAERGGLKEEDKKAFIRRQLVETRQITKHVARILDERFNNEKNENGEPIRKVRVITLKSKLVSDFRKKFELYKVREINDFHHAHDAYLNAVVGSLLLKKYPKLESEFVYGAFKKFETRKIYEKATRRYLFYSNILNFLNGSLEDRVTEDGELIWDNNKDLPNIKKWLYVPQVNVVKKTEVQSVGQNGGLFDNNIVPRTKIKNPEKYVEIKKNKGLDVTKYGGYSGETIAYSVFVVGKRKAKNGKIKAVKELVGITVRNQKQYEKNKLKYLLSMGFEEINPSLLFEFPKYTLFQMEDGRKRMLASSTELQKANMIYFEEKFVKLLYHAKNISDENSKIHENYLSEHRNEFLSLFKIIIEFSKKYIVKDKVEQKLVNVVEKEFEAASIHQLSESFVNLLEYVNRGPASQFNFLGVVINRENLRYQTVTECLNAIVCFESITGLYETRIDLSKYGE

SEQ ID NO: 21266 - protein, 1392 aa, unidentified
  REGION 1..1392: note = Cas Enzyme sequence
MSNKFKRKNGIQKWKHDTTNEKWRRAMNKGQQKPYTIGLDIGTNSVGWAVMYDDYKLASRKMKVDGLEKRVHKNFWGVRLFDEGEVAADRRSKRTTRRRIARRCNRIKYLQEIFAEDMLQVDDSFFHRLENSFLSYKHGDKDFKYPLFPTESEEKAYHESYPTIYHLRKALVCGEREFVDNKGNAKPLFGMDEVGRADLRLVYLALHHIVKYRGHFLIEGKLDSENSSVEEALQRFIEEYNRILSLQAEDSVDSKRIELESIENLNKLTNILKEKVSRSSKVDAIFSELGIAKNKNDLLHNFLKLIVGNQGNFKKYVSSREDAKIQMSKDTYEDDLEHVLSQMGDGYEDIFVAAKGTYNAVELEGILQGKYFISEAMIERYRNHEKDLAELKSFVYKNMPSKYNEVFRDRTKNGYAGYIDGSTTQEDFYKYIKNITKDIAEEFDDRIDKEIFMRKQRTFDNGVIPHQCHWQEAAEILHNQSKYYSFLQENLAKIEKIFTVRIPYYVGPLATKADPLKFAWLTRQSEEKIRPWNIEDVVDYEKSAVDFIERMTNFCTYLRDEKVLPRHSMLYEKYMVFNELTKVKYMAGGSNNQDFFSTKTKQLIFEGLFKAKRKVTEKDLRQFLENEMCFSGVQISGIEKSFNASFATYHDFLNMGIEKAFLDDEKNEAHLEEIVKILTVFEDRKMLKSQLKKYDELFSREILKKLSKKHYTGWGRLSKKLLIGLRDDKSQKSIMDYLIDDGNNRNLMQLINDDELSFKIKIQKANTVKNESDLHDIVKGLAGSPAIKKGILQSLKIMEELVNIMGYKPDSIVVEMARENQTTQQGRRNSQPREKSLKKALEAFGVNAITCDVNNQALQNDRLYLYYLQNGKDMYTGEPIDINNLSRYDIDHIIPQSFIMDNSIDNRVLVSSKANRGKLDDVPSRDVVTKMYGFWERLNKSGLISERKFNNLTKAARDGLTENDKAGFIKRQLVETRQITKHVAQILHEQYNVEDGKVKIITLKSSLTSQFRKMFEIYKVREINDYHHAHDAYLNAVVASTLLKVYPKLRPQFVYGEYANYNSWDENKATAKKKLYSNIMRFFASEEKSFDKDTGVILWDKQADLSIIKKVLGYRQMNIVKKVEVQKGQFSKESVLSKGDSDKLIPRKTRKIIWETSKYGGFDSPTVAYAVAISYEKGKAKKRTNTIVGITIMEQVAYEKDREAYLVSKGFTNSIIIAKLPKYTLYEFDDGRRRMIASAKEAQKANQMVLDGRFVELLYHAERYNSELQSDSRRYVNEHKSDFTEILQEIAGFVEKYNLAPKKEVIDTLREFDINQFSKTEDLIKLVQACLILTRAGTTNVTGKIDNREICKIIRMTKSQYQFTKKEDMDILSAVLISQSITGLYETRKRLS

SEQ ID NO: 21267 - protein, 1343 aa, unidentified
  REGION 1..1343: note = Cas Enzyme sequence
MRKNYSIGLDIGTNSVGYSVIFDDNYKVPVKNAKILGNTSKKSIRKNLMGSVLLDSGETAMARRMQRTNGRRIERRRNRIRYLQEIFAPFMMEVDENFFARLQDSFLWEEDKPHSKYPFFGNVEQEVAFHDDYKTIYHLRKELADGKEKADLRLVYLALAHIVKFRGHFLIEGNIDIENNDIQQLFDEFLTVYSAYFEDSSVLEKKMEVREILTEKITKSAKKDKIVQTYSIDKKSPINKFLELIVGNKSNFQIIFDLEERSSLQFSKESYEDDLTTLLEQVGDEVADVFLAAKKVYDSVVLANILSIKDKNTKAPLSAAMIERYKNHKKELAELKQFFKATLEREIYKEFFNDPKKDGYAGYIDGSTTQEAFYTKLKKLFEITGTPELFKEKIDQEDFLRKQRTFDNGSIPHQIHQKEFEAIIERQGVFYPFLIENKDKLIKIFEFRIPYYVGPLAKNQQSPFAWATYYTDEPVRPWNFEEIVDTKVAAEEFIHRMTNYDIYLPDQKVLPKHSYLYELFTVYNELTKIQFVDDQNYKSYFNAKAKEDIIDNVFKKERKVTYEKLMNYLKIAYADFRIESILGLNKDTKAFNASLGTYHDLLKLKVDKDFLDNESNLPIIEDIILTLTIFEDRKMIRERLSQYASYFDEKVMKRLERRHYTGWGRLSKKLIDGIRDNGKTILDYLKDDPAGNRNFMQLTRDDYLTFKKQIADAQVVGEADSLVEQVQSLAGSPAIKKGVLQAMKIVDELVKIMGYKPTSIVIEMARENLTTKKGKKQSQPRYTKLSKSLKILSSNILKENNITKEDLLKEKIYLYCLQNGRDMYTDEPLDINCLRDYDVDHIIPRSFLPDDSIDNKVLVSSKLNRGKADNVPSIEVVNRMETYWRVLLNAKLISEAKYKRLTKAKSPEGGLTEKDKEGFIHRQLVETRQITKYVAKLLDERWNSSVDKFGKKIQEVNIVTLKSSLVSNFRKMFDIPKIRELNHYHHAHDAYLNAVVGNLLIKKYPRLAPEFIYGQHLHLSRKSNEEEKATKKVILYSNVLNFLNDEEEQRDFEGNVIWNKNQHIGMIKKVIFNNQVTVVKKTEIQSGGFANETVEKKGDSDKLIPRKNGWDTKKYGGFQGENDAYCVLFKAEDSKKKKGVKKYLLGISIMNRKRFEDNPKIFLEKLGYANIQKDSILILPKYTLFEIEGGKRRRLASDQELQKANELTLSADFTLLLYHASHRDDSENKKHHEYLEQHYLEFGKLFYAILEKSEQWIVKPKAVAKLIQLWEEKIEQASIDEISSSILSLLKFTKAGASEEFQFFGQKIDRQRYQTVTEILNGILIYQSVTGFYETRIDLSIEK

SEQ ID NO: 21268 - protein, 1346 aa, unidentified
  REGION 1..1346: note = Cas Enzyme sequence
VGNMRKNYSIGLDIGTNSVGYSVIFDDNYKVPVKNAKILGNTSKKSIRKNLMGSVLLDSGETAMARRMQRTNGRRIERRRNRIRYLQEIFAPFMMEEDENFFARLQDSFLWEEDKPHSKYPFFGNVEQEVAFHDDYKTIYHLRKELADGKEKADLRLVYLALAHIVKFRGHFLIEGNIDIENNDIQQLFDEFLTVYSAYFEDSSVLEKKMEVREILTEKITKSAKKDKIVQTYSIDKKSPINKFLELIVGNKSNFQIIFDLEERSSLQFSKESYEDDLTTLLEQVGDEVADVFLAAKKVYDSVVLANILSIKDKNTKAPLSAAMIERYKNHKKELAELKQFFKATLEREIYKEFFNDPKKDGYAGYIDGSTTQEAFYTKLKKLFETTGTPELFKEKIDQEDFLRKQRTFDNGSIPHQIHQKEFEAIIERQGVFYPFLLENKDKLIKIFEFRIPYYVGPLAKNQQSPFAWATYYTDEPVRPWNFEEIVDTKVAAEEFIHRMTNYDIYLPDQKVLPKHSYLYELFTVYNELTKIQFVDDQNYKSYFNAKAKEDIIDNVFKKERKVTYEKLMNYLKIAYADFRIESILGLNKDTKAFNASLGTYHDLLKLKVDKDFLDNESNLPIIEDIILTLTIFEDRKMIRERLSQYASYFDEKVMKRLERRHYTGWGRLSKKLIDGIRDNGKTILDYLKDDPAGNRNFMQLTRDDYLTFKKQIADAQVVGEADSLVEQVQSLAGSPAIKKGVLQAMKIVDELVKIMGYKPTSIVIEMARENLTTKKGKKQSQPRYTKLSKSLKILSSNILKENNITKEDLLKEKIYLYCLQNGRDMYTDEPLDINCLRDYDVDHIIPRSFLPDDSIDNKVLVSSKLNRGKADNVPSIEVVNRMETYWRVLLNAKLISEAKYKRLTKAKSPEGGLTEKDKEGFIHRQLVETRQITKYVAKLLDERWNSSVDKFGKKIQEVNIVTLKSSLVSNFRKMFDIPKIRELNHYHHAHDAYLNAVVGNLLIKKYPRLAPEFIYGQHLHLSRKSNEEEKATKKVILYSNVLNFLNDEEEQRDFEGNVIWNKNQHIGMIKKVIFNNQVTVVKKTEIQSGGFANETVEKKGDSDKLIPRKNGWDTKKYGGFQGENDAYCVLFKAEDSKKKKGVKKYLLGISIMNRKRFEDNPKIFLEKLGYANIQKDSILILPKYTLFEIEGGKRRRLASDQELQKANELTLSADFTLLLYHASHRDDSENKKHHEYLEQHYLEFGKLFYAILEKSEQWIVKPKAVAKLIQLWEEKIEQASIDEISSSILSLLKFTKAGASEEFQFFGQKIDRQRYQTVTEILNGILIYQSVTGFYETRIDLSIEK

SEQ ID NO: 21269 - protein, 1345 aa, unidentified
  REGION 1..1345: note = Cas Enzyme sequence
VGNMRKNYSIGLDIGTNSVGYSVIFDDNYKVPVKNAKVLGNTDKKSIRKNLMGSVLFDGGETAMARRMKRTNRRRIERRRNRIRYLQEIFAPFMMQVDENFFARLQDSFLWEEDKPHGKYPFFGNVEQEVAFHDNYKTIYHLRKELADGKEKADLRLVYLALAHIVKFRGHFLIEGNVDVENNDIQQLFDEFLVVYSAYFEDSSVLEKKMEVREILTEKISKSAKKDKIVQTYSLDKKSPLIEFLKLIVGNSGEFKKIFELDEKSSLQFSKESYEDDLTAILEQVGDEVADVYLAAKKVYDSVVLANILSIKNKNTKAPLSAAMIERYENHQEELAELKQFFKATLERETYKEFFNDSKKDGYAGYIDGSTTQEAFYKQLKKLFEVTEAPELFKEKLVREDFLRKQRTFDNGSIPHQIHQKEFEAIIERQAVFYPFLLENKDRLVKIFEFRIPYYVGPLAKNQQSPFAWATYHTDEPVRPWNFEEIVDTKVAAEEFIHRMTNYDIYLPDQKVLPKHSYLYELFAVYNELTKIQFVDDQNYKSYFNAKTKKDIIDNVFKKERKVTYEKLMNYLKVAYADFRIESIVGLSEHTNAFNASLGTYHDLLKLKVDKDFLDNESNLPIIEDIILTLTIFEDRKMIRERLSQYESNFDEKVMKRLERRHYTGWGRLSKKLIDGIRDNGKTILDYLKDDPAGNRNFMQLIRDDYLTFKKQIAEAQVVGEEDSLVEQVQSLAGSPAIKKGILQTMKIVDELIKIMGYKPTSIVIEMARENQTTAQGLKQSRTRFKKLSESLKLLSSKLLEDHNITNKELMKEKLYLYCLQNGRDMYIDEPLDINRLSDYDVDHIIPRSFLPDDSIDNKVLVSSKENRGKSDDVPSIEVVNRMDAYWRVLLNAKLMSESKYNRLTKARHGGLTDKDKEGFIHRQLVETRQIIKHIARILDERWNSNVDESGKKIYEVKIVTLKSSLVSNFRKMFDIPKIRDLNHYHHAHDAYLNAVVGNLLMKKYPRLAPEFIYGQHLHLSRKPNEEEKATKKVILYSNVLNFLKDDREQTDSKGNVIWNKDQHIGMIKKVIFNNQVTVVKKTEVQSGGFTNETVEKKGTSDKLIPRKNGWDTNKYGGVKGENIAYSVLFEYEKTKGKKNVKVKEIIGVSIMNQKRFEENPKEFLEVWGYTNIQKDSIIILPKYTLFELENGKRRRLASHQELQKANELTLSEDFTLLLYHAIHRSDEENKKHREYLEQHQSEFRELFDFIVERSEQWIVKPTAIAKLRKIMDKNYEKASIDELSTAILSLLTFTQAGASAAFQFFGEQIDRQRYSTVTEILTGTLIYQSVTGFYETRIDLDIEK

SEQ ID NO: 21270 - protein, 1345 aa, unidentified
  REGION 1..1345: note = Cas Enzyme sequence
VGNMRKNYSIGLDIGTNSIGYSVIFDDNYKVPVKTAKVLGNTNKKSIRKNLMGSVLFDSGETAMARRMKRTNRRRIERRRNRIRYLQEIFAPFMMQVDENFFARLQDSFLWEEDKPHTKYPFFGNVEQEVAFHDNYKTIYHLRKKLADGKEKADLRLVYLALAHIVKFRGHFLIEGNVDIENNDIQQLFDEFLAFYSAYFEDSSVLEKKMEVREILTEKISKSAKKDKIVQTYSLDKKSPFIEFLKLIVGNSGEFKKIFDLEEKSSLQFSKESYEDDLTALLEQVGDEVADVFLAAKKVYDSVVLANILSIKDKNTKAPLSAAMIERYENHEEELAELKQFFKATLERETYKEFFNDPKKDGYAGYIDGSTTQEAFYKQLKKLFEATEAPELFKEKLEREDFLRKQRTFDNGSIPHQIHQKEFEAIIERQGAFYPFLLENKDKLVKIFEFRIPYYVGPLAKNQRSPFAWATYHTDEPVRPWNFEEIVDTKVAAEEFIHRMTNYDIYLPDQKVLPKHSYLYELFTVYNELTKIKFVDDQGNDSYFNAKAKKDIIDNVFKKERKVTYEKLMNYLRVAYADFRIESIVGLSKDTKAFNASLGTYHDLLKLKVDKDFLDNESNLPIIEDIILTLTIFEDRKMIRERLSQYTSYFDEKVMKRLERRHYTGWGRLSKKFIDGIRDNGKTILDYLKDDPAGNRNFMQLIRDDYLTFKKQIAEAQVVGEKDSLVEQVQSLAGSPAIKKGILQTMKIVDELIKIMGYKPTSIVIEMARENQTTAQGLKQSRTRFKKLSEGLKLLSSKLLEEQNITNKELMKEKLYLYCLQNGRDMYTDEPLDISRLSDYDVDHIIPRSFLPDDSIDNKVLVSSKLNRGKSDDVPSIEVVNRMDTYWGVLLNAKLISESKYNRLTKARHGGLTDKDKEGFIHRQLVETRQITKHIARMLDERWNSSVDDSGKKIYEVKIVTLKSNLVSNFRKMFDIPKIRDLNHYHHAHDAYLNAVVGNLLIKKYPRLAPEFIYGQHLYINRKVKDEEKATKKVVLYSNVLKFLQDEGEQKDSTENVIWNKNQHIGMIKKVIFNNQVTIVKKTEIQSGGFTNETVEKKGTSDKLIPRKNGWDTNKYGGVKGENTAYSVMFEYEKTKGKKHVKVKDIIGISIMNQKQFEENPNVFLEELDYTNIQKDSIIILPKYTLFELENGKRRRLASHQELQKANELTLSADFTLLLFHALHRDDEENKKHREYLDQHRSDFKDLFDVIIEKSEQWIVKPTAVAKLRKIMDKNYEQASIDELSLAILSLLTFTQAGASAAFQFFGEQIDRQRYSTVTEILTGTLIYQSVTGFYETRIDLKLEK

SEQ ID NO: 21271 - protein, 1129 aa, unidentified
  REGION 1..1129: note = Cas Enzyme sequence
MTNGKILGLDIGVASVGVGIIDAKTGNVIHANSRLFSAANAENNAERRGFRGARRLTRRKKHRVKRVRDLFEKYDISTDFRNLNLNPYELRVKGLSEQLTNEELFAALRTIAKRRGISYLDDAEDDSTGSSDYAKSIDENRRLLKSMTPGQIQLERLEKYGQLRGNFTVYDENGEAHRLINVFSTSDYKNEARKILETQSNYNKQITDEFIEDYIEILTQKRKYYHGPGNEKSRTDYGRFRTDGTTLENIFGILIGKCSFYPEEYRASKASYTAQEFNFLNDLNNLKVPTETGKLSTEQKEYLVDFAKNSKTLGASKLLKEIAKLVDGDVKDISGYREDSKGKPDLHTFEPYRKLKFNLTTVDIDNLSRDILDKLADILTLNTEREGIEDAINRNLPEQFTKEQISEIVQIRKSQSSAFNKGWHSFSAKLMNELIPELYATSEEQMTILTRLEKFKATKKSSKNTKTIDEKEITDEIYNPVVAKSVRQTIKIINAAVKKYGDFDKIVIEMPRDKNADDEKKFIDKKNKENKKEKDDSLKRAAYLYNGTDKLPDDVFHGNKQLATKIRLWYQQGERCLYSGKPILIQDLVHNSNNFEIDHILPLSLSFDDSLANKVLVYAWTNQEKGQKTPYQVIDSMDAAWSFREMKDYVLKQKGIGKKKREYLLTTENIDKIEVKKKFIERNLVDTRYASRVVLNSLQTALKELGKDTKVSVVRGQFTSQLRRKWKIDKSRETYHHHAVDALIIAASSQLKLWQKHENLMFENYGENQVVNKETGEILSISDDEYKELVFQPPYQGFVNTISSKAFEDEILFSYQVDSKFNRKVSDATIYSTRKAKLGKDKKEETYVLGKIKDIYSQDGFDTFIKRYKKDKTQFLMYQKDPLTWENVIEVILRDYPTTKKSEDGKNDVKCNPFEEYRRENGLICKYSKKGKGTPIKSLKYYDKKLGNHISITPKESKNDVVLQSLNPWRADLYFNPDTLKYELMGLKYSDLSFEKGTGKYHISQEKYDEIKEKEGIGKNSEFKFTLYRNDLILIKDIKHSCEKLLRFSSKNDTSNHYVELKPVEKGYFDSEEELLPVLGKVAKSGRFIKGLSKPGISIYKVRTDVLGNKFFVKKEGDKPKLDFKNNKK

SEQ ID NO: 21272 - protein, 1392 aa, unidentified
  REGION 1..1392: note = Cas Enzyme sequence
MDNKNYSIGLDIGTNSVGWAVITDDYKVPSKKMKVRGNTDKHFIKKNLIGALLFDEGTTAEDRRLKRTARRRYTRRKNRLRYLQEIFAEEMSKVDSSFFHRLDDSFLIPEDKRGSKYPIFATLAEEKEYHKQFPTIYHLRKHLADSKEKADLRLIYLALAHMIKYRGHFLYEESFDIKNNDIQKIFNELISIYDNTFEGSSLSEQSVQVEAIFTDKISKSAKRERVLKLFPDEKSTGLFSEFLKLIVGNQADFKKHFDLEDKAPLQFSKDTYDEDLENLLGQIGDDFSDLFVAAKKLYDAILLSGILTVTDLSTKAPLSASMIERYENHQEDLAALKQFIKNNLPEKYDEVFSDQFKDGYAGYIDGKATQEAFYKYIKNLLSKFEGADYFLEKIEREDFLRKQRTFDNGSIPHQIHLQEMNAILRRQGEHYPFLKENKEKIEKILTFRIPYYVGPLARGNRDFAWLTRNSDQGIRPWNFEEIVDKASSAEDFVNKMTNYDLYLPEEKVLPKHSLLYETFAVYNELTKVKFIAEGLRDYQFLDSVQKKQIVNQLFKEKRRVTEKDIIQYLYTVDGYDGIELKGIEKQFNASLSTYHDLLKIIKDKEFMDDSKNEAILEDIVHTLTIFEDREMIKQRLAQYDSLFDEKVIKALTRRHYTGWGKLSAKLINGIRDKKSGKTILDYLIDDGYSNRNFMQLIHDDGLSFKEMIRKGQVVGKTDDVKQVVQELPGSPAIKKGILQSIKIVDELVKVMGHAPESIVIEMARENQTTAKGKKNSRQRYKRIEDSLKILASGLNSKILKEHPTDNIQLQNDRLFLYYLQNGKDMYTGEALDINKLSSYDIDHIIPQAFIKDDSLDNRVLTSSKENRGKSDNVPSLEVVQKRKAFWQQLLDSKLISERKFNNLTKAERGGLDERDKVGFIKRQLVETRQITKHVAQILDTRYNTEVNEKNQKIRTVKIITLKSNLVSNFRKEFRLYKVREINDYHHAHDAYLNAVVAKAILKKYPKLEPEFVYGDYQKYDLKRYISRSKDPKDIEKATEKYFFYSNLLNFFKEEVHYADGTIVKRENIEYSKDTGEIAWNKEKDFATIKKVLSLPQVNIVKKTEIQSHGLDRGKPKGLFNSNPSPKPSEDSKENLVPIKQGLDPRKYGGYTGISNSYAVLVKAIIEKGAKKQQKTILEFQGISILDKINFENNKENYLLEKGYIKILSTITLPKYSLFEFSDGTRRRLASILSTNNKRGEIHKGNELVIPEKYTTLLYHAKNINKALEPEHLEYVEKHRDEFAKLLDYVLDFNEKYVGALKNGERIRQAFTDWETVDIKELCFSFIGPENSKNAGLFELTSQGSASDFEFLGVKIPRYRDYTPSSLLNATLIHQSITGLYETRIDLSKLGED

SEQ ID NO: 21273 - protein, 1377 aa, unidentified
  REGION 1..1377: note = Cas Enzyme sequence
MDKSYSIGLDIGTNSVGWAVITDDYKVPSKKMKVLGNTDRHFIKKNLIGTLLFDEGTTAEDRRLKRTARRRYTRRKNRLLYLQEIFSEEISKLDSSFFHRLDDSFLVPEDKRGSKYPIFATLEEEKEYHKKFPTIYHLRKHLADSKEKTDLRLIYLALAHMIKYRGHFLYEESFDIKNNDIQKIFNEFISIYDNTCEGSSLSGQNAQVEAIFTDKISKSAKRERVLKLFPDEKSTGLFSEFLKLIVGNQADFKKHFNLEEKAPLQFSKDTYDEDFENLLGQIGDDFADLFLVAKKLYDAILLSGILTVTDPSTKSPLSASMIERYENHQKDLAALKQFIKNNLPEKYKEVFSDQSKDGYAGYIDGKTTQEAFYKYIKNLLSKFEGADYFLDKIEREDFLRKQRTFDNGSIPHQIHLQEMNAILRRQGEHYPFLKENREKIEKILTFRIPYYVGPLARGNRDFAWLTRNSDEAIRPWNFEEIVDKASSAEEFINKMTNYDLYLPEEKVLPKHSLLYETFAVYNELTKVKFIAEGLRDYEFLDRVQKKQVVNQLFKEKRKVTGKDIIHYLHNVDGYDGIELKGIEKQFNASLSTYHDLLKIIKDKEFMDDPKNEEILENIVHTLTIFEDREMIKQRLAQYDTLFDEKVIKALTRRHYTGWGKLSAKLINGICDKQTGDTILDFLIDDDKINRNFMQLINDDGLSFKEIIQKAQVVGKTDDVKQVVQELPGSPAIKKGILQSIKIVDELVKIMGHAPESIVIEMARENQTTARGKKNSQQRYKRIEDALKNLAPGLDSNILKENPTDNIQLQNDRLFLYYLQNGKDMYTGKALDINQLSNYDIDHIIPQAFIKDDSLDNRVLTSSKDNRGKSDNVPSIEVVQKRKAFWQQLLDSKLISERKFNNLTKAERGGLDERDKVGFIKRQLVETRQITKHVAQLLDARFNTEVNEENQKIRTVKIITLKSNLVSNFRKEFGLYKVREINDYHHAHDAYLNAVVAKAILKKYPKLEPEFVYGDYQKYDLKRYISRFKDPKEVEKATEKYFFYSNLLNFFKEEVHYADGTIKKRENIEYSNDTGEIAWNKEKDFATIKKVLSLPQVNIVKKTEEQTVGQNGGLFDNNIVSKKKVVDASKLIPIKSSLSPEKYGGYARPTIAYSVLVIADIEKVKGKAKKLKRIKEIVGITIQDKKKFESNPVTYLEECGYKNINSDLIIKLPKYSLFEFNDGQRRLLASSIELQKGNELILPYHLTALLYHAQRINKISEPIHKQYVEAHQNEFKELLTTIISLSKKYIQKPNVELLLQQAFDQADKDIYQLSESFISLLKLTSFGAPGAFKFLGVEISQSSVRYKPNSQFLDTTLIHQSITGLYETRIDLSKLGED

SEQ ID NO: 21274 - protein, 1363 aa, unidentified
  REGION 1..1363: note = Cas Enzyme sequence
MTKPYSIGLDIGTNSVGWAVITDDYKVPSKKMKVLGNTSKKYIKKNLLGALLFDSGITAEGRRLKRTARRRYTRRRNRILYLQEIFSTEMATLDDAFFQRLDDSFLVPDDKRDSKYPIFGNLVEEKAYHDEFPTIYHLRKYLADSTKKADLRLVYLALAHMIKYRGHFLIEGEFNSKNNDIQKNFQDFLDTYNAIFESDLSLENSKQLEEIVKDKISKSAKKDRILKLFPGEKNSGIFSEFLKLIVGNQADFKKYFNLDEKAPLHFSKESYDEDLETLLGYIGDDYSDVFLKAKKLYDAILLSGILTVTDNGTEAPLSSAMIMRYKEHEEDLALLKAYIKNISLETYNEVFKDDTKNGYAGYIDGKTSQEDFYVHLKKLLAGLEGADYFLEKIDREDFLRKQRTFDNGSIPYQIHLQEMRAILDKQAKFYPFLAKNKERIEKILTFRIPYYVGPLARGNSDFAWSIRKRNEKITPWNFEDVIDKESSAEAFINRMTSFDLYLPEEKVLPKHSLLYETFTVYNELTKVRFIAESMRDYQFLDSKQKKDIVRLYFKNKRKVTDKDIIEYLHAIDGYDGIELKGIEKQFNSSLSTYHDLLNIINDKEFLDDSSNEAIVEEIIHTLTIFEDREMIKQRLSKFENIFDKSVLKKLSRRHYTGWGKLSAKLINGIRDEKSGNTILDYLIDDGVSNRNFMQLIHDDALSFKKKIKKAQIIGDKDNIKQVVQALPGSPAIKKGILQSIKIVDELVKVMGGRPESIVVEMARENQYTNQGKSNSQQRLKRLEESLKDLGSKILKENIPAKLSKIDNNALQNDRLYLYYLQNGKDMYTGEELDIDRLSNYDIDHIIPQAFLKDNSIDNKVLVSSASNRGKSDDVPSLEVVKKRKTLWYQLLKSKLISQRKFDNLTKAERGGLSPEAKAGFIQRQLVETRQITKHVARLLDERFNNKKDEDNKTLRTVKIITLKSSLVSQFRKDFELYKVREINDFHHTHDAYLNAVVASALLKKYPKLEPEFVYGDYPKYNSFRERKSATEKVYFYSNIMNIFKKSIPLADGTVIDRPLIEVNEETGESVWNKESDLATVRRVLSYPQVNVVKKVEVQSGGFSKESVQPHGNSDKLIPRKTKKMIWDTKKYGGFDSPIVAYSVLVMAEREKGKSKKLKPVKELVGITIMEKESFENNTIDFLERRGFRNIQDENIIPLPKFSLFELENGRRRLLASAKELQKGNEFILTNKLVKLLYHAKNIHNTLEPEHLEYVETHRADFGKILDVVSVFSEKYILAETNLKKIREIYHTNMDAEIDELVISFINLLTFTSIGAPATFKFFGHNIERKRYSSVAEILNATLIHQSVTGLYETRIDLGKLGED

SEQ ID NO: 21275 - protein, 1377 aa, unidentified
  REGION 1..1377: note = Cas Enzyme sequence
MNNKPYSIGLDIGTNSVGWSVITDDYKVPSKKMKVLGNTDKRFIKKNLIGALLFDEGTTAEARRLKRTARRRYTRRKNRLRYLQEIFAEEMSKVDSSFFHRLDDSFLIPEDKRGSKYPIFATLVEEKEYHKQFPTIYHLRKQLADSKEKADLRLIYLVLAHMIKYRGHFLYEEAFDIKNNDIQKIFNEFISIYDNTFEGSSLSGQNAQVETIFTDKISKSAKRERVLKLFPDEKSTGLFSEFLKLIVGNQADFKKHFDLEEKAPLQFSKDTYDEDLENLLEQIGDDFADLFVAAKKLYDAILLSGILTVTDPSTKAPLSASMIERYENHQKDLAVLKQFIKTNLPEKYVEVFSDQSKDGYAGYIDGKTTQEAFYKYIKNLLSKFDGADYFLDKIEREVFLRKQRTFDNGSIPHQIHLQEMNTILRRQGEHYPFLKENKEKIEKILTFRIPYYVGPLARGNRDFAWLTRNSDQAIRPWNFEEIVDKASSAEDFINKMTNYDLYLPEEKVLPKHSLLYETFAVYNELTKVKFIAEGMRDYQFLDSGQKKKIINQLFKKKRKVTEDDIIDCLQKIDNYDGIELKGIEKQFNASLSTYHDILKIIRDKEFMDDPKNGDILENVIHTLTIFEDREMIKQRLAQYNSIFDEKVIKALSRKHYTGWGKLSAKLIDGIRDKQTGKTILDYLMDDGKSNRNFMQLIKDDELSFTEIIQKAQVVGDTDNLRQVVQNLPGSPAIKKGILQSIKIVDELVKVMGHAPESIVIEMARENQTTARGKKNSQQRYKRIEDSLKNLASGLDSNILKENPTDNIQLQNDRLFLYYLQNGKDMYTGEALNINQLSSYDIDHIIPQAFIKDDSLDNRVLTSSKDNRGKSDNVPSLEVVEKMKAFWQQLLDSKLISERKYNNLTKAERERGGLNELDKVGFIKRQLVETRQITKHVAQILDARFNKEVTEKNKKNRNVKIITLKSNMVSNFRKEFGLYKVREINDYHHAHDAYLNAVVAKAILKKYPKLEPEFVYGDYQKYDLKRYISRSKDPKEVEKATEKYFFYSNLLNFFKEEVHYADGTIVKRENIEYSKDTGEIAWNKEKDFATIKKVLSLPQVNIVKKTEEQTVGQNGGLFDNNIVSKKKVVDASKLIPIKSGLSPEKYGGYARPTIAYSVLVTYKQNNKIKNTMVGIPVLTKLEFERDPNLYLRNLGINNVSHVIKLVKYTVLEFKHKYGTYRRFIVSNQELKRANQIFVTTKQMKLISQYTTLDKNEHDSLLKNNQQLIQSIWNQFLEFMLATDLVNKKQYDELILTNNQTIEECRNIMNRVITTLSFTNINAGQKKIIFDDTLSLPIKRWQFTDSDKMVKKIIESTLIHQSITGLYETRIDLSKLGED

SEQ ID NO: 21276 - protein, 1160 aa, unidentified
  REGION 1..1160: note = Cas Enzyme sequence
MKKPYSIGLDIGTNSVGWAVITDDYKVPSKKMKVLGNTDKHFIKKNLIGALLFDEGTTAEDRRLKRTSRRRYTRRKNRLRYLQEIFSEEISKLDSSFFHRLDDSFLVPEDKRGSKYPIFATLEEEKEYHKKFPTIYHLRKHLADSKEKTDLRLIYLALAHMIKYRGHFLYEESFDIKNNDIQKIFNEFISIYDNTFEGSSLSGQNAQVEAIFTDKISKSTKRERVLKLFSDEKSTGLFSEFLKLIVGNQADFKKHFDLEEKAPLQFSKDTYDEDLENLLGQIGDGFADLFLVAKKLYDAILLSGILTVTDPSTKAPLSASMIERYENHQEDLAALKQFIKNNLSEKYAEVFSDQSKDGYAGFIDGKTTQEAFYKYIKNLLSKLEGADYFLNKIEREDFLRKQRTFDNGSIPHQIHLQEMNAILRRQGEHYLFLKENREKIEKILAFRIPYYVGPLARGNRDFAWLTRNSDQAIRPWNFEEVVDKASSAEDFINKMTNYDLYLPEEKVLPKHSLLYETFAVYNELTKVKFIAEGLRDYQFLDSGQKKQIVNQLFKDKRKVTEKDIIHYLHNVDGYDGIELKGIEKQFNASLSTYHDLLKIIKDKEFMDNPKNGEILENIIHTLTIFEDREMIKQRLAQYDTLFDEKVIKALTRRHYTGWGKLSAKLINGIRDKQTGKTILEYLIDDGDCNRNFMQLINDDGLSFKEIIQKAQVVGKTDDVKQVVQEIPGSPAIKKGILQSIKIVDELVKVMGHNPESIVIEMARENQTTAKGKKNSQQRYKRIEDALKNLAPELDSNILKENPTDNIQLQNDRLFLYYLQNGKDMYTGKAIDINQLSNYDIDHIIPQAFIKDDSLDNRVLTSSKDNRGKSDNVPSIEVVQKRKAFWQQLLDSKLISERKFNNLTKAKRGGLDERDKVGFIKRQLVETRQITKHVAQLLDTRFNTEVNEENQKIRTVKIITLKSNLVSNFRKEFGLYKVREINDYHHAHDAYLNAVVAKAILKKYPKLEPEFVYGDYQKYDLKRYILKSKASNTIDKATEKYFFYSNLLNFFKEKVRYADGTIKKRENIEYSNDTGEIAWNKEKDFATIKKVLSLPQVNIVKKTEEQTVGQNGGLFDNNIVSKKKVVDASKLIPIKSSLSPEKYGGYAKTYNRLFSPCYSRY

SEQ ID NO: 21277 - protein, 1375 aa, unidentified
  REGION 1..1375: note = Cas Enzyme sequence
MSNKPYSIGLDIGTNSVGWAVITDDYKVPSKKMKVLGNTDKHFIKKNLIGALLFDEGTTAEDRRLKRTARRRYTRRKNRLRYLQEIFSQEISKVDSSFFHRLDDSFLVPEDKRGSKYPIFATLVEEKEYHKKFPTIYHLRKHLADSKEKTDLRLIYLALAHMIKYRGHFLYEESFDIKNNDIQKIFSEFISIYDNTFEGSSLSGQNAQVEAIFTDKISKSAKRERVLKLFPDEKSTGLFSEFLKLIVGNQAEFKKHFDLEEKAPLQFSKDTYDEDLENLLGQIGDDFADLFLVAKKLYDAILLSGILTVTDPSTKAPLSASMIERYENHQKDLASLKQFIQNNIQEKYDEVFSDQSKDGYAGYIDGKTTQEAFYKYIKNLLSKFEGADYFLDKIEREDFLRKQRSFDNGSIPHQIHLQEMNAILRRQGEHYPFLKENKEKIEKILTFRIPYYVGPLARGNGDFAWLTRNSDQAIRPWNFEEIVDQASSAEDFINKMTNYDLYLPEEKVLPKHSLLYETFAVYNELTKVKFIAEGLTRYQFLDKKQKKDIFDTFFKAEDKRKVTEKDIIHYLHTVDGYDGIELKGIEKQFNASLSTYHDLLKIIKDKEFMDDSKNEEILENIVHTLTIFEDREMIKQRLAKYDSLFDEKVIKALTRRHYTGWGKLSAKLINGSRDKKSGKTILDYLIDDGEINRNFMQLIHDDGLSFKEIIQKAQVFGKTNDVKQVVQELPGSPAIKKGILQSIKIVDELVKVMGHAPESIVIEMARENQTTARGKKNSQQRYKRIEDSLKNLASGLDSNILKENPTDNVQLQNDRLFLYYLQNGRDMYTGKPLDINQLSSYDIDHIVPQAFIKDDSLDNRVLTSSKDNRGKSDNVPSIEVVEKMKAFWQQLLDSKLISERKFNNLTKAERERDGLNELDKVGFIKRQLVETRQITKHVAQILDARFNKEVTEKDKKNRNVKIITLKSNLVSNFRKEFGLYKVREINDYHHAHDAYLNAVLAKAILKKYPKLEPEFVYGDYQKYDLKRYISKSRDPKEVEKATQKYFFYSNLLNFFKEEVYYADGTIVRRENIEYSKDTGEIAWNKEKDFATVKKVLSLPQVNIVKKTEVQTGGFSKESILPKGNSDKLIPRKTKDILWDTTKYGGFDSPVIAYSILLIADIEKGKAKKLKTVKTLVGITIMEKAAFEKNPITFLENKGYHNVRKENILCLPKYSLFELESGRRRMLASAKELQKGNEIVLPVYLTTLLYHSKNVYKLDEPEHLEYIQKHRYEFKDLLNLVSEFSQKYVLADANLEKIKNLYADNEQADIEILANSFINLLTFTALGAPAAFKFLGKDVDRKRYTTVSEILNATLIHQSITGLYETRIDLSKLGED

SEQ ID NO: 21278 - protein, 1392 aa, unidentified
  REGION 1..1392: note = Cas Enzyme sequence
MENKNYSIGLDIGTNSVGWAVITDDYKVPSKKMKVRGNTDKHFIKKNLIGALLFDEGTTAEDRRLKRTARRRYTRRKNRLRYLQEIFSEEISKVDNSFFHRLDDSFLVPEDKRGSKYPIFATLAEEKEYHKNFPTIYHLRKQLADSKEKADLRLIYLALAHMMKYRGHFLYEESFDIKNNDIQKIFNEFISIYDNTFEGSSLSEQNVQVEVIFTDKISKSAKRERVLKLFPDEKSTGLFSEFLKLIVGNQAEFKKHFDLEEKAPLQFSKDTYDEDLENLLGQIGDGFADLFLVAKKLYDAILLSGILTVTDPSTKAPLSASMIERYESHQKDLAAFKKFIKNNLPEKYDEVFSDQSKDGYAGYIDGKTTQEAFYKYIKNLLSKFEGVDYLLDKIEREDFLRKQRTFDNGSIPHQIHLQEMNAILRRQGEHYPFLKENREKIEKILTFRIPYYVGPLARGNGDFAWLTRNSDQAIRPWNFEEIVDKASSAEAFINKMTNYDLYLPEEKVLPKHSLLYETFAVYNELTKVKFIAEGLRDYQFLDSGQKKQIVEQLFKEKRKVSEKDIIQFLHNVDGYDGIELKGIEKQFNASLSTYHDLLKIIKDKEFMDDSKNQEILENIVHTLTIFEDREMIKQRLAQYDSLFDEKVIKALIRRHYTGWGKLSAKLINGICDKQTGNTILDYLIDDGYSNRNFMQLINDDGLSFKEIIQKAQVVGKTDDVKQVVQELPGSPAIKKGILQSVKLVDELVKVMGHAPESIVIEMARENQTTAKGKKNSQQRYKRIEDAIKNLAPGLDSTILKEHPTDNIQLQNDRLFLYYLQNGRDMYTGKPLEINQLSNYDIDHIIPQAFIKDDSLDNRVLTSSKENRGKSDNVPSLEVVEKMKAFWQQLLDSKLISYRKFNNLTKAERGGLDERDKVGFIKRQLVETRQITKYVAQILDSRFNTEVTEKDKKNHNVKIITLKSNLVSNFRKEFGLYKVREINDYHHAHDAYLNAVLAKAILKKYPKLEPEFVYGDYQKYDLKRYISRSRDPKEVEKATEKYFFYSNLLNFFKEEVHYADGTIVKRENIEYSKDTGEIAWNKEKDFATIKKVLSLPQVNIVKKTEIQTHGLDRGKPKGLFNSNPSPKPSEDSKENLVPIKQGLDPRKYGGYAGISNSYAVLVKAIIEKGAKKQQKTVLEFQGISILDKINFEKNKENYLLEKGYIKILSTITLPKYSLFEFPDGTRRRLASILSTNNKRGEIHKGNELVLPEKYTTLLYHAKNINKTLEPEHLEYVEKHRNDFAKLLESVLDFNDKYVGALKNGERIRQVFIDWETVDIEKLCFSFIGPRNSKNAGLFELTSQGSASDFEFLGVKIPRYRDYTPSSLLNATLIHQSITGLYETRIDLSKLGED

SEQ ID NO: 21279 - protein, 1365 aa, unidentified
  REGION 1..1365: note = Cas Enzyme sequence
MSNKSYSIGLDIGTNSVGWAVITDDYKVPSKKMKVLGNTDKYFIKKNLIGALLFDEGTTAEDRRLKRTARRRYTRRKNRLRYLQEIFSEEMSKVDSSFFHRLDDSFLVPEDKRGSKYPIFATSAEEKEYHKKFPTIYHLRKQLADSKEKTDLRLIYLALAHMIKYRGHFLYEESFDIKNNDIQKIFSEFISIYDNTFEGSSLSGQNAQVEAIFTDKISKSAKRERILKHFDLEEKAPLQFSKDTYDEDLENLLGQIGDDFADLFLVAKKLYDAILLSGILTVTDPSTKAPLSASMIERYENHQKDLASLKQFIQNNIQEKYDEFFSDQSKDGYAGYIDGKTTQEAFYKYIKNLLSKFEGVDYFLDKIEREDFLRKQRSFDNGSIPHQIHLQEMNAIIRRQGEHYPFLQENKEKIEKILTFRIPYYVGPLARGNGDFAWLTRNSDQAIRPWNFEEIVDQTSSAEDFINKMTNYDLYLPEEKVLPKHSLLYETFAVYNELTKVKFIAEGLRDYQFLDSGQKKQIVNQLFKEKRKVTEKDIIQYLHNVDGYDGIELKGIEKQFNASLSTYHDLLKIIKDKAFMDDPKNEEILENIVHTLTIFEDREMIKQRLAQYDSLFDKKGIKALTRRHYTGWGKLSAKLINGICDKKTGKTILDYLIDDGYSNRNFMQLINDDGFSFKDIIQKAQVVDKTNDVKQVVQELPGSPAIKKGILQSIKLVDELVKVMGHTPESIVIEMARENQTTARGKKNSQQRYKRIEDALKNLAPGLDSNILKEHPTDNIQLQNDRLFLYYLQNGKDMYTGEPLNINQLSSYDIDHIVPQAFIKDDSLDNRVLTSSKDNRGKSDNVPSLEVVQKRKAFWQQLLDSKLISERKFNNLTKAERGGLDERDKVGFIRRQLVETRQISKHVAQILDARFNTEVTEKDKKNRKVKIITLKSNLVSNFRKEFKLYKVREINDYHHAHDAYLNAVVAKAILKKYPKLEPEFVYGDYQKYDLKRYISRSKDPKDVEKATEKYFFYSNLLNFFKEEVHYADGTIVKRENIEYSNDTGEIAWNKEKDFATIKKVLSLPQVNIVKKTEIQTHGLDRGKPRGLFNSNPSPKPSEDSKENLVPIKQGLDPRKYGGYAGISNSYAVLVKAIIEKGAKKQQKTVLEFQGISILDKINFEKNKENYLLEKGYIKILSTITLPKYSLFEFPDGTRRRLASILSTNNKRGEIHKGNELVIPEKYTTLLYHAKNINKTLEPEHLEYVEKHRNDFAKLLESVLDFNDKYVGALKNGERIRQAFIDWETVDIEKLCFSFIGPRNSKNAGLFELTSQGSASDFEFLGVKIPRYRDYTPSSLLNATLIHQSITGLYETRIDLSKLGED

SEQ ID NO: 21280 - protein, 1196 aa, unidentified
  REGION 1..1196: note = Cas Enzyme sequence
IQKIFNEFISIYDNTFEGSSLSGQNAQVETIFTDKISKSAKRERVLKLFPDEKSTGLFSEFLKLIVGNQADFKKHFDLEEKAPLQFSKDTYDEDLENLLEQIGDDFADLFVAAKKLYDAILLSGILTVTDPSTKAPLSASMIERYENHQKDLAVLKQFIKTNLPEKYVEVFSDQSKDGYAGYIDGKTTQEAFYKYIKNLLSKFDGADYFLDKIEREVFLRKQRTFDNGSIPHQIHLQEMNTILRRQGEHYPFLKENKEKIEKILTFRIPYYVGPLARGNRDFAWLTRNSDQAIRPWNFEEIVDKASSAEDFINKMTNYDLYLPEEKVLPKHSLLYETFAVYNELTKVKFIAEGMRDYQFLDSGQKKKIINQLFKKKRKVTEDDIIDCLQKIDNYDGIELKGIEKQFNASLSTYHDILKIIRDKEFMDDPKNGDILENVIHTLTIFEDREMIKQRLAQYNSIFDEKVIKALSRKHYTGWGKLSAKLIDGIRDKQTGKTILDYLMDDGKSNRNFMQLIKDDELSFTEIIQKAQVVGDTDNLRQVVQNLPGSPAIKKGILQSIKIVDELVKVMGHAPESIVIEMARENQTTARGKKNSQQRYKRIEDSLKNLASGLDSNILKENPTDNIQLQNDRLFLYYLQNGKDMYTGEALNINQLSSYDIDHIIPQAFIKDDSLDNRVLTSSKDNRGKSDNVPSLEVVEKMKAFWQQLLDSKLISERKYNNLTKAERERGGLNELDKVGFIKRQLVETRQITKHVAQILDARFNKEVTEKNKKNRNVKIITLKSNMVSNFRKEFGLYKVREINDYHHAHDAYLNAVVAKAILKKYPKLEPEFVYGDYQKYDLKRYISRSKDPKEVEKATEKYFFYSNLLNFFKEEVHYADGTIVKRENIEYSKDTGEIAWNKEKDFATIKKVLSLPQVNIVKKTEEQTVGQNGGLFDNNIVSKKKVVDASKLIPIKSGLSPEKYGGYARPTIAYSVLVTYKQNNKIKNTMVGIPVLTKLEFERDPNLYLRNLGINNVSHVIKLVKYTVLEFKHKYGTYRRFIVSNQELKRANQIFVTTKQMKLISQYTTLDKNEHDSLLKNNQQLIQSIWNQFLEFMLATDLVNKKQYDELILTNNQTIEECRNIMNRVITTLSFTNINAGQKKIIFDDTLSLPIKRWQFTDSDKMVKKIIESTLIHQSITGLYETRIDLSKLGED

SEQ ID NO: 21281 - protein, 1230 aa, unidentified
  REGION 1..1230: note = Cas Enzyme sequence
IKYRGHFLYEESFDIKNNDIQKIFSEFISIYDNTFEGSSLSGQNAQVEAIFTDKISKSAKRERILKLFAYEKPTGLFSEFLKLIVGNQAEFKKHFDLEEKAPLQFSKDTYDEDLENLLGQIGDDFADLFLVAKKLYDAILLSGILTVTDPSTKAPLSASMIERYENHQKDLAALKQFIQNNLQEKYDEVFSDQSKDGYAGYINGKTTQEAFYKYIKNLLSKFEGSDYFLDKIEREDFLRKQRTFDNGSIPHQIHLQEMNAIIRRQGEHYPFLQENKEKIKKILTFRIPYYVGPLARGNGDFAWLTRNSDQAIRPWNFEEIVDKASSAEAFINKMTNYDLYLPEEKVLPKHSLLYETFAVYNELTKVKFIAEGLRDYQFLDSGQKKQIVNQLFKEKRKVTEKDIIQYLHNVDGYDGIELKGIEKQFNASLSTYHDLLKIIKDKAFMDDAENEATLENIIHTLTIFEDREMIKQRLAQYDSLFDEKVIKALIRRHYTGWGKLSAKLINGICDKKTGKTILDYLIDDGYSNRNFMQLINDDGLSFKDIIQKAQVVGKTNDVKQVVQELPGSPAIKKGILQSIKLVDELVKVMGHAPESIVIEIARENQTTVRGKKNSQQRYKRIEDALKNLAPGLDSNILKEHPTDNIQLQNDRLFLYYLQNGKDMYTGEPLDINQLSSYDIDHIVPQAFIKDDSLDNRVLTSSKDNRGKSDNVPSLEVVQKRKAFWQQLLDSKLISERKFNNLTKAERGGLDERDKVGFIRRQLVETRQITKHVAQILDARFNTEVTEKDKKNRKVKIITLKSNLVSNFRKEFSLYKVREINDYHHAHDAYLNAVVAKAILKKYPKLEPEFVYGDYQKYDIKRYISRSKDPKEVEKATEKYFFYSNLLNFFKEEVHYADGTIVKRENIEYSKDTGEIAWNKEKDFATIKKVLSLPQVNIVKKTEIQTHGLDRGKPRGLFNSNPSPKPSEDSKENLVPIKQGLDPRKYGGYAGISNSYAVLVKAIIEKGAKKQQKTVLEFQGISILDKINFEKNKENYLLEKGYIKILSTITLPKYSLFEFPDGTRRRLASILSTNNKRGEIHKGNELVISEKYTTLLYHAKNINKTLEPEHLEYVEKHRNDFAKLLESVLDFNDKYVGALKNGERIRQAFIDWETVDIEKLCFSFIGPRNSKNAGLFELTSQGSASDFEFLGVKIPRYRDYTPSSLLNATLIHQSITGLYETRIDLSKLGED

SEQ ID NO: 21282 - protein, 1385 aa, unidentified
  REGION 1..1385: note = Cas Enzyme sequence
MTKPYSIGLDIGTNSVGWAVITDDYKVPSKKMKVLGNTSKKYIKKNLLGALLFDSGITAEGRRLKRTARRRYTRRRNRILYLQEIFSTEMATLDDAFFQRLDDSFLVPDDKRDSKYPIFGNLVEEKVYHDEFPTIYHLRRHLADSSKKADLRLVYLALAHMIKYRGHFLIEGDFNSKNNDIQKNFQDFLDTYNTIFESDLSLENSKQLEEIVKDKISKSAKKDRILKLFPGEKNSGIFSEFLKLIVGNQADFRKYFNLDEKTSLQFSKESYDEDLETLLGHIGDDYSDVFLKAKKLYDAILLSGILTVTDKGTEAPLSSAMIMRYKEHEEDLALLKAYIRNISLETYNEVFKDNTKNGYAGYIDGKTSQEDFYVYLKKLLAGLEGADYFLEKIDREDFLRKQRTFDNGSIPYQIHLQEMRAILDKQAKFYPFLAKNKERIEKILTFRIPYYVGPLARGNSDFAWSIRKRNEKITPWNFEDVIDKESSAEAFINRMTSFDLYLPEEKVLPKHSLLYETFTVYNELTKVRFIAEGMKDYQFLDSKQKKDIVRLYFKGKRKVTDKDIIEYLHAIDGYDGIELKGIEKQFNSSLSTYHDLLNIINDKEFLDDSSNETFIEEIIHTLTIFEDREMIKQRLSKFDNIFDKSVLKKLSRRHYTGWGKLSAKLINGIRDEKSGNTILDYLIDDGVSNRNFMQLIHDDALSFKKKIKKAQIIGDKDNIKQVVKSLPGSPAIKKGILQSIKIVDELVKVMGREPESIVVEMARENQYTNQGKSNSQQRLKRLEESLKGLGSKILKENVPTRLSKIDNNALQNDRLYLYYLQNGKDMYTGEELDIDRLSNYDIDHIIPQAFLKDNSIDNKVLVSSASNRGKSDDVPSLEVVKKRKTLWYQLLKSKLISQRKFDNLTKAERGGLSPEDKAGFIQRQLVETRQITKHVARLLDEKFNNKKDENNRAVRTVKIITLKSSLVSQFRKDFELYKVREINDSHHAHDAYLNAVVASALLKKYPKLEPEFVYGDYPKYNSFRERKSATEKVYFYSNIMNIFKKSISLADGTVIERPLIEVNVETGESVWNKVADLSTVRKVLSYSQVNVVKKVEEQNHGLDRGKPKGLFNANLSSKPKQNSKENLVGAKEYLDPKKYGGYAGISNSFAILVKGTIEKGAKKKITNVLEFQGISILDRIYYRKDKLNFLLEKGYKDIELIIELPKYSLFELSDGSRRMLASILSTNNKRGEIHKGNQIFISQKFVKLLYHAKRISSTFNENHRKYVENHKKEFEELFYYILEFNENYVGAKKNGELLKSAFQSWQNHSIDELCSSFIGPTGSERKGLFELTSRGGAADFEFLGVKIPRYRDYTPSSLLKDATLIHQSVTGLYETRLDLSKLGED

SEQ ID NO: 21283 - protein, 1208 aa, unidentified
  REGION 1..1208: note = Cas Enzyme sequence
YEESFDIKNNDIQKIFNEFISIYDNTFEGSSLSGQNAQVEAIFTDKISKSAKRERVLKLFSDEKSTGLFSEFLKLIVGNQADFKKHFDLEEKAPLQFSKDTYDEDLENLLGQIGDGFADLFLVAKKLYDAILLSGILTVSDPSTKAPLSASMIERYENHQEDLAALKQFIKNNLPEKYGEVFSDQSKDGYAGFIDGKTTQEAFYKYIKNLLSKLEGADYFLDKIEREDFLRKQRTFDNGSIPHQIHLQEMNAILRRQGEHYPFLKENREKIEKILTFRIPYYVGPLARDNRDFSWLTRNSDEPIRPWNFEEVVDKASSAEDFINKMTNYDLYLPEEKVLPKHSLLYETFAVYNELTKVKFIAEGLRDYQFLDSGQKKQIVNQLFKEKRKVTEKDIIHYLHNVDGYDGIELKGIEKQFNASLSTYHDLLKIIKDKEFMDNADNEEILENIVHTLTIFEDREMIKQRLAQYGAIFDEKVLKTLSRRHYTGWGKLSAKLINGISDKQTGNTILDYLIDDGNNNRNFMQLINDDGLSFKEIIQKAQVVGKTDDVKQVVQELPGSPAIKKGILQSIKIVDELVKIMGHAPESIVIEMARENQTTARGKKNSQQRYKRIENALKNLAPGLDSNILKENPTDNIQLQNDRLFLYYLQNGKDMYTGKTIDINQLSNYDIDHIIPQAFIKDDSLDNRVLTSSKDNRGKSDNVPSIEVVQKRKAFWQQLLDSKLISERKFNHLTKAERGGLDERDKVGFIRRQLVETRQITKHVAQILDARFNTEVNEKNQKIRTVKIITLKSNLVSNFRKEFRLYKVREINDYHHAHDAYLNAVVAKAILKKYPKLEPEFVYGDYQKYDLKRYISKSKASNTIDKATEKYFFYSNLLNFFKEKVRYADGTIKKRENIEYSNDTGEIAWNKEKDFATIKKVLSLPQVNIVKKTEEQTVGQNGGLFDNNIVSKKKVVDASKLIPIKSSLSPEKYGGYARPTIAYSVLVIADIEKGKGKAKKLKRIKEIVGIAVQDKKKFESNPIAYLEECGYKNINSDLIIKLPKYSLFEFNDGQRRLLASSIELQKGNELILPYHLTVLLYHAQRINKISEPIHKQYVEAHQNEFKELLTTIISLSKKYIQKPNVELLLQQAFDRADKDIYQLSESFISLLKLTSFGAPGAFKFLGVEISQSSVRYKPNSQFLDTTLIHQSITGLYETRIDLRKLGED

SEQ ID NO: 21284 - protein, 1394 aa, unidentified
  REGION 1..1394: note = Cas Enzyme sequence
MNSKKYSIGLDIGTNSVGWAIITDDYNVPSKKMKVLGNTDKHFIKKNLIGALLFDEGTTAKDRRLKRTARRRYTRRHNRLRYLQEIFVEEMSKVDESFFLRLEDSFLVPEEKRGSKYPIFPTLSEEKEYHKNFPTIYHLRKHLADSKEKADLRLIYLALAHMIKYRGHFLYEESFDIKNNDIQKIFNEFLSIYDNTFEGNSLSGQNSQVEAIFTDKITKSAKRERILKLFPEKESIGLFAEFLKLILGNQADFKKHFNLEEKAPLHFSKDTYDEDLENLLGQIGDDYTDLFLVAKKLYDAILLSGILTVTDSTTQAPLSSSMIDRYENHQKDLAILKQFIKNNLTEKYDEVFSDQSKDGYAGYVDGKTTQEAFYKYIKKLLSAFDGADYFLDKIEREDFLRKQRIFDNGSIPYQIHLQEMNAILHRQGEHYSFLKENREKIEKILTFRIPYYVGPLARGNRDFAWLTRNSDDAIRPWNFEEIVDKSSSAEDFIHRMTNYDLYLPEENVLPKHSLLYETFTVYNELTKVKFIAEGMRDYQFLDSGQKKEIINKLFKEKRKVTEDDIIDCLQKLDNYDGIELKGIEKQFNASLSTYHDLLKIIRDKEFMDDPKNGDILENVIHTLTIFEDREMIKQRLAQYNSIFDEKVIKALSRKQYTGWGKLSAKLINGIRDKQTGKTILDYLMDDGKSNRNFMQLIKDDGLSFTKIIDKAQVVGETDNLRQVVQNLPGSPAIKKGILQSIKIVDELVKVMGHAPESIVIEMARENQTTARGKKNSQQRYKRIEDSLKNLASGLDSNILKENPTDNIQLQNDRLFLYYLQNGKDMYTGKPLDINQLSSYDIDHIIPQAFIKDDSLDNRVLTSSKENRGKSDNVPSLEVVQKRKAFWQQLLDSKLISERKFNNLTKAERERGGLNEIDKVGFIKRQLVETRQITKHVAQILDARYNTEVNEKKQKIRNVKIITLKSNLVSNFRKEFRLYKVREINDYHHAHDAYLNAVVAKAILKKYPKLEPEFVYGDYQKYDLKRYISRFKDPKEIEKATEKYFFYSNLLNFFKEEVHYADGTIVKRENIEYSKDTGEIAWNKEKDFATIKKVLSLLQVNIVKKTEIQTHGLDRGKPKGLFNSNPSPKPLEDSKENLVPIKQELDPRKYGGYAGISNSYAVLVKAIIEKGAKKQRKTILEFQGISILDKINFEKNKENYLLEKGYKEILSTITLPKYSLFEFPDGTRRRLASILSTNNKRGEIHKGNELVLPEKYITLLYHAKNINKTLEPEHLEYVEKHRDEFANLLEFVLDFNEKYVGALKNGERIRQAFTDWETVDIKELCLSFIGPENSKNAGLFELTSQGSASDFEFLGVKIPRYRDYTPSSLLNSTLIHQSITGLYETRIDLSKLGEE

SEQ ID NO: 21285 - protein, 1392 aa, unidentified
  REGION 1..1392: note = Cas Enzyme sequence
MNNNNYSIGLDIGTNSVGWAVITDDYKVPSKKMKVLGNTDKHFIKKNLIGALLFDEGTTAEDRRLKRTARRRYTRRKNRLRYLQEIFSEEMSKVDSSFFHRLDDSFLVPEDKRGSKYPIFATLAEEKEYHKKFPTIYHLRKHLADSKEKTDLRLIYLALAHMIKYRGHFLYEESFDIKNNDIQKIFSEFISIYDNTFEGSSLSGQNAQVEAIFTDKISKSAKRERILKLFAYEKPTGLFSEFLKLIVGNQAEFKKHFDLEEKAPLQFSKDTYDEDLENLLGQIGDDFADLFLVAKKLYDAILLSGILTVTDPSTKAPLSASMIERYENHQKDLAALKQFIQNNLQEKYDEVFSDQSKDGYAGYINGKTTQEAFYKYIKNLLSKFEGSDYFLDKIEREDFLRKQRTFDNGSIPHQIHLQEMNAIIRRQGEHYPFLQENKEKIKKILTFRIPYYVGPLARGNGDFAWLTRNSDQAIRPWNFEEIVDKASSAEAFINKMTNYDLYLPEEKVLPKHSLLYETFAVYNELTKVKFIAEGLRDYQFLDSGQKKQIVNQLFKEKRKVTEKDIIQYLHNVDGYDGIELKGIEKQFNASLSTYHDLLKIIKDKAFMDDAENEATLENIIHTLTIFEDREMIKQRLAQYDSLFDEKVIKALIRRHYTGWGKLSAKLINGICDKKTGKTILDYLIDDGYSNRNFMQLINDDGLSFKDIIQKAQVVGKTNDVKQVVQELPGSPAIKKGILQSIKLVDELVKVMGHAPESIVIEIARENQTTVRGKKNSQQRYKRIEDALKNLAPGLDSNILKEHPTDNIQLQNDRLFLYYLQNGKDMYTGEPLDINQLSSYDIDHIVPQAFIKDDSLDNRVLTSSKDNRGKSDNVPSLEVVQKRKAFWQQLLDSKLISERKFNNLTKAERGGLDERDKVGFIRRQLVETRQITKHVAQILDARFNTEVTEKDKKNRKVKIITLKSNLVSNFRKEFKLYKVREINDYHHAHDAYLNAVVAKAILKKYPKLEPEFVYGDYQKYDLKRYISRSKDPKDVEKATEKYFFYSNLLNFFKEEVHYADGTIVKRENIEYSKDTGEIAWNKEKDFATIKKVLSLPQVNIVKKTEIQTHGLDRGKPRGLFNSNPSPKPSEDSKENLVPIKQGLDPRKYGGYAGISNSYAVLVKAIIEKGAKKQQKTVLEFQGISILDKINFEKNKENYLLEKGYIKILSTITLPKYSLFEFPDGTRRRLASILSTNNKRGEIHKGNELVISEKYTTLLYHAKNINKTLEPEHLEYVEKHRNDFAKLLESVLDFNDKYVGALKNGERIRQAFIDWETVDIEKLCFSFIGPRNSKNAGLFELTSQGSASDFEFLGVKIPRYRDYTPSSLLNATLIHQSITGLYETRIDLSKLGED

SEQ ID NO: 21286 - protein, 1035 aa, unidentified
  REGION 1..1035: note = Cas Enzyme sequence
RNISLETYNEVFKDDTKNGYAGYIDGKTSQEDFYVYLKKLLAGLEGADYFLEKINREDFLRKQRTFDNGSIPYQIHLQEMNAILRRQGEHYPFLNENREKIEKILTFRIPYYVGPLASGNSDFAWLTRNSEEAIRPWNFEEIVDKASSAEDFINKMTNYDLYLPEEKVLPKHSLLYETFAVYNELTKVKFIAEGLRDYQFLDSGQKKQIVNQLFKEKRKITEKDIIHYLHNVDGYDGIELKGIEKQFNASLSTYLDLLKIIRDKEFMDDPKNEAILENIVHTLTIFEDREMIKQRLAQYNSLFDDKVIKALTRRHYTGWGRLSAKLINGIRDKQTGNTILDYLIDDDKINRNFMQLINDDVLSFKETIEKAQVVGKTDDVKQVVQELPGSPAIKKGILQSIKIVDELVKVMGHTPESIVIEMARENQTTARGKKNSQQRYKRIEDSLKNLASGLDSSILKENPTDNVQLQNDRLFLYYLQNGKDMYTGEALDINKLSNYDIDHIIPQAFIKDDSLDNRVLTSSKDNRGKSDNVPSLEVVQKRKAFWQQLLDSKLISERKFNNLTKAERGGLDERDKVGFIKRQLVETRQITKHVAQILDSRFNTEVNEKNQKIRTVKIVTLKSNLVSNFRKEFKLYKVREINDYHHAHDAYLNAVVAKAILKKYPKLEPEFVYGEYQKYDLKRYISRSKDPKDIEKATEKYFFYSNLLNFFKEEVHYADGTIVKRENIEYSKDTGEIAWNKEKDFATIKKVLSYPQVNIVKKTEEQTVGQNGGLFDNNIVSKKKVVDASKLIPIKSGLSPEKYGGYARPTIAYSVLVTYKQNNKIKNTMVGIPGLTKLEFERDPNLYLRNLGINNVSHVIKLVKYTVLEFKHKYGTYRRFIVSNQELKRANQIFVTTKQMKLISQYTTLEKNEHDSLLKNNQQLIQSIWNQFLEFMLATDLVNKKQYDELILTNNQTIEECRNIMNRVITTLSFTNINAGQKKIIFDDTSSLPIKRWQFTDSDKMVKKIIESTLIHQSITGLYETRIDLSKLGED

SEQ ID NO: 21287 - protein, 1377 aa, unidentified
  REGION 1..1377: note = Cas Enzyme sequence
MNNKPYSIGLDIGTNSVGWSVITDDYKVPSKKMKVLGNTDKRFIKKNLIGALLFDEGTTAEARRLKRTARRRYTRRKNRLRYLQEIFAEEMSKVDSSFFHRLDDSFLIPEDKRGSKYPIFATLVEEKEYHKQFPTIYHLRKQLADSKEKADLRLIYLVLAHMIKYRGHFLYEEAFDIKNNDIQKIFNEFISIYDNTFEGSSLSGQNAQVETIFTDKISKSAKRERVLKLFPDEKSTGLFSEFLKLIVGNQADFKKHFDLEEKAPLQFSKDTYDEDLENLLEQIGDDFADLFVAAKKLYDAILLSGILTVTDPSTKAPLSASMIERYENHQKDLAVLKQFIKTNLPEKYVEVFSDQSKDGYAGYIDGKTTQEAFYKYIKNLLSKFDGADYFLDKIEREVFLRKQRTFDNGSIPHQIHLQEMNTILRRQGEHYPFLKENKEKIEKILTFRIPYHVGPLARGNRDFAWLTRNSDQAIRPWNFEEIVDKASSAEDFINKMTNYDLYLPEEKVLPKHSLLYETFAVYNELTKVKFIAEGMRDYQFLDSGQKKKIINQLFKKKRKVTEDDIIDCLQKIDNYDGIELKGIEKQFNASLSTYHDILKIIRDKEFMDDPKNGDILENVIHTLTIFEDREMIKQRLAQYNSIFDEKVIKALSRKHYTGWGKLSAKLIDGIRDKQTGKTILDYLMDDGKSNRNFMQLIKDDELSFTEIIQKAQVVGDTDNLRQVVQNLPGSPAIKKGILQSIKIVDELVKVMGHAPESIVIEMARENQTTARGKKNSQQRYKRIEDSLKNLASGLDSNILKENPTDNIQLQNDRLFLYYLQNGKDMYTGEALNINQLSSYDIDHIIPQAFIKDDSLDNRVLTSSKDNRGKSDNVPSLEVVEKMKAFWQQLLDSKLISERKYNNLTKAERERGGLNELDKVGFIKRQLVETRQITKHVAQILDARFNKEVTEKNKKNRNVKIITLKSNMVSNFRKEFGLYKVREINDYHHAHDAYLNAVVAKAILKKYPKLEPEFVYGDYQKYDLKRYISRSKDPKEVEKATEKYFFYSNLLNFFKEEVHYADGTIVKRENIEYSKDTGEIAWNKEKDFATIKKVLSLPQVNIVKKTEEQTVGQNGGLFDNNIVSKKKVVDASKLIPIKSGLSPEKYGGYARPTIAYSVLVTYKQNNKIKNTMVGIPVLTKLEFERDPNLYLRNLGINNVSHVIKLVKYTVLEFKHKYGTYRRFIVSNQELKRANQIFVTTKQMKLISQYTTLDKNEHDSLLKNNQQLIQSIWNQFLEFMLATDLVNKKQYDELILTNNQTIEECRNIMNRVITTLSFTNINAGQKKIIFDDTLSLPIKRWQFTDSDKMVKKIIESTLIHQSITGLYETRIDLSKLGED

SEQ ID NO: 21288 - protein, 1385 aa, unidentified
  REGION 1..1385: note = Cas Enzyme sequence
MTKPYSIGLDIGTNSVGWAVITDDYKVPSKKIKVLGNTSKKYIKKNLLGALLFDSGITAEGRRLKRTARRRYTRRRNRILYLQEIFSTEMATLDDAFFQRLDDSFLVPDDKRDSKYPIFGNLVEEKAYNDEFPTIYHLRKYLADSTKKADLRLVYLALAHMIKYRGHFLIEGGFNSKNNDIQKNFQDFLDTYNAIFESDLSLENSKQLEEIVKDKISKSAKKDRILKLFPGEKNSGIFSEFLKLIVGNQADFRKYFNLDEKTSLQFSKESYDEDLETLLGHIGDDYSDVFLKAKKLYDAILLSGILTVTDNETEAPLSSAMIMRYKEHEEDLALLKAYIRNISLETYNEVFKDDTKNGYAGYIDGKTSQEDFYVYLKKLLAGLEGADYFLEKINREDFLRKQRTFDNGSIPYQIHLQEMRAILDKQAKFYPFLAKNKDRIEKILTFRIPYYVGPLARGNSDFAWSIRKRNEKITPWNFEDVIDKESSAEAFINRMTSFDLYLPEEKVLPKHSFLYETFTVYNELTKVRFIAESMRDYQFLDSKQKKDIVRLYFKNKRKVTDKDIIEYLHAIDGYDGIELKGIEKQFNSSLSTYHDLLNIINDKEFLDDSSNEAIIEEIIHTLTIFEDREMIKQRLSKFENIFDKSVLKKLSRRHYTGWGKLSAKLINGIRDEKSGNTILDYLIDDGVSNRNFMQLIHDDALSFKKKIKKSQIIGDKDNIKQVVQALPGSPAIKKGILQSIKIVDELVKVMGRRPESIVVEMARENQYTNQGKSNSQQRLKRLEESLKDLGSKILKENIPAKLSKIDNNELQNDRLYLYYLQNGKDMYTGEELDIDRLSNYDIDHIIPQAFLKDDSIDNKVLVSSASNRGKSDDVPSLEVVKKRKTHWYQLLKSKLISQRKFDNLTKAERGGLSQEEKAGFIQRQLVETRQITKHVARLLDERFNNKKDEDNKTIRTVKIITLKSSLVSQFRKDFELYKVREINDFHHAHDAYLNAVVASALLKKYPKLEPEFVYGDYPKYNSFRERKSATEKVYFYSNIMNIFKKSISLADGTVIERPLIEVNEETGESVWNKVADLSTVRKVLSYSQVNVVKKVEEQNHGLDRGKPKGLFNANLSSKPKQNSKENLVGAKEYLDPKKYGGYAGISNSFAILVKGTIEKGAKKKITNVLEFQGISILDRIYYRKDKLNFLLEKGYKDIELIIELPKYSLFELSDGSRRMLASILSTNNKRGEIHKGNQIFISQKFVKLLYHAKRISSTFNENHRKYVENHKKEFEELFYYILEFNENYVGAKKNGELLKSAFQSWQNHSIDELCSSFIGPTGSERKGLFELTSRGGAADFEFLGVKIPRYRDYTPSSLLKDATLIHQSVTGLYETRLDLSKLGED

SEQ ID NO: 21289 - protein, 1391 aa, unidentified
  REGION 1..1391: note = Cas Enzyme sequence
MSNKSYSIGLDIGTNSVGWAVITDDYKVPSKKMKVLGNTNKHFIKKNLIGALLFDEGTTAEDRRLKRTARRRYTRRKNRLRYLQEIFSEEMSKVDSSFFHRLDDSFLVPEDKRGSKYPIFATSVEEKEYHKKFPTIYHLRKHLADSKEKTDLRLIYLALAHMIKYRGHFLYEESFDIKNNDIQKIFSEFISIYDNTFEGSSLSGQNAQVEAIFTDKISKSAKRERILKLFAYEKPTGLFSEFLKLIVGNQAEFKKHFDLEEKAPLQFSKDTYDEDLENLLGQIGDDFADLFLVAKKLYDAILLSGILTVTDPSTKAPLSASMIERYENHQKDLSALKQFIQNNLQEKYDEVFSDQSKDGYAGYINGKTTQEAFYKYIKNLLSKFEGVDYFLDKIEREDFLRKQRTFDNGSIPHQIHLQEMNAIIRRQGEHYPFLQENKEKIEKILTFRIPYYVGPLARGNRNFAWLTRNSDQAIRPWNFEEIVDQASSAEEFINKMTNYDLYLPEEKVLPKHSLLYETFAVYNELTKVKFIAEGLRDYQFLDSGQKKQIVNQLFKEKRKVTEKDIIQYLHNIDGYDGIELKGIEKQFNASLSTYHDLLKIIKDKEFMDDPKNEEILENIVHTLTIFEDREMNKQRLAQYASIFDKKVIKALTRRHYTGWGKLSAKLINDICDKKTGKTILDYLIDDGYSNRNFMQLINDDGLSFKDIIQKAQVVGKTSDVKLVQELPGSPAIKKGILQSIKLVDELVKVMGHAPESIVIEMARENQTTARGKKNSQQRYKRIEDALKNLAPGLDSNILKEHPTDNIQLQNDRLFLYYLQNGKDMYTGEPLDINQLSSYDIDHIVPQAFIKDDSLDNRVLTSSKDNRGKSDNVPSLEVVQKRKAFWQQLLDSKLISERKFNNLTKAERGGLDERDKVGFIRRQLVETRQITKHVAQILDARFNTEVTEKDKKNRNVKIITLKSNLVSNFRKEFKLYKVREINDHHHAHDAYLNAVVAKAILKKYPKLEPEFVYGDYQKYDLKRYISRSKDPKDVEKATEKYFFYSNLLNFFKEEVHYADGTIVKRENIEYSKDTGEIAWNKEKDFATIKKVLSLPQVNIVKKTEIQTHGLDRGKPRGLFNSNPSPKPSEDSKENLVPIKQGLDPRKYGGYAGISNSYAVLVKAIIEKGEKKQQKTVLEFQGISILDKINFEKNKENYLLEKGYIKILSTITLPKYSLFEFPDGTRRRLASILSTNNKRGEIHKGNELVIPEKYTTLLYHAKNINKTLEPEHLEYVEKHRNDFAKLLESVLNFNDKYVGALKNGERIRQAFIDWETVDIEKLCFSFIGPRHSKNAGLFELTSQGSASDFEFLGVKIPRYRDYTPSSLLNATLIHQSITGLYETRIDLSKLGED

SEQ ID NO: 21290 - protein, 1371 aa, unidentified
  REGION 1..1371: note = Cas Enzyme sequence
MIKKPYSIGLDIGTNSVGWAVITDDYNVPSKKMKVLGNTNKEFIKKNLIGALLFDEGTTAEDRRLKRTARRRYTRRKNRLRYLQEIFTEEMSKVDSSFFHRLDDSFLVPEDKRGSKYPVFATLKEEKEYHKNFPTIYHLRKHLADSKEKADLRLIYLALAHMIKYRGHFLYEESFDIKNNDIQKIFNEFLSIYDNTFEENSLSGQNAQVEAIFTDKISKSAKRERVLKLFPDEKSSGLFSEFLRLIVGNQADFKKHFDLEEKAPLQFSKDTYDEDLENLLGQIGDGFADLFLVAKKLYDAILLSGILTVTDPSTKAPLSASMIERYENHQKDLAALKQFIQNNLQEKYDEVFSDQSKDGYAGYIDGKTTQEAFYKYIKNLLSKFDGADYFLEKIEREDFLRKQRTFDNGSIPYQIHLQEMNAIIRRQGEHYPFLKENREKIEKILTFRIPYYVGPLARGNRDFAWLTRNSDEAIRPWNFEEIVDKASSAEDFINKMTNYDLYLPEEKVLPKHSLLYETFAIYNELTKVKFIAEGLRDYQFLDSGQKKEIVNQLFKEKRKVTEKDIVHYLHNVDGYDGIELKGIEKQFNSSLSTYHDLLKIIKDKEFMDDSKNEEILENIVHTLTIFEDREMIKQRLAQYASIFDEKVIKKLTRRHYTGWGKLSVKLINGIHDKKTGKTILDYLIDDSYNNRNFMQLINDDGLSFKEIIKESQVVGKTDDVKQVVQELPGSPAIKKGILQSIKIVDELVKVMDHAPESIVIEMARENQTTDRGKKNSQQRYKRIEDSLKNLSPGLDSNILKENPTDNIQLQNDRLFLYYLQNGKDMYTGNPLDINQLSSYDIDHIIPQAFIKDDSLDNRVLTSSKENRGKSDNVPSLEVVQNRKAFWQQLLDSKLISERKFNNLTKAERGGLDERDKVGFIKRQLVETRQITKHVAQILDAHFNTEMNEKAQKTRTVKIITLKSNLVSNFRKEFKLYKVREINNYHHAHDAYLNAVVAKAILKKYPKLEPEFVYGDYQKHDLKRYISRSKDPKEIEKATEKYFFYSNLLNFFKEEVHYADGTIVKRENIEYSKDTGEIAWNKEKDFATIKKVLSYPQVNIVKKREVQTGGFSKESILPKGNSDKLIPRKTKEILWDTTKYGGFDSPVIAYSILLIADIEKGKAKKLKTVKTLVGITIMEKAAFEENPITFLENKGYHNVRKENILCLPKYSLFELENGRRRLLASAKELQKGNEIVLPVYLTTLLYHSKNVHKLDEPVHLEYIQKHRNEFKDLLNLVSEFSQKYVLADANLEKIKNLYADNEQADIEILANSFINLLTFTALGAPAVFKFFGKDVERKRYTTVSEILNATLIHQSITGLYETRIDLSKIGED

SEQ ID NO: 21291 - protein, 1385 aa, unidentified
  REGION 1..1385: note = Cas Enzyme sequence
MTKPYSIGLDIGTNSVGWAVITDDYKVPSKKMKVLGNTSKKYIKKNLLGALLFDSGITAEGRRLKRTARRRYTRRRNRILYLQEIFSTEMATLDDAFFQRLDDSFLVPDDKRDSKYPIFGNLVEEKAYHDEFPTIYHLRKYLADSTKKADLRLVYLALAHMIKYRGHFLIEGEFNSKNNDIQKNFQDFLDTYNAIFESDLSLENSKQLEEIVKDKISKSAKKDRILKLFPGEKNSGIFSEFLKLIVGNQADFRKYFNLDEKTSLQFSKESYDEDLETLLGHIGDDYSDVFLKAKKLYDAILLSGILTVTDNETEAPLSSAMIMRYKEHEEDLALLKAYIRNISLETYNEVFKDDTKNGYAGYIDGKTSQEDFYVYLKKLLAGLEGADYFLEKIDREDFLRKQRTFDNGSIPYQIHLQEMRAILDKQAKFYPFLAKNTDRIEKILTFRIPYYVGPLARGNSDFAWSIRKRNEKITPWNFEDVIDKESSAEAFINRMTSFDLYLPEEKVLPKHSFLYETFTVYNELTKVRFIAESMRDYQFLDSKQKKDIVRLYFKNKRRVTDKDIIEYLHAIDGYDGIELKGIEKQFNSSLSTYHDLLNIINDKEFLDDSSNEAIIEEIIHTLTIFEDREMIKQRLSKFENIFDKSVLKKLSRRHYTGWGKLSAKLINGIRDEKSGNTILDYLIDDGVSNRNFMQLIHDDALSFKKKIKKAQIIGYKDNIKQVVQALPGSPAIKKGILQSIKIVDELVKVMGRRPESIVVEMARENQYTNQGKSNSQQRLKRLEESLKDLGSKILKENIPAKLSKIDNNELQNDRLYLYYLQNGKDMYTGEELDIDRLSNYDIDHIIPQAFLKDDSIDNKVLVSSASNRGKSDDVPSLEVVKKRKTHWYQLLKSKLISQRKFDNLTKAERGGLSQEEKAGFIQRQLVETRQITKHVARLLDERFNNKKDEDNKTIRTVKIITLKSSLVSQFRKDFELYKVREINDFHHAHDAYLNAVVASALLKKYPKLEPEFVYGDYPKYNSFRERKSATEKVYFYSNIMNIFKKSISLADGTVIERPLIEVNEETGESVWNKVADLSTVRKVLSYSQVNVVKKVEEQNHGLDRGKPKGLFNANLSSKPKQNSKENLVGAKEYLDPKKYGGYAGISNSFAILVKGTIEKGAKKKITNVLEFQGISILDRITYRKDKFNFLLEKGYKDIDLIIELPKYSLFELSDGSRRMLASILSTNNKRGEIHKGNQIFISQKFVKLLYHAKRISSTFNENHRKYVENHKKEFEELFYYILEFNENYVGAKKNGELLKSAFQSWQNHSIDELCSSFIGPTGSERKGLFELTSRGGAADFEFLGVKIPRYRDYTPSSLLKDATLIHQSVTGLYETRLDLSKLGED

SEQ ID NO: 21292 - protein, 1102 aa, unidentified
  REGION 1..1102: note = Cas Enzyme sequence
MLTYTGATHARFSATMIERYEEHRKDLQRFKSFVKQNLSEQDYLDIFGRKTQNGFDIDKETKGYVGYISNKMVLTNSQKQKTIQQNFYDYISGKITGIEGAEYFLNKISDGTFLRKLRTSDNGAIPNQIHAYELEKIIERQGEDYPFLLENKDKLLSILTFKIPYYVGPLAKGNNSRFAWIKRATSQDVLDDNDEDTRNGKIRPWNYHKLINMDETRDAFITNLIGNDIILLNEKVLPKRSLIYEEVMLQNELTRVKYKDKHGKTHFLDSELRQEIINNIFKTNSKRVSSAMLLDYLENYTNLQAVEIVSGIEKDKSLNSTLKTYNDFKTIFSEEFLDSEIYQKELEEIIKVITVFDDKKSIKNYLTKYFGHLEFLDEEKINQLSKLRYTGWGRYSAKLLLDIRDEDTGFNLLQFLRNDEENRNLTNLISDNTLSFEPKIKAIQSKSTVEDDVFDEIKKLAGSPAIKRGILNSIKIVDELVQIIGYPPQNIVIEMARENMTTEEGQRKSKTRKTKLESALKNIENSVLENGKVPHSDEQLQSEKLYLYYLQNGKDMYSLDKTGSPVPLYRDQLDQYEVDHIIPYSFLPIDSIDNKVLTHRKNNQRKLDNIPDKETVANMKPFWEKLYNAKLISQTKYQRLTTSERTPDGVLTESMKAGFIERQLVETRQIIKHVARILDNRFSDTKIITLKSQLITNFRNTFHIAKIRELNDYHHAHDAYLAVVVGQTLLKAYPKLAPELIYGHHAHFNRHEENKATIRKHLYSNIMRFFNNPDSKVSKDIWDCNRDLPIIKDVIYKSQVNFVKRTMIKKGAFYKQNIIPKNSSVTVDKRFPIKNKKYLDPKLYGGYYERNSALSVFIIGQRFNKNNKLKVVKEFYDINIIDYPWFNTSPMSFFNDDSENGFLTKNNLQSVQAFYKIPKYSLIQKNDGTRMLFESTTNFHKATQFKLTESQNELFFHMRRLLTKTDFMDLKSEESIKESQDFIMSHKEEFDNIVNGLFEYAEKQLGSKSLFTQAHEAYKLRKYPVFNLSEEIIRYYYDNFLKLFSLTKSGTSSGYVVGLFEAPKLRNAVYKATKDENKATLIHQSITGLYETRIDLSKLGED

SEQ ID NO: 21293 - protein, 1345 aa, unidentified
  REGION 1..1345: note = Cas Enzyme sequence
MKKPYSIGLDIGTNSVGWAVVTDDYKVPAKKMKVLGNTDKSHIKKNLLGALLFDSGNTAEDRRLKRTTRRRYTRRRNRILYLQEIFSEEMGKVDDSFFHRLEDSFLVTEDKRGERHPIFGNLEEEVKYHENFPTIYHLRQYLADNPEKTDLRLVYLALAHIIKFRGHFLIEGKFDTRNNDVQRLFQEFLAVYDNTFENSSLQEQNVQVEEILTDKISKSAKKDRVLKLFPNEKSNGRFAEFLKLIVGNQADFKKHFELEEKAPLQFSKDTYEEELEVLLAQIGDNYAELFLSAKKLYDSILLSGILTVTDVSTKAPLSASMIQRYNEHQMDLTQLKQFIRQKLSDKYNEVFSDVSKDGYAGYIDGKTNQEAFYKYLKGLLNKIEGSGYFLDKIEREDFLRKQRTFDNGSIPHQIHLQEMRAIIRRQAEFYPFLADNQDRIEKLLTFRIPYYVGPLASGKSDFAWLSRKSADKITPWNFDEIVDKESSAEAFINRMTNYDLYLPNQKVLPKHSLLYEKFTVYNELTKVKYKTEQGKTAFFDANMKQEIFDGVFKVYRKVTKDKLMDFLEKEFDEFRIVDLTGLDKENKVFNASYGTYHDLCKILDKDFLDNSKNEKILEDIVLTLTLFEDREMIRKRLENYSDLLTKEQVKKLERRHYTGWGRLSAELIHGIRNKESRKTILDYLIDDGNSNRNFMQLINDDALSFKEEIAKAQVIGETDNLNQVVSDIAGSPAIKKGILQSLKIVDELVKIMGHQPENIVVEMARENQFTNQGRRNSQQRLKGLTDSIKEFGSQILKEHPVENSQLQNDRLFLYYLQNGRDMYTGEELDIDYLSQYDIDHIIPQAFIKDNSIDNRVLTSSKENRGKSDDVPSKDVVRKMKSYWSKLLSAKLITQRKFDNLTKAERGGLTDDDKAGFIKRQLVETRQITKHVARILDERFNTETDENNKKIRQVKIVTLKSNLVSNFRKEFELYKVREINDYHHAHDAYLNAVIGKALLGVYPQLEPEFVYGDYPHFHGHKENKATAKKFFYSNIMNFFKKDDVRTDKNGEIIWKKDEHISNIKKVLSYPQVNIVKKVEEQTGGFSKESILPKGNSDKLIPRKTKKFYWDTKKYGGFDSPIVAYSILVIADIEKGKSKKLKTVKALVGVTIMEKMTFERDPVAFLERKGYRNVQEENIIKLPKYSLFKLENGRKRLLASARELQKGNEIVLPNHLGTLLYHAKNIHKVDEPKHLDYVDKHKDEFKELLDVVSNFSKKYTLAEGNLEKIKELYAQNNGEDLKELASSFINLLTFTAIGAPATFKFFDKNIDRKRYTSTTEILNATLIHQSITGLYETRIDLSKLGGD

SEQ ID NO: 21294 - protein, 1377 aa, unidentified
  REGION 1..1377: note = Cas Enzyme sequence
MKKPYSIGLDIGTNSVGWAVITDDYKVPSKKMKVLGNTDKHFIKKNLIGALLFDEGTTAEDRRLKRTARRRYTRRKNRLRYLQEIFSEEISKLDSSFFHRLDDSFLVPEDKRGSKYPIFATLAEEKEYHKNFPTIYHLRKQLAESNEKADLRLIYLALAHMIKYRGHFLYEESFDIKNNDIQKIFNEFISIYDNTFEGSSLSGQNAQVEAIFTDKISKSAKRERVLKLFSDEKSTGLFSEFLKLIVGNQADFKKHFDLEEKAPLQFSKDTYDEDLENLLGQIGDGFADLFLVAKKLYDAILLSGILTVSDPSTKAPLSASMIERYENHQEDLAALKQFIKNNLPEKYGEVFSDQSKDGYAGFIDGKTTQEAFYKYIKNLLSKLEGADYFLDKIEREDFLRKQRTFDNGSIPHQIHLQEMNAILRRQGEHYPFLKENREKIEKILTFRIPYYVGPLARDNRDFSWLTRNSDEPIRPWNFEEVVDKASSAEDFINKMTNYDLYLPEEKVLPKHSLLYETFAVYNGLTKVKFIAEGLRDYQFLDSGQKKQIVNQLFKEKRKVTEKDIIHYLHNVDGYDGIELKGIEKQFNASLSTYHDLLKIIKNKEFMDDPKNEEILENIVHTLTIFEDREMIKQRLAHYNSLFDEKVIKALTRRHYTGWGKLSAKLINGICDKQTGKTILDYLIDDGDFNRNFMQLINDDGLSFKEIIQKAQVVGKTDDVKQVVQELPGSPAIKKGILQSIKIVDELVKIMGHAPESIVIEMARENQTTARGKKNSQQRYKRIEDALKNLAPGLDSNILKENPTDNIQLQNDRLFLYYLQNGKDMYTGKPLDINQLSSYDIDHIVPQAFIKDDSLDNRVLTSSKDNRGKSDNVPSLEVVEKMKAFWQQLLDSKLISERKFNNLTKAERGGLDERDKVGFIKRQLVETRQITKHVAQILDARFNTGVTEKDKKNRTVKIVTLKSNLVSNFRKEFRLYKVREINDYHHAHDAYLNAVVAKAILKKYPKLEPEFVYGDYQKYDLKRYISKSKASNTIDKATEKYFFYSNLLNFFKEKVRYADGTIKKRENIEYSNDTGEIAWNKEKDFATIKKVLSLPQVNIVKKTEEQTVGQNGGLFDNNIVSKKKVVDASKLIPIKSSLSPEKYGGYARPTIAYSVLVIADIEKGKGKAKKLKRIKEIVGIAVQDKKKFESNPIAYLEECGYKNINSDLIIKLPKYSLFEFNDGQRRLLASSIELQKGNELILPYHLTVLLYHAQRINKISEPIHKQYVEAHQNEFKELLTTIISLSKKYIQKPNVELLLQQAFDRADKDIYQLSESFISLLKLTSFGAPGAFKFLGVEISQSSVRYKPNSQFLDTTLIHQSITGLYETRIDLRKLGED

SEQ ID NO: 21295 - protein, 1370 aa, unidentified
  REGION 1..1370: note = Cas Enzyme sequence
MKKSYSIGLDIGTNSVGWAVVNDDYKVPAKKMRVFGDTDRSHIKKNLLGTLLFDDGNTAESRRLKRTARRRYTRRRNRILYLQEIFIESMNEIDESFFHRLDDSFLVPEDKRGSKYPIFATLEEEKEYHKKFPTIYHLRKHLADSKEKTDLRLIYLALAHMIKYRGHFLYEESFDIKNNDIQKIFNEFISIYDNTFEGSSLSGQNAQVEAIFTDKISKSAKRERVLKLFSDEKSTGLFSEFLKLIVGNQADFKKHFDLEEKAPLQFSKDTYDEDLENLLGQIGDGFADLFLVAKKLYDAILLSGILTVTDPSTKAPLSASMIERYENHQEDLAALKQFIKNNLSEKYAEVFSDQSKDGYAGFIDGKTTQEAFYKYIKNLLSKLEGADYFLNKIEREDFLRKQRTFDNGSIPHQIHLQEMNAILRRQGEHYLFLKENREKIEKILTFRIPYYVGPLARGNRDFAWLTRNSDQAIRPWNFEEVVDKASSAEDFINKMTNYDLYLPEEKVLPKHSLLYETFAVYNELTKVKFIAEGLRDYQFLDSGQKKQIVNQLFKEKRKVTGKDIIHYLHNVDGYDGIELKGIEKQFNASLSTYHDLLKIIKDKEFMDDPKNEEILENIVHTLTIFEDREMIKQRLAQYDTLFDEKVIKALTRRHYTGWGKLSAKLINGICDKQTGDTILDFLIDDDKINRNFMQLINDDGLSFKEIIQKAQVVGKTDDVKQVVQELPGSPAIKKGILQSIKIVDELVKIMGHAPESIVIEMARENQTTARGKKNSQQRYKRIEDALKNLAPGLDSNILKENPTDNIQLQNDRLFLYYLQNGKDMYTGKALDIKQLSNYDIDHIIPQAFIKDDSLDNRVLTSSKDNRGKSDNVPSIEVVQKRKAFWQQLLDSKLISERKFNNLTKAERGGLDERDKVGFIKRQLVETRQITKHVAQLLDARFNTEVNEENQKIRTVKIITLKSNLVSNFRKEFGLYKVREINDYHHAHDAYLNAVVAEAILKKYPKLEPEFVYGDYQKYDLKRYISKSKVSNTIDKATEKYFFYSNLLNFFKEKVRYADGTIKKRENIEYSNDTGEIAWNKEKDFATIKKVLSLPQVNIVKKREVKTGGFSKESILPKGNSDKLIPRKTKDILWDTTKYGGVDSPVIAYSILLIADIEKGKAKKLKTVKTLVGITIMEKAAFEENPITFLENKGYHNVRKENILCLPKYSLFELENGRRRMLASAKELQKGNEIVLPVYLTTLLYHSKNAHKLDEPGHLEYIQKHRNEFKDLLNLVSEFSQKYVLAEANLEKIKNLYADNEQADIEILANSFINLLTFTALGAPAAFKFFGKDVDRKRYTTVSEILNATLIHQSITGLYETRIDLSKLGED

SEQ ID NO: 21296 - protein, 1320 aa, unidentified
  REGION 1..1320: note = Cas Enzyme sequence
YTRRRNRILYLQEIFTDSMNEIDESFFHRLDDSFLVPEDKRGSKYPIFATLEEEKEYHKKFPTIYHLRKHLADSKEKTDLRLIYLALAHMIKYRGHFLYEESFDIKNNDIQKIFNEFISIYDNTFEGSSLSGQNAQVEAIFTDKISKSAKRERVLKLFPDEKSTGLFSEFLKLIVGNQADFKKHFNLEEKAPLQFSKDTYDEDFENLLGQIGDDFADLFLVAKKLYDAILLSGILTVTDPSTKSPLSASMIERYENHQEDLAALKQFIKNNLPEKYAEVFSDQSKDGYAGYIDGKTTQEAFYKYIKNLLSKFEGADYFLDKIEREDFLRKQRTFDNGSIPHQIHLQEMNAILRRQGEHYPFLKENKEKIKKILTFRIPYYVGPLARDNRDFAWLTRNSDQAIRPWNFEEVVDKASSAEDFINKMTNYDLYLPEEKVLPKHSLLYETFAVYNELTKVKFIAEGLRDYQFLDSGQKKQIVNQLFKEKRKVTEKDIIHYLHNVDGYDGIELKGIEKQFNASLSTYHDLLKIIKDKEFMDNADNEEILENIVHTLTIFEDREMIKQRLAQYGAIFDEKVLKTLSRRHYTGWGKLSAKLINGISDKQTGNTILDYLIDDGNNNRNFMQLINDDGLSFKEIIQKAQVVGKTDDVKQVVQELPGSPAIKKGILQSIKIVDELVKIMGHAPESIVIEMARENQTTARGKKNSQQRYKRIENALKNLAPGLDSNILKENPTDNIQLQNDRLFLYYLQNGKDMYTGKTIDINQLSNYDIDHIIPQAFIKDDSLDNRVLTSSKDNRGKSDNVPSIEVVQKRKAFWQQLLDSKLISERKFNHLTKAERGGLDERDKVGFIRRQLVETRQITKHVAQILDARFNTEVNEKNQKIRTVKIITLKSNLVSNFRKEFRLYKVREINDYHHAHDAYLNAVVAKAILKKYPKLEPEFVYGDYQKYDLKRYISRSKDPKEVEKATEKYFFYSNLLNFFKEEVLYADGTIRKRENIEYSKDTGEIAWDKEKDFATIKKVLSYPQVNIVKKTEIQTHGLDRGKPKGLFNSNPSPKPSEDSKENLVPIKQGLDPRKYGGYAGISNSYAVLVKAIVEKGAKKQQKTILEFQGISILDKINFENNKEKYLLEKGYIKLLSTITLPKYSLFEFPDGTRRRLASILSTNNKRGEIHKGNELVLPGKYTTLLYHAKNINKKLEPEHLEYVEKHRNDFAKLLECVLNFNDKYVGALKNGERIRQAFTDWETVDIEKLCFSFIGPENSKNAGLFELTSQGSASDFEFLGVKIPRYRDYAPSSLLKATLIHQSITGLYETRIDLSKLGED

SEQ ID NO: 21297 - protein, 1155 aa, unidentified
  REGION 1..1155: note = Cas Enzyme sequence
AKRERVLKLFPDQKSTGLFSEFLKLILGNQANFKKHFDLEEKAPLQFSKDTYDEDLENLLGQIRDDFADLFLVAKKLYDAILLSGILTVKDLSTKAPLSASMIEHYENHQKDLVALKQFIKNNLQEKYDEVFSDQSKDGYAGYINGKTTQEAFYKYIKNLLSKFEGSDYFLDKIEREYFLRKQRTFDNGSIPHQIHLQEMNAIIRRQGEHYPFLKENREKIEKILTFRIPYYVGPLARGNRDFAWLTRNSDEAIRPWNFEEIVDKASSAEDFINKMTNYDLYLPEEKVLPKHSLLYETFAVYNELTKVKFIAEGLTRYQFLDKKQKKDIFDTFFKAENKRKVTEKDIIHYLHNVDGYDGIELKGIEKQFNASLSTYHDLLKIIKDKAFMDDSKNEEILENIIHTLTIFEDREMIKQRLAQYDSLFDEKVIKALTRRHYTGWGKLSAKLINGIRDKKSGKTILDYLIDDGEINRNFMQLIHDDGLSFKEIIQKAQVFGKTNDVKQVVQELPGSPAIKKGILQSIKIVDELVKVMGHAPESIVIEMARENQTTAKGKKNSQQRYKRIEDSLKNLASGLDSNILKENPTDNVQLQNDRLFLYYLQNGRDMYTGKPLEINQLSNYDIDHIIPQAFIKDDSLDNRVLTSSKDNRGKSDNVPSLEVVEKMKTFWQQLLDSKLISERKFNNLTKAERERGGLNELDKVGFIKRQLVETRQITKHVAQFLDARFNKEVTEKDKNNRNVKIITLKSNLVSNFRKEFGLYKVREINDYHHAHDAYLNAVLAKAILKKYPKLEPEFVYGDYQKYDLKRYISRSRDPKEVEKATEKYFFYSNLLNFFKEEVHYADGTIVRRENIEYSKDTGEIAWNKEKDFATIKKVLSLPQVNIVKKTEVQTGGFSKESILPKGNSDKLIPRKTKDILWDTTKYGGFDSPVIAYSILLIADIEKGKAKKLKTVKTLVGITIMEKAAFEKNPITFLENKGYHNVRKENILCLPKYSLFELESGRRRMLASAKELQKGNEIVLPVYLTTLLYHSKNVHKLDEPEHLEYIQKHRYEFKDLLNLVSEFSQKYVLADANLEKIKNLYADNEQADIEILANSFINLLTFTALGAPAAFKFLGKDVDRKRYTTVSEILNATLIHQSITGLYETRIDLSKLGED

SEQ ID NO: 21298 - protein, 1380 aa, unidentified
  REGION 1..1380: note = Cas Enzyme sequence
MGEKLMIKKPYSIGLDIGTNSVGWAVITDDYKVPSKKMKVLGNTNKHFIKKNLIGALLFDEGTTAEDRRLKRTARRRYTRRKNRLRYLQEIFTEEMSKVDSSFFHRLDDSFLVPEDKRESKYPIFATLKEEKEYHKNFSTIYHLRKHLADSKEKADLRLIYLALAHMIKYRGHFLYEESFDIKNNDIQKIFNEFLCIYDNTFEGNSLSGQNSQVEAIFTDKITKSAKRERILKLFPEKESIGLFAEFLKLILGNQADFKKHFNLEEKAPLHFSKDTYDEDLENLLGQIGDDYTDLFLVAKKLYDAILLSGILTVTDPSTKAPLSASMIERYENHQKDLASLKQFIKNNLPEKYDEVFSDQFKDGYAGYIDGKATQEAFYKYIKNLLSKFEGADYFLEKIEREDFLRKQRTFDNSSIPHQIHLQEMNAILRRQGEHYPFLNENREKIEKILTFRIPYYVGPLASGNSDFAWLTRNSEEAIRPWNFEEIVDKASSAEDFINKMTNYDLYLPEEKVLPKHSLLYETFAVYNELTKVKFIAEGLRDYQFLDSGQKKQIVNQLFKEKRKITEKDIIHYLHNFDGYDGIELKGIEKQFNASLSTYHDLLKIIRDKEFMDDPKNEAILENIVHTLTIFEDREMIKQRLAQYNSLFNDKVIKALTRRHYTGWGKLSAKLINGIRDKQTGNTILDYLIDDDKINRNFMQLINDDGLSFKEIIQKSQVVDKTDDVKQVVQELPGSPAIKKGILQSIKIVDELVKVMGHNPESIVIEMARENQTTARGKKNSQQRYKRIEDSLKNLASGLDSNILKENPTDNVQLQNDRLFLYYLQNGKDMYTGEALDINKLSNYDIDHIIPQAFIKDDSIDNRVLTSSKDNRGKSDNVPSLEVVQKRKAFWQQLLDSKLISERKFNNLTKDERGGLDERDKVGFIKRQLVETRQITKHVAQILDSRFNTEVNEKNQKIRTVKIVTLKSNLVSNFRKEFKLYKVREINDYHHAHDAYLNAVVAKAILKKYPKLEPEFVYGEYQKYDLKRYISRSKDPKDIEKATEKYFFYSNLLNFFKEEVHYADGTIVKRENIEYSKDTGEIAWNKEKDFATIKKVLSLPQVNLVKKTEEQTVGQNGGLFDNNIVSKEKVVDASKLIPIKSGLSPEKYGGYARPTIAYSVLVTYKQNNKIKNTMVGIPVLTKLEFERDPNLYLRNLGINNVSHVIKLVKYTVLEFKHKYGTYRRFIVSNQELKRANQIFVTTKQMKLISQYTTLDKNEHDILLKNNQQLIQSIWNQFLEFMLATDLVNKKQYDELILTNNQTIEECRNIMNRVITTLSFTNINAGQKKIIFDDTLSLPIKRWQFTDSDKMVKKIIESTLIHQSITGLYETRIDLGKLGED

SEQ ID NO: 21299 - protein, 1373 aa, unidentified
  REGION 1..1373: note = Cas Enzyme sequence
MSNKSYSIGLDIGTNSVGFAVITDDYKVPSKKMKVLGNTDKRFIKKNLIGALLFDEGTTAEARRLKRTARRRYTRRKNRLRYLQEIFVGEMSKVDSSFFHRLDDSFLVPEDKRGSKYPIFATLVEEKEYHKKFPTIYHLRKHLADSKEKADLRLIYLVLAHMIKYRGHFLYEESFDIKNNDIQKIFNEFISIYDNTFEGSSLSGQNAQVEAIFTDKISKSAKRERVLKLFPDEKSSGLFSEFLKLVVGNQADFKKYFDLEEKAPLQFSKDTYDEDLENVLGQIGDDFADLFVAAKKLYDAILLSGILTVTDPSTKAPLSASMIERYKNHQKDLATLKQFIKTNLPKRYDEVFSDQSKDGYAGYIDGKTTQEAFYKYIKNLLSKFEGADYFLEKIEREDFLRKQRTFDNGSIPHQIHLQEMNAILRRQGEHYPFLQENKEKVEKILTFRIPYYVGPLAHGNRDFAWLTRNSDQAIRPWNFEEVVDKASSAEDFINKMTNYDLYLPEEKVLPKHSLLYETFAVYNELTKVKFIAEGLRDYQFLDSGQKKQIVNQLFKEKRKVTEKDIIHYLHNVDGYDGIELKGIEKQFNASLSTYHDLLKIIKDKEFMDDSKNEEILENIVHTLTIFEDREMIKQRLAQYDSLFDEKVIKALIRRHYNGWGKLSAKLINGICDKQTGNTILDYLIDDGKINRNFMQLINDDGLSFKEIIQKAQVVGKTDDVKQVVQELPGSPAIKKGILQSVKLVDELVKVMGHKPESIVIEMARENQTTAKGKKNSQQRYKRIEDAIKNLAPGLDSNILKEHPTDNIQLQNDRLFLYYLQNGRDMYTGKPLEINQLSNYDIDHIIPQAFIKDDSLDNRVLTSSKENRGKSDNVPSLEVVEKMKTFWQQLLDSKLISERKFNNLTKAERERDGLNELDKVGFIKRQLVETRQITKHVAQILDARFNKEVTEKDKKNRTVKIITLKSNLVSNFRKEFGLYKVREINDYHHAHDAYLNAVLAKAILKKYPKLEPEFVYGDYQKYDLKRYISRSRDSKEVEKATEKYFFYSNLLNFFKEEVHYADGTIVKRENIEYSKDTGEIAWNKEKDFATIKKVLSLPQVNIVKKREVQTGGFSKESILPKGNSDKLIPRKTKDILWETTKYGGFDSPVIAYSILLIADIEKGKAKKLKTVKTLVGITIMEKAAFEENPITFLENKGYHNVRKENILCLPKYSLFELENGRRRLLASAKELQKGNEIVLPVYLTTLLYHSKNVHKLDEPEHLEYIQKHRNEFKDLLNLVSEFSQKYVLADANLEKIQNLYADNEQADIEILANSFINLLTFTALGAPAAFKFFGKDIDRKRYTTVSEILNATLIHQSITGLYETRIDLSKLGED

SEQ ID NO: 21300 - protein, 1392 aa, unidentified
  REGION 1..1392: note = Cas Enzyme sequence
MNSKKYSIGLDIGTNSVGWAIITDDYNVPSKKMKVLGDTDKHFIKKNLIGALLFDEGTTAKDRRLKRTARRRYIRRHNRLRYLQEIFVEEMSKVDESFFLRLEDSFLVPEEKRGSKYPIFPTLSEEKEYHKNFPTIYHLRKHLTDSKEKADLRLIYLALAHMIKYRGHFLYEESFDIKNNDIQKIFNEFLSIYDNTFEGNSLSGQNSQVEAIFTDKITKSAKRERILKLFPEKESIGLFAEFLKLILGNQADFKKHFNLEEKAPLHFSKDTYDEDLENLLGQIGDDYTDLFVVAKKLYDAILLSGILTVTDSTTQAPLSSSMIERYENHQKDLATLKQFIKNNLTEKYDEVFSDQSKDGYAGYVDGKTTQEAFYKYIKKLLSAFDGADYFLDKIEREDFLRKQRTFDNGSIPYQIHLQEMNAILHRQGEHYPFLKENREKIEKILTFRIPYYVGPLARGNRDFAWLTRNSDDAIRPWNFEEIVDKSSSAEDFIHRMTNYDLHLPEEKVLPKHSLLYETFTVYNELTKVKFIAEGMRDYQFLDSGQKKEIINKLFKKKRKVTEDDIIDCLQKLDNYDGIELKGIEKQFNASLSTYHDLLKIIRDKEFMDDPKNGDILENVIHTLTIFEDREMIKQRLAQYNSIFDEKVIKALSRKHYTGWGKLSAKLINGIRDKQTGKTILDYLMDDGKSNRNFMQLIKDDGLSFTKIIDKAQVVGETDNLRQVVQELPGSPAIKKGILQSIKIVDELVKVMGHAPESIVIEMARENQTTARGKKNSQQRYKRIEDSLKNLASGLDSNILKENPTDNIKLQNDRLFLYYLQNGKDMYTGEALDINQLSSYDIDHIIPQAFIKDDSLDNRVLTSSKNNRGKSDNVPSLEVVEKMKGFWQQLLDSKLISERKFNNLTKAERGGLDERDKVVFIKRQLVETRQITKHVAQILDARFNTKVNEKKQKIRNVKIITLKSNLVSNFRKEFRLYKVREINDYHHAHDAYLNAVVAKAILKKYPKLEPEFVYGEYQKYDLKRYISKSKNPKEVEKATEKYFFYSNLLNFFKEEVHYADGTIVKRENIEYSKDTGEIAWNKEKDFATIKKVLSFPQVNIVKKTEIQTHGLDRGKPKGLFNSNPSPKPSEDSKENLVPIKQGLDPRKYGGYAGISNSYAVLVKAIIEKGAKKQRKTILEFQGISILDKINFEKNKENYLLEKGYKEILSTITLPKYSLFEFPDGTRRRLASILSTNNKRGEIHKGNELVLPEKYITLLYHAKNINKTLEPEHLEYVEKHRDEFANLLEFVLDFNEKYVGALKNGERIRQAFTDWETVDIKELCLSFIGPENSKNAGLFELTSQGSASDFEFLGVKIPRYRDYTPSSLLSSTLIHQSITGLYETRIDLSKLGED

SEQ ID NO: 21301 - protein, 907 aa, unidentified
  REGION 1..907: note = Cas Enzyme sequence
QAIRPWNFEEIVDKASSAEDFINKMTNYDLYLPEEKVLPKHSLLYETFAVYNELTKVKFIAEGLRDYQFLDSGQKKDIFYTLFKAEDKRKVTEKDIIHYLHNVNGYDGIELKGIEKQFNASLSTYHDLLKIIKDKEFMDDPKNEEILENIVHTLTIFEDREMIKQRLAQYDSLFDEKVIKALTRRHYTGWGKLSAKLINGIRDKQTGNTILDYLIDDGKINRNFMQLINDDGLSFKEIIQKAQVIGKTDDVKQVVQELPGSPAIKKGILQSIKLVDELVKVMGYAPESIVIEMARENQTTARGKKNSQQRYKRIEDALKNLAPGLDSTILKENPTDNIQLQNDRLFLYYLQNGKDMYTGEALDINQLSSYDIDHIIPQAFIKDDSLDNRVLTSSKDNRGKSDNVPSLEVVKKRKAFWQQLLDSKLISERKFNNLTKAERGGLDERDKVGFIKRQLVETRQITKHVARILDARFNTEVSEKNQKIRTVKIITLKSNLVSNFRKEFKLYKVREINDYHHAHDAYLNAVVAKAILKKYPKLEPEFVYGDYKKYDLKRYISKSKDPKEVEKATEKYFFYSNLLNFFKEEVHYADGTIVKRENIEYSKDTGEIAWNKEKDFVTIKKVLSLPQVNIVKKTEEQTVGQNGGLFDNNIVSKKKVVDASKLIPIKSGLSPEKYGGYARPTIAYSVLVIADIEKGKAKKLKRIKEMVGITIQDKKKFEANPIAYLEECGYKNINSDLIIKLPKYSLFEFNDGQRRLLASSIELQKGNELILPYHLTALLYHAQRINKISEPIHKQYVETHQNEFEELLTTIISLSKKYIQKPNVESLLQQAFDQADKDIYQLSESFISLLKFTSFGAPGAFKFLGVEISQSSVRYKPNSQFLDTTLIHQSITGLYETRIDLSKLGED

SEQ ID NO: 21302 - protein, 922 aa, unidentified
  REGION 1..922: note = Cas Enzyme sequence
RGNRDFAWLTRNSDESIRPWNFEEIVDKASSAEDFINKMTNYDLYLPEEKVLPKHSLLYETFAVYNELTKVKFIAEGLTRYQFLDKKQKKDIFYTFFKAEDKRKVTEKDIIHYLHTVDGYDGIELEGIEKQFNASLSTYHDLLKIIKDKEFMDDDKNEAILENIVHTLTIFEDREMIKQRLAQYNSLFDEKVIKALTRRHYTGWGKLSAKLINGIRDKKSGKTILDYLIDDGEINRNFMQLIHDDGLSFKEIIQKAQVVGKTDDVKQVVQELPGSPAIKKGILQSIKIVDELVKVMGHAPESIVIEMARENQTTAKGKKNSQQRYKRIEDALKNLAPGLDSNILKENPTDNVQLQNDRLFLYYLQNGRDMYTGKPLEINQLSNYDIDHIIPQAFIKDNSLDNRVLTSSKENRGKSDNVPSLEVVEKMKAFWQQLLDSKLISERKFNNLTKAERERGGLNELDKVGFIKRQLVETRQITKHVAQILDAQFNKEVTEKDKKNRNVKIITLKSNLVSNFRKEFGLYKVREINDYHHAHDAYLNAVLAKAILKKYPKLEPEFVYGDYQKYDLKRYISISRDPKEVEKATQKYFFYSNLLNFFKEEVHYADGTIVRRANIEYSKDTGEIAWNKEKDFATIKKVLSLPQVNIVKKTEEQTVGQNGGLFDNNIVSKKKVVDASKLIPIKSDLLPEKYGGYARPTIAYSVLVTYKQNNKIKNTMIGIPVLTKLEFERNPNLYLKNLGINNVLHIIKLVKYTVLEFKHKYGTYRRFIVSNQELKRANQIFVTTKQMKLISQYITLDKNEHDSLLKNNQQLTQSIWNQFLEFMLATDLVNSKQYEELIATNIKTIEECRSIMNRVVTTLSFTNINAGQKKIIFDDTLSLPIKRWQFTDSNKMVKKIMDATLIHQSITGLYETRIDLSKLGED

SEQ ID NO: 21303 - protein, 1368 aa, unidentified
  REGION 1..1368: note = Cas Enzyme sequence
MYRQKKMKVLGNTDKHFIKKNLIGALLFDEGTTAKDRRLKRTARRRYTRRHNRLRYLQEIFVEEMSKVDESFFLRLEDSFLVPEEKRGSKYPIFPTLSEEKEYHKNFPTIYHLRKHLADSKEKADLRLIYLALAHMIKYRGHFLYEESFDIKNNDIQKIFNEFLSIYDNTFEGNSLSGQNSQVEAIFTDKITKSAKRERILKLFPEKESIGLFAEFLKLILGNQADFKKHFNLEEKAPLHFSKDTYDEDLENLLGQIGDDYTDLFLVAKKLYDAILLSGILTVTDSTTQAPLSSSMIDRYENHQKDLAILKQFIKNNLTEKYDEVFSDQSKDGYAGYVDGKTTQEAFYKYIKKLLSAFDGADYFLDKIEREDFLRKQRIFDNGSIPYQIHLQEMNAILHRQGEHYSFLKENREKIEKILTFRIPYYVGPLARGNRDFAWLTRNSDDAIRPWNFEEIVDKSSSAEDFIHRMTNYDLYLPEEKVLPKHSLLYETFTVYNELTKVKFIAEGMRDYQFLDSGQKKEIINKLFKEKRKVTEDDIIDCLQKLDNYDGIELKGIEKQFNASLSTYHDLLKIIRDKEFMDDPKNGDILENVIHTLTIFEDREMIKQRLAQYNSIFDEKVIKALSRKQYTGWGKLSAKLINGIRDKQTGKTILDYLMDDGKSNRNFMQLIKDDGLSFTKIIDKAQVVGETDNLRQVVQNLPGSPAIKKGILQSIKIVDELVKVMGHAPESIVIEMARENQTTARGKKNSQQRYKRIEDSLKNLASGLDSNILKENPTDNIQLQNDRLFLYYLQNGKDMYTGKPLDINQLSSYDIDHIIPQAFIKDDSLDNRVLTSSKENRGKSDNVPSLEVVQKRKAFWQQLLDSKLISERKFNNLTKAERERGGLNEIDKVGFIKRQLVETRQITKHVAQILDARYNTEVNEKKQKIRNVKIITLKSNLVSNFRKEFRLYKVREINDYHHAHDAYLNAVVAKAILKKYPKLEPEFVYGDYQKYDLKRYISRFKDPKEIEKATEKYFFYSNLLNFFKEEVHYADGTIVKRENIEYSKDTGEIAWNKEKDFATIKKVLSLLQVNIVKKTEIQTHGLDRGKPKGLFNSNPSPKPLEDSKENLVPIKQELDPRKYGGYAGISNSYAVLVKAIIEKGAKKQRKTILEFQGISILDKINFEKNKENYLLEKGYKEILSTITLPKYSLFEFPDGTRRRLASILSTNNKRGEIHKGNELVLPEKYITLLYHAKNINKTLEPEHLEYVEKHRDEFANLLEFVLDFNEKYVGALKNGERIRQAFTDWETVDIKELCLSFIGPENSKNAGLFELTSQGSASDFEFLGVKIPRYRDYTPSSLLNSTLIHQSITGLYETRIDLSKLGEE

SEQ ID NO: 21304 - protein, 956 aa, unidentified
  REGION 1..956: note = Cas Enzyme sequence
FLLENKNKLLSILTFKIPYYVGPLAKGDNSRFAWIKRTTSQDVLDDNDEDTRNGKIRPWNYHKLINMDETRDAFITNLIGNDIILLNEKVLPKRSLIYEEVMLQNELTRVKYKDKYGKTHFFDSELRQEIINNLFKTSSKRVSSAMLLDYLENYTNLQAVEIVSGIEKGKSLNSTLKTYNDLKTIFSEELLDSEIYQKELEEIVKVITVFDDKKSIKNYLTKYFGHLEFLNEEKINQLSKLRYTGWGRYSAKLLLGIRDEDTGFNLLQFLRNDDENRNLSQLISDSTLSFDSTIKAIQSKSTVEDDVFEEIKKLAGSPAIKRGILNSIKIVDELVQIIGYPPQNIVIEMARENMTTEEGQKKAKTRKSKLESELKNIEDSVLDNGKVPHSDEQLQSEKLYLYYLQNGKDMYSLDKKGSPSPLYRDQLDQYEVDHIIPYSFLPIDSIDNKVLTHRENNQRKLNNIPDKETVANMKPFWEKLYNAKLISQTKYQRLTTSERTPDGVLTESMKAGFIERQLVETRQIIKHVARILDNRFSDTKIITLKSQLVTNFRNTFHIAKIRELNDYHHAHDAYLAVVVGQTLLKAYPKLAPELIYGHHAHFNRHEENKATIRKHLYSNIMRFFNNPESKVSKDIWDCNRDLPIIKDVIYNSQVNFVKRTMIKKGAFYKQNIIPKDSSVTVEKRFPIKNKRYLDPKLYGGYYERNSALSVFIIGQRFNKNNKLKVVKEFYDINIIDYPWFNTDPMSFFNDDSENGFLTKNNLQSVQTFYKIPKYSLIQKNDGTRMLFESTTNFHKATQFKLTESQNELFFHMRRLLTKTDFMDLKSEESIKESQDFITNHKKEFDNIVNGLFGYAEKQLGSKSLFTQAHEAYKLRKYPVVNLSEETIRYYYDNFLRLFSLTKSGTSSGYVVGLFEAPKLRNVDYKATKDESNATLIHQSITGLYETRIDLSKLGED

SEQ ID NO: 21305 - protein, 1392 aa, unidentified
  REGION 1..1392: note = Cas Enzyme sequence
MSNKSYSIGLDIGTNSVGWAVITDDYKVPSKKMKVLGNTDKHFIKKNLIGALLFDEGTTAEDRRLKRTARRRYTRRKNRLRYLQEIFSEEMSKVDSSFFHRLDDSFLVPEDKRGSKYPIFATLAEEKEYHKKFPTIYHLRKHLADSKEKTDLRLIYLALAHMIKYRGHFLYEESFDIKNNDIQKIFNEFISIYDNTFEGSSLSGQNAQVEAIFTDKISKSAKRERVLKLFPDEKSTGLFSEFLKLILGNQADFKKHFDLEEKAPLQFSKDTYDEDLENLLGQIGDDFADLFLVAKKLYDAILLSGILTVKDLSTKAPLSASMIERYENHQKDLAALKRFIQNNLQEKYDEVFSDQSKDGYAGYINGKTTQEAFYKYIKNLLSKFEGADYFLDKIEREDFLRKQRTFDNGSIPHQIHLQEMNAIIRRQGEHYPFLQENKEKIEKILTFRIPYYVGPLARGNCDFAWLTRNSDQAIRPWNFEEIVDQASSAEEFINKMTNYDLYLPEEKVLPKHSLLYETFAVYNELTKVKFIAEGLRDYQFLDSGQKKQIVNQLFKEKRKVTEKDIIQYLHNVDGYDGIELKGIEKQFNASLSTYHDLLKIIKDKEFMDDPKNEEILENIVHTLTIFEDREMIKQRLAQYASIFDKKVIKALTRRHYTGWGKLSAKLVNGICDKKTGKTILDYLIDDGYSNRNFMQLINDDALSFKDIIQKAQVVGKTNDVKQVVQELPGSPAIKKGILQSIKLVDELVKVIGHAPESIVIEIARENQTTARGKKNSQQRYKRIEEALKNLATGLDSNILKEYPTDNIQLQNDRLFLYYLQNGKDMYTGEPLDINQLSSYDIDHIVPQAFIKDDSLDNRVLTSSKDNRGKSDNVPSLEVVQKRKAFWQQLLDSKLISERKFNNLTKAERGGLDERDKVGFIRRQLVETRQITKHVAQILDAHFNTEMTEKDTKNRNVKIITLKSNLVSNFRKEFSLYKVREINDYHHAHDAYLNAVVAKAILKKYPKLEPEFVYGDYQKYDIKRYISRSKDPKEVEKATEKYFFYSNLLNFFKEEVHYADGTIVKRENIEYSKDTGEIAWNKEKDFATIKKVLSLPQVNIVKKTEIQTHGLDRGKPRGLFNSNPSPKPSEDRKENLVPIKQGLDPRKYGGYAGISNSYAVLVKAIIEKGAKKQQKTVLEFQGISILDKINFEKNKENYLLEKGYIKILSTITLPKYSLFEFPDGTRRRLASILSTNNKRGEIHKGNELVIPEKYTTLLYHAKNINKTLEPEHLEYVEKHRNDFAKLLEYVLNFNDKYVGALKNGERIRQAFIDWETVDIEKLCFSFIGPRNSKNAGLFELTSQGSASDFEFLGVKIPRYRDYTPSSLLNATLIHQSITGLYETRIDLSKLGED

SEQ ID NO: 21306 - protein, 987 aa, unidentified
  REGION 1..987: note = Cas Enzyme sequence
KKLLAGLEGADYFLEKIDREDFLRKQRTFDNGSIPYQIHLQEMRAILDKQAKFYPFLAKNKERIEKILTFRIPYYVGPLARGNSDFAWSIRKRNEKITPWNFEDIIDKESSAEAFINRMTSFDLYLPEEKVLPKHSLLYETFTVYNELTKVRFIAESMRDYQFLDSKQKKDIVRLYFKNKRKVTDKDIIEYLHAIDGYDGIELKGIEKQFNSSLSTYHDLLNIINDKEFLDDSSNEAIIEEIIHTLTIFEDREMIKQRLSKFENIFDKSVLKKLSRRHYTGWGKLSAKLINGIRDEKSGNTILDYLIDDGISNRNFMQLIHDDALSFKKKIKKAQIIGDKDNIKQVVQALPGSPAIKKGILQSIKIVDELVKVMGGRPESIVVEMARENQYTNQGKSNSQQRLKRLEESLKDLGSKILKENIPAKLSKIDNNALQNDRLYLYYLQNGKDMYTGEELDIDRLSNYDIDHIIPQAFLKDNSIDNKVLVSSASNRGKSDDVPSLEVVKKRKTLWYQLLKSKLISQRKFDNLTKAERGGLSPEDKAGFIQRQLVETRQITKHVARLLDERFNNKKDEDNKTLRTVKIITLKSTLVSQFRKDFELYKVREINDFHHAHDAYLNAVVASALLKKYPKLEPEFVYADYPKYNSFRERKSATEKVYFYSNIMNIFKKSIPLADGTVIDRPLIEVNEETGESVWNKESDLATVRRVLSYPQVNVVKKVEVQSGGFSKELVQPHGNSDKLIPRKTKKMIWDTKKYGGFDSPIVAYSVLVMAEREKGKSKKLKPVKELVGITIMEKESFEKNTIDFLERRGLRNIQDENIIQLPKFSLFELENGRRRLLASAKELQKGNEFILPNKLVKLLYHAKNIHNTLEPEHLEYVETHRADFGKILDVVSVFSEKYILAETNLKKIREIYHTNMDAEIDELVISFINLLTFTSIGAPATFKFFGHNIERKRYSSVAEILNATLIHQSVTGLYETRIDLGKLGED

SEQ ID NO: 21307 - protein, 1371 aa, unidentified
  REGION 1..1371: note = Cas Enzyme sequence
MIKKPYSIGLDIGTNTVGFAVITDDYKVPSKKMKVLGNTDKRFIKKNLIGALLFDEGTTAEARRLKRTARRRYTRRKNRLRYLQEIFFEEMSKLDSSFFHRLDDSFLIPEDKRASKYPIFATLGEEKEYHKQFPTIYHLRKYLADSKEKADLRLIYLALAHMIKYRGHFLYEDTFDIKNNDIQKIFNEFISIYDNTFEESSLSGQNAQVEAIFTDKISKSAKRESVLKLFPDEKSTGLFSEFLKLIVGNQADFKKHFNLEEKTSLQFSKDTYDEDLENLLGQIGDDFADLFVVAKKLYDAILLSGILTVTDPSTKAPLSASMIERYENHQKDLAALKQFIKNNLPEKFVEIFSDQSKDGYAGYIDGKTTQEAFYKYIKNLLSKFEGADYFLEKIEREDFLRKQRTFDNGSIPHQIHLQEMNAILRRQGEHYPFLKENREKIKKILTFRIPYYVGPLASGNSDFAWLTRNSDQAIRPWNFEEIVDKASSAEDFINKMTNYDLYLPEEKVLPKHSLLYETFAVYNELTKVKFIAEGLRDYQFFDSGQKKQIVNQLFKEKRKVTEKDIIHYLHNVDGYDGIELKGIEKQFNASLSTYHDLLKIIKDKEFMDDAKNEAILENIVHTLTIFEDREMIKQRLAQYDSLFDEKVIKALTRRHYTGWGKLSAKLINGICDKQTGNTILDYLIDDGKINRNFMQLINDDGLSFKEIIQKAQVFGKTDDVKQVVQELPGSPAIKKGILQSIKIVDELVKVMGHAPESIVIEMARENQTTARGKKNSQQRYKRIEDSLKILASGLDSNILKENPTDNIKLQNDRLFLYYLQNGKDMYTGEALDINQLSSYDIDHIIPQAFIKNDSLDNRVLTSSKDNRGKSDNVPSIEVVQKRKAFWQQLLDSKLISERKFNNLTKAERGGLDERDKVGFIKRQLVETRQITKHVAQILDARFNTEVNEKNQKIRTVKIITLKSNLVSNFRKEFRLYKVREINDYHHAHDAYLNAVVAKAILKKYPKLEPEFVYGDYQKHDLKRYISRSKDPKEIEKATEKYFFYSNLLNFFKEEVHYADGTIVKRENIEYSKDTGEIAWNKEKDFAIVKKVLSLPQVNIVKKREVQTGGFSKESILPKGNSDKLIPRKTKDILWDTTKYGGFDSPVIAYSILLIADIEKGKAKKLKTVKTLVGITIMEKAAFEKNPITFLENKGYHNVRKENILCLPKYSLFELENGRRRLLASAKELQKGNEIVLPVYLTTLLYHSKNVHKLDEPGHLEYIQKHRNEFKDLLNLISEFSQKHVLADANLEKIKNLYADNEQADIEILVNSFINLLTFTALGAPAAFKFFGKDVDRKRYTTVSEILNATLIHQSITGLYETRIDLSKLGED

SEQ ID NO: 21308 - protein, 1363 aa, unidentified
  REGION 1..1363: note = Cas Enzyme sequence
MTKPYSIGLDIGTNSVGWAVITDDYKVPSKKMKVLGNTSKKYIKKNLLGALLFDSGITAEGRRLKRTARRRYTRRRNRILYLQEIFSTEMATLDDAFFQRLDDSFLVPDDKRDSKYPIFGNLVEEKAYHDEFPTIYHLRKYLADSTKKADLRLVYLALAHMIKYRGHFLIEGEFNSKNNDIQKNFQDFLDTYNAIFESDLSLENSKQLEEIVKDKISKSAKKDRILKLFPGEKNSGIFSEFLKLIVGNQADFKKYFNLDEKAPLHFSKESYDEDLETLLGYIGDDYSDVFLKAKKLYDAILLSGILTVTDNGTEAPLSSAMIMRYKEHEEDLALLKAYIRNISLETYNEVFKDDTKNGYAGYIDGKTSQEDFYVYLKKLLAGLEGADYFLEKIDREDFLRKQRTFDNGSIPYQIHLQEMRAILDKQAKFYPFLAKNKERIEKILTFRIPYYVGPLARGNSDFAWSIRKRNEKITPWNFEDVIDKESSAEAFINRMTSFDLYLPEEKVLPKHSLLYETFTVYNELTKVRFIAESMRDYQFLDSKQKKDIVRLYFKNKRKVTDKDIIEYLHAIDGYDGIELKGIEKQFNSSLSTYHDLLNIINDKEFLDDSSNEAIIEEIIHTLTIFEDREMIKQRLSKFENIFDKSVLKKLSRRHYTGWGKLSAKLINGIRDEKSGNTILDYLIDDGVSNRNFMQLIHDDALSFKKKIKKAQIIGDKDNIKQVVQALPGSPAIKKGILQSIKIVDELVKVMGGRPESIVVEMARENQYTNQGKSNSQQRLKRLEESLKDLGSKILKENIPAKLSKIDNNALQNDRLYLYYLQNGKDMYTGEELDIDRLSNYDIDHIIPQAFLKDNSIDNKVLVSSASNRGKSDDVPSLEVVKKRKTLWYQLLKSKLISQRKFDNLTKAERGGLSPEDKAGFIQRQLVETRQITKHVARLLDERFNNKKDEDNKTLRTVKIITLKSTLVSQFRKDFELYKVREINDFHHAHDAYLNAVVASALLKKYPKLEPEFVYGDYPKYNSFRERKSATEKVYFYSNIMNIFKKSIPLADGTVIDRPLIEVNEETGESVWNKESDLATVRRVLSYPQVNVVKKVEVQSGGFSKELVQPHGNSDKLIPRKTKKMIWDTKKYGGFDSPIVAYSVLVMAEREKGKSKKLKPVKELVGITIMEKESFEKNTIDFLERRGLRNIQDENIIPLPKFSLFELENGRRRLLASAKELQKGNEFILSNKLVKLLYHAKNIHNTLEPEHLEYVETHRADFGKILDVVSVFSEKYILAETNLKKIREIYHTNMDAEIDELVISFINLLTFTSIGAPATFKFFGHNIERKRYSSVAEILNATLIHQSVTGLYETRIDLGKLGED

SEQ ID NO: 21309 - protein, 1363 aa, unidentified
  REGION 1..1363: note = Cas Enzyme sequence
MTKPYSIGLDIGTNSVGWAVITDDYKVPSKKMKVLGNTSKKYVKKNLLGALLFESGITAEGRRLKRTARRRYTRRRNRILYLQEIFSREMAKIDESFFQRLDDSFLVPDEKRDSKYPIFGNLVKEKTYHDEFPTIYHLRKYLADSSKKADLRLVYLALAHMIKYRGHFLIEGDFNSRNNDIKKNFQDFLDSYNAIFESDLSLENSKQLEEIVKDKISKSAKKDRLLKLFPGEKNSGIFSEFLKLIVGNQADFRKYFNLDEKTSLHFSKESYDEDLETLLGHIGDDYSDVFLKAKKLYDAILLSGILTVTDNEIEAPLSSAMIMRYKEHEEDLALLKAYIRNISLETYNEVFKDDTKNGYAGYIDGKTNQEDFYVYLKKLLTGLEGADYFLEKINREDLLRKQRTFDNGSIPYQIHLQEMRAIIDKQAKFYPFLAKNKEKIEKILTFRIPYYVGPLARGNSDFAWSIRKRHEKITPWNFEDVIDKESSAEAFINRMTSFDLYLPEEKVLPKHSLLYETFTVYNELTKVRFIAEGMRDYQFLDSKQKKDIVRLYFKGKRKVTDKDIIDYLHAIDGYDGIGLKGIEKQFNSSLSTYHDLLNIINEKEFLDDSSNEAIIEEIIHTLTIFEDREMIKQRLSKFDNIFDKSVLKKLSRRHYTGWGKLSAKLINGIRDEKSGKTILDYLIDDGISNRNFMQLIHDDTLSFKKKIQKAQIIGDQDNIKQVVQSLPGSPAIKKGILQSIKIVDELVKVMGRNPESIVVEMARENQYTNQGKSNSQQRLKRLEESLKELGSKILKENVPAKLFKIDNNALQNERLYLYYLQNGKDMYTGDDLDIDRLSNYDIDHIIPQAFLKDNSIDNKVLVSSASNRGKSDDVPSLDVVKKRKTFWHQLLKSKLISQRKFDNLTKAERGGLSPEDKAGFIQRQLVETRQITKHVARLLDERFNNKKDEDNKALRTVKIITLKSSLVSQFRKDFELYKVREINDFHHAHDAYLNAVVASALLKKYPKLEPEFVYGDYPKYNSFRERKSATEKVYFYSNIMNIFKKSITLADGTVIDRPLIEVNEETGESVWNKESDLATVRRVLSYPQVNVVKKVEVQSGGFSKESVQPHGNSDKLIPRKTKKMVWDTKKYGGFDSPIVAYSVFVMAEREKGKSKKLKPVKELVGITIMEKESFEKNKIDFLERRGLRNIQDENIIQLPKFSLFELENGRRRLLASAKELQKGNEFILPNKLVKLLYHAKNIHNTLEPEHLEYVETHRADFGEILDIVSVFSEKYILAEANLEKIKEIYRKNVDAEISELVISFINLLTFTSIGAPATFKFFGNNIERRRYSSTAEILNATLIHQSVTGLYETRIDLGKLGED

SEQ ID NO: 21310 - protein, 1007 aa, unidentified
  REGION 1..1007: note = Cas Enzyme sequence
MTKPYSIGLDIGTNSVGWAVITDDYKVPSKKMKVLGNTSKKYIKKNLLGALLFDSGITAEGRRLKRTARRRYTRRRNRILYLQEIFSTEMATLDDAFFQRLDDSFLVPDDKRDSKYPIFGNLVEEKAYHDEFPTIYHLRKYLADSTKKADLRLVYLALAHMIKYRGHFLIEGEFNSKNNDIQKNFQDFLDTYNAIFESDLSLENSKQLEEIVKDRISKSAKKDRILKLFPGEKNSGIFSEFLKLIVGNQADFKKYFNLDEKAPLHFSKESYDEDLETLLGYIGDYYSDVFFKAKKLYDAILLSGILTVTDNGTEAPLSSAMIMRYKEHEEDLALLKAYIRKISLETYNEVFKDDTKNGYAGYIDGKTSQEDFYVHLKKLLAGLEGADYFLEKIDREDFLRKQRTFDNGSIPYQIHLQEMRAILDKQAKFYPFLAKNKERIEKILTFRIPYYVGPLARGNSDFAWSIRKRNEKITPWNFEDVIDKESSAEAFINRMTSFDLYLPEEKVLPKHSLLYETFNVYNELTKVRFIAESMRDYQFLDSKQKKDIVRLYFKNKRRVTDKDIIEYLHAIDGYDGIELKGIEKQFNSSLSTYHDLLNIINEKEFLDDSSNEAIIEEIIHTLTIFEDREMIKQRLSKFENIFDKSVLKKLSRRHYTGWGKLSAKLINGIRDEKSGNTILDYLIDDGVSNRNFMQLIHDDALSFKKKIKKAQIIGDKDNIKQVVQALPGSPAIKKGILQSIKIVDELVKVMGRRPESIVVEMARENQYTNQGKSNSQQRLKRLEESLKELGSKILKENIPAKLSKIDNNALQNDRLYLYYLQNGKDMYTGEELDIDRLSNYDIDHIIPQAFLKDNSIDNKVLVSSASNRGKSDDVPSLEVVKKRKTLWYQLLKSKLISQRKFDNLTKAERGGLSPEAKAGFIQRQLVETHQITKHVARLLDERFNNKKDEDNKTLRTVKIITLKSSLVSQFRKDFELYKVREINDFHHAHDAYLNAVVASALLKNTLN

SEQ ID NO: 21311 - protein, 1363 aa, unidentified
  REGION 1..1363: note = Cas Enzyme sequence
MTKPYSIGLDIGTNSVGWAVITDDYKVPSKKMKVLGNTSKKYIKKNLLGALLFDSGITAEGRRLKRTARRRYTRRRNRILYLQEIFSTEMATLDDAFFQRLDDSFLVPDDKRDSKYPIFGNLVEEKAYHDEFPTIYHLRKYLADSTKKADLRLVYLALAHMIKYRGHFLIEGEFNSKNNDIQKNFQDFLDTYNAIFESDLSLENSKQLEEIVKDKISKSAKKDRILKLFPGEKNSGIFSEFLKLIVGNQADFKKYFNLDEKAPLHFSKESYDEDLETLLGYIGDDYSDVFLKAKKLYDAILLSGILTVTDNGTEAPLSSAMIMRYKEHEEDLALLKAYIRNISLETYNEVFKDDTKNGYAGYIDGKTSQEDFYVYLKKLLAGLEGADYFLEKIDREDFLRKQRTFDNGSIPYQIHLQEMRAILDKQAKFYPFLAKNKERIEKILTFRIPYYVGPLARGNSDFAWSIRKRNEKITPWNFEDIIDKESSAEAFINRMTSFDLYLPEEKVLPKHSLLYETFTVYNELTKVRFIAESMRDYQFLDSKQKKDIVRLYFKNKRKVTDKDIIEYLHAIDGYDGIELKGIEKQFNSSLSTYHDLLNIINDKEFLDDSSNEAIIEEIIHTLTIFEDREMIKQRLSKFENIFDKSVLKKLSRRHYTGWGKLSAKLINGIRDEKSGNTILDYLIDDGISNRNFMQLIHDDALSFKKKIKKAQIIGDKDNIKQVVQALPGSPAIKKGILQSIKIVDELVKVMGGRPESIVVEMARENQYTNQGKSNSQQRLKRLEDSLKDLGSKILKENIPAKLSKIDNNALQNDRLYLYYLQNGKDMYTGEELDIDRLSNYDIDHIIPQAFLKDNSIDNKVLVSSASNRGKSDDVPSLEVVKKRKTLWYQLLKSKLISQRKFDNLTKAERGGLSPEDKAGFIQRQLVETRQITKHVARLLDERFNNKKDEDNKTLRTVKIITLKSTLVSQFRKDFELYKVREINDFHHAHDAYLNAVVASALLKKYPKLEPEFVYGDYPKYNSFRERKSATEKVYFYSNIMNIFKKSIPLADGTVIDRPLIEVNEETGESVWNKESDLATVRRVLSYPQVNVVKKVEVQSGGFSKESVQPHGNSDKLIPRKTKKMIWDTKKYGGFDSPIVAYSVLVMAEREKGKSKKLKPVKELVGITIMEKESFENNTIDFLERRGFRNIQDENIIPLPKFSLFELENGRRRLLASAKELQKGNEFILPNKLVKLLYHAKNIHNTLEPEHLEYVETHRADFEKILDVVSVFSEKYILAETNLKKIREIYHTNMDAEIDELVISFINLLTFTSIGAPATFKFFGHNIERKRYSSVAEILNATLIHQSVTGLYETRIDLGKLGED

SEQ ID NO: 21312 - protein, 1010 aa, unidentified
  REGION 1..1010: note = Cas Enzyme sequence
LLAEFEGADYFLEKIDREDFLRKQRTFDNGSIPYQIHLQEMRAILDKQAKFYPFLAKNKERIEKILTFRIPYYVGPLARGNSDFAWSIRKRNEKITPWNFEDVIDKESSAEAFINRMTSFDLYLPEEKVLPKHSLLYETFNVYNELTKVRFIAESMRDYQFLDSKQKKDIVRLYFKDKRKVTDKDIIEYLHAIYGYDGIELKGIEKQFNSSLSTYHDLLNIINDKEFLDDSSNEAIIEEIIHTLTIFEDREMIKQRLSKFENIFDKSVLKKLSRRHYTGWGKLSAKLINGIRDEKSGNTILDYLIDDGISNRNFMQLIHDDALSFKKKIQKAQIIGDEDKGNIKEVVKSLPGSPAIKKGILQSIKIVDELVKVMGGRKPESIVVEMARENQYTNQGKSNSQQRLKRLEKSLKELGSKILKENIPAKLSKIDNNALQNDRLYLYYLQNGKDMYTGEELDIDRLSNYDIDHIIPQAFLKDNSIDNKVLVSSASNRGKSDDFPSLEVVKKRKTFWYQLLKSKLISQRKFDNLTKAERGGLSPEAKAGFIQRQLVETRQITKHVARLLDEKFNNKKDENNRAVRTVKIITLKSTLVSQFRKDFELYKVREINDFHHAHDAYLNAVIASALLKKYPKLEPEFVYGDYPKYNSFRERKSATEKVYFYSNIMNIFKKSISLADGRVIERPLIEVNEETGESVWNKESDLATVRRVLSYPQVNVVKKVEEQNHGLDRGKPKGLFNANLSSKPKPNSNENLVGAKEYLDPKKYGGYAGISNSFAVLVKGTIEKGAKKKITNVLEFQGISILDRINYRKDKLNFLLEKGYKDIELIIELPKYSLFELSDGSRRMLASILSTNNKRGEIHKGNQIFLSQKFVKLLYHAKRISNTINENHRKYVENHKKEFEELFYYILEFNENYVGAKKNGELLKSAFQSWQNHSIDELCSSFIGPTGSERKGLFELTSRGSAADFEFLGVKIPRYRDYTPSSLLKDATLIHQSVTGLYETRIDIAKLGEG

SEQ ID NO: 21313 - protein, 1175 aa, unidentified
  REGION 1..1175: note = Cas Enzyme sequence
LDSYNAIFESDLSLENSKQLEEIVKDKISKSAKKDRLLKLFPGEKNSGIFSEFLKLIVGNQADFRKYFNLDEKTSLHFSKESYDEDLETLLGHIGDDYSDVFLKAKKVYDAILLSGILAVTDNETEAPLSSAMIMRYKEHEEDLALLKAYIRKISLETYNEVFKDDTKNGYAGYIDGKTNQEDFYVYLKKLLTGLEGADYFLEKINREDLLRKQRTFDNGSIPYQIHLQEMRAIIDKQAKFYPFLAKNKEKIEKILTFRIPYYVGPLARGNSDFAWSIRKRHEKITPWNFEDVIDKESSAEAFINRMTSFDLYLPEEKVLPNHSLLYETFTVYNELTKVRFIAEGMRDYQFLDSKQKKDIVRLYFKGKRKVTDNDIIDYLHAIDGYDGIELKGIEKQFNSSLSTYHDLLNIINEKEFLDDSSNEAIIEEIIHTLTIFEDREMIKQRLSKFDNIFDKSVLKKLSRRHYTGWGKLSAKLINGIRDEKSGKTILDYLIDDGISNRNFMQLIHDDTLSFKKKIQKAQIIGDQDNIKQVVQSLPGSPAIKKGILQSIKIVDELVKVMGRNPESIVVEMARENQYTNQGKSNSQQRLKRLEESLKELGSKILKENVPAKLSKIDNNSLQNERLYLYYLQNGKDMYTGDDLDIDRLSNYDIDHIIPQAFLKDNSIDNKVLVSSASNRGKSDDVPSLDVVKKRKTFWHQLLKSKLISQRKFDNLTKAERGGLSPEDKAGFIQRQLVETRQITKHIARLLDERFNNKKDEDNKALRTVKIITLKSSLVSQFRKDFELYKVREINDFHHAHDAYLNAVVASALLKKYPKLEPEFVYGDYPKYNSFRERKSATEKVYFYSNIMNTFKKSITLADGTVIDRPLIEVNEETGESVWNKESDLATVRRVLSYPQVNVVKKVEVQSGGFSKELVQPHGNSDKLIPRKTKKMLWDTKKYGGFDSPVVAYSVLVMAEREKGKSKKLKPVKELIGITIMEKESFEKNTVDFLERRGLRNIQVENIIQLPKFSLFELENGRRRLLASAKELQKGNEFILPDKLVKLLYHAKNIYNTLEPEHLEYVETHRTDFGKILDTVSVFSEKYILAEANLEKMKEIYRKNVDTEIDELVTSFINLLTFTSIGAPATFKFFGRSIERRRYSSIAEILNATLIHQSVTGLYETRIDLGKLGED

SEQ ID NO: 21314 - protein, 1384 aa, unidentified
  REGION 1..1384: note = Cas Enzyme sequence
MLFNKCIIFSINLDFSNKEKCMTKPYSIGLDIGTNSVGWAVITDSYKVPSKKMKVLGNTSKKYVKKNLLGALLFESGITAEGRRLKRTARRRYTRRRNRILYLQEIFSTEMAKVDESFFQRLDDSFLVPDDKRDSKYPIFGNLVKEKTYHDEFPTIYHLRKYLADSSKKADLRLVYLALAHMIKYRGHFLIEGDFNSRNNDIKKNFQDFLDSYNAIFESDLSLENSKQLEEIVKDKISKSAKKERLLKLFPREKNSGIFSEFLKLIVGNQADFRKFFNLDEKTSLHFSKESYDEDLETLLGHIGDDYSDVFLKAKKVYDAILLSGILAVTDNETEAPLSSAMIMRYKEHEEDLALLKAYIRNISLETYNEVFKDNTKNGYAGYIDGKTSQEDFYVYLKKLLAGLEGADYFLEKIDREDFLRKQRTFDNGSIPYQIHLQEMRAILDKQAKFYPFLAKNKERIEKILTFRIPYYVGPLARGNSDFAWSIRKRNEKITPWNFEDVIDKESSAEAFINRMTSFDLYLPEEKVLPKHSLLYETFTVYNELTKVRFIAEGMKDYQFLDSKQKKDIVRLYFKGKRKVTDKDIIEYLHAIDGYDGIELKGIEKQFNSSLSTYHDLLNIINDKEFLDDSSNETFIEEIIHTLTIFEDREMIKQRLSKFDNIFDKSVLKKLSRRHYTGWGKLSAKLINGIRDEKSGNTILDYLIDDGVSNRNFMQLIHDDALSFKKKIKKAQIIGDKDNIKQVVKSLPGSPAIKKGILQSIKIVDELVKVMGREPESIVVEMARENQYTNQGKSNSQQRLKRLEESLKGLGSKILKENVPTRLSKIDNNALQNDRLYLYYLQNGKDMYTGEELDIDRLSNYDIDHIIPQAFLKDNSIDNKVLVSSASNRGKSDDVPSLEVVKKRKTLWYQLLKSKLISQRKFDNLTKAERGGLSPEDKAGFIQRQLVETRQITKHVARLLDEKFNNKKDENNRAVRTVKIITLKSSLVSQFRKDFELYKVREINDSHHAHDAYLNAVVASALLKKYPKLEPEFVYGDYPKYNSFRERKSATEKVYFYSNIMNIFKKSISLADGTVIERPLIEVNVETGESVWNKESDLATVRRVLSYPQVNVVKKVEVQSGGFSKELVQPHGNSDKLIPRKTKKMIWDTKKYGGFDSPIVAYSVLVMAEREKGKSKKLKPVKELVGITIMEKESFENNTIDFLERRGFRNIQDENIILLPKFSLFELENGRRRLLASAKELQKGNEFILPNKLVKLLYHAKNIHNTLEPEHLEYVESHRADFGKILDVVSVFSEKYILAEAKLEKIKEIYRKNIDTEIQEMAIAFINLLTFTSIGAPATFKFFGHNIERKRYSSVAEILNATLIHQSVTGLYETRIDLGKLGED

SEQ ID NO: 21315 - protein, 1392 aa, unidentified
  REGION 1..1392: note = Cas Enzyme sequence
MNNNNYSIGLDIGTNSVGWAVITDDYKVPSKKMKVLGNTDKHFIKKNLIGALLFDEGTTAEDRRLKRTARRRYTRRKNRLRYLKEIFSEEMSKVDSSFFHRLDDSFLVPEDKRGSKYSIFATLAEEKEYHKKFPTIYHLRKHLADSKEKTDLRLIYLALAHMIKYRGHFLYEESFDIKNNDIQKIFSEFISIYDNTFEGSSLSGQNAQVEAIFTDKISKSAKRERILKLFAYEKPTGLFSEFLKLIVGNQAEFKKHFDLEEKAPLQFSKDTYDEDLENLLGQIGDDFADLFLVAKKLYDAILLSGILTVKDLSTKAPLSASMIERYENHQKDLATLKQFIQNNLQEKYDEVFSDQSKDGYAGYINGKTTQEAFYKYIKNLLSKFEGADYFLDKIEREDFLRKQRTFDNGSIPHQIHLQEMNAIIRRQGEHYPFLQENKEKIEKILTFRIPYYVGPLARGNGDFAWLTRNSDQAIRPWNFEEIVDQASSAEDFINKMTNYDLYLPEEKVLPKHSLLYETFAVYNELTKVKFIAEGLRDYQFLDSGQKKQIVNQLFKEKRKVTKKDIIQYLHNVDGYDGIELKGIEKQFNASLSTYHDLLKIIKDKAFMDDPKNEEILENIVHTLTIFEDREMIKQRLAQYDSLFDKKGIKALTRRHYTGWGKLSAKLINGICDKKTGKTILDYLIDDGYSNRNFMQLINDDGFSFKDIIQKAQVVDKTNDVKQVVQELPGSPAIKKGILQSIKLVDELVKVMGHTPESIVIEMARENQTTARGKKNSQQRYKRIEDALKNLAPGLDSNILKEHPTDNIQLQNDRLFLYYLQNGKDMYTGEPLNINQLSSYDIDHIVPQAFIKDDSLDNRVLTSSKDNRGKSDNVPSLEVVQKRKAFWQQLLDSKLISERKFNNLTKAERGGLDERDKVGFIRRQLVETRQISKHVAQILDARFNTEVTEKDKKNRKVKIITLKSNLVSNFRKEFKLYKVREINDYHHAHDAYLNAVVAKAILKKYPKLEPEFVYGDYQKYDLKRYISRSKDPKDVEKATEKYFFYSNLLNFFKEEVHYADGTIVKRENIEYSNDTGEIAWNKEKDFATIKKVLSLPQVNIVKKTEIQTHGLDRGKPRGLFNSNPSPKPSEDSKENLVPIKQGLDPRKYGGYAGISNSYAVLVKAIIEKGAKKQQKTVLEFQGISILDKINFEKNKENYLLEKGYIKILSTITLPKYSLFEFPDGTRRRLASILSTNNKRGEIHKGNELVIPEKYTTLLYHAKNINKTLEPEHLEYVEKHRNDFAKLLESVLDFNDKYVGALKNGERIRQAFIDWETVDIEKLCFSFIGPRNSKNAGLFELTSQGSASDFEFLGVKIPRYRDYTPSSLLNATLIHQSITGLYETRIDLSKLGED

SEQ ID NO: 21316 - protein, 1353 aa, unidentified
  REGION 1..1353: note = Cas Enzyme sequence
MRKEYSIGLDIGTNSVGYAVIYHDFTVPAKKMKVSGNTDKKHIKKNLIGSVTFDEGSTASDRRLSRGARRRYTRRAYRLNTLQRFFDEPLSAVDPNFLARLKESFLVEGDKHYAKHPIFANEAQEKAYHEKFPTIYHLRKFLANTKEQADLRLVYLALAHIIKYRGHFLIDGQLNADNTSVKTIFNQFARAYNEAFALSQDFVAISEEQGMRVEEILNDVKLSKSGKVEKTLELFEGQARNGRLKQFLSLIVGNQGNFKGHLPIEEDAKLQFSSEKYDEDLETLLATVGNDFSDIFALAHNVYDAMLLSGILAGVDSETKAKLSESMVKRYETHQQDLDDFQAFMRLRCTDKEYKDMFKNREVTGYAQYIEGTLPSKSGYTKCASRADFYTYVKKVIEGKEGAEPFLEKISQDRFLLKQRTYENGAIPHQIQLKELEEIIDNQGQYYPFLLENKDKLKAILTFRIPYYVGPLAKHKKYSDFAWLERRSDQAITPWNMHEVIDVDRTAEKFIERMTNFDTYLPTESVLPKHSLIYEQYMIFNELTKVRYVSEQGRKLLLNTREKALIFDELFKKHRKVTRKRLETFFALEFNIEGVKVEGIEDSFNAGYATYHDLKKVEGMAEIMDDESYFDHIEQIIKILTIFEDRSIIERQLSQFDFLPEKTRKKLSRKKYTGWGSLSKKLLVGIRDRVSHKTILDYLKDDEHEGRPLNRNLMQLINEEGLSFKEYIATHQPEIGEASLQDIVAEIPGSPAIKKGILNSLKIVDELVEIMGYQPSNIVVEMARENQTTKRGKTLPREKGLKEAIDKLGSAILKEFPTDNKSLQNDRLYLYYLQNGKDIYTGNPLDIHRLSEYDIDHIIPQSYLKDDSIDNKVLTSREANRGKLDDVPSREVAEARIGFWTSLLKSGLISQRKFDNLTRGLRGGLTEEAKQGFIHRQLVETRQITKHVARILHQRFNQENMPEVNIISLKSRMVSTFRKSFGLYKVRDINDYHHAHDAYLNAVVSLSVLKVYPQISRDLIYGQFGKHQRVKGTQATKEFYLYKNILKFFDKENVIVESTGEVLWNQATVIPRVKKVLYKSQINFVKKAEVQRGEFYKASIVSKSDSDVLIPRKKGWDTKKYGGLMYPKVAYSLAVKYINGKGKETSEFIGVKITEQEKFEKNPNSFFKSHGITNILGYLKVVKYDLIEFSDGRRRLLASDKELQKANQLMLSEEWTKMVYHLKQCSETGNVDSKRHVESNLDKLDDIFEYLLEFVDKKIKLPKASEELKKAYNKRNKICDISTLSESMMGILLFCHRGAFPVKFKFFGENVGQKRYIGLSSCWQGVLIYQSITGLYETRVKLEDLSSWDGAQL

SEQ ID NO: 21317 - protein, 1398 aa, unidentified
  REGION 1..1398: note = Cas Enzyme sequence
METQASNQLISSHLKGYPIKDYFVGLDIGTSSVGWAVTNKAYELLKFRSHKMWGSRLFDEGESAVARRGFRSMRRRLERRKLRLKLLEELFADAMAQVDSTFFMRLRESKYHYEDKTTGHSSKHILFIDKNYTDQDYYKAYPTIYHLRAELMKDGTDDIRKLFLAVHHILKYRGNFLYEGASFDSNASTLDDVLKQALENITFNCFDCNSAISSIGQILMEAGKTKSDKAKAIEHLVDTYIATDTVDTSSKTQKDQVKEDKKRLKAFANLVLGLNASLIDLFGSVEELEEDLKKLQIAGDTYDDKRDELAKAWSDEIYIIDDCKSVYDAIILLSIKEPGLTISESKVKAFNKHKDDLAILKSLLKADRSIYNEMFKADEKGLHNYVHYIKQGRKEETSCNREEFYKYTKKVVEGLPDSKDKEYILSEIELQTLLPLQRIKDNGVIPYQLHLEELKTILDTCKSKFPFLNVVADGYSVADKLIKMLEFRIPYYVGPLNTHHNVDNGGFAWAVRKASGRVTPWNFDDKIDREKSAAAFIKNLTNKCTYLLGEDVLPKSSLLYSKFMLLNELNNVRIDGKPLETKVKAHLIKAVFKQDHKKMTKNRIEQFLKDNGYISKTHKHEITGLDGEIKNDLASYRDMVRILGTNFDVSMAEDIIADITIFGESKKMLRETLRNKFSSRLDDEAIKKLSKLRYRDWGRLSKKLLNGIDGCDKIGDGTSVTIIEAMRDFSYNLMELLGDKFSFMERIQEINAKLTEDQIVNPHDIIDDLALSPAVKRAVWQALRIVDEVVHIKKALPARIFVEVTRSNKAEKKKKDSRQKRLSDLYAAIKKDDALLSGLTNEEFGGLKSGLAKYDDAALRSKKLYLYYTQMGRCAYTGEVIDLSQLNTDNYDIDHIYPRSLTKDDSFDNLVLCKRTANAQKSDTYPISKEIQKAQKAFWIFLKQQGLISERKYERLTRITPLTADDLSGFIARQLVETNQSVKAATTLLRRLYPGVDVVFVKAENVTDFRHDNNFIKVRSLNHHHHAKDAYLNIVVGNVYHERFTRNFRAFFKKNGANRTYNLAKMFNYDVNCTNAKDGKAWDVKTSMDTVKKMMDSNDVRVTKRLLEQTGALADATIYKATVAGKAKDGAYIGMKTKSSVFADVSKYGGMTKIKNAYSIIVQYTGKKGEVIKEIVPLPIYLTNRNTTDQDLINYVASIIPQAKDISIIYGKLCINQLVKVNGFYYYLGGKTNSKFCIDNAIQVIVSNEWIPYLKVLEKFNNMRKDNKDLKANVVSTRALDNKHTIEVRIVEEKNIEFFDYLVSKLKMPIYQKMKGNKAAELSEKGYGLFKKMSLEEQSIHLIELLNLLTNQKTTFEVKPLGITASRSTVGSKISNQDEFKVINESITGLYSNEVTIV

SEQ ID NO: 21318 - protein, 1398 aa, unidentified
  REGION 1..1398: note = Cas Enzyme sequence
METQASNQLISSHLKGYPIKDYFVGLDIGTSSVGWAVTNKSYELLKFRSHKMWGSRLFDEGESAVARRGFRSMRRRLERRKLRLKLLEELFADAMAQVDPTFFMRLRESKYHYEDKTTGHSSKHILFIDENYTDQDYFKEYPTIYHLRAELMKDGTDDIRKLFLAVHHILKYRGNFLYEGATFDSNASTLDDVLKQAIENITFNCFDAKAAISSIGEILMEQGKTKSDKAKAIERLVDTYIITDEVNTSGKTQKEQVKEDKKRLKSFANLVLGLSASLTDLFGSVEDLDEDLKKLQIVGDTYDEKRDDLAKAWGDEIHIIDDCKSVYDAIILMSIKEPGITISESKVKAFNKHKDDLAILKSLLKADKSIYNTMFKADEKGLHNYVHYIKQGRTEETSCNREDFYKYTKKIVEELSDSKDKEYILSQIELQTLLPLQRIKDNGVIPYQLHLEELKAILAKCGPKFPFLNEVADGFSVAEKLIKMLEFRIPYYVGPLNTHHNVDNGGFAWAVRKASGRVTPWNFDDKIDREKSAAAFIKNLTNKCTYLLGEDVLPKSSLLYSEFMLLNELNNVRIDGKPLEKAVKEHLIEAVFKQDHKKMTKNRIEQFLKDNNYIPEKHKPEITGLDGEIKNDLASYRDMVRILGNNFDLSMAEEIIMDITIFGESKKMLRETLRKKFASCLDDEAIKKLTKLRYRDWGRLSQKLLNGIEGCDKAGDGTPETIIILMRNFSYNLMELLGDKFSFMERIQEINAKLTEGQIVNPHDIIDDLALSPAVKRAVWQALRIVDEVAHIKKALPARIFVEVTRSNKNEKKKKDSRQKRLSDLYAAIKKDDVLLNGLNNEIFGELKSSLAKYDDAALRSKKLYLYYTQMGRCAYTGEIIELSLLNTDNYDIDHIYPRSLTKDDSFDNLVLCKRTANAQKSDAYPISEEIQKTQKPFWTFLKQQGLISERKYERLTRITPLTADDLSGFIARQLVETNQSVKAATTLLRRLYPGVDVVFVKAENVTDFRHDNDFIKVRSLNHHHHAKDAYLNIVVGNVYHEKFTRNFRAFFKKNGANRTYNLAKMFNYDVNCTNAKDGKAWDVKTSMDTVKKMMDSNDVRVTKRLLEQTGALADATIYKATVAGKAKDGAYIGMKTKSSVFADVSKYGGMTKIKNAYSIIVQYTGKKGEVIKEIVPLPIYLTNRNTTDQDLINYVASIIPQAKDISIIYGKLCINQLVKVNGFYYYLGGKTNSKFCIDNAIQVIVSNEWIPYLKVLEKFNNMRKDNKDLKANVVSTRALDNKHTIEVRIVEEKNIEFFDYLVSKLKMPIYQKMKGNKAAELSEKGYSLFKKMSLEEQSIHLIELLNLLTNQKTTFEVKPLGITASRSTVGSKISNQDEFKVINESITGLYSNEVTIV

SEQ ID NO: 21319 - protein, 1398 aa, unidentified
  REGION 1..1398: note = Cas Enzyme sequence
METQASNQLISSHLKGYPIKDYFVGLDIGTSSVGWAVTNKAYELLKFRSHKMWGSRLFDEGESAVARRGFRSMRRRLERRKLRLKLLEELFADAMAQVDPTFFMRLRESKYHYEDKTTGHSSKHILFIDKNYNDQDYFKEYPTVYHLRSELMKSGTDDIRKLFLAVHHILKYRGNFLYEGATFDSNASTLDDVIKQALENITFNCFDSSAAIGSIGQILMELGKTKSDKAKAIERLVDTYIITDEVDTSGKTQKEQVKEDKKRLKSFANLVLGLSASLTDLFGSVEDLDEDLKKLQIIGDTYDERRDDLAKVWGDEIHIIDDCKSVYDAIILMSIKEPGLTISESKVKAFNKHKDDLAILKSLLKSDRSIYNAMFKVDEKGLHNYVHYIKQGRTEETSCNREDFYKYTKKVVEGLPDSKDKEYILSEIELQTLLPLQRIKDNGVIPYQLHLEELKAILAKCGPKFPFLNEVTDGFSVAEKLIKMLEFRIPYYVGPLNTHHNVDNGGFAWAVRKASGRVTPWNFDDKIDREKSAAAFIKNLTNKCTYLLGEDVLPKSSLLYSEFMLLNELNNVRIDGKPLEKAVKEHLIEAVFKQDHKKMTKNRIEQFLKDNNYIPEKHKPEITGLDGKIKNDLASYRDMVRILGNNFDLSMAEEIITDITIFGESKKMLRETLRKKFASCLDDEAIKKLSKLRYRDWGRLSKKLLNGIDGCDKAEDGTSVTIIEEMRDFSYNLMELLGDRFSFMERIQEINAKLTEGQIVNPHDIIDDLALSPAVKRAVWQALRIVDEIVHIKKTLPARIFVEVTRSNKAEKKKKDSRQKRLSDLYAAIKKDDALLSGLTNEEFGGLKSGLAKYDDAALRSKKLYLYYTQMGRCAYTGEVIDLSQLNTDNYDIDHIYPRSLTKDDSFDNLVLCKRTANAQKSDAYPISEEIQKTQKPFWTFLKQQGLISERKYERLTRITPLTADDLSGFIARQLVETNQSVKAATTLLRRLYPGVDVVFVKAENVTDFRHDNNFIKVRSLNHHHHAKDAYLNIVVGNVYHERFTRNFRAFFKKNGANRTYNLAKMFNYDVNCTNAKDGKAWDVKTSMDTVKKMMDSNDVRVTKRLLEQTGALADATIYKATVAGKAKDGAYIGMKTKSSVFADVSKYGGMTKIKNAYSIIVQYTGKKGEVIKEIVPLPIYLTNRNTTDQDLINYVASIIPQAKDISIIYGKLCINQLVKVNGFYYYLGGKTNSKFCIDNAIQVIVSNEWIPYLKVLEKFNNMRKDNKDLKANVVSTRALDNKHTIEVRIVEEKNIEFFDYLVSKLKMPIYQKMKGNKAAELSEKGYGLFKKMSLEEQSIHLIELLNLLTNQKTTFEVKPLGITASRSTVGSKISNQDEFKVINESITGLYSNEVTIV

SEQ ID NO: 21320 - protein, 1398 aa, unidentified
  REGION 1..1398: note = Cas Enzyme sequence
METQASNQLISSHLKGYPIKDYFVGLDIGTSSVGWAVTNKAYELLKFRSHKMWGSRLFDEGESAVARRGFRSMRRRLERRKLRLKLLEELFADAMAQVDPTFFMRLRESKYHYEDKTTGHSSKHILFIDKNYTDQDYYKAYPTIYHLRAELMKDGTDDIRKLFLAVHHILKYRGNFLYEGATFDSNASTLDDVIKQALENITFNCFDCNSAISSIGQILMEAGKTKSDKAKAIEHLVDTYIATDTVDTSSKTQKDQVKEDKKRLKAFANLVLGLNASLIDLFGSVEELEEDLKKLQITGDTYDDKRDELAKAWSDEIYIIDDCKSVYDAIILLSIKEPGLTISESKVKAFNKHKDDLAILKSLLKSDRSIYNTMFKVDEKGLHNYVHYIKQGRTEETSCNREDFYKYTKKVVEGLPDSKDKEYILSEIELQTLLPLQRIKDNGVIPYQLHLEELKVILAKCGPKFPFLNEVADGFSVAEKLIKMLEFRIPYYVGPLNTHHNVDNGGFAWAVRKASGRVTPWNFDDKIDREKSAAAFIKNLTNKCTYLLGEDVLPKSSLLYSEFMLLNELNNVRIDGKPLEKAVKEHLIEAVFKQDHKKMTKNRIEQFLKDNNYIPEKHKPEITGLDGEIKNDLASYRDMVRILGNNFDLSMAEEIITDITIFGESKKMLRETLRNKFSSRLDDEAIKKLSKLRYRDWGRLSRKLLNVIEGCDKAGDGTPETIIILMRNFSYNLMELLGDKFSFMERIQEINAKLIEGQIVNPHDIIDDLALSPAVKRAVWQALRIVDEIVHIKKTLPARIFVEVTRSNKAEKKKKDSRQKRLSDLYAAIKKDDALLSGLTNEEFGGLKSGLAKYDDAALRSKKLYLYYTQMGRCAYTGEVIDLSQLNTDNYDIDHIYPRSLTKDDSFDNLVLCKRTANAQKSDTYPISKEIQKAQKAFWIFLKQQGLISERKYERLTRITPLTADDLSGFIARQLVETNQSVKAATTLLRRLYPGVDVVFVKAENVTDFRHDNDFIKVRSLNHHHHAKDAYLNIVVGNVYHERFTRNFRAFFKKNGANRTYNLAKMFNYDVNCTNAKDGKAWDVKTSMDTVKKMMASNDVRVTKRLLEQSGALADATVYKAAVAEKAKDGAYIGMKTKSSVFADVSKYGGMTKIKNAYSIIVQYAGKKGEVVKEIVPLPIYLTNRNTTDQDLIDYVASIIPQAKDISIIYRKLCINQLVKVNGFYYYLGGKTNSKFCIDNAIQVIVSNEWIPYLKVLEKFNNMRKDNKDLKANVVSTRALDNKHTIEVRIVEEKNIEFFDYLVSKLKMPIYQKMKGNKAAELSEKGYGLFKKMSLEEQSIHLIELLNLLTNQKTTFEVKPLGITASRSTVGSKISNQDEFKVINESITGLYSNEVTIV

SEQ ID NO: 21321 - protein, 1398 aa, unidentified
  REGION 1..1398: note = Cas Enzyme sequence
METQASNQLISSHLKGYPIKDYFVGLDIGTSSVGWAVTNKAYELLKFRSHKMWGSRLFDEGESAVARRGFRSMRRRLERRKLRLKLLEELFADAMAQVDPTFFMRLRESKYHYEDKTTGHSSKHILFIDKNYTDQDYYKAYPTIYHLRAELMKDGTDDIRKLFLAVHHILKYRGNFLYEGATFDSNASTLDDVIKQALENITFNCFDCNSAISSIGQILMEAGKTKSDKAKAIEHLVDTYIATDTVDTSSKTQKDQVKEDKKRLKAFANLVLGLNASLIDLFGSVEELEEDLKKLQITGDTYDDKRDELAKAWSDEIYIIDDCKSVYDAIILLSIKEPGLTISESKVKAFNKHKDDLAILKSLLKSDRSIYNTMFKVDEKGLHNYVHYIKQGRTEETSCNREDFYKYTKKVVEGLPDSKDKEYILSEIELQTLLPLQRIKDNGVIPYQLHLEELKVILAKCGPKFPFLNEVADGFSVAEKLIKMLEFRIPYYVGPLNTHHNVDNGGFAWAVRKASGRVTPWNFDDKIDREKSAAAFIKNLTNKCTYLLGEDVLPKSSLLYSEFMLLNELNNVRIDGKPLEKAVKEHLIEAVFKQDHKKMTKNRIEQFLKDNNYIPEKHKPEITGLDGEIKNDLASYRDMVRILGNNFDLSMAEEIITDITIFGESKKMLRETLRNKFSSRLDDEAIKKLSKLRYRDWGRLSRKLLNVIEGCDKAGDGTPETIIILMRNFSYNLMELLGDRFSFMERIQEINDKLTEGQIVNPHDIIDDLALSPAVKRAVWQALRIVDEIVHIKKTLPARIFVEVTRSNKAEKKKKDSRQKRLSDLYAAIKKDDALLSGLTNEEFGGLKSGLAKYDDAALRSKKLYLYYTQMGRCAYTGEVIDLSQLNTDNYDIDHIYPRSLTKDDSFDNLVLCKRTANAQKSDTYPISKEIQKAQKAFWIFLKQQGLISERKYERLTRITPLTADDLSGFIARQLVETNQSVKAATTLLRRLYPGVDVVFVKAENVTDFRHDNDFIKVRSLNHHHHAKDAYLNIVVGNVYHERFTRNFRAFFKKNGANRTYNLAKMFNYDVNCTNAKDGKAWDVKTSMDTVKKMMASNDVRVTKRLLEQSGALADATVYKAAVAEKAKDGAYIGMKTKSSVFADVSKYGGMTKIKNAYSIIVQYAGKKGEVVKEIVPLPIYLTNRNTTDQDLIDYVASIIPQAKDISIIYRKLCINQLVKVNGFYYYLGGKTNSKFCIDNAIQVIVSNEWIPYLKVLEKFNNMRKDNKDLKANVVSTRALDNKHTIEVRIVEEKNIEFFDYLVSKLKMPIYQKMKGNKAAELSEKGYGLFKKMSLEEQSIHLIELLNLLTNQKTTFEVKPLGITASRSTVGSKISNQDEFKVINESITGLYSNEVTIV

SEQ ID NO: 21322 - protein, 1395 aa, unidentified
  REGION 1..1395: note = Cas Enzyme sequence
METQASNQLISSHLKGYPIKDYFVGLDIGTSSVGWAVTNKSYELLKFRSHKMWGSRLFDEGESAVARRGFRSMRRRLERRKLRLKLLEELFADAMVQVDPTFFMRLRESKYHYEDKTTGHSSKHILFIDKNYTDQDYYKAYPTIYHLRAELMKDGTDDIRKLFLAVHHILKYRGNFLYEGASFDSNASTLDDVLKQALENITFNCFDSSVAIGSIGQILMELGKTKSDKAKAIERLVDTYIITDEVDTSGKTQKEQVKEDKKRLKSFANLVLGLSASLTDLFGSVEDLDEDLKKLQIIGDTYDERRDDLAKVWGDEIHIIDDCKSVYDAIILLSIKEPGLTISESKVKAFNKHKDDLAILKSLLKSDRSIYNTMFKVDEKGLHNYVHYIKQGRTEETSCNREDFYKYTKKVVEGLPDSKDKEYILSEIELQTLLPLQRIKDNGVIPYQLHLEELKVILAKCGPKFPFLNEVADGFSVAEKLIKMLEFRIPYYVGPLNTHHNVDNGGFAWAVRKASGRVTPWNFDDKIDREKSAAAFIKNLTNKCTYLLGEDVLPKSSLLYSEFMLLNELNNVRIDGKPLEKAVKEHLIEAVFKQDHKKMTKNRIEQFLKDNNYIPEKHKPEITGLDGEIKNDLASYRDMVRILGNNFDLSMAEEIITDITIFGESKKMLRETLRNKFSSRLDDEAIKKLSKLRYRDWGRLSRKLLNVIEGCDKAGDGTPETIIILMRNFSYNLMELLGDKFSFMERIQEINAKLIEGQIVNPHDIIDDLALSPAVKRAVWQALRIVDEIVHIKKTLPARIFVEVTRSNKAEKKKKDSRQKRLSDLYAAIKKDDALLSGLTNEEFGGLKSGLAKYDDAALRSKKLYLYYTQMGRCAYTGEVIDLSQLNTDNYDIDHIYPRSLTKDDSFDNLVLCKRTANAQKSDTYPISKDIQKAQKAFWIFLKQQGLISERKYERLTRITPLTADDLSGFIARQLVETNQSVKAATTLLRRLYPGVDVVFVKAENVTDFRHDNNFIKVRSLNHHHHAKDAYLNIVVGNVYHERFTRNFRAFFKKNGANRTYNLAKMFNYDVNCTNAKDGKAWTVKTSMDTVKKMMDSNDVRVTKRVYEQKGQLSDINLTKASKVKADIYLPIKANDPIMSQNMKYGGYSDIKNAYYTIIEYSDKKNNSIKAFIPIPIFIATKTLTKQALLEYIKTVLPKANNLRIIYKKVYNDQLLKIDGFNYYLGGRSNDRFCIDNAIQLIVPLEIQFYIKLVEKFTAIISENKNIALKASSVKSRNPINNQVENITLEYTQKLFDYLVSKFNELIYLKMRGNKLTDVNNIGRKQFIKLSLEERCKALAELLNIFTNMNKKLSLSTINVSASRKVVNFKISSLDEFKIVNESITGLYSHEITIV

SEQ ID NO: 21323 - protein, 1395 aa, unidentified
  REGION 1..1395: note = Cas Enzyme sequence
MEMQTSKQLISSHLKEYPIKDYFVGLDIGTSSVGWAVTNKLYELLKFRSHKMWGSRLFDEAESAVGRRSFRSIRRRLERRKLRLKLLEELFADAMAQVDSTFFIRLHESKYHYEDKTTGHSSKHILFIDKDYTDQDYFKEYPTIYHLRAELMKSGTDDIRKLFLAVHHILKYRGNFLYEGATFDSNASTLDDVLKQALENITFNCFDCNSAISSIGQILMDASKTKSDKAKAIERLVDTYIATDTEDSSSKTQKEQVKEDKKRLKAFANLVLGLSASLTDLFGSVEELDDDLKKLQITGDTYDDKRDELAKVWGDEVHIIDDCKSVYDAIILMSIKEPGLTISESKVKAFNKHKEDLVILKSLLKTDRSIYNTMFKADEKGLHNYVHYIKQGRKEETSCNREDFYKYTKKIVEGLPDSKDKEYILSEIELQTLLPLQRIKDNGVIPYQLHLEELKTIFKTCGAKFPFLNEVADGYSVAEKLIKMLEFRIPYYVGPLNTYHNVEKGGFAWAVRKASGRVTPWNFDDKIDREKSAAAFIKNLTNKCTYLLGEDVLPKSSLLYSEFMLLNELNNIRIDGKPLETAVKEHLIEAVFKQDHKKMTKNRIEQFLQDNNYIPNKHKSDITGLDGEIKNDLKSYRDMVRILGTNFDISMAEDIIMDITIFGESKKMLRETLRNKFASRLDDEAIKKLSKLRYRDWGRLSKKLLNGIEGCDKAGDGTPETIIKLMRNFSYNLMELLGDKFSFMERIQELNDELTMGQVVDPHDIIDELGLSPAVKRAVWQALRIVDEVIHIKKALPSRIFVEVTRSNKAEKKKKDSRQKRLSDLYTAIKKDEALLNGLKDTEFDGLKLGLSNYDDAALRSKKLYLYYTQMGRCAYTGEVIDIALLNTDNYDIDHIYPRSLTKDDSFDNLVLCKRAANAQKSDTYPIAEGIQKDQKPFWNFLKQQGLISERKYERLTRNTPLTADDLSGFIARQLVETNQSVKAVTTLLRRLYPEIDVVFVKAENVTDFRHDNNFIKVRSLNHHHHAKDAYLNIVVGNVYHEKFTRNFRAFFKKNGANRTYNLAKMFNYDVKCTNAKDGKAWDVKTSMDIVKKMMDSNDVRVTKRIYEQKGQLADINLTKASKVKADIYLPIKGNDLIMSQNTKYGGYSDIKNAYYTIIEYKDKKNNSIKSFLPIPIFIATKNLTNQALLEYIKTILPKANNLRIIYKKVYNDQLLKIDGFNYYLGGRSNDRFCIDNAIQLIVPLEMQFYIKLVEKFIAIISENKNVALKASSVKSRNPLNNQVENISLEYTQKLFDYLVSKFNEPIYLKMRGNKLTDVDNIGRKEFIKLSLDERCKALAELLNIFTNMNKKLSLSTINVSVSRKVVNFKISSLDEFKIVNESVTGLYSNEITIV

SEQ ID NO: 21324 - protein, 1409 aa, unidentified
  REGION 1..1409: note = Cas Enzyme sequence
MSIINFQRRGLMETQASNQLISSHLKGYPIKDYFVGLDIGTSSVGWAVTNKAYELLKFRSHKMWGSRLFDEGESAVARRGFRSMRRRLERRKLRLKLLEELFADAMAQVDPTFFMRLRESKYHYEDKTTGHSSKHILFIDKNYNDQDYFKEYPTVYHLRSELMKSGTDDIRKLFLAVHHILKYRGNFLYEGATFDSNASTLDDVIKQALENITFNCFDCNSAISSIGQILMEAGKTKSDKAKAIEHLVDTYIATDTVDTSSKTQKDQVKEDKKRLKAFANLVLGLNASLIDLFGSVEELEEDLKKLQITGDTYDDKRDELAKAWSDEIYIIDDCKSVYDAIILMSIKEPGLTISESKVKAFNKHKDDLAILKSLLKADRSIYNEMFKADEKGLHNYVHYIKQGRKEETSCNREEFYKYTKKVVEGLPDSKDKEYILSEIELQTLLPLQRIKDNGVIPYQLHLEELKTILDTCKSKFPFLNVVADGYSVADKLIKMLEFRIPYYVGPLNTHHNVDNGGFAWAVRKASGRVTPWNFDDKIDREKSAAAFIKNLTNKCTYLLGEDVLPKSSLLYSEFMLLNELNNVRIDGKPLEKAVKEHLIEAVFKQDHKKMTKNRIEQFLKDNNYIPEKHKPEITGLDGEIKNDLASYRDMVRILGDGFDKSMAEEIITDITIFGESKKMLRETLRNKFSSRLDDEAIKKLSKLRYRDWGRLSKKLLNGIDGCDKAGDGTSVTIIEAMRDFSYNLMELLGDRFSFMERIQEINDKLTEGQIVNPHDIIDDLALSPAVKRAVWQALRIVDEIVHIKKALPARIFVEVTRSNKAEKKKKDSRQKRLSDLYAAIKKDDALLSGLTNEEFGGLKSGLAKYDDAALRSKKLYLYYTQMGRCAYTGEVIDLSQLNTDNYDIDHIYPRSLTKDDSFDNLVLCKRTANAQKSDTYPISKDIQKAQKPFWTFLKQQGLISERKYERLTRITPLTADDLSGFIARQLVETNQSVKAATTLLRRLYPGVDVVFVKAENVTDFRHDNNFIKVRSLNHHHHAKDAYLNIVVGNVYHERFTRNFRAFFKKNGANRTYNLAKMFNYDVNCTNAKDGKAWAVKTSMDTVKKMMDSNDVRVTKRLLEQTGALADVTIYKAIVAGKAKDGAYIGMKTKSSVFADVSKYGGMTKIKNAYSIIVQYTGKKGEVIKEIVPLPIYLTNRNTTDQDLINYVASIIPQAKDISIIYGKLCINQLVKVNGFYYYLGGKTNSKFCIDNAIQVIVSNEWIPYLKVLEKFNNMRKDNKDLKANVVSTRALDNKHTIEVRIVEEKNIEFFDYLVSKLKMPIYQKMKGNKAAELSEKGYGLFKKMSLEEQSIHLIELLNLLTNQKTTFEVKPLGITASRSTVGSKISNQDEFKVINESITGLYSNEVTIV

SEQ ID NO: 21325 - protein, 1407 aa, unidentified
  REGION 1..1407: note = Cas Enzyme sequence
MSIINFPRRVLMEMQTSKQFISSHLKEYPIKDYFVGLDIGTNSVGWAVTNKLYELLKFRSHKMWGSRLFDEGESAVGRRSFRSIRRRLERRKLRLKLLEELFADAMAQVDPTFFMRLRESKYHYEDKTTGHSSKHILFIDKDYTDQDYFKEYPTIYHLRAELMKSGTDDNRKLFLAVHHILKYRGNFLYEGATFDFNASTLDDVLKQALEKITFNCFDCNSAISAIGQILMDAGKTKSDKAKAIERLVDTYIATDTEDSSSKTQKEQVKEDKKRLKAFANLVLGLSASLTDLFGSVEELDDDLKKLQITGDTYDDKRDELAKVWGDEVHIIDDCKSVYDAIILMSIKEPGLTISESKVKAFNKHKEDLVILKSLLKTDRSIYNTMFKADEKGLHNYVHYIKQGRKEETSCNREDFYKYTKKVVEGLPDSKDKEYILSEIELQTLLPLQRIKDNGVIPYQLHLEELKTILKTCGAKFPFLNEVADGYSVAEKLIKMLEFRIPYYVGPLNTYHNVEKGGFAWAVRKASGRVTPWNFDDKIDREKSAAAFIKNLTNKCTYLLGEDVLPKSSLLYSEFMLLNELNNIRINGKPLEPGVKEHLIEAVFKQDHKKMTKNRIEQFLKDNNYIPKKHKPDITGLDGEIKNDLTSYRDMVRILGTNFDRSMAEDIIMDITIFGESKKMLRETLRNKFASHLDDETIKKLSKLRYRDWGRLSKKLLNGVEGCDKAGDGTPETIIELMRNFSYNLMELLGDKFSFMERIQEINDKLTEDQVVDPQDIIDELALSPAVKRAVWQALRIVDEVIHIKKALPSRIFVEVTRSNKTEKKKKDSRQKRLSDLYAAIKKDEALLSGLKETEFEGLKSGLANYDDAALRSKKLYLYYTQMGRCAYTGEVIELSQLNTDNYDIDHIYPRSLTKDDSFDNLVLCKRIANAQKSDTYPIAEKIQKAQKPFWTFLKQQGLISERKYERLTRNTPLTADDLSGFIARQLVETNQSVKAATTLLRRLYPEIDVVFVKAENVTDFRHDNNFIKVRSLNHHHHAKDAYLNIVVGNVYHEKFTRNFRSFFQKNGASRTYNLAKMFNYDVTCTNAKDGKAWDVKTSMNIVKKMMGSNDVRVTKRLLEQSGALADATVYKATVAAMAKDGAYIGMKTKSSVFADVTKYGGMTKIKNAYSIIVQYIGKKGEVVKEIVPLPIYLTNRNTTDQDLIDYVASITPEAKDISIIYRKLCINQLVKVNGFYYYLGGKTSNSICIDNAIQVLLSNEFLIYAKLLDKVNTLRKSDPSINIQNISTLSPFAKEQISITINDNLKFYDYLVEKLNSNIYIKMKGNKASDLIDIGREKFKGIDVSSQCILLLEILNMLTNMKTTYDIKLLGFSTSRTKIALKVSTLDEFKIINQSITGLYSSEITIV

SEQ ID NO: 21326 - protein, 1396 aa, unidentified
  REGION 1..1396: note = Cas Enzyme sequence
MEMQTSKQLISSHLKEYPIKDYFVGLDIGTSSVGWAVTNKLYELLKFRSHKMWGSRLFDEAESAVGRRSFRSIRRRLERRKLRLKLLEELFADAMAQVDSTFFIRLHESKYHYEDKTTGHSSKHILFIDKDYTDQDYFKEYPTIYHLRAELMKSGTDDIRKLFLAVHHILKYRGNFLYEGATFDSNASTLDDVLKQALENITFNCFDCNSAISSIGQILMDASKTKSDKAKAIERLVDTYIATDTEDSSSKTQKEQVKEDKKRLKAFANLVLGLSASLTDLFGSVEELDDDLKKLQITGDTYDDKRDELAKVWGDEVHIIDDCKSVYDAIILMSIKEPGLTISESKVKAFNKHKEDLVILKSLLKTDRSIYNTMFKADEKGLHNYVHYIKQGRKEETSCNREDFYKYTKKIVEGLPDSKDKEYILSEIELQTLLPLQRIKDNGVIPYQLHLEELKTIFKTCGAKFPFLNEVADGYSVAEKLIKMLEFRIPYYVGPLNTYHNVEKGGFAWAVRKASGRVTPWNFDDKIDREKSAAAFIKNLTNKCTYLLGEDVLPKSSLLYSEFMLLNELNNIRIDGKPLETAVKEHIIEAVFKQDHKKMTKNRIEQFLKDNNYIHNKHKPDITGIDGEIKNDLTSYRDMVRILGTNFDRSMAEDIIMDITIFGESKKMLRETLRNKFASHLDDETIKKLSKLRYRDWGRLSKKLLNGIEGCDKAGDGTPETIIELMRNFSYNLMELLGDKFSFMERIQEINDKLTEGQVVDPQDIIDELALPPAVKRAVWQALRIVDEVIHIKKALPSRIFVEVTRSNKTEKKKKDSRQKRLSDLYAAIKKDEALLSGLKDTEFEGLKSGLASYDDAALRSKKLYLYYTQMGRCAYTGNIIDLNLLNTDNYDIDHIYPRSLTKDDSFDNLVLCERTANAKKSDTYPIDNTIQTNQKAFWSFLKHQGLISERKYERLTRNTPLTADDLSGFIARQLVETNQSVKAATTLLRRLYPEIDVVFVKAENVTDFRHDNNFIKVRSLNHHHHAKDAYLNIVVGNVYHEKFTRNFRAFFKKNGANRTYNLAKMFNYDVKYTNAKDGKAWDIKTSMDIVKKMMDSNDVRVTKRLLEQSGALADATVYKATVAAKANDGAYIGMKTKSSVFADVTKYGGMTKIKNAYSIIVQYIGKKGEVVKEIVPLPIYLTNRNITDQDLIDYVASITPEAKDISIIYRKLCINQLVKVNGFYYYLGGKTSNSICIDNAIQVLLSNEFLIYAKLLDKVNTLRKSDPSINIQNISTLSPFAKEQISITINDNLKFYDYLVEKLNSNIYIKMKGNKASDLIDIGREKFKGIDVSSQCILLLEILNMLTNMKTTYDIKSLGFSTSRTKIALKVSTLDEFKIINQSITGLYSSEITIV

SEQ ID NO: 21327 - protein, 1396 aa, unidentified
  REGION 1..1396: note = Cas Enzyme sequence
MEMQTAKQLISSHLKGYPIKDYFVGLDIGTSSVGWAVTNKLYELLKFRSHKMWGSRLFDEGESAVGRRSFRSIRRRLERRKLRLKLLEELFADAMAQVDSTFFIRLHESKYHYEDKTTGHSSKHILFIDKDYTDQDYFKEYPTIYHLRAELMKSGTDDIRKLFLAVHHILKYRGNFLYEGATFDSNASTLDDVLKQALENITFNCFDCNSAISSIGQILMDAGKTKSDKAKVIERLVDTYIATHTEGISSKTQKEHVKEDKKRLKAFASLVLGLSASLTDLFGSVEELEDDLKKLQITGDTYDDKRDELAKAWGDKIHIIDDCKSVYDAIILMSIKEPGLTISESKVKAFNKHKEDLVILKSLLKTDRSIYNTMFKADEKGLHNYVHYIKQGRKEETSCNREDFYKYTKKVVEGLPDSKDKEYILSEIELQTLLPLQRIKDNGVIPYQLHLEELKTILKTCGAKFPFLNEVADGYSVAEKLIKMLEFRIPYYVGPLNTYHNVEKGGFAWAVRKASGRVTPWNFDDKIDREKSAAAFIKNLTNKCTYLLGEDVLPKSSLLYSEFMLLNELNNIRIDGKPLEPGVKEHLIEAIFKQDHKKMTKNRIEQFLKDNNYIPKKHKPDITGLDGEIKNDLTSYRDMVRILGTNFDRSMAEDIIMDITIFGESKKMLRETLRNKFASHLDDETIKKLSKLRYRDWGRLSKKLLNGIEGCDKAGDGTPETIIELMRNFSYNLMELLGDKFSFMERIQEINDKLTEGQVVDPQDIIDELALPPAVKRAVWQALRIVDEVIHIKKALPSRIFVEVTRSNKTEKKKKDSRQKRLSDLYAAIKKDEALLSGLKDTEFEGLKSGLASYDDAALRSKKLYLYYTQMGRCAYTGNIIDLNLLNTDNCDIDHIYPRSLTKDDSFDNLVLCERTANAKKSDTYPIDNTIQTNQKAFWSFLKHQGLISERKYERLTRNTPLTADDLSGFIARQLVETNQSVKAATTLLRRLYPDVDVVFVKAENVTDFRHDNNFIKVRSLNHHHHAKDAYLNIVVGNVYHEKFTRNFRAFFKKNGANRTYNLAKMFNYDVKCTNAKDGKAWDIKTSMDIVKKMMDSNDVRVTKRLLEQSGALADATVYKATVAAKANDGAYIGMKTKSSVFADVTKYGGMTKIKNAYSIIVQYIGKKGEVVKEIVPLPIYLTNRNITDQDLIDYVASITPEAKDISIIYRKLCINQLVKVNGFYYYLGGKTSNSICIDNAIQVLLSNEFLIYAKLLDKVNTLRKSDPSINIQKISTLSPFAKEQISITINDNLKFYDYLVEKLNSNIYIKMKGNKASDLIDIGREKFKGIDVSSQCILLLEILNMLTNMKTTYDIKLLGFSTSRTKIALKVSTLDEFKIINQSITGLYSSEITIV

SEQ ID NO: 21328 - protein, 1110 aa, unidentified
  REGION 1..1110: note = Cas Enzyme sequence
DEDLKKLQIIGDTYDERRDDLAKVWGDEIHIIDDCKSVYDAIILMSIKEPGLTISESKVKAFNKHKDDLAILKSLLKSDRSIYNAMFKVDEKGLHNYVHYIKQGRTEETSCNREDFYKYTKKVVEGLPDSKDKEYILSEIELQTLLPLQRIKDNGVIPYQLHLEELKVILAKCGPKFPFLNEVADGFSVAEKLIKMLEFRIPYYVGPLNTHHNVDNGGFAWAVRKASGRVTPWNFDDKIDREKSAAAFIKNLTNKCTYLLGEDVLPKSSLLYSEFMLLNELNNVRIDGKPLEKAVKEHLIEAVFKQDHKKMTKNRIEQFLKDNNYIPEKHKPEITGLDGEIKNDLASYRDMVRILGNNFDLSMAEEIITDITIFGESKKMLRETLRNKFSSRLDDEAIKKLSKLRYRDWGRLSRKLLNVIEGCDKAGDGTPETIIILMRNFSYNLMELLGDRFSFMERIQEINDKLTEGQIVNPHDIIDDLALSPAVKRAVWQALRIVDEIVHIKKALPARIFVEVTRSNKAEKKKKDSRQKRLSDLYAAIKKDDALLSGLTNEEFGGLKSGLAKYDDAALRSKKLYLYYTQMGRCAYTGEVIDLSQLNTDNYDIDHIYPRSLTKDDSFDNLVLCKRTANAQKSDTYPISKEIQKAQKAFWIFLKQQGLISERKYERLTRITPLTADDLSGFIARQLVETNQSVKAATTLLRRLYPGVDVVFVKAENVTDFRHDNDFIKVRSLNHHHHAKDAYLNIVVGNVYHERFTRNFPAFFKKNGANRTYNLAKMFNYDVNCTNAKDGKAWDVKTSMDTVKKMMASNDVRVTKRLLEQSGALADATVYKAAVAEKAKDGAYIGMKTKSSVFADVSKYGGMTKIKNAYSIIVQYAGKKGEVVKEIVPLPIYLTNRNTTDQDLIDYVASIIPQAKDISIIYRKLCINQLVKVNGFYYYLGGKTNSKFCIDNAIQVIVSNEWIPYLKVLEKFNNMRKDNKDLKANVVSTRALDNKHTIEVRIVEEKNIEFFDYLVSKLKMPIYQKMKGNKAAELSEKGYGLFKKMSLEEQSIHLIELLNLLTNQKTTFEVKPLGITASRSTVGSKISNQDEFKVINESITGLYSNEVTIV

SEQ ID NO: 21329 - protein, 1398 aa, unidentified
  REGION 1..1398: note = Cas Enzyme sequence
METQASNQLISSHLKGYPIKDYFVGLDIGTSSVGWAVTNKAYELLKFRSHKMWGSRLFDEGESAVARRGFRSMRRRLERRKLRLKLLEELFADAMAQVDPTFFMRLRESKYHYEDKTTGHSSKHILFIDKNYNDQDYFKEYPTVYHLRSELMKSGTDDIRKLFLAVHHILKYRGNFLYEGATFDSNASTLDDVIKQALENITFNCFDCNSAISSIGQILMEAGKTKSDKAKAIEHLVDTYIATDTVDTSSKTQKDQVKEDKKRLKAFANLVLGLNASLIDLFGSVEELEEDLKKLQITGDTYDDKRDELAKAWSDEIYIIDDCKSVYDAIILLSIKEPGLTISESKVKAFNKHKDDLAILKSLLKADRSIYNEMFKADEKGLHNYVHYIKQGRKEETSCNREEFYKYTKKVVEGLPDSKDKEYILSEIELQTLLPLQRIKDNGVIPYQLHLEELKTILDTCKSKFPFLNVVADGYSVADKLIKMLEFRIPYYVGPLNTHHNVDNGGFAWAVRKASGRVTPWNFDDKIDREKSAAAFIKNLTNKCTYLLGEDVLPKSSLLYSKFMLLNELNNVRIDGKPLETKVKAHLIKAVFKQDHKKMTKNRIEQFLKDNNYIPEKHKPEITGLDGEIKNDLASYRDMVRILGDGFDKSMAEEIITDITIFGESKKMLRETLRNKFSSRLDDEAIKKLSKLRYRDWGRLSKKLLNGIDGCDKAGDGTSVTIIEEMRDFSYNLMELLGDRFSFMERIQEINDKLTEGQIVNPHDIIDDLALSPAVKRAVWQALRIVDEIVHIKKALPARIFVEVTRSNKAEKKKKDSRQKRLSDLYAAIKKDDALLSGLTNEEFGGLKSGLAKYDDAALRSKKLYLYYTQMGRCAYTGEVIDLSQLNTDNYDIDHIYPRSLTKDDSFDNLVLCKRTANAQKSDTYPISKDIQKAQKPFWTFLKQQGLISERKYERLTRITPLTADDLSGFIARQLVETNQSVKAATTLLRRLYPGVDVVFVKAENVTDFRHDNDFIKVRSLNHHHHAKDAYLNIVVGNVYHEKFTRNFRAFFKKNGANRTYNLAKMFNYDVNCTNAKDGKAWEVKTSMDTVKKMMDSNDVRVTKRLLEQTGALADATIYKATVAGKAKDGAYIGMKTKSSVFADVSKYGGMTKIKNAYSIIVQYTGKKGEVIKEIVPLPIYLTNRNTTDQDLINYVASIIPQAKDISIIYGKLCINQLVKVNGFYYYLGGKTNSKFCIDNAIQVIVSNEWIPYLKVLEKFNNMRKDNKDLKANVVSTRALDNKHTIEVRIVEEKNIEFFDYLVSKLKMPIYQKMKGNKAAELSEKGYGLFKKMSLEEQSIHLIELLNLLTNQKTTFEVKPLGITASRSTVGSKISNQDEFKVINESITGLYSNEVTIV

SEQ ID NO: 21330 - protein, 1398 aa, unidentified
  REGION 1..1398: note = Cas Enzyme sequence
METQASNQLISSHLKGYPIKDYFVGLDIGTSSVGWAVTNKAYELLKFRSHKMWGSRLFDEGESAVARRGFRSMRRRLERRKLRLKLLEELFADAMAQVDPTFFMRLRESKYHYEDKTTGHSSKHILFIDKNYTDQDYYKAYPTIYHLRAELMKDGTDDIRKLFLAVHHILKYRGNFLYEGATFDSNASTLDDVIKQALENITFNCFDCNSAISSIGQILMEAGKTKSDKAKAIEHLVDTYIATDTVDTSSKTQKDQVKEDKKRLKAFANLVLGLNASLIDLFGSVEELEEDLKKLQITGDTYDDKRDELAKAWSDEIYIIDDCKSVYDAIILLSIKEPDLTISESKVKAFNKHKDDLAILKSLLKADRSIYNEMFKADEKGLHNYVHYIKQGRKEETSCNREEFYKYTKKVVEGLPDSKDKEYILSEIELQTLLPLQRIKDNGVIPYQLHLEELKTILDTCKSKFPFLNVVADGYSVADKLIKMLEFRIPYYVGPLNTHHNVDNGGFAWVVRKASGRVTPWNFDDKIDWEKSAAAFIKNLTNKCTYLLGEDVLPKSSLLYSKFMLLNELNNVRIDGKPLETKVKAHLIKAVFKQDHKKMTKNRIEQFLKDNGYISKTHKHEITGLDGEIKNDLASYRDMVRILGTNFDVSMAEDIIADITIFGESKKMLRETLRNKFSSRLDDEAIKKLSKLRYRDWGRLSKKLLNGIDGCDKIGDGTSVTIIEAMRDFSYNLMELLGDKFSFMERIQEINAKLTEDQIVNPHDIIDDLALSPAVKRAVWQALRIVDEVVHIKKALPARIFVEVTRSNKAEKKKKDSRQKRLSDLYAAIKKDDALLSGLTNEEFGGLKSGLAKYDDAALRSKKLYLYYTQMGRCAYTGEVIDLSQLNTDNYDIDHSYPRSLTKDDSFDNLVLCKRTANAQKSDTYPISKEIQKAQKPFWTFLKQQGLISERKYERLTRITPLTADDLSGFIARQLVETNQSVKAATTLLRRLYPGVDVVFVKAENVTDFRHDNNFIKVRSLNHHHHAKDAYLNIVVGNVYHEKFTRNIRAFFKKNGANRTYNLAKMFNYDVKCTNAKDGKAWDVKTSMDTVNKMMTSNDVRVTKRLLEQSGALADATVYKATVAAKAKDGAYIGMKTKSSVFADVTKYGGMTKIKNAYSIIVQYIGKKGEVVKEIVPLPIYLTNRNITDQDLIDYVASITPQAKDISIIYRKLCINQLVKVNGFYYYLGGKTNSNIYIDNAVEVVVPANIAVYIKVLEKFALLHKDNNNIKASTVTTRIYNEGSTNIVSITDKDGLIVYDYLMSKLRTPLYMKMKGNKVDELSTVGRSKFMNMTLEEQSIYLLEVLNLLTNSKTTFDVKALGITASRSTIGVKIHTLDEFKIINQSITGLYSNEITIV

SEQ ID NO: 21331 - protein, 1393 aa, unidentified
  REGION 1..1393: note = Cas Enzyme sequence
MEMQASNQLISSHLKDYPIKDYFVGLDIGTNSVGWAVTNKSYKLLKFRSHKMWGSRLFDEGESAVARRGFRSMRRRLERRKLRLKLLEELFADVMVQVDPTFFMRLRESKYHYEDKTTGHSSKHILFINEDYTDQDYFKAYPTIYHLRAELMKDGTDDIRKLFLAVHHILKYRGNFLYEGASFDSNASTLDDVLKQALKNIIFNCFDSTAAIGSIGQILMEPGKTKSDKAKAIERLVDTYIITDEVDTSGKTQKEQVKEDKKRLKSFANLVLGLSASLTDLFGSVEELDDDLKNLQIRGDTYDDERDKLAKAWSDEIHSIDDCKSVYDAIILMFIKEPGLTISESKVKAFNKHKEDLVILKSLLKTDRSIYNAMFKADEKGLHNYVHYIKQGRTEETSCNREDFYKYTKKIVEGLSDSKEKDYILSEINLQTLLPLQRIKDNGVIPYQLHLEELKTILDKCKFKFPFLNEVADGYSVAEKLIKLLEFRIPYYVGPLNTHHNVDNGGFAWAVRKASGQVTPWNFDDKIDREKSAAAFIKNLTNKCTYLLGEDVLPKSSLLYSEFMLLNELNNVRIDGKPLETKVKAHLIEAVFKQDHKKMTENRIEQFLKDNGYISNPHKPEITGLDGEIKNDLTSYRDMVRILGDGFDTSMAEEIITDITIFGESKKMLRETLRNKFSSCLDDEVIKKLAKLRYRDWGRLSKKLLNGIDGCDKTGDCEPATIIKFMRNFSYNLMELLGDKFSFMERIQEINDKLTAGQVLAPHDSIDELALSPAVKRAVWQALRIVDEVIHIKKALPSRIFVEVTRSNKTDKKKKDSRQKRLSDLYAAIKHDDSLVEALNGQKFNTLKSDLSGCDDAALRSKKLYLYYTQMGRCAYTGNIIDLNLLNTDNYDIDHIYPRSLTKDDSFDNLVLCERTANAKKSDTYPIDNTIQTNQKVFWSFLKHQGLISERKYARLTRIAPLTEDDLSGFIARQLVETNQSVKAATTLLRRLYPGVDVVFVKAENVTDFRYDNNFIKVRSLNHHHHAKDAYLNIVVGNVYHERFTRNFRAFFKKNGANRTYNLAKMFNYDVNCTNAKDGKAWDVKTSMDTVKKMMFSNDVRVTKRVYEQKGQLADINLTKASKVKADIYLPIKANDLIVSQNTKYGGYSDIKNAYYTIIEYSDKKNNSIKAFIPIPIFIASKILTEQALLEYIKTVLPKANNIKIIYKRVYNDQLLKIDGFTYYLGGRSNDRFCIDNAIQLIVPLDIQFYLKLVEKFTTIMLEDKNIKVSSVSSRNPVNNQVENITLEYTQKLFDYLVSKFNEPIYLKMRGNKLKDVDNVGRKQFIKLSLEERCKALSELLNIFTNRNKKLSLSSINVSASRKVVNFKVSSLDEFKIINESITGLYSNEVIIV

SEQ ID NO: 21332 - protein, 1398 aa, unidentified
  REGION 1..1398: note = Cas Enzyme sequence
METQASNQLISSHLKGYPIKDYFVGLDIGTSSVGWAVTNKAYELLKFRSHKMWGSRLFDEGESAVARRGFRSMRRRLERRKLRLKLLEELFADAMAQVDPTFFMRLRESKYHYEDKTTGHSSKHILFIDKNYNDQDYFKEYPTVYHLRSELMKSGTDDIRKLFLAVHHILKYRGNFLYEGATFDSNASTLDDVIKQALENITFNCFDCNSAISSIGQILMEAGKTKSDKAKAIEHLVDTYIATDTVDTSSKTQKDQVKEDKKRLKAFANLVLGLNASLIDLFGSVEELEEDLKKLQITGDTYDDKRDELAKAWSDEIYIIDDCKSVYDAIILLSIKEPGLTISESKVKAFNKHKDDLAILKSLLKADRSIYNEMFKADEKGLHNYVHYIKQGRKEETSCNREEFYKYTKKVVEGLPDSKDKEYILSEIELQTLLPLQRIKDNGVIPYQLHLEELKTILDTCKSKFPFLNVVADGYSVADKLIKMLEFRIPYYVGPLNTHHNVDNGGFAWAVRKASGRVTPWNFDDKIDREKSAAAFIKNLTNKCTYLLGEDVLPKSSLLYSKFMLLNELNNVRIDGKPLETKVKAHLIKAVFKQDHKKMTKNRIEQFLKDNNYIPEKHKPEITGLDGEIKNDLASYRDMVRILGDGFDKSMAEEIITDITIFGESKKMLRETLRNKFSSRLDDEAIKKLSKLRYRDWGRLSKKLLNGIDGCDKAGDGTSVTIIEEMRDFSYNLMELLGDRFSFMERIQEINDKLTEGQIVNPHDIIDDLALSPAVKRAVWQALRIVDEIVHIKKALPARIFVEVTRSNKAEKKKKDSRQKRLSDLYAAIKKDDALLSGLTNEEFGGLKSGLAKYDDAALRSKKLYLYYTQMGRCAYTGEVIDLSQLNTDNYDIDHIYPRSLTKDDSFDNLVLCKRTANAQKSDTYPISKDIQKAQKPFWTFLKQQGLISERKYERLTRITPLTADDLSGFIARQLVETNQSVKAATTLLRRLYPGVDVVFVKAENVTDFRHDNDFIKVRSLNHHHHAKDAYLNIVVGNVYHEKFTRNFRAFFKKNGANRTYNLAKMFNYDVNCTNAKDGKAWEVKTSMDTVKKMMDSNDVRVTKRLLEQTGALADATIYKATVAGKAKDGAYIGMKTKSSVFADVYKYGGMTKIKNAYSIIVQYTGKKGEVIKEIVPLPIYLTNRNTTDQDLINYVASIIPQAKDISIIYGKLCINQLVKVNGFYYYLGGKTNSKFCIDNAIQVIVSNEWIPYLKVLEKFNNMRKDNKDLKANVVSTRALDNKHTIEVRIVEEKNIEFFDYLVSKLKMPIYQKMKGNKAAELSEKGYGLFKKMSLEEQSIHLIELLNLLTNQKTTFEVKPLGITASRSTVGSKISNQDEFKVINESITGLYSNEVTIV

SEQ ID NO: 21333 - protein, 1398 aa, unidentified
  REGION 1..1398: note = Cas Enzyme sequence
METQASNQLISSHLKGYPIKDYFVGLDIGTSSVGWAVTNKAYELLKFRSHKMWGSRLFDEGESAVARRGFRSMRRRLERRKLRLKLLEELFADAMAQVDPTFFMRLRESKYHYEDKTTGHSSKHILFIDKNYNDQDYFKEYPTVYHLRSELMKSGTDDIRKLFLAVHHILKYRGNFLYEGATFDSNASTLDDVIKQALENITFNCFDCNSAISSIGQILMEAGKTKSDKAKAIEHLVDTYIATDTVDTSSKTQKDQVKEDKKRLKAFANLVLGLNASLIDLFGSVEELEEDLKKLQITGDTYDDKRDELAKAWSDEIYIIDDCKSVYDAIILLSIKEPDLTISESKVKAFNKHKDDLAILKSLLKADRSIYNEMFKADEKGLHNYVHYIKQGRKEETSCNREEFYKYTKKVVEGLPDSKDKEYILSEIELQTLLPLQRIKDNGVIPYQLHLEELKTILDTCKSKFPFLNVVADGYSVADKLIKMLEFRIPYYVGPLNTHHNVDNGGFAWVVRKASGRVTPWNFDDKIDWEKSAAAFIKNLTNKCTYLLGEDVLPKSSLLYSKFMLLNELNNVRIDGKPLETKVKAHLIKAVFKQDHKKMTKNRIEQFLKDNGYISKTHKHEITGLDGEIKNDLASYRDMVRILGTNFDVSMAEDIIADITIFGESKKMLRETLRNKFSSRLDDEAIKKLSKLRYRDWGRLSKKLLNGIDGCDKIGDGTSVTIIEAMRDFSYNLMELLGDKFSFMERIQEINAKLTEDQIVNPHDIIDDLALSPAVKRAVWQALRIVDEVVHIKKALPARIFVEVTRSNKAEKKKKDSRQKRLSDLYAAIKKDDALLSGLTNEEFGGLKSGLAKYDDAALRSKKLYLYYTQMGRCAYTGEVIDLSQLNTDNYDIDHSYPRSLTKDDSFDNLVLCKRTANAQKSDTYPISKEIQKAQKAFWIFLKQQGLISERKYERLTRITPLTADDLSGFIARQLVETNQSVKAATTLLRRLYPGVDVVFVKAENVTDFRHDNNFIKVRSLNHHHHAKDAYLNIVVGNVYHEKFTRNIRAFFKKNGANRTYNLAKMFNYDVKCTNAKDGKAWDVKTSMDTVNKMMTSNDVRVTKRLLEQSGALADATVYKATVAAKAKDGAYIGMKTKSSVFADVTKYGGMTKIKNAYSIIVQYIGKKGEVVKEIVPLPIYLTNRNITDQDLIDYVASITPQAKDISIIYRKLCINQLVKVNGFYYYLGGKTNSNIYIDNAVEVVVPANIAVYIKVLEKFALLHKDNNNIKASTVTTRIYNEGSTNIVSITDKDGLIVYDYLMSKLRTPLYMKMKGNKVDELSTVGRSKFMNMTLEEQSIYLLEVLNLLTNSKTTFDVKALGITASRSTIGVKIHTLDEFKIINQSITGLYSNEITIV

SEQ ID NO: 21334 - protein, 958 aa, unidentified
  REGION 1..958: note = Cas Enzyme sequence
MKKSKDVESYAIGCDMGTGSFGWCVTDENGELVSFRHQPMWGVRLFETGKTAEERRQFRSTRRRLARRVQRLQWLRDLLGSEVEKVDPDFFKRLQYSSVSPHDSQWEALRELFASDGYCSNLYEKKYPTIYHLRKALAEETQKADFRLIYLAIHHIIKYRGNFLHEGEMQIHGGVDLKSSVSALLSLVIDGDTEISEAVSSITDTLKDEKKSAFDKQKVIQIALQSVTDDQDKKFCAELSKAILGRSADYTQIFPTLGEKKISVSLDDEAACEQFSENLGDTELEVFQVLQKLYADYTLAMLLSGNVSTISDVYINRYNQHAQDLRTLKRIVRAKCPHETYHDLFNGKQSWYERYRLNNSKDSSYDNLIKSIKKILESIENSVHDDDVSYCMKRIEEGEFLKKPKSSENGAIPNQLHCEELKAILDHQKRFYPVLAENEQKLLQIASYRIPYYVGPLSPQATKYGWAQRKEQGPVTPWNFTDKIDVMASAERFITQRTDTCQFLYGEPVLPKNSLLYGEYCVLNELNGIRLDGKRLSVDVKQQIFHELFQTQKTVTKGTLSKWLYEHRYASHEKGLDLTGFQKEDEFASNLSSWIDFSRIFGGIREQDKEMIENLILWNTLFTDKKILKAKIRKSYPTLADPTVVAICRLNYQGWGRLSQKLLTGISTLDAQGRVWTVMDLLWETNQLFMEIIFDETYGFQQKIETANKQNKPETSLNAYDTAFPDVPMSPSVKKSAWQGLQVIREIVQVMGKEPKRIYVEFTRGDEEKKRTISRYYALEKIYKRLKDDPSFEKVYEELTSRKEEYKKQNGPLKIMRLYLYFLQNGKCMYSGQTLDIQRLGDYQIDHILPQAYIKNNSIDNLVLVKSKENQRKRDSLLLDDTIITKQKPFWKTLRKNGLISSKKFHALIREEVSENDYIGFINRQIVETSQAVKILSDVLKEAFPTTTVMGIKAGLVS

SEQ ID NO: 21335 - protein, 1323 aa, unidentified
  REGION 1..1323: note = Cas Enzyme sequence
MKKSKDVESYAIGCDMGTGSFGWCVTDENGELVSFRHQPMWGVRLFETGKTAEERRQFRSTRRRLARRVQRLQWLRDLLGSEVEKVDPDFFKRLQYSSVSPHDSQWEALRELFASDGYCSNLYEKKYPTIYHLRKALAEETQKADFRLIYLAIHHIIKYRGNFLHEGEMQIHGGVDLKSSVSALLSLVIDGDTEISEAVSSITDTLKDEKKSAFDKQKVIQIALQSVTDDQDKKFRAELSKAILGRSADYTQIFPTLGEKKISVSLDDEAACEQFSENLGDTELEVFQVLQKLYADYTLAMLLSGNVSTISDVYINRYNQHAQDLRTLKRIVRAKCPHETYHDLFNGKQSWYERYRLNNSKDSSYDNLIKSIKKILESIENSVHDDDVSYCMKRIEEGEFLKKPKSSENGAIPNQLHCEELKAILDHQKRFYPVLAENEQKLLQIASYRIPYYVGPLSPQATKYGWAQRKEQGPVTPWNFTDKIDVMASAERFITQRTDTCQFLYGEPVLPKNSLLYGEYCVLNELNGIRLDGKRLSVDVKQQIFHELFQTQKTVTKGTLSKWLYEHRYASHEKGLDLTGFQKEDEFASNLSSWIDFSRIFGGIREQDKEMIENLILWNTLFTDKKILKAKIRKSYPTLADPTVVAICRLNYQGWGRLSQKLLTGISTLDAQGRVWTVMDLLWETNQLFMEIIFDETYGFQQKIETANKQNKPETSLNAYDTAFPDVPMSPSVKKSAWQGLQVIREIVQVMGKEPKRIYVEFTRGDEEKKRTISRYYALEKIYKRLKDDPSFEKVYEELTSRKEEYKKQNGPLKIMRLYLYFLQNGKCMYSGQTLDIQRLGDYQIDHILPQAYIKNNSIDNLVLVKSKENQRKRDSLLLDDTIITKQKPFWKTLRKNGLISSKKFHALIREEVSENDYIGFINRQIVETSQAVKILSDVLKEAFPTTTVMGIKAGLSHDFRSQNGLHKVREVNDYHHAHDALLACQVGRFLAGPFGQMIKNKEAFIDFQNALQDDTSNARDEKYGFVIHCMSREYGSWHGYAVVEYLRKVFGYHHYFLSRKTEEMRGAFYNQMLMPKGEKGGATVPSKEGKDFVVYGGYSGENLAHFDIIEYSKGKKRYRKLVGIPIRIIALEETQRGAVTRYLSSLYKDPVIIKAGIRKYQYIRYPEKDGSLNEFYIVSDGEVINARELNLSQETIAHLALFDRLEVIEKQKLFKELCYKMKQYPCYQGIAEKLLLHVCDFGEMNSLQQKKCIQGILVYMQANSSRFDFGKEFGASWKNVSSNRLIKSLDPNQIEFIDHSVTGMYERRYHLGLSNRGDHKTC

SEQ ID NO: 21336 - protein, 1328 aa, unidentified
  REGION 1..1328: note = Cas Enzyme sequence
MNKNISAYNIGLDIGTGSVGYAATDQMGNNLKIKGKNMWGVRLFDGADTAASTRASRGMRRRYDRRRQRIELLRHFFADSGEIDTDFFDMIDCSFLNEEVNEYNLFNDIGLNDKSYYNRFKTIYHLRSYLQNCEEKADIRLLYLAIHHIVKYRGNFLHEDNPNLSSENAGIEDSVKQLFSELEIAFEKQYNSEIIENITNIIDDDSLTRSEKSKELGFLLGNDSFSKNLVKAFIGYKFNASAIFEPDSEKNEFKITDDEKYQSFISSLDESFVGVAEALFNLNSAITLKSILTFEKGKSGTLSDAMINKYNAYGEDLSDLKKLIRKYYNNEYKWMFGQKPCITDDNRIEALKKSSILFSYALNEKTYTGYNTGVKKCSLDDLYKTIKSLFIMDGGNYPYSNDECFIRMSQRMENEDFLKKINSTDNGAIPYQLHLEELKNIINNQGKYYPFLLENKDKICSIVSFRLPYWCGPLNAEKNPDGSRQFAWSVRKKKDEKVYPWNFESVIDVDKTAEKFITTLTNYCTYLPCEKVLPKNSLLFSEYCLRNEIFSINIDGKFLDAKVRNDLFDRFCEGKNSMTEKELKNWLAIEEQINVLTKKINGFQGDEKFACNMKSYNDFKKILGKVDESNYKDIEKMIYYLTVYNDKKIIRRRLKQEFDYLSQAEISAISNLKYSGWGSLSRRLLDGISIEENGRMVTIIDKMRTGRFNFMQIINEKNFKKAIEEEAHYNLDEDINDTIESLAGSPAIKKGIRQSLLIVNEIISIMGFVPDNIFVEFAREDQESSRKSTRQKKLLKAYEKYKDNPDFKETYDFIKNSNEKDFDDRMIYLYCLQNGKSLYSGKKLDISSLSQTCQIDHILPRCYIKDDSFDNLALVLSNENQRKKDSMLLDDEIIRSQYGRWNDLKSAGLISFKKFDNLVRKEIKKQDAKHFINRQLVETRQITKHVANLLKEIYSPQGTAVVQVKAGLTSDLRKRFSLYKNREINDYHHAHDAFLACQIGIFTQVCYPGVYKEFDFTTAKRYFSLKNNECARENKYGFIIGRFDELFVDENGEVIWHGEEKVNQIVKCLNYKDCFISKKTEKQSGGFCKDTIYPAGSKEASIRIKKDMPVELYGGKTGTNESYSAVIEYTKGKKTVKKLVGIPIIVDTISQTNPDAVENYLTEQGYLNAKVLKSPICKYQKVIIDGNEYYISSSSEVHNAKQLILPAWVVKTISNPTIDDEPELSKIYDILTEKIDLFYQGYSSVNEKLKKLETKEKFDSLDFNNKVKVINQIIIMLHANASNANLKEIGLRDREGRKEKYNIDINKAIFVYSSPTGIFENRIAGADL

SEQ ID NO: 21337 - protein, 1337 aa, unidentified
  REGION 1..1337: note = Cas Enzyme sequence
MKKDYVIGLDIGTNSVGWAVMTEDYQLVKKKMPIYGNTEKKKIKKNFWGVRLFEEGHTAEDRRLKRTARRRISRRRNRLRYLQAFFEEAMTALDENFFARLQESFLVPEDKKWHRHPIFAKLEDEVAYHETYPTIYHLRKKLADSSEQADLRLIYLALAHIVKYRGHFLIEGKLSTENISVKEQFQQFMIIYNQTFVNGESRLVSAPLPESVLIEEELTEKASRTKKSEKVLQQFPQEKANGLFGQFLKLMVGNKADFKKVFGLEEEAKITYASESYEEDLEGILAKVGDEYSDVFLAAKNVYDAVELSTILADSDKKSHAKLSSSMIVRFTEHQEDLKNFKRFIRENCPDEYDNLFKNEQKDGYAGYIAHAGKVSQLKFYQYVKKIIQDIAGAEYFLEKIAQENFLRKQRTFDNGVIPHQIHLAELQAIIHRQAAYYPFLKENQKKIEQLVTFRIPYYVGPLSKGDASTFAWLKRQSEEPIRPWNLQETVDLDQSATAFIERMTNFDTYLPSEKVLPKHSLLYEKFMVFNELTKISYTDDRGIKANFSGKEKEKIFDYLFKTRRKVKKKDIIQFYRNEYNTEIVTLSGLEEDQFNASFSTYQDLLKCGLTRAELDHPDNAEKLEDIIKILTIFEDRQRIRTQLSTFKGQFSEEVLKKLERKHYTGWGRLSKKLINGIYDKESGKTILDYLIKDDGVSKHYNRNFMQLINDSQLSFKNAIQKAQSSEHEETLSETVNELAGSPAIKKGIYQSLKIVDELVAIMGYAPKRIVVEMARENQTTSTGKRRSIQRLKIVEKAMAEIGSNLLKEQPTTNEQLRDTRLFLYYMQNGKDMYTGDELSLHRLSHYDIDHIIPQSFMKDDSLDNLVLVGSTENRGKSDDVPSKEVVKKMKAYWEKLYAAGLISQRKFQRLTKGEQGGLTLEDKAHFIQRQLVETRQITKNVAGILDQRYNAKSKEKKVQIITLKASLTSQFRSIFGLYKVREVNDYHHGQDAYLNCVVATTLLKVYPNLAPEFVYGEYPKFQAFKENKATAKAIIYTNLLRFFTEDEPRFTKDGEILWSNSYLKTIKKELNYHQMNIVKKVEVQKGGFSKESIKPKGPSNKLIPVKNGLDPQKYGGFDSPVVAYTVLFTHEKGKKPLIKQEILGITIMEKTRFEQNPILFLEEKGFLRPRVLMKLPKYTLYEFPEGRRRLLASAKEAQKGNQMVLPEHLLTLLYHAKQCLLPNQSESLAYVEQHQPEFQEILERVVDFAEVHTLAKSKVQQIVKLFEANQTADVKEIAASFIQLMQFNAMGAPSTFKFFQKDIERARYTSIKEIFDATIIYQSTTGLYETRRKVVD

SEQ ID NO: 21338 - protein, 1337 aa, unidentified
  REGION 1..1337: note = Cas Enzyme sequence
MKKDYVIGLDIGTNSVGWAVMTEDYQLVKKKMPIYGNTEKKKIKKNFWGVRLFEEGHTAEDRRLKRTARRRISRRRNRLRYLQAFFEEAMTDLDENFFARLQESFLVPEDKKWHRHPIFAKLEDEVAYHETYPTIYHLRKKLADSSEQADLRLIYLALAHIVKYRGHFLIEGKLSTENISVKEQFQQFMIIYNQTFVNGESRLVSAPLPESVLIEEELTEKASRTKKSEKVLQQFPQEKANGLFGQFLKLMVGNKADFKKVFGLEEEAKITYASESYEEDLEGILAKVGDEYSDVFLAAKNVYDAVELSTILADSDKKSHAKLSSSMIVRFTEHQEDLKKFKRFIRENCPDEYDNLFKNEQKDGYAGYIAHAGKVSQLKFYQYVKKIIQDIAGAEYFLEKIAQENFLRKQRTFDNGVIPHQIHLAELQAIIHRQAAYYPFLKENQEKIEQLVTFRIPYYVGPLSKGDASTFAWLKRQSEEPIRPWNLQETVDLDQSATAFIERMTNFDTYLPSEKVLPKHSLLYEKFMVFNELTKISYTDDRGIKANFSGKEKEKIFDYLFKTRRKVKKKDIIQFYRNEYNTEIVTLSGLEEDQFNASFSTYQDLLKCGLTRAELDHPDNAEKLEDIIKILTIFEDRQRIRTQLSTFKGQFSAEVLKKLERKHYTGWGRLSKKLINGIYDKESGKTILGYLIKDDGVSKHYNRNFMQLINDSQLSFKNAIQKAQSSEHEETLSETVNELAGSPAIKKGIYQSLKIVDELVAIMGYAPKRIVVEMARENQTTSTGKRRSIQRLKIVEKAMAEIGSNLLKEQPTTNEQLRDTRLFLYYMQNGKDMCTGDELSLHRLSHYDIDHIIPQSFMKDDSLDNLVLVGSTENRGKSDDVPSKEVVKDMKAYWEKLYAAGLISQRKFQRLTKGEQGGLTLEDKAHFIQRQLVETRQITKNVAGILDQRYNANSKEKKVQIITLKASLTSQFRSIFGLYKVREVNDYHHGQDAYLNCVVATTLLKVYPNLAPEFVYGEYPKFQTFKENKATAKAIIYTNLLRFFTEDEPRFTKDGEILWSNSYLKTIKKELNYHQMNIVKKVEVQKGGFSKESIKPKGPSNKLIPVKNGLDPQKYGGFDSPIVAYTVLFTHEKGKKPLIKQEILGITIMEKTRFEQNPILFLEEKGFLRPRVLMKLPKYTLYEFPEGRRRLLASAKEAQKGNQMVLPEHLLTLLYHAKQCLLPNQSESLTYVEQHQPEFQEILERVVDFAEVHTLAKSKVQQIVKLFEANQTADVKEIAASFIQLMQFNAMGAPSTFKFFQKDIERARYTSIKEIFDATIIYQSTTGLYETRRKVVD

SEQ ID NO: 21339 - protein, 1337 aa, unidentified
  REGION 1..1337: note = Cas Enzyme sequence
MKKDYVIGLDIGTNSVGWAVMTEDYQLVKKKMPIYGNTEKKKIKKNFWGVRLFEEGHTAEDRRLKRTARRRISRRRNRLRYLQAFFEEAMTDLDENFFARLQESFLVPEDKKWHRHPIFAKLEDEVAYHETYPTIYHLRKKLADSSEQADLRLIYLALAHIVKYRGHFLIEGKLSTENISVKEQFQQFMIIYNQTFVNGESRLVSAPLPESVLIEEELTEKASRTKKSEKVLQQFPQEKANGLFGQFLKLMVGNKADFKKVFGLEEEAKITYASESYEEDLEGILAKVGDEYSDVFLAAKNVYDAVELSTILADSDKKSHAKLSSSMIVRFTEHQEDLKKFKRFIRENCPDEYDNLFKNEQKDGYAGYIAHAGKVSQLKFYQYVKKIIQDIAGAEYFLEKIAQENFLRKQRTFDNGVIPHQIHLAELQAIIHRQAAYYPFLKENQEKIEQLVTFRIPYYVGPLSKGDASTFAWLKRQSEEPIRPWNLQETVDLDQSATAFIERMTNFDTYLPSEKVLPKHSLLYEKFMVFNELTKISYTDDRGIKANFSGKEKEKIFDYLFKTRRKVKKKDIIQFYRNEYNTEIVTLSGLEEDQFNASFSTYQDLLKCGLTRAELDHPDNAEKLEDIIKILTIFEDRQRIRTQLSTFKGQFSAEVLKKLERKHYTGWGRLSKKLINGIYDKESGKTILGYLIKDDGVSKHYNRNFMQLINDSQLSFKNAIQKAQSSEHEETLSETVNELAGSPAIKKGIYQSLKIVDELVAIMGYAPKRIVVEMARENQTTSTGKRRSIQRLKIVEKAMAEIGSNLLKEQPTTNEQLRDTRLFLYYMQNGKDMYTGDELSLHRLSHYDIDHIIPQSFMKDDSLDNLVLVGSTENRGKSDDVPSKEVVKDMKAYWEKLYAAGLISQRKFQRLTKGEQGGLTLEDKAHFIQRQLVETRQITKNVAGILDQRYNANSKEKKVQIITLKASLTSQFRSIFGLYKVREVNDYHHGQDAYLNCVVATTLLKVYPNLAPEFVYGEYPKFQTFKENKATAKAIIYTNLLRFFTEDEPRFTKDGEILWSNSYLKTIKKELNYHQMNIVKKVEVQKGGFSKESIKPKGPSNKLIPVKNGLDPQKYGGFDSPIVAYTVLFTHEKGKKPLIKQEILGITIMEKTRFEQNPILFLEEKGFLRPRVLMKLPKYTLYEFPEGRRRLLASAKEAQKGNQMVLPEHLLTLLYHAKQCLLPNQSESLAYVEQHQPEFQEILERVVDFAEVHTLAKSKVQQIVKLFEANQTADVKEIAASFIQLMQFNAMGAPSTFKFFQKDIERARYTSIKEIFDATIIYQSTTGLYETRRKVVD

SEQ ID NO: 21340 - protein, 1337 aa, unidentified
  REGION 1..1337: note = Cas Enzyme sequence
MKKDYVIGLDIGTNSVGWAVMTEDYQLVKKKMPIYGNTEKKKIKKNFWGVRLFEEGHTAEDRRLKRTARRRISRRRNRLRYLQAFFEEAMTALDENFFARLQESFLVPEDKKWHRHPIFAKLEDEVAYHETYPTIYHLRKKLADSSEQADLRLIYLALAHIVKYRGHFLIEGKLSTENISVKEQFQQFMIIYNQTFVNGEGRLVSSPLPESVLIEEELTEKASRTKKSEKVLQQFPQEKANGLFGQFLKLMVGNKADFKKVFGLEEEAKITYASESYEEDLEGILAKVGDEYSDVFLAAKNVYDAVELSTILADSDKKSHAKLSSSMIVRFTEHQEDLKNFKRFIRENCPDEYDNLFKNEQKDGYAGYIAHAGKVSQLKFYQYVKKIIQDIAGAEYFLEKIAQENFLRKQRTFDNGVIPHQIHLAELQAIIHRQAAYYPFLKENQEKIEQLVTFRIPYYVGPLSKGDESTFAWLKRQSEEPIRPWNLQETVDLDQSATAFIERMTNFDTYLPSEKVLPKHSLLYEKFMVFNELTKISYTDDRGIKANFSGKEKEKIFDYLFKTRRKVKKKDIIQFYRNEYNTEIVTLSGLEEDQFNASFSTYQDLLKCGLTRAELDHPDNAEKLEDIIKILTIFEDRQRIRTQLSTFKGQFSAEVLKKLERKHYTGWGRLSKKLINGIYDKESGKTILGYLIKDDGVSKHYNRNFMQLINDSQLSFKNAIQKAQSSEHEETLSETVNELAGSPAIKKGIYQSLKIVDELVAIMGYAPKRIVVEMARENQTTSTGKRRSIQRLKIVEKAMAEIGSNLLKEQPTTNEKLRDTRLFLYYMQNGKDMYTGDELSLHRLSHYDIDHIIPQSFMKDDSLDNLVLVGSTENRGKSDDVPSKEVVKDMKAYWEKLYAAGLISQRKFQRLTKGEQGGLTLEDKAHFIQRQLVETRQITKNVAGILNQRYNANSKEKKVQIITLKASLTSQVRSIFGLYKVREVNDYHHGQDAYLNCVVATTLLKVYPNLAPEFVYGEYPKFQTFKENKATAKAIIYTNLLRFFTEDEPRFMKDGEILWSNSYLKTIKKELNYHQMNIVKKVEVQKGGFSKESIKPKGPSNKLIPVKNGLDPQKYGGFDSPVVAYTVLFTHEKGKKPLIKQEILGITIMEKTRFEQNPILFLEEKGFLRPRVLMKLPKYTLYEFPEGRRRLLASAKEAQKGNQMVLPEHLLTLLYHAKQCLLPNQSESLAYVEQHQPEFQEILERVVDFAEVHTLAKSKVQQIVKLFEANQTADVKEIAASFIQLMQFNAMGAPSTFKFFQKDIERARYTSIKEIFDATIIYQSPTGLYETRRKVVD

SEQ ID NO: 21341 - protein, 1338 aa, unidentified
  REGION 1..1338: note = Cas Enzyme sequence
MPMKNNGSYNIGLDIGTNSVGWAVTDENSQLLKFKKKNMWGVRLFDEGMTAASTRNYRSNRRRLQRRKNRIALLQSLIGDEVLKVDDTFFIRMKESFFVKEEKPHRNDYILFNDKNYTDQQYYDEYPTIYHLRYKLITCREKMDIRLVYLALHHIIKYRGNFLYEGQNFTLNDVPITEEIVTLLELLRDRAEIEFFDVARVTESIIHMLEDKKTSTTDKVKRVLSDIQMPAEDKKKFKEVLNAIVGLQVDLSKIFELEEPLKIRLSEELEEEKLNVLQDYMDVIEKVQKIYSFGVLQGMLNGKTFISEAMIAKYEKHKQDLAVLKKLFKAHFPNEYNNMFRKYFDNAGKPLFNYVNYIGNQYIDKKIAKEDLYKTIKKILDTKKELAETCKEYQYCLDAIKNDDFLNLQNSRDNGAIPYQLHKEELIRIIDNQSSYYPVLQRERGNLIQLLEFRIPFYVGPLSSNPRGRQFAWVERKVKGEKVYPWNFEEVIDIEATAEKFIQRMTNKCTYLLGEDVLPKYSLLYSEFEVLNEINKIRVNGRLLSVSEKKNLLNTLFKTEKIIKEKRFKEWLVENQICRDFNVKVEGFQKEGQFSTSLTSYIDFKRIFGEVNERNYQMIEDIILWVTLFTEKDIIERKIKKTYAQVTDEQIREIKKLRYSGWGRLSRKLLAGITVTDNYNNPRTIMDYLRDTNMNLMQIISSDKLGFKKIIEKDTRFFDDADNLEEVVNGLPGSPAIKRGILQTMKVLEEIVKVKGRMPDNIFVEFAREDQESKRTQSRMDNLMKLYQKMKEESHSFFNEIAHLELQKKNLENNKLDTLKLFLYFIQNGKCMYTGEPLDIHNLSLYEVDHILPRSYIKDDSIDNLALVLKKENQRKADDMLLKREIIDRQRTWWNYLLECGLISKKKFDNLTRDHIDPDTMKGFIQRQLVETRQITKHVVKLIKACYPYSNIVSVKAQLCSDFRQQFNLYKCRTVNDFHHAHDAYLVSVIGNYILRRFPKLSEEFNYGQYRKIARDNASKYKFGFVISSMTSYSKTIDYNTGEVFEWNPDFEIGRIKKVLDYKDCFVSRKKEELTGEFYKQTIYGKNDARASIPLKKGLDVRIYGGYTGEQKAFYSVVEYKKKNKIHHAIVGIPIYIAKLAEQNETELIRYLLQAGYEDVKILKKKILKYQLIKYDGGLFYMVSDSEIINAKQLLVDQKYLEVINAIERGDISDINVELLHELYFHLVDKIKTHYHFYNDIADRLIDSANLFCDLSLENKAKFVEEMLKITQVNSTNANFKRFGFPGLGDRVGRMAGKNLVVDKIEFIDTSVTGMFETRQKGSELWDSEQLSLPTRVS

SEQ ID NO: 21342 - protein, 1338 aa, unidentified
  REGION 1..1338: note = Cas Enzyme sequence
MPMKNNGSYNIGLDIGTNSVGWAVTDENSQLLKFKKKNMWGVRLFDEGMTAASTRNYRSNRRRLQRRKNRIALLQSLIGDEVLKVDDTFFIRMKESFFVKEEKPHRNDYILFNDKNYTDQQYYDEYPTIYHLRYKLITCREKMDIRLVYLALHHIIKYRGNFLYEGQNFTLNDVPITEEIVTLLELLRDRAEIEFFDVARVTESIIHMLEDKKTSTTDKVKRVLSDIQMPAEDKKKFKEVLNAIVGLQVDLSKIFELEEPLKIRLSEELEEEKLNVLQDYMDVIEKVQKIYSFGVLQGMLNGKTFISEAMIAKYEKHKKDLAVLKKLFKAHFPNEYNNMFRKYFDNAGKPLFNYVNYIGNQYIDKKIAKEDLYKTIKKILDTKKELAETCKEYQYCLDAIKNDDFLNLQNSRDNGAIPYQLHKEELIRIIDNQSSYYPVLQRERGNLIQLLEFRIPFYVGPLSSNPRGRQFAWVERKVKGEKVYPWNFEEVIDIEATAEKFIQRMTNKCTYLLGEDVLPKYSLLYSEFEVLNEINKIRVNGRLLSVSEKKNLLNTLFKTEKIIKEKRFKEWLVENQICRDFNVKVEGFQKEGQFSTSLTSYIDFKRIFGEVNERNYQMIEDIILWVTLFTEKDIIERKIKKTYAQVTDEQIREIKKLRYSGWGRLSRKLLAGITVTDNYNNPRTIMDYLRDTNMNLMQIISSDKLGFKKIIEKDTRFFDDADNLEEVVNGLPGSPAIKRGILQTMKVLEEIVKVKGRMPDNIFVEFAREDQESKRTQSRMDNLMKLYQKMKEESHSFFNEIAHLELQKKNLENNKLDTLKLFLYFIQNGKCMYTGEPLDIHNLSLYEVDHILPRSYIKDDSIDNLALVLKKENQRKADDMVLKREIIDRQRTWWNYLLECGLISKKKFDNLTRDHIDPDTMKGFIQRQLVETRQITKHVVKLIKACYPYSNIVSVKAQLCSDFRQQFNLYKCRTVNDFHHAHDAYLVSVIGNYILRRFPKLSEEFNYGQYRKIARDNASKYKFGFVISSMTSYSKTIDYNTGEVFEWNPDFEIGRIKKVLDYKDCFVSRKKEELTGEFYKQTIYGKNDARASIPLKKGLDVRIYGGYTGEQKAFYSVVEYKKKNKIHHAIVGIPIYIAKLAEQNETELIRYLLQAGYEDVKILKKKILKYQLIKYDGGLFYMVSDSEIINAKQLLVDQKYLEVINAIERGDISDINVELLHELYFHLVDKIKTHYHFYNDIADRLIDSANLFCDLSLENKAKFVEEMLKITQVNSTNANFKRFGFPGLGDRVGRMAGKNLVVDKIEFIDTSVTGMFETRQKGSELWDSEQLSLPTRVS

SEQ ID NO: 21343 - protein, 902 aa, unidentified
  REGION 1..902: note = Cas Enzyme sequence
ITNEMIEKVKEIISFRIPYYIGPLISNEENAKFGWAQRKEDGNIKPWNIEKIIDRSQSAENFINRMTSYCTYLTNEKVLPKHSLLYQKFEVLNELNGIQIRSSHELPNQKHRLEANEKKWIIENVFTKYKTVTHKRLKNELKKSSFKHLILDNNTGGLKEIYGTQKEDRFASSLSTYIDMETLFGPLKSVDKEMLEKIVYWISVFEEKEIIKYKIRENFPKVNQKQINQLINKNYPGWGRLSKKLLNELPADKENGLTIIDVMEQNSMVFMEVLSEGKYDLENRITKLNSQSDESYTRIKYKDIEQLQGSPAVKKGIWQAILIIEELVDIFGEPKNIMIEFAREDGQSRRTQSRKKQISDWHRAINKGEKDLKSFLKEHSQYEEAKYRNNRLYLYVTQQGKCLYSGEQLNLSQLQNYQVDHILPRSFVKDDSIDNLALVTTTMNQKKSGTKMPLEIIPKDKVYTQKAQWKKLFENKLISQRKYQRLLKESFSEQDKESFFARQLVETRQITKHVKDLLNERFEHTEIHTVNANIVTGLREHSDVIKLRNLNNKHHAVDAALAALIIQFTINKYGSNFLNFNFKYQEARKKWRKVFTKYHKSFFLFGDIDKYEKFTHYQTGEILSGRQYLAILNNEMPWQTTKKVGSSEEAFYDQTLYSPNDVKGRKPQYSSSKIEKGVHSSLKVDSSYLISYKYLNQKGQEKVNSEIVNYLVIERYQNVNFSQNDLALFLAKKVAKGIVISAKIHTRILKHQLLMNEKHPLYFVSEREMNNAKQFRPSRELMKRIHHINTKLIDKDNVKESYFKETFQLIIEDVMLQYKHFLPESRIHNMKEYVKKVKNIETFNYGLNEVYKMASASAARSEVFGGRYERKLDPKKVKFIYQSITGLRYRKPKSFKNELWFK

SEQ ID NO: 21344 - protein, 1357 aa, unidentified
  REGION 1..1357: note = Cas Enzyme sequence
MQKEYSIGLDIGTSSVGWSVIDSNTYKVIKKNTLVNHYNLNTSEETKEIKEKALWGVRLFEEAETAVNRRMARSTRRRYDRRRKRIKLLQDIFKEEINKVDNEFFEKLKTSFYSPEDINNIKINLTDFDKKNIFSNNKRNGTPKKYPTIYHLRNELVNNPDKKDIRLVYLALHHIIKYRGNFLYNNDNFKVNDINIADKLKEAFELIDDKELFTLNTEIDYKNLESIILGKSKNDVNVNLKKEFKNIIDDSKIADELVKLIIGNKFNVLTIFGLEKEEDCIEKISFNGSEYDDNYDKLSSQLNDKIEILEELKELYDAIFIKKMFNSENATTISALMVEKYDKHKKDLKELKSLLKENKNEYKRIFKSSDKEKCIYEKYVDNNIEYNDFKNEIKKALEKVTNLDLANKILKELNDETYLPRITSTDNGKYPYQFNKEELRKIIEHQSKYYPFLKNEVNGINKLEKILSFRIPYYIGPLNNRTNNKDIENPNAWLIKKDENKPISIYNFDEVIDKEQTAEKFIERMIKNCTYINNEKAMPINSIFYSRYKVISEIKQISVKANNQIIRFDKEQIENIYTDLFLKREKVNRKDLENYLRQDSFFRSIGDFETSGFQGKDRFVSSMKSYIDFFGENGLFNNTDYDLNDAEDIIKDVTIFEDKELLRTRIERKYPELNSSRICKLKYSGWSSLSKKLLDGIYYINPESKERKSIMDLLLETNENFMQILNNKKYHFQDEINKLNVITENEKINYELVKNLATSPKNKRGIYQALKIVEEIVDFMGYEPKNIAIEMARGDEEKKRTSSRKDQLKSIYDNIKGQVENYKELNKELNEIPDDQITEKVFLYFIQLGKSLYSGEKLDINRLNEYEVDHIMPQSLIKDDSIDNKALVLKEENQKKRDSLILPKEYRDKCTKWWTHLRKCNLISAKKEFALTRKEYTKDQIEGFINRQLVETRQITKHVANILNNFYKKTKIIYLHANLSHNYREKFELYKYRDLNDYHHAHDAYLAVCLGIYQDKYINKNIDFNELKELSKQLYKNEQYKELKYGYVINSLDNNIRNVNIKTGEVFDNVNFNKTIENTLYRNDIIISKKTEVKTGEFYNQTKNSKGLAGVELKKGLDTKLYGSYTSLNPSYAVVVKYYKGNTINQRMVGIPILIDTKLNSDPAVIDNYVKSLLNIKKDESISYVLDRENKILKIPFFTKMKWNEQICSLVGATDRVEVCNAKEFKIDKLNLKKWKYTLNILLNKKKKSNTFDYNKYENDLKEILNYIYEKVEREYNLYFNLTSELKDIIDESLISIEYEEKAIIELLKLLKFNSQTANFKHIKHSLAFGKKNDRTIDHATLITQSVTGLKERTYEF

SEQ ID NO: 21345 - protein, 1391 aa, unidentified
  REGION 1..1391: note = Cas Enzyme sequence
MTKVNKDYIVGLDIGTDSCGWVATDKKNNILKLQGKTAIGSRLFEEGHSAADRRTFRGTRRRLNRRKWRLKFLEEIFDPYMTKVDPYFFARLRESGLSPKDSTKNTQAIIFPTPKDDSDFYYKYHTIYHLRQALMSEDKKFDLREIYLAIHHIVKYRGNFLQNTPVKSFNASKINVKKTIKALNQLYAGSSNENQIELNIENTSKIEDIIRSKTTFKMDKAKQISKLLAMSSENKDINKQNRNIAKQITNAILGYKTQFETILSKKIDKNDKATWEFKLSDADVDDKLAILLPDLNQSEQGIIDEIKQLFSAVTLSDIVDEGKTLSESMIRKYNDHKKDLKLLKDVVRSQKDKDKAKRLSLAYDLYVNNQHGKLLEAKKAFKVMDKDKFYKIVKNNVDDSESAKTILKEIELDSFMPKQRTNQNGVIPYQLHQIELDKIIKNQSKYYPFLAEKNPVIDHQKQAPYKLDELVRFRVPYYVGPMITATDQEKTSGKNFAWMIRKEQGQITPWNFEQKVDRMASANKFIKRMTTKDTYLLGEDVLPANSLLYQKFTVLNELNNIRINNHRISVDVKQDVYKNLFKKYKTISSNKLSNYLKNNYNLKFVKITGLSDKSNNSKFNSSLATYYQLKHLNILGDKIDDPNYQKDLEHIIEWSTVFEDKSIYAAKLKTIDWLNVEQIKALSNLRYQGWGRLSHKLLTGLHDKNGQNITEKLWDSQKNFMQIVKEPDFKAAIEKENQSVVKATDTEDILADAYTSPANKKAIRQVIRVADDIVKAASGKAPSQFAIEFARESEKNPKLSQIRGSKLRKSYEKVFENSANKLVDVSLKEELDNSIKSRKLVRDKYFLYFMQGGRDAYTGERINIDEVDTKYQIDHILPQSFIKDDSFNNRVLTLAKINNEKSDRLPFNYSNRPADKGRLGMTMHQMWHEWLESGLISKYKYRNLILDPNQVSKYQKSGFINRQLVETSQIIKLVATILQAKYPDSEIIVVKAGYNHALRDRLNLYKNREVNDYHHAIDAYLTTICGNFLYQVYPDLRPFFVYGQFKKFSSNPDLEKQALKKHKKFDFIWPLLKRKDASEEIHQFKMGPVVFHKHEDIFNKLRRAYTFKYMLVSREVTTRDQEMFKMTLYPRADHDIKKSRKLIPKSKNMPTNIYGGYTSNSDAYMALVKIKKGQIFIYKVIGVPMRALSKLKIAKKQGKYDQVLKDVLTPVIMLNKNGKTQRGIEGFRILKGKIPYKQVVLDGEKKFMLGSSTYVYNAKQLTLSNETMRIVTNNFTIKDDRSKLLNQAYDEILEKVDKYLPLYDINSFRNKLHKGKDKFSKLNIKEKEATLVEILNGLHDNSVMGKLKNIGFSTAFGQMQIPSGITLSPNAKLIYQSPTGLFEKRVKISEL

SEQ ID NO: 21346 - protein, 1391 aa, unidentified
  REGION 1..1391: note = Cas Enzyme sequence
MTKVNKDYIVGLDIGTDSCGWVATDKKNNILKLQGKTAIGSRLFEEGHSAADRRTFRGTRRRLNRRKWRLKFLEEIFDPYMTKVDPYFFARLRESGLSPKDSTKNTQAIIFPTPKDDSDFYYKYHTIYHLRQALMSEDKKFDLREIYLAIHHIVKYRGNFLQNTPVKSFNASKINVKKTIKALNQLYAGSSNENQIELNIENTSKIEDIIRSKTTFKMDKAKQISKLLAMSSENKDINKQNRNIAKQITNAILGYKTQFETILSKKIDKNDKATWEFKLSDADVDDKLAILLPDLNQSEQGIIDEIKQLFSAVTLSDIVDEGKTLSESMIRKYNDHKKDLKLLKDVVRSQKDKDKAKRLSLAYDLYVNNQHGKLLEAKKAFKVMDKDKFYKIVKNNVDDSESAKTILKEIELDSFMPKQRTNQNGVIPYQLHQIELDKIIKNQSKYYPFLAEKNPVIDHQKQAPYKLDELVRFRVPYYVGPMITATDQEKTSGKNFAWMIRKEQGQITPWNFEQKVDRMASANKFIKRMTTKDTYLLGEDVLPANSLLYQKFTVLNELNNIRINNHRISVDVKQDVYKNLFKKYKTISSNKLSNYLKNNYNLKFVKITGLSDKSNNSKFNSSLATYYQLKHLNILGDKIDDPNYQKDLEHIIEWSTVFEDKSIYAAKLKTIDWLNVEQIKALSNLRYQGWGRLSHKLLTGLHDKNGQNITEKLWDSQKNFMQIVKEPDFKAAIEKENQSVVKATDTEDILADAYTSPANKKAIRQVIRVADDIVKAASGKAPSQFAIEFARESEKNPKLSQIRGSKLRKSYEKVFENSANKLVDVSLKEELDNSIKSRKLVRDKYFLYFMQGGRDAYTGERINIDEVDTKYQIDHILPQSFIKDDSFNNRVLTLAKINNEKSDRLPFNYSNRPADKGRLGMTMHQMWHEWLESGLISKYKYRNLILDPNQVSKYQKSGFINRQLVETSQIIKLVATILQAKYPDSEIIVVKAGYNHALRDRLNLYKNREVNDYHHAIDAYLTTICGNFLYQVYPDLRPFFVYGQFKKFSSNPDLEKQALKKHKKFDFIWPLLKRKDASEEIHQFKMGPVVFHKHEDIFNKLRRAYTFKYMLVSREVTTRDQEMFKMTLYPRADHDIKKSRKLIPKSKNMPTNIYGGYTSNSDAYMALVKIKKERSFIYKIIGVPMRALSKLKLAKKQGKYDQVLKDVLTPVIMLNKNGKTQRGIEGFRILKGKIPYKQVVLDGEKKFMLGSSTYVYNAKQLTLSNETMRIVTNNFTIKDDRSKLLNQAYDEILEKVDKYLPLYDINSFRNKLHKGKDKFSKLNIKEKEATLVEILNGLHDNSVMGKLKNIGFSTAFGQMQIPSGITLSPNAKLIYQSPTGLFEKRVKISEL

SEQ ID NO: 21347 - protein, 1391 aa, unidentified
  REGION 1..1391: note = Cas Enzyme sequence
MTKVNKDYIVGLDIGTDSCGWVATDKKNNILKLQGKTAIGSRLFEEGHSAADRRTFRGTRRRLNRRKWRLKFLEEIFDPYMTKVDPYFFARLRESGLSPKDSTKNTQAIIFPTPKDDSDFYYKYHTIYHLRQALMSEDKKFDLREIYLAIHHIVKYRGNFLQNTPVKSFNASKINVKKTIKALNQLYAGSSNENQIELNIENTSKIEDIIRSKTTFKMDKAKQISKLLAMSSENKDINKQNRNIAKQITNAILGYKTQFETILSKKIDKNDKATWEFKLSDADVDDKLAILLPDLNQSEQGIIDEIKQLFSAVTLSDIVDEGKTLSESMIRKYNDHKKDLKLLKDVVRSQKDKDKAKRLSLAYDLYVNNQHGKLLEAKKAFKVMDKDKFYKIVKNNVDDSESAKTILKEIELDSFMPKQRTNQNGVIPYQLHQIELDKIIKNQSKYYPFLAEKNPVIDHQKQAPYKLDELVRFRVPYYVGPMITATDQEKTSGKNFAWMIRKEQGQITPWNFEQKVDRMASANKFIKRMTTKDTYLLGEDVLPANSLLYQKFTVLNELNNIRINNHRISVDVKQDVYKNLFKKYKTISSNKLSNYLKNNYNLKFVKITGLSDKSNNSKFNSSLATYYQLKHLNILGDKIDDPNYQKDLEHIIEWSTVFEDKSIYAAKLKTIDWLNVEQIKALSNLRYQGWGRLSHKLLTGLHDKNGQNIMEKLWDSQKNFMQIVKEPDFKAAIEKENQSVVKATDTEDILADAYTSPANKKAIRQVIRVADDIVKAASGKAPSQFAIEFARESEKNPKLSQIRGSKLRKSYEKVFENSANKLVDVSLKEELDNSIKSRKLVRDKYFLYFMQGGRDAYTGERINIDEVDTKYQIDHILPQSFIKDDSFNNRVLTLAKINNEKSDRLPFNYSNRPADKGRLGMTMHQMWHEWLESGLISKYKYRNLILDPNQVSKYQKSGFINRQLVETSQIIKLVATILQAKYPDSEIIVVKAGYNHALRDRLNLYKNREVNDYHHAIDAYLTTICGNFLYQVYPDLRPFFVYGQFKKFSSNPDLEKQALKKHKKFDFIWPLLKKKDASEEIHQFKMGPVVFHKHEDIFNKLRRAYTFKYMLVSREVTTRDQEMFKMTLYPRADHDIKKSRKLIPKSKNMPTNIYGGYTSNSDAYMALVKIKKERSFIYKIIGVPMRALSKLKLAKKQGKYDQVLKDVLTPIIMLDKNGKTKRGIEEFRILKGKIPYRQIVLDDEKKFMLGSSTYVYNAKQLTLSNETMRIVTNNFTTKDDRSNLLNQAYDEILEKVDKYLPLYDINSFRNKLHKGKDKFSKLNIKEKEATLVEILNGLHDNSVMGKLKNIGFSTAFGQMQIPSGITLSPNAKLIYQSPTGLFEKRVKISEL

SEQ ID NO: 21348 - protein, 1052 aa, unidentified
  REGION 1..1052: note = Cas Enzyme sequence
MSKIDKDYIAGLDIGTNSCGWVATDLQNNILKMHGKTAIGSHLFEEGTSAADRHGFRTTRRRLKRRKWRLKLLEEIFDPYMVKLDPYFFARLKESGLSPLDRRKTSSSIIFPTKSEEQEYYKKDKYPTIYHLRNALMKENQRFDLREVFLAIHHIVKYRGNFLQDTPVKDFNASKIDVKITLENLNKLFPDVSEEYSVEFAVENVDKIETILRDDNTFKLDKSRQISKLLVEPSKNKDENKLRKDIARQVANAILGYKTKFEDILLVDIDKDEKSNWEFKLSDSDADEKVDQIITALSDTQQEVISEIRNLFSAITLSGIVDEGKTLSESMIRKYKDHQKDVALLKKVIKNHPDKDEAKRLSLAYDLYVNNRHGHVLEAKKVLKSQGIKTNKTLTKEDFYSLVKKNLDESKEAKEILNKIALDSFMPKQRTNENGVIPFQLHQIELDKIIANQSKYYPFLAEKNPVESHRSQAPYKLDELVRFRVPYYVGPMIQPKETKDQQVKQNQNFAWMVRKEKGQITPWNFDQKVNRMESANHFIKRMTTKDTYLLGEDVLPANSLLYQKFMVLNELNNIRINNRRISVAVKQNVYNDLFMNKATVSTKNLVDYLKQKYRLPSVEIKGLADPKKFNSGLIVYNKLKNTNLFDAEIADSRYRSDLERIIEWSTIFEDKTIYKAKLQTIDWLNDKQIRTLINIRLQGWGRLSRKLLTGLHDKNGQTIMEQLWDSQKAFMQIVNEPDFKAEIASENQAIVKNTSIEDFLTDAYTSPANKKAIRQVIKVVDDIVKAASGKAPKQIAIEFARDADRSKRTVGRGARLLNIYEKITDDLITTSLKESLKQASETNQFIHDKIYLYFMQGGRDAYTGKPINIDEVITGYQIDHILPQSFIKNDSLDNRVLVSSPVNNGKSDHVPAKMFGNKMAAGLGITISDMWKKWLDLGLISKQKFQNLKLDPNHINKYQASGFINRQLVETSQIIKLVATILQTKYPDTEILVVKASSNHCLRKHFHLYKSREVNDYHHAIDAYLSTICGNLLYQAYPKLRPFFVMDSTKNL

SEQ ID NO: 21349 - protein, 1386 aa, unidentified
  REGION 1..1386: note = Cas Enzyme sequence
MTKIKNEYIVGLDIGTNSCGWVAMDFQNTILRMHGKTAIGSHLFDAGNSAADRRAFRTTRRRIKRRKWRLKLLEEIFDPYMTEVDPYFFARLKESGLSPLDKRKNASSIVFPTALEDKKFYCNYPTIYHLRYDLMSEDKKFDLREIYLAIHHIVKYRGNFLYNTPVKDFEASKIDVKDSLEKLNELYERLDSEFTVELDSSNALEIEKIIRDKNVFKINKVKSIHQLLSLKTENKERTKLIKDVSKQIINAILGYKTKFETILLKNISKDEADDWEFKLTDVDADNKFENLIGDLNENEQEILLVIRNLANAITLSNIVEEGKTLSESMIDKYNKHSDDLKLLKQVISDHPDRDKAKKLALAYDLYVNNRHGKLLQAKDVLGSKKTLSKEDFYKEVKKNLDDSKASQEILDAIALDSFMPKQRTNENGVIPYQLHQLELDRIIKNQGKYYPFLKEANPVSSHLKQAPYKLDELIRFRVPYYVGPLISPNESTKNKQTKKNQNFAWMIRKEQGQITPWNFDQKVDRMASANKFIKRMTTKDTYLLGEDVLPANSLLYQKFTVLNELNNIKINGKRISVPLKQELYNNLFKKNSTVTTNKLKSYLKENYNLINVEIKGLADEKKFNSGLTTYNKLRNLKIFDQQIDDLNYDKDFERIIEWSTIFEDKAIYKDKLKTIKWLSDRQIDKLSKIRMQGWGQLSKKLLSQLTDNNGQTIIEQLWDSQNNFMQIVNQADFKDAIAVANQNLLVNTSVEDILNEAYTSPANKKAIRQVVKVVDDIVKAASGKVPKQIAIEFTRDADDKAKISQTRANKLRKVYKELSNELASEAIRSELERVAKDQKLLKDKYYLYFMQLGRDAYTGEPIDIDELEQYDIDHILPQSFIKDDSLENRVLVKKAVNNGKSDNVPVKLYGNHMAADLGITIRHMWEKWKDQGLITKTKYNNLIIDPDKINKYESSGFIHRQLVETSQIIKLASTILQSKYPDTEIIVVKARYNHYLRKHLNLYKSREVNDYHHAIDAYLSAICGNLLYQVYPYLRPFFVYGQYKKFSSDPKKEKIIYDKTRKYNFISQIFENKGNDIISLETKKKVFDKKDIIEKLKHAYDYKYMLVSRETETRDQEMFKMTVYPRLSRDTKKSRNLIPKKKDMPTEIYGGYTNNSDAYMVIARINKKKETEYRVFGVPMRELVNLRKAEKKGHYNAYLKQVLEPEIMYNKNGKKNKTISSFEIVKSKVPYKQVILDGDKKFMLGSSTYVYNAKQLTLSQDAMQAITDNCENDTDEEKALIEAYDEILTNIDKYLPLFDINKFRDKLHAGREKFINLSLDVKKDTILQVLNGLYDNAVMPKIKSLGLSTELGKLQIPTGVKLSENAKLIYQSPTGLFEKRVKISDL

SEQ ID NO: 21350 - protein, 1156 aa, unidentified
  REGION 1..1156: note = Cas Enzyme sequence
MGKRIYRLGLDIGIGSVGWAVISTDEQGRNGRIESFGTRIFESGEKNNGKERTSQERRGFRHIRRTLRRRRSRKDILKNYLKYIRFLKDSEIHAASETPETRMVALKCRAAEEPVSREDLLRVLIHFCNHRGYRDFYEPEERSQASEDTELEEDGATKEEQAKLDEERGMLEAADSFDRKFQESGCRTVSQYIRENYVMSDSGQYNFRNHDYKGKDRLVVRRKHFQDEAQLILERQAVHCPELTEERILHILDIIFRQRDFEDGPGDSQDENRRYKGFLDTLGMCRFYPEEKRGFRNTVLGDLYAAVNAFSQYRYVNEETGEAGLTKEAAQRLIEAIMKEGSLTRKQAEKLLKPLRLTLLGAKDVDTTLTKSFRYIRLIKKAAEKAGLSWEAMIENKDCWTEREPLSFLNQLGDTLSSYQTPRRRVEELRRIQALAEARHIPVNDTFWKLLKGLRLSGTSGVSYHHMADAVEAFLDGDIYGNFQWGREKKALEQEEIKKTLLLPPDVLSRDEDLKDNPVVLRSINETRKILNALIRIYGTPDYINVEVADDVARSYVERQRLDRLKKSNEKENDAIRKKAAEILQCDPAEVKGPQIERYKLYCQQEGKCLYSGEPLDLKRALILDNHEYEVDHIVPYSLILDNTIHNKALVLGSENQSKRQQTPLMYLKGEKREAFLARVEAAYRRKSHPISQRKYQYLHLESIYGDKAAEVLKGWKSRNINDTRYITKYVVGLLKHHLAGSPKVYGIRGHITSRFRKEWLNRDTWGSEEKNRGNYLNHAADAVIIANLTEAAAVLAMDYEKLRQVQRHFGGTESIAYQRMLDGCVKQLSGYYHMDAELARARLQNTAVVPSVVPGLRQEVDLRFGPAEGDTRTTEEFQHEVELYYGGCGDFILPPYQPITSIKPERRFRGAVADSKPIRLVEIDGDMWKISRRAIGSVKKKDLPNLYTTDGALLDALHTALDGQADSYTVQQYLDAHGMDAFLTTAGQVVRKVSVKEQTVSNYYKKYISKNNYSILGMPKTYCVELYKDIKGKTRIWGIRYVDMQNKDGKLTLLRPLPSNYVQHIMYLHAGDYIEVTKKEKTVFKGFFQAVKNINENKVYVKNINQSNTIYISLGPDTTVQKYALTLLGVKGGCIDEMKEGFPCFVPLSSKKGNG

SEQ ID NO: 21351 - protein, 1171 aa, unidentified
  REGION 1..1171: note = Cas Enzyme sequence
  SITE 112: note = misc_feature - Xaa can be any naturally occurring amino acid
  SITE 236: note = misc_feature - Xaa can be any naturally occurring amino acid
  SITE 297: note = misc_feature - Xaa can be any naturally occurring amino acid
  SITE 711: note = misc_feature - Xaa can be any naturally occurring amino acid
  SITE 724: note = misc_feature - Xaa can be any naturally occurring amino acid
  SITE 787: note = misc_feature - Xaa can be any naturally occurring amino acid
  SITE 863: note = misc_feature - Xaa can be any naturally occurring amino acid
  SITE 865: note = misc_feature - Xaa can be any naturally occurring amino acid
  SITE 886: note = misc_feature - Xaa can be any naturally occurring amino acid
  REGION 898..899: note = misc_feature - Xaa can be any naturally occurring amino acid
  SITE 924: note = misc_feature - Xaa can be any naturally occurring amino acid
  SITE 990: note = misc_feature - Xaa can be any naturally occurring amino acid
  SITE 1105: note = misc_feature - Xaa can be any naturally occurring amino acid
  SITE 1138: note = misc_feature - Xaa can be any naturally occurring amino acid
MDKKVVIGLDLGIASVGYCLVEKETQEIILRGSHVFEILSNAKSGPNTKGGYGEGIRGEKRRARRLIRRRQTRKSDFCKLIESEKYKKLFNFSKTSILENKLNDKNYINKIXSEYDNLKVFSCQELNKIPYPIYELAAYGLDNELKPDELFKVLHARLSFRGVSYAIPKEDCSKPLSKQLLELLEKNKKLRDLNCRILNDLNDANKEEKEQKNHLLIFSCKRNCDDLKKIIQNCSXLGNLKEEFIKDFLGDPSSENISKKYGIFSRVRDYSYGPGTEKSRTDFGIYKKDGTQVKNLXEESIGICPVFNDLKRSLKCQIIPEISNLLSQLNSIKILFDNEVHFLSLTQKITIFRKIITEKVPLTLLKMSKWLSIKKDDIKGYPTNKDRSEHNFESCKNLIKIIKNEILIIKDFQELIEKSYELDILTEKYLINFYNPDEPSYCNKNYSQSIKLIKEKDINKIINNYENYCNLNPLTEKEMNSKTAEKIQESKNNYTKNVISGTHQLSLKALYEYIKENVNDNKTCSAFYFKQLAEFEKSQYKFSSYSKYLPEDLLKYADFISPNVKQTVRECCKILNKILKKYIFNNEKYILDAIVIETTNDTKYALHGIENNKRIINQQMNESKIKEKIRENYPGIKEETIEKISLLKQQNYTDLYDGYSINEKDIINNPDQYEIDHILPISRTQNNNQNNKAITKKLNNKNKGNRTLYEXKSSSEFEELKIKXISIFEKTNIIKLNNLLMKDLKLKERSFIARNLTETQYIIRRIKLGFIAYYDHIMQHRLIDDNXESTINQLKDMQILTVSGEVTQRIRNKKLSVGKKDREISSEHHSVDASICAMLGTLTPFRETLNSLIRIINNETGKXEXKYNDKRPLDIFDYEIISNNEXVKISSNIKKSGXXLSTKYTNKLDKYKTLEEKLTEINSXKSKKLSDETIYGYVDINEEHHQKEKINLLKTDEKQIQKLKSIFGKDYKYPDCLNSKNYFDALKKIXFNSISKFNLNLEDLKENPFHLYMEDQAIVDLEFKLSLSKSCVKIIDNNLNADIKKITVLGNKINGYLLKKMSKNAMIDGLTAKCVYLVKKEDQKIIFLNENYLNLGKEKCEKNNXEIIDVIEIGQIYNINNVLFKIIGCHKTNGCLQXKNIENKKEKTRQNPYSTFPKEKIKTNFLFNNKQ

SEQ ID NO: 21352 - protein, 976 aa, unidentified
  REGION 1..976: note = Cas Enzyme sequence
MTKILGIDLGTSSIGWCIINEKERIPSAIVDMGVRIFSEVTDAKTKTPKNQERRLKRGLRRQTDRKARRRKKVSNILNRFGFLPLTQSDHQAWQEWNIKVGCPYEIRKKALTERITKEEFAKAMIHFAKRRGFKSNRKVPGGEDGIVKSAISEIRQEMETSGFRTVGEYLHGEEIKRGKYLHRDMFEDEFTKIWEKQSSFDANAYSESLKECLWDAIFFQRPLKIQTHLIGNCSLEQNRKRCPKAYLAFQEFRILTELANLEVKDPITGDHEPLSSDQKTALFELLNISEKLTWKKARKALGLHDGETINLEETGSKYLQGNKTATQLVKIIGKDNWSRYARSQKDQLITDISTIEQEESLKKRLTEHWKFKQNEVLGLLKIKLEDGYGNYSHKALSKIIPHLKEGKNLWEAKLSSGYNDQEKEEALDALPLPDNLRNPVVMKALHEVRKVINAIIRTHGKPEIIRIEMARDLKQSKKDRDQYLKVVREREKENKKISSILGEDPEFNLAKPTRDDRIKYQLWKECGMVCPYSGQSISKSMLFGGGVEIEHILPYSISLDDSIGNKTLCVTSFNRDKGNKTPYQAFGNQLEWDDMVQRVRASRMSFGKKKRFETKEASFDNFSSRQLNDTRYICKEVSGYVKKLGVRVDVSRGQLTHAIRHQWGLNRLLSTENQKNRDDHRHHALDALITAIISPRMMQEVSRISQKLNGASLSNRLFKLPKPWSAFDEDLKNKVFSIIVSHAEENRISGAFHEDTAYGKRKDGTLAYRKSVEMLNNKECEDKIRDPAVKAIILKQISKHDGDIKKALAEPIFHKDGKTPIKKVRLETKKEEHSLFEVRHNHEPFKYHLLGNNHHIEIFEDKNGKWLPRVVSTYESAKRARTNKENIVSRDFKDNKFIMSLSSKQMLEIINETKVEYYKVQNISVSSGGRVMLKRDYSADLKDSSTSMDKTINALKKLNFRKISVDPIGRVQTRND

SEQ ID NO: 21353 - protein, 1428 aa, unidentified
  REGION 1..1428: note = Cas Enzyme sequence
MYNYNIGLDIGTGSVGWCLTDENGHLLKVNRKGNNGKTYRNSAWGVRLFESADTAADCRIKRSTRRRYNRRRTRIIELRKIMSDMIMPIDPNFYARLDEAFLWNEDKSDKAKAPFLLFNDNGYDDVKYYTDYPTIYHLRKHLLETEGRADARLIYLALHHMMKYRGHFLFEGQSFEAIDNIEDTFIELEHLVNVYVKEKEDTDNNSKNNALYQTIKNYLADNKVKNKDKKEDITDTFIKAGYDNKYSKELAAAVLGYEFNVGIIVNDNNLTDENGKALKAKFADAKYEEQEEKLSDTLGEKYYIVETLKKIYSWKVLHSILGDSKYLSYAMVDKYKKHGEQLTALKDLFHKYTSQNEYNDFFHHEKDEDGKYIVNYVNYIKGIKRLSNETNKKYNTKQQLYESIKEKLGERAADDEVYKKILVEMEQETFLEKINNVDNSAIPYQLNLMEMDKILTQQGVYYKELRGNKELLLKMLSSKIPYYVGPLNNNSNGNRNFAWMTKKAGKENEKVYPWNVKDVVDIDVTAEDFITRMTNYCTYLPDEKVLPKESLLYQKYMLLEELSQIRIDGKKLSKEDRKVIINDLFIGKGRIKVSDKDFKEYLNKINYVKINDKGYDVTGYQSDDGFACALSSYNKFRRILGYVDERNEKMIEDIIYWLTVFDDKDIVKRKINKQYADRLNDEQLKKILKLKFKGWGRYSAKLLNGIKGDMGTTIIEMLEDADERFEYCDYCPNFMQIINKDEKIKQIIDDNRPRYDGTKDLLDVIQDMHTSPANKRGIWQTMKVIEEIIEYMGEKPQQIYIEFAREDDPKAKNKRTDSRKRAIDKALKKLKEDVVDEYNENVYKELKQYEKRLDEEKVYLYFMQNGKDLYFPDKELNLDELEKLEIDHIIPYSLSDDDSLDNKALVLKGNNQNKGNKIVKEAFPQLFSNSGTVNYWKNLKKAGLISEKKFNNLQKNNVDDILTKGFINRQLVETRQIVKSVANLILDYYNEQIDVIEVKSSLSTSVRKMLTYEKKDNNGFWEENKDNCMFYKNRDMNDYHHAHDAYLANIIGMYIQKNYPHLQKELNYSQYRRVWRKYYENTKNNNGVNWFATLGKFSSNNEEADWYGQDIIAYMRKIFCYRDVLISKKVEENTGAFYSETKYPREDKAGSKLVPLKQGDNMRGANNLKELDTRKYGGYKGGEKAYFVLVRYCTEKALKKKVKKEYHMEFVEIPVYIARGIKNKNINLYDYVCDTLNEANKNSVADVEILRNKVPKYQMIIGENGEEYYLVSATEVINSKQFVLGGSNQQYNRLLNYIKYGKNDKWQYIQTALLDEQLIGLYNLLIAKIKDEYKGFSKEAVRIQENNSFDKLDVKDKKEFIAEMIKLVQPDSDYPYLGKYATGLSNRMGRKTGEKVGKKITLVDKSVTGLYERRTTFELEDDSSTKSR

SEQ ID NO: 21354 - protein, 1425 aa, unidentified
  REGION 1..1425: note = Cas Enzyme sequence
MYNIGLDIGTGSVGWCLTDENGYLLKVNRKGNNGNTYRNSAWGVRLFESADTAADCRIKRSTRRRYKRRRTRIIELRKIMSDMIMPIDPNFYARLDEAFLWNEDKSDKAKAPFLLFNDNGYDDVKYYTDYPTIYHLRKHLLETKEKADPRFIYLALHHMMKYRGHFLFEGQSFEAIDNIEDTFIELEHLVNVYVKEKEDTDNNAENNALYQEMKNYLADNKVKNKDKKEYITDTFIKADYDNKYSKELAAAVLGYEFNVGIIVNDNSLTDEDGKALKAKFADAKYEEKEEKLSDTLGERYYIIETLKKIYSWKVLHSILGDNKYLSYAMVDKYEKHSEQLKALKYLFHKYTSQDEYSEFFHQEKNKEGKYIVNYANYIKGIKRLSNETNKKYNTKQQLYQSIMKILGERAADDEVYKKILVEMEQETFLEKINNVDNSAIPYQLNLMEMDKILTQQGVYYKELRDNKELLLKMLTSKIPYYVGPLNNNSNGNRNFAWMTKKDGKENEKVYPWNVKDVVDIDVTAEDFITRMTNYCTYLPNEKVLPKESLLYQRYMLLEELSQIRIDGRKLSKEDRKAIINDLFIGKGRVKVSDKDFKEYLNKVNYVKVNGKGYDVTGYQSDDGFACALSSYNKFRRILGHIDEQNEKMIEDIIYWITVFEDKDIVKRKINKQYADRLSAEQLKKILKLKFKGWGRYSSKLLNGIKGDMGTTIIEMLEDADERFAYCDYCPNFMQIINKDEKIKQIIDDNRPRYDGTKDLLDVIQDMHTSPANRRGIWQTMKAIEEIIEYMGEKPQQIYIEFAREDDPKAKNKRADSRKRAIDKALKKLKEDVVDEYNEKVYKELKQYEKRLDEEKVYLYFMQNGKSLYTGKELNLNEPENLEIDHIIPYSLSDDDSLDNKALVLKKENQNKGNKIVKEAFTQSFSDSEMMDYWKNLKKSGLISEKKYNNLQKNNVDDILTKGFINRQLVETRQIVKSVANLILDYYNEQIDVIEVKASLSTSVRKMLTYEKKDNNGFWIENKDNCMFYKNRDMNDYHHAHDAYLANIIGLYIQKNYPRLQKELNYSQYRRIWRKYYENTKNNNGVNWFATLGKFSSNNEEADWYGQDIIAYMRKIFCYRDVLISKKVEENTGAFYSETKYPREDKAGSKLVPLKQGNNMRGANNLKELDARKYGGYKGGEKAYFVLVKYCIEKALKKKVKKEYHMEFVEIPVYIARGIKNKDINLYDYVCDILNEANKNSVADVEILRNKVPKYQMIIGENGEEYYLVSATEVINSKQFVLGGANQQYNRLLNYIKYGKNDKWQYIQTELLDEQLIGLYNLLIAKIKDEYKGFSKEAVRIQENNSFDKLDVKDKKEFIAEMIKLVQPDSDYPYLGKYATGLSNRMGRKTGEKVGKKITLVDKSVTGLYERRTTFELEDDSSTKSR

SEQ ID NO: 21355 - protein, 1425 aa, unidentified
  REGION 1..1425: note = Cas Enzyme sequence
MYNIGLDIGTGSVGWCLTDENGYLLKVNRKGNNGNTYRNSAWGVRLFESADTAADCRIKRSTRRRYNRRRTRIIELRKIMSDMIMPIDPNFYARLDEAFLWNEDKSDKAKAPFLLFNDKEYNDKKYYEDFKTIYHLRKYLINTTNKVDARLIYLALHHMMKYRGHFLYEGQTFESIDNVEDVFVELNNLVNAYIKECEDKDGNEYNDVYREIKKCLADNEIKNKDKKELIAAMFMRADYSKKYSKEVAVAILGYEFNVGIIVGENELTGEDNKPLKTKFSDANYEEQEENISSVLGEKYSIIEALKKIYSWKVLHGILGDNTYISSAMVAKYNIHKQQLSELKQLFHKYASQDEYSDFFHKEKYKSGNYIVNYANYIKGIKRLTNKDNKNYSAKQQLYISIRKILDDRALKDETYQKILKEMEEETFLEKINNVDNSAIPYQLNLMEMDKILTQQGVYYKELKDNKEQLLKMLTSKIPYYVGPLNNHNKGNRNFAWMTRKTGKESEKLYPWNIKDVVDIDVTAEDFITRMTNYCTYLPDEKVLPKESLLYQRYMLLEELSQIRIDGKKLSKEDRKAIIDDLFIGKGRVKVSDKDFKEYLNKVNYVKVNGKGYDVTGYQSDDGFACALSSYNKFRRILGHIDEQNEKMIEDIIYWLTVFEDKDIVKRKINKQYPDRLTDEQLKKILKLKFKGWGRFSRKFLAGIKGDMGTTIIDMLEDADDRFLYCNYCPNLMQIINKDEKIKQIIDDNRPRYDGTEDLLDVIQDMHTSPANRRGIWQTMKAIEEVIEYMGEKPQQIYIEFAREDDPKAKNKRADSRKRAIDKALKKLKEDVVDEYNENVYKELKQYEKRLDEEKVYLYFMQNGKDLYFPDKELNLDELEKLEIDHIIPYSLSDDDSLDNKALVLKGNNQNKGNKIVKEAFPQLFSNSGTVNYWKNLKKSGLISEKKYNNLQKNNVDDILTKGFINRQLVETRQIVKSVANLILDYYNEQIDVIEVKASLSTSVRKMLTYEKKDNNGFWIENKDNCMFYKNRDMNDYHHAHDAYLANIIGLYIQKNYPRLQKELNYSQYRRIWRKYYENTKNNNGVNWFATLGKFSSNNEEADWYGQDIIAYMRKIFCYRDVLISKKVEENTGAFYSETKYPREDKAGSKLVPLKQGNNMRGANNLKELDARKYGGYKGGEKAYFVLVKYCIEKALKKKVKKEYHMEFVEIPVYIARGIKNKDINLYDYVCDILNEANKNSVADVEILRNKVPKYQMIIGENGEEYYLVSATEVINSKQFVLGGANQQYNRLLNYIKYGKNDKWQYIQTELLDEQLIGLYNLLIAKIKDEYKGFSKEAVRIQENNSFDKLDVKDKKEFIAEMIKLVQPDSDYPYLGKYATGLSNRMGRKTGEKVGKKITLVDKSVTGLYERRTTFELEDDSSTKSC

SEQ ID NO: 21356 - protein, 1446 aa, unidentified
  REGION 1..1446: note = Cas Enzyme sequence
MFNIGLDIGTASVGWCLTDENGHLLKVNRKGDNGKTYRNSAWGVRLFDSADTAADCRIKRSTRRRYNRRRTRIIELRKIMSDMIMPVDPNFYARLDEAFLWNEDKSDKAKAPFLLFNDNGYDDVKYYTDYPTIYHLRKHLLETKEKVDPRFIYLALHHMMKYRGHFLFEGQSFEAIDNIEDTFIELEHLVNVYVKEKEDTDNNAENNALYQEIKNYLADNKVKNKDKKEYITDTFIKADYDNKYSKELVAAVLGYEFNVGIIVNDNSLTDEDGKALKAKFADAKYEEKEEKLSDTLGERYYIIETLKKIYSWKVLHSILGDNKYLSYAMVDKYEKHSEQLKALKYLFHKYTSQDKYNDFFHKEKCYKNDKDEKDADEEKNNNEKKCDKWKYIVNYANYIKGIKRLSNETNKKYNTKQQLYQSIKEILGERAADDEVYKKILVEMEQETFLEKINNVDNSAIPYQLNLMEMDKILTQQGVYYKELRGNKELLLKMLTSKIPYYVGPLNNNNKGNRNFAWMTKKAGKENEKVYPWNVKDVVDIDVTAEDFITRMTNYCTYLPDEKVLPKESLLYQRYMLLEELSQIRIDGRKLSKEDRKAIIDDLFIGKGRVKVSDKDFKEYLNKVNYVKVNSKGYDVTGYQSDDGFACALSSYNKFRRILGYVDERNEKMIEDIIYWLTVFEDKDIVKRKMNKQYADKLSDEQLKKILKLKFKGWGRYSAKLLNGIKGDMGTTIIEMLEDADERFAYCDYCPNFMRIINKDEKIKQIIDDNRPRYDGTKDLLDVIQDMHTSPANKRGIWQTMKVIEEIIEYMGEKPQQIYIEFAREDDLKAKNKRTDSRKRVIDKALKKLKEEVVDEYNENVYKELKQYEKRLDEEKVYLYFMQNGKSLYTGKELNLNEPENLEIDHIIPYSLSDDNSLDNKALVLKKENQNKGNKIVKEAFPQSFSDSKMIDYWKNLKKAGLISEKKFNNLQKNNVEDILTKGFINRQLVETRQIVKSVANLILDYYNEQIDVIEVKASLSTSVRKMLTYEKKDNNGFWEENKDNCMFYKNRDMNDYHHAHDAYLANIIGMYIQKNYPHLQKELNYSQYRRVWRKYYENTKNNNGVNWFATLGKFSSNNEKVDWYGQGIIAYMRKIFCYRDVIISKKVEENTGAFYSETKYPREDKTDSKLVPLKQGNNMRGANNLKELDTRKYGGYKGGEKAYFVLVKYCIEKALKKSVKKEYHMEFIGIPVYIARGIKNKDINLYDYVCDILNEANKNSVADVEILRNKVPKYQMIIGENGEEYYLVGATEVINSKQFVLGGANQQYNRLLNYIKYGKNDKWQYIQTELLDEQLIGLYNLLIAKIKDEYKGFSKEAVRIQENNSFDKLDVKDKKEFIAEMIKLVQPDSDYPYLGKYATGLSNRMGRKTGEKVGKKITLVDKSVTGLYERRTTFELEDDSSTKSR

SEQ ID NO: 21357 - protein, 1446 aa, unidentified
  REGION 1..1446: note = Cas Enzyme sequence
MFNIGLDIGTASVGWCLTDENGHLLKVNRKGDNGKTYRNSAWGVRLFESADTAADCRIKRSTRRRYNRRRTRIIELRKIMSDMIMPVDPNFYARLDEAFLWNEDKSDKAKAPFLLFNDNGYDDVKYYTDYPTIYHLRKHLLETKEKVDPRFIYLVLHHMMKYRGHFLFEGQSFEAIDNIEDTFIELEHLVNVYVKEKEDTDNNAENNALYQEIKNYLADNKVKNKDKKEYITDTFIKADYDNKYSKELAAAVLGYEFNVGIIVNDNSLTDEDGKALKAKFADAKYEEKEEKLSDTLGERYYIIETLKKIYSWKVLHSILGDNKYLSYAMVDKYEKHSEQLKALKYLFHKYTSQDKYNDFFHKEKCYKNDKDEKDADEEKNNNEKKCDKWKYIVNYANYIKGIKRLSNETNKKYNTKQQLYQSIKEKLGERAADDEVYKKILVEMEQETFLEKINNVDNSAIPYQLNLMEMDKILTQQGVYYKELRDNKELLLKMLTSKIPYYVGPLNNNNKGNRNFAWMTKKAGKENEKVYPWNVKDVVDIDVTAEDFITRMTNYCTYLPDEKVLPKESLLYQRYMLLEELSQIRIDGRKLSKEDRKAIIDDLFIGKGRVKVSDKDFKEYLNKVNYVKVNSKGYDVTGYQSDDGFACALSSYNKFRRILGYVDERNEKMIEDIIYWLTVFEDKDIVKRKMNKQYADKLSDEQLKKILKLKFKGWGRYSAKLLNGIKGDMGTTIIEMLEDTDERFAYCDYCPNFMRIINKDEKIKQIIDDNRPIYDGTKDLLDVIQDMHTSPANRRGIWQTMKVIEEIIEYMGEKPQQIYIEFAREDDLKAKNKRTDSRKRVIDKALKKLKEEVVDEYNENVYKELKQYEKRLDEEKVYLYFMQNGKSLYTGEELNLNEPGNLEIDHIIPYSLSDDDSLDNKALVLKRENQNKGNKIVKEAFLQSFSDSKMIDYWKNLKKAGLISEKKFNNLQKNNVEDILTKGFINRQLVETRQIVKSVANLILDYYNEQIDVIEVKASLSTSVRKMLTYEKKDSNGFWEENKDNCMFYKNRDMNDYHHAHDAYLANIIGMYIQKNYPHLQKELNYSQYRRVWRKYYENTKNNNGVNWFATLGKFSSNNEEADWYGQDIIAYMRKIFCYRDVLISKKVEENTGAFYSETKYPREDKAGSKLVPLKQGNNMRGANNLKELDTRKYGGYKGGEKAYFVLVKYCIEKALKKKVKKEYHMEFVEIPVYIARGIKNKDINLYDYVCDILNEANKNSVADVEILRNKVPKYQMIIGENGEEYYLVGATEVANSKQFVLGGANQRYNRLLNYISYGKNDKWQYIQTELLDEQLIGLYNLLIAKIKDEYKGFSKEVVRIQENNSFDKLDVKNKKEFIAEMIKLVQPDSRYPDLGKYATGLSDRMGRKSKEKVGKKITLVDKSVTGLYERRTTFELEDDSSTKSR

SEQ ID NO: 21358 - protein, 1043 aa, unidentified
  REGION 1..1043: note = Cas Enzyme sequence
RLTNKDNKNYSAKQQLYISIRKILDDRALKDETYQKILKEMEEETFLEKINNVDNSAIPYQLNLMEMDKILTQQGVYYKELRDNKELLLKMLTSKIPYYVGPLNNNNKGNRNFAWMTKKAGKENEKVYPWNVKDVVDIDVTAEDFITRMTNYCTYLPNEKVLPKESLLYQRYMLLEELSQIRIDGKKLSKEDRKAIIDDLFIGKGRVKVSDKDFKEYLDKVNYVKVNGKGYDVTGYQSDDGFACALSSYNKFRRILGYVDERNEKMIEDIIYWLTVFEDKDIVKRKINKQYADKFSDEQLKKILKLKFKGWGRYSAKLLNGIKGDMGTTIIEMLEDADERFAYCDYCPNFMRIINKDAKIKQIIDDNRPIYDGTKDLLEVIQDMHTSPANRRGIWQTMKVIEEIIEYIGEKPRQIYIEFAREDDFKAKNKRTDSRKKTVDKALKKLKKEVVDEYNENVYKELKQYENRLDEEKVYLYFMQNGKSLYTEEKLNLNEPENLEIDHIIPYSLSDDDSLDNKALVLKDENQKKGNKIVKETFPQSFSDIKMINYWKNLKKVGLISEKKYNNLQKNNVDDILTKGFINRQLVETRQIVKSVANLILDYYNEQIDVIEVKASLSTSVRKMLTYEKKDNNGFWEENKDNCMFYKNRDMNDYHHAHDAYLANIIGMYIQKNYPHLQKELNYSQYRRVWRKYYENTKNNNGVNWFATLGKFSSNNEEADWYGQDIIAYMRKIFCYRDVLISKKVEENTGAFYSETKYPREDKAGSKLVPLKQGNNMRGADNLKELDTRKYGGYKGGEKAYFVLVKYCIEKALKKKVKKEYHMEFVEIPVYIARGIKNKDINLYDYVCDILNEANKNSVADVEILRNKVPKYQMIIGENGEEYYLVGATEVINSKQFVLGGANQQYNRLLNYIMYGKNDKWQYIQTELLDEQLTGLYDLLLSKIKDEYKGFSKEAIRIQEDNSFYKLDVKNKKEFIAEMIKLVQPDSNYPYLGKYSTGLSDRMGRKSKEKVGKKITLVDKSVTGLYERRTTFELEDDSSTKSR

SEQ ID NO: 21359 - protein, 1426 aa, unidentified
  REGION 1..1426: note = Cas Enzyme sequence
MYNIGLDIGTGSVGWCLTDENGYLLKVNRKGNNGNTYRNSAWGVRLFESADTAADCRIKRSTRRRYKRRRTRIIELRKIMSDMIMPIDPNFYARLDEAFLWNEDKSDKAKAPFLLFNDNGYDDVKYYTDYPTIYHLRKHLLETKEKADPRFIYLALHHMMKYRGHFLFEGQSFEAIDNIEDTFIELEHLVNVYVKEKEDTDNNAENNALYQEMKNYLADNKVKNKDKKEYITDTFIKADYDNKYSKELAAAVLGYEFNVGIIVNDNSLTDEDGKALKAKFADAKYEEKEEKLSDTLGERYYIIETLKKIYSWKVLHSILGDNKYLSYAMVDKYEKHSEQLKALKYLFHKYTSQDEYSEFFHQEKNKEGKYIVNYANYIKGIKRLSNETNKKYNTKQQLYQSIMKILGERAADDEVYKKILVEMEQETFLEKINNVDNSAIPYQLNLMEMDKILTQQGVYYKELRDNKELLLKMLTSKIPYYVGPLNNNSNGNRNFAWMTKKDGKENEKVYPWNVKDVVDIDVTAEDFITRMTNYCTYLPNEKVLPKESLLYQRYMLLEELSQIRIDGRKLSKEDRKAIINDLFIGKGRVKVSDKDFKEYLNKVNYVKVNGKGYDVTGYQSDDGFACALSSYNKFRRILGHIDEQNEKMIEDIIYWITVFEDKDIVKRKINKQYADRLSAEQLKKILKLKFKGWGRYSSKLLNGIKGDMGTTIIEMLEDADERFAYCDYCPNFMQIINKDEKIKQIIDDNRPRYDGTKDLLDVIQDMHTSPANRRGIWQTMKAIEEIIEYMGEKPQQIYIEFAREDDPKAKNKRADSRKRAIDKALKKLKEDVVDEYNENVYKELKQYEKRLDEEKVYLYFMQNGKDLYFPDKELNLDELEKLEIDHIIPYSLSDDDSLDNKALVLKGNNQNKGNKIVKEAFPQLFSNNGTVNYWKNLKKAGLISEKKYNNLQKNNVDDILTKGFINRQLVETRQIVKSVANLILDYYNEQIDVIEVKASLSTSVRKMLTYEKKDNNGFWIENKDNCMFYKNRDMNDYHHAHDAYLANIIGLYIQKNYPRLQKELNYSQYRRIWRKYYENTKNNNGVNWFATLGKFSSNNEEADWYGQDIIAYMRKIFCYRDVLISKKVEENTGAFYSETKYPREDKAGSKLVPLKQGNNMRGANNLKELDARKYGGYKGGEKAYFVLVKYCIEKALKKKVKKEYHMEFVEIPVYIARGIKNKDINLYDYVCDILNEANKNSVADVEILRNKVPKYQMIIGENGEEYYLVSATEVINSKQFVLGGANQQYNRLLNYIKYGKNDKWQYIQTELLDEQLIGLYNLLIAKIKDEYKGFSKEAVRIQENNSFDKLDVKDKKEFIAEMIKLVQPDSDYPYLGKYATGLSNRMGRKTGEKVGKKITLVDKSVTGLYERRTTFELEDDSSTKSC

SEQ ID NO: 21360 - protein, 1425 aa, unidentified
  REGION 1..1425: note = Cas Enzyme sequence
MYNIGLDIGTGSVGWCLTDENGYLLKVNRKGNNGNTYRNSAWGVRLFESADTAADCRIKRSTRRRYNRRRTRIIELRKIMSDMIMPIDPNFYARLDEAFLWNEDKSDKAKAPFLLFNDNGYDDVKYYTDYPTIYHLRKHLLETKEKADPRFIYLALHHIMKYRGHFLFEGQSFEAIDNIEDTFIELEHLVNVYVKEKEDTDNNAENNALYQEIKNYLADNKVKNKDKKEYITDTFIKADYDNKYSKELAAAVLGYEFNVGIIVNDNSLTDEDGKALKAKFADAKYEEQEEKLSDKLGERYYIVEALKKIYSWKVLHSILGDSMLLSYAMVDKYEKHREQLTALKNLFHKYVSQDEYSEFFHQEKNKEGKYIVNYANYIKGIKRLSNETNKKYNTKQQLYQSIKEKLGERAADDEVYKKILVEMEQETFLEKINNVDNSAIPYQLNLMEMDKILTQQGVYYKELRDNKELLLKMLTSKIPYYVGPLNNNNKGNRNFAWMTKKAGKENEKVYPWNVKDVVDIDVTAEDFITRMTNYCTYLPDEKVLPKESLLYQRYMLLEELSQIRIDGRKLSKEDRKAIIDDLFIGKGRVKVSDKDFKEYLNKVNYVKVNSKGYDVTGYQSDDGFACALSSYNKFRRILGYVDERNEKMIEDIIYWLTVFEDKDIVKRKINKQYPDRLTDEQLKKILKLKFKGWGRFSRKFLAGIKGDMGTTIIDMLEDADDRFLYCNYCPNLMQIINKDEKIKQIIDDNRPRYDGTEDLLDVIQDMHTSPANRRGIWQTMKAIEEIIEYMGEKPQQIYIEFAREDDPKAKNKRADSRKRAIDKALKKLKEDVVDEYNEKVYKELKQYEKRLDEEKVYLYFMQNGKSLYTGKELNLNEPENLEIDHIIPYSLSDDDSLDNKALVLKKENQNKGNKIVKEAFTQSFSDSEMMDYWKNLKKAGLISEKKYNNLQKNNVDDILTKGFINRQLVETRQIVKSVANLILDYYNEQIDVIEVKASLSTSVRKMLTYEKKDNNGFWIENKDNCMFYKNRDMNDYHHAHDAYLANIIGLYIQKNYPRLQKELNYSQYRRIWRKYYENTKNNNGVNWFATLGKFSSNNEEADWYGQDIIAYMRKIFCYRDVLISKKVEENTGAFYSETKYPREDKAGSKLVPLKQGNNMRGANNLKELDTRKYGGYKGGEKAYFVLVKYCIEKALKKSVKKEYHMEFVEIPVYIARGIKNNDINLYDYVCDILNEANKNSVADVEILRNKVPKYQMIIGENGEEYYLVSATEVINSKQFVLGGANQQYNRLLNYIKYGKNDKWQYIQTELLDEQLIGLYNLLIAKIKDEYKGFSKEAVRIQENNSFDKLDVKDKKEFIAEMIKLVQPDSDYPYLGKYATGLSNRMGRKTGEKVGKKITLVDKSVTGLYERRTTFELEDDSSTKSR

SEQ ID NO: 21361 - protein, 1424 aa, unidentified
  REGION 1..1424: note = Cas Enzyme sequence
MYNIGLDIGTGSVGWCLTDENGYLLKVNRKGNNGNTYRNSAWGVRLFESADTAADCRIKRSTRRRYNRRRTRIIELRKIMSDMIMPIDPNFYARLDEAFLWNEDKSDKAKAPFLLFNDKEYNDKKYYEDFKTIYHLRKYLINTTNKVDARLIYLALHHMMKYRGHFLYEGQTFESIDNVEDVFVELNNLVNAYIKECEDKDGNEYNDVYREIKKCLADNEIKNKDKKELIAAMFMRADYSKKYSKEVAVAILGYEFNVGIIVGENELTGEDNKPLKTKFSDANYEEQEENISSVLGEKYSIIEALKKIYSWKVLHGILGDNTYISSAMVAKYNIHKQQLSELKQLFHKYASQDEYSDFFHKEKDKSGNYIVNYANYIKGIKRLTNKDNKNYSAKQQLYISIRKILDDRALKDETYQKILKEMEEETFLEKINNVDNSAIPYQLNLMEMDKILTQQGVYYKELKDNKEHLLKMLTSKIPYYVGPLNNHNKGNRNFAWMTRKTGKESEKLYPWNVKGVVDIDVTAEHFITRMTNYCTYLPNEKVLPKESLLYQKYMLLEELSQIKIDDNKLSKEDRKAIINDLFIGERRAKVSDKNFKEYLNKINYVKINDKGYDVTGYQSDDGFACALSSYNKFRRVLGYVDERNEKMIEDIIYWLTVFEDKDIVKRKINKQYPDRLTDEQLKKILKLKFKGWGRFSRKFLAGIKGDMGTTIIDMLEDADDRFLYCNYCPNFMQIINKDEKIKQIIDDNRPRYDGTKDLLDVIQDMHTSPANRRGIWQTMKAIEEIIEYMGEKPQQIYIEFAREDDPKAKNKRADSRKRAIDKALKKLKEDVVDEYNENVYKELKQYEKRLDEEKVYLYFMQNGKSLYTGKELNLNEPENLEIDHIIPYSLSDDDSLDNKALVLKKENQNKGNKIVKEAFTQSFSDSEMMDYWKNLKKAGLISEKKYNNLQKNNVDDILTKGFINRQLVETRQIVKSVANLILDYYNEQIDVIEVKASLSTSVRKMLTYEKKDNNGFWIENKDNCMFYKNRDMNDYHHAHDAYLANIIGLYIQKNYPRLQKELNYSQYRRIWRKYYENTKNNNGVNWFATLGKFSSNNEEADWYGQDIIAYMRKIFCYRDVLISKKVEENTGAFYSETKYPREDKAGSKLVPLKQGNNMRGANNLKELDTRKYGGYKGGEKAYFVLVKYCIEKALKKSVKKEYHMEFVEIPVYIARGIKNNDINLYDYVCDILNEANKNSVADVEILRNKVPKYQMIIGENGEEYYLVSATEVINSKQFVLGGANQQYNRLLNYIKYGKNDKWQYIQTELLDEQLIGLYNLLIAKIKDEYKGFSKEAVRIQENNSFDKLDVKDKKEFIAEMIKLVQPDSDYPYLGKYATGLSNRMGRKTGEKVGKKITLVDKSVTGLYERRTTFELEDDSSTKSR

SEQ ID NO: 21362 - protein, 1426 aa, unidentified
  REGION 1..1426: note = Cas Enzyme sequence
MYNIGLDIGTGSVGWCLTDENGYLLKVNRKGNNGNTYRNSAWGVRLFESADTAADCRIKRSTRRRYKRRRTRIIELRKIMSDMIMPIDPNFYARLDEAFLWNEDKSDKAKAPFLLFNDNGYDDVKYYTDYPTIYHLRKHLLETKEKADPRFIYLALHHMMKYRGHFLFEGQSFKAIDNIEDTFIELEHLVNVYVKEKEDTDNNAENNALYQEIKNYLADNKVKNKDKKEYITDTFIKADYDNKYSKELAAAVLGYEFNVGIIANDNSLTDEDGKALKAKFADAKYEEKEEKLSDTLGERYYIIETLKKIYSWKVLHSILGDNKYLSYAMVDKYEKHSEQLKALKYLFHTYTSQDEYSEFFHQEKNKEGKYIVNYANYIKGIKRLSNETNKKYNTKQQLYQSIKEKLGERAADDEVYKKILVEMEQETFLEKINNVDNSAIPYQLNLMEMDKILTQQGVYYKELRDNKELLLKMLSSKIPYYVGPLNNNSNGNRNFAWMTKKAGKENEKVYPWNVKDVVDIDVTAEDFITKMTNYCTYLPDEKVLPKESLLYQRYMLLEELSQIRIDGKKLSKEDRKAIINDLFIGKGRVKVSDKDFKEYLNKVNYVKANGKGYDVTGYQSNDGFACALSSYNKFRRILGHIDEQNEKMIEDIIYWITVFEDKDIVKRKINKQYADSLSAEQLKKILKLKFKGWGRYSVKLLNGIKGDMGTTIIEMLEDADERFAYCDYCPNFMQIINKDEKIKQIIDDNRPRYDGTKDLLDVIQDMHTSPANRRGIWQTMKVIEEIIEYMGEKPQQIYIEFAREDDPRAKNKRTDSRKRAIDKALKKLKEDVVDEYNENVYKELKQYEKRLDEEKVYLYFMQNGKDLYFPDKELNLDELEKLEIDHIIPYSLSDDDSLDNKALVLKGNNQNKGNKIVKEAFPQLFSNSGTVNYWKNLKKAGLISEKKYNNLQKNNVDDILTKGFINRQLVETRQIVKSVANLILDYYNEQIDVIEVKASLSTSVRKMLTYEKKDSNGFWEENKDNCMFYKNRDMNDYHHAHDAYLANIIGLYIQKNYPHLQKELNYSQYRRVWRKYYENTKNNNGVNWFATLGKFSSNNEEADWYGQDIIAYMRKIFCYRDVLISKKVEENTGAFYSETKYPREDKTDSKLVPLKQGDNMRGANNLKELDTRKYGGYKGGEKAYFVLVRYCTEKVLKKSVKKEYHMEFVEIPVYIARGIKNKDINLYDYVCDILNEANKNSVADVEILRNKVPKYQMIIGENGEEYYLVSATEVINSKQFVLGGANQQYNRLLNYIKYGKNDKWQYIQTELLDEQLIGLYNLLIAKIKDEYKGFSKEAVRIQENNSFDKLDVKDKKEFIAEMIKLVQPDSDYPYLGKYATGLSNRMGRKTGEKVGKKITLVDKSVTGLYERRTTFELEDDSSTKSC

SEQ ID NO: 21363 - protein, 1446 aa, unidentified
  REGION 1..1446: note = Cas Enzyme sequence
MFNIGLDIGTASVGWCLTDENGHLLKVNRKGDNGRTYRNSAWGVRLFESADTAADCRIKRSTRRRYNRRRTRIIELRKIMSDMIMPVDPNFYARLDEAFLWNEDKSNKAKAPFLLFNDNGYDDVKYYTDYPTIYHLRKHLLETKEKADPRFIYLALHHMMKYRGHFLFEGQSFEAIDNIEDTFIELEHLVNVYVKEKEDTDNNAENNALYQEIKNYLADNKVKNKDKKEYITDTFIKADYDNKYSKELAAAVLGYEFNVGIIVNDNSLTDEDGKALKAKFADAKYEEKEEKLSDTLGERYYIIETLKKIYSWKVLHSILGDNKYLSYAMVDKYEKHSEQLKALKYLFHKYTSQDKYNDFFHKEKCYKNDKDEKDADEEKNNNEKKCDKWKYIVNYANYIKGIKRLSNETNKKYNTKQQLYQSIKEKLGERAADDEVYKKILVEMEQETFLEKINNVDNSAIPYQLNLMEMDKILTQQGVYYKELRDNKELLLKMLTSKIPYYVGPLNNNNKGNRNFAWMTKKAGKENEKVYPWNVKDVVDIDVTAEDFITRMTNYCTYLTDEKVLPKESLLYQRYMLLEELSQIRIDGRKLSKEDRKAIIDDLFIGKGRVKVSDKDFKEYLDKVNYVKVNSKGYDVTGYQSDDGFACALSSYNKFRRILGYVDERNEKMIEDIIYWLTVFEDKDIVKRKMNEQYADSLSAEQLKKILKLKFKGWGRYSVKLLNGIKGDMGTTIIEMLEDADERFAYCDYCPNFMRIINKDEKIKQIIDDNRPRYDGTKDLLDVIQDMHTSPANKRGIWQTMKVIEEIIEYMGEKPQQIYIEFAREDDPKAKNKRTDSRKRAVDKALKKLKEDVVDEYNENVYKELKQYEKRLDEEKVYLYFMQNGKSLYTGKELNLNEPENLEIDHIIPYSLSDDNSLDNKALVLKKENQNKGNKIVKEAFPQSFSDSKMIDYWKNLKKAGLISEKKFNNLQKNNVEDILTKGFINRQLVETRQIVKSVANLILDYYNEQIDVIEVKASLSTSVRKMLTYEKKDNNGFWEENKDNCMFYKNRDMNDYHHAHDAYLANIIGMYIQKNYPHLQKELNYSQYRRVWRKYYENTKNNNGVNWFATLGKFSSNNEKADWYGQGIIAYMRKIFCYRDVIISKKVEENTGAFYSETKYPREDKTDSKLVPLKQGNNMRGANNLKELDTRKYGGYKGGEKAYFVLVKYCIEKALKKSVKKEYHMEFIGIPVYIARGIKNKDINLYDYVCDILNEANKNSVADVEILRNKVPKYQMIIGENGEEYYLVGATEVINSKQFVLGGANQRYNRLLNYITYGENDKWQYIQTELIDEQLIGLYNLLIAKIKDEYKGFSKEAVRIQENNSFDKLDVKNKKEFIAEMIKLVQPDSRYPDLGKYATGLSDRMGRKSKEKVGKKITLVDKSVTGLYERRTTFELEDDSSTKSR

SEQ ID NO: 21364 - protein, 1425 aa, unidentified
  REGION 1..1425: note = Cas Enzyme sequence
MYNIGLDIGTGSVGWCLTDENGYLLKVNRKGNNGNTYRNSAWGVRLFESADTAADCRIKRSTRRRYKRRRTRIIELRKIMSDMIMPIDPNFYARLDEAFLWNEDKSDKAKAPFLLFNDNGYDDVKYYTDYPTIYHLRKRLLETKEKADPRFIYLALHHMMKYRGHFLFEGQSFEAIDNIEDTFIELEHLVNVYVKEKEDTDNNAENNALYQEMKNYLADNKVKNKDKKEYITDTFIKADYDNKYSKELAAAVLGYEFNVGIIVNDNSLTDEDGKALKAKFADAKYEEKEEKLSDTLGERYYIIETLKKIYSWKVLHSILGDNKYLSYAMVDKYEKHSEQLKALKYLFHKYTSQDEYSEFFHQEKNKEGKYIVNYANYIKGIKRLSNETNKKYNTKQQLYQSIMKILGERAADDEVYKKILVEMEQETFLEKINNVDNSAIPYQLNLMEMDKILTQQGVYYKELRDNKELLLKMLTSKIPYYVGPLNNNSNGNRNFAWMTKKDGKENEKVYPWNVKDVVDIDVTAEDFITRMTNYCTYLPNEKVLPKESLLYQRYMLLEELSQIRIDGRKLSKEDRKAIINDLFIGKGRVKVSDKDFKEYLNKVNYVKVNGKGYDVTGYQSDDGFACALSSYNKFRRILGHIDEQNEKMIEDIIYWITVFEDKDIVKRKINKQYADRLSAEQLKKILKLKFKGWGRYSSKLLNGIKGDMGTTIIEMLEDADERFAYCDYCPNFMQIINKDEKIKQIIDDNRPRYDGTKDLLDVIQDMHTSPANRRGIWQTMKAIEEIIEYMGEKPQQIYIEFAREDDPKAKNKRADSRKRAIDKALKKLKEDVVDEYNEKVYKELKQYEKRLDEEKVYLYFMQNGKSLYTGKELNLNEPENLEIDHIIPYSLSDDDSLDNKALVLKKENQNKGNKIVKEAFTQSFSDSEMMDYWKNLKKSGLISEKKYNNLQKNNVDDILTKGFINRQLVETRQIVKSVANLILDYYNEQIDVIEVKASLSTSVRKMLTYEKKDNNGFWIENKDNCMFYKNRDMNDYHHAHDAYLANIIGLYIQKNYPRLQKELNYSQYRRIWRKYYENTKNNNGVNWFATLGKFSSNNEEADWYGQDIIAYMRKIFCYRDVLISKKVEENTGAFYSETKYPREDKAGSKLVPLKQGNNMRGANNLKELDARKYGGYKGGEKAYFVLVKYCIEKALKKKVKKEYHMEFVEIPVYIARGIKNKDINLYDYVCDILNEANKNSVADVEILRNKVPKYQMIIGENGEEYYLVSATEVINSKQFVLGGANQQYNRLLNYIKYGKNDKWQYIQTELLDEQLIGLYNLLIAKIKDEYKGFSKEAVRIQENNSFDKLDVKDKKEFIAEMIKLVQPDSDYPYLGKYATGLSNRMGRKTGEKVGKKITLVDKSVTGLYERRTTFELEDDSSTKSC

SEQ ID NO: 21365 - protein, 1150 aa, unidentified
  REGION 1..1150: note = Cas Enzyme sequence
LKAKFADAKYEEKEEKLSDTLGERYYIIETLKKIYSWKVLHSILGDNKYLSYAMVDKYEKHSEQLKALKYLFHKYTSQDEYSEFFHQEKNKEGKYIVNYANYIKGIKRLSNETNKKYNTKQQLYQSIKEKLGERAADDEVYKKILVEMEQETFLEKINNVDNSAIPYQLNLMEMDKILTQQGVYYKELRDNKELLLKMLTSKIPYYVGPLNNNNKGNRNFAWMTKKAGKENEKVYPWNVKDVVDIDVTAEDFITRMTNYCTYLPDEKVLPKESLLYQRYMLLEELSQIRIDGRKLSKEDRKAIIDDLFIGKGRVKVSDKDFKEYLNKVNYVKVNSKGYDVTGYQSDDGFACALSSYNKFRRILGYVDERNEKMIEDIIYWLTVFEDKDIVKRKMNKQYADKLSDEQLKKILKLKFKGWGRYSAKLLNGIKGDMGTTIIEMLEDADERFAYCDYCPNFMRIINKDEKIKQIIDDNRPIYDGTKDLLDVIQDMHTSPANRRGIWQTMKVIEEIIEYMGEKPQQIYIEFAREDDLKAKNKRTDSRKRVIDKALKKLKEEVVDEYNENVYKELKQYEKRLDEEKVYLYFMQNGKSLYTGEELNLNEPENLEIDHIIPYSLSDDNSLDNKALVLKKENQNKGNKIVKEAFPQSFSDSKMIDYWKNLKKAGLISEKKFNNLQKNNVEDILTKGFINRQLVETRQIVKSVANLILDYYNEQIDVIEVKASLSTSVRKMLTYEKKDNNGFWEENKDNCMFYKNRDMNDYHHAHDAYLANIIGMYIQKNYPHLQKELNYSQYRRVWRKYYENTKNNNGVNWFATLGKFSSNNEEADWYGQDIIAYMRKIFCYRDVLISKKVEENTGAFYSETKYPREDKAGSKLVPLKQGNNMRGANNLKELDTRKYGGYKGGEKAYFVLVKYCIEKALKKKVKKEYHMEFVEIPVYIARGIKNKDINLYDYVCDILNEANKNSVADVEILRNKVPKYQMIIGENGEEYYLVGATEVANSKQFVLGGANQRYNRLLNYISYGKNDKWQYIQTELLDEQLIGLYNLLIAKIKDEYKGFSKEAVRIQENNSFDKLDVKNKKEFIAEMIKLVQPDSRYPDLGKYATGLSDRMGRKSKEKVGKKITLVDKSVTGLYERRTTFELEDDSSTKSR

SEQ ID NO: 21366 - protein, 1425 aa, unidentified
  REGION 1..1425: note = Cas Enzyme sequence
MYNIGLDIGTGSVGWCLTDENGHLLKVNRKGDNGKTYRNSAWGVRLFESADTAADCRIKRSTRRRYNRRRTRIIELRKIMSDMIMPIDPNFYARLDEAFLWNEDKSDKAKAPFLLFNDKEYNDKKYYEDFKTIYHLRKYLINTTNKVDARLIYLALHHMMKYRGHFLYEGQTFESIDNVEDVFVELNNLVNAYIKECEDKDGNEYNDVYREIKKCLADNEIKNKDKKELIAAMFMRADYSKKYSKEVAVAILGYEFNVGIIVGENELTGEDNKPLKTKFSDANYEEQEENISSVLGEKYSIIEALKKIYSWKVLHGILGDNTYISSAMVAKYNIHKQQLSELKQLFHKYASQDEYSDFFHKEKDKSGNYIVNYANYIKGIKRLTNKDNKNYSAKQQLYISIRKILDDRALKDETYQKILKEMEEETFLEKINNVDNSAIPYQLNLMEMDKILTQQGVYYKELRDNKELLLKMLSSKIPYYVGPLNNNSNGNRNFAWMTKKAGKENEKVYPWNVKDVVDIDVTAEDFITKMTNYCTYLPDEKVLPKESLLYQRYMLLEELSQIRIDGKKLSKEDRKAIINDLFIGKGRVKVSDKDFKEYLNKVNYVKVNGKGYDVTGYQSDDGFACALSSYNKFRRILGHIDEQNGKMIEDIIYWITVFEDKDIVKRKINKQYADRLSAEQLKKILKLKFKGWGRYSSKLLNGIKGDMGTTIIEMLEDADERFAYCDYCPNFMQIINKDEKIKQIIDDNRPRYDGTKDLLDVIQDMHTSPANRRGIWQTMKAIEEIIEYMGEKPQQIYIEFAREDDPKAKNKRADSRKRAIDKALKKLKEDVVDEYNENVYKELKQYEKRLDEEKVYLYFMQNGKDLYFPDKELNLDELEKLEIDHIIPYSLSDDDSLDNKALVLKGNNQNKGNKIVKEAFPQLFSNSGTVNYWKNLKKAGLISEKKYNNLQKNNVDDILTKGFINRQLVETRQIVKSVANLILDYYNEQIDVIEVKASLSTSVRKMLTYEKKDSNGFWEENKDNCMFYKNRDMNDYHHAHDAYLANIIGMYIQKNYPHLQKELNYSQYRRVWRKYYENTKNNNGVNWFATLGKFSSNNEEADWYGQDIIAYMRKIFCYRDVLISKKVEENTGAFYSETKYPREDKAGSKLVPLKQGDNMRGANNLKELDTRKYGGYKGGEKAYFVLVKYCIEKALKKSVKKEYHMEFVEIPVYIARGIKNNDINLYDYVCDILNEANKNSVADVEILRNKVPKYQMIIGENGEEYYLVSATEVINSKQFVLGGANQQYNRLLNYIKYGKNDKWQYIQTELLDEQLIGLYNLLIAKIKDEYKGFSKEAVRIQENNSFDKLDVKDKKEFIAEMIKLVQPDSDYPYLGKYATGLSNRMGRKTGEKVGKKITLVDKSVTGLYERRTTFELEDDSSTKSR

SEQ ID NO: 21367 - protein, 1424 aa, unidentified
  REGION 1..1424: note = Cas Enzyme sequence
MYNIGLDIGTGSVGWCLTDENGYLLKVNRKGNNGNTYRNSAWGVRLFESADTAADCRIKRSTRRRYNRRRTRIIELRKIMSDMIMPIDPNFYARLDEAFLWNEDKSDKAKAPFLLFNDKEYNDKKYYEDFKTIYHLRKYLINTTNKVDARLIYLALHHMMKYRGHFLYEGQTFESIDNVEDVFVELNNLVNAYIKECEDKDGNEYNDVYREIKKCLADNEIKNKDKKELIAAMFMRADYSKKYSKEVAVAILGYEFNVGIIVGENELTGEDNKPLKTKFSDANYEEQEENISSVLGEKYSIIEALKKIYSWKVLHGILGDNTYISSAMVAKYNIHKQQLSELKQLFHKYASQDEYSDFFHKEKDKSGNYIVNYANYIKGIKRLTNKDNKNYSAKQQLYISIRKILDDRALKDETYQKILKEMEEETFLEKINNVDNSAIPYQLNLMEMDKILTQQGVYYKELKDNKEHLLKMLTSKIPYYVGPLNNHNKGNRNFAWMTRKTGKESEKLYPWNVKGVVDIDVTAEHFITRMTNYCTYLPNEKVLPKESLLYQKYMLLEELSQIKIDDNKLSKEDRKAIINDIFIGERRAKVSDKNFKEYLNKINYVKINDKGYDVTGYQSDDGFACALSSYNKFRRVLGYVDERNEKMIEDIIYWLTVFEDKDIVKRKINKQYPDRLTDEQLKKILKLKFKGWGRFSRKFLAGIKGDMGTTIIDMLEDADDRFLYCNYCPNLMQIINKDEKIKQIIDDNRPRYDGTEDLLDVIQDMHTSPANRRGIWQTMKVIEEIIEYMGEKPQQIYIEFAREDDLKAKNKRTDSRKRVIDKALKKLKEEVVDEYNENVYKELKQYEKRLDEEKVYLYFMQNGKSLYTGEELNLNEPGNLEIDHIIPYSLSDDDSLDNKALVLKRENQNKGNKIVKEAFLQSYSDSDMKSYWKALKKAGLMSEKKYNSLMKDNVNEVLTRGFINRQLVETRQIVKSVANLILDYYNEQIDVIEVKASLSTSVRKMLTYEKKDSNGFWEENKDNCMFYKNRDMNDYHHAHDAYLANIIGMYIQKNYPHLQKELNYSQYRRVWRKYYENTKNNNGVNWFATLGKFSSNNEEADWYGQDIIAYMRKIFCYRDVLISKKVEENTGAFYSETKYPREDKAGSKLVPLKQGDNMRGANNLKELDTRKYGGYKGGEKAYFVLVKYCIEKALKKSVKKEYHMEFVEIPVYIARGIKNNDINLYDYVCDILNEANKNSVADVEILRNKVPKYQMIIGENGEEYYLVSATEVINSKQFVLGGANQQYNRLLNYIKYGKNDKWQYIQTELLDEQLIGLYNLLIAKIKDEYKGFSKEAVRIQENNSFDKLDVKDKKEFIAEMVKLVQPDSDYPYLGKYATGLSNRMGRKTGEKVGKKITLVDKSVTGLYERRTTFELEDDSSTKSR

SEQ ID NO: 21368 - protein, 1426 aa, unidentified
  REGION 1..1426: note = Cas Enzyme sequence
MYNIGLDIGTGSVGWCLTDENGYLLKVNRKGNNGNTYRNSAWGVRLFESADTAADCRIKRSTRRRYKRRRTRIIELRKIMSDMIMPIDPNFYARLDEAFLWNEDKSDKAKAPFLLFNDNGYDDVKYYTDYPTIYHLRKHLLETKEKADPRFIYLALHHMMKYRGHFLFEGQSFEAIDNIEDTFIELEHLVNVYVKEKEDTDNNAKNNALYQEIKNYLADNKVKNKDKKEYITDTFIKADYDNKYSKELAAAVLGYEFNVGIIVNDNSLTDEDGKALKAKFADAKYEEKEEKLSDTLGERYYIIETLKKIYSWKVLHSILGDNKYLSYAMVDKYEKHSEQLKALKYLFHKYTSQDEYSEFFHQEKNKEGKYIVNYANYIKGIKRLSNETNKKYNTKQQLYQSIKEKLGERAADDEVYKKILVEMEQETFLEKINNVDNSAIPYQLNLMEMDKILTQQGVYYKELRDNKELLLKILSSKIPYYVGPLNNNSNGNRNFAWMTKKAGKENEKVYPWNVKDVVDIDVTAEDFITKMTNYCTYLPDEKVLPKESLLYQRYMLLEELSQIRIDGKKLSKEDRKAIINDLFIGKGRVKVSDKDFKEYLNKVNYVKVNGKGYDVTGYQSDDGFACALSSYNKFRRILGHIDEQNGKMIEDIIYWITVFEDKDIVKRKINKQYADRLSAEQLKKILKLKFKGWGRYSSKLLNGIKGDMGTTIIEMLEDADKRFAYCDYCPNFMQIINKDEKIKQIIDDNRPRYDGTKDLLDVIQDMHTSPANRRGIWQTMKAIEEIIEYMGEKPQQIYIEFAREDDPKAKNKRADSRKRAIDKALKKLKEDVVDEYNENVYKELKQYEKRLDEEKVYLYFMQNGKDLYFPDKELNLDELEKLEIDHIIPYSLSDDDSLDNKALVLKGNNQNKGNKIVKEAFPQLFSNSGTVNYWKNLKKAGLISEKKYNNLQKNNVDDILTKGFINRQLVETRQIVKSVANLILDYYNEQIDVIEVKASLSTSVRKMLTYEKKDSNGFWEENKDNCMFYKNRDMNDYHHAHDAYLANIIGMYIQKNYPHLQKELNYSQYRKIWRKYYENAKNNNGVNWFATLGKFSSNNEEADWYGQDIIAYMRKIFCYRDVLISKKVEENTGAFYSETKYPREDKAGSKLVPLKQGDNMRGANNLKELDTRKYGGYKGGEKAYFVLVKYCIEKALKKSVKKEYHMEFVEIPVYIARGIKNNDINLYDYVCDILNEANKNSVADVEILRNKVPKYQMIIGENGEEYYLVSATEVINSKQFVLGGANQQYNRLLNYIKYGKNDKWQYIQTELLDEQLIGLYNLLIAKIKDEYKGFSKEAVRIQENNSFDKLDVKDKKEFIAEMIKLVQPDSDYPYLGKYATGLSNRMGRKTGEKVGKKITLVDKSVTGLYERRTTFELEDDSSTKSR

SEQ ID NO: 21369 - protein, 1426 aa, unidentified
  REGION 1..1426: note = Cas Enzyme sequence
MYNIGLDIGTGSVGWCLTDENGYLLKVNRKGNNGNTYRNSAWGVRLFESADTAADCRIKRSTRRRYKRRRTRIIELRKIMSDMIMPIDPNFYARLDEAFLWNEDKSDKAKAPFLLFNDNGYDDVKYYTDYPTIYHLRKHLLETKEKADPRFIYLALHHMMKYRGHFLFEGQSFEAIDNIEDTFIELEHLVNVYVKEKEDTDNNAENNALYQEIKNYLADNKVKNKDKKEYITDTFIKADYDNKYSKELAAAVLGYEFNVGIIVNDNSLTDEDGKALKAKFADAKYEEKEEKLSDTLGERYYIIETLKKIYSWKVLHSILGDNKYLSYAMVDKYEKHSEQLKALKYLFHKYTSQDEYSEFFHQEKNKEGKYIVNYANYIKGIKRLSNETNKKYNTKQQLYQSIKEKLGERAADDEVYKKILVEMEQETFLEKINNVDNSAIPYQLNLMEMDKILTQQGVYYKELRDNKELLLKMLSSKIPYYVGPLNNNSNGNRNFAWMTKKAGKENEKVYPWNVKDVVDIDVTAEDFITKMTNYCTYLPDEKVLPKESLLYQRYMLLEELSQIRIDGKKLSKEDRKAIINDLFIGKGRVKVSDKDFKEYLNKVNYVKVNGKGYDVTGYQSDDGFACALSSYNKFRRILGHIDEQNGKMIEDIIYWITVFEDKDIVKRKINKQYADRLSAEQLKKILKLKFKGWGRYSSKLLNGIKGDMGTTIIEMLEDADKRFAYCDYCPNFMQIINKDEKIKQIIDDNRPRYDGTKDLLDVIQDMHTSPANRRGIWQTMKAIEEIIEYMGEKPQQIYIEFAREDDPKAKNKRADSRKRAIDKALKKLKEDVVDEYNENVYKELKQYEKRLDEEKVYLYFMQNGKDLYFPDKELNLDELEKLEIDHIIPYSLSDDDSLDNKALVLKGNNQNKGNKIVKEAFPQLFSNNGTVNYWKNLKKAGLISEKKYNNLQKNNVDDILTKGFINRQLVETRQIVKSVANLILDYYNEQIDVIEVKASLSTSVRKMLTYEKKDSNGFWEENKDNCMFYKNRDMNDYHHAHDAYLANIIGLYIQKNYPHLQKELNYSQYRRVWRKYYENTKNNNGVNWFATLGKFSSNNEEADWYGQDIIAYMRKIFCYRDVLISKKVEENTGAFYSETKYPREDKTDSKLVPLKQGDNMRGANNLKELDTRKYGGYKGGEKAYFVLVRYCTEKVLKKSVKKEYHMEFVEIPVYIARGIKNKDINLYDYVCDILNEANKNSVADVEILRNKVPKYQMIIGENGEEYYLVSATEVINSKQFVLGGANQQYNRLLNYIKYGKNDKWQYIQTELLDEQLIGLYNLLIAKIKDEYKGFSKEAVRIQENNSFDKLDVKNKKEFIAEMIKLVQPDSDYPDLGKYATGLSNRMGRKSKEKVGKKITLVDKSVTGLYERRTTFELEDDSSTKSR

SEQ ID NO: 21370 - protein, 1426 aa, unidentified
  REGION 1..1426: note = Cas Enzyme sequence
MYNIGLDIGTGSVGWCLTDENGYLLKVNRKGNNGNTYRNSAWGVRLFESADTAADCRIKRSTRRRYKRRRTRIIELRKIMSDMIMPIDPNFYARLDEAFLWNEDKSDKAKAPFLLFNDNGYDDVKYYTDYPTIYHLRKHLLETKEKADPRFIYLALHHMMKYRGHFLFEGQSFEAIDNIEDTFIELEHLVNVYVKEKEDTDNNAKNNALYQEIKNYLADNKVKNKDKKEYITDTFIKADYDNKYSKELAAAVLGYEFNVGIIVNDNSLTDEDGKALKAKFADAKYEEKEEKLSDTLGERYYIIETLKKIYSWKVLHSILGDNKYLSYAMVDKYEKHSEQLKALKYLFHKYTSQDEYSEFFHQEKNKEGKYIVNYANYIKGIKRLSNETNKKYNTKQQLYQSIKEKLGERAADDEVYKKILVEMEQETFLEKINNVDNSAIPYQLNLMEMDKILTQQGVYYKELRDNKELLLKMLSSKIPYYVGPLNNNSNGNRNFAWMTKKAGKENEKVYPWNVKDVVDIDVTAEDFITKMTNYCTYLPDEKVLPKESLLYQRYMLLEELSQIRIDGKKLSKEDRKAIINDLFIGKGRVKVSDKDFKEYLNKVNYVKVNGKGYDVTGYQSDDGFACALSSYNKFRRILGHIDEQNGKMIEDIIYWITVFEDKDIVKRKINKQYADRLSAEQLKKILKLKFKGWGRYSSKLLNGIKGDMGTTIIEMLEDADKRFAYCDYCPNFMQIINKDEKIKQIIDDNRPRYDGTKDLLDVIQDMHTSPANRRGIWQTMKAIEEIIEYMGEKPQQIYIEFAREDDPKAKNKRADSRKRAIDKALKKLKEDVVDEYNENVYKELKQYEKRLDEEKVYLYFMQNGKDLYFPDKELNLDELEKLEIDHIIPYSLSDDDSLDNKALVLKGNNQNKGNKIVKEAFPQLFSNSGTVNYWKNLKKAGLISEKKYNNLQKNNVDDILTKGFINRQLVETRQIVKSVANLILDYYNEQIDVIEVKASLSTSVRKMLTYEKKDSNGFWEENKDNCMFYKNRDMNDYHHAHDAYLANIIGMYIQKNYPHLQKELNYSQYRKIWRKYYENAKNNNGVNWFATLGKFSSNNEEADWYGQDIIAYMRKIFCYRDVLISKKVEENTGAFYSETKYPREDKAGSKLVPLKQGDNMRGANNLKELDTRKYGGYKGGEKAYFVLVKYCIEKALKKSVKKEYHMEFVEIPVYIARGIKNNDINLYDYVCDILNEANKNSVADVEILRNKVPKYQMIIGENGEEYYLVSATEVINSKQFVLGGANQQYNRLLNYIKYGKNDKWQYIQTELLDEQLIGLYNLLIAKIKDEYKGFSKEAVRIQENNSFDKLDVKDKKEFIAEMIKLVQPDSDYPYLGKYATGLSNRMGRKTGEKVGKKITLVDKSVTGLYERRTTFELEDDSSTKSR

SEQ ID NO: 21371 - protein, 1425 aa, unidentified
  REGION 1..1425: note = Cas Enzyme sequence
MYNIGLDIGTGSVGWCLTDENGYLLKVNRKGNNGNTYKNSAWGVRLFESADTAADCRIKRSTRRRYKRRRTRIIELRKIMSDMIMPIDPNFYARLDEAFLWNEDKSDKAKAPFLLFNDNGYDDVKYYTDYPTIYHLRKHLLETKEKADPRFIYLALHHMMKYRGHFLFEGQSFKAIDNIEDTFIELEHLVNVYVKEKEDTDNNAENNALYQEIKNYLADNKVKNKDKKEYITDTFIKADYDNKYSKELAAAVLGYEFNVGIIANDNSLTDEDGKALKAKFADAKYEEKEEKLSDTLGERYYIIETLKKIYSWKVLHSILGDNKYLSYAMVDKYEKHSEQLKALKYLFHKYTSQDEYSEFFHQEKNKEGKYIVNYANYIKGIKRLSNETNKKYNTKQQLYQSIKEKLGERAADDEVYKKILVEMEQETFLEKINNVDNSAIPYQLNLMEMDKILTQQGVYYKELRDNKELLLKMLSSKIPYYVGPLNNNSNGNRNFAWMTKKAGKENEKVYPWNVKDVVDIDVTAEDFITKMTNYCTYLPDEKVLPKESLLYQRYMLLEELSQIRIDGKKLSKEDRKAIINDLFIGKGRVKVSDKDFKEYLNKVNYVKVNGKGYDVTGYQSDDGFACALSSYNKFRRILGHIDEQNGKMIEDIIYWITVFEDKDIVKRKINKQYADRLSAEQLKKILKLKFKGWGRYSSKLLNGIKGDMGTTIIEMLEDADERFAYCDYCPNFMQIINKDEKIKQIIDDNRPRYDGTKDLLDVIQDMHTSPANRRGIWQTMKAIEEIIEYMGEKPQQIYIEFAREDDPKAKNKRADSRKRAIDKALKKLKEDVVDEYNEKVYKELKQYEKRLDEEKVYLYFMQNGKSLYTGKELNLNEPENLEIDHIIPYSLSDDDSLDNKALVLKKENQNKGNKIVKEAFTQSFSDSEMMDYWKNLKKSGLISEKKYNNLQKNNVDDILTKGFINRQLVETRQIVKSVANLILDYYNEQIDVIEVKASLSTSVRKMLTYEKKDNNGFWIENKDNCMFYKNRDMNDYHHAHDAYLANIIGLYIQKNYPRLQKELNYSQYRRIWRKYYENTKNNNGVNWFATLGKFSSNNEEADWYGQDIIAYMRKIFCYRDVLISKKVEENTGAFYSETKYPREDKAGSKLVPLKQGNNMRGANNLKELDARKYGGYKGGEKAYFVLVKYCIEKALKKKVKKEYHMEFVEIPVYIARGIKNKDINLYDYVCDILNEANKNSVADVEILRNKVPKYQMIIGENGEEYYLVSATEVINSKQFVLGGANQQYNRLLNYIKYGKNDKWQYIQTELLDEQLIGLYNLLIAKIKDEYKGFSKEAVRIQENNSFDKLDVKDKKEFIAEMIKLVQPDSDYPYLGKYATGLSNRMGRKTGEKVGKKITLVDKSVTGLYERRTTFELEDDSSTKSC

SEQ ID NO: 21372 - protein, 1425 aa, unidentified
  REGION 1..1425: note = Cas Enzyme sequence
MYNIGLDIGTGSVGWCLTDENGYLLKVNRKGNNGNTYRNSAWGVRLFESADTAADCRIKRSTRRRYKRRRTRIIELRKIMSDMIMPIDPNFYARLDEAFLWNEDKSDKAKAPFLLFNDNGYDDVKYYTDYPTIYHLRKHLLETKEKADPRFIYLALHHMMKYRGHFLFEGQSFEAIDNIEDTFIELEHLVNVYVKEKEDTDNNAENNALYQEMKNYLADNKVKNKDKKEYITDTFIKADYDNKYSKELAAAVLGYEFNVWIIVNDNSLTDEDGKALKAKFADAKYEEKEEKLSDTLGERYYIIETLKKIYSWKVLHSILGDNKYLSYAMVDKYEKHSEQLKALKYLFHKYTSQDEYSEFFHQEKNKEGKYIVNYANYIKGIKRLSNETNKKYNTKQQLYQSIMKILGERAADDEVYKKILVEMEQETFLEKINNVDNSAIPYQLNLMEMDKILTQQGVYYKELRDNKELLLKMLTSKIPYYVGPLNNNSNGNRNFAWMTKKDGKENEKVYPWNVKDVVDIDVTAEDFITRMTNYCTYLPNEKVLPKESLLYQRYMLLEELSQIRIDGRKLSKEDRKAIINDLFIGKGRVKVSDKDFKEYLNKVNYVKVNGKGYDVTGYQSDDGFACALSSYNKFRRILGHIDEQNEKMIEDIIYWITVFEDKDIVKRKINKQYADRLSAEQLKKILKLKFKGWGRYSSKLLNGIKGDMGTTIIEMLEDADERFAYCDYCPNFMQIINKDEKIKQIIDDNRPRYDGTKDLLDVIQDMHTSPANRRGIWQTMKAIEEIIEYMGEKPQQIYIEFAREDDPKAKNKRADSRKRAIDKALKKLKEDVVDEYNEKVYKELKQYEKRLDEEKVYLYFMQNGKSLYTGKELNLNEPENLEIDHIIPYSLSDDDSLDNKALVLKKENQNKGNKIVKEAFTQSFSDSEMMDYWKNLKKSGLISEKKYNNLQKNNVDDILTKGFINRQLVETRQIVKSVANLILDYYNEQIDVIEVKASLSTSVRKMLTYEKKDNNGFWIENKDNCMFYKNRDMNDYHHAHDAYLANIIGLYIQKNYPRLQKELNYSQYRRIWRKYYENTKNNNGVNWFATLGKFSSNNEEADWYGQDIIAYMRKIFCYRDVLISKKVEENTGAFYSETKYSREDKAGSKLVPLKQGNNMRGANNLKELDTRKYGGYKGGEKAYFVLVKYCIEKALKKKVKKEYHMEFVEIPVYIARGIKNKDINLYDYVCDILNEANKNSVADVEILRNKVPKYQMIIGENGEEYYLVSATEVINSKQFVLGGANQQYNRLLNYIKYGKNDKWQYIQTELLDEQLIGLYNLLIAKIKDEYKGFSKEAVRIQENNSFDKLDVKDKKEFIAEMIKLVQPDSDYPYLGKYATGLSNRMGRKTGEKVGKKITLVDKSVTGLYERRTTFELEDDSSTKSC

SEQ ID NO: 21373 - protein, 1425 aa, unidentified
  REGION 1..1425: note = Cas Enzyme sequence
  REGION 626..631: note = misc_feature - Xaa can be any naturally occurring amino acid
MYNIGLDIGTGSVGWCLTDENGYLLKVNRKGNNGNTYRNSAWGVRLFESADTAADCRIKRSTRRRYNRRRTRIIELRKIMSDMIMPIDPNFYARLDEAFLWNEDKSDKAKAPFLLFNDKEYNDKKYYEDFKTIYHLRKYLINTTNKVDARLIYLALHHMMKYRGHFLYEGQTFESIDNVEDVFVELNNLVNAYIKECEDKDGNEYNDVYREIKKCLADNEIKNKDKKELIAAMFMRADYSKKYSKEVAVAILGYEFNVGIIVGENELTGEDNKPLKTKFSDANYEEQEENISSVLGEKYSIIEALKKIYSWKVLHGILGDNTYISSAMVAKYNIHKQQLSELKQLFHKYASQDEYSDFFHKEKYKSGNYIVNYANYIKGIKRLTNKDNKNYSAKQQLYISIRKILDDRALKDETYQKILKEMEEETFLEKINNVDNSAIPYQLNLMEMDKILTQQGVYYKELKDNKEQLLKMLTSKIPYYVGPLNNHNKGNRNFAWMTRKTGKESEKLYPWNIKDVVDIDVTAEDFITRMTNYCTYLPDEKVLPKESLLYQRYMLLEELSQIRIDGKKLSKEDRKAIIDDLFIGKGRVKVSDKDFKEYLNKVNYVKVNGKGYDVTGYQSDDGFACXXXXXXKFRRILGHIDEQNEKMIEDIIYWLTVFEDKDIVKRKINKQYPDRLTDEQLKKILKLKFKGWGRFSRKFLAGIKGDMGTTIIDMLEDADDRFLYCNYCPNLMQIINKDEKIKQIIDDNRPRYDGTEDLLDVIQDMHTSPANRRGIWQTMKAIEEVIEYMGEKPQQIYIEFAREDDPKAKNKRADSRKRAIDKALKKLKEDVVDEYNENVYKELKQYEKRLDEEKVYLYFMQNGKDLYFPDKELNLDELEKLEIDHIIPYSLSDDDSLDNKALVLKGNNQNKGNKIVKEAFPQLFSNSGTVNYWKNLKKSGLISEKKYNNLQKNNVDDILTKGFINRQLVETRQIVKSVANLILDYYNEQIDVIEVKASLSTSVRKMLTYEKKDNNGFWIENKDNCMFYKNRDMNDYHHAHDAYLANIIGLYIQKNYPRLQKELNYSQYRRIWRKYYENTKNNNGVNWFATLGKFSSNNEEADWYGQDIIAYMRKIFCYRDVLISKKVEENTGAFYSETKYPREDKAGSKLVPLKQGNNMRGANNLKELDARKYGGYKGGEKAYFVLVKYCIEKALKKKVKKEYHMEFVEIPVYIARGIKNKDINLYDYVCDILNEANKNSVADVEILRNKVPKYQMIIGENGEEYYLVSATEVINSKQFVLGGANQQYNRLLNYIKYGKNDKWQYIQTELLDEQLIGLYNLLIAKIKDEYKGFSKEAVRIQENNSFDKLDVKDKKEFIAEMIKLVQPDSDYPYLGKYATGLSNRMGRKTGEKVGKKITLVDKSVTGLYERRTTFELEDDSSTKSC

SEQ ID NO: 21374 - protein, 1428 aa, unidentified
  REGION 1..1428: note = Cas Enzyme sequence
MYNYNIGLDIGTGSVGWCLTDENGHLLKVNRKGNNGKTYRNSAWGVRLFESADTAADCRIKRSTRRRYNRRRTRIIELRKIMSDMIMPIDPNFYARLDEAFLWNEDKSDKAKAPFLLFNDNGYDDVKYYTDYPTIYHLRKHLLETEGRADARLIYLALHHMMKYRGHFLFEGQSFEAIDNIEDTFIELEHLVNVYVKEKEDTDNNSKNNALYQTIKNYLADNKVKNKDKKEDITDTFIKAGYDNKYSKELAAAVLGYEFNVGIIVNDNNLTDENGKALKAKFADAKYEEQEEKLSDTLGEKYYIVETLKKIYSWKVLHSILGDSKYLSYAMVDKYKKHGEQLTALKDLFHKYTSQNEYNDFFHHEKDEDGKYIVNYVNYIKGIKRLSNETNKKYNTKQQLYESIKEKLGERAADDEVYKKILVEMEQETFLEKINNVDNSAIPYQLNLMEMDKILTQQGVYYKELRGNKELLLKMLSSKIPYYVGPLNNNSNGNRNFAWMTKKAGKENEKVYPWNVKDVVDIDVTAEDFITRMTNYCTYLPDEKVLPKESLLYQKYMLLEELSQIRIDGKKLSKEDRKVIINDLFIGKGRIKVSDKDFKEYLNKINYVKINDKGYDVTGYQSDDGFACALSSYNKFRRILGYVDERNEKMIEDIIYWLTVFDDKDIVKRKINKQYADRLNDEQLKKILKLKFKGWGRYSDKLLNGIKGDMGTTIIEMLEDADERFEYCDYCPNFMQIINKDEKIKQIIDDNRPRYDGTKDLLDVIQDMHTSPANKRGIWQTMKVIEEIIEYMGEKPQQIYIEFAREDDPKAKNKRTDSRKRAIDKALKKLKEDVVDEYNENVYKELKQYEKRLDEEKVYLYFMQNGKDLYFPDKELNLDELEKLEIDHIIPYSLSDDDSLDNKALVLKGNNQNKGNKIVKEAFPQLFSNSGTVNYWKNLKKAGLISEKKFNNLQKNNVDDILTKGFINRQLVETRQIVKSVANLILDYYNEQIDVIEVKSSLSTSVRKMLTYEKKDNNGFWEENKDNCMFYKNRDMNDYHHAHDAYLANIIGMYIQKNYPHLQKELNYSQYRRVWRKYYENTKNNNGVNWFATLGKFSSNNEEADWYGQDIIAYMRKIFCYRDVLISKKVEENTGAFYSETKYPREDKAGSKLVPLKQGDNMRGANNLKELDTRKYGGYKGGEKAYFVLVRYCTEKALKKKVKKEYHMEFVEIPVYIARGIKNKNINLYDYVCDTLNEANKNSVADVEILRNKVPKYQMIIGENGEEYYLVSATEVINSKQFVLGGSNQQYNRLLNYIKYGKNDKWQYIQTELLDEQLIGLYNLLIAKIKDEYKGFSKEAVRIQENNSFDKLDVKDKKEFIAEMIKLVQPDSDYPYLGKYATGLSNRMGRKTGEKVGKKITLVDKSVTGLYERRTTFELEDDSSTKSR

SEQ ID NO: 21375 - protein, 1425 aa, unidentified
  REGION 1..1425: note = Cas Enzyme sequence
MYNIGLDIGTGSVGWCLTDNNGHLLKINRKGDNGKTYRNSAWGVRLFASADTAADCRIKRSTRRRYNRRRTRVIELRKIMSEMIMPVDPNFYARLDEAFLWNEDKSDKAKAPFLLFNDKELYDIKYYKKYPTIYHLRKYLLETKEKADPRFIYLALHHMMKYRGHFLFEGQSFEAIDNIKDTFIELEQLINVYVKGKEEIEDNNKNNDKYEAIKICLADNKVKNKDKKENITDIFIKAGYDNKYSKELAAAVLGYEFNVGIIVNDNSLTDEDGKALKAKFADAKYEEQEEKLSDTLGERYYIVEALKKIYSWKVLHSILGDSMFLSCAMVDKYEKHGEQLTALKNLFHKYVSQDEYSEFFHQEKNKEGKYIVNYANYIKGIKRLNNESNKNSNANQQLYQSIKKILGKRAADDEVYKNILTEMEQETFLEKINNVDNSAIPYQLNLMEMDKILTQQGVYYKELRDNKELLLKMLSSKIPYYVGPLNNNSNGNRNFAWMTKKAGKENEKVYPWNVKDVVDIDVTAEDFITRMTNYCTYLPNEKVLPKESLLYQRYMLLEELSQIRIDGKKLSKEDRKAIIDDLFIGKGRVKVSDKDFKEYLDKVNYVKVNGKGYDVTGYQSDDGFACALSSYNKFRRILGYVDERNEKMIEDIIYWLTVFEDKDIVKRKINKQYADKFSDEQLKKILKLKFKGWGRYSAKLLNGIKGDMGTTIIEMLEDADERFAYCDYCPNFMQIINKDGKLKQIIDDNRPRYDGTKDLLDVIQDMHTSPANRRGIWQTMKVIEEIIEYMGEKPQQIYIEFAREDDFKAKNKRTDSRKKAVDKALNKLKEEVIDEYNENVYKELKQYEKRLDEEKVYLYFMQNGKSLYTGEELNLNEPENLEIDHIIPYSLSDDDSLDNKALVLKKENQNKGNKIVKEAFPQSFSDSEMIDYWKNLKKARLISEKKFNNLQKNNVDDILTKGFINRQLVETRQIVKSVANLILDYYNEQIDVIEVKANLSVSVRKMLTYEKKDNNGFWVENNDNSMFYKNRHMNDYHHAHDAYLANIIGMYIQKNYPQLQKELNYSQYRKIWRKYYENAKNNNGVNWFATLGKFSINNKETAWYGEDIIAYMRKIFCYRDVIISKKLEENTGAFYSETKYPREDKADSKLVPLKQGNNMRGANNLKELDTRKYGGYKGGEKAYFVLVKYCIEKALKKKVKKEYHMEFVEIPVYIARDIKNKDINLYDYVCDILSEAYKNSVVDVEILRNKVPKYQMIIGENGEEYYLVGATEVINSKQFVLGGANQQYNRLLNYIMYGKNDKWQYIQTELLDEQLTGLYDLLLSKIKDEYKGFSKEAIRIHEDNSFYKLDVKNKKEFIAEMIKLVQPDSNYPYLGKYSTGLSDRMGRKSKEKVGKKITLVDKSVTGLYERRTTFELEDDSSTKSR

SEQ ID NO: 21376 - protein, 1428 aa, unidentified
  REGION 1..1428: note = Cas Enzyme sequence
MYNYNIGLDIGTGSVGWCLTDENGHLLKVNRKGNNGKTYRNSAWGVRLFESADTAADCRIKRSTRRRYNRRRTRIIELRKIMSDMIMPIDPNFYARLDEAFLWNEDKSDKAKAPFLLFNDNGYDDVKYYTDYPTIYHLRKHLLETEGRADARLIYLALHHMMKYRGHFLFEGQSFEAIDNIEDTFIELEHLVNVYVKEKEDTDNNSKNNALYQTIKNYLADNKVKNKDKKEDITDTFIKAGYDNKYSKELAAAVLGYEFNVGIIVNDNNLTDENGKALKAKFADAKYEEQEEKLSDTLGEKYYIVETLKKIYSWKVLHSILGDSKYLSYAMVDKYKKHGEQLTALKDLFHKYTSQNEYNDFFHHEKDEDGKYIVNYVNYIKGIKRLSNETNKKYNTKQQLYESIKEKLGERAADDEVYKKILVEMEQETFLEKINNVDNSAIPYQLNLMEMDKILTQQGVYYKELRGNKELLLKMLSSKIPYYVGPLNNNSNGNRNFAWMTKKAGKENKKVYPWNVKDVVDIDVTAEDFITRMTNYCTYLPDEKVLPKESLLYQKYMLLEELSQIRIDGKKLSKEDRKVIINDLFIGKGRIKVSDKDFKEYLNKINYVKINDKGYDVTGYQSDDGFACALSSYNKFRRILGYVDERNEKMIEDIIYWLTVFDDKDIVKRKINKQYADRLNDEQLKKILKLKFKGWGRYSAKLLNGIKGDMETTIIEMLEDADERFEYCDYCPNFMQIINKDEKIKQIIDDNRPRYDGTKDLLDVIQDMHTSPANKRGIWQTMKVIEEIIEYMGEKPQQIYIEFAREDDPKAKNKRTDSRKRAIDKALKKLKEDVVDEYNENVYKELKQYEKRLDEEKVYLYFMQNGKDLYFPDKELNLDELEKLEIDHIIPYSLSDDDSLDNKALVLKGNNQNKGNKIVKEAFPQLFSNSGTVNYWKNLKKAGLISEKKFNNLQKNNVDDILTKGFINRQLVETRQIVKSVANLILDYYNEQIDVIEVKSSLSTSVRKMLTYEKKDNNGFWEENKDNCMFYKNRDMNDYHHAHDAYLANIIGMYIQKNYPHLQKELNYSQYRRVWRKYYENTKNNNGVNWFATLGKFSSNNEEADWYGQDIIAYMRKIFCYRDVLISKKVEENTGAFYSETKYPREDKAGSKLVPLKQGDNMRGANNLKELDTRKYGGYKGGEKAYFVLVRYCTEKALKKKVKKEYHMEFVEIPVYIARGIKNKNINLYDYVCDTLNEANKNSVADVEILRNKVPKYQMIIGENGEEYYLVSATEVINSKQFVLGGSNQQYNRLLNYIKYGKNDKWQYIQTELLDEQLIGLYNLLIAKIKDEYKGFSKEAVRIQENNSFDKLDVKDKKEFIAEMIKLVQPDSDYPYLGKYATGLSNRMGRKTGEKVGKKITLVDKSVTGLYERRTTFELEDDSSTKSR

SEQ ID NO: 21377 - protein, 1090 aa, unidentified
  REGION 1..1090: note = Cas Enzyme sequence
MTKNYSIGIDMGVNNVGWSILNNDTKKLENYGVRLFPTSNDAKERREVRNTRRRLKRKETRLDDTLYLLKKYGFNEDNTIEENLIEKRVKGLNEKLEKQDIVNILCYMIKHRGYIPFGDEEVTLVDLNGKYPCEFYYEMYKNGGKYRNRKMTVRITDNEKEIKKILETQSKYYKNINQDFINKYLNILTRKRKYWEGPGSINDLTPFGRFKTQEDVENYLEEKRKNPSYEKYIYEDLIKKCDYELEERCCCKLNIYYEIFNMYQDFINVSFKNIEELENKDCFYETKNGLYKLNKKGLLMVKDYCMNNFKLKYTDILKKLFNTDKDNISGYRIDKDHKPEFSTLNSYRKIMLEFTEKGFDTTWVSDYNCYNEIMEKMTLTPGGVEFIKEIENNKLVPYKFNEEEKSLFKELKEYFNKKTLLSYGSLSQKILQKAINDMLDLEKNFMQVSRIKDYGKEARENFIKQYKKTSNKLEINASFVDDIIASPQVKKSLRQAIKIINAIIEKEGCLPVSIAIESTKELNSDKKKKEIEKEQKIQENLRKQASNYLSVVFGDSNATETNILKVMLYNETNGHCAYCNKPLNINDIFTDNIQVDHILPISKSFNDSFNNKIISCKKCNDDKKNNTPYQFLKNKNYFEEFEKRVLENKNISDYKKDNLLYKDDLDKYKTRFFNRNLRDTAYATTELINQIEIFNNYLEILDKKRINTLSVPGQITSSIRNRYVKNEDKTSLEKNRDAGVFHHAVDASIVVSVSDTHIGQIMLKAQNYKEYWIKNKSNYDDIYKYLINLRIDDTINQIEKINNENIKVSKQVSKNPQGKLANSNIYKMIKKDNEQYIINQIDNIYTFDFKKDENKKLFEKLLNEENNEFTLLCYDNDKNTFNYIKKIYNEYKDEKGNPFVNYLIDKGEISDGNSLDYDITGIRMITKKGNGPIIKRLRYYSKKNDLYILNKKNINKKDSNYLALDSLKQFCVKVYVDNDNKKFVFLPVYTISLDPKTKKVNENDEFYKLFYNKYIGNKNVTFFADIYNGNKLEITKKDGTIVSGYYSTFDKSSNRLETQNGHKFVCSDKKISIIHTDILGNEKKRLTKEL

SEQ ID NO: 21378 - protein, 1061 aa, unidentified
  REGION 1..1061: note = Cas Enzyme sequence
MGINNVGWSIINEEKMQIEKSGVRLFKISSSAEERRNFRSSRRRKKRKYNRIKDILKLLGSIDFPSENTIDSNLLEKRVKGLKTKISKQDIANICCYYASHRGYIPFGDEERELINLDNKYPCEYYYQLLQERGKFRALQEVVDNKDLIREYKEIINKQLEYYPELIKVKDEILNTVERKREFWQGPGSEKSRTDYGRFKTEKYKLEHGLKNDLEYLYDDLIGKCSICIGEKTVPVSNYYYEVFNLLNDFINTSIKSIDNLTKQNAVYLDKNTGYYKLTSDSLNTIINYCKQNPNLKYNDIFRDLFGLKKEDLIGYRIDKNYKPTFSTMNFYRLVKNTFETFNSDWIDDIDEYNNFIRILAISPGIVETKNLIEKYMKHSFSDKEYELIKEISSKLKSKGGLKYGALSEKILKKSINDMMSTNQNFMQVRRKFDYDKESRDYFIKSYKETEGIYLMDEKFVDDIIASPQVKKSLRQSIKVINSIITEKKAFPDVIAVESTNELNNDSKRKLIEKEQKINESARTSAREYIINNFGDSYVSEKNITKVMLYNELDGICPYCGKPFKDGLNSIIKSNIEIEHILPLSKSFNDSYNNKTLSCRSCNSNKSDRSPYMWMGPEKFDEFSERIKKLPISEEKKTNFLETNDLDKYNTRFFNRNLRDTSYATSELINQIKIYNDFLDNKLDGNVKIRTLSAPGQLTYKIRKNLGIDKDRDAGKFHHAVDASIVGGIALDNGIGSILLESQNEKEFWIKKKYLGNRIDELIFNYNNSILDDQLRNIKSDNDIKISEQVDKDFNKSLANSNVYKYLKIGNDFKKVEQISNIYDEKIMTNKIIKNLFDDNDKKVNLMIKDNNPKMYKKLKNIFEQYNNKGPSSNPFINYCLEVNNISIDEFDYTKFGIKQENGPIVKKLRYYTTANIPNLLSNKNMKKNTYIGLDSVGQAYTKVYWDKDKLKFIFLPIYSTSIDLKNNKLNKNDKTYKQFYDLYLKGKNYQFVVNLYNGNHVTGISSTGEKITGNISYYHKTNNFICLKNKKNIGTTIKQLIVYDVDCLGNEKIRLTWPSD

SEQ ID NO: 21379 - protein, 1119 aa, unidentified
  REGION 1..1119: note = Cas Enzyme sequence
LYNEKKYWGVKMKYIIGLDLGINNVGWSIVNQETNEIVDCGVVRYQESSDAQERRKLRASRRLRNRRLHRVERLALLFKENGIPTQRTIEPELITKRAKGLKEELSVQEIVNIIYYFAMHRGYIPFDDEKQEREVVQLDDNQFPCEFIINEFKKYGKYRNSNKLIKCSDNIREIKQILETQRTFHPELTPELTDKIIKIITSKREFYEGPGGARINQLTPYGRFRTAADLEEYKVNPQKYKYLYEKLIAKCKIALGETCAPRINYFAEEFNFLNDFINMKVKDVTLLPQEFAYKVDEKGKLSGETILEIRDYVLSNETVRLDKMFKQILGTGIENIEGYRIDKNKKPEVSLYDFYKYVIKQFSQNNLNPTWLYDKDKKIYNKTMYVLTVVPSSVQIEEMLIERIPEYSFSQEEINVLKGIKTKKITNNRGMYHSLSEKVLLRTLADMKKTQYQLNYMQLMKELDYEKEAKEYFEKNYTNRTVEPYLVEKKYIDVLIANPQVKKTLRKAISVINAIIKRYKEYPTVIAIESTREMNSKAKKDAIIKEQAKLEKLRKDAITFLEENDLRVNETNILKAMCYKETNGHCMYCNTPIPASQLSTLEIEHILPISQSYDDSFDNITCACLKCNMEKLKKTPYEFLMSINSYEPFKERVIDLPISDKKKNNLLFEGDISKYELKFINRNLRDTAYGSMALAEELRKFNVFLERKANRYINIVTIPGQMTSKMRRKYELEEKDRTQLYHHAVDATIVASIANTPVGRLIIKGQNDAKFWFENKEKRLELSKLFPYAELENIKEIKELIPKKGEELICEKDDRIKRSFEVKKSINQQIANQNIVKYKIIDGEYYLVQQINNIYEEKSNDIFYKLFDESKKDKILLCELEDPKLYNRLREIFYAHEKSKINPFLEYCLFEHGIETTPNNFNYLIHGIKKSPNKPNSPIVKKLRYLERKTNPYIFKKADLNRKRNNFGEFVIPKLKDKTINGLDSLSQYCVEVYYDSDAQRFIFLPIYMVSVDINSKKINREERYYKETVARLIGKKTPLYITTLYTGNWCKVVKRDSSFSQGRFICYHKTHNKLVFGKDGSYSSSDAFYMTTNDKQIIIYGLDILGKKYKILDSNDII

SEQ ID NO: 21380 - protein, 1108 aa, unidentified
  REGION 1..1108: note = Cas Enzyme sequence
MKYIIGLDLGINNVGWSIVNQETNEIVDCGVVRYQESSDAQERRKLRASRRLRNRRLHRVERLALLFKENGIPTQRTIEPELITKRAKGLKEELSVQEIVNIIYYFAMHRGYIPFDDEKQEREVVQLDDNQFPCEFIINEFKKYGKYRNSNKLIKCSDNIREIKQILETQRTFHPELTPELTDKIIKIITSKREFYEGPGGARINQLTPYGRFRTAADLEEYKVNPQKYKYLYEKLIAKCKIALGETCAPRINYFAEEFNFLNDFINMKVKDVTLLPQEFAYKVDEKGKLSGETILEIRDYVLSNETVRLDKMFKQILGTGIENIEGYRIDKNKKPEVSLYDFYKYVIKQFSQNNLNPTWLYDKDKKIYNKTMYVLTVVPSSVQIEEMLIERIPEYSFSQEEINVLKGIKTKKITNNRGMYHSLSEKVLLRTLADMKKTQYQLNYMQLMKELDYEKEAKEYFEKNYTNRTVEPYLVEKKYIDVLIANPQVKKTLRKAISVINAIIKRYKEYPTVIAIESTREMNSKAKKDAIIKEQAKLEKLRKDAITFLEENDLRVNETNILKAMCYKETNGHCMYCNTPIPASQLSTLEIEHILPISQSYDDSFDNITCACLKCNMEKLKKTPYEFLMSINSYEPFKERVIDLPISDKKKNNLLFEGDISKYELKFINRNLRDTAYGSMALAEELRKFNVFLERKANRYINIVTIPGQMTSKMRRKYELEEKDRTQLYHHAVDATIVASIANTPVGRLIIKGQNDAKFWFENKEKRLELSKLFPYAELENIKEIKELIPKKGEELICEKDDRIKRSFEVKKSINQQIANQNIVKYKIIDGEYYLVQQINNIYEEKSNDIFYKLFDESKKDKILLCELEDPKLYNRLREIFYAHEKSKINPFLEYCLFEHGIETTPNNFNYLIHGIKKSPNKPNSPIVKKLRYLERKTNPYIFKKADLNRKRNNFGEFVIPKLKDKTINGLDSLSQYCVEVYYDSDAQRFIFLPIYMVSVDINSKKINREERYYKETVARLIGKKTPLYITTLYTGNWCKVVKRDSSFSQGRFIYYHKTHNKLVFGKDGSYSSSDAFYMTTNDKQIIIYGLDILGKKYKILDSNDII

SEQ ID NO: 21381 - protein, 1108 aa, unidentified; identical to SEQ ID NO: 21380
  REGION 1..1108: note = Cas Enzyme sequence

SEQ ID NO: 21382 - protein, 1396 aa, unidentified
  REGION 1..1396: note = Cas Enzyme sequence
MNDKSKKYFIGLDLGTNSVGYAVMDKDCGVLRKSGKKMWGSVLFDEGQAAASTRVQCSSRRRFERRKERIRLLQRLTAKSVAEVDPSFFARLERSFLLNVKNDDEFGRDNIFNLFDGSYTDRDYYAEYKTIYHLRKRLCEDKSKADIRLVYLALHHMIKYRGNFLHDEERLQAGSENIAEAIEDFFEDYKKAYFDVDEETGEVIALPEVPVAEIAEILKQKGKKSEKKDEIIKKICGNAGSLKKKASAFASLLLGYKADLSELFSLESGDEDKKKEAKVSFESADYDEKAETFPELFGDEGAELICRLKAIYSDLTLSSIIGEGKKYVYEGMIERYEKNKKDLLMLKTVLKADEQIYREFFKDSNEKKVNFVSYFKPHVRGKLNEIGKRASKDDFYKEVQKLLNSGKFPDSEAKNYVISRIEEDDFLIKLNSTRNAVIPYQLNLNELELILDNQSVYYPELAENRDKIISLLTFRRPYSVGVIKPESRFAWVENAAVKDERAYPWNFDEVVDYDSASEKFIKNLTGRCTYFKDQLVLPANSVIYQAYNVLNELANVSIVLSEGGQRKLTVSEKQQCFTLFLEQATVKPKDITSKLFKTFNVASKGLTGLGGDDGKKFLSKMTGYRAIKTALKADCFVEENGKIQTNYELFEVYEKIAEILTVFNDGKIKRRALEKLLGQKFPKAAIDLLVKQNFVGWGRLSKKCLCGVENEDGQNVLETMYSTSKNFMEVISDDTLGFKEAFEQKTDKNSGEIKYSEVNELYVSPSVKRTVWQAVKVVKEVVKAVGCEPCGIYVESTRQDDKKKTPKKRIEKLKELYENVRKDTDEYNSKFYDKPVGDKLKTMSDDMLNDDMVYLYMLQMGKSMYSGKPLDLRNLSTTCEIDHIVPRHYIKDDGIENRVLVLKQENQEKSGTLALKKSVRDEMTPFWAFLKSKGFIGKKKFLNLTKSEYTENDMTGFINRQLVETNQSMKAVRDLLKSRYSSSDVEFVKAGISSAFRSAHTEAGYVEFFKLRELNDFHHAKDAYLAAAIGYFTRKIYPIWGANSQARQLRDEIESSAGRDIVELCQKRNGIVVDAMIYANPDRDDNVIWNTCYNNILSAFSNNDCLVTRKKEEASAQFYNATVWSPRTENGDVNLRYAVTRSAEKKPLPLLYGNYNGENDAYFVLATVQKGKKTETVLTGVPVRIAYLAKKNETAVDDYLKRYFEANKKVYVSHDKRKILKYQLIRYNGQLCYITAATEVINAEQLIMDKKYSLLLYCIAHPNKKVTVKGNVYRLTDVCREQFFTILMKEFVSAYAEKLNERYPLYSKYAEGILAFIGSQNFEALPLYSEKEACKAAYILNLLNLTKACSTCLDMKKYAGKTSWGRLNGKTIRKNEVDWIDTSITGIYRTEVKGVE

SEQ ID NO: 21383 - protein, 1408 aa, unidentified
  REGION 1..1408: note = Cas Enzyme sequence
MNRNKQVLMDRANVCDSTNKTMEQLYNIALDIGTSSVGWCVTDMNGKLMKFKRRNMWGARLFDKGQTAETRRLKRSLRRRYARRRQRIILLQNLLGDMVNQKDKNFFVRLNESFLWKCDKTEKSDYLLFADKDYTDKEYYKKYPTIYHLRKHLIESNEKADPRMVYLAIHNIIKHRGHFLYQGQKFEEVSDLSDIINELSDCLKCNFEGAEFKIEKEVIEKVEEIFNEKTKEGVNNEHKKSKAEKCEDLEKILVDNKWDKKISKEIAKACLGYKFNVGTVIGESELKGEDGKSIKIQFDDSKYEEKILELAEKINDKIEIINILQNVYSWIVMEDILSGYKYISDAMVDKYERHNKQLNMLKRLFRKYLSRDDYLEFFRKEKGKEKDENKEKYIINYVNYIKRNKRCANTKGTARENLYKEIKGKFKGMAENDAEYQLILKEMDNDEFLLKQKDVNNSNIPYQINLIELEKIIDNQGKYYPVLLENREKIIKLLTFRIPYYIGPVNPRKNDNKFAWVKKKEGHETETVNPWNLEEIVDIDVTAERFIDNMTGFCTYLPEEKVLPKNSLIYQEYKVLNELNKIKVNDKGLDIKTRNDIIEGVFKKQKNINEKTLKTYLLSINYLGAKIIEEYKIEGYQGDKQFANSMGSYIDFKKILGSVDVRNLDMIEEIVYWLTVFEEKSIVKRKMIQKYSDKLSEKQLSRILDLKYDGWGRFSKKFLTGIYGDYYGEKKTIMDVLKEDNKLPNLMQIINKKEFGFNEIIEKNRIKLDEGEVLKDAIDKIHCSPEVRRGIWQSMKLVEEVIEIENGVLPQNIYIEFARSEEDKKRTKKRKNKLEAAYKVLKKEIDVYNEKVLKELGEYKEKLDDEKVYLYFLQNGQCMYTKQELNLNGYLKDCEIDHIIPQSVYDEDSLDNKVLVLKGANQEKGNRIPYDYIKEKNKVNWESMKIWWEKLYKCGLMSEKKYKRLTTQNIGEIINSGFIKRQLTVTSQMIKNVANLITDYYGGKVNVMAVRAAFSTKIRKTYSELVKGSDGNYIEKNDGDCFIKNRFLNDFHHAHDAYLASIIGKYLNTVYPKMADEINYNKYIKYYNEQCKKNRKQKFNFILSKFDKIFERDGEIVWNGVEQIKYLKNILNYRDCIITHKLEENTGSFYDENRLPKNDKSEKLIPIKEGLPVERYGGYQGGEAAYCCLVSYVKKKKQQLELVKIPVMTAKKIYDGKTTLENYLKEKMGLDDIHIIRKKIMKYQLIEEDGCRYYLVSAEELANAKQLVLGSKNVRFNRILNIIEDNRYNGYSPEYIQRGLDDFYEFLIGKIQKEFGRSSSVAQEIYDTKVFYELESAKDKGDFIMEILKLTNIGSDYPYLKKYKKYNKISSSLIDRKGRSKYQGYKIKPGTVLIDQSVTGLYERRLEL

SEQ ID NO: 21384 - protein, 1390 aa, unidentified
  REGION 1..1390: note = Cas Enzyme sequence
MFAENISEKSKNGYYLGVDIGTDSVGYAVTDRDYSLCRFKGEPMTGVALFDKADQCADRRAHRTSRRRYARRQMRVNLIQDLFCVEMAKVDPNFFIQMNESRLWQCDKKPETLVGCEWLDREYNRRFPTVHHLITELINEKNSNTDVRHLYLAVAWLVAHRGHFLSDISCDKIRELYDIKPLYSAFIGWFGENGYSAPWECDADALMATMSRRCGVRAKEAELKKLIYGGKKPVEDESCPLYQEAIIKLLAGGSIEIKKTLKWEEYKGVEGSICLDDAEKLEAALAELGDDGEVIRLMSQVYDCAALSKMLSGHTYISEAKIEQYETHKADLRELKRLAKKYCSDDEYKNFFVSETGTYSAYSAYFKCSEKRNGKKITREDFYKGVKKLIAKIKERIGEGDDIDLVIANGVLSRIDAGTYMPKQVNPENRLIPYQLYYAELDVILSNAEKRFAFLSGRDSDGLSVSDKIRSVFTFRIPYFVGPLEKVPGNKFAWIERKAEGRILPWNFDEKVDLDASEDGFIKRMTNKCTYLPGENVLPKQSLLYCKFTILDEINKINIDGVPISVELKQQIFHELFEKEKKVTKKKLIDFLVSVKAISKGEEVRISGLGAEIKSSYKPYIDFRRLLAAGTLTAEDVDCIIERITCTEDTARLKKWLLKWSKENGKDLSDDDIKYISQRKYDDFGRLSGKLLNGIEAACTETGEVGTVMHFMWNTNDNLMQIIKGQKYRFEDRISEISKEYFSEHPTTLVERLDELGISNAVKRPVMRTLDIIADIVKAKKCPPEKIFVEMTRGEDKRIDSDKLNRGKRLRELYSKLDLEDAVRPRKELDALGDEADRKLQREALFLYFCQMAKCAYCGAPLDISAIGTNEYNVDHIWPRAYIKDDSILNNKVLVHSEENGRKTDTYPIESKIRSEMRGFWENLRNAKLINEEKFRRLTREHAFSTDERLGFINRQIVETGQSAKVVTNLLTDLYPKAEIVFVKAGNVSEFRHEYGEICNYALFGRTLTDAEKKSKCLVKSRTASDIHHAHDAYLNIVVGNLFHEKFTKRYYLDTLNDYSPKMHILFGRKCVIDGNVIWNPEKHLPTVDRTMANVHIHLTKYQTKQKGLLFDQQPLRAGSSDSLVPLKKNLDTAKYGGYNSPKISFCVLVRYRIRKKYELTIVPVERLVANKYLSEQGYPAKHVREKLPVNAEDISFPLENRIIKVNTVFSLDGFEACVSGTSNRGSTILMRSLMTPRYTAEQIAYIKNLDNISEKRKKNPQYVIDETFSGISREKNVALFADLVNMMNGSVYSKQPGAKLGISADDQKKFEGLTIDMQYECLKNMILYLKTNRSDDCNMNAMGGKSQIGAVRLSANISNWKKNYSDVRIIDRSSSGLFEHRTGNLLNLI

SEQ ID NO: 21385 - protein, 1390 aa, unidentified
  REGION 1..1390: note = Cas Enzyme sequence
MFAENFSEKSKNGYYLGVDIGTDSVGYAVTDRDYSLCRFKGEPMTGVALFDKADQCADRRAHRTSRRRYARRQMRVNLIQDLFCVEMAKVDPNFFIQMNESRLWQCDKKPETLVGCEWLDREYNRRFPTVHHLIMELINEENSNTDVRHLYLAVAWLVAHRGHFLSDISCDKIRELYDIKPLYSAFIGWFGENGYSAPWECDADALMAAMSRRCGVRAKEAELKKLIYGGKKPVEDENCPLYQEAIIKLLAGGSIEIKKTLKWEEYKGVEGSICLDDAEKLEAVLAELGDDGEVIRLMSQVYDCAALSKMLSGHTYISEAKIEQYETHKADLRELKRLAKKYCSDDEYTNFFVSETGTYSAYSAYFKCSEKRKGKKITREDFYKGVKKLIAKIKERIGEGDDADLVIANGVLSRIDAGTYMPKQVNPENRLIPYQLYYAELDVILSNAEKRFAFLSGRDSDGLSVSDKIRSVFTFRIPYFVGPLEKSPGNKFAWIERKAEGRILPWNFDEKVDLDASEDGFIKRMTNKCTYLPGENVLPKQSLLYCKFTILDEINNINIDGVPISVELKQQIFHELFEKEKKVTKKKLIDFLVSVKAISKGEEVRISGLGAEIKSSYKPYIDFRRLLAAGTLTAEDVDCIIERITCTEDSARLKKWLLKWSKENGKDLSDDDIKYISQRKYDDFGRLSGKLLNGIEAACTETGEVGTVMHFMWNTNDNLMQIIKGQKYRFEDRISEISKEYFSEHPTTLVERLDELGISNAVKRPVMRTLDIIADIVKAKKCPPEKIFVEMTRGEDKRIDSDKLNRGKRLRELYSKLDLEDAVRPRKELDDLGDEADRKLQREALFLYFCQMAKCAYCGKPLDIPTIGTNEYNVDHIWPRAYIKDDSILNNKVLVHSEENGRKTDTYPIESKIRSEMRGFWENLRNAKLINEEKFRRLTREHAFSTDERLGFINRQIVETGQSAKVVTNLLTDLYPKTEIVFVKAGNVSEFRHEYGEICNYALFGRTLTDAEKKSKCLVKSRTASDIHHAHDAYLNIVVGNLFHEKFTKRYYLDALNDYSPKMHILFGRKCVIDGNVIWNPEKHLPTVDRTMANVHIHLTKYQTKQKGGFFDQQPKSAGSSDSLVPLKKGLDTAKYGGYNKPTISFYVLVRYRIRKKYELTIVPVELLVANKYLSEQGYPAKHVREKLPVNAEDISFPLENRIIKVNTVFSLDGFEACVSGTSNRGSTILMRSLMTPRYTAEQIAYIKNLDNISEKRKKNPQYVIDETFSGISREKNVALFADLVNMMNGSVYSKQPGAKLGISADDQKKFEGLTIDMQYECLKNMILYLKTNRSDDCNMSAMGGKPQSGAVYLSANISNWKKNYSDVRIIDRSSSGLFEHRTGNLLNLI

SEQ ID NO: 21386 - protein, 1390 aa, unidentified
  REGION 1..1390: note = Cas Enzyme sequence
MFAENFSEKSKNGYYLGVDIGTDSVGYAVTDRDYSLCRFKGEPMTGVALFDKADQCADRRAHRTSRRRYARRQMRVNLIQDLFCVEMAKVDPNFFIQMNESRLWQCDKKPETLVGCEWLDREYNRRFPTVHHLIMELINEENSNTDVRHLYLAVAWLVAHRGHFLSDISCDKIRELYDIKPLYSAFIGWFGENGYSAPWECDADALMAAMSRRCGVRAKEAELKKLIYGGKKPVEDENCPLYQEAIIKLLAGGSIEIKKTLKWEEYKGVEGSICLDDAEKLEAVLAELGDDGEVIRLMSQVYDCAALSKMLSGHTYISEAKIEQYETHKADLRELKRLAKKYCSDDEYKNFFVSETGTYSAYSAYFKCSEKRKGKKITREDFYKGVKKLIAKIKERIGEGDDADLVIANGVLSRIDAGTYMPKQVNPENRLIPYQFYYAELDVILSNAEKRFAFLSERDSDGLSVSDKIRSVFTFRIPYFVGPLEKVPGNKFAWIERKAEGRILPWNFDEMVDLDASEDGFIKRMTNKCTYLPGENVLPKQSLLYCKFTILDEINNINIDGVPISVELKQQIFHELFEKEKKVTKKKLIDFLVSVKAISKGEEVRISGLGAEIKSSYKPYIDFRRLLAAGTLTAEDVDCIIERITCTEDSARLKKWLLKWSKENGKDLSDDDIKYISQRKYDDFGRLSGKLLNGIEAACTETGEVGTVMHFMWNTNDNLMQIIKGQKYRFEDRISEISKEYFSEHPTTLVERLDELGISNAVKRPVMRTLDIIADIVKAKKCPPEKIFVEMTRGEDKRIDSDKLNRGKRLRELYSKLDLEDAVRPRKELDDLGDEADRKLQREALFLYFCQMAKCAYCGKPLDIPTIGTNEYNVDHIWPRAYIKDDSILNNKVLVHSEENGRKTDTYPIESKIRSEMRGFWENLRNAKLINEEKFRRLTREHAFSADERLGFINRQIVETGQSAKVVTNLLTDLYPKTEIVFVKAGNVSEFRHEYGEICNYALFGRTLTDAEKKSKCLVKSRTASDIHHAHDAYLNIVVGNLFHEKFTKRYYLDALNDYSPKMHILFGRKCVIDGNVIWNPEKHLPTVDRTMANVHIHLTKYQTKQKGGFFCQQPKSAGSSDSLVPLKKDLDTAKYGGYNKPTISFYVLVRYRIGKKYKLTIVPVELLVANKYLSEQGYPAKHVREKLPVNAEDISFPLENRIIKVNTVFSLDGFEACVSGTSNRGSTILMRSLMTPRYTAEQIAYIKNLDNISEKRKKNPQYVIDETFSGISREKNVALFADLVNMMNGSVYSKQPGAKLGISADDQKKFEGLTIDMQYECLKNMILYLKTNRSDDCNMSAMGGKPQSGAVYLSANISNWKKNYSDVRIIDRSSSGLFEHRTGNLLNLI

SEQ ID NO: 21387 - protein, 1390 aa, unidentified
  REGION 1..1390: note = Cas Enzyme sequence
MFAENFSEKSKNGYYLGVDIGTDSVGYAVTDRDYSLCRFKGEPMTGVALFDKADQCADRRAHRTSRRRYARRQMRVNLIQDLFCVEMAKVDPNFFIQMNESRLWQCDKKPETLVGCEWLDREYNRRFPTVHHLIMELINEENSNTDVRHLYLAVAWLVAHRGHFLSDISCDKIRELYDIKPLYSAFIGWFGENGYSAPWECDADALMAAMSRRCGVRAKEAELKKLIYGGKKPVEDESCPLYQEAIIKLLAGGSIEIKKTLKWEEYKGVEGSICLDDAEKLEAVLAELGDDGEVIRLMSQVYDCAALSKMLSGHTYISEAKIEQYETHKADLRELKRLAKKYCSDDEYKNFFVSETGTYSAYSAYFKCSEKRKGKKITREDFYKGVKKLIAKIKERIGEGDDADLVIANGVLSRIDAGTYMPKQVNPENRLIPYQLYYAELDVILSNAEKRFAFLSGRDSDGLSVSDKIRSVFTFRIPYFVGPLEKSPGNKFAWIERKAEGRILPWNFDEMVDLDASEDGFIKRMTNKCTYLPGENVLPKQSLLYCKFTILDEINNINIDGVPISVELKQQIFHELFEKEKKVTKKKLIDFLVSVKAISKGEEVRISGLGAEIKSSYKPYIDFRRLLAAGTLTAEDVDCIIERITCTEDTARLRKWLLKWSKENGKDLSDDDIKYISQRKYDDFGRLSGKLLNGIEAACTETGEVGTVMHFMWNTNDNLMQIIKGQKYRFEDRISEISKEYFSEHPTTLVERLDELGISNAVKRPVMRTLDIIADIVKAKKCPPEKIFVEMTRGEDKRIDSDKLNRGKRLRELYSKLDLEDAVRPRKELDDLGDEADRKLQREALFLYFCQMAKCAYCGKPLDIPTIGTNEYNVDHIWPRAYIKDDSILNNKVLVHSEENGRKTDTYPIESKIRSEMRGFWENLRNAKLINEEKFRRLTREHAFSTDERLGFINRQIVETGQSAKVVTNLLTDLYPKTEIVFVKAGNVSEFRHEYGEICNYALFGRTLTDAEKKSKCLVKSRTASDIHHAHDAYLNIVVGNLFHEKFTKRYYLDTLNDYSPKMHILFGRKCVIDGNVIWNPEKHLPTVDRTMANVHIHLTKYQTKQKGLLFDQQPLRAGSSDSLVPLKKGLDTAKYGGYNKPTISFYVLVRYRIRKKYELTIVPVELLVANKYLSEQGYPAKHVREKLPVNAEDISFPFGNRIIKVNTVFSLDGFEACVSGTSNRGSTILMRSLMTPRYTAEQIAYIKNLDNISEKRKKNPQYVIDETFSGISREKNVALFADLVNMMNGSVYSKQPGAKLGISADDQKKFEGLTIDMQYECLKNMILYLKTNRSDDCNMSAMGGKPQSGAVYLSANISNWKKNYSDVRIIDRSSSGLFEHRTGNLLNLI

SEQ ID NO: 21388 - protein, 1390 aa, unidentified
  REGION 1..1390: note = Cas Enzyme sequence
MFAENFSEKSKNGYYLGVDIGTDSVGYAVTDRDYSLCRFKGEPMTGVALFDKADQCADRRAHRTSRRRYARRQMRVNLIQDLFCVEMAKVDPNFFIQMNESRLWQCDKKPETLVGCEWLDREYNRRFPTVHHLIMELINEENSNTDVRHLYLAVAWLVAHRGHFLSDISCDKIRELYDIKPLYSAFIGWFGENGYSAPWECDADALMAAMSRRCGVRAKEAELKKLIYGGKKPVEDESCPLYQEAIIKLLAGGSIEIKKTLKWEEYKGVEGSICLDDAEKLEAVLAELGDDGEVIRLMSQVYDCAALSKMLSGHTYISEAKIEQYETHKADLRELKRLAKKYCSDDEYKNFFVSETGTYSAYSAYFKCSEKRKGKKITREDFYKGVKKLIAKIKERIGEGDDADLVIANGVLSRIDAGTYMPKQVNPENRLIPYQLYYAELDVILSNAEKRFAFLSGRDSDGLSVSDKIRSVFTFRIPYFVGPLEKSPGNKFAWIERKAEGRILPWNFDEKVDLDASEDGFIKRMTNKCTYLPGENVLPKQSLLYCKFTILDEINNINIDGVPISVELKQQIFHELFEKEKKVTKKKLIDFLVSVKAISKGEEMRISGLGAEIKSSYKPYIDFRRLLAAGTLTAEDVDCIIERITCTEDSARLKKWLLKWSKENGKNLSDDDIKYISQRKYDDFGRLSGKLLNGIEAACTETGEVGTVMHFMWNTNDNLMQIIKGQKYRFEDRISEISKEYFSEHPTTLVERLDELGISNAVKRPVMRTLDIIADIVKAKKCPPEKIFVEMTRGEGKRIDSDKLNRGKRLRELYSKLDLEDAARPRKELDDLGDEADRKLQREALFLYFCQMAKCAYCGKPLYISAIGTNEYNVDHIWPRAYIKDDSILNNKVLVHSEENGRKTDTYPIESKIRSEMRGFWENLRNAKLINEEKFRRLTREHAFSADERLGFINRQIVETGQSAKVVTNLLTDLYPKTEIVFVKAGNVSEFRHEYGEICNYALFGRTLTDAEKKSKCLVKSRTASDIHHAHDAYLNIVVGNLFHEKFTKRYYLDTLNDYSPKMHILFGRKCVIDGNVIWNPEKHLPTVDRTMANVHIHLTKYQTKQKGGFFDQQPKSAGSSDSLVPLKKGLDTAKYGGYNKPTISFYVLVRYRIRKKYELTIVPVELLVANKYLSEQGYPAKHVREKLPVNAEDISFPLENRIIKVNTVFSLDGFEACVSGTSNRGSTILMRSLMTPRYTAEQIAYIKNLDNISEKRKKNPQYVIDETFSGISREKNVALFADLVNMMNGSVYSKQPGAKLGISADDQKKFEGLTIDMQYECLKNMILYLKTNRSDDCNMSAMGGKSQIGAVRLSANISNWKKNYSDVRIIDRSSSGLFEHRTGNLLNLI

SEQ ID NO: 21389 - protein, 1390 aa, unidentified
  REGION 1..1390: note = Cas Enzyme sequence
MFAENFSEKSKNGYYLGVDIGTDSVGYAVTDRDYSLCRFKGEPMTGVALFDKADQCADRRVHRTSRRRYARRQMRVNLIQDLFCVEMAKVDPNFFIQMNESRLWQCDKKPETLVGCEWLDREYNRRFPTVHHLIMELINEENSNTDVRHLYLAVAWLVAHRGHFLSDISCDKIRELYDIKPLYSAFIGWFGENGYSAPWECDADALMAAMSRRCGVRAKEAELKKLIYGGKKPVEDESCPLYQEAIIKLLAGGSIEIKKTLKWEEYKGVEGSICLDDAEKLEAVLAELGDDGEVIRLMSQVYDCAALSKMLSGHTYISEAKIEQYETHKADLRELKRLAKKYCSDDEYKNFFVSETGTYSAYSAYFKCSEKRKGKKITREDFYKGVKKLIAKIKERIGEGDDADLVIANGVLSRIDAGTYMPKQVNPENRLIPYQLYYAELDVILSNAEKRFAFLSGRDSDGLSVSDKIRSVFTFRIPYFVGPLEKSPGNKFAWIERKAEGRILPWNFDEKVDLDASEDGFIKRMTNKCTYLPGENVLPKQSLLYCKFTILDEINNINIDGVPISVELKQQIFHELFEKEKKVTKKKLIDFLVSVKAISKGEEVRISGLGAEIKSSYKPYIDFRRLLAAGTLTAEDVDCIIERITCTEDSARLKKWLLKWSKENGKKLSDDDIKYISQRKYDDFGRLSGKLLNGIEAACTETGEVGTVMHFMWNTNDNLMQIIKGQKYRFEDRISEISKEYFSEHPTTLVERLDELGISNAVKRPVMRTLDIIADIVKAKKCPPEKIFVEMTRGEDKRIDSDKLNRGKRLRELYSKLDLEDAVRPRKELDDLGDEADRKLQREALFLYFCQMAKCAYCGKPLDIPTIGTNEYNVDHIWPRAYIKDDSILNNKVLVHSEENGRKTDTYPIESKIRSEMRGFWENLRNAKLINEEKFRRLTREHAFSADERLGFINRQIVETGQSAKVVTNLLTDLYPKTEIVFVKADNVSEFRHEYGEICNYALFGRTLTDAEKKSKCLVKSRTASDIHHAHDAYLNIVVGNLFHEKFTKRYYLDALNDYSPKMHILFGRKCVIDGNVIWNPEKHLPTVDRTMANVHIHLTKYQTKQKGLFFDQQPKSAGSSDSLVPLKKGLDTAKYGGYNKPTISFYVLVRYRIRKKYELTIVPVELLVANKYLSEQGYPAKHVREKLPVNAEDISFPFGNRIIKVNTVFSLDGFEACVSGTSNRGSTILMRSLMTPRYTAEQIAYIKNLDNISEKRKKNPQYVIDETFSGISREKNVALFADLVNMMNGSVYSKQPGAKLGISADDQKKFEGLTIDMQYECLKNMILYLKTNRSDDCNMNAMGGKSQIGAVRLSANISNWKKNYSDVRIIDRSSSGLFEHRTGNLLNLI

SEQ ID NO: 21390 - protein, 1131 aa, unidentified
  REGION 1..1131: note = Cas Enzyme sequence
  REGION 1123..1130: note = misc_feature - Xaa can be any naturally occurring amino acid
LINGLLNIRCKDVKGDNMGIIIGLDIGIASVGIAVVDKDTLDIKCVVSDLFDSADASKNIERRNNRQARRLNRRRKTRIGDFNTLWVSMFGELPEEVDSNVLLLRNAGLDEQLTLDEIYCVLKYMLKHRGISYLEDALNEENVTGSYQKGIAINQRESEYMLPCEIQLERFRKYGQYRGECEAENENGEKITLSNVFMTNSYRKEIDKFLNTQGKYGILNQKFIDEYLKIFNRKRKYYEGPGNEKSRTDYGKYTTGKDLDGKYITEKNIFEKLIGKCSVYKEELRAAGASYTAQEFNILNDLNNITVNNKKLTTQQKKDVIEIVQNSDRINMEKIISSCIGEKIEKIEGARIDKNEKNIYHTFEQYNKMRKIFAEKNYDIKELTIEQLDEIGRILTINTEREGIKDAIMESELLHLNNEQINLLIELRYKNSSLFTKWQSLSIKAMREIIPDLYDRNVNQMNILAERGVFKDKINLFENSVYLPKEPVLEEIYNPVVRRSISMTIDALNALIKKYGYPEDIVIEMPRDRNDAEQKDRIKKFQKTRENELKNIKKKIKEEYGIEITDEYFRKHKGLELELKLWVEQNEKCPYSGKYINVQDILYHHELFEIDHIIPLSISYDDSRNNKVLVYKEENQDKGNRTPLMYLSTVNRQYDQHEFMNYVLSTKTLPRKKRELLLNYEDITKIDVLKGFINRNLNDTRYASRSVLNAIQLFFGGKECDTKVRVIRGAVTNQLRIKLNLPKDREKSYSHHAIDAAIMCYSQMGLMNFRNIQNKFIDFENETYLSDERDSCFDNKYYDEALFGQVLKMRKNLLKAEGKPQRSVQSKGVFDEEEKNNGIVRYHHKVDKKPNRGLSNASIYGTRKIDDKIYKIVGYDIRNNKDAEAIINIIKKGKSDNFLMAKHDPETFKNLMEIYEQYKEEKNPFLAYEQETGDYIRKYAKNHNGPIIKKIKYVDSEVGSCIDISANYGYKNGDKRVIMDTLTPYRADVYYNYKDGTYRIIGVKYADFKYSNAKYVLDEEAYALILIKEGLLKIGDSLENISSSGYEYRLSFYKNDIIEYTKNDIVYKERFLSRTMPKVKNYIETKPISAALYEKRNPIGLTNATNICKIYTDVLGNETKIYXXXXXXXXN

SEQ ID NO: 21391 - protein, 1113 aa, unidentified
  REGION 1..1113: note = Cas Enzyme sequence
MGIIMGLDIGIASVGIAVVDKDTLDIKCVVSDLFDSADASKNIERRNARQARRLNRRRKTRIEDFNTLWVSMFGELPEEVDSNVLLLRNAGLDEQLTLDEIYCVLKYMLKHRGISYLEDALNEENVTGSYQKGIAINQRKSEYMLPCEIQLERFRKYGQYRGECEVEIENGEKITLSNVFMTSSYRKEIDKFLNIQGKYGILNQEFIDEYLKIFNRKRKYYEGPGNEKSRTDYGKYTTRKDLDGKYIPEKNIFEKLIGKCSVYKEELRAAGASYTAQEFNILNDLNNITVNNKKLTTQQKKDIIEIVQNSDRINMEKIISSCIGERIEKIEGARIDKNEKNIYHTFEQYNKMRRAFVEKNYDIKKLTIEQLDEIGRILTINTEREGIEDAIMDSSLLNLNNEQVNLLIELRRKNSSLFTKWQSLSIKAMREIIPDLYARNVNQMNILVERGVFKDKINLFENSVYLPKEPVLEEIYNPVVRRSISMTIDALNALIKKYGYPEDIIIEMPRDRNDAEQKDRIKKFQKTRENELKNIKKKIKEEYGIEITDEHFRKHKGLELELKLWLEQNEKCPYSGKHINVQDILFHHELFEIDHIIPLSISYDDSRNNKVLVYKEENQDKGNRTPLMYLSTVNRQYDQHEFMNYVLSTKTLPRKKRELLLNYEDITKIDVLKGFINRNLNDTRYASRSVLNAMQLFFGGKECDTKVRVIRGAVTNQLRIKLNLPKDREKSYSHHAIDAAIMCYSQMGLMNFRNTQNKFIDFENETYLSGDKDSCFDNKYYDEALFGQVLKMRKNLLKAEGEPQRSVQSKGVFDEEEKNNGIVRYHHKVDKKPNRGLSNATIYGTRKIDDKIYKIVGYDIRNNKDAEAIINIIKKGKLNNFLMAKHDPETFKNLMEIYEQYKEEKNPFIAYEQETGDYIRKYAKNHNGPIIKKIKYVDNEVGSCIDISANYGYKNGDKRVIMDTLASYRADVYYNFNDKLYRIIGIKYAYFKYLNGKYVLDEKSYVAILIKEGLLKEGDTLESLKLAGYEYRLSFYENDIIEYEQNGIVYKERFLSKSEGVKNKVETKPIMAKGYKNRKFPYLSKVRYISKIYTDILGNETKIYKEKFKLSVD

SEQ ID NO: 21392 - protein, 1113 aa, unidentified
  REGION 1..1113: note = Cas Enzyme sequence
MGIIIGLDIGIASVGIAVVDKDTLDIKCVVSDLFDSADASKNIERRNNRQARRLNRRRKTRIGDFNTLWVSMFGELPEEVDSNVLLLRNAGLDEQLTLDEIYCVLKYMLKHRGISYLEDALNEENVTGSYQKGIAINQRESEYMLPCEIQLERFRKYGQYRGDCEAENENGEKITLSNVFMTNSYRKEIDKFLNTQGKYGILNQKFIDEYLKIFNRKRKYYEGPGNEKSRTDYGKYTTGKDLDGKYITEKNIFEKLIGKCSVYKEELRAAGASYTAQEFNILNDLNNITVNNKKLTTQQKKDVIEIVQNSDRINMEKIISSCIGEKIEKIEGARIDKNEKNIYHTFEQYNKMRKIFAEKNYDIKELTIEQLDEIGRILTINTEREGIKDAIMESELLHLNNEQINLLIELRYKNSSLFTKWQSLSIKAMREIIPDLYDRNVNQMNILAERGVFKDKINLFENSVYLPKEPVLEEIYNPVVRRSISMTIDALNALIKKYGYPEDIVIEMPRDRNDAEQKDRIKKFQKTRENELKNIKKKIKEEYGIEITDEYFRKHKGLELELKLWVEQNEKCPYSGKYINVQDILYHHELFEIDHIIPLSISYDDSRNNKVLVYKEENQDKGNRTPLMYLSTVNRQYDQHEFMNYVLSTKTLPRKKRELLLNYEDITKIDVLKGFINRNLNDTRYASRSVLNAIQLFFGGKECDTKVRVIRGAVTNQLRIKLNLPKDREKSYSHHAIDAAIMCYSQMGLMNFRNIQNIFIDFENETYLSDDKDSCFDNKYYDEALFGQVLKMRKNLLKAEGEPQRSVQSKGVFDEEEKNNGIVRYHHKVDKKPNRGLSNATIYGTRKIEDKIYKIVGYDIRNNKDVEAIINIIKKGKLNNFLMAKHDPETFKNLMEIYEQYKEEKNPFIAYEQETGDYIRKYAKNHNGPIIKKIKYVDNEVGSCIDISANYGYKNGDKRVIMDTLASYRADVYYNFNEKLYRIIGIKYAYFKYLNGKYVLDEKSYVAILIKEGLLKEGDTLESLKLAGYEYRLSFYENDIIEYEQNGIVYKERFLSKSEGVKNKVETKPIMAKGYKNRKFPYLSKVRYISKIYTDILGNETKIYKEKFKLSVD

SEQ ID NO: 21393 - protein, 914 aa, unidentified
  REGION 1..914: note = Cas Enzyme sequence
  REGION 884..894: note = misc_feature - Xaa can be any naturally occurring amino acid
MKGDNMGTIIGLDIGIASVGVAVVDKDTLEIKCVVSDLFDSADASKNIERRNARQARRLNRRRKTRVGDFNTLWLKEFGEIPEEHDTDVLLLRNAGLEEQLTLDEIYCVLKYMLKHRGISYLEDALNEENVTGSYQKGIAINQRESEYMLPCEIQLERFRKYGQYRGECDAENENGEKITLSNVFMTSSYRKEIEKFLGTQKKYHVVNDKFVDKYIKIFERKRKYYEGPGSEKSRTNYGIYTTKKNPDGTYKNEKNIFEKLIGKCSIYKEELRAAGASYTAQEFNILNDLNNITVNNKKLTTQQKKDIIEIVQNSDRINMEKIISSCIGEKIEKIEGARIDKNEKNIYHTFEQYNKMRRAFAEKSYDIKKLTIEQLDEIGRILTINTEREGIEDAIMDSELLNLNNEQIDLLIELRRKNSSLFTKWQSLSIKAMREIIPDLYERNVNQMNIFTERGVFKDKLNLFENSVYLPKELVLEEIYNPVVRRSISMTIDALNALIKKYGYPEDIVIEMPRDRNDAEQKDRIKKFQKTRENELKNIKKKIKEEYGIEITDEHFRKHKGLELELKLWVEQNEKCPYSGKHINVQDILYHHELFEIDHIIPLSISYDDSRNNKVLVYKEENQDKGNRTPLMYLSTVNRQYDQHEFMNYVLSTKSLPRKKRELLLNYEDITKIDVLKGFINRNLNDTRYASRSVLNAMQLFFGGKECDTKVRVIRGSVTNQLRIKLNLPKDREKSYSHHAIDAAIMCYSQMGLMNFRNTQNKFIDFENETYLSDDKDSCFDNKYYNEALFGQVLKMRKNLLKAEGEPQRSVQSKGVFDEEEKNNGIVRYHHKVDKKPNRGLSNATIYGTRKIEDKIYKIVGYDIRNNKDVEAIINIIKKGKLXXXXXXXXXXXKLLKTLWKYMNNTKKKKIHL

SEQ ID NO: 21394 - protein, 1113 aa, unidentified
  REGION 1..1113: note = Cas Enzyme sequence
MGIIIGLDIGIASVGIAVVDKDTLDIKCVVSDLFDSADASKNIERRNNRQARRLNRRRKTRIGDFNTLWVSMFGELPEEVDSNVLLLRNAGLDEQLTLDEIYCVLKYMLKHRGISYLEDALNEENVTGSYQKGIAINQRESEYMLPCEIQLERFRKYGQYRGDCEAENENGEKITLSNVFMTNSYRKEIDKFLNTQGKYGILNQKFIDEYLKIFNRKRKYYEGPGNEKSRTDYGKYTTGKDLDGKYITEKNIFEKLIGKCSVYKEELRAAGASYTAQEFNILNDLNNITVNNKKLTTQQKKDVIEIVQNSDRINMEKIISSCIGEKIEKIEGARIDKNEKNIYHTFEQYNKMRKIFAEKNYDIKELTIEQLDEIGRILTINTEREGIKDAIMESELLHLNNEQINLLIELRYKNSSLFTKWQSLSIKAMREIIPDLYDRNVNQMNILAERGVFKDKINLFENSVYLPKEPVLEEIYNPVVRRSISMTIDALNALIKKYGYPEDIVIEMPRDRNDAEQKDRIKKFQKTRENELKNIKKKIKEEYGIEITDEYFRKHKGLELELKLWVEQNEKCPYSGKYINVQDILYHHELFEIDHIIPLSISYDDSRNNKVLVYKEENQDKGNRTPLMYLSTVNRQYDQHEFMNYVLSTKTLPRKKRELLLNYEDITKIDVLKRFINRNLNDTRYASRSVLNAIQLFFGGKECDTKVRVIRGAVTNQLRIKLNLPKDREKSYSHHAIDAAIMCYSQMGLMNFRNIQNIFIDFENETYLSDDKDSCFDNKYYDEALFGQVLKMRKNLLKAEGEPQRSVQSKGVFDEEEKNNGIVRYHHKVDKKPNRGLSNATIYGTRKIEDKIYKIVGYDIRNNKDVEAIINIIKKGKLNNFLMAKHDPETFKNLMEIYEQYKEEKNPFIAYEQETGDYIRKYAKNHNGPIIKKIKYVDNEVGSCIDISANYGYKNGDKRVIMDTLASYRADVYYNFNEKLYRIIGIKYAYFKYLNGKYVLDEKSYVAILIKEGLLKEGDTLESLKLAGYEYRLSFYENDIIEYEQNGIVYKERFLSKSEGVKNKVETKPIMAKGYKNRKFPYLSKVRYISKIYTDILGNETKIYKEKFKLSVD

SEQ ID NO: 21395 - protein, 1119 aa, unidentified
  REGION 1..1119: note = Cas Enzyme sequence
MKGDNMGTIIGLDIGIASVGVAVVDKDTLEIKCVVSDLFDSADASKNIERRNARQARRLNRRRKTRVGDFNTLWLKEFGEIPEEHDTDVLLLRNAGLEEQLTLDEIYCVLKYMLKHRGISYLEDALNEENVTGSYQKGIAINQRESEYMLPCEIQLERFRKYGQYRGECEAENENGEKITLSNVFMTSSYRKEIDKFLNTQGKYGIINQEFIDEYLKIFNRKRKYYEGPGNEKSRTDYGKYTTRKDLDGKYITEKNIFEKLIGKCSIYKEELRAAGASYTAQEFNILNDLNNITVNNKKLTTQQKKDIIEIVQNSDRINMEKIISSCIGEKIEKIEGARIDKNEKNIYHTFEQYNKMRRAFAEKSYDIKKLTIEQLDEIGRILTINTEREGIEDAIMDSELLNLNNEQIDLLIELRRKNSSLFAKWQSLSIKAMREIIPDLYERNVNQMNIFTERGVFKDKLNLFENSVYLPKEPVLEEIYNPVVRRSISMTIDALNALINKYGYPEDIVIEMPRDRNDAEQKDRIKKFQKTRENELKNIKKKIKEEYGIEITDEHFRKHKGLELELKLWVEQNEKCPYSGKHINVQDILYHHELFEIDHIIPLSISYDDSRNNKVLVYKEENQDKGNRTPLMYLSTVNRQYDQHEFMNYVLSTKTLPRKKRELLLNYEDITKIDVLKGFINRNLNDTRYASRSVLNAMQLFFGGKECDTKVRVIRGAVTNQLRIKLNLPKDREKSYSHHAIDAAIMCYSQMGLMNFRNTQNKFIDFENETYLSDDKNSCFDNKYYDEALFGQVLKMRKNLLKAEGEPQRSVQSKGVFDEEEKNNGIVRYHHKVDKKPNRGLSKASIYGTRKIDGKIYKIVGYDIRNNKDVEAIINIIKKGKSDNFLMSKHDPKTFKNLMEIYEQYKEEKNPFLAYEQETGDYIRKYAKNHNGPIIKKIKYVDSEVGSCIDISASYGYKNGDKRVIMDTLTPYRADVYYNYKDGTYRIIGVKYADFKYSNGKYVLDEDAYVSILIKEGLLKNGDRLENLSSVGYEYRLSFYKNDIIEYTKNDIVYKERFLSRTMPKVKNYIETKPISAALYEKRNPIGLTNATNICKICTDVLGNETKIYKEKFKLSVD

SEQ ID NO: 21396 - protein, 1114 aa, unidentified
  REGION 1..1114: note = Cas Enzyme sequence
MGIIIGLDIGIASVGIAVVDKDTLDIKCVVSDLFDSADASKNIERRNNRQARRLNRRRKTRIGDFNTLWVSMFGELPEEVDSNVLLLRNAGLDEQLTLDEIYCVLKYMLKHRGISYLEDALNEENVTGSYQKGIAINQRESEYMLPCEIQLERFRKYGQYRGECEAENENGEKITLSNVFMTNSYRKEIDKFLNTQGKYGILNQKFIDEYLKIFNRKRKYYEGPGNEKSRTDYGKYTTGKDLDGKYITEKNIFEKLIGKCSVYKEELRAAGASYTAQEFNILNDLNNITVNNKKLTTQQKKDVIEIVQNSDRINMEKIISSCIGEKIEKIEGARIDKNEKNIYHTFEQYNKMRKIFAEKNYDIKELTIEQLDEIGRILTINTEREGIKDAIMESELLHLNNEQINLLIELRYKNSSLFTKWQSLSIKAMREIIPDLYDRNVNQMNILAERGVFKDKINLFENSVYLPKEPVLEEIYNPVVRRSISMTIDALNALIKKYGYPEDIVIEMPRDRNDAEQKDRIKKFQKTRENELKNIKKKIKEEYGIEIIDEYFRKHKGLELELKLWVEQNEKCPYSGKYINVQDILYHHELFEIDHIIPLSISYDDSRNNKVLVYKEENQDKGNRTPLMYLSTVNRQYDQHEFMNYVLSTKTLPRKKRELLLNYEDITKIDVLKGFINRNLNDTRYASRSVLNAIQLFFGGKECDTKVRVIRGAVTNQLRIKLNLPKDREKSYSHHAIDAAIMCYSQMGLMNFRNIQNKFIDFENETYLSDERDSCFDNKYYDEALFGQVLKMRKNLLKAEGKPQRSVQSKGVFDEEEKNNGIVRYHHKVDKKPNRGLSNASIYGTRKIDDKIYKIVGYDIRNNKDAEAIINIIKKGKSDNFLMAKHDPETFKNLMEIYEQYKEEKNPFLAYEQETGDYIRKYAKNHNGPIIKKIKYVDSEVGSCIDISANYGYKNGDKRVIMDTLTPYRADVYYNYKDGTYRIIGVKYEDFKYSNAKYVLDEEAYALILIKEGLLKIGDSLENISSSGYEYRLSFYKNDIIEYTKNDIVYKERFLSRTMPKVKNYIETKPISAALYEKRNPIGLTNATNICKIYTDVLGNETKIYKEKFKLSVD

SEQ ID NO: 21397 - protein, 1114 aa, unidentified
  REGION 1..1114: note = Cas Enzyme sequence
MGYIFGLDIGVASVGVAVINNQTLEIEEVVSDLFESADASKNVERRSARQSRRLQRRRKNRVSDFNRLWIKSGYDIPEDNDENILLLRNEGIKKALSEKELYYVLRYMLQHRGISYLEDALGEEEVKGSYQKGIALNQKESENLLPCEIQQERMIRYGQYRGQYEITEEDGSKVTLSNIFTTSSYIKELNKLFEVQQKHGLVNEEFVNQYMEIFRRKRKYYEGPGNELSRTDYGKYTTKKNDDGKYITEKNIFEKLIGKCSVYKNEFRAAGASYTAQEFNILNDLNNITVDGKKLSKEQKVSIIESIKSANRVSVEKIIGDCIGNKKPFIEGARIDKNGKHIYHSFEQYNKMRKAFELINFDIAELSVDELDEIGRILTINTEKEGIEEAFKESKVSLTEEQINVLVDLRRKNSLAFNKWQSLSVKAMRELIPDLYERSVNQMVLLTEKGIFKEKENEFAKSVYIPKKIIISEIYNPVVKRSVSVALDALNALIKKYGYPDDVVVEMPRDKNEDEQKDRIKKFQKNRENELKEIKNKLKQEYNIELTDEYFRKHKGLELQLKLWVEQEEKCPYSGKYININDLLYHHDMFEVDHIIPLSISYDDGRNNKVLVYREENQSKRNNTPMTYLANVNRDYDMHEFMDYVLKNKKFPPKKKSNLLYGEDITKIDVVKGFINRNLNDTRYASRSILNAIQLYFSSRDCNTTVRVINGTVTHQLRNRLKLEKDRDKSYSHHAIDAAIICYTQLGLLKFKEIQSRFIDFDNEIYKEADIQSCYDEKYYDEALFSQVLKIRNNLKNAEGDPQTTVVSRGIYAESEKNNGIVKYHHRVDKKANRGLSNATIYGTRNINNKIYKIVSYDIRDNKDVDSIRKIIAGGKQEYFLMYKNDPKTFEMLMSIYEQFNDEKNPFVAFEQETGEKIRKYSKKHNGPVIKKIKYADSEVGSCIDISANYGYNKDDKKVIMDTLKPYRADLYYDTKKNNYRIIGVKYADFKFVKGRYILDEASYEDILVKEEILKPGMKITDLESEGYEFRLSFYENDIIQYEKDGDIYKERFLSRTMPKKKNYIETKPVVAAKYLKPRNLIGLTKAGNIGKIYTDILGNEKIVYKERFKLSID

SEQ ID NO: 21398 - protein, 1113 aa, unidentified
  REGION 1..1113: note = Cas Enzyme sequence
MGYIFGLDIGVASVGVAVINNQTLEIEEVVSDLFESADASKNVERRSARQSRRLHRRRKNRVSDFNRLWIKSGYDIPEENDENILLLRNEGIKKALSEKELYYVLRYMLQHRGISYLEDALGEEEAKGSYQKGIALNQKESENLLPCEIQQERMISYGQYRGQYEITEEDGSKVTLSNIFTTSSYIKELNKLFEVQQKHGLVNEEFVNQYMEIFRRKRKYYEGPGNEFSRTDYGKYTTKKNDDGKYITEKNIFEKLIGKCSVYKNEFRAAGASYTAQEFNILNDLNNITVDGKKLSKEQKVSIIESIKSANRVSVEKIIGDCIGNKKLIIEGARIDKNGKHIYHSFEQYNKMRKAFELINFDIAELSVDELDEIGRILTINTEKEGIEEAFKESKVSLTEEQINVLVDLRRKNSLAFNKWQSLSVKAMRELIPDLYERSVNQMVLLTEKGIFKEKENEFAKSVYIPKEIIISEIYNPVVKRSVSVALDALNALIKKYGYPDDVVVEMPRDKNEDEQKDRIKKFQKNRENELKEIKNKLKQEYNIELTDEYFRKHKGLELQLKLWVEQEEKCPYSGKYININDLLYHHDMFEVDHIIPLSISYDDGRNNKVLVYREENQSKRNNTPMTYLANVNRDYDMHEFMDYVLKNKKFPPKKKSNLLYGEDITKIDVVKGFINRNLNDTRYASRSILNAIQLYFSSRDCSTTVRVINGTVTHQLRNRLKLEKDRDKSYSHHAIDAAIICYTQLGLLKFKEIQSRFIDFDNEVYKEADIQSCYDEKYYDEALFSQVLKIRNNLKKAEGDSQTTVRSRGIYAESEKNNGIVKYHHRVDKKANRGLSNATIYGTRNINNKIYKIVSYDIRDNKDVDSIRKIIAGGKQEYFLMYKNDPKTFEMLMSIYEQFNDEKNPFVAYEQETGEKIRKYSKKHNGPVIKKIKYADSEVGSCIDISANYGYNKDDKKVIMDTLKPYRADLYYNRRNNNYRIIGVKYADFKFVKGRYILDEASYEDILVKEEILKPGMKITDLESEGYEFRLSFYKNDIIQYEKDGDVYKERFLSRTMPKQKNYIETKPIVAAAYEKRIPIGLTKAKNIGKIYTDILGNEKIVYKERFKLSID

SEQ ID NO: 21399 - protein, 1005 aa, unidentified
  REGION 1..1005: note = Cas Enzyme sequence
QHRGISYLEDALGEEEAKGSYQKGIALNQKESQNLLPCEIQQERMRSYGQYRGQYEITEEDGSKVTLSNIFTTSSYIKELNKLFEVQQEHGLVNEEFINQYMEIFRRKRKYYEGPGNESSRTDYGKYTTKKNDDGKYITEKNIFEKLIGKCSVYKNEFRAAGASYTAQEFNILNDLNNITVDGKKLSKEQKVSIIESIKSANRVSVEKIIGDCIGNKKPFIEGARIDKNGKHIYHSFEQYNKMRKAFELINFDIAELSVDELDEIGRILTINTEKEGIEEAFKESKVSLTEEQINALIDLRRKNSLAFNKWQSLSVRAMRELIPDLYERSVNQMVLLTEKGIFKEKENEFAKSVYIPKEIIISEIYNPVVKRSVSVALDALNALIKKYGYPDDVVVEMPRDKNEDEQKDRIKRFQKNRENELKEIKNKLKQEYNIELTDEYFRKHKGLELQLKLWVEQEEKCPYSGKYININDLLYHHDMFEVDHIIPLSISYDDGRNNKVLVYREENQSKRNNTPMVYLANVNRDYDVHEFMDYVLKNKKFTPKKKSNLLYSEDITKIDVVKGFINRNLNDTRYASRSILNAIQLYFSSRDCNTTVRVINGTVTHQLRNRLKLEKDRDKSYSHHAIDAAIICYTQLGLLKFKEIQSRFIDFDNEVYKEADIQSCYDEKYYDEALFSQVLKIRNNLKNAEGDPQTTVVSRGIYAESEKNNGIVKYHHRVDKKANRGLSNATIYGTRNINNKIYKIVSYDIRDNKDVDSIRKIIAGGKQEYFLMYKNDPKTFETLMSIYEQFNDEKNPFVAFEQETGEKIRKYSKKHNGPVIKKIKYADSEVGSCIDISANYGYNKDDKKVIMDTLKPYRADLYYNRRNNNYRIIGVKYADFKFVKGRYILDEASYEDILVKEEILKSGMKITDLESEGYEFRLSFYKNDIIQYEKDGDVYKERFLSRTMPKQKNYIETKPIVAAKYLKPQNLIGLTKADNIGKIYTDILGNEKIVYKERFKLSID

SEQ ID NO: 21400 - protein, 1114 aa, unidentified
  REGION 1..1114: note = Cas Enzyme sequence
MGYIFGLDIGVASVGVAVINNQTLEIEEVVSDLFESADASKNVERRSARQSRRLQRRRKNRVSDFNRLWIKSGYDIPEDNDENILLLRNEGIKKALSEKELYYVLRYMLQHRGISYLEDALGEEEAKGSYQKGIALNQKESENLLPCEIQQERMISYGQYRGQYEITEEDGSKVTLSNIFTTSSYIKELNKLFEVQQEHGLVKEEFINQYMEIFRRKRKYYEGPGNESSRTDYGKYTTKKNGDGKYITEKNIFEKLIGKCSVYKNEFRAAGASYTAQEFNILNDLNNITVDGNKLSKEQKVSIIESIKSANRVSVEKIIGDCIGSKKPFIEGARIDKNGKHIYHSFEQYNKMRKTFELIGFDIAELSVDELDEIGRILTINTEKEGIEEAFKESKVSLTEEQINALIDLRRKNSLAFNKWQSLSVRAMRELIPDLYERSVNQMVLLTEKGIFKEKENEFVKSIYIPKKIIISEIYNPVVKRSVSVALDALNALIKKYGYPDDVVVEMPRDKNEDEQKDRIKKFQKNRENELKEIKNKLKQEYNIELTDEHFRKHKGLELQLKLWVEQEEKCPYSGKHININDLLYHHDMFEVDHIIPLSISYDDGRNNKVLVYRDENQSKRNNTPMAYLANVNRDYDVHEFMDYVLKNKKFPPKKKSNLLYGEDITKIDVVKGFINRNLNDTRYASRSILNAIQLYFSSRDCNTTVRVINGMVTHQLRNRLKLEKDRDKSYSHHAIDAAIICYTQLGLLKFKEIQSRFIDFDNEVYKEADIQYCYDEKYYDEALFSQVLKIRNNLKKAEGDPQTTVVSRGIYAESEKNNGIVKYHHRVDKKANRGLSNATIYGTRNINNKIYKIVSYDIRDNKDVDSIRKIIAGGKQEYFLMYKNDPKTFEMLMSIYEQFNDEKNPFVAFEQETGEKIRKYSKKHNGPVIKKIKYADSEVGSCIDISANYGYNKDDKKVIMDTLNPYRADLYYDTRKNNYRIIGVKYADFKFVKGRYILDEASYEDILVKEEILKPGMKITDLEGEGYEFRLSFYKNDIIQYEKEGDIYKERFLSRTMPKKKNYIETKPIVAAKYLKPQNLIGLTKAGNIGKIYTDILGNERIVYKEKFKLSID

SEQ ID NO: 21401 - protein, 1118 aa, unidentified
  REGION 1..1118: note = Cas Enzyme sequence
MRRKIMGYIFGLDIGVASVGVAVINNQTLEIEEVVSDLFESADASKNVERRSARQSRRLQRRRKNRVSDFNRLWIKSGYDIPEDNDENILLLRNEGIKKALSEKELYYVLRYMLQHRGISYLDDALGEEEEKGSYQKGIALNQKESENLLPCEIQQERMISYGQYRGQYEITEEDGSKVTLSNIFTTSSYIKELNKLFEVQQKHGLVNEEFVNQYMEIFRRKRKYYEGPGNELSRTDYGKYTTKKNDDGKYITEKNIFEKLIGKCSVYKNEFRAAGASYTAQEFNILNDLNNITVDGKKLSKEQKVSIIESIKSANRVSVEKIIGDCIGNKKPFIEGARIDKNGKHIYHSFEQYNKMRKAFELINFDIAELSVDELDEIGRILTINTEKEGIEEAFKESKVSLTEEQINALIDLRRKNSLAFNKWQSLSVRAMRELIPDLYERSVNQMVLLTEKGIFKEKENEFAKSVYIPKEIIISEIYNPVVKRSVSVALDALNALIKKYGYPDDVVVEMPRDKNEDEQKDRIKKFQKNRENELKEIKNKLKQEYNIELTDEYFRKHKGLELQLKLWVEQEEKCPYSGKYININDLLYHHDMFEVDHIIPLSISYDDGRNNKVLVYREENQSKRNNTPMVYLANVNRDYDVHEFMDYVLKNKKFPPKKKSNLLYGEDITKIDVVKGFINRNLNDTRYASRSILNAIQLYFSSRDCNTTVRVINGTVTHQLRNRLKLEKDRDKSYSHHAIDAAIICYTQLGLLKFKEIQSKFIDFDNEVYKEADIQSCYDEKYYDEALFSQVLKIRNNLKNAEGDPQTTVVSRGIYAESEKNNGIVKYHHRVDKKANRGLSNATIYGTRNINNKIYKIVSYDIRDNKDVDSIRKIIAGGKQEYFLMYKNDPKTFEMLMSIYEQFNDEKNPFVAFEQETGEKIRKYSKKHNGPVIKKIKYADSEVGSCIDISANYGYNKDDKKVIMDTLKPYRADLYYNRRNNNYRIIGVKYADFKFVKGRYILDEASYEDILVKEEILKPGMKITDLESEGYEFRLSFYKNDIIQYEKDGDVYKERFLSRTMPKQKNYIETKPIVAAAYEKRIPIGLTKAKNIGKIYTDILGNEKIVYKERFKLSID

SEQ ID NO: 21402 - protein, 1104 aa, unidentified
  REGION 1..1104: note = Cas Enzyme sequence
MKYRLGLDIGIASVGWCILNEDNSIVKAGVRLFPEGSSDENQKRRGRRASRRLLRRRQFRIERVRELLYRYEIIDNYNYDFYTNETTPYHIRKKGLYEKLSKKELAIAMFHLAKRRGAGEFNIEIKEGDEESTKSILADNEKLLREGKYICEIQLERFENKTQEVRGDRNNFKTSDYIKEIRKLIEIQREFYPNLDKKFEEEYVEIIEGRRKYFEGPGKNSPYSWKSQEEWMEGLMGNCTYFPEELRLVKNCYTAEKFNLLNDLNNLKIKRAENDRITKEEKLELLKLFKGAKTEKSVTLKKIASILNVKEEDISGYRVKKDGSPEFAFLKSYVEINKIFKCDDVDILDSISKIATYYQDVETRKEKYREELKGVAGVTEEVIDTLAQKIKFTGSHSLSKKAIKLIENDLLETSKNQMELFNDYELVPYKMDFKDEKIKYIPKDYVNNWVLSPTVKRSMFQTINIVNEILKEYGTPDEIVIELAREKNSDDMRKTLKDIQNKNEKENKEIIELLEDKKLDKRYFELLKYWRKQDGICMYSGEMIGIDEILQNPLAFEIDHIIPRSISFDDSQDNKVLVRRIENQKKGQRSPYEYFSSKMTERSYEEFKAQVLNMFDNKKISLKKRDLLLLEEDISKYSRNFIARNLVDTRYATREFMSLLRVFFRDKQERVKIKSIRGSFTSQIRKEWKMTKMREISHNHHAQDAYIILMAEKTLHKLKWVKDFDENDELVRTYVRKEEILNDEDFKKLFDYKYSTPIKEYKDFLYSHFVDKKPNRQLTDETLYSTRMFEEKDKKGKKIDNEYIIGKISNIYDKKSNVVKYFSDEKKYGELLIYHHDRQTFDKMLKIFNEYGGKGAKVNPFTKYFEEFGKIRKYSKKENGPEINDLKYRVSQLGNHLDITHKYKDSKNRVVMLSIPTYRADMYFNGKDYKFISVRYLMLRARGKYYIIDINEYEREKNRKGIDEKYNFVFSLYTGDIVEVERQDGSIEKVKFKGVNNDERKCIEVDNVERNYGSYVELIREVVTKKKEAEKNEIRYNFEEKLSVILGVTLTKNEGEEFLNSISLSSKQKIITIGGDIKRLRKIYTNVLGKEYNGKEKLEEIIKK

SEQ ID NO: 21403 - protein, 1394 aa, unidentified
  REGION 1..1394: note = Cas Enzyme sequence
MEKNFKNYYLGLDIGTNSCGFAVTDYDYNVLRVKGKRFWGVRLFDGAETSEARRQKRANRRRLDRRKLKLSWLNEIFAEEIEKVDKNFFDRIKYSPLFLEDKQLNNNSLGKYSLFDGEIDGVKYTDREFYKDYSSIYHLRKELLTVPAKDIRLLYLAIHSIIKRRGHFLYEGEFSENSNVLGTINDLVKFANTFSETNIFSLQEITSEKEKGLLELLSKGFKKKESKLFLYEALNAKAKHEKALIDSVVNGIFDCEKIFQKELEKLDFSSDDIQDKILNLDSVEEEELILIEKAKSLFSLFQLKKVLGNYNYIAESMVGIIEQHGRQLGEFKKFIKEYYPLKYAEIFRKENTKNVNYVHYINQTKYNGSKKVLGLELSSTEKRTKEFFYKYVKTILSGKVEETEEYLKKKNKFLELIENDNFLPKPRSKNNSVLPNKLYEKELLKILEVNEQKYPFLKKVDKEFGITTSQKIHQILTFRVPYFVGPITSKENKNAWAIKISNDSLKPWNIEKIIDFSQAETDFVKRMVRSCTYMPKYNTMPKKSLLYSEFCVLNELNNLTINGNKISIELKQLIFNNLFKKLKKVNVSKLKEFLVSNGYCTDKEVKDLIFGGIDKNFANSLTLYCTLCDRFGQEYVDNNKDLFDKVIYYSTIISDKSRFETKLKKDFPNFNDAQIKFLKSLTCNDWGRISKEFLTNTFIDKTSGELTNVISELYKTNLNLMEIINSNNYTISEMLQQESAYDLESLTYEAVEELYCSPSVKRGVWQAIKIIKEVVSTMGTMPSKIFVEVTREDGEKGDRGRKISRKDSLTELYKTSLKDATIETKEELNKLMAELNNKDDSSLRSEILYLYFLQQGKCMYTGETITLSDLFNNNLYNVDHIIPQSTIKDDSIDNKVLVKTQANLSKLDTYPLPQEWVSRQENFWKGLHKYKFISDKKLQKLIRRDNLKQEELGDFIARQLVETNQSAKAVIDFLKGIVDNPRSVVYSKAGRVSDFRHKYNILKCREVNDYHHAKDAYLNIVVGNVLFNRFTDNPRRFYADKEKNKNANVTKNVVKIFEKTITKYNNNDVIVWDEKIHLPLVKKICQRNDCLVSYMSYCNYNFAFYDETIYKSQLHDKKSKAKISLKGKGNSLSDCEKYGGYNNERTAYFMVVQSEQKGKKIITIETVTSYNYKKSNGDTNKILESIAKEQGLVNAKIVLDRLNIKSTIKIGEGEYLLAGKSGDQYKLHNFIEWNTNNEVSDYVRIIAKYMEIKSTGKENLLKSTANEIIVSDRGERGKTQLKLSKDKNLWLYKTIVSQLQKELYNFSGFKVVLSVLENGEELFKNLQKETQIGLLSELVKKLSVGDSMVNLKSLNGNSQAGVIYLGKNITNKNIKIVIRSVTGLCEKIIPLGEV

SEQ ID NO: 21404 - protein, 1091 aa, unidentified
  REGION 1..1091: note = Cas Enzyme sequence
MGKVLGLDIGIASVGWSLIDTDNNKIIDMGVRLFNSAGANNNQERREARSARRTLHRKNHRLQNVEEFLLENGFNSTNRADLNPYELRVKGLNEKLNSEELYVALFHLAKRRGVSYLDEAEEDDKNINESLKINKELSKGNYPCEIQLERLEAYGKVRGLVEVGDVNSSEILINVFTTSAYKKEAIAILEQQKKYYQQIDDDFIKGYTDILTRKREFYIGPGNEKSRTNYGIYKTDGTTIENIFEELIGKCSIYADQQRAPSSSFTAQEFNLLNDLNNITVEGRKLTRDEKRSIVGDILSSNSVNMMNVIKKNTGIEDKNGIKGFRIDKKGKPEFHTFETERKIQKFLKGTSLNYDEFDIEKKDKLAEVLSLSMDYKTLKKNCNKYFPEFSDKDIEILFLFLKNNKTLYKNWHSFSLKLMKEMRNELYSSSKNQMNILTEKGLKKNLQNSFEGYKYIPVEFLNEEIYNPIVRRSVNQSIRIVNAIIKKYGDLEAIIIEMPRETNEIKEKKKINDLQKQNEKEKNEAINRARNEYGFTEEQLYSQRELVTKIRLWYQQDGKCIYTGGVISAGDLINNPNIFEIDHIIPKSISLDDSLNNKVLVYSYANQRKGQRSPFGAFYLPYNDIAYEEIKLRASKLLENKKINKVKYDLLTFEEDINKYDVRQRFINRNLNDTRYASRVILNGLQEFMKAKGKDTQIHVIRGKFTYQLRKRWGIEKNRDESFEHHAVDATIVAVSYMLGQSEGTIRNPFLQQIGRYDKNLWNVVSNREYDKEVYRLPWEGFKRDLNKATARIKYSYKIDTKVNRTIADATLYSTRKVDGEDYIVRKYKNIYDNKAAVSVIKLVKADLNNFEDANESKILMRKHDPRTFESLVKIIDEYEDENPNPFEAYRREHGYIRKYSKKNNGPIIKDIKYLDKKLGEHISVSKTENISDKKKVVLLSLNPFRTDVYYNEETGDYKNIGIKYNDISFKEGKYILDDKVYNKMKKEIGIDVTYKFLFSLHENDIIGITYKENPKIEHRYRFLSSKSDNPNRIEIKPIDKKDFKTRSQPTIGKKVLKFSKYHADILGNTFNVMGEKLKLEFIVDNINNL

SEQ ID NO: 21405 - protein, 1035 aa, unidentified
  REGION 1..1035: note = Cas Enzyme sequence
YGLIDYETREVITAGVRLFKEADVENNEGRRTKRGSRRLQRRRRHRIHRIQQLMVNHDLLDMDHIPTDTNPYAIRVKGLSHELTKDELVIALLHLAKRRGIHNVEAAIENDDEGNELSTKEQLMQNQKELEDKYVCEVQLERYENGKVRGERNRFKTSDFVKEARQLLKMQQPFHQLDDSFVEEYIKLIEKRREYFEGPGKGSPYGWEGDLKKWYELLMGRCTYFPEELRSVKYSQTATLFNVLNDLNNLNINRDENIKLTHQEKLNIINNVFRVKKTPTLKQIAKELDIAETEISGYRITKAGKPEFTTLKLFHDLNGIVKDSALLSNVDLMDKIAEILTMYQTSGDIKKQLLELHIPLSEDEAEQISLLSGYTGTHSLSKKCMKLVLDELWHTSDNQMAIFTRLNIKPTKFKLSNQNKIPVDFVEDFILSPVVKRSFIQSINVVNAVIKKYGLPKDIIIELARESNSADARKAITNRQKNFEATNKRINEVIGKYGLQNAKYLVEKIKLHDMQEGKCLYSLEDIPLEDLLRNPLHYEVDHIIPRSVAFDNSFNNKVLVKQTENSKKGNRTPYQYLNSADAKITYPQFKHHVLNLSKSKDRMTKKKREYLLEERDINKFSVQKEFINRNLVDTRYATRELMTLLKAYFEANHLDVKVKSINGGFTSFLRTRWKFDKERNKGYKHHAEDALIIANVDFIFKSHNKLKNQMKVMEKPSVDEPEVEVKVAGEEEYEEMFIIPHQIQGIKDFKDFKYSHRVDKKPNRQLINDTIYSTREVDEELYTVQTIKNIYAKDNDTIKKIMDKSPEKLLMFKNDPRTFEKLQLIMKQYSNEKNPLFKHLEETGEMLTKYSKKGNGPTVKSLKYIGKKVGTHLDITNDYKDARNKVIKLSQKPYRFDVFKDDEGYKFVTVKYIDVIKKESYFIIDNKKYKKSMMKRSIKDGSKFIGSFYNNDLIKIDNEIFKVIGVNSERLNRIEVDLIDIRYPDFCKINNIATPRLYKTITNKTKSLSKVSSDLLGNTYNAFSSEKPQMIIKKG

SEQ ID NO: 21406 - protein, 1048 aa, unidentified
  REGION 1..1048: note = Cas Enzyme sequence
MERKYGIGLDIGIGSVGYAVISRTNNLDARIEDIGVRLFDSGENIRQKASNAQERRGYRSTRRLLRRRKHRKERIKKFFLKIKLMNEMQLKAWQEQNGNQNVLQTRIKGLNEKLTPEEILDCIIHICNRRGYREFYGDDSKKDNADKDELQKIEGGLANFDEIYQSGGYKSVAEMLINAPVFKTETSFADYRNHKNAKRYILIKREFVKKELEDILNKQSEYYPQLTANNIRIICDDMVFAQRDFETGPGNEDDKTRRFMGFIDSIGQCMYYKDEKRAYRSTVIADIYALVNCLSQLSFVNTETGEILLPENVAKEIINTSLTNASITENDIKNILKPYKLEMRKPGKLEVKVPDTTKTLKLLKAILTNAGYKYEELIKENQFDVNNPSKLHQLCLLLSENITPARRIRALKAKGWNEKLQKEVIRKKFGGTASVCEKYMIEAIEAFKRGETYGNFQARMLKERENALSDIEKQKYLAPFDKKVDEELVKNAVIFKAVNETRKILNELIRKYGSPEYINIEVANDLGRSFKERAKIIKRINDNKKEKDKIANKLIELGLRKEGEVKPFDIERYRLWEEQEGKDLYTGDVIPIEKILSGIYDVDHIVPFSLILDDTLQNKALVNLGVNRQQKGQQVPLGYLSSADKEDYLKRINTLFKKKKISIKKYKYLTLSNLYGNRDLLSEWKSRNINDTRYITRFLVNYLSANLLFNSDKAKNVFGVKGIITSRMRRLWFNKKTWGDEQKNRDNNLHHAADAIVIANLTPAYLEIASDKIKLDRIYKDYHKRISDKYLTYLGKAVNKMVKYYGFNKEYAEKLLATPNSRVPAMIRNIADETDIRLWDNSLECYKDVSEEQFYKNVRAFYKDDTVFADTIKPVLVSYKQNKKYQGKVADDTLYKNEEKGYYKKVISDNNKSILDARNYYCLELYKNIDDGISLRGIRYVDLKKQYKKLCINVSCPKDYKNHIMYLFNNDYIAIFDKNNNLKFNGYYKGLKSVNNRFIYVKNNNSNLSEYKTIGKKDIIKKYYVDILGKIGGEIKCSVPFLSLKDNI

SEQ ID NO: 21407 - protein, 1054 aa, unidentified
  REGION 1..1054: note = Cas Enzyme sequence
MSRKYGIGLDIGIGSVGFAVISRTNKEDARIEDLGVRLFDSGETNDHKARKSQERRAHRSVRRLIRRRAHRKERVKNFLQKINLISNDKLKAWQEQNGNQNIFAVRLKGLDAKLTPEEIADCIIHICNHRGYREFYEEESTDKEAGVIKQALAEFEQRFQDGNYRSVADMILHDEVFKTETAFPDYHNHKESERHILIKRAYLEKELLEILKHQQNYYPQLTEHNIDFLCNKIVFAQRDFETGPGEPGKMLNRKTGQKEEQLRKFLGFLDSIGKCMFYKDEKRAFRSTVLSDVYALINCLSQFTYVDVETGEIVLPKEAASVILKEVLIKASATEKELKALLKRFGIEMIKPGKLEVKAPDTIKTLKILKATLEASGYNYEELIAEEQFDLENPSKLQRLCVILSENITPKRRERALEREGWNKKLREEMKRKKFGGTASVCERYMVEAINAFLNGETYGNFQARRLQEREEATEIKTKYKTLPALTKNTDEEIIENVVVFKAINETRKVLNAIIRKYGSPEYINVEVADELGRSFKERDKISKMNRDNEKERKQIVDKIVQLGLRNEGEVKNKDILRFRLWKAQNGVDLYTGRPIEENEVLSEIYEVDHIVPFSLILDDTINNKALVNRTANQEKRQRVPREYLADDEEFMKRVNTLFNKGKISAKKYKYLTLESLYTPQARLLLEEWKSRNINDTRYITRYIVNYLAGNLLFDSDKAKNVYAIKGAITSKMRKLWLNSKSWGNAEKDRENNLHHAADAVVIANLTPAYVEIASDTLKLQSIYKAHHKQESFEYTTYLNGAVRKMEKYYGFNEAYSRRLLEAKGRIPSLVRNLYAEVDKRLVDNSLEFFQDVTCEQFVANVKDYYRDDQIFAESLSMPLVSYKQNKKFQGQITDDNPVKQSQRKDTSIAKLDTLGNENVLSANKYYCIEIYRDKQNKTALRGIRYVDLVKKNKKLYLATPLPENYKEHVMYLFANDYVRIFDGNNKLKFEGYYRSTKNVNRNLLYIRNNNVNSDVIVSVTKNDKVIKLNVDILGKLGGEVKCSVPFMLLSEKD

SEQ ID NO: 21408 - protein, 1043 aa, unidentified
  REGION 1..1043: note = Cas Enzyme sequence
MSRKYGIGLDIGIGSVGFAIISRTNKEDARIEDLGVRLFDSGETNDHKARKSQERRAHRSVRRLIRRRAHRKERVKNFLQKINLISNDKLKAWQEQNGNQNIFEVRLKGLDAKLTPEEIADCIIHICNHRGYREFYEEESTDKEAGVIKQALAEFEQRFQNGNYRSVADMILHDEVFKTETAFPDYHNHKESDRHILIKRAYLEKELFEILKHQQNYYPQLTEHNIDFICNKIVFAQRDFETGPGNEEDKTRKFMGFLDTLGKCMFYKDEKRAFRSTVISDVYALTNCLSQFTYVDVETGEIVLPKEAASAIVNEVLVKASATEKEIKAILKRFGIEMIKPGKLEVKAPDTIKTLKILKSTLEESSYNYEELITEEQFDLENPSKLQRLCVILSENITPKRRERALEREGWNKKLCEEMKRKKFGGTASVCERYMLEAINAFLNGETYGNFQARRLQEREEATEVKTKYKTLPALTKNTDEEIVENVVVFKAINETRKVLNAIIRKYGSPEYINVEVADELGRSFKERDKISKMNRDNEKERKQIADKIVQLGLRNEGEVKNKDILRFRLWKAQNGVDLYTGRPIEENEVLSEIYEVDHIVPFSLILDDTINNKALVSRTANQEKRQRVPREYLADDEEFMKRVNTLFNKGKISAKKYKYLTLESLGTKQARMLLEEWKSRNINDTRYITRYIVNYLAGNLLFDSDKAKNVYAIKGAITSKMRKLWLNSKSWGNAEKDRENNLHHAADAVVIANLTPAYVEIASDTLKLQSIYKAHQKQESFEYTTYLNGAVKKMAKYYGFNEAYSRRLLEAKGRIPSIVRNLYVEVDKRLVDNSLEIFQAITPERFMANVKDYYRDDQAFAESLSMPLVSYKQNKKFQGQITDDNSIAKNKRKETSVAKIDTLGNENILSANKYYCIEIYKDNQNKTALRGIRYVDLVKRNKKLYLATPYPAGYQEHVMYLFANDYVRIYDGRNRLKFEGYYKSVENINEKKLNFKINNGVLSTKKGIAQKDIIKKYNVDILGCLGGEVKCSEPFMLLPEKD

SEQ ID NO: 21409 - protein, 1429 aa, unidentified
  REGION 1..1429: note = Cas Enzyme sequence
MKTYSIGLDIGTNSVGWAVIDEKNQLVRYKKKNMWGARLFDEADKAEGRRKNRAARRRLKRRAQRINFLQQIFAPIVLSVDDGFFIKLNESMLWKDDKTCNPLELSLQKAGYYAKNPDNITLRYSTIYHLRKALMESNEKFDPRLVYLAIHHIVKYRGNFLYQKDFNIDDSSDISEKLTQLFEYLKENFDFDSDVLDSSKQQEIVAIIKQTDKSRSARRSEIEALFEFSKTNKVIFSEIIKMILGLNADAKKIFADLEDKLGIEFSGKYEDKRDEIATILGDDRMELINLLEAIYNWGVLQSVLKGEGSVSQAMINKYDAYAADLKFIKDLFREKLSRVDYKAFFKSKKDDKGETLYYTKYTTSGYDYKNFIKDFETYFIKATNGFKYSYDNFKKDTSGNKSPEKVVEAIDRFARQFSSEYAQKFIERLNNGEAFSKQRMSDNGAIPYQLHKNELIKIIENQGKYYPELLEKINNGDGKQEYKIVRLLEHRIPYYVGPLQTKNQNNSNFAWMKSCADGNITPFNFYQKVDKIASAEAFIDNLTNNCTYLPDKPVLPRHSLLFSEFVVRNELKNLKIEGKRIPIELENEIFNELFLQNKKVTRKMLIDLLKCENFVPLVNNSNPEIEGMAQSSCFTATMQSYVDLTKKVGLSVELEINSPSYLMAENLIKWITVFEDKGILREKIEKEYGDKLTPEQIFNICKLNYGGWARLSRELLTTIKDNTDNSIIDLMREGQDNFMQIISKPPIKKKLQEKLEKYVNDHSELDVIDDIPASPSLKRGIRQAKKLVDEIIELRGGQKPVKIYIEMARGGEEGKRKDNRKRQLEKLHNSIEINNSYCGADELKRIKKELEEWEEIDKEKRYLYFLQLGKCAYSGKPINLDTISQECEVEHILPQSMIKDDSLDNKVLVYRKFNQDKSGDYPLDPEIRQSQTGLWRYWLDNKLISDVKFARLIKTKEKFEADKLSGGFIKRQLVETRQISKHVAALFNKIYGSESDVDVVEPVKAGIASEFRDKFDLPKSRTINDFHHAKDAYLNAVLGQYLISKFPNRSRSALYSRYMSFKKDLTKNASARKQRNDRELSFILSGIGRKEDMNCETGEIIDGEARVATIRRTMMFNDCSVTRMTEIKTNGELYNATVYKHQNGAKAKIPRKDNLPVEKYGGHTSDKAAYMAAVEQIDADNKKKRLIIKVPIRIVLLAHNNDALLSELMKQELGVKELRIIKSPIPKYQVIKTKDGSMLMLTSQADAGNVKQLRLPYDVENRYTKLQKLISGFDDFNTPEFAQNMYYKLPEYVNRAGKLGDYYYELKNNALENIITFLNSFYRILFDKISSHVPFYGKKMIDKIDAFYEVFANYDVSKQDILKQKVIFLEEMLKLVQANAKYSEFEKLDISKGYFKSGTGYITMKTFYLDDIEFYDYSITGLKVKKTKL

SEQ ID NO: 21410 - protein, 1427 aa, unidentified
  REGION 1..1427: note = Cas Enzyme sequence
MKAYSIGLDIGTNSVGWAVIGEDNLVRYKKKNMWGARLFEEANKAEGRRKNRAARRRLKRRAQRINFLQQIFAPIVLSVDDGFFIKLNESMLWEDDKTRSPLKLSLQKAGYYAKNPDDITLRYPTIYHLRKALTESNEKFDPRLVYLAIHHIVKYRGNFLYQKDFNIDDSSDISEKLTQLSEYLKENFGFDGDELDPKQQKIVAIIKQTDKSRSARRSEIEALFEFSKTNKVIFSEIIKMILGLNADAKKIFADLEDKLGIEFSGKYEDKRDEIATTLGDDRMELINLLEAIYNWGVLQSVLKGEGSVSQAMINKYDAYAADLKFIKDLFREKLSRVDYKTFFKSKKDDKGETLYYTKYTTSGYDYKKFIKDFETYFIKATDGFGYSYDDFKKDTSGNKSPEKVAEAINQFARQFSSEYAQKFIERLNNGEAFSKQRMSDNGAIPYQLHKNELIKIIENQGKYYPELLEKIDNGDGKQEYKIVRLLEHCIPYYVGPLQTKNQNNSNFAWMKSRADGNITPFNFYQKVDKIASAEAFIDNLTNNCTYLPDKPVLPRHSLLFSEFVVRNELKNLKIEGKRISIELENEIFNELFLQNKKVTRKMLIDLLKCENFVPLVNNSNPEIEGMAQSSCFTATMQSYVDLTKKVGLSVELEINSPSYLMAENLIKWITVFEDKEILREKIEKEYGDKLTPEQISNICKLNYSGWARLSRELLTTIKDNTDNSIIDLMRESKDNFMQIISKSPIKDKLQKRLEEYIDDHDEIDVIDDIPASPSLKRGIRQAKKLVDEIIELRGGQKPVKIYIEMARGGEEGKRKDNRKRQLEKLHNSIEINNSYCGANELKRIKKELEEWEEIDKEKRYLYFLQLGKCAYSGKPINLDTISQECEVEHILPQNMIKDDSLDNKVLVFRKFNQDKGGNYPLSLEIIQSQTGLWRYWLNNKLISDVKFARLIKTKEKFEADELSGSFIKRQLVETRQISKHVATLFNKIYGSEDNTNVVEPVKAGIVSEFRDKFDLPKSRAINDFHHAKDAYLNAVLGQYLISKFPNRSRSVLYSRYMSFEKDLMKDASARKQRNDRELSFILSGISRKEDTNYETGEIIDGEARVAIIRHTMMFNDCLVTRMLKRNNGKFYDINLQKKEIGEKKKKDNAKAVLIDKKKGLPSDKYGGYDGVQKAYYVAIGYHDTKGRRKNELIGIPIDVANKIDSKQLKIIDFVKSVVPKDTSDVKVLRDKILKYQVIKRNDSMQMLVSDQEVWNARQLFFDFKIEQLFAILDKKDKDDKKMVNVNCLDNLESNKYIKNKLCRILGIDLQTNTSTICKIINEKLNEMFEVFIEKLKENYHLFDNETNRIESERSVFYGCSIAKKIGILDQLLCMTRANSDTANFKTNTFGKLSIDRMGRKAGQSFELSDIEFYDYSITGLKVKKTKL

SEQ ID NO: 21411 - protein, 1432 aa, unidentified
  REGION 1..1432: note = Cas Enzyme sequence
MKEEDMKYSIGLDIGTSSVGWAVIDEDNQLVRYKKKNMWGARLFDEADKAEGRRKNRAARRRLKRRAQRINFLQQIFAPIVLSVDDGFFIKLNESMLRKEDKTHDPVKLSLQKAGYYAKNPDDITLRYPTIYHLRKMLMKSNEKFDPRLVYLAIHHIIKYRGNFLYQKDFTVDDSSDVGEKLTQLFGYLEENFGLDSTELDSKQQEIVAIIKQTDKSRSARRSEIEALFEFSKTSKVIFGETVKMILGLNADAKKIFADLEDKLGIEFSGKYEDKRDDIATILGDDRMEFINLLEAIYNWGVLQSVLKGEGSVSQAMINKYDAYAADLKFIKDLFREKLSRVDYKMFFKSKKDDKGETLYYTKYTTSGYDYKKFIKDFETYFIKATDGFEYSYDNFKKDTSGNKSPEKVAEAINQFARQFSSEYAQKFIERLNNGEAFSKQRMSDNGAIPYQLHKNELIKIIENQGKYYPELLEKIDNGDGKQEYKIVRLLEHRIPYYVGPLQTKNQNNSNFAWMKSRADGNITPFNFYQKIDKIASAEAFIDNLTNNCTYLPDKPVLPRHSLLFSEFVVRNELKNLKIEGKRIPIELENEIFNELFLQNKKVTRKMLIDLLKCENFVPLVNNSNPEIEGMAQSSCFTATMQSYVDLTKKVGLSVELEISSPSYLMAENLIKWITVFEDKGILREKIEKEYGDKLTPEQIFNICKLNYGGWARLSRELLTTIKDNTDNSIIDLMREGQDNFMQIISKPPIKKKLQEKLEKYVNDHSELDVIDDIPASPSLKRGIRQAKKLVDEIIELRGGQKPVKIYIEMARGGEEGKRKDNRKRQLEKLHNSIEINNSYCGADELKRIKKELEEWEEIDKEKRYLYFLQLGKCAYSGKPINLDTISQECEVEHILPQSMIKDDSLDNKVLVYRKFNQDKSGDYPLDPEIRQSQTGLWRYWLNNKLISDVKFARLIKTKEKFEADKLSGGFIKRQLVETRQISKHVAALFNKIYGSESDVDVVEPVKAGIASEFRDKFDLPKSRTINDFHHAKDAYLNAVLGQYLISKFPNRSRSALYSRYMSFKKDLTKNASARKQRNDRELSFILSGIGRKEDMNCETGEIIDGEARVATIRHTMMFNDCLVTRMTETKTNGELYNATVYKHQNGAKAKIPRKDNLPVEKYGGHTSDKAAYMAAVEQIDADNKKKRLIIKVPIRIVLLAHNNDALLSELMKQELGVKELRIIKSPIPKYQVIKTKNGSMLMLTSQADAGNVKQLRLPYDVENRYTKLQKLISGFDDFNTPEFAQNMYYKLPEYVNRAGKSGDYYYELKNNALENIITFLNSFYRILFDKISSHVPFYGKKMIDKIDAFYEVSANYDVSKQDILKQKVIFLEEMLKLVQANAKYSEFEKLDISKGYFKSGTGYITMKTFYLDDIEFYDYSITGLKVKKTKL

SEQ ID NO: 21412 - protein, 1432 aa, unidentified
  REGION 1..1432: note = Cas Enzyme sequence
MKEEDMKYSIGLDIGTHSVGWAVIDEDNQLVRYKKKNMWGARLFDEADKAEGRRKNRAARRRLKRRAQRIHFLQQIFAPIVLSVDDGFFIKLNESMLQKEDKTHDPFELSLQEAGYYAKNPDGITLRYPTIYHLRKALMESNEKFDPRLVYLAIHHIIKYRGNFLYQKDFNIDDSSDISEKLTQLFGYLEENFGFDSTELDSKQQEIVAIIKQTDKSRSARRSEIEALFEFGKTNKVIFGETVKMILGLNADAKKIFADLEDKLGIEFSGKYEDKRDDIATILGDDRMEFINLLEAIYNWGVLQSVLKGEGSVSQAMINKYDAYAADLKFIKDLFREKLSRVDYKTFFKSKKDDKGETLYYTKYTTSGYDYKKFIKDFETYFIKATDGFGYSYDNFKKDTSGNKSPEKVAEAINQFARQFSSEYAQKFIERLNNGEAFSKQRMSDNGAIPYQLHKNELIKIIENQGKYYPELLEKIDNGDGKQEYKIVRLLEHRIPYYVGPLQTKNQNNSNFAWMKPRADGNITPFNFYQKVDKIASAEAFIDNLTNNCTYLPDKPVLPRHSLLFSEFVVRNELKNLKIEGKRIPIELENEIFNELFLQNKKVTRKMLIDLLKCENFVTLKNNSNPEIEGMAQSSGFTATMQPYIDLTKKVGLSVELEINSPSYLMAENLIKWITVFEDKGILREKIEKEYGNKLTSEQISNICKLNYSGWARLSRELLTTIKDNTDNSIIDLMREGKDNFMQIISKPPIKNKLQEKLEKYVNDHSELDVIDDIPASPALKRGIRQAKKLVDEIIELRGGQKPVKIYIEMARGGEEGKRKDTRKRQLEKLHNGIEINNSYCSADELRRIKKELEEWEGIDKEKRYLYFLQLGKCAYSGKPINLDTISQECEVEHILPQSMIKDDSLDNKVLVFRKFNQDKGGNYPLSLEIIQSQTGLWRYWLNNKLISDVKFARLIKTKEKFEADELSGSFIKRQLVETRQISKHVATLFNKIYGSEDNTNVVEPVKAGIVSEFRDKFDLPKSRAINDFHHAKDAYLNAVLGQYLISKFPNRSRSVLYSRYMSFEKDLMKDASARKQRNDRELSFILSGISRKEDTNYETGEIIDGEARVAIIRHTMMFNDCLVTRMLKRNNGKFYDINLQKKEIGEKKKKDNAKAVLIDKKKGLPSDKYGGYDGVQKAYYVAIGYHDTKGRRKNELIGIPIDVANKIDSKQLKIIDFVKSVVPKDTSDVKVLRDKILKYQVIKRNDSMQMLVSDQEVWNARQLFFDFKIEQLFAILDKKDKDDKKMVNVNCLDNLESNKYIKNKLCRILGIDLQTNTSTICKIINEKLNEMFEVFIEKLKENYHLFDNETNRIESERSVFYGCSIAKKIGILDQLLCMTRANSDTANFKTNTFGKLSIDRMGRKTGQSFELSDIEFYDYSITGLKVKKTKL

SEQ ID NO: 21413 - protein, 1380 aa, unidentified
  REGION 1..1380: note = Cas Enzyme sequence
MKNSTQVKKREYYLGLDIGTDSVGYAVTDKEYGLCKFKGEPMWGVTTFEAANQSEERRTHRTSRRRGARKVWRINLLSELFAKEIAKVDERFFIRLKESGLYRDDVSDINDRHIFFNDEGYNDSDYFKEYPTIHHLINELMTGDEPHDVRLVYLACAWLVAHRGHFLSDLSKENIDVVNNFPIVYKGLMDHFTGNDFDMPWECDASTFLGVLNMKTGVSGKEKKFGEILFGGKIPKEKAENFDDEQLEKHPYNIALIIKLLCGGKVAPKDLYFITGEQYSELTSFTLGMSDEEFLQLMENLGDDYELIKQLKAVYDAVTLIDLLNGESRISVSKVNLYNQHAEDLKNLKYIIKNYAPKKYNEVFREVKKSTANYVAYSYNTKGLKKSDLKELKKVNKEDFCKYIKGILKGIVPTEKDVEMFEDITLRLETNSFMPKQKDTDNRVIPYQLYYVELEDILKKASGYLPFLSEKDENGISCADKIKQIFEFRIPYYVGPLHKDEKVKSNAWIVRKPGKITPWNFDEKVDLDACEEEFIKRLINKCTYLPAEDVLPKSSLLYSKFCVLNEINNIKIDGKEIPVELKQKIYNEVFMFNPRVTRKKIKDYCISNGFMDKKSVLDGVDINLTSTLKPWMDFRRLLESGTLTEADAEEIIKRSTYSDNKYRFKLWLHNHYPMLTRDDISYLASKPYKDFGRISRKLLCELYGTEKKGYGEAFTIIEGMWETNNNLMQFLSDKYTFADEIENIRKEHYSDKVTTLSERLDSMYISNAVKRPIIRTLDIISDVVKVKGGAPAKIFVEMARGAEEEQRNKRTQSRREKINDLYNSIKNEDISALRAELESMGEYVDNRLQSERLYLYFMQLGKCMYSGEAIDIVELMNGSKNYDVDHIYPQCLVKDDSIHNNKVLVLSRLNGEKGDKYPIKSEIQSKMAEYWDKLKANGLISDEKYKRLTRKSTFTDDELMGFINRQLVETRQSTKAVATLLREKFPETDIVYVKAGLVSDFRHQYSMLKSRTVNDLHHAKDAYLNIVVGNVYDNKFSKKWFKLSDTYSMKTENLFKYPVNTPSGELMWSGENAIGIVKKNYSKNRAHITRYAFCRKGGLFDQMPLKAAEGLISRKSDMPTEKYGGYNKPTASFFSLVKFTNEKKSDIIIMPVDLIYAERYKNDETFREYYAKGTIQNITNKPVIKVEFPLGDRVIKVNTLFEIDGFRMCLGYKSGGGKQLGFLNIVPFTCRKQTEEYIRQVEKFNEKIKKNESYKYDVDFSYITVENNIELYELYIDKLSSYPYNKRPASPLESIVNGKDKFVSLSIKEQIKCLISIHSIFGRLVGGTDLTYIGGVGRAGNIAMSSTLSNWTKNYKEIYIIDQSASGLFEKKSCNLLDLL

SEQ ID NO: 21414 - protein, 1062 aa, unidentified
  REGION 1..1062: note = Cas Enzyme sequence
MELKLGLDIGVASVGWGIIDENYNVIDSGVRLFPEGSAEENLTRRTMRSSRRRIRRMHHRLQRMRILLSNTLAINFPEPQGNIYEIRSRGLQELLSREELFLAVMHLTKRRGTHFLTAEDIEGKNNNGKSTEEILAEQEACLAKKYVCEIQYERYLTDNGKVRGIENRFRNKDYLRELEQLLAVQSKFYDEIEKNADAILEIYKSKREYYEGPGSEKSPTPYGRYRYDENGNVIKIDLIDLMRGRCTYFPDEKRIAKGAYTACLFNLLNDLNNLKVGERKLTEDEKKYFVKEFIDKGKNITLKIIAKKVVKDENEITGYRIDKNNKPLFTEFKQYKSILKIYQAFDKADYAEGNLDLCDNISEILTRLKSVEERKIALMNYGIEKEIAQELSKVSGFTEYHSLSKKAMDLIMGDLWATDKNQMQIFYDAGMTEVNKNDYIGEEIKFDGSDWIVSPITKRAVAESVKVINAARKLVRRKYGQEFSHIIIEMAREKNSAEEKQNKQKIQRINEERGNAIRELTLGKKITPRQFEIIGLLKEQDMKCAYSGKSVSLTQVYENMLEVDHIIPRSLSFDNSRNNKVAVLVSENQKKGQRTPFQYLNSGAGAITYADYKAMVLKNNSYSARKKANLLYEEAPEKELRGFINRNLVDTRYACREVLNMLQNYFNANEINTKVKVVNGSFTFDFRKKAKLDKDRDATYAHHAQDALIVAGLFNTDLIKKINSIIKMSDSFLDEKKTIIFDNGMVVNTVTGEFVSEADFSANKYIQFIKQIELRPQKYSHKVDRKPNRQLYDQQIKSTRTCLNAKGKEEIYVVTKYKNIYTVGLESCGDKLKKRILEKPESLLMYRNDQETFKKFREIVDFYNDAKNPFAEYFKEHGPIKKFAKKDNGPEIFDVKFLDGRLGVHRINSRQQGKNKSVYLQIKSFRVDIYQEGEQYKFVNVPYDMLKFPSGVYKIDMEKYLQSKQNKKITKQAIFLFSLYHGEVFSYEKEGVKYWWQFSCLNNDTSNVIEVKYIDKPSPAATQGKRMITIGSKIKNMKKYHVDVLGNIYPASKEILQTEIKL

SEQ ID NO: 21415 - protein, 1062 aa, unidentified
  REGION 1..1062: note = Cas Enzyme sequence
MELKLGLDIGVASVGWGIIDENYNVIDSGVRLFPEGSAEENLTRRTMRSSRRRIRRMHHRLQRMRILLSNTLAINFPEPQGNIYEIRSRGLQELLSREELFLAVMHLTKRRGTHFLTAEDIEGKNNNGKSTEEILSEQEACLAKKYVCEIQYERYLTDNGKVRGIENRFRNKDYLRELEQLLAVQSKFYDEIEKNADAILEIYKSKREYYEGPGSEKSPTPYGRYRYDENGNVIKIDLIDLMRGRCTYFPDEKRIAKGAYTACLFNLLNDLNNLKVGERKLTEDEKKYFVKEFIDKGKNITLKIIAKKVVKDENEITGYRIDKNNKPLFTEFKQYKSILKIYQAFDKADYAEGNLDLCDNISEILTRLKSVEERKIALMNYGIEKEIAQELSKVSGFTEYHSLSKKAMDLIMGDLWATDKNQMQIFYDAGMTEVNKNDYIGEEIKFDGSDWIVSPITKRAVAESVKVINAARKLVRRKYGQEFSHIIIEMAREKNSAEEKQNKQKIQRINEERGNAIRELTLGKKITPRQFEIIGLLKEQDMKCAYSGKSVSLTQVYENMLEVDHIIPRSLSFDNSRNNKVAVLVIENQKKGQRTPFQYLNSGAGAITYADYKAMVLKNNSYSARKKANLLYEEAPEKELHGFINRNLVDTRYACREVLNMLQNYFNANEINTKVKVVNGSFTFDFRKKAKLDKDRDATYAHHAQDALIVAGLFNTDLIKKINSIIKMSDSFLDEKKTIIFDNGMVVNTVTGEFVSEADFSANKYIQFIKQIELRPQKYSHKVDRKPNRQLYDQQIKSTRTCLNAKGKEEIYVVTKYKNIYTVGLGSCGDKLKKRILEKPESLLMYRNDQETFKKFREIVDFYNDAKNPFAEYFKEHGPIKKFAKKDNGPEIFDVKFLDGRLGVHRINSRQQGKNKSVYLQIKSFRVDIYQEGEQYKFVNVPYDMLKFSSGVYKVDMEKYLQSKQNKKITKQAIFLFSLYHGEVFSYEKEGVKYWWQFSCLNNDTSNVIEVKYIDKPSPAATQGKRMITIGSKIKNMKKYHVDVLGNIYPASKEILQTEIKL

SEQ ID NO: 21416 - protein, 1050 aa, unidentified
  REGION 1..1050: note = Cas Enzyme sequence
MNRSYGLGLSIGIGTVSYTVLSQIKDTNNIIDNDVRIEDIGVRMFETGETPDHKNSLNQDRRSYRASRRLIRRRKHRKERVKHFLERIQFINYDKYRTWKKIFNPNIFQLKYDGLSKKLSPEEIFAIVIHFCNHRGYKDFYEEDATTINEKERGKIKTALSNFEKIYKDNGYISVSEMILKDPIFLGKGNYPDYHNHAIKNKQDNIEPRFFLIKREYLRKELINILKKQQQYYSKLTDKRINFICDNIVFIQRDFEDGPGDKKDSTRKYMGFLDSIGNCIYYKNEKRAFRTTIISDIYSLINQLSQVYFIDKNTEEISFSKEAANEIIDYVLINASLTEKDLKNILKKYDLILNKPGNLKLKINDCLKALKILKNTLEKCGYDYTSLIKEEQFNLEQPSKLQKLCILLSKNITPKRRILALQKAGYNKELQQEMIRKNFSSTANVSEKYMIQAIEAFKHGENYGNFQARMFKDKYNNITKKEKHLLLPSLTLKDDEDIVKNVVVFKAINETRKVINALIRKYGSFKYINILASDELGHSIQERKRIVKMQNKNRKETQNIRTKILELGLKKEDEITTQDIQRYKLYQQQNGIDLYTGSIIPENEILGTNYEIDYIVPFSLILDDTLNNKVLTKISINRITKNTKLPLQFLENEALDFYKKTVTTLFNKGKISSKKYNYLLLPILNEEILFEWKSRNLNDTRYICKFITNYISSNLIFDSNKKKNVYAIKAPIISKMRKIWLNKKTWGAKELDKTNNLYHAVNALVAANLTPAYVEIVYDNIRLQQIYREHHKTISNEYIDYLNKSINKMQKYYGFSIEYSQKLLRSLGKVPAILKNIWAEADIRLADNTIEYYKDIDDERFRQNICSFYQDKEFAESVQKVIVSYKSYKKFQGKITDDNPLPLSKNKSSYIKKMNNILNANKYYCIEVYKTIDNTINLRGIRFIDLIRKKGKLQLVIDNPIDYKHHIMYLFKNDYVKVYKNNKLLFKGYYKSVGNINQNILMFKIDNSSINTLKFIGKQYNIKKYDVNILGKLGGEIKCSVPFMFHKGNN

SEQ ID NO: 21417 - protein, 1071 aa, unidentified
  REGION 1..1071: note = Cas Enzyme sequence
MRYTIGLDIGIASVGWAVINEDKSRIEDLGVRVFKKAEEPDGKSLNLARREARGSRRRIRRRATRMQKVKELLVKYNLVSEKELETLYIITETTPDVYELRAKGLDRLLSRQEFARVLTNIAKRRGYKSNRKIDEEDKEVGKLSKGTIENKRILQEKGYRTIGEMFYKDEKFEYNKRNKAGEYNSTVLRSMLIDEVHTLFEMQRKFKSEFANEEFEKEYVEVMTYQKPYITPELLEKMLGKCTFEKGEPRAPKNSYTFERFMLLQKVNNLNIYINGEKVEIPQEKKKEIIELAYKQAEIKYTQLRKKLELPIEARFADLNYQIKGIEEDSEEDLVKKVEDKKFVKLEGWHKIRLALKENKDKFEKIEKNPELQNIIADALVRNKTDETIKKYLEKSDIDEEIINAVLNINFTKFGHLSYKAMNKIIPELEKGLIYDKACENVGYEFKGRKNELQYKLPPVTELEDEILNSVVLRAVSQTRKVINAIIDKYGSPTAIYIETARELSKPYDERMKIEKRQKENAVNNDKIKEYIKETFGFDPKPFDIVKMKLWREQNGKCAYSSKPIPAERLYEENFVQVDHIIPFSRCFDDSYQNKVLVLTDENQKKKERTPFEYFGEDKERWHQFEEFVNLTYKFNTRKKENLLIKNFNEEKSKEWIQRNINDTKYISKFMYNYIANNLKFADSESKRKVYNINGQATSILRHYWGLKKDREESDKHHAQDAVIIACATNKNIKKVSDYSRRKLLYKNNEIIDEETGEIIDKKYNIDISIKEPWPKFREEVEARMEDADNNGQLYALINGNFTNYDDVDITHIKPIFTSRMPERKITGRAHKDTMRSQKFIQQGQNFTVVKKPLKAISKQEIEGIINNPDFKNLYLSDKKLYDDIYQKMKEADFKAEKAFADEYRKYSKNGNSPIVRSIKVPSAGATGVQLKNGAIAENANMVRVDVFEKDNKNYLVPIYVSDFAKNELPNKAICANKDEKEWIEMTEKYKFKFSLYPNDLVKIKRKNEKEFYAYYCSTHRGTGAINLLAVNGESRIESVGVKGLEIFEKYQVDILGNISKINKEKREGVK

SEQ ID NO: 21418 - protein, 1058 aa, unidentified
  REGION 1..1058: note = Cas Enzyme sequence
MCVTLTTDYGSRNIGLALMQAHAGQRPTALYAATIIVEPKPLKELVVRRAQLRRMRRTRKTRRRRLRRLADALRGIAGAETIVRFCRRRGYSHDPKREREGRGSDDSNSSEKVLFAVSREEFFKALEAEVQRVIAEPDRQRVLAACRRHLNAARLPGAELRPPRFDNRAVGRCGWQGCSRRPPRAENAVWECLRQTLYGWLKPVFDEALANLEQAEAAKARAAMCAEVDQWCSALVKLAAEYRKLADQQPAQRDKKDVDKTIALLTRRKKQLYRQIVRWVQDTAPAKAGRKFAADFEAYVGKKGGKGKQKSGSVSAAGARQAGVRQKKTKRGFRNQLDDIVVKGRSGRLRYCREHSAQYIQYLLDGKQIPNREDVLDRDIRSRRQKIVFDRLWTLIRGRLLPLAGGRIDRIVVERVAFDVLAGRFKHRQKFYSGKEERAAEMYWFGPGYGFDSELEMLREEFGGRCAYCGQQSQDMEVEHILPRSRFPFDSYLLKVPACRQCNMRKGARSITEAKMRIHPDAYGAYERYLEKRNVRHYFCDIKKGALKLLTNGTQNWDAERLLGMIAQNILEMGKSQNASRALARWLAGKLERETGVRPEVVFRNGRYTAACREVVLPEYDKPAEKRKGNTRNHAVDAILLGCDFPAVTFVDAQGKWWLSEDRLRHWEEQVKAAAPELVELPGQGDAPPAKLPRVEAPAPIRFFEEDVGGGYFKIDLSAFGWNRRRQSGTKVDPVRKITTANGTRLAKREPAQAVLDKLLAKEKDRDKCIALIANRRLRQLLQSDPDSAARNYVLWLQRQTARGLRAAKMGNHPADIKRRQMLQQFINTPVDAFLRPGKERSAQDAPQQAQSDYAQIPEVIGVCCLIDQGEIKYDVPRCDRVGKPIHYYASQPAIRALYVGYKRRKDGKLDRSKPVIFRVNQVWKVYYGPPGKDQDSPAAREVIEKLGQDSPLHGRMLGQRGSWQKFRRRWHEAFDRLWADLGVEKRFRIAQGAVIEKTDGTCFLVRNFDTSEPWMKGSPWKNIRRVYRSPLHYLAAKAKAASHNAAQTGAPVAETLS

SEQ ID NO: 21419 - protein, 1076 aa, unidentified
  REGION 1..1076: note = Cas Enzyme sequence
MSVTLTIDPGSRNIGLALVRSRAGDRPSALYAACIVAEPKPLKELVVRRAQLRRMRRTRKTRRRRLRRLADALRGIAGAEAIVRFCRRRGYSHDPKRARDGRGADDSTGADKLLFNVSREDFFKALEAEVQRVIAEPDRQRVLAACRRHLNAARLPGRELRPPRFDNRAVGRCRWQDCPRRPRRRANAVEENLRQTLYEWLKPVFGEALAGLEQAEAAKAKSQMCAELDHWCSLLAKLAAEYRKLADEQPDQRDEKAIKKVSALLERRKNELYQKIVDWAQENAPAKAGRKFAEDFEAYCDKKRSKGKQKWEGVSAAGATQAGAVGQKKKKKKKKRGFGNQLDDIVVKGRAGRLQYCREHTEQYIQYFLEGKPIPNREDVLDRDIRSRRQKIVFDRLWALIRGRLLPLAGGRIDRIVVERVAFDVLAGTFADCQELFRTDEEKAAEMYWFGPRHGFKNELEMLRTEFAGRCAYCGQQFQDLEVEHILPRSRFPFDSYLVKVPACRQCNMKKGGRSILEAQMRIHPDAYDAYEQYLEKREVRHYFCDIKKGVLKLLTNGAQNWGFERLLGMIAHNIFEQGKSQNAPRALGRWLAGKLERETGVRPKVVFLSGRHTAAWRQQVLPDYEKAAEKAEGKKRNHAVDAILLGCDFPPVAFLDSQRKWWLSEDRLRRWEEQVKAAAPELADLAGDGDAAPARLPRVEAPPPIRFFEEDLGGGYFKIDLSAFGWNRRRQSGAKVDPVRMITTANGKLVAKREPAQAVLKDLLAEKQRDKRIKLIANRRLRQLLQSDPANAARNYVLWLQRQTARGLRAAKMGNHPADTKRREMLEQFINTPVDDFLRPSKRRTAKKAQQQTQSSDGRGNGQSAAEQTSAAEIPAIIGVCCLIAQKYTKYDVPRCDRNGKPLHYYASQPAIRALYVGYKRRKDGRLDRSKPEIFRVNQVWKVYYGPPGKDQDSPKARKVIEKLGQDSPLHGRMLGQRGSWQEFRKRWHEAFGRLWADLGVEKRFQIAQGAVIEKTDGTCFLVRNFDNTEGWMRGSPWKDIRRVYRSPLHYLSAKAKAAFDHSSRSAATVAETIN

SEQ ID NO: 21420 - protein, 949 aa, unidentified
  REGION 1..949: note = Cas Enzyme sequence
MRTVHSLAIDYGAKYIGISLIAHTPEAPNRVLYAAVIVVQPKPLKASVRPRVGSRRLRRGLKTRRYRLRGLAAAIRGIPGAEEILRFSRRRGYGHDRGEDADDSKLLYAVSRESFFEALAEEIQRVVPARHQQAVLKSCRKHLNAARRPTGEPRPARFENRHPSKCQWKGCTRNVPRKKNAPREQLTQTLFNWLKPIHDQSQDKSAFRRSVEHQIDRMVALIRLARRTADRSQGSPFAKLKKRIFADLRRAVADHGDEATVKEFGENWSRTYSKQLNDILGNEQSGRLRFCREHSKEYTEYFLAGKVFPQRTEVLVSDLFGRSQQIVFQRIWRLVEARLLPLARHRIDRVVVERTAFDVLAGTLKQRTQAVKAEDRAAEMYWHGPMFGYANRLEMLKKEFDGLCGYCGQSGALVEVEHILPKSRFPFDSYFNIVPACPKCNHRKGARSALEADMTIHQTAYDAYASYVKTRKPPHVYHTIKKGMLKLMTRETGAAKAQQQLALLANDLATIAATQKGPRPLARFLAVRIEQETGRDCRPKWISGRHTAVYREITVPELDKQADKQKHGLVNHAVDAIVAGCKFPSVSRLENPKWSLTVKDLLAWRREVCNAAPKLLDGLPEVEPLERLDHFEQDLGGGYFAIDLSAFNWNRQRQSGVKLDPFGQTADGQPLKRKPADAVLSALLDEKHRDAEIESIAHRGLRGLLRRRPEDAAEHFVRWLQESTRAGMSAAIRGRHPSDEVRYAALEEFIDTPAAEYLRKKEPKPERTDGLAPAERKAIPETIGIRCTNDGVRGKLGIARRKETDGSVQYYAVQAQYRALYVGYRAGDDGRPDRTRPVVLAVDQAYRVSFKRGRKLKPVSEDGNCALQGRVFGHPIDRKAFVAQWRKELGALFHKLEIIASFRLTQGCFVEKTDGTRFQLRNFDDKAPWMKNGPFQNIARVWRSPLHHQ

SEQ ID NO: 21421 - protein, 1390 aa, unidentified
  REGION 1..1390: note = Cas Enzyme sequence
MESKNYYIGLDIGTDSIGYAAADESYRLLKYKGEPVWGSHIIEEANLKTERRQHRTERRRLDRRQQRVTLIREIFAKEIAKIDPDFYKREEESALLAEDASTSKGLFTDIGYTDKKYHKSYPTIHHLINELMTDAAPHDVRLVYLACAWLVAHRGHFLSEVSLDNVESVVDFKTVYDNLTDYFAFEIGCEPAWDNADPDEIEKILVKKIKSTSKINELNNLLFGKKKPETEITDAFPFSRPGIIKLLCGKDCSAKDLFGKEEYAEIKSLKLDDDELDSNLSELGDDAELVLRLKAVYDCVTLHDVLGENKFISAAKVETYEQHKRDLAELKKFIKKYAPEKYNEIFRKVDKSTANYSAYSGNIKSDKNTKADWKKATPENFCTYILKIVNNITPAAEDKAFFDDMVARLQKDVNTFMPKQVNGDNRVIPYQLYYVELKKILENAEKYLPFLSETDEEGYLTKDKILSVFTFRIPYYVGPLNASSPYAWIKRKAGRITPWNFSEMVDGNESEQGFINKLIGVCSYLPGEKVLPKQSLLYQRFTVLNEINNITINGLRISPEIKQLIYNDVFKKNKKVSVKKIKDSLRQNTQLKDDVETIAGIDISIKSSLSSYISFRRLLESGTLNETDVEKIIKVSTYMESRPRFKAWLEGEYPNLSDNDVKYITSLKFKDFGRLSEKFLCGIIGGCKDTGEACSIIDALWSTDKNLMELLSDDYTYSDAIKRYSDNYYMANGAKSLDERMDDMYLSNAVRRPIYRVLDIVSDIVKAEGKAPNKIFVEMARGAKPDEKGKRTTSRCGMLKALYKTIDTDDVRRLEQELEKMGDEANSRLQSEKLFLYFLQLGKCMYSGEKIILSDLMTSDKRYDIDHIYPQSKVKDDSLFNNKVLVKSELNHQKGDRYPVPENIRENMSGMWKKLLDGGLITEEKYRRLTRKTGFTDDEAWGFINRQMVETRQSTKAVATLLKEYYPNTKIVYVKAGLVSEFRHEKKLWKAILPEEERYLDDSQIEPWKTELWKSRTVNDLHHAKDAYLNIVAGNVYHEKCTKPWYLSNKDNYSINLTSLYSLTPYTAGGRKIWDGVNSLETVWKTVHKNAVHYTIYPFSRKGGLFDQNPLKKNADLTPLKNNGEIYLDPKKYGGYNKPTATFFVLVKYYFGKKSDVMLMPVDLAIAEKYKSDSQFRLDYAKIQLGRILNKTIDKVEFPLGDRIIKVKTMIELDGYRMCITGKAGGGTVIMLSSMTPLCLAPEWEFYVKKLETLNEKKKNNPNMVYMEKYDFVSTEKNAELYDILTDKLTNTVFNNRPGNPYDKLATGKEKFAAQDVFTQTACLLQIVGIFGRINNGFDLTAIDEAPKAARSKLSSNLSNWKKYYSDVRIIDTTASGLFEHRSCNLLDLL

SEQ ID NO: 21422 - protein, 1388 aa, unidentified
  REGION 1..1388: note = Cas Enzyme sequence
MESKNYYIGLDIGTDSIGYAAADESYRLLKYKGEPVWGSHIIEEANLKTERRQHRTERRRLDRRQQRVTLIREIFAKEIAKIDPDFYKREEESALLAEDASTSKGLFTDIGYTDKKYHKSYPTIHHLINELMTDAAPHDVRLVYLACAWLVAHRGHFLSEVSLDNVESVVDFKTVYDNLTDYFAFEIGCEPAWDNADPDEIEKILVKKIKSTSKINELNNLLFGKKKPETEITDAFPFSRPGIIKLLCGGTCSAKDLFGNEEYAEIKSLKLDDNELDSNISELGDDAELVLRLKAVYDCVTLHDVLGENKFISAAKVEAYEQHKRDLAGLKKFIKKYAPEKYDEIFRKVEKKTANYSAYSGNIKSDKDADWKKATPEAFCAYILKIVRNITPDAEDKAFFDDMIARLQKDVNTFMPKQVNGDNRVIPYQLYYVELKKILENAEKYLPFLSETDEEGYLTKDKILSVFTFRIPYYVGPLNASSPYAWIKRKAGRITPWNFSEMVDGNESEQGFINKLIGVCSYLPGEKVLPKQSLLYQRFTVLNEINNITINGLRISPEIKQLIYNDVFKKNKKVSVKKIKDSLRQNTQLKDDVETIAGIDISIKSSLSSYISFRRLLESGTLNETDVEKIIKVSTYMESRPRFKAWLEGEYPNLSDNDVKYITSLKFKDFGRLSEKFLCGIIGGCKDTGEACSIIDALWSTDKNLMELLSDDYTYSDAIKRYSDNYYMANGAKSLDERMDDMYLSNAVRRPIYRVLDIVSDIVKAEGKAPNKIFVEMARGPKPDEKGQRKTSRYDTLKDLYKAIDTDDVRRLEQELEKMGDEANSRLQSEKLFLYFLQLGKCMYSGEKIILSDLMTSDKRYDIDHIYPQSKVKDDSLFNNKVLVKSELNHQKGDRYPVPEGIRENMSGIWKKLLDGGLITEEKYRRLTRKTGFTDDEAWGFINRQMVETRQSTKAVATLLKEYYPDTEIVYVKAGLVSEFRHEKKLWKAILPEEERYLDDSQIEPWKTELWKSRTVNDLHHAKDAYMNIVAGNVYHEKCTKQWYLLNKDNYSINLTSLYSLTPYTAGGRKIWDGVNSLETVWKTVHKNAVHYTIYPFSRKGGLFDQNPLKKNADLTPLKNNGEIYLDPEKYGGYNKPTATFFVLVKYYFGKKSDVMLMPVDLAIAEKYKSDSQFRFDYAKIQLGRILNKTIDKVEFPLGDRIIKVKTMIELDGYRMCITGKGSGGKVVMLSSMTPLCLAPEWEFYVKKLETLNEKKKNNLNMVYMEKYDFVSTEKNIELYDILTDKLLNTVFKKRPGNPCDDLADGKEKFVAQDVFTQTACLLQIIGIFGRINNGFDLTAIDEAPKAAISKLSTNLSNWKKYYSDVRIIDTTASGLFEHRSCNLLDLL

SEQ ID NO: 21423 - protein, 1360 aa, unidentified
  REGION 1..1360: note = Cas Enzyme sequence
MKSEKYYVGLDIGTNSVGYAVANENYQLCKFKSEPMWGVTVFDEAQPAAERRGFRVARRRLERRQQRIRLIMDLFAEEISKTDADFYRRIKESYLYPATADEKIRIFGSYNEQKEYGKKYPTIHHLICELMNSTAAHDVRLVYIACAWLVAHRGHFLSEVDKQNIDAVTDFKTVYQHLADLILRDGTYALPWKESIDLDAVAEGLKKKQGVNYKTKALSEALFGTGKAPSAVDEQYEYNYALVLKLLCGGKVALKDLFGKDDYADLEEKSVSLDMDDEKLALIMQSVGDDAELIAVLKAIYDWSLMVDILKGSNTISEAKVAIYEQHQQDLKMLKTLIKKYVPQKYNAVFRAEKQANNYVAYIGKNKTANQTAKVGKTNNNDDFFKFIGSILKSMDVEPQDRGAYDSLCERAENRELLPKQVNGDNRLIPYQLYWFELNKILDNAKQYLPFLNKSDEDGITVAEKILSVFEFRVPYYVGPLGKNGKNRWMIRKAEGKIYPWNFDEKVDLDASEDAFIARMTNACTYLPGEDVLPKNSLVYAAFEVLNEINHIKINGQEIPIEAKQSIYCDLFMSPKKVTPKKIAEYLISNNYMTENDILSGLDVTVKSSLKPFLQFKNLVSNELLTYSDAEKIIARATYSEDKARFSGWIKANYSHLPETEIKYITGLKIKEFGRLSKRLLCGIAGTNKESGEEFSSIIRAMWETNYNLMQLLSDTFTFKDRISEIAREYYDANPRTLSERLEEMYVSNAVKRPIIRTLDILKDVVKVQGHAPERIFIEMARGAAEEQKGKRTKTRLTQILELYAKIKDEEVRLLSKQLEEWGDLAHNKLQSDKLFLYFIQLGKCLYTGKSIDLQSVISGDGNYNIEHIYPRSFVKDDSIINNKILVDSKANGEKSDTFPIDPRIQSNMRETWQRFHKNGLISDEKLKRLTRTTPFSDAEKFEFINRQLVETRQSTKALAALLKELYPDTQIVYVKAGLVSDFRQQFDLLKTRCINDLHHAKDAYLNIVAGNVWHCKFSRHFWREGEEHNAKAEIVFTHSVKCNGKIVWNGAADKDRVVRIVQKNTAHVTKYAFCRKGGFFDQMPVSAGKGLVPLKRNRPTEIYGGYNKSTATFFVLVRYQTTKKQDVMVMPVELLYAEKFIRDDGFAQQYAKQTIANIIGKPVDAVGFLLNKRILKVNTLLSLNGFIVSITGKSSGGKTIGIQSLTQFKASRQIEAYIKRLESFEAKRKKNDRIIFSEKYDCITAEKNLELYDLYIDKLGKAPYKYRPANPVETLTKGRLKFVELLPQKQVSVLLSVQGLFGREVKADLTAIGGVASAGVATLSSSISNWKKNYTDVRIVDQSASGLFEKTSENLLELL

SEQ ID NO: 21424 - protein, 1112 aa, unidentified
  REGION 1..1112: note = Cas Enzyme sequence
MDIGKLTSLHHHSKFIFNISLYFLYVNIRRIKMDKKIRIGLDIGIGSIGWAVLSDDAETQKVEDCGVRLFDSSENIRDRENNNQERRRARAGRRLIRRRHHRRERLKKHLENIGLISVATLQEWYEKNNPNPYELRCNALDAKIKPEEITASLIHICNHRGYRDFYELQEDDATKEEKEEAQKENEAIEGFNNLYKTTSFRTPGEFFFKHKGLSHIRNKATSEQRLLVPRKLLKQETESILKKQSRFYPCLTEDAIKITLDIVFSQRDFETGPGNPDDPNRKYKGFLDTIGYCIYYKDKKRGCRNTVLADLYAATNAISQYMFINTETGAIELKSETANKIINHILHSGNINLTELKKLIKEDGLTLSSGVNLDNKALPNAIKYLRHTKSILEDSGFDWTDFINEEQFDISNPSRLHLLGKILSSYQTPERKEKELRKLDFLNEKAIKLFGSKKFSGTSNVSYEYMIDAIEAFKRGETYGNFQAQMFDKQGERTKNKYLPQICDEDIIKNPVVHRALCETRKVLNAIIAKHGSPETIVVEVASDVSRSFEQRLEIMRDQRKKQKENERVRNTLMELFGLEEKEVTPVLTDKYKLYESQGGKCLYSNREIMLERINTDDYEADHIIPFSLILDNTLNNKALVLSSENQYKKQRAPLEYLHGEKREKYIETVKDMLKHKKITLKKYQYCMTENLQNEGLLDEWKSRNINDTRYVTKYIIGYIKNNLQFSTDKPQPIYGIKGGITSQFRRLWLDRETWGKPDKDKSREETTLHHAADAIVIANLTRPYVEIGSDALKLREIYKRQGDGEAYRDYLKKCLDKMQKYYGFNPYYTESTLTKRGRIPSFVPNLRYEVDALLNEENAPITSYKTERKYRGEISAQNAIGIKKIEGELWQISSKPIRNISKKDLDNIYSDDGLLLKKLHEIFDKRQDTEYTLGDYMDETGLKEFSPNGRQAIHKLKIKVKKANDVFVKQINDKNNTILDVRKYYCIEIYKTKGNKTAARGIKYTDITKEEKRLYLKSLYPEDYEEHIMYLFKNEYIEISKPNGDTKFAGNYCSVKNINNGVLWMKEINKPAAQAVSIAQSDTLKKYAIDVLGKKGGEIKCSVPLSSIKES

SEQ ID NO: 21425 - protein, 1211 aa, unidentified
  REGION 1..1211: note = Cas Enzyme sequence
MENYRQKHRFVLATDLGIGSNGWAIIDLDAHRVEDLGVQIFESGEEGAKKASARASQQRRLKRSAHRLNRRKKQRKEALIKFLQEIEFPDLVEILNSFKKQKNPNDILSLRVKGLDNKLSPLELFSILIYMSNNRGYKDFYDNDINDNNTDKDEKEMEKAKSTIEKLFASNSYRTVGEMIATDPTFIVDKSGSKKVIKYHNKKGYQYLIPRKLLENEMSLILHKQEEFYDCLSIDNITIILDKIFFQRNFEDGPGPKNKRDDYKNNSKGNQFYTGFNEMIGLCPFYPNEKKGTKNSLIYDEYYLINTLSQFFFTDSNGVIMSFSKSLLHDLMLYFFDHKGELTNKELSSFLLKHGLELNSKEKSNKKYRLNYMKQLTDSTIFETEMIASFREEIETSSYRSVNSLSNKIGNCIGQFITPLKRKEELTNILIDTNYPKELASKLADSIKVIKSQSVANISNKYMLEAIHAFESGKKYGDFQAEFNETRELEDHHFMKNNKLIAFQDSDLIRNPVVYRTINQSRKIINAAINKYNIVRINIEVASDVNKSFEQRDNDKKYQNDNYEKNLQLESELTDYINKENLHVNVNSKMMERYKLYLSQNKHCIYTNTPLTMMDVIYSTNVQVDHIIPQSKILDDTLNNKVLVLRDANSIKNNRLPLEAFDEMQINVDTNYTKKDYLTECLHLLKNKTNPISKKKYQYLTLKKLDDETIEGFISRNINDTRYITRYIANYLKTAFKESDKTKNIDVVTIKGAVTSRFRKRWLTTYDEYGYHPTIYSLEDKGRNLYYYHHAIDAIILANIDKRYITLANAYDTIRLIKIDRNLSKEQKQRDIDTVIKNTVKSMSKYHGFSEDYIRSLMSKNHIPAICKNLSDEVQIRIPLKFNTDYDNLGYRFTDDQYHYKKLYIAFKEAQNALKEKETLEKELIERFNNEAQILNANIILTYTGFESNNELIDIKKAKKVTDTLKPNLKNYIKAIDILTQEEYTKRCLEYYNDSEFATQLKIPYVNFKINKRFRGKIQGSENAVSLREVLKKTKLNSFEEFESYLKSEDGIKSPYYIKYTKNTLGKESYTIYEANSYYCAEIYTDSQNKPQLRGIRYVDVRKEDGKLVLLKPLPSTCKHITYLFHNEYIAIYKDSNYKRLKNNGFGAYRSINNVNVNKIIIRLFANQNLNDNDVVITSSIFIKKYSLDVFGHINGEIKCGDQSLFTIKKR

SEQ ID NO: 21426 - protein, 1211 aa, unidentified; identical to SEQ ID NO: 21425
  REGION 1..1211: note = Cas Enzyme sequence

SEQ ID NO: 21427 - protein, 1457 aa, unidentified
  REGION 1..1457: note = Cas Enzyme sequence
MLFCIQLLYHTKERMSTKMNNKFYLGLDIGTDSCGWALTDERYNLARISGKDAWGVRLFESADVAAARRQKRTARRRLQRRRLQNEWLREVFSQEIEKVDPKFFDRLKYSNLHLEDKEQMGMNSRYSLFNDILEEAYTDKEYYNKYKTVYHLRSELIKKPADDIRLLYLAVHSILTHRGHFLYTIESSKNIDETKMFNDLVDKLGEIIVAEDGSKIFNVNHASKDNFARLYQDLKEGTSLRQTKETFAEGIGAKSKKDKDIVKIVVDGKFKLKDLFAEIEKEDNIEVNFSSDKYETEVYGNIIKTLGDDDKLSIIDDFQKIYSSIQLKRLLGDHKYICQSLAEKYDIHNAQLKEFKDFIKKYYPSKNAFVFRYVKPKKSSDGKKNIVNNYAAYVYSNLTNGKKQVIDGKASKDDFYAFVKKEIFEKDPEIAADEEYANYKNKVTELMAKGEFLQKVRSHENTVLPNSLYTNELEAILDANKEKFTFLTEKDETGLTNAEKIKQIIAFKVPYFVGPIGESTEKFSWAEKQNDMPLRPWNLEKIVDFDKAEDKFIQRMTNKCTYLKDKDVLPNDSLLYSKFRVLNELNNLKINGDGITVELKQKIFNELFKKNKKVSVKRLKEFLVAENIVPKSEIANISITGIDREFVNTLSSYVTLAGRFGEDFVDNNVETFEKIIKYHTIISDKDRLVKRLKREFNIFSDDDIKFLKSLNYSKWGRLSKEFLTELKFVDKRKAQKISTDNFSEDYQDKCSNGEAFSVIEAMWETNNNLQQLFDQGNYTLAERIEDHYGKLDRDIVYADIDEMYCSPSVKRGAWQAIQIINEIKSRIGRYPDKIFVEVTRHDETKGDAGRKDSRKKKIEKLYNNAELKKVCEELCVEYNELMRQLLGEDGKSGKTDAELRSDRLYLYFMQLGKCMYTGEPLEIDKIYDDNIYNIDHIIPQSKIKDDSLNNKVLVKMQVNKEKDNSYPINEYNPQIQIKQKAFWKMLNEKGLLSNEKLARLCRTEPFNEREEIAFVNRQLVETNQESKAVTDLLRRVVDNPTSVVFSKACFVSDFRKKFDIFKSRTVNNLHHAKDAYLNVVVGNIMDNRFTIPFWNNTKDDINKSITRNTSKVFERIVKSPIDGLVIWNGCLQEDINKCENDIKRIKEICSKNTCIVSVMPFVNNNGLFYDETIYKSAKNDPNTKASVPLKGEKKFLSNVQNYGGYNSLKYAYFIVVESIDKKGKTKKTIESVPIMIEYTYRNAPDKEQKIIEYLEKQNNIKITKVILPVLKYKSTLKINGGLFTITGKTGERYKLIKQNQWYIDNEHVGYIKAIEKYLNLSDTAKAGLERDENSIVVSLAKSKDAKEITLTKEENLQLYDMMTKQLSKEFYCLDSIKEIANKLIQAREKFEDMPIEDQIKLLNNIVGYIGGIYSIDLKIVGGSGEGGTTTISKNITDLDISVIMQSVAGFSKKEIKL

SEQ ID NO: 21428 - protein, 1082 aa, unidentified
  REGION 1..1082: note = Cas Enzyme sequence
MYYRIGLDIGITSVGWCAVETDASGEPKSILDLGARIFDAAEQPKTGASLAEPRRLARGLRRRLRRRALRLALAKELFAELGVAPEAAPRDVNELRVAGLDNLLEEREFAAVLLLLLKRRGFKSNSKAQNSKEDGELLSATKRNAELMAERGYRTVGEMLAAEYSEKRTRADGSTYTVYNVRNKGGSYAHTVRRADIRQEIEALFAAQAGFGSALASDEVKDRVLEIFDMQRNFDDGPGKGSKYSATYAVGKCEFLEDEERAPRASYSNERFVALQKINHLRIISGGKSRELTAEEREKLIALAEKNKKTTYAAVRKTLGLGDGERFNALTYSTKKENGDEIKESEKATFVTFERSRAISDCLDEEHRTADIIDAAAYVLSHVKSDSRRLKMFADVPETAVLSDAEKEGLLAVNCDKFGHLSVKAIRAIIPYLEEGQRYDEACRSAGFHHSKKQNDGERSLLLKGSAVAEETENITSPVVRRAVAQTLKVLNAIIGRYGSPVAINIELAREMSKSRAERDKATRENEKRRKDNDTLRETIKEMGVVPTYTRLLMMKLYEEQKGQCPYTGETIAINRLFEDNYVQIDHIIPYSRCFNDSFNNKVLVKTRANQDKGNRTPFEWLFTTPEWNDFFDRVNGMYAGNFKKKQMLLKESFDEEEWKSRALNDTRYICRYMRGLLADRLLFEEAGMGTQRVFAVNGGITAELRRQWGIGKVREDGDIHHAVDAAIIACVTPGAVRKLSAGYKKKHEEKRYKEEGYGAEVTEPYAGFADELAARCMEDEGLLRDRLRALGFDENTVLKAKPVFVSRMPKRKGRGPIHKETIQSAKYVEDGISVKKVALTELKLERDKNGEWYIKDYFRPEDDRKTYELLLDKLIAADGNAKVAFAEKVFKPAAEGKIPNEIKKVKLYYPVNSGVMLEDIKGFADNGSMVRVDMFSKNGKYYCVPVYTADIYAGRLSDRAVTRDKRQSEWDVMDDTYKFEFALYPNDLIWIKSKKGICMSKQRDNNNSRMPATLNMREGCVYFRGLNINDGGANIITHNNCYGMKLGLKTIGEIKKCVVDVLGNISFVQEEKRPPAKIKQK

SEQ ID NO: 21429 - protein, 1087 aa, unidentified
  REGION 1..1087: note = Cas Enzyme sequence
MDKWNYAIGLDIGIASVGWSVVALDSQGDPYGIIKLGSRIFDKAEQPKTGESLAAPRRQARGLRRVIGRRALRKEDIYKLLAKHNIVTKEQMMEIFRTGHLEDIYELRTKALDELVTRTDFARILIHLAQRRGFKSNRKSESSDEGKLKDAVRRNQILMEEKGYRTVGEMFAKDELYSRHKRNKGSEYTSTVLRDNVIGEAVLIFESQRSLGNSWASEELQESYIEILSRQRSFDEGPGEPSPFHGNQISRMVGKCTLEPEETRAAKATASFEKFTLLQKINHIRVSNEDGEMVPLNVEQRQKVIDLAYKTPDVTFLKIRKALELHEYDRFNLARYRTTDSVEKAEKDEKLKCLNAYHEMRKALDGIEKGHIQKFSDEQLNKAAEILTRYKNDSTVINLLQEEGFSPEEADALSVLSFSKFGHISVKACRKLIPFLEQGLTYDKACKEAGYDFRGHNSAKSMYLPANTEQGAPELQDITNPVVRRAVSQAIKVINAIIREQGCSPAFINIELARELSKDFAERNQITKDLEKNTAENERLKEELLELVHGKTIGGQDLVKYRLWKEQDGRSAYNGKPIEIERLLEPGYAEVDHIIPYSISFDDRRSNKVLVFAYENREKGNRLPLQYLEGKAREDFIVRTETTVKQYRKKQNLLKEKNTEETAEFRQRNLTDTQYLAVLLYNFITDHLEFAEGTEFGKRRVFTVNGAITSFLRKRWGLTKVREDGDLHHALDATVIACTTNRMIQLISGYYARIEGTPYLSKKGKELFPQPWDHFRDDLVLRLSDTITPESLYLVNPVFYHSFGAENIKPVMVSRMPRHKVTGQAHKETLKGTKALKDGYLTTKKSLRDLKLNKDGEIADYYNPESDLLLYHALKEQLQKHSGDGKKAFPEGSHFYKPKSDGTPGPEVRKVKLIEKSTLNVSLNDGTAFADNGSMVRIDVFRVPEEGYYFVPVYVADTKKKQLPSKAVIAGKPYSKWKEMDDKDFIFSIYPNDLLFFEHNKGINWSVKNKNSTLPNQKEATELFGYYIKAGIATATISIINHDNSYMLSSLGIKTLKSLKKFQIDILGNISEVKHERRTGFNQRSGG

SEQ ID NO: 21430 - protein, 1143 aa, unidentified
  REGION 1..1143: note = Cas Enzyme sequence
MYRLGLDVGIKSVGWCVLECDENGEPIQINALNSRIFDAAEQPKTGASLAEPRRNARGLRRRIRRKSFRLERIRKLFSENGIELFETQDDLICLKDEYKNLDVVKLRSDALDKKLTEAEFARVLYSLARHRGFKSNKREGAKDSDEGKLLGSIRKSEEEMRESGMRTRGEQLYKKYLMEGKPVHNKGGDYSMCVSRDILVKEIELLFEKQKEFGNNFATDENKEKYLDIFLSQRNFDEGPGKGSQYTGSHDVKKCEIYRDEDVAAKGTYTSEWATIYQKINNLSIICGGDRRHLSNEERQIAVELVKKVDKVSYKSFRKAIKLDDDYRFSALNYSEKKKSDKKKNEGESKSDVVEINDVVDSLACEDKGDFITAKNSNKIVKALNDNLKSDVELIDEIAEICTKYKSENLFRNAIAESKIIGGRLDEETIEKLSKIDMKGYGHLSLHVLREILPYLEEGMVYSDAMQKAGHNHSEHNFEKQKYLGTKEVYDAIGGVTSPVVKRALSQTVKVIDAVIRQYGSPYAINIELARDMSMSKDERDKLKKENDARAAKNEAIRENIAKLNAMPNSTNVLKYKLYEEQDHKCAYSMETLDINHLFEDGYYEIDHIIPYSRSFDDSFNNKVLVLKRENQNKRNSTPVEYFERIGRDYDEVLAFWKAVYQKRNRKKLEFLQKKEINESEWKNRALNDTRYASRMLANLIKDYLLFDEKSKDKYGRVETVKGAITSYLRRFWGVQKIREDGDKHHAVDAAIIACVTPKTKNKIERYNQIKESRKMRNGQYVLEDGEICDSDYYDKNSHLVLPYPYKEFINELDARVMDEPVLMQNKLRLLGFNENYLMNAKPFVVSRMTSRKAKGCINEATVFSSKYADNKYPTVCDGNNVIVKRTALANLKLDKNGEINGYFQPEGDVALYNALKQRLVEFDGDAKKAFATPIRKPCNSGQGNIVRTVKTYETYTGGGMILEKNKGIVKNDGMIRVDLYSKDGKYFGVPVYVADLYRGELPKRAATQNKPQNEWRVIDDTYTFEMSIYQDDLLHIENKKGIELKKKKDVENSAKAQTKTITDDLVYFIGFNRSTASIEVEDTTGCYRRDGIGTQNIGKITKCEIDVLGNVQEIKKRPKQPQPLKMLTDKEKAEKRKNNQNK

SEQ ID NO: 21431 - protein, 1157 aa, unidentified
  REGION 1..1157: note = Cas Enzyme sequence
MYRLGLDVGIKSVGWCVLECDENGEPIQINALNSRIFDAAEQPKTGASLAEPRRNARGLRRRIRRKSFRLERIRKLFSENGIELFETQDDLICLKDEYKNLDVVKLRSDALDKNLTEAEFARVLYSLARHRGFKSNKRVVETDDGDEEKKGKGKNKDEGKLLSSIRESEEEMRESGMRTRGEQLYKKYLLEGKPVHNKGGDYSMCVSRDILVKEIELLFEKQKEFGNNFATDENKEKYLDIFLSQRNFDEGPGKGSQYTGSHNVKKCEIYRDEDVAAKGTYTSEWATIYQKINNLSIICGGDRRRLSNEERQIAVELAKKVDKVTYKAFRKAIKLDDDYRFSALNYSEKKKSDKKKNEGESKSDVVEINDVVDSLACEDKGDFITAKNSNKIVKALNDNLKSDIELIDEIAEICTKYKSENLFRSAIAESKIIDGRLDEETIEKLSKIDMKGYGHLSLHVLREILPYLEEGMVYSDAMQKAGHNHSEHNFEKQKYLGTKEVYDAIGGVTSPVVKRALSQTVKVIDAVIRQYGSPYAINIELARDMSMSKDERDKLKKENDARAAKNEAIRENIAKLNAMPNSTNVLKYKLYEEQDHKCAYSMETLDINHLFEDGYYEIDHIIPYSRSFDDSFNNKVLVLKRENQNKRNSTPVEYFERIGRDYDEVLAFWKAVYQKRNRKKLEFLQKKEINESEWKNRALNDTRYASRMLANLIKDYLLFDEKSKEKYGRVETVKGAITSYLRRFWGVQKIREDGDKHHAVDAAIIACVTPKTKNKIERYNQIKESRKMRNGQYVLEDGEICDSDYYDKNSHLVLPYPYKEFINELDARVMDEPVLMQNKLRLLGFNENYLMNAKPFVVSRMTSRKAKGCINEATVFSSKYADNKYPTVCDGNNVIVKRTALANLKLDKNGEINGYFQPEGDVALYNALKQRLLEFGGDAKKAFAPTNPIRKPCNSGQGNIVRTVKTYETYTGGGMLLEKNKGIVKNDGMIRVDLYSKDGKYFGVPVYVADLYRGELPKRAATANKPQNEWREMDDTYTFEMSIYQDDLLRIESKKGIELKKKKDVENSAKATSKTITDDFVYFIGFNRSTASIEVEDTTGCYRRDGIGTQNIGKITKCEIDVLGNVQEIKKRPKQPQPLKMLTDKEKAEKRKNNQNK

SEQ ID NO: 21432 - protein, 1155 aa, unidentified
  REGION 1..1155: note = Cas Enzyme sequence
MIDYILGLDIGIGSVGWAVINLEKRRIEDFNVRIFESGEIIKSNRLTRKSRETRRYRGMRRLYGRKGHRKHRLKKHLEMIGFTTEVKLREYFESGNSNIISIRAKALDEKIEAEELAACLIHICNNRGYNDFYSIDEELLSKEELEEYESDRDAIARISSIMKNGNYRTIGEMIFKDPEFNNDGSDFRKYHNSSITGTVNLIKREDMKDEVSKILKKQSEYYECLTPENIDIIKKIIFSQRAFEDGPGDVNDKFRKYTGFLDTLGKCRFYTDEKRGARFTAISDVYALVNTLSQYHYFDENGEFCFNSEIAEELIDFAIKNGNMTKKDLSAIAKKFKIKIKSSDESDTSITKCLKYLKSVKPVFEKYGYDWGQLVQGYMDTENNLLNKIGVIFSQYYTPSKRVLKLKEMQGNFDEEIILELSRLKFSGTTNVSYKFMKDSISAFLRGDIYGRFQAKIIKEMEKSKDDSKKSYKLPPFKNEDDCEFFKNPVVFRSINETRKIINAIIDKYGQPCAINIETADEVNKSFKARSKENKLKKRNEKENDHIKSEISKILDIPVDSVRPVMIEKYKLWEAQEHKCLYSGKAIDDISVVLNDKNHLFEIDHIVPYSLILDNTLNNKALVYMEENQIKGQRTPLMYMKPENVEAYKPRVNAMLRSKKCNKKKYQYLMLQNLDDSELLSEWKSRNLNDTRYIAKYLVNYLKNSLIFNPKNKFSDGLTIKEQSRVFAVKSKFVSNFRKQWLNPMTWGRRDKGELKKITYLDHAADAIVIANCRPEYVILAGEKMKLYNIYKNAGKRITDEYNKSFNDCVESLYRYYGVDRAFSKKILKTPEFCITPIVPNLYNEVDNRLRDYNTHRKLFGNGADKDTDEQIQEIFVSTNKNLYPDDPEFAKSLKMPVISYKPERSYTGKITEEQAISIKEINGKFMKVKRVDITKLEKSNYNKVYTGDIDLLSSLDVIFKDKGEKYTVKEYLNNNNLDYFVTLKGRRINRVTVIEKEPDIYLRKDISENNFTIMDNRAYYCLEIYKTKDNKNNVQGIAMSDVVKKNGKLYFKKGYEYPEDYDKHVMYLFKGDYIRIYDSKGKVKFEGYYLSSKSVNNNRFYAILNNSTEKVIISVSPKDRCIKLNVDILGNVSGFNDGRGISCGEPLSLLEENE

SEQ ID NO: 21433 - protein, 1119 aa, unidentified
  REGION 1..1119: note = Cas Enzyme sequence
MTNKVRIGLDIGIGSIGWAVITGEQKNSRIENFGVRVFDSGELENGKSRKSQVRRGFRGVRRLIRRRYFRKELLKAHLQNIGLLNEKVMREYERIKDQNVHVLKAKGVSEELSPAELYKCLIHTCNHRGYRDFYEDDETLDMEDETSVNRAAASEFEKMFKSSGCETVSLFICKHFVNEAGQIEFRNRDSRKDKYLLIRRSLLRDELRIILDKQAEYHSALTPHNIETIDKIIFSQRNFEDGPGNPDDPFRRYTGFLESLGSCPFCTGDRRGFRGTVIADVYAVVNTLSQYRFVDKETGEYCLKPDIARQLIDFLLKNASLTLSDVKRILKANNFELLKSENSDDKALTKAVRFLKLAKSSIENGGENWEDWISEEQFDIEKPSKLHKIGELLSKYQTPSYRSSKFKELGFMTPQLIKAFSGKKISGTAGAGYRYMCDAIHAFLDGDIYGNFQANKLKQISEEKNISKRSVKLLPEHIDDEDIKQNPVVFRAINETRKVLNAIIELYGSPEVIVVEVASELNSSFLERNKTAKRQKENERKNDEAKRVISELLGISVEEVTGNMLDKYKLYHEQQGKCLYSGRPLGDLTEVLKDKDKRYEVDHIIPYSLILDNTLNNKALVWSNENQTKGQRTPLMYLGAEKAAAFKARVNEMRTRKENCISDRKYRYLMLESIYGTEAEDLLSQWKSRNINDTRAITKYIVSLLSKNLVFSGTSGQPVFGVKGALTSKFRRIWLGNTVWGDSDKDRTTYLSHAVDAVVLANLTPPYIEIASDNIKLQQIYRKYKSQSAAEYQDYLEKCLDKMQKYGFSREYTLHLLTKTQRVPSYLPNIASEVEIRFDDEDEERFKTNVVKFYGDALESFIVKPQMPIASIKQERKFRGEIADANPIRVVEINSEPHKIARKDIKSITKKDIDKLYTTDTTLVATLNRIFEGKDDKYTVEKYLKENNLTTFKTDSGQPVHKVSLDAGKISNFFKKVISDSNYTMLGGLNYYCVEVYKDKKGNTKVWGIRYVDIRRKDKKLHVIKERMPEDYCSHVMYLFKNDYIRIYRGGEVRFEGYYKRVYNINEKRLVFSYGNYTNTRDIVIAQKDEVRKVYIDILGRLGGEVKCSAPLLSISEKE

SEQ ID NO: 21434 - protein, 1119 aa, unidentified
  REGION 1..1119: note = Cas Enzyme sequence
MTNKVRIGLDIGIGSIGWAVITGEQKNSRIENFGVRVFDSGELENGKSRKSQVRRGFRGVRRLIRRRYFRKELLKAHLQNIGLLNEKVMREYERIKDQNVHVLKAKGVSEELSPAELYKCLIHTCNHRGYRDFYEDDETLDMEDETSVNRAAASEFEKMFKSSGCETVSLFICKHFVNEAGQIEFRNRDSRKDKYLLIRRSLLRDELRIILDKQAEYHSALTPHNIETIDKIIFSQRNFEDGPGNPDDPFRRYTGFLESLGSCPFCTGDRRGFRGTVIADVYAVVNTLSQYRFVDKETGEYCLKPDIARQLIDFLLKNASLTLSDVKRILKANNFELLKSENSDDKALTKAVRFLKLAKSSIENGGENWEDWISEEQFDIEKPSKLHKIGELLSKYQTPSYRSSKFKELGFMTPQLIKAFSGKKISGTAGAGYRYMCDAIHAFLDGDIYGNFQANKLKQISEEKNISKRSVKLLPEHIDDEDIKQNPVVFRAINETRKVLNAIIELYGSPEVIVVEVASELNSSFLERNETAKRQKENERKNDEAKRVISELLGISVEEVTGNMLDKYKLYHEQQGKCLYSGRPLGDLTEVLKDKDKRYEVDHIIPYSLILDNTLNNKALVWSNENQAKGQRTPLMYLGAEKAAAFKARVNEMRTRKENCISDRKYRYLMLESIYGTEAEDLLSQWKSRNINDTRAITKYIVSLLSKNLVFSGTSGQPVFGVKGALTSKFRRIWLGNTVWGDSDKDRTTYLSHAVDAVVLANLTPPYIEIASDNIKLQQIYRKYKSQSAAEYQDYLEKCLDKMQKYGFSREYTLHLLTKTQRVPSYLPNIASEVEIRFDDEDEERFKTNVVKFYGDALESFIVKPQMPIASIKQERKFRGEIADANPIRVVEINSEPHKIARKDIKSITKKDIDKLYTTDTTLVATLNRIFEGKDDKYTVEKYLKENNLTTFKTDSGQPVHKVSLDAGKISNFFKKVISDSNYTMLGGLNYYCVEVYKDKKGNTKVWGIRYVDIRRKDKKLHVIKERMPEDYCSHVMYLFKNDYIRIYPGGEVRFEGYYKHVDNINKKRLVFSYGNYTNTRDIVIAQKDEVRKVYIDILGRLGGEVKCSAPLLSISEKE

SEQ ID NO: 21435 - protein, 1032 aa, unidentified
  REGION 1..1032: note = Cas Enzyme sequence
GACLINYCNKRGYQDFYEMDESAMTTKEKEEYRKERAGAEFIDSKMASGQYRTIAEMIKLDPYFCGTGNFRSYRNNAWREENLQINRRYLREECALLLERQSVFYPQLTEQNINSTLKIIFEQRFFEEGPGKKTDPYHRYTGFLDTYGKCRFYPEENRGCRFTVLADIFALVNVLSQYRYLDNEGAECFTGALGSDLIAFALANGNLAAKDLKAIVKKHGLTLNASLVEKSDGLSKCLKYIKVIKRIYDNAGLDWSAAISQDYRDMNSDLNRLGILLSENQTPRRRIDRLRKLGMFDEETITHLARQKFSGTSNVSNKYMIGIIDGFIQGDLYGKQQADIVKRLESERSASGAASYKLPSFEARKDEFEFYKNPVVCRSINETRKIINAVIGRYGSPYAINVEVASDLNRCFDDRQEIERSQKANAKNRENARKEIAKVLGTDDPESISPVQIDRWLLGEQQNWQCLYSGAVIDPKTCLTPNDRTYEIDHIVPYSLILDNTLHNKALVLASENQAKRQRTPLMYLSGDAAEKFIGRVRSLHYSKPSKISKKKYDYLMQETLDGEMMGEWKSRNINDTRYISKFLVRYLRENLLFNHEADEKYRQPEVYAIKGAVTSQMRRLWLNRDTWGTLDKGDLKEITLLDHAADAVVIACCIPAYVEIASVQNKLRNIWKRAGKKETEEYRAVMEDCIRTMQTYHGMSRSVVEPLLRRSDRTPCLIPNLREEVDIRFIEPYSYRAFGGLKPEDITEEEIMAIYRTKCRELYPDDISFADSLQPVIVSHKPNRKASGTITKDNALSVRVIDGEEWELSHVSILSLKKKQLGSVYSGDSEMLKLLEELLAPMKDDSTVRDALAAKGEKFFVTPGGRRINMVTLKVKPSGRKLVKHLSGGGRTVLNSTSYYCIELYYTTKGELNMRGITYGELVRARGKLWLSEQSVLPEDYDRHYMYLHKWDYIHVYDHKGELKFKGYYVSVNNINRNCLYYAHDNTSTVPKKGLTISKKDTVRKYDIDVLGRKGGELECGAPLSSITEKN

SEQ ID NO: 21436 - protein, 1451 aa, unidentified
  REGION 1..1451: note = Cas Enzyme sequence
MENAKKYFLGLDIGTESCGWAVTDLNYNLMKAKGKHLWGVRLFDEAVDASERRGKRASRRRLVRRKLKLMWLQEIFEKEIGKVDPHFLSRMKYSSLWEEDKEKMDIALNSKDSLFSDLKDGESFRDADYYEDYKTIYHLRRELLEKPAKDVRLLYLALHNIIKRRGHFLLEGEMNEDGKGESVLDLLNRLIEYIEENKEEMFAKDKTTFANIPPITKDQEDDIIKLIQAKDKNVTTKKKEFAACLNIVKNDAWKNISDALINGKIDVKKVFKIESKEEIKAKSFDDENYETAVLGELENILSEEQMTILAMIRKIYSSLQLQRLLNGKDYICEAMVDRFEQHQEQLQQFKNFIKTYIPSQYNKMFRDYLNDKKKGEHNEANYCFYVGLNKIAGKKKVLNLASGKPGESLQERFYKFVKKVLEEKVEVENYDIEKYEQQKQKFLDLIESNNFLPKLRTRENAVFPNQLYKKEVKKILETNKEKYSFLNQIDESGLSNIDKILKILEFRIPYYVGPLGGTGESKNSWSNSDKSFDIKPWNMEKMVDYNKAEDEFIKRMLNNCTYITAAKNETDGKVLPKNSLLYSKFRVLNELNNLKINAQPIKIVEKQAIFNGLFCNKKKVTTKELKNFLVNEGFRPHAEVESMVITGIDKEFANNYAPYIEFKNIFGEKFVEQNQSMIDKIISYITIISDKTRLVERIKREFGEKVSDEQLKKIKGLNYAGWGRLSELFLQNMVFENKKTKEKTTIINELWNTNRNLQEILFNSDYNVQDVLKDYQKQVEGDITYALVEESYCSPAVKRAVWQTLLIIKEIRDTLGAMPEKIFVEVTRKEGQKNRTKSRKNNLLALYQSKDFKSSTAHMAADVEELLQNLNNDDDLRLRSDKYYLYYMQLGKDVYTGETIPMDEFDNGLINYEIDHIIPQSFIKDDSLNNRVLTHKDNNQKKKNIFPCCDAFADEFTKAKWFAKVKVLWEVLLKTKLISQEKFDRLSREKPLSQEESGAFIARQLVETSQAATSVLDVLKNLYEDPRNLVYSKAHYVSEFRQIHDIVKARDVNDLHHAKDAYLNIVVGNILNSHFTSDPRRYPGSKNETRLLTEEERNERLQEKSDLITKILKNKAWSYLTGEVVWDRNRDISRIRKICNYNDVLISQKTEQNLNGAYYDETVYKKNGDGKLIPLKGDKNNPLSNVERYGGYNSMKGAYFMVMESEDKKGNKIKTIETLPTMIYQKYKNDADREQKYLNYIIEENKLKNAKLLTKLNYKSTLKIGKGMFLLTGKTGGMFILSNFNQWFVDNETQKYIKAIKKYIDLKTKNQVERLEEKDGKVVLSRPKTDDELFNKKKEIALTREENENLYKQIIEQLNKPFYENTTFVGTIQKSLIEKEEMFKSLSVMIQAEVLYNLVKKLHRGVATLDLSLLDLDKNMAKIRINKNITDKDIKLIITSPTGLYKRSIKL

SEQ ID NO: 21437 - protein, 1086 aa, unidentified
  REGION 1..1086: note = Cas Enzyme sequence
MEYKLGLNIGITSVGWGMIECSTNNIINSGVRLFPEANPENNQTRRMARGKRRIIRRKQHRLLRLKRLLVENNIINSLDCDFSAPAGQVFLCRKKGLTELLSDRELAIALHHLIKKRGAEDYDLTDTSNDDDGTKATLVKNEAKLGESKYVCEVQLDTLNANGKVLGKENIFKTKDLKKEALKILETQKELGNKKVTDDFIKNCIEILERKRTYFEGPGQESPFSWANEKEWIQGLMGRCTYFPEEIRMIKHSYSAELFNLLNDLNNLKIARETGDEKLSYEEKEGLLEIFKSQKTVNLKKIAKYLGVEPEAITGYRIDTAEKALFTPLETYINVNKVFKTDDRELIDSIAEICTYYQEASDRKSYLAELLKEYNLNNSTLEELAKNKFTGTHAFSKKLLNILIPEMLETTKNSMQVITELDLVPYKMNFKGQSKIDKKYIDEWIVNPVVKKAVGQCINIINEILRIYGTPKEIIIECCKEYSSKEEQKKIKSLQASREKENKKIKEILGSLELEKRYFPYIKFWKEQNEKCMLTGEHIPLDDLVKNISKYEIAHIIPMSISFDNSNNNKILVKRSANLLRGVKAPFGYFTKFNTERTFEEFEAQVKELKISKTKRELLLYKGNLSKNYDEFISRNLNDTRYIIKEVKNLLDRFFKDNDKKVKVRGINNSFVTYVRNLWDLPRLKSKSYSHYAEDSLILLVGHSILENLKWYKSYEEENGEKSFYYIRTGEILDDDNFKKIFNFSYRKKIVDYNEYKYSHYVDKKPNRQLFNETVYFLKPYTIKNKEVECAIITLKDIYAKDKFVLSNLFETETTENLFIYSSDVKTYKKFEKAYEDYKESAKAENVNPFYLYYQDNGYIKQGEKNNGTLVKTLKMLDKGINTYFDNSHKYKNPKGKVIFKKMATYRLDLYSNGEKYKFISVRYPMLRSLKDKYTIDENLYNSELERKKITEDYKFVCSLHDGDIFELVTPKISGIFKFRGINNDKQSKIAIDYVDKSNSLLIKALTELKAKLTKNMETKIANDLNELLGLNYTEEEAKEYVLKVSLSSNQKIITISDIKYFRKKSVDVLGNIYNSEEKFKKFLKK

SEQ ID NO: 21438 - protein, 1108 aa, unidentified
  REGION 1..1108: note = Cas Enzyme sequence
MGIKIGLDVGITSVGYAVLRTDEAGVPYKIETLNSVIFPAAENPQSGESLAAPRRGNRGSRRRTRRTKFRKYRTKRLFIRHGLLTSEEIENIFNQKLGHKTIYELRTEALDRKLTNEELFRILYFFAGHRGFKSNRKAEIVNADAETGMVLSAINEIKAALEEGTYRTLGEYMHAHPKYEEHKRNKDGKDRYLGTAQRDLIIDEIKQILNAQRGFGNGALTDTFEQEFIGKSEGETAGIFTAQRDFDEGPGKGSPYGGDQIEKMIGWCTFEKEEHRAAKGTYTFQYFELLSKLNNLKIQEFAGDDWKELNPDQRQLIIDKAFSKDKLQYAEIKKLLKLEPEAKFNLLSYGSKTEQDKTEKTNFVALRSYDKVRKALGKEVYEPMPNSLKDEIGTILTTYSSDKSRRRVFADRLSLTAEQVEALLPLTMTQYGHLSLKAMRNIIPYLEMGLTYDKAAESAGYDFKHNAIDRAFIHENVSNPVVKRAVSQCIKVVNQLTREYGKPDAINIEFSRELGKNFDERKKIEKNQKENMARNESIANELRENGIAVNGENITRLKLWREQGNMDPYTGQYIPYAEIFFGNYDVDHIIPYSISFDDSYGNKVLVSSAANREKGNRIPMEYLANDPIRIKNLENIASTIRNYNKREKLLKKKMSPEDVDGWKSRNINDTRYIARLLRNYFKQNIEFSEKENIKEKVAVNNGTVTARMRARWGLGPKHRNNDRHHAMDAVVVGCMTPTFVRRVTVYSKRQEVRFNKSLWNEGTLESDLAHMSLEKREEYEKMFSKAFPQPWEGFRDELNARLSDNPKELIKNIKNTLGTYTDAEIEKLKPMFVVRRPNKKITGPAHLDTIRSGKLLHEGKAISRVSISKLKLNKNGEIGTGNAEFYKSDDNGWMPAYTALKAELEKNGGSGEKAFPEGVFTYTQENGQMHTVRKVKVVQKSTLQAVLNNGKAMAGNGPSMIRIDVFRTSKKYVFVPVYVKDTVSRELPNKGCVAHKNYEDWYELSEEDEFMFSLYQNDVVRVEHKKGIPLTYYEGNVGQEKVTEFIGYYNSADIASGNIYILGNDNSFFARGVGIATLLNIEKMQVDYLGNLSKVKERSRQTFSNMKR

SEQ ID NO: 21439 - protein, 1147 aa, unidentified
  REGION 1..1147: note = Cas Enzyme sequence
MDKLYRIGLDIGIGSVGWAVLENDPITEEPNRILQVGVRTFSPNEVDKTGESTAKARRESRGSHRRNRRKNFRKHRIENLIDRTFGTKFQEELKEISNVDVYMLRSDALDRKLSEIELVKVIFNLLKRRGFKSNRKNQSQSKDEGKLKSSISENIKFLEDKGYRTWGEALYKDEKFKYIQDEKVFYNIRNHEGDYRNCVSRDMLKDELLLILNNQKEFNNKITTEFIDKVIEIFESQRNFDIGPGQPSPYSAKFEVGNCTFLKEEKRAPKASYTFELFTALSKVNSLKIDDEELSFEQKQVIIEYFKEKKEVSFAQIRKLLDIPENKLFNLCRYQTKSKKNNTDEADDLIKVSEKSILLSMARSYEIRQKLKLENSENNSDLIDEVALMLSLCKSDSTIEEYISKNDLLKNLSQEQIESISSLNFDKFGSLSIKAMKKVIPYLLQGKRYDEACKCAGFNHSNFEYEKYKYLKGEFIQERLQDVTSNVVKRAVNQTLRIVNEIIKKYGSPQFVTIELARELSKSKQDRNKLTAKQNDNFKNNEEVKKKLKELYNLDNPKGQDILKYRLYEEQSAKCMYSGKAFEVGRLFEPNYVQIDHIIPFSRSMNDSYNNKVLVLSCENQNKGNKTPFEYFGSDEKKWNDFVARVNLLRNKEKRQFLLKENFDEKVEKDFIDRNLVDTQYMARFLYNLFNDFLLTTPSRKYKRVIRCVKGAITNYLRKCWNIKKIREDGDTHHAVDATIIATVTDGQIQKITKFNKFKEKFKYDEKADKYINILTGEVLSESEKKEFEQININNIARILEYPYPEFIKELKLRTRTNYNTLSYTDEEKLELARIGYSNEEIEATKPLFVSRMKTVKNTGAIHEETIMSIREYDESKMLIKSVNLSKLKLCNKPEEIILKDDKYPECSIENYYRPKDDRLLYLKLKNYLKENEKIPDNMDFHKPKKDGTDGPLVKKVKVYEKASNCVITPRGGAANDKMYRVDVFEKNNKYYLCPVYKADVYMKKLPNRVIEIGKEWTEIDDSFMFLFSLYQNDVILLENKKVINLKKNFKNENSCKKDEISNNKFLLYYTSTGITGASISVVTHDNCYKIDSSGVKNLKSIEKYYVDIMGNVYKAPKEERKGFGGVTLTFLCQTKQEYLLKTINYI

SEQ ID NO: 21440 - protein, 1145 aa, unidentified
  REGION 1..1145: note = Cas Enzyme sequence
MDKLYRIGFDIGVGSVGYAVLENDPVTEDPIKILKLGVRTFSPNEVKDTGASTATARREKRGVRRRARRKKLRMQKLKVLISSQLQIDVNQMQNNLINKDVYELRAKALDEKISNDELAKIILNIAKYRGFKSNRKSSKASGDDGKLLKAIEKNNKFIKDNGYRTWGEAVYKDKNFKITVAGNDFYNVRNHGGDYKNCVQRSDLEEELRLILKKQQEFNNLITDDFIELIILVFSRQRNFDIGPGKQSPYFKENGFADDVGYCTFYEEEQRAPKASFTFEYFNALSKINSLKIGSEFLSLEQKQKLYEEFKIKKELSFAQIRKMFNFDDEKSFNLCRYKTLSKKEREGLNQEEIVNKNKELFFDSEKKQKLASMEHSYDIKKALGYESSYDNRELIDEIAYMLSVYKSEERIDAYLKSNDKGLFTLLNEEQVSKIKELKFDKFASLSLKAMNEIIPYLLEGLRYDLACEKAGFNHSSFKFEKLKYLKGDKIKAEFKDLTSNVVKRAANQTLRILNEIIKEYGSPQFVSIELARELSQLPSERRKSSDLMIANQDKNEQLKERLRSEFNLINPTGRDILTLKLYEEQNSKSMYTGTKIEADRLFEPNYVQIDHIIPYSRCFDDSYNNKVLVIADENQNKGDRTPYEYFGNDEQRWNEFIVRANLLHNAKKTRNLLKKNFSQEESNEFINRNLNDTQYVSKFLLNLFQKYLMLTPSKKFKEIKQIKCVSGSVTSYLRKCWGIKKIREDGDIHHCVDAAIIASVSEGTVQKITTFNKFKEKFFFDKKNERFISKKTGEVMTAEEKENYEKEGIELLRGTLPKLYDGFTQELKIRSKVNYFDFNFSDEDKNALVKLGYSQEEVESLKPVFISRMKNVKTTGAIHKDTMMSTREFDETKCLIKTVTLDNLKIENKVEEEPLKDDKYPEKRIANYYNPKTDRLLYLKLKEMLVEKGKILDKVYKPTKSGQQGPLVRTVKLYEKSSNPVITKHGAGANDKMYRVDVYEKANKFYLCPVYMSDVYNKTLPNKVIIRDKPWAEIDDSYQFKFSLYQNDLIKVTSNKEIVMKKDKNHQNKLSLKPDEIKNNEFFVYYNSTNISTASIEVISYDNCYYKEGLGVTTLKNIEKYYVDIMGKIYKSPKEERKNFNGLY

SEQ ID NO: 21441 - protein, 1353 aa, unidentified
  REGION 1..1353: note = Cas Enzyme sequence
MQTKKVDEYYVGFDIGTNSVGYAVTDKNYNLIKHGGEPMWGSHVFEAALTAQERRAFRTARRRNDRKKQRIVLVSEIFAPEIAKVDPRFFIRRRESALFRDDVNINDRYVVFNDSAFTDKDYYDMYPTIHHLIYDLMSNKEKHDIRLVYMACAYLVAHRGHFLSEVSKDNIDSVLDFDAVYNNFLSIMENLAEIPWECDISKFKEILKKKQTVTNKERDFLQLLNEGKKFKTSEEDDVSREGLVKLLSGGTYELGKLFPKLTFEEKVSVSFNMTEEDFAMVLQQLGDEGDIISSLRNVYDWATLSDVLNGKNSVSEGKITVYEQHKKDLSFLKYFVKKYIPNRYYEVFRDGNIVGNYVSYSYNLKNVQNVSKFKGAKKDAFCDYIKKVVKDIKVDDEDKVEYEDMMFRLDTYSFMPKQVENDNRVIPYQLHYYELKKILDNASSYLEFLDEKDMDGYTSREKLLSIMEFRIPYYVGPLRTDNGQHGWMKRKTEGRIYPWNFEDKVDLDASEQEFINRMTNSCTYLPGETVVPKYSLLYCKFNVLNEINNIKINDCSIPIEHKQEIYKLFERYRKVTPKKIKDYLVSNNLLHPEDVISGIDVTIKSSLKSYHDFKKMLESGVLKEKQVEAIIERLTYSEDKGRIIRWLHIEFPDLSDDDVKYISKLKYSDFGRLSRKLLVGIRGCNKDTGEVDSIMGMLWSTNDNMMKLLSNSYTFVEEIEAIKNEYYVEHPANLDSMLDEMYVSNAVRRPIHRTLDILSDIRKVCGKNPSKIFVEMARGGGEKGVRTKSRRDQISELYKNMDKAEVRELSEQLEGKTDNELQSEVLFLYFMQLGKCAYTQKTIDIDKLKTNIYNVDHIYPQSYVKDDSITNKVLVISEENGQKGDKYPISKDIREKMQPFWYILLSNKLISEEKYRRLTRCTSFTEEELTGFINRQLVETHQSTKAVTTVFRTLFPDVEIVYSKAGLVSDFRKEFDMLKTRSVNDLHHAKDAYLNIVVGNVYHCKFTKNFYVTQKYSLKTKTLFTHNVKSGDVMIWDGQESIGEIRKVLTKNNIHYTKYSFMRKGKLFAQNPIKAKEGLIPRKEGLSSEKYGGYSDTTATAFLLVKFRDRKGTDAMIIPIDLMYSNKVFSDKKYAIAYAKDRIKKIWGMSEGQITDVTLPLGLRMLKINTMLSFDGFKSCITGKASLGKQLGLTSMMPLVIGNEWENYVKKIDRFIEKKQNNKKLLLNTIYDNITKEKNEQLYQILVNKVVNGIYNSAFKSQIKILKNGHEIFNKLELEEQVMALANIILLLKSGRAGNCDMTLLGGSKKAGTYVCSTKISNLQKNYKEVWLIDSSASGIYESKVCNLLEVIE

SEQ ID NO: 21442 - protein, 1130 aa, unidentified
  REGION 1..1130: note = Cas Enzyme sequence
MKAYNKTNFRGDNMANYVLGLDIGIGSVGVGLIEKETGEIIHKSVNLFPSGDAASNVERRGFRGAKRIKRRKTHRIKRTEDLFDKYDIDVDLHSVPINLNPYEIRVRGLNEKLSLTELFVALKNMVKHRGISYLDDAIDEDNAATSGSDYKKAIEINARELKNKTPGEIQLERLEKYGQVRGDFSVRLEDGTERRLINVFSTSEYRKEAESILKTQQQFYPELTDEFIADYLEILTKKRKYYHGPGNEKSRTDYGRYRTNGETLDNIFSILIGKCTYYPDEFRAAKASYSAQEFNLLNDLNNLTVPTETKKLSVDQKEEIIQFVKDAKTCGAKNILSKIAKMIGCKADDITGVREDKDHKAEMHSFEVYRKMKQLETIDVADLTREQLDQLGRILTLNTEREGILESIHEYLPDTFTNEQIDELIQFRKKNTTLLNKGWHSFSLKLLNELIPELYHTSEEQMTILTRLGKQKPKNESAKTKYIDGELITEEIYNPVVAKAVRQTIKIVNKILQEYGEIDTIVVEMARDKNDEDQKKRIQEGQKKNKNEKDAAILAAAMDYSNSKELPSTVFHGHKDLALKIRLWYQQEKRCAYSGREIPIAQLINNQGGYEIDHILPLSLTFDDGLDNKVLVEHIANQEKGQRTPFQAMPLLTNSWSWGEFKYYVINNSRFSKKKREYLLFEEDINKFEVRSKFIARNLVDTRYASRVVLNALQDFFKQRGANTKIAVVRGQFTAQLRRKWGIEKTRDTYHHHAIDALVIAASSQLNLWRKTKNTLIRYSENELLDTETGELISDDQYKEAVFKSPYDNFTKVLKSKELEDSILFAYQQDSKVNRKISDATIYTTRKRGDEEITVAKIKDIYSIEGYDEFLKVYQKDPSKFLMAQHDPVTFEKVIKVIIETYPDKEINENGKEVKVSPFKKYYDEHGFVRKYSRKGNGPVIKQLKYLDKAVGKHIDITPENSSRKVALKSLKPWRADVYFNPETKRYEIMGLKYSDLRFQKGGDYGITKEKYDVIKEEEGISEKSEFKFSLYKNDLLIVKDTVENKQAIFRFLSRTGSFKNYVELKPYDKAKFEPKEELFKFGKVAPSGQFVKTLSMDNISLYKVETNVLGRKFIVKQEGEKPQLTFKNF

SEQ ID NO: 21443 - protein, 1130 aa, unidentified
  REGION 1..1130: note = Cas Enzyme sequence
MKAYNKTNFRGDNMANYVLGLDIGIGSVGVGLIEKETGEIIHKSVNLFPSGDAASNVERRGFRGAKRIKRRKTHRIKRTEDLFEKYDIDVDLLSVPINLNPYEIRVRGLNEKLSLTELFVALKNMVKHRGISYLDDAIDEDNAATSGSDYKKAIEINARELKNKTPGEIQLERLEKYGQVRGDFSVKLEDGTERRLINVFSTSEYRKEAERILKTQQQFYPELTDEFISDYLEILTKKRKYYHGPGNEKSRTDYGRYRTNGETLDNIFSILIGKCTYYPDEFRAAKASYSAQEFNLLNDLNNLTVPTETKKLSLEQKEEIIQFVKDAKTCGAKNILSKIAKMIGCKADDITGVREDKDHKAEMHSFEAYRKMKQLETIDVASLTREQLDQLGRILTLNTEREGILESIHEYLPDTFTNEQIDELIQFRKKNTTLLNKGWHSFSLKLLNELIPELYHTSEEQMTILTRLGKQKPKNESAKTKYIDGELITEEIYNPVVAKAVRQTIKIVNKILQEHGEIDTIVVEMARDKNDEDQKKRIQEGQKKNKNEKDAAILAAAMDYSNSKELPSTVFHGHKDLALKIRLWYQQEKRCAYSGREIPIAQLINNQGGYEIDHILPLSLTFDDGLDNKVLVEHIANQEKGQRTPFQAMPLLTNSWSWGEFKHYVINNSRFSKKKREYLLFEEDINKFEVRSKFIARNLVDTRYASRIVLNALQDFFKQRGANTKIAVVRGQFTAQLRRKWGIEKTRDTYHHHAIDALVIAASSQLKLWRKTKNTLIHYSENELLDTETGELISDDQYKENVFQAPYDNFTKVLKSKELEDSILFAYQQDSKVNRKISDATIYTTRKRGDEEITVAKIKDIYSIEGYDEFLKVYQKDPSKFLMAQHDPVTFEKVIKVIVETYPDKEINENGKEVKVSPFKKYYDEHGFVRKYSRKGNGPVIKQLKYLDKAVGKHIDITPENSSRTVALKSLKPWRSDVYFNPETKRYEIMGLKYSDLRFQKGGDYGITKEKYDVIKEREKISENSVFKFTLYKNNLVLVKDTETNEQQIFRFGSRNETNFNYVELKPYDKAKFDSKEKLVKFGTVASSGQFIKSINIDNLSLYKIETNILGKKYIIKNEGEDPQLTFKNF

SEQ ID NO: 21444 - protein, 1130 aa, unidentified
  REGION 1..1130: note = Cas Enzyme sequence
MKAYNKINFRGDYMANYVLGLDIGIGSVGVGLIEKETGEIIHKSVNLFPSGDAASNVERRGFRGAKRIKRRKTHRIKRTEDLFDKYDIDVDLHSVPINLNPYEIRVRGLNEKLSLTELFVALKNMVKHRGISYLDDAIDEDNVATSGSDYKKAIEINARELKNKTPGEIQLERLEKYGQVRGDFSVKLEDGTERRLINVFSTSEYRKEAERILKTQQQFYPELTDEFIADYLEILTKKRKYYHGPGNEKSRTDYGRYRTNGETLDNIFSILIGKCTYYPDEFRAAKASYSAQEFNLLNDLNNLTVPTETKKLSLEQKEEIIQFVKDAKTCGAKNILSKIAKMIGCKADDITGVREDKDHKAEMHSFEVYRKMKQLETIDVADLTREQLDQLGRILTLNTEREGILESIHEYLPDTFTNEQIDELIQFRKKNTTLLNKGWHSFSLKLLNELIPELYHTSEEQMTILTRLGKQKPKNETAKTKYIDGELITEEIYNPVVAKAVRQTIKIVNKILQEHGEIDTIVVEMARDKNDEDQKKRIQEGQKKNKNEKDAAILAAALDYSNSKVLPSTVFHGHKDLALKIRLWYQQEKRCAYSGREIPIDQLINNQGGYEIDHILPLSLTFDDGLDNKVLVEHIANQEKGQRTPFQAMPLLTNSWSWGEFKHYVINNSRFSKKKREYLLFEEDINKFEVRSKFIARNLVDTRYASRVVLNALQDFFKQRGANTKIAVVRGQFTAQLRRKWGIEKTRDTYHHHAIDALVIAASSQLKLWRKTKNTLIRYSENELLDTETGELISDDQYKENVFQSPYDNFTKVLKSKELEDSILFAYQQDSKVNRKISDATIYTTRKRGDEEITVAKIKDIYSIEGYDEFLKVYQKDPSKFLMAQHDPVTFEKVIKVIVETYPDKEINENGKEVKVSPFKKYYDEHGHVRKYSRKGNGPVIKQLKYLDKAVGKHIDITPENSSRKVALKSLKPWRADVYFNPETKRYEIMGLKYSDLRFQKGGNYGITKEEYDVIKEEEGISEKSEFKFSLYKNDLLIVKDTVENKQAIFRFLSRTGSFKNYVELKPYDKAKFEPKEELFKFGKVAPSGQFVKTLSMDNISLYKVETNVLGRKFIVKQEGEKPQLTFKNF

SEQ ID NO: 21445 - protein, 1130 aa, unidentified
  REGION 1..1130: note = Cas Enzyme sequence
MKAYNKTNFWGDNMANYVLGLDIGIGSVGVGLIEKETGEIIHKSVNIFPSGDAASNVERRGFRGAKRIKRRKTHRIKRTEDLFDKYDIDVALHSVPINLNPYEIRVRGLNEKLSLTELFVALKNMVKHRGISYLDDAIDEDNVATSGSDYKKAIEINARELKNKTPGEIQLERLEKYGQVRGDFSVKLEDGTERRLINVFSTSEYRKEAERVLKTQQQFYPELTDEFIADYLEILTKKRKYYHGPGNEKSRTDYGRYRTNGETLDNIFSILIGKCTYYPDEFRAAKASYSAQEFNLLNDLNNLTVPTETKKLSLEQKEAIIQFVKDAKTCGAKNILSKIAKMIGCKADDITGVREDKDHKAEMHSFEAYRKMKQLETIDVTALTREQLDQLGRILTLNTEREGILESIHEYLPDTFTNEQIDELIQFRKKNTTLLNKGWHSFSLKLLNELIPELYHTSEEQMTILTRLGKQKPKNESAKTKYIDGELITEEIYNPVVAKAVRQTIKIVNTILQEHGEIDTIVVEMARDKNDEDQKKRIQEGQKKNKNEKDAAILAAAMDYSNSKELPSTVFHGHKDLALKIRLWYQQEKRCAYSGREIPIAKLINNQGQYEIDHILPLSLTFDDGLDNKVLVEHIANQEKGQRTPFQAMPLLTNSWSWGEFKHYVINNSRFSKKKREYLLFEEDINKFEVRSKFIARNLVDTRYASRVVLNALQDFFKQRGANTKVAVVRGQFTAQLRRKWGIEKTRDTYHHHAIDALVIAASSQLKLWEKTKNTLIRYSENELLDTETGELISDDQYKEAVFKSPYDNFTKVLKSKELEDSILFAYQQDSKVNRKISDATIYTTRKRGDEEITVAKIKDIYSIEGYDEFLKVYQKDPSKFLMLQHDPITFEKVIKVIVETYPDKEINENGKEVKVSPFKKYYDEHGYVRKYSRKGNGPIIKQLKYLDKAVGKHIDITPKNSSRKVALKSLKPWRADVYFNPETKRYEIMGLKYSDLKFQKGGNYGITKEEYDVIKKIEKISENSVFKFTLYKNNLILVKDTETNEQQIFRFGSRNETNFNYVELKPYDKAKFDSKEKLVKFGTVASSGQFIKSINIDNLSLYKIETNILGKKYIIKKEGEDPQLTFKNF

SEQ ID NO: 21446 - protein, 1367 aa, unidentified
  REGION 1..1367: note = Cas Enzyme sequence
MKKQQFSDYYLGFDIGTNSVGWCVTDLNYNVLRFNKKDMWGSRLFDEAKTAAERRVQRNSRRRLKRRKWRLNLLEEIFSDEILKIDSNFFRRLKESSLWLEDKSSKEKFTLFNDDNYKDYDFYKQYPTIFHLRNELIKNPEKKDIRLVYLALHSIFKSRGHFLFEGQNLKDIKNFETLYNNLMAFLEDNDIYKNIDSNYIGNLENIICDSKKGLKDKEKEFKEIFNSDKQLVAFFKLSVGSSVSLNDLFDTDEYKKGEVEKEKISFREQIYEDDKPIYHSILGEKIEFLDIAKSFYDFMVLNNILADSQYISEAKVKLYDEHKRDLKNLKYIIRKYNKENYDKLFKDKNESNYSAYIGLNKEKAKKEVIEKSRLKIDDFAKIIKGYLPKAEKIDEKDRSIFNEILNKIELKTILPKQRISDNGTLPYQIHEAELEKILENQAKYYDFLNHEENGVSTKDKLLMTFKFRIPYYVGPLNSYHKNKGGNSWIVRKEEGKILPWNFEQKVDIEKSAEEFIKRMTNKCTYLNGEDVIPKDSFLYSEYIILNELNKVQVNDEFLNKEIKSKIIEDLFKKSKKISEKNFKEYLLVNQIADKTVELKGVKDAFNSNYVSYIKFKDIFGDKLNLDIYKEISEKSILWKCLYGDDKKIFEKKIKSEYGDILTKDEIKKINSFKFNTWGRLSEKLLTGIEFIDLETGECYSSVMDALRRTNYNLMELLSSKFTLQENIDSENKEVSEFSYRDLVEESYVSPSLKRAILQTLKIYEEIRKITGRIPKKVFIEMARGGDETMKNKKIPARQEQLKKLYDSCGKDISNFSIDIKEMKNSLNSYDNNSLRQKKLYLYYLQFGKCMYTGKEIDLNRLLQNNDTYDIDHIYPRSKVIKDDSFDNLVLVLKNENAEKSNEYPLKKEIQEKMKSFWKFLKEKNFISDEKYKRLIGTDELELRGFMARQLVNVRQTTKEVGKILQQIEPEIKIVYSKAEIASSFRETFDFIKVRELNDTHHAKDAYLNIVAGNVYNTKFTEKPYRYLQEIKENYDVKKIYNYDIKNAWDKEKSLEIVKKNMEKNTVNITRFIKEEKGQLFDLNPIKKGETSNEIIAIKPKFYEGSAEKLNEKYGYYKSLNPAYFIYVEHKEKNKITRSFERVNLVDVNNIKDEKSLIKYLIENKGLIEPKVIKKIYKNQCILIDNYPYLIIGMESTKKMEFKNNKALYLDEKYEKILKNVIKFLEDNQGKSEENYKFIYLKKRDRNEKNETIDSAKERYNIEFNKMYEKFLEKLNSKDYKNYMNNKKYQELLDVKEDFIKLNLLDKALILRSFLKIFTKETIADFSKLNLSKTLGRLNGKSSNTLSKNILYLIEESVTGLFVKKIKL

SEQ ID NO: 21447 - protein, 1367 aa, unidentified
  REGION 1..1367: note = Cas Enzyme sequence
MKKQQFSDYYLGFDIGTNSVGWCVTDLNYNVLRFNKKDMWGSRLFDEAKTAAERRVQRNSRRRLKRRKWRLNLLEEIFSDEILKIDSNFFRRLKESSLWLEDKSSKEKFTLFNDDNYKDYDFYKQYPTIFHLRNELIKNPEKKDIRLVYLALHSIFKSRGHFLFEGQNLKDIKNFETLYNNLMAFLEDNDIYKNIDSSYIGNLENIICDSKKGLKDKEKEFKEIFNSDKQLVAFFKLSVGSSVSLNDLFDTDEYKKGEVEKEKISFREQIYEDDKTIYYSILGEKIEFLDIAKSFYDFMVLNNILADSQYISEAKVKLYDEHKRDLKNLKYIIRKYNKENYDKLFKDKNESNYSAYIGLNKEKGKKEVIEKSRLKIDDFTKIIKGYLPKAEKIDEKDRSIFNEILDKIELKTILPKQRISDNGTLPYQIHEAELEKILENQAKYYDFLNHEENGVSTKDKLLMTFKFRIPYYVGPLNSYHKNKGGNSWIVRKEEGKILPWNFEQKVDIEKSAEEFIKRMTNKCTYLNGEDVIPKDSFLYSEYIILNELNKIQVNDEFLNKEIKKKIIEDLFKKSKKISEKNFKEYLLVNQIANKTVELKGIKDAFNSNYVSYIKFKDIFEDKLNLDVYKEISEKSILWKCLYGDDKKIFEKKIKSEYGDILTKDEIKKINSFKFNTWGRLSEKLLTGIEFIDLETGECYSSVMDALRRTNYNLMELLSSKFTLQENIDNENKEVSEFSYRDLVEESYVSPSLKRAILQTLKIYEEIRKITGRIPKKVFIEMARGGDETMKNKKIPARQEQLKKLYDSCGKDISNFSIDIKEMKNSLNSYDNNSLRQKKLYLYYLQFGKCMYTGKEIDLNRLLQNNDTYDIDHIYPRSKVIKDDSFDNLVLVLKNENAEKSNEYPLKKEIQEKMKSFWKFLKEKNFISDEKYKRLTGKDEFELRGFMARQLVNVRQTTKEVGKILQQIEPEIKIVYSKAEIASSFREMFDFIKVRELNDTHHAKDAYLNIVAGNVYNTKFTEKPYRYLQEIKENYDVKKIYNYDIKNAWDKEKSLEIVKKNMEKNTVNITRFIKEEKGQLFDLNPIRKGETSNEIIAIKPKFYEGSAEKLNEKYGYYNSLNPAYFIYVEHKEKNKITRSFERVNLVDVNNTKNKEGLIKYLIENKGLIEPKVIKKIYKNQCILINNYPYLINGMDSTKKLEFKNNKALYLDKKYEKILKNVIKFLEDNQGKSEESYKFIYLKKKDRNEKNETIDSVKERYNIEFNEMYDNFLEKLDSKDYKNYMNNKKYQELLDVKEKFIKLNLFDKAFTLKSFLDLFNRKTIADFSKVGLTKYLGKMHGISSNVLSKNELYLIEESVTGLFVKKIKL

SEQ ID NO: 21448 - protein, 1314 aa, unidentified
  REGION 1..1314: note = Cas Enzyme sequence
RRVQRNSRRRLKRRKWRLNLLEEIFSDEILKIDSNFFRRLKESSLWLEDKSSKEKFTLFNDDNYKDYDFYKQYPTIFHLRNELLKNQEKKDIRLVYLALHSIFKSRGHFLFEGQNLKDIKNFETLYNNLIAFLEDNDIYKNIDSSYIGNLENIICDSKKGLKDKEKEFKEIFNSDKQLVAFFKLSVGSSVSLNDLFDTDEYKKGEVEKEKISFREQIYEDDKPIYYSILGEKIEFLDIAKSFYDFMVLNNILADSQYISEAKVKLYDEHKRDLKNLKYIIRKYNKENYDKLFKDKNESNYSAYIGLNKEKGKKEVIEKSRLKIDDFAKIIKGYLPKAEKIDEKDRSIFNEILDKIELKTILPKQRISDNGTLPYQIHEAELEKILENQAKYYDFLNHEENGVSTKDKLLMTFKFRIPYYVGPLNSYHKNKGGNSWIVRKEEGKILPWNFEQKVDIEKSAEEFIKRMTNKCTYLNGEDVIPKDSFLYSEYIILNELNKVQVNDEFLNKEIKKKIIEDLFKKSKKIIEKNFREYLLVNQIANKTVELKGIKDAFNSNYVSYIKFKDIFGDKLNLDIYKEISEKSILWKCLYGDDKKIFEKKIKSEYGDILTKDEIKKINSFKFNTWGRLSEKLLTGIEFIDLETGECYSSVMDALRRTNYNLMELLSSKFTLQENIDNENKEVSEFSYRDLVEESYVSPSLKRAILQTLKIYEEIRKITGRIPKKVFIEMARGGDETMKNKKIPARQEQLKKLYDSCGKDISNFSIDIKEMKNSLNSYDNNSLRQKKLYLYYLQFGKCMYTGKEIDLNRLLQNNDTYDIDHIYPRSKVIKDDSFDNLVLVLKNENAEKSNEYPLKKEIQEKMKSFWKFLKEKNFISDEKYKRLTGKDEFELRGFMARQLVNVRQTTKEVGKILQQIEPEIKIVYSKAEIASSFREMFDFIKVRELNDTHHAKDAYLNIVAGNVYNTKFTEKPYRYLQEINENYDVKKIYNYDIKNAWDKEKSLEIVKKNMEKNTVNITRFIKEEKGQLFDLNPIRKGETSNEIIAIKPKFYEGSAENLNEKYGYYNSLNPAYFIYVEHKEKNKITRSFERVNLVDVNNTKNKEGLIKYLIENKGLVEPKIIKKVYKNQCILIDGYPYLMNGMDSTKKLEFKNNKVLYLDKKDEKILKNVIKFLEDNQGKSGENYKFIYLKKRDRNEKNETIDSAKERYNIEFNKMYDKFLEKLDSKDYKNYMNNKKYQELSNVKEKFIKLNLFDKALILKSFLKIFTKETIADFSKLNLSKTLGRLNGKSSNVLSKNELHLLEESVTGLFVKKIKL

SEQ ID NO: 21449 - protein, 1373 aa, unidentified
  REGION 1..1373: note = Cas Enzyme sequence
MEKQEYYLGLDMGISSVGWAVTNTKYEILRKKGKDMWGIREFEEADSSAERRTHRMNRRRRQHQVARMGLLKEYFSDAIEKVDPNFFIRMENSKYFSEDKDERLSSKNGIFDDADYKDVDYYTEYPTIFHLRKTLLDIEDTGKEYDIRLVYLALVNMFKHRGHFLLNTEGDALSSEQVGTTYLELLEVLENNYEIGLKSRDIKDVIDIISNRDNGRKKKHEQILELFEVKKSDKRVKELLKCLCGLSVNAKLIFDENPEEKVDLCFHDFSYTDKIPDLMEQLSEEEYLVVEQLKSIYDYAILAGTLKGYDYLSCARVELYEKHREDLKLLKALYRRYKTKEEYNKMFNGFDSNSEKNGKKEVSYAAYVNSLNSSDSCVESKKYRRNMNGRKTENLYATIKKAFKDNIDDKDVQSMMESIDKEQFLPKQLTGANGVIPNQVHKKEMERILKNAQNYLPFLKEKDESGLTVSERILRLFTFQIPYYVGPLGENSKTGWIVRREEGRVLPWNIDEKIDMSATSEAFIGNLIRRCTYLSDEKVMPKASLSYERYCVLNEINNICIDGERLDTELKQKIYTDCFMKGKRVTRKQLCNYLVAQGCIKSDEQVTGIDININSSLSSYGKMFAIFGERLKEDAIRKVAEEIIYWGTIFSDSKKMFRKHLTKYVEQDILSESQVKRILGYKFKDWGRFSKALLTLQGIDKSTGELLSLENAMWEYSLNFMELINSEDFTFKDELANKRTTSIKSLSEFTYEDLEDTYFSAPVKRMIWQTILVVREIEQVMGCAPKRIFVEMARSEEEKGDKGRKDSRGTQLLELYKNIKNTDDHDWKKEISEANASGKLRSKKLYLYYVQMGRDLYTGEEINIDMLYDDSMYDIDHIYPRHYVKDDSIINNLVLVNRRANQDIKKDLYPIPDQIVSNPKVQELWKMLHRQNLITDEKYKRLMSRSPFTEKQLGDFIARQLVETRQATKGIAELLGQLFKDTEIVYAKATNVSDFRRDNGFFKSRLVNDFHHAQDAYLNIVVGNVYYTKFTKNPWNFIKKDLNKDRDKNRYNLAKMFEWDVVRGEDVAWIADKNDNQGTITTVRKMMRKNTPLMTRMSFEQHGGIANATLYSARKAKVENYIPLKTSDTRLGDVTKYGGFTSATISYYFIVSHKEGKKENTTIEGLPLYCKDKVESEENGLLRYCEEVLRYEDVKILFNRLKIQSLLEINGYQVHLSGKTGNQLILRNAMNLCLPEKWTTYIKKLEKLVIGKIKEQTITAESNIELYDLLTDKHLNAVYAKRPNAYGQKLEDDRSNFINLKLENQCEAILQILQLTKIGNNETNLKLIGESEHSGKMLISKNLKATDKPAIICQSVTGLYERKIYIFGDRLDK

SEQ ID NO: 21450 - protein, 1326 aa, unidentified
  REGION 1..1326: note = Cas Enzyme sequence
MNLLIKLIYYFVIYIKRRTVMEKQEYYLGLDMGISSVGWAVTNTKYEILRKKGKDMWGIREFEEADSSAERRTHRVNRRRRQRQVARMGLLKEYFSDAIEKVDPNFFIRMENSKYFSEDKDERLSSKNGIFDDADYKDVDYYTEYPTIFHLRKTLLDIEDTGKEYDVRLVYLALVNMFKHRGHFLLNTEGDALSSEQVGTTYLELLEVLENNYEIGLESRDIKDVIDIISNRDNGRKKKHEQILELFEVKKSDKRAKELLKCLSGLSVNAKLIFDENPEEKVDLCFHDFSYTDKIPDLMEQLSEEEYLVVEQLKSIYDYAILAGTLKGYDYLSCARVELYEKHCEDLKFLKLLYRRYKNKEEYRDMFKSDKEGTYSAYVNSFNSSDSSVKIKKYRRNMKGRTIENLYSTIKKAFKDNIDDKDVQSMMESIDKEQFLPKQLTGANGVIPNQVHKKEMERILKNAQNYLPFLKEKDESGLTVSERILRLFTFQIPYYVGPLGENSKTGWIVRREEGRVLPWNIDEKIDMSATSEAFIGNLIRRCTYLSDEKVMPKASLSYERYCVLNEINNICIDGERLDTELKQKIYTDCFMKGKRVTRKQLCNYLVAQGCIKSDEQVTGIDININSSLSSYGKMFAIFGERLKEDAIRKVAEEIIYWGTIFSDSKKMFRKHLTKYVEQDILSESQVKRILGYKFKDWGRFSKALLTLQGIDKSTGELLSLENAMWEYSLNFMELINSEDFTFKDELANKRTTSIKSLSEFTYEDLEDTYFSAPVKRMIWQTILVVREIEQVMGCAPKRIFVEMARSEEEKGDKGRKDSRGTQLLELYKNIKNTDDHDWKKEISEANASGKLRSKKLYLYYVQMGRDLYTGEEMNIDMLYDDSMYDIDHIYPRHYVKDDSIINNLVLVNRRANQDIKKDLYPIPDQIVSNPKVQELWKMLHRQNLITDEKYKRLMSRSPFTEKQLGDFIARQLVETRQGTKGIAELLGQLFKDTEIVYAKATNVSDFRRDNGFFKSRLVNDFHHAQDAYLNIVVGNVYYTKFTKNPWNFIKKDLNKDRDKNRYNLAKMFEWDVVRGEDVAWIADKNDNQGTITTVRKMMRKNTPLMTRMSFEQHGGIANATLYSARKAKVENYIPLKTSDTRLGDVTKYGGFTSATISYYFIVSHKEGKKENTTIEGLPLYCKDKVESEENGLLRYCEEVLRYEYVKILFNKLKIQSLLEINGYQVHLSGKTGNQLILRNAMNLCLPEKWTTYIKKLEKLVIGKIKEQTITAESNIELYDLLTDKHLNAVYAKRPNAYGQKLEDDRSNFINLKLENQCEAILQIRRI

SEQ ID NO: 21451 - protein, 1364 aa, unidentified
  REGION 1..1364: note = Cas Enzyme sequence
MEKQEYYLGLDMGISSVGWAVTNTKYEILRKKGKDMWGIREFEEADSSAERRTHRVNRRRRQRQVARMGLLKEYFSDAIEKVDPNFFIRMENSKYFSEDKDERLSSKNGIFDDADYKDVDYYTEYPTIFHLRKTLLDIEDTGKEYDVRLVYLALVNMFKHRGHFLLNTEGDALSSEQVGTTYLELLEVLENNYEIGLESRDIKDVIDIISNRDNGRKKKHEQILELFEVKKSDKRAKELLKCLSGLSVNAKLIFDENPEEKVDLCFHDFSYTDKIPDLMEQLSEEEYLVVEQLKSIYDYAILAGTLKGYDYLSCARVELYEKHCEDLKFLKLLYRRYKNKEEYRDMFKSDKEGTYSAYVNSFNSSDSSVKIKKYRRNMKGRTIENLYSTIKKAFKDNIDDKDVQSMMESIDKEQFLPKQLTGANGVIPNQVHKKEMERILKNAQNYLPFLKEKDESGLTVSERILRLFTFQIPYYVGPLGENSKTGWIVRREEGRVLPWNIDEKIDMSATSEAFIGNLIRRCTYLSDEKVMPKASLSYERYCVLNEINNICIDGERLDTELKQKIYTDCFMKGKRVTRKQLCNYLVAQGCIKSDEQVTGIDININSSLSSYGKMFAIFGERLKEDAIRKVAEEIIYWGTIFSDSKKMFRKHLTKYVEQDILSESQVKRILGYKFKDWGRFSKALLTLQGIDKSTGELLSLENAMWEYSLNFMELINSEDFTFKDELANKRTTSIKSLSEFTYEDLEDTYFSAPVKRMIWQTILVVREIEQVMGCAPKRIFVEMARSEEEKGDKGRKDSRGTQLLELYKNIKNTDDHDWKKEISEANASGKLRSKKLYLYYVQMGRDLYTGEEMNIDMLYDDSMYDIDHIYPRHYVKDDSIINNLVLVNRRANQDIKKDLYPIPDQIVSNPKVQELWKMLHRQNLITDEKYKRLMSRSPFTEKQLGDFIARQLLETRQGTKGIAELLGQLFKDTEIVYAKATNVSDFRRDNGFFKSRLVNDFHHAQDAYLNIVVGNVYYTKFTKNPWNFIKKDLNKDRDKNRYNLAKMFEWDVVRGEDVAWIADKNDNQGTITTVRKMMRKNTPLMTRMSFEQHGGIANATLYSARKAKVENYIPLKTSDTRLGDVTKYGGFTSATISYYFIVSHKEGKKENTTIEGLPLYCKDKVESEENGLLRYCEEVLRYEYVKILFNKLKIQSLLEINGYQVHLSGKTGNQLILRNAMNLCLPEKWTTYIKKLEKLVIGKIKEQTITAESNIELYDLLTDKHLNAVYAKRPNAYGQKLEDDRSNFINLKLENQCEAILQILQLTKIGNNETNLKLIGESEHSGKMLISKNLKATDKPAIICQSVTGLYERKIYIFGDRLDK

SEQ ID NO: 21452 - protein, 1060 aa, unidentified
  REGION 1..1060: note = Cas Enzyme sequence
MNLKLGLDIGVASVGWGIIDENYTVIDSGVRLFTESSADSNAIRRSMRSSRRRLRRLQHRLHRLEKILCRALEIEKPSFAGNVYEIRCRGLQEKLTKEELFVAIMHLGKRRGTHFLTAEDFIEPDQGGKSTEEILREQEKKLQGKFVCQIQYEKLLQDGKVRGIENRFGNKEYRRELVTLLKLQGEYYPAIRDNEDKILSLYDSKREYYEGPGGPNSPTPYGCFRYDDKGKIIEVNLIDLMRGTCTFFPDEKRIAYNSYTACLFNLLNDLNNMTAAGEPINYDQKKALVENVVNQGKNVTLQTIAKITGVKSQELRGYRIDKNEKPIFTEFVGYKAILSAVEKAGGQSDFVKGNREWVDHIADILTKEKSIERRLEELIRYGIEPAVAQELKKLAGFTKYHSLSQRAIELVLDDLWETNDNQMQLFYKLGIFRQDKIKLQGSNIPFDGSDWIVSPVTKRAVNETIKIINETRAWVRKKYNCEFTEIVIEMAREKNSQEKTDFIKKMQKQNEMIGQNIKTLVDTRRINAKQFEILKLLLEQDFRCAYSGESVGLAHVLEGCLEVDHIIPRSFSFDDSLANKVAVLVSENQKKGQDTPFQYLKTGRGKQSYEEFKSWVLNNENYRKHKKKRENLLYEGNPQDELTGFINRNLVDTRYACKEVLNLLQDYFQVNQIATKVSVVKGSFTHAFRKKAKLSKDRETTYAHHAQDALIVAGLANTRLFHKVHYLVQQNEDILDDDAAVSAERDTSVKGAAGESIIESDFDCSPYIRFIRAIEQLQPKYSHKVDRKPNRALYDQQVKSTREKDDKLFIITKYKDIYSKGANNSGEKLKKRLQENPESLLMYHYDRKTFDQFQQIVAEYSDSKNPFADYFADYGQPVRKYAKNGTGTFINDVKFYDRELGNHRKNVKQQGKNLSVYLGIKSLRADFYLDNGVYKFVSVPYDMLVNQDKAYVIDELRYGQAKQRKRISEAAEFLFSLHTGEMFSYEKDGKSFEWFYNCVNDDDASRIEAKFVDRPSPGKTQGQRRETIGKKISNLEKYHVDVLGNKYKVKQEPFVGRIEL

SEQ ID NO: 21453 - protein, 1062 aa, unidentified
  REGION 1..1062: note = Cas Enzyme sequence
MELKLGLDIGVASVGWGIIDENYNVIDSGVRLFPEGSAEENLTRRTMRSSRRRIRRMHHRLQRMRILLSNTLAINFPEPQGNIYEIRSRGLQELLSREELFLAVMHLTKRRGTHFLTAEDIEGKNNNGKSTEEILAEQEACLAKKYVCEIQYERYLTDNGKVRGIENRFRNKDYLRELEQLLAVQSKFYDEIEKNADAILEIYKSKREYYEGPGSEKSPTPYGRYRYDENGNVIKIDLIDLMRGRCTYFPDEKRIAKGAYTACLFNLLNDLNNLKVGERKLTEDEKKYFVKEFIDKGKNITLKIIAKKVVKDENEITGYRIDKNNKPLFTEFKQYKSILKIYQAFDKADYAEGNLDLCDNISEILTRLKSVEERKIALMNYGIEKEIAQELSKVSGFTEYHSLSKKAMDLIMGDLWATDKNQMQIFYDAGMTEVNKNDYIGEEIKFDGSDWIVSPITKRAVAESVKVINAARKLVRRKYGQEFSHIIIEMAREKNSAEEKQNKQKIQRINEERGNAIRELTLGKKITPRQFEIIGLLKEQDMKCAYSGKSVSLTQVYENMLEVDHIIPRSLSFDNSRNNKVAVLVSENQKKGQRTPFQYLNSGAGAITYADYKAMVLKNNSYSARKKANLLYEEAPEKELRGFINRNLVDTRYACREVLNMLQNYFNANEINTKVKVVNGSFTFDFRKKAKLDKDRDATYAHHAQDALIVAGLFNTDLIKKINSIIKMSDSFLDEKKTIIFDNGMVVNTVTGEFVSEADFSANKYIQFIKQIELRPQKYSHKVDRKPNRQLYDQQIKSTRTCLNAKGKEEIYVVTKYKNIYTVGLGSCGDKLKKRILEKPESLLMYRNDQETFKKFREIVDFYNDAKNPFAEYFKEHGPIKKFAKKDNGPEIFDVKFLDGRLGVHRINSRQQGKNKSVYLQIKSFRVDIYQEGEQYKFVNVPYDMLKFSSGVYKIDMEKYLQSKQNKKITKQAIFLFSLYHGEVFSYEKEGVKYWWQFSCLNNDTSNVIEVKYIDKPSPAATQGKRMITIGSKIKNMKKYHVDVLGNIYPASKEILQTEIKL

SEQ ID NO: 21454 - protein, 1062 aa, unidentified
  REGION 1..1062: note = Cas Enzyme sequence
MELKLGLDIGVASVGWGIIDENYNVIDSGVRLFPEGSAEENLTRRTMRSSRRRIRRMHHRLQRMRILLSNTLAINFPEPQGNIYEIRSRGLQELLSREELFLAVMHLTKRRGTHFLTAEDIEGKNNNGKSTEEILAEQEACLAKKYVCEIQYERYLTDNGKVRGIENRFRNKDYLRELEQLLAVQSKFYDEIEKNADAILEIYKSKREYYEGPGSEKSPTPYGRYRYDENGNVIKIDLIDLMRGRCTYFPDEKRIAKGAYTACLFNLLNDLNNLKVGERKLTEDEKKYFVKEFIDKGKNITLKIIAKKVVKDENEITGYRIDKNNKPLFTEFKQYKSILKIYQAFDKADYAEGNLDLCDNISEILTRLKSVEERKIALMNYGIEKEIAQELSKVSGFTEYHSLSKKAMDLIMGDLWATDKNQMQIFYDAGMTEVNKNDYIGEEIKFDGSDWIVSPITKRAVAESVKVINAARKLVRRKYGQEFSHIIIEMAREKNSAEEKQNKQKIQRINEERGNAIRELTLGKKITPRQFEIIGLLKEQDMKCAYSGKSVSLTQVYENMLEVDHIIPRSLSFDNSRNNKVAVLVSENQKKGQRTPFQYLNSGAGAITYADYKAMVLKNNSYSARKKANLLYEEAPEKELRGFINRNLVDTRYACREVLNMLQNYFNANEINTKVKVVNGSFTFDFRKKAKLDKDRDATYAHHAQDALIVAGLFNTDLIKKINSIIKMSDSFLDEKKTIIFDNGMVVNTVTGEFVSEADFSANKYIQFIKQIELRPQKYSHKVDRKPNRQLYDQQIKSTRTCLNAKGKEEIYVVTKYKNIYTVGLGSCGDKLKKRILEKPESLLMYRNDQETFKKFREIVDFYNDAKNPFAEYFKEHGPIKKFAKKDNGPEIFDVKFLDGRLGVHRINSRQQGKNKSVYLQIKSFRVDIYQEGEQYKFVNVPYDMLKFPSGVYKIDMEKYLQSKQNKKITKQAIFLFSLYHGEVFSYEKEGVKYWLQFSCLNNDTSNVIEVKYIDKPSPAATQGKRMITIGSKIKNMKKYHVDVLGNIYPASKEILQTEIKL

SEQ ID NO: 21455 - protein, 1062 aa, unidentified; identical to SEQ ID NO: 21453
  REGION 1..1062: note = Cas Enzyme sequence

SEQ ID NO: 21456 - protein, 1314 aa, unidentified
  REGION 1..1314: note = Cas Enzyme sequence
MEAKKTKKYQEYNIGLDIGTNSVGWAVTDFENNILKYKNKNMWGARLFEAGNTSAETRKFRGIRRRIQRRRERINILQSLLLDDIEKEYPNFFPMLRESSKVQEEKEFEKINGKKYNLFSELNFSDITYYKKYPTIYHLRQGLIDENKKFDIRLIYLAIHHIIKYRGNFLYEGNLENDGKEILETINTLIDFIENTLEIKCILSAEDIRQILMKKEEKKIEKKEKLLNAFDYTKNDKAVINNIVSSILGYKFDLTKIFDINIENGVISFSNEIENEDEIKEILQDQAYMYDAMQKTYNWFVLQDILQGNRNISEAYIKKYDKYKNDLRKLKELYKKYLSNQYKKMFKYREKDNYVAYNDEISKCSLEDLYKRIKKDLSKIENNDEVEKVLSEIENENFLIKINTTENAVIPYQLHYKELKEILENQSKYYKKLEENKQHILDLMKFRIPYYVGPLAKENQSRFAWIIRKSNEKILPWTFEKVVDIDQTAEMFIRRMTNKCTYLLNKDVIPKQSILYSEFCVLNELANIRINNHKLTSKEKQLVIEKLFKIKKIVKINDLKQLLLDYQVYSEIDTITGIVDDYKFMSNMSSFIDMKNLFGKIDEDNIEMIEKIIEWITIFEDKKILKSKIKSKYGLDEKMINQLSKKNYSGWSRLSKELLVDLKSYDDNKSIMEKLYTTKENFMQIINNDKYGFNKQIERIVNGTNEKITYETIKEIQTSPSNKRAIWQCLKVVKEIAQVMKREPKNIYVEFAREEQEKGKKNDNRAKKLLNIYDKYAEEIKQLKDYNPKVYKELKSKQSDKEFTERLYLYFTQNGRCMYSSEPLNIDTLYLYEVDHILPQNYIKDDSLSNKVLVKKEENQRKSGSLLLDDKIINRQEMWWKQLHKSGLIDDKKYYNLIRRKLFESDSDKVKFISRQLVETRQSIKNITNLLTKQYPNTNIFAIRAELTSSFRKEFEMYKNRNVNDYHHAQDAFIISIVGNTIDTKLKYKDEYKYTEYVKKYIKDSEDNKNKTWIIMKMISNNMDYNMIKRVFNYKDCFITRKLEEQTGAFYNQTLYGPNDSKVKAVIPLKENMNVEKYGGYSSEKKAYFIICSYLDKKYRLQTELIGIPIKIAYDIKNKKITLQKYVENVLKDATDIKIIKDKILKYQEYLDENNEPMVFLSDSEVRTNKQLVIEPQIARLVYNMNREKELTDKEKEEIENKMLEIYNYLLEKLETEYKSYYGCYLKLNSIAIKQKFQELSIQEKTIIINEIIKIMNIGTGNFKILGLSMTLGRKNEKSFKTDVLKKMIFIDKSVTGMYERRYRINGMENNCSK

SEQ ID NO: 21457 - protein, 1116 aa, unidentified
  REGION 1..1116: note = Cas Enzyme sequence
MGKYSIGLDLGINNVGWAIYDLEEKQIIDKGVVRYKEASGAQDRRGIRGSRRLTKRRRHRVERLAQYLYSISFCTQRSYEPDLLQKRIKGLKEKLTEQEITNILYYFSIHRGYIPFDEEKPDREVHQCIDDELPCFYIQSYYEKYKKYRGQCELILMKDNMRELETLLKTQKQYHSKINDEVIQNIMDIVRSKRQFWEGPGGAKDNQLTPYGRYATIEDLEELAKDPTYHKYLYEVLIGKCELSMDKTGHMDSVAPACNYFAEEFNFYNDFINMSVKEPSKMDEAFQYKIKSNNGKFTEATIEEFKTYILCNKTINFDKMIQNVLGLQEEDIQGYRVDKNRKPEFTKFEFYKYVKEQMSQKGLHPDWLCGEDKTTYNKVVYVLTVAPSTYAIEDMLTDRISNISFSKAEIEILQEIKRKKNDQLRYHALSESILKKALNDIKKYHCELNFMQIMKRLEYEKEMKEYFQNYYSTKAKEPFPMEEKYIDDIIANPQVKKTLRKAIKVINAIMKQQKDYPDTIIVESTKEMNGKEAKQKIEKEQAIYKKLNEDAEKILIENGYPVQSKNIDKVIFWQETNHKCAYCGKEVSLASLLQTDLEHILPKSKTMDSSSNNLTCSCPECNTTKSNRTPYEYLTSINSYQVFKERVLTEFKNMPQTKKDNLLFEGSIEKYSIKFINRNLRDTAYGTVALIEELAKYNTYLAGKIGYQINVISAPGQLTSRIRKNLDLSIKNRDYLYHHAVDAMILAGLCDTPIGQVLIKSQNDSKYWLGVKDKQHYEKVYQMIAGVHLICGKQIKSFNEACDNQPLDDKEGLLKRSYEVLKNPIRQFSDTNYAKFIKRGDTYYQICQIDNIYNYDEKKDKKLLDKLFNPDDHTVELLCYEKDKTLYHKLKQIYDSYPEEGNPFRKECIYKNGLEEGTEKFEYLLHGIHRSDDKKSPIVVKLRYMQKVNYPYLKQQVSLRKKNQYGEFINMPMKQTTNIGLTSLSQLSTQILYAVEEKKFIFLPIPSICYQNGKLDTSHSYYTETYNRLVGKKKVIEFTSIYCGEWIGVIKKNGEYKEGRYSCYDKESNRLIVNTNGLSPNLTSKTGIMTSDQAIIIYTTEILGNRYVRLDSRKIL

SEQ ID NO: 21458 - protein, 1123 aa, unidentified
  REGION 1..1123: note = Cas Enzyme sequence
MKKYTIGLDLGINNVGWAKYDLETKKVIDKGVVRFKESSTAQDRRIIRGSRRLRKRKQHRVERLAIQLSNINFCTSRSYEPELLNKRIKGLNESLSEQEITNIIYWFAIHRGYIPFDEEKPEREVHKFAEDGYPCQYIFDYYKEYGVYRGQCDLISLKDNLKELKQILLTQQKYHSKLTDEVIDNILYIIQSKREFWEGPGASKENQLSPYGRYRTLEDLEKYKADSTYHQYLYEMLIGKCELSIDKDGFMDQVAPKCNFYAEEFNFYNDFINMSVKEPSQIDEEYRNKITLKGKFTEDTIEEIKKEIISTKKVSLDKLVKKILGLELKDIQGYRIDKKYKPEISQFEFYKYLLKSFKDEKLNPSWLENDDKTIYNQIVYILTVAPSTYAIEDMLKDRVKEVEFKKEEIDVLIDIKKKKNPDLKYHSLSERILKKALDDIKRHNCEYNFMQIMKRLEYEKEMKEYFQNNYSTKTQSPYTIEDQYIDHLIANPQVKKTLRKAIKIINAIIKEEKNYPETIVIESATSLNSKERKKQIEEEQKTFNQLNKEVKKELEDNGYEVTDKNMQLLINWKETNESCIYCGESISLKEVLITEIEHILPKSKSMDNSHNNTTCSCLKCNKEKNNRTPYQYLTSKNMYEGFKNRVMNQYDKMSQDKKSNLLFEGDIDKYSIKFINRNLRDTSYASVALVQELKKYNEYLGAKEGYKINIITSPGQLTSKIRQYLKIKDKDRTYLYHHVVDAMILASIPDTEIGKVLIEAQNDSQYWFKDKNKENKYKEEVYNMLNNVWLSNRDQIQKFNQDCDNMPDNNKEGLIKRSYEVLKNPVRQFSQYTEYAKYIKQNDVYYKISQIDNIYNLLIRKKDGSADKDKKLLDELFDLSNKKNKTLLCEKKDPKLYQKLKNIYEKNSFSINPFVDESKYMYGLEDGDKFDCLKQGIRKTDNSNSPLVIKLRYLEKVTNPYIKNNITTRRKNLYNEFTINKPKKDTLIGLDGLKQVSTRIFYSYEDKKFIFLPICAISFVNGKLNKKEKNYQTTYNRLIGNKNVKEMGNIYVGEWVGVYKKNGEYFEGRYKGYHKTSNVLEYYINGLDTLSCATIGSSDLRIIIYTTDILGNRHIRLDTQKEI

SEQ ID NO: 21459 - protein, 1123 aa, unidentified
  REGION 1..1123: note = Cas Enzyme sequence
MKKYTIGLDLGINNVGWAKYDLETKKVIDKGVVRFKESSTAQDRRIIRGSRRLRKRKQHRVERLAIQLSNINFCTSRSYEPELLNKRIKGLNESLSEQEITNIIYWFAIHRGYIPFDEEKPEREVHKFAEDEYPCQYIFDYYKEYGVYRGQCDLISLKDNLKELKQILLTQQKYHSKLTDEVIDNILYIIQSKREFWEGPGASKENQLSPYGRYRTLEDLEKYKADPTYHQYLYEMLIGKCELSIDKDGFMDQVAPKCNFYAEEFNFYNDFINMSVKEPSQIDEEYRNKITLKGKFTEDTIEEIKKEIISTKKVSLDKLVKKILGLELKDIQGYRIDKKYKPEISQFEFYKYLLKSFKDEKLNPSWLENDDKTIYNQIVYILTVAPSTYAIEDMLKDRVKEVEFKKKEIDVLIDIKKKKNPDLKYHSLSERILKKALDDIKRHNCEYNFMQIMKRLEYEKEMKEYFQNNYSTKTQSPYTIEDQYIDHLIANPQVKKTLRKAIKIINAIIKEEKNYPETIVIESATSLNSKERKKQIEEEQKTFNQLNKEVKKELEDNGYEATDKNMQLLINWKETNESCIYCGESISLKEVLITEIEHILPKSKSMDNSHNNTTCSCLKCNKEKNNRTPYQYLTSKNMYEGFKNRVMNQYDKMSQDKKSNLLFEGDIDKYSIKFINRNLRDTSYASVALVQELKKYNEYLGAKEGYKINIITSPGQLTSKIRQYLKIKDKDRTYLYHHVVDAMILASIPDTEIGKVLIEAQNDSQYWFKDKNKENKYKEEVYNMLNNVWLSNRDQIQKFNQDCDNMPDNNKEGLIKRSYEVLKNPVRQFSQYTEYAKYIKQNDVYYKISQIDNIYNLLIRKKDGSADKDKKLLDELFDLSNKKNKTLLCEKKDPKLYQKLKNIYEKNSFSINPFVDESKYMYGLEDGDKFDCLKQGIRKTDNSNSPLVIKLRYLEKVTNPYIKNNITTRRKNLYNEFTINKPKKDTLIGLDGLKQVLTRIFYSYEDKKFIFLPICAISFVNGKLNKKEKNYQTTYNRLIGNKNVKEMGNIYVGEWVGVYKKNGEYFEGRYKGYHKTSNVLEYYINGLDTLSCATIGSSDLRIIIYTTDILGNRHIRLDTQKEI

SEQ ID NO: 21460 - protein, 1119 aa, unidentified
  REGION 1..1119: note = Cas Enzyme sequence
VKGDNMGIIIGLDIGIASVGIAVVDKDTLDIKCVVSDLFDSADASKNIERRNNRQARRLNRRRKTRIGDFNTLWVSMFGELPEEVDSNVLLLRNAGLDEQLTLDEIYCVLKYMLKHRGISYLEDALNEENVTGSYQKGIAINQRESEYMLPCEIQLERFRKYGQYRGECEAENENGEKITLSNVFMTNSYRKEIDKFLNTQGKYGILNQKFIDEYLKIFNRKRKYYEGPGNEKSRTDYGKYTTGKDLDGKYITEKNIFEKLIGKCSVYKEELRAAGASYTAQEFNILNDLNNITVNNKKLTTQQKKDVIEIVQNSDRINMEKIISSCIGEKIEKIEGARIDKNEKNIYHTFEQYNKMRKIFAEKNYDIKELTIEQLDEIGRILTINTEREGIKDAIMESELLHLNNEQINLLIELRYKNSSLFTKWQSLSIKAMREIIPDLYDRNVNQMNILAERGVFKDKINLFENSVYLPKEPVLEEIYNPVVRRSISMTIDALNALIKKYGYPEDIVIEMPRDRNDAEQKDRIKKFQKTRENELKNIKKKIKEEYGIEITDEYFRKHKGLELELKLWVEQNEKCPYSGKYINVQDILYHHELFEIDHIIPLSISYDDSRNNKVLVYKEENQDKGNRTPLMYLSTVNRQYDQHEFMNYVLSTKTLPRKKRELLLNYEDITKIDVLKGFINRNLNDTRYASRSVLNAIQLFFGGKECDTKVRVIRGAVTNQLRIKLNLPKDREKSYSHHAIDAAIMCYSQMGLMNFRNIQNKFIDFENETYLSDERDSCFDNKYYDEALFGQVLKMRKNLLKAEGKPQRSVQSKGVFDEEEKNNGIVRYHHKVDKKPNRGLSNASIYGTRKIDDKIYKIVGYDIRNNKDAEAIINIIKKGKSDNFLMAKHDPETFKNLMEIYEQYKEEKNPFLAYEQETGDYIRKYAKNHNGPIIKKIKYVDSEVGSCIDISANYGYKNGDKRVIMDTLTPYRADVYYNYKDGTYRIIGVKYADFKYSNAKYVLDEEAYALILIKEGLLKIGDSLENISSSGYEYRLSFYKNDIIEYTKNDIVYKERFLSRTMPKVKNYIETKPISAALYEKRNPIGLTNATNICKIYTDVLGNETKIYKEKFKLSVD

SEQ ID NO: 21461 - protein, 1114 aa, unidentified
  REGION 1..1114: note = Cas Enzyme sequence
MGIIIGLDIGIASVGIAVVDKDTLDIKCVVSDLFDSADASKNIERRNNRQARRLNRRRKTRIGDFNTLWVSMFGELPEEVDSNVLLLRNAGLDEQLTLDEIYCVLKYMLKHRGISYLEDALNEENVTGSYQKGIAINQRESEYMLPCEIQLERFRKYGQYRGECEAENENGEKITLSNVFMTNSYRKEIDKFLNTQGKYGILNQKFIDEYLKIFNRKRKYYEGPGNEKSRTDYGKYTTGKDLDGKYITEKNIFEKLIGKCSVYKEELRAAGASYTAQEFNILNDLNNITVNNKKLTTQQKKDVIEIVQNSDRINMEKIISSCIGEKIEKIEGARIDKNEKNIYHTFEQYNKMRKIFAEKNYDIKELTIEQLDEIGRILTINTEREGIKDAIMESELLHLNNEQINLLIELRYKNSSLFTKWQSLSIKAMREIIPDLYDRNVNQMNILAERGVFKDKINLFENSVYLPKEPVLEEIYNPVVRRSISMTIDALNALIKKYGYPEDIVIEMPRDRNDAEQKDRIKKFQKTRENELKNIKKKIKEEYGIEITDEYFRKHKGLELELKLWVEQNEKCPYSGKYINVQDILYHHELFEIDHIIPLSISYDDSRNNKVLVYKEENQDKGNRTPLMYLSTVNRQYDQHEFMNYVLSTKTLPRKKRELLLNYEDITKIDVLKGFINRNLNDTRYASRSVLNAIQLFFGGKECDTKVRVIRGAVTNQLRIKLNLPKDREKSYSHHAIDAAIMCYSQMGLMNFRNIQNKFIDFENETYLSDERDSCFDNKYYDEALFGQVLKMRKNLLKAEGKPQRSVQSKGVFDEEEKNNGIVRYHHKVDKKPNRGLSNASIYGTRKIDDKIYKIVGYDIRNNKDAEAIINIIKKGKSDNFLMAKHDPETFKNLMEIYEQYKEEKNPFLAYEQETGDYIRKYAKNHNGPIIKKIKYVDSEVGSCIDISANYGYKNGDKRVIMDTLTPYRADVYYNYKDGTYRIIGVKYADFKYSNAKYVLDEEAYALILIKEGLLKIGDSLENISSSGYEYRLSFYKNDIIEYTKNDIVYKERFLSRTMPKVKNYIETKPISAALYEKRNPIGLTNATNICKIYTDVLGNETKIYKEKFKLSVD

SEQ ID NO: 21462 - protein, 1114 aa, unidentified
  REGION 1..1114: note = Cas Enzyme sequence
MGYIFGLDIGVASVGVAVINNQTLEIEEVVSDLFESADASKNVERRSARQSRRLHRRRKNRVSDFNRLWIKSGYDIPEDNDENILLLRNEGIKKALSEKELYYVLRYMLQHRGISYLEDALGEEEAKGSYQKGIALNQKESENLLPCEIQQERMRNYGQYRGQYEITEEDGSKVTLSNIFTTSSYIKELNKFFEVQQEHGLLKEEFINQYMEIFRRKRKYYEGPGNESSRTDYGKYTTKKNGDGKYITEKNIFEKLIGKCSVYKNEFRAAGASYTAQEFNILNDLNNITVDGNKLSKEQKLSIIENIKSANRVSVEKIIGDCIGSKKPFIEGARIDKNGKHIYHSFEQYNKMRKTFELIGFDIAELSVDELDEIGRILTINTEKEGIEEAFKESKVSLTEEQINALIDLRRKNSLAFNKWQSLSVKAMRELIPDLYERSVNQMVLLTEKGIFKEKENEFAKSIYIPKKIIISEIYNPVVKRSVSVALDALNALIKKYGYPDDVVVEMPRDKNEDEQKDRIKKFQKNRENELKEIKNKLKQEYNIELTDEYFRKHKGLELQLKLWVEQEEKCPYSGKHININDLLYHHDMFEVDHIIPLSISYDDGRNNKVLVYRDENQSKRNNTPMAYLANVNRNYDVHEFMDYVLKNKKFPPKKKSNLLYGEDITKIDVVKGFINRNLNDTRYASRSILNAIQLYFSSRDCNTTVRVINGMVTHQLRNRLKLEKDRDKSYSHHAIDAAIICYTQLGLLKFKDIQSRFIDFDNEVYKEADIQSCYDEKYYDEALFSQVLKIRNNLKNAEGDPQTTVVSRGIYAESEKNNGIVKYHHRVDKKANRGLSNATIYGTRNINNKIYKIVSYDIRDNKDVDSIRKIIAGGKQEYFLMYKNDPKTFEMLMSIYEQFNDEKNPFVAYEQETGEKIRKYSKKHNGPVIKKIKYADSEVGSCIDISANYGYNKDDKKVIMDTLKPYRADLYYDTRNNNYRIIGVKYADFKFVKGRYILDEASYEDILVKEEILKPGMKITDLESEGYEFRLSFYENDIIQYEKDGDIYKERFLSRTMPKKKNYIETKPVVAAKYLKPRNLIGLTKAGNIGKIYTDILGNEKIVYKEKFKLSID

SEQ ID NO: 21463 - protein, 1114 aa, unidentified
  REGION 1..1114: note = Cas Enzyme sequence
MGYIFGLDIGVASVGVAVINNQTLEIEEVVSDLFESADASKNVERRSARQSRRLQRRRKNRVSDFNRLWIKSGYDIPEDNDENILLLRNEGIKKVLSEKELYYVLRYMLQHRGISYLEDALGEEEAKGSYQKGIALNQKESENLLPCEIQQERMIRYGQYRGQYEITEEDGSKVTLSNIFTTSSYIKELNKLFEVQQKHGLVNEEFVNQYMEIFRRKRKYYEGPGNELSRTDYGKYTTKKNDDGKYITEKNIFEKLIGKCSVYKNEFRAAGASYTAQEFNILNDLNNITVDGKKLSKEQKVSIIESIKSANRVSVEKIIGDCIGNKKPFIEGARIDKNGKHIYHSFEQYNKMRKAFELINFDIAELSVDELDEIGRILTINTEKEGIEEAFKESKVSLTEEQINVLVDLRRKNSLAFNKWQSLSVKAMRELIPDLYERSVNQMVLLTEKGIFKEKENEFAKSVYIPKEIIISEIYNPVVKRSVSVALDALNALIKKYGYPDDVVVEMPRDKNEDEQKDRIKKFQKNRENELKEIKNKLKQEYNIELTDEYFRKHKGLELQLKLWVEQEEKCPYSGKYININDLLYHHDMFEVDHIIPLSISYDDGRNNKVLVYREENQSKRNNTPMTYLANVNRDYDMHEFMDYVLKNKKFPPKKKSNLLYGEDITKIDVVKGFINRNLNDTRYASRSILNAIQLYFSSRDCNTTVRVINGTVTHQLRNRLKLEKDRDKSYSHHAIDAAIICYTQLGLLKFKEIQSRFIDFDNEIYKEADIQSCYDEKYYDEALFSQVLKIRNNLKNAEGDPQTTVVSRGIYAESEKNNGIVKYHHRVDKKANRGLSNATIYGTRNINNKIYKIVSYDIRDNKDVDSIRKIIAGGKQEYFLMYKNDPKTFEMLMSIYEQFNDEKNPFVAFEQETGEKIRKYSKKHNGPVIKKIKYADSEVGSCIDISANYGYNKDDKKVIMDTLKPYRADLYYDTKKNNYRIIGVKYADFKFVKGRYILDEASYEDILVKEEILKPGMKITDLESEGYEFRLSFYENDIIQYEKDGDIYKERFLSRTMPKKKNYIETKPVVAAKYLKPRNLIGLTKAGNIGKIYTDILGNEKIVYKERFKLSID

SEQ ID NO: 21464 - protein, 1119 aa, unidentified
  REGION 1..1119: note = Cas Enzyme sequence
VKGDNMGIIIGLDIGIASVGIAVVDKDTLDIKCVVSDLFDSADASKNIERRNNRQARRLNRRRKTRIGDFNTLWVSMFGELPEEVDSNVLLLRNAGLDEQLTLDEIYCVLKYMLKHRGISYLEDALNEENVTGSYQKGIAINQRESEYMLPCEIQLERFRKYGQYRGECEAENENGEKITLSNVFMTNSYRKEIDKFLNTQGKYGILNQKFIDEYLKIFNRKRKYYEGPGNEKSRTDYGKYTTGKDLDGKYITEKNIFEKLIGKCSVYKEELRAAGASYTAQEFNILNDLNNITVNNKKLTTQQKKDVIEIVQNSDRINMEKIISSCIGEKIEKIEGARIDKNEKNIYHTFEQYNKMRKIFAEKNYDIKELTIEQLDEIGRILTINTEREGIKDAIMESELLHLNNEQINLLIELRYKNSSLFTKWQSLSIKAMREIIPDLYDRNVNQMNILAERGVFKDKINLFENSVYLPKEPVLEEIYNPVVRRSISMTIDALNALIKKYGYPEDIVIEMPRDRNDAEQKDRIKKFQKTRENELKNIKKKIKEEYGIEITDEYFRKHKGLELELKLWVEQNEKCPYSGKYINVQDILYHHELFEIDHIIPLSISYDDSRNNKVLVYKEENQDKGNRTPLMYLSTVNRQYDQHEFMNYVLSTKTLPRKKRELLLNYEDITKIDVLKGFINRNLNDTRYASRSVLNAIQLFFGGKECDTKVRVIRGAVTNQLRIKLNLPKDREKSYSHHAIDAAIMCYSQMGLMNFRNIQNKFIDFENETYLSDERDSCFDNKYYDEALFGQVLKMRKNLLKAEGKPQRSVQSKGVFDEEEKNNGIVRYHHKVDKKPNRGLSNASIYGTRKIDDKIYKIVVYDIRNNKDAEAIINIIKKGKSDNFLMAKHDPETFKNLMEIYEQYKEEKNPFLAYEQETGDYIRKYAKNHNGPIIKKIKYVDSEVGSCIDISANYGYKNGDKRVIMDTLTPYRADVYYNYKDGTYRIIGVKYADFKYFNAKYVLDEEAYALILIKEGLLKIGDSLENISSSGYEYRLSFYKNDIIEYTKNDIVYKERFLSRTMPKVKNYIETKPISAALYEKRNPIGLTNATNICKIYTDVLGNETKIYKEKFKLSVD

SEQ ID NO: 21465 - protein, 1114 aa, unidentified
  REGION 1..1114: note = Cas Enzyme sequence
MGIIMGLDIGIASVGIAVVDKDTLDIKCVVSDLFDSADASKNIERRNARQARRLNRRRKTRIEDFNTLWVSMFGELPEEVDSNVLLLRNAGLEEQLTLDEIYCVLKYMLKHRGISYLEDALNEENVTGSYQKGIAINQRESEYMLPCEIQLERFRKYGQYRGECEAENENGEKITLSNVFMTSSYRKEIDKFLNTQGKYGIINQEFIDEYLKIFNRKRKYYEGPGNEKSRTDYGKYTTRKDLDGKYITEKNIFEKLIGKCSIYKEELRAAGASYTAQEFNILNDLNNITVNNKKLTTQQKKDIIEIVQNSDRINMEKIISSCIGEKIEKIEGARIDKNEKNIYHTFEQYNKMRRAFAEKSYDIKKLTIEQLDEIGRILTINTEREGIEDAIMDSELLNLNNEQIDLLIELRRKNSSLFAKWQSLSIKAMREIIPDLYERNVNQMNIFTERGVFKDKLNLFENSVYLPKEPVLEEIYNPVVRRSISMTIDALNALIKKYGYPEDIVIEMPRDRNDAEQKDRIKKFQKTRENELKNIKKKIKEEYGIEITDEHFRKHKGLELELKLWVEQNEKCPYSGKHINVQDILYHHELFEIDHIIPLSISYDDSRNNKVLVYKEENQDKGNRTPLMYLSTVNRQYDQHEFMNYVLSTKTLPRKKRELLLNYEDITKIDVLKGFINRNLNDTRYASRSVLNAMQLFFGGKECDTKVRVIRGAVTNQLRIKLNLPKDREKSYSHHAIDAAIMCYSQMGLMNFRNTQNKFIDFENETYLSDDKNSCFDNKYYDEALFGQVLKMRKNLLKAEGEPQRSVQSKGVFDEEEKNNGIVRYHHKVDKKPNRGLSKASIYGTRKIDGKIYKIVGYDIRNNKDVEAIINIIKKGKSDNFLMSKHDPETFKNLMEIYEQYKEEKNPFLAYEQETGDYIRKYAKNHNGPIIKKIKYVDSEVGSCIDISASYGYKNGDKRVIMDTLTPYRADVYYNYKDGTYRIIGVKYADFKYSNGKYVLDEDAYVSILIKEGLLKNGDRLENLSSVGYEYRLSFYKNDIIEYTKNDIVYKERFLSRTMPKVKNYIETKPISAALYEKRNPIGLTNATNICKICTDVLGNETKIYKEKFKLSVD

SEQ ID NO: 21466 - protein, 1108 aa, unidentified
  REGION 1..1108: note = Cas Enzyme sequence
LDIGIASVGIAVVDKDTLDIKCVVSDLFDSADASKNIERRNARQARRLNRRRKTRIEDFNTLWVSMFGELPEEVDSNVLLLRNAGLDEQLTLDEIYCVLKYMLKHRGISYLEDALNEENVTGSYQKGIAINQRESEYMLPCEIQLERFRKYGQYRGDCEAENENGEKITLSNVFMTNSYRKEIDKFLNTQGKYGILNQKFIDEYLKIFNRKRKYYEGPGNEKSRTDYGKYTTGKDLDGKYITEKNIFEKLIGKCSVYKEELRAAGASYTAQEFNILNDLNNITVNNKKLTTQQKKDVIEIVQNSDRINMEKIISSCIGEKIEKIEGARIDKNEKNIYHTFEQYNKMRKIFAEKNYDIKELTIEQLDEIGRILTINTEREGIKDAIMESELLHLNNEQINLLIELRYKNSSLFTKWQSLSIKAMREIIPDLYDRNVNQMNILAERGVFKDKINLFENSVYLPKEPVLEEIYNPVVRRSISMTIDALNALIKKYGYPEDIVIEMPRDRNDAEQKDRIKKFQKTRENELKNIKKKIKEEYGIEITDEYFRKHKGLELELKLWVEQNEKCPYSGKYINVQDILYHHELFEIDHIIPLSISYDDSRNNKVLVYKEENQDKGNRTPLMYLSTVNRQYDQHEFMNYVLSTKTLPRKKRELLLNYEDITKIDVLKGFINRNLNDTRYASRSVLNAIQLFFGGKECDTKVRVIRGAVTNQLRIKLNLPKDREKSYSHHAIDAAIMCYSQMGLMNFRNIQNKFIDFENETYLSDERDSCFDNKYYDEALFGQVLKMRKNLLKAEGKPQRSVQSKGVFDEEEKNNGIVRYHHKVDKKPNRGLSNASIYGTRKIDDKIYKIVGYDIRNNKDAEAIINIIKKGKSDNFLMAKHDPETFKNLMEIYEQYKEEKNPFLAYEQETGDYIRKYAKNHNGPIIKKIKYVDSEVGSCIDISANYGYKNGDKRVIMDTLTPYRADVYYNYKDGTYRIIGVKYADFKYSNAKYVLDEEAYALILIKEGLLKIGDSLENISSSGYEYRLSFYKNDIIEYTKNDIVYKERFLSRTMPKVKNYIETKPISAALYEKRNPIGLTNATNICKIYTDVLGNETKIYKEKFKLSVD

SEQ ID NO: 21467 - protein, 1114 aa, unidentified
  REGION 1..1114: note = Cas Enzyme sequence
MGIIIGLDIGIASVGIAVVDKDTLDIKCVVSDLFDSADASKNIERRNNRQARRLNRRRKTRIGDFNTLWVSMFGELPEEVDSNVLLLRNAGLDEQLTLDEIYCVLKYMLKHRGISYLEDALNEENVTGSYQKGIAINQRESEYMLPCEIQLERFRKYGQYRGECEAENENGEKITLSNVFMTNSYRKEIDKFLNTQGKYGILNQKFMDEYLKIFNRKRKYYEGPGNEKSRTDYGKYTTGKDLDGKYITEKNIFEKLIGKCSVYKEELRAAGASYTAQEFNILNDLNNITVNNKKLTTQQKKDVIEIVQNSDRINMEKIISSCIGEKIEKIEGARIDKNEKNIYHTFEQYNKMRKIFAEKNYDIKELTIEQLDEIGRILTINTEREGIKDAIMESELLHLNNEQINLLIELRYKNSSLFTKWQSLSIKAMREIIPDLYDRNVNQMNILAERGVFKDKINLFENSVYLPKEPVLEEIYNPVVRRSISMTIDALNALIKKYGYPEDIVIEMPRDRNDAEQKDRIKKFQKTRENELKNIKKKIKEEYGIEITDEYFRKHKGLELELKLWVEQNEKCPYSGKYINVQDILYHHELFEIDHIIPLSISYDDSRNNKVLVYKEENQDKGNRTPLMYLSTVNRQYDQHEFMNYVLSTKTLPRKKRELLLNYEDITKIDVLKGFINRNLNDTRYASRSVLNAIQLFFGGKECDTKVRVIRGAVTNQLRIKLNLPKDREKSYSHHAIGAAIMCYSQMGLMNFRNIQNKFIDFENETYLSDERDSCFDNKYYDEALFGQVLKMRKNLLKAEGKPQRSVQSKGVFDEEEKNNGIVRYHHKVDKKPNRGLSNASIYGTRKIDDKIYKIVGYDIRNNKDAEAIINIIKKGKSDNFLMAKHDPETFKNLMEIYEQYKEEKNPFLAYEQETGDYIRKYAKNHNGPIIKKIKYVDSEVGSCIDISANYGYKNGDKRVIMDTLTPYRADVYYNYKDGTYRIIGVKYADFKYSNAKYVLDEEAYALILIKEGLLKIGDSLENISSSGYEYRLSFYKNDIIEYTKNDIVYKERFLSRTMPKVKNYIETKPISAALYEKRNPIGLTNATNICKIYTDVLGNETKIYKEKFKLSVD

SEQ ID NO: 21468 - protein, 1114 aa, unidentified
  REGION 1..1114: note = Cas Enzyme sequence
MGIIIGLDIGIASVGIAVVDKDTLDIKCVVSDLFDSADASKNIERRNNRQARRLNRRRKTRIGDFNTLWVSMFGELPEEVDSNVLLLRNAGLDEQLTLDEIYCVLKYMLKHRGISYLEDALNEENVTGSYQKGIAINQRESEYMLPCEIQLERFRKYGQYRGECEAENENGEKITLSNVFMTNSYRKEIDKFLNTQGKYGILNQKFIDEYLKIFNRKRKYYEGPGNEKSRTDYGKYTTGKDLDGKYITEKNIFEKLIGKCSVYKEELRAAGASYTAQEFNILNDLNNITVNNKKLTTQQKKDVIEIVQNSDRINMEKIISSCIGEKIEKIEGARIDKNEKNIYHTFEQYNKMRKIFAEKNYDIKELTIEQLDEIGRILTINTEREGIKDAIMESELLHLNNEQINLLIELRYKNSSLFTKWQSLSIKAMREIIPDLYDRNVNQMNILAERGVFKDKINLFENSVYLPKEPVLEEIYNPVVRRSISMTIDALNALIKKYGYPEDIVIEMPRDRNDAEQKDRIKKFQKTRENELKNIKKKIKEEYGIEITDEYFRKHKGLELELKLWVEQNEKCPYSGKYINVQDILYHHELFEIDHIIPLSISYDDSRNNKVLVYKEENQDKGNRTPLMYLSTVNRQYDQHEFMNYVLSTKTLPRKKRELLLNYEDITKIDVLKGFINRNLNDTRYASRSVLNAIQLFFGGKECDTKVRVIRGAVTNQLRIKLNLPKDREKSYSHHAIDAAIMCYSQMGLMNFRNIQNKFIDFENETYLSDERDSCFDNKYYDEALFGQVLKMRKNLLKAEGKPQRSVQSKGVFDEEEKNNGIVRYHHKVDKKPNRGLSNASIYGTRKIDDKIYKIVGYDIRNNKDAEAIINIIKKGKSDNFLMAKHDPETFKNLMEIYEQYKEEKNPFLAYEQETGDYIRKYAKNHNGPIIKKIKYVDSEVGSCIDISANYGYKNGDKRVIMDTLTPYRADVYYNYKDGTYRIIGVKYEDFKYSNAKYVLDEEAYALILIKEGLLKIGDSLENISSSGYEYRLSFYKNDIIEYTKNDIVYKERFLSRTMPKVKNYIETKPISAALYEKRNPIGLTNATNICKIYTDVLGNETKIYKEKFKLSVD

SEQ ID NO: 21469 - protein, 934 aa, unidentified
  REGION 1..934: note = Cas Enzyme sequence
MTNSYRKEIDKFLNTQGKYGILNQKFIDEYLKIFNRKRKYYEGPGNEKSRTDYGKYTTGKDLDGKYITEKNIFEKLIGKCSVYKEELRAAGASYTAQEFNILNDLNNITVNNKKLTTQQKKDVIEIVQNSDRINMEKIISSCIGEKIEKIEGARIDKNEKNIYHTFEQYNKMRKIFAEKNYDIKELTIEQLDEIGRILTINTEREGIKDAIMESELLHLNNEQINLLIELRYKNSSLFTKWQSLSIKAMREIIPDLYDRNVNQMNILAERGVFKDKINLFENSVYLPKEPVLEEIYNPVVRRSISMTIDALNALINKYGYPEDIVIEMPRDRNDAEQKDRIKKFQKTRENELKNIKKKIKEEYGIEITDEYFRKHKGLELELKLWVEQNEKCPYSGKYINVQDILYHHELFEIDHIIPLSISYDDSRNNKVLVYKEENQDKGNRTPLMYLSTVNRQYDQHEFMNYVLSTKTLPRKKRELLLNYEDITKIDVLKGFINRNLNDTRYASRSVLNAMQLFFGGKECDTKVRVIRGAVTNQLRIKLNLPKDREKSYSHHAIDAAIMCYSQMGLMNFRNTQNKFIDFENETYLSDDKNSCFDNKYYDEALFGQVLKMRKNLLKAEGEPQRSVQSKGVFDEEEKNNGIVRYHHKVDKKPNRGLSNASIYGTRKIDDKIYKIVGYDIRNNKDAEAIINIIKKGKSDNFLMAKHDPETFKNLMEIYEQYKEEKNPFLAYEQETGDYIRKYAKNHNGPIIKKIKYVDSEVGSCIDISANYGYKNGDKRVIMDTLTPYRADVYYNYKDGTYRIIGVKYADFKYSNAKYVLDEEAYALILIKEGLLKIGDSLENISSSGYEYRLSFYKNDIIEYTKNDIVYKERFLSRTMPKVKNYIETKPISAALYEKRNPIGLTNATNICKIYTDVLGNETKIYKEKFKLSVD

SEQ ID NO: 21470 - protein, 1113 aa, unidentified
  REGION 1..1113: note = Cas Enzyme sequence
MGIIIGLDIGIASVGIAVVDKDTLDIKCVVSDLFDSADASKNIERRNNRQARRLNRRRKTRIGDFNTLWVSMFGELPEEVDSNVLLLRNAGLDEHLTLDEIYCVLKYMLKHRGISYLEDALNEENVTGSYQKGIAINQRESEYMLPCEIQLERFRKYGQYRGECEAENENGEKITLSNVFMTNSYRKEIDKFLNTQGKYGILNQKFMDEYLKIFNRKRKYYEGPGNEKSRTDYGKYTTGKDLDGKYITEKNIFEKLIGKCSVYKEELRAAGASYTAQEFNILNDLNNITVNNKKLTTQQKKDVIEIVQNSDRINMEKIISSCIGEKIEKIEGARIDKNEKNIYHTFEQYNKMRKIFAEKNYDIKELTIEQLDEIGRILTINTEREGIKDAIMESELLHLNNEQINLLIELRYKNSSLFTKWQSLSIKAMREIIPDLYDRNVNQMNILAERGVFKDKINLFENSVYLPKEPVLEEIYNPVVRRSISMTIDALNALIKKYGYPEDIVIEMPRDRNDAEQKDRIKKSQKTRENELKNIKKKIKEEYGIEITDEYFRKHKGLELELKLWVEQNEKCPYSGKYINVQDILYHHELFEIDHIIPLSISYDDSRNNKVLVYKEENQDKGNRTPLMYLSTVNRQYDQHEFMNYVLSTKTLPRKKRELLLNYEDITKIDVLKGFINRNLNDTRYASRSVLNAIQLFFGGKECDTKVRVIRGAVTNQLRIKLNLPKDREKSYSHHAIDAAIMCYSQMGLMNFRNIQNIFIDFENETYLSDDKDSCFDNKYYDEALFGQVLKMRKNLLKAEGEPQRSVQSKGVFDEEEKNNGIVRYHHKVDKKPNRGLSNATIYGTRKIEDKIYKIVGYDIRNNKDVEAIINIIKKGKLNNFLMAKHDPETFKKLMEIYEQYKEEKNPFIAYEQETGDYIRKYAKNHNGPIIKKIKYVDNEVGSCIDISANYGYKNGDKRVIMDTLASYRADVYYNFNEKLYRIIGIKYAYFKYLNGKYVLDEKSYVAILIKEGLLKEGDTLESLKLAGYEYRLSFYENDIIEYEQNGIVYKERFLSKSEGVKNKVETKPIMAKGYKNRKFPYLSKVRYISKIYTDILGNETKIYKEKFKLSVD

SEQ ID NO: 21471 - protein, 1425 aa, unidentified
  REGION 1..1425: note = Cas Enzyme sequence
MYNIGLDIGTGSVGWCLTDNNGHLLKINRKGDNGKTYRNSAWGVRLFASADTAADCRIKRSTRRRYNRRRTRVIELRKIMSEMIMPVDPNFYARLDEAFLWNEDKSDKAKAPFLLFNDKELYDIKYYKKYPTIYHLRKYLLETKEKADPRFIYLALHHMMKYRGHFLYEGQTFEAIDNIKDTFIELEQLINVYVKEKEETEYNNKNNNQYEAIKNCLADNKVKNKDKKENITDIFIKVGYDNKYSKELAAAVLGYEFNVGIIVNDNSLTDEDGKALKAKFADAKYEEQEEKLSDTLGERYYIVEALKKIYSWKVLHSILGDSMFLSCAMVDKYEKHGEQLKALKNLFHKYVSQDEYSEFFHQEKNKEGKYIVNYANYIKGIKRLNNETNKNSNANQQLYQSIKKILDKRAADDEVYKNILTEMEQETFLEKINNVDNSAIPYQLNLIEMDKILTQQGVYYKELKDNKELLLKMLTSKIPYYVGPLNNNNKGNRNFAWMTKKAGKENEKVYPWNVKDVVDIDVTAEDFITRMTNYCTYLPNEKVLPKESLLYQRYMLLEELSQIRIDGKKLSKEDRKAIIDDLFIGKGRVKVSDKDFKEYLDKVNYVKVNGKGYDVTGYQSDDGFACALSSYNKFRRILGYVDERNEKMIEDIIYWLTVFEDKDIVKRKINKQYADKFSDEQLKKILKLKFKGWGRYSAKLLNGIKGDMGTTIIEMLEDADERFAYCEYCPNFMRIINKDAKIKQIIDDNRPIYDGTKDLLEVIQDMHTSPANRRGIWQTMKVIEEIIEYIGEKPRQIYIEFAREDDFKAKNKRTDSRKKTVDKALKKLKKEVVDEYNENVYKELKQYENRLDEEKVYLYFMQNGKSLYTEEKLNLNEPENLEIDHIIPYSLSDDDSLDNKALVLKDENQKKGNKIVKETFLQSFSDIKMINYWKNLKKVGLISEKKYNNLQKNNVDDILTKGFINRQLVETRQIVKSVANLILDYYNEQIDVIEVKASLSTSVRKMLTYEKKDSNGFWEENKDNCMFYKNRDMNDYHHAHDAYLANIIGMYIQKNYPHLQKELNYSQYRKIWRKYYENAKNNNGVNWFATLGKFSSNNEEADWYGQDIIAYMRKIFCYRDVIISKKVEENTGAFYSETKYPREDKAGSKLVPLKQGNNMRGADNLKELDTRKYGGYKGGEKAYFVLVKYCIEKALKKKVKKEYHMEFVEIPVYIARDIKNKDINLYDYVCDILNEAYKNSVVDVEILRNKVPKYQMIIGENGEEYYLVGATEVINSKQFVLGGANQQYNRLLNYIMYGKNDKWQYIQTELLDEQLTGLYDLLLSKIKDEYKGFSKEAIRIQEDNSFYKLDVKNKKEFIAEMIKLVQPDSNYPYLGKYSTGLSDRMGRKSKEKVGKKITLVDKSVTGLYERRTTFELEDDSSTKSR

SEQ ID NO: 21472 - protein, 1428 aa, unidentified
  REGION 1..1428: note = Cas Enzyme sequence
MYNYNIGLDIGTGSVGWCLTDENGHLLKVNRKGDNGKTYRNSAWGVRLFESADTAADCRIKRSTRRRYNRRRTRIIELRKIMSDMIMPIDPNFYARLDEAFLWNEDKSDKAKAPFLLFNDNGYDDVKYYTDYPTIYHLRKHLLETEGRADARLIYLALHHMMKYRGHFLFEGQSFEAIDNIEDTFIELEHLVNVYVKEKEDTDNNSKNNALYQTIKNYLADNKVKNKDKKEDITDTFIKVGYDNKYSKELAAAVLGYEFNVGIIVNDNSLTDEDGKALKAKFADAKYEEQEEKLSDTLGERYYIIETLKKIYSWKVLHSILGDNKYLSYAMVDKYKKHSEQLKTLKALFYKYTSQDEYNTFFHYEKDEDGKYIVNYANYIKGIKRLSNETNKKYNTKQQLYESIKEKLGERAADDEVYKNILVEMEQETFLEKINNVDNSAIPYQLNLMEMDKILTQQGVYYKELRGNKELLLKMLSSKIPYYVGPLNNNSNGNRNFAWMTKKAGKENEKVYPWNVKDVVDIDVTAEDFITRMTNYCTYLPDEKVLPKESLLYQKYMLLEELSQIRIDGKKLGKEDRKVIINDLFIGKGRIKVSDKDFKEYLNKINYVKINDKGYDVTGYQSDDGFACALSSYNKFRRILGYVDERNEKMIEDIIYWLTVFDDKDIVKRKINKQYADRLNDEQLKKILKLKFKGWGRYSAKLLNGIKGDMGTTIIEMLEDADERFEYCDYCPNFMQIINKDEKIKQIIDDNRPRYDGTKDLLDVIQDMHTSPANKRGIWQTMKVIEEIIEYMGEKPQQIYIEFAREDDPKAKNKRTDSRKRAVDKALKKLKEEVVDEYNENIYKELKQYEKRLDEEKVYLYFMQNGKDLYFPDKELNLDELEKLEIDHIIPYSLSDDDSLDNKALVLKGNNQNKGNKIVKEAFPQLFSNSGTVNYWKNLKKAGLISEKKFNNLQKNNVDDILTKGFINRQLVETRQIVKSVANLILDYYNEQIDVIEVKASLSTSVRKMLTYEKKDNNGFWEENKDNCMFYKNRDMNDYHHAHDAYLANIIGLYIQKNYPHLQKELNYSQYRRVWRKYYENTKNNNGVNWFATLGKFSSNNEEADWYGQDIIAYMRKIFCYRDVLISKKVEENTGAFYSETKYPREDKAGSKLVPLKQGDNMRGANNLKELDTRKYGGYKGGEKAYFVLVRYCTEKALKKKVKKEYHMEFVEIPVYIARGIKNKNINLYDYVCDTLNEANKNSVADVEILRNKVPKYQVIIGENGEEYYLVSATEVINSKQFVLGGANQQYNRLLNYIKYGKNDKWQYIQTELLDEQLIGLYNLLIAKIKDEYKGFSKEAVRIQENNSFDKLDVKDKKEFIAEMIKLVQPDSDYPYLGKYATGLSNRMGRKTGEKVGKKITLVDKSVTGLYERRTTFELEDDSSTKSR

SEQ ID NO: 21473 - protein, 1428 aa, unidentified
  REGION 1..1428: note = Cas Enzyme sequence
MYNYNIGLDIGTGSVGWGLTDENGHLLKVNRKGDNGKTYRNSAWGVRLFESADTAADCRIKRSTRRRYNRRRTRIIELRKIMSDMIMPIDPNFYARLDEAFLWNEDKSDKAKAPFLLFNDNGYDDVKYYTDYPTIYHLRKHLLETEGRADARLIYLALHHMMKYRGHFLFEGQSFEAIDNIEDTFIELEHLVNVYVKEKEDTDNNSKNNALYQTIKNYLADNKVKNKDKKEDITDTFIKVGYDNKYSKELAAAVLGYEFNVGIIVNDNSLTDEDGKALKAKFADAKYEEQEEKLSDTLGERYYIIETLKKIYSWKVLHSILGDNKYLSYAMVDKYKKHSEQLKTLKALFYKYTSQDEYNTFFHYEKDEDGKYIVNYANYIKGIKRLSNETNKKYNTKQQLYESIKEKLGERAADDEVYKNILVEMEQETFLEKINNVDNSAIPYQLNLMEMDKILTQQGVYYKELRGNKELLLKMLSSKIPYYVGPLNNNSNGNRNFAWMTKKAGKENEKVYPWNVKDVVDIDVTAEDFITRMTNYCTYLPDEKVLPKESLLYQKYMLLEELSQIRIDGKKLGKEDRKVIINDLFIGKGRIKVSDKDFKEYLNKINYVKINDKGYDVTGYQSDDGFACALSSYNKFRRILGYVDERNEKMIEDIIYWLTVFDDKDIVKRKINKQYADRLNDEQLKKILKLKFKGWGRYSAKLLNGIKGDMGTTIIEMLEDADERFEYCDYCPNFMQIINKDEKIKQIIDDNRPRYDGTKDLLDVIQDMHTSPANKRGIWQTMKVIEEIIEYMGEKPQQIYIEFAREDDPKAKNKRTDSRKRAVDKALKKLKEEVVDEYNENIYKELKQYEKRLDEEKVYLYFMQNGKDLYFPDKELNLDELEKLEIDHIIPYSLSDDDSLDNKALVLKGNNQNKGNKIVKEAFPQLFSNSGTVNYWKNLKKAGLISEKKFNNLQKNNVDDILTKGFINRQLVETRQIVKSVANLILDYYNEQIDVIEVKASLSTSVRKMLTYEKKDNNGFWEENKDNCMFYKNRDMNDYHHAHDAYLANIIGLYIQKNYPHLQKELNYSQYRRVWRKYYENTKNNNGVNWFATLGKFSSNNEEADWYGQDIIAYMRKIFCYRDVLISKKVEENTGAFYSETKYPREDKAGSKLVPLKQGDNMRGANNLKELDTRKYGGYKGGEKAYFVLVRYCTEKALKKKVKKEYHMEFVEIPVYIARGIKNKNINLYDYVCDTLNEANKNSVADVEILRNKVPKYQVIIGENGEEYYLVSATEVINSKQFVLGGANQQYNRLLNYIKYGKNDKWQYIQTELLDEQLIGLYNLLIAKIKDEYKGFSKEAVRIQENNSFDKLDVKDKKEFIAEMIKLVQPDSDYPYLGKYATGLSNRMGRKTGEKVGKKITLVDKSVTGLYERRTTFELEDDSSTKSR

SEQ ID NO: 21474 - protein, 1428 aa, unidentified
  REGION 1..1428: note = Cas Enzyme sequence
MYNYNIGLDIGTGSVGWCLTDNNGHLLKVNRKGNNGNTYRNSAWGVRLFESADTAADCRIKRSTRRRYNRRRTRIIELRKIMSDMIMPIDPNFYARLDEAFLWNEDKSDKAKAPFLLFNDNGYDDVEYYTDYPTIYHLRKYLLEKEGRADARFIYLALHHMMKYRGHFLFEGQSFEAIDNIEDTFIELEHLVNVYVKEKEDTDNNSKNNALYQTIKNYLADNKVKNKDKKEDITDTFIKAGYDNKYSKELAAAVLGYEFNVGIIVNDNNLTDENGKALKAKFADAKYEEQEEKLSDTLGEKYYIVETLKKIYSWKVLHSILGDSKYLSYAMVDKYKKHSEQLKTLKALFYKYTSQDEYNAFFHYEKDEDGKYIVNYANYIKGIKRLSNETNKKFNAKQQLYESIKEKLGERATDDEVYKNILVEMEQETFLEKINNVDNSAIPYQLNLMEMDKILTQQGVYYKELRGNKELLLKMLSSKIPYYVGPLNNNSNGNRNFAWMTKKAGKENEKVYPWNVKDVVDIDVTAEDFITRMTNYCTYLPDEKVLPKESLLYQKYMLLEELSQIRIDGKKLSKEDRKVIINDLFIGKGRIKVSDKDFKEYLNKINYVKINDKEYDVTGYQSDDGFACALSSYNKFRRILGYVDERNEKMIEDIIYWLTVFDDKDIVKRKINKQYADRLNDEQLKKILKLKFKGWGRYSAKLLNGIKGDMGTTIIEMLEDADERFEYCDYCPNFMQIINKDEKIKQIIDDNRPRYDGTKGLLDVIHDMHTSPANKRGIWQTMKVIEEIIEYMGEKPQQIYIEFAREDDPKAKNKRTASRKRAIDKALKKLKEDVVDEYNENVYKELKQYEKRLDEEKVYLYFMQNGKDLYFPDKELNLDELEKLEIDHIIPYSLSDDDSLDNKALVLKGNNQNKGNKIVKEAFPQLFSNSGTVNYWKNLKKAGLISEKKFNNLQKNNVDDILTKGFINRQLVETRQIVKSVANLILDYYNEQIDVIEVKASLSTSVRKMLTYEKKDNNGFWEENKDNCMFYKNRDMNDYHHAHDAYLANIIGLYIQKNYPHLQKELNYSQYRRVWRKYYENTKNNNGVNWFATLGKFSSNNEEADWYGQDIIAYMRKIFCYRDVLISKKVEENTGAFYSETKYPREDKAGSKLVPLKQGDNMRGANNLKELDTRKYGGYKGGEKAYFVLVRYCTEKALKKKVKKEYHMEFVEIPVYIARGIKNKNINLYDYVCDTLNEANKNSVADVEILRNKVPKYQMIIGENGEEYYLVSATEVINSKQFVLGGSNQQYNRLLNYIKYGKNDKWQYIQTELLDEQLIGLYNLLIAKIKDEYKGFSKEAVRIQENNSFDKLDVKDKKEFIAEMIKLVQPDSDYPYLGKYATGLSNRMGRKTGEKVGKKITLVDKSVTGLYERRTTFELEDDSSTKSR

SEQ ID NO: 21475 - protein, 1314 aa, unidentified
  REGION 1..1314: note = Cas Enzyme sequence
MEAKKTKKYQEYNIGLDIGTNSVGWAVTDFENNILKYKNKNMWGARLFEAGNTSEETRKFRGIRRRIQRRRERINILQSLLLDDIEKEYPNFFPMLRESSKVQEEKEFEKINGKKYNLFSELNFSDITYYKKYPTIYHLRQGLIDENKKFDIRLIYLAIHHIIKYRGNFLYEGNLENDGKEILETINTLIDFIENTLEIKCILSAEDIRQILMKKEEKKIEKKEKLLNAFDYTKNDKAVINNIVSSIFGYKFDLTKIFDINIENGVISFSNEIENEDEIKEILQDQAYMYDAMQKTYNWFVLQDILQGNRNISEAYIKKYDKYKNDLRKLKELYKKYLSNQYKKMFKYREKDNYVAYNDEISKCSLEDLYKRIKKDLSKIENNDEVEKVLSEIENENFLIKINTTENAVIPYQLHYKELKEILENQSKYYKTLEENKQHILDLMKFRIPYYVGPLAKENQSRFAWIIRKSNEKILPWTFEKVVDIDQTAEMFIRRMTNKCTYLLNKDVIPKQSILYSEFCVLNELANIRINNHKLTSKEKQLVIEKLFKIKKIVKINDLKQLLLDYQVYSEIDTITGIVDDYKFMSNMSSFIDMKNLFGKIDEDNIEMIEKIIEWITIFEDKKILKSKIKSKYGLDEKMINQLAKKNYSGWSRLSKELLVDLKSYDDNKSIMEKLYTTKENFMQIINNDKYGFNKQIERIVNGTNEKITYETIKEIQTSPSNKRAIWQCLKVVKEIAQVMKREPKNIYVEFAREEQEKGKKNDNRAKKLLNIYDKYAEEIKQLKDYNPKVYKELKSKQSDKEFTERLYLYFTQNGRCMYSSEPLNIDTLYLYEVDHILPQNYIKDDSLSNKVLVKKEENQRKSGSLLLDDKIINRQEMWWKQLHKSGLIDDKKYYNLIRRKLFESDSDKVKFISRQLVETRQSIKNITNLLTKQYPNTNIFAIRAELTSSFRKEFEMYKNRNVNDYHHAQDAFIISIVGNTIDTKLKYKDEYKYTEYVKKYIKDSEDNKNKTWIIMKMISNNMDYNMIKRVFNYKDCFITRKLEEQTGAFYNQTLYGPNDSKVKAVIPLKENMNVEKYGGYSSEKKAYFIICSYLDKKYRLQTELIGIPIKIAYDIKNKKITLQKYVENVLKDATDIKIIKDKILKYQEYLDENNEPMVFLSDSEVRTNKQLVIETQIARLVYNMNREKELTDKEKEKIENKMLEIYNYLLEKLETEYKSYYECYLKLNNMNIKQKFQELSTQEKTIIINEIIKIMNVGIGNFKILGLSTALGRKCGKSFKTDVLKKMIFIDKSVTGMYERRYKINGMENNCSK

SEQ ID NO: 21476 - protein, 1361 aa, unidentified
  REGION 1..1361: note = Cas Enzyme sequence
MQKKNFYGDWLLGLDIGTNSVGWAVTDTGYNILKYKSNAMWGVHLFDPANQCEDRRSFRTSRRRLDRRQQRISLLQELMAKPIAEIDPDFFIRLKQSALYPEDRSTGTQNIYFNDVNYTDKEYFSEYPTIHHLIDELMKDTSPHDVRLVYLACAYILAHRGHFLFSVDKDNISEVLNFDKVYQVFTNWFNSADKAQPWECSSEKFAEILKRNITKTAKERDFKLLLWDGKKPTLTEESAINPATAIKLIVGGKAKLSDLFLNESYKELETNSITFNDDNFDDLFESLIPALDDGDSDLLASMKAIYDWSLLSRILKEKSCISEAKKEIYEQHKSDLAFLKYAVKKYIPEKYDDVFRIADSKLPNYLAYSYNTNDYKSKNKTIPSDLKKASPEDFCKYIKGIFKETKCDKADLSKFDDMLNRLDLLSFCPKQVNSDNRVIPYQLYWYELNLILNNASTYLNFLNDSDEYGSVKDKILSLMEFRIPYYVGPLVSSDKSNFAWMKRKAEGKIYPWNFKDMVDEDASEEEFIRRMTCKCTYLPGKNVLPKNSLLYCRFNVLNEINNIKINNKPITVECKKLIYNEVFLKHDRVTLKHIKDTLRSHGCYEDKDSITGIDITVKSSLKPLRDFKPLLESGMLTEEDAERIIEKITFSNDKLRIKKWLKENYTLSDEAIKKIAKSNYKDFGRLSREFLTEVFDIDPKTGEVVNPNIITMLWETNKNLMELLSQNYGYSSNVKKQAKEYYNAHPKNVIDRLNEMYISNAVKRPILRTLDIVKELKHIMPTPPKRIFIEMARGEGEKKRTKSRRDLILEMYKNYGEDEVGELKKQLSSKADGELRSERLFLYFTQLGKCMYSGESINISNLASTVYDVDHIYPRSRKKDDSLDNKVLVLSKENKNKGDKYPISSEIRNKMKPMWEKLAKGNLISKEKLHRLERDTEFTDEELAGFINRQIVETQQSTKAIAHLLEEMFPDTQIVYVKARLVSEFRQTYDMLKCRSVNDLHHAKDAYLNIVMGNVQYVKYTNNPLNFIKSGQKYSLKLDSLLKHDIIRGNDTAWLKDGSSLTTVKNTMEKNNIRFVRYSSCQKGELFNIMPLKKGLGQISLKKDNISDISKYGGYNSATSTYFYLVKHMKKDKVTISFVPIDLIYAGQLTSKQEVLNHLCEKHGLIEPELLLGGRKIKYNTLLEIDGFRSHLTCKTNDRIKIKRGLQLILPYEWEKYIKRLETYNNRNSEYQRLNKKTLEITVKDEITNEKNIELYNILLDKLKNTKYNVFKTPSEIIEQGKEFFTNLSVEEQSIALFKMLGLFNCTLPSGIDLKLIGGSQSSAILSISMDLNKKSFSSIKIIDQSPTGLFEKKSPNLLDL

SEQ ID NO: 21477 - protein, 1104 aa, unidentified
  REGION 1..1104: note = Cas Enzyme sequence
MSRYVLGLDIGITSVGYGVIDIDNNLFVDYGVRLFKEGTAAENETRRTKRGSRRLKRRKSNRLNDMKNLLKENELYFEDYRNYNPYEVRVKGLKEKLLPEELCTAIMHITKSRGTTLEALADESQDDEGTKATLSKNAKELSNGKYVCEVQLDRLNNNHRIRGAENNFKTEDYVKELKEILKHQDLNEELCNQIIEIVSRRRRYDQGPGSEKSPTPYGSYRLVDGVLKHVNLIDEMRGRCSVYPNEFRAPKQSYTAELFNLLNDLNNLTIKGEKITVEEKKKVIAVVNEKGNITVKQLLKLLDAQEDEVTGFRIDKNDKPLITEFKGYSKVLKVFKKYNQQELLEDKLIVDQVIDICTKSKGIDERKKDIKELYPEFDNELIEELASIKGVSAYHSLSFKAMHIINKEMLTTEMNQIQVLHEIEMFDKNRKSLKGKKNIEPDEEAILSPVAKRAHRETFKVINALRKKYGEFDSIVIEMTRDKNSKEQVKRINDSQKRFKSENDRVDGIIKNSGIDPERVNGKTKTKIRLYLQQDCKTAYTQQDIDLHTLIFDDKAYEIDHIIPISVSLDDSLTNKVLASRLENQQKGNLTPMMAYLKGKFTGGNLEKYKLFVSSNKNFNGKKRNNLLTEQDITKEDVARKFINRNLVDTSYACRTVLNTLQHYFKDNEIDTKVHTIRGQSTNIFRKRINLQKDREQDYFHHAIDALIVASLKKMNIVNSYLMHYNYSDLYDEETGEVFDVLPDKQFIDQRYISFISDLKNIYQESNQYNLGYITQEQMHYPLIKVSHKIDTKPNRQIADETIYSTRNIEGQDMLVEKIKNIYDPKEKKAIELVNNIINDDTDKYIMKHKDPQTFEKIKEVVLNHFNDYKDSKEYYVIDKKGKYSLKEESPLTSYYNENGAITKYSKKNNGPAITSMKFYSEKLGNHLAITSNYNTNNKKVILKQISPYRTDFYVSPEGKYKFVTIRYKDVFYKETIHKFVIDENWYHEEKTKKGIQDGWKFVCSMHRDELIGLIKPEGKKFVYDASINGGQTQYHNGKHYEILKFTATNDDKANIFEVKPINTICKKQLRPSAGSMLHIQKFATDVLGNIYEVKDNRLKLEFD

SEQ ID NO: 21478 - protein, 1104 aa, unidentified
  REGION 1..1104: note = Cas Enzyme sequence
MSRYVLGLDIGITSVGYGVIDIDNNLFVDYGVRLFKEGTAAENETRRTKRGSRRLKRRKSNRLNDMKNLLMENELYFEDYRNYNPYEVRVKGLKEKLLPEELCTAIMHITKSRGTTLEALADESQDDEGTKATLSKNAKELNDGKYICEVQLDRLNKDHKVRGTENNFKTEDYVKELKEILKHQDLNEKLCDQIIEMVSRRRRYDQGPGSEKSPTPYGSYRMVDGVLKHVNLIDEMRGRCSVYPDEFRAPKQSYTAELFNLLNDLNNLTIKGEKITVEEKEKVVAFVNEKGNITVKQLLKLLDAQEDEVTGFRIDKNDKPLITEFKGYSKVLKVFKKYNQQKLLEDKLIVDQVIDICTKSKGIDERKKDIKELYPQFDNELIEELASIKGVSAYHSLSFKAMHIINKEMLTTEMNQIQVLHEIEMFDKNRKSLKGKKNIEPDEEAILSPVAKRAHRETFKVINALRKKYGEFDSIVIEMTRDKNSKEQVKRINDSQKRFKSENDRVDGIIKNSGIDPERVNGKTKTKIRLYLQQDCKTAYTQQDIDLHTLIFDDKAYEIDHIIPISVSLDDSLTNKVLASRLENQQKGNLTPMMAYLKGKFTGGNLEKYKLFVSSNKNFNGKKRNNLLTEQDITKEDVARKFINRNLVDTSYACRTVLNTLQRYFKDNEIDTKIHTIRGQSTNIFRKRINLQKDREQDYFHHAIDALIVASLKKMNIVNSYLMHYNYSDLYDEETGEVFDVLPDKQFIDQRYISFISDLKNIYQESNQYNLGYITQEQMHYPLIKVSHKIDTKPNRQIADETIYSTRNIEGQDMLVEKIKNIYDPKEKKAIELVNNIVNDDTDKYIMKHKDPQTFEKIKEVVLNHFNDYKDSKEYYVIDKKGKYSLKEESPLTSYYNENGAITKYSKKNNGPAITSMKFYSEKLGNHLAITSNYNTNNKKVILKQISPYRTDFYVSPEGKYKFVTIRYKDVFYKETIHKFVIDENWYHEEKTKKGIQDGWKFVCSMHRDELIGLIKPEGKKFVYDASINGGQTQYHDGKHYEILKFTATNDEKKGTFEVKPINTICKKQLMPSVGPFIKIQKFATDVLGNIYEVKDNRLKLEFD

SEQ ID NO: 21479 - protein, 1104 aa, unidentified
  REGION 1..1104: note = Cas Enzyme sequence
MSRYVLGLDIGITSVGYGVIDIDNNLFVDYGVRLFKEGTAAENETRRTKRGSRRLKRRKSNRLNDMKNLLMENELYFEDYRNYNPYEVRVKGLKEKLLPEELCTAIMHITKSRGTTLEALADESQDDEGTKATLSKNAKELNDGKYICEVQLDRLNKDHKVRGTENNFKTEDYVKELKEILKHQDLNEKLCDQIIEMVSRRRRYDQGPGSEKSPTPYGSYRMVDGVLKHVNLIDEMRGRCSVYPDEFRAPKQSYTAELFNLLNDLNNLTIKGEKITVEEKEKVVAFVNEKGNITVKQLLKLLDAQEDEVTGFRIDKNDKPLITEFKGYSKVLKVFKKYNQQKLLEDKLIVDQVIDICTKSKGIDERKKDIKELYPQFDNELIEELASIKGVSAYHSLSFKAMHIINKEMLTTEMNQIQVLHEIEMFDKNRKSLKGKKNIEPDEEAILSPVAKRAHRETFKVINALRKKYGEFDSIVIEMTRDKNSKEQVKRINDSQKRFKSENDRVDGIIKNSGIDPERVNGKTKTKIRLYLQQDCKTAYTQQDIDLHTLIFDDKAYEIDHIIPISVSLDDSLTNKVLASRLENQQKGNLTPMMAYLKGKFTGGNLEKYKLFVSSNKNFNGKKRNNLLTEQDITKEDVARKFINRNLVDTSYACRTVLNTLQRYFKDNEIDTKIHTIRGQSTNIFRKRINLQKDREQDYFHHAIDALIVASLKKMNIVNSYLMHYNYSDLYDEETGEVFDVLPDKQFIDQRYISFISDLKNIYQESNQYNLGYITQEQMHYPLIKVSHKIDTKPNRQIADETIYSTRNIEGQDMLVEKIKNIYDPKEKKAIELVNNIVNDDTDKYIMKHKDPQTFEKIKEVVLNHFNDYKDSKEYYVIDKKGKYSLKEESPLTSYYNENGAITKYSKKNNGPAITSMKFYSEKLGNHLAITSNYNTNNKKVILKQISPYRTDFYVSPEGKYKFVTIRYKDVFYKETIHKFVIDENWYHEEKTKKGIQDGWKFVCSMHRDELIGLIKPEGKKFVYDASINGGQTQYHDGKHYEILKFTATNDEKKGTFEVKPINTICKKQLMPSVGPFIKIQKFATDVLGNMYEVKDNRLKLEFD

SEQ ID NO: 21480 - protein, 905 aa, unidentified
  REGION 1..905: note = Cas Enzyme sequence
MINSLSQFEFKQNGNIVNCPESMIHELRQKLFETNGIITKKQLDKICKDYSIERVSNAELDKKKHLIKAPFIQFLSNPEYFPDDLIKEFMEEDFTDLNSLSSKIGFALAKYATPRRRQEEIKAVLSEEDFAAIDNANKIKLYKSNGAANISFKYMSEAIEAYIQGIKYGDFQARFNKEHPNDTKYDYLYPNGKIKPITDPDMVRNPVVYRSLNETRKVINAVLGKYKDISAINIEVAKDVGKSFEQRKETAKFQRDNEELNEQTRAELVQKLTAEKYPVMLSDKLMDKYTLWKSQDHQCIYSGKDISFAELVSGTKVQVDHIIPQSIVLDETLNNKVLVLTEENQKKGNSLPLQYMYDDQAQEFKNRVGNLSRKGNISRIKKEYLLLPYLDDEVISGFVDRNINDTRTISKYIASYLKNAYGNKIKINVIKGAVTSRFRRRWLGSRVKAYNYIPSIYGLDQKNRDLHYYHHAIDAAVVANLKRSYIELAQDYCRFESIKNDIKYHEKHGNAATVGRLSLDLAEEKAKTVDKMFRQYHFNREFTLSLLENNYVPSICENFRNEIEVRVPLSIDFKAKEYADMEKAYRELKQLLNGVRYNLKDCDIAGTEKVIDDDTLEDINSIIHDVDPKVACMNYKAQIIFEDRPIGEIDPEKIRKELDSYVKKLAPRDIKDYINDISMASEDEYAERVHAYYDDDSFADQIEFPYVSFKIDRKFRGSMVASDNPVPLDKTGFATYKELENDINNNLKSPYYVRFNKGIGESGNFTIYDARSYYCMEIYTDENDAYQIRGIRYVDVRIDYKSGRMVLLKPLPENYKHYMYLFKNEYIKAYKKGKLRNNGFGAYRSVNNINQNTGKMRLFSNTNMKGSDIVIILAGECKKIELSILGHIIGECECGDQSLFITENG

SEQ ID NO: 21481 - protein, 1114 aa, unidentified
  REGION 1..1114: note = Cas Enzyme sequence
MIQKSGGLHMGIKIGLDVGITSVGYAVLRTDDEGVPYKIETLNSVIFPAAENPKSGDSLAAPRRGNRGSRRRTRRTKFRKYRTKRLFIRHGLLTAEEIEDIFNQKLGHKTIYELRTEALDRKLTNEELFRILYFFAGHRGFKSNRKAEKAEDDIGIVLSAISEIKTALEEGTYRTLGEYMHAHPKYEEHKRNKDGKDRYLGTAQRDFIIDEIKQIVNAQRGFGNEALTETFEQEFIGNGEGEAAGIFTAQRDFDEGPGKGSPYGGDQIEKMIGWCTFEKEEHRAAKGTYTFQYFELLSKLNNLKIQEFAGDDWKELNPNQRQFIIDKAFSKDKLQYAEIKKLLKLEPEAKFNLLSYGSKTEQDKTEKTNFVALSSYDKVRKALGKEVYEAMPNSLKDEIGTILTTYSSDKSRRRVFADRLSLTSEQVEALLPLTMTQYGHLSLKAMRNIIPYLEMGLTYDKAAESAGYDFKHNAIDRAFIHENVSNPVVKRAVSQCIKVVSQLTREYGKPDAINIEFSRELGKNFEERRKIEKNQKENMARNESIANELRENGIAVNGENITRLKLWREQGNMDPYTGKEIQYGDVFYGHYDVDHIIPYSISFDDSFGNKVLVSSAANREKGNRIPMEYLANDPVGIQNLEKIAGTIRNYNKREKLLKKKLSPEDVDGWKSRNINDTRYIARLLRNYFRQNIEFSEKENIKEKVAVNNGTVTARMRARWGLGPKHRDNDRHHAMDAVVVACMTPAFVRRVTAYSKRQEVRYNKSLWNADTLESDLAHMSIEKREEYEKMFSKSFPQPWEGFRDELNARLSDSPKELIKNIRNTLGTYADEEIEKLKPMFVVRRPNKKITGPAHLETIRSGKLLTEGKSLSRVSISKLKLNKNGEIGTGNAEFYKSEDNGWMPVYNALKAEMEQNGGSGEKAFPDGVFTYTQENGQTHTVRKVKVIQKSTLQAVLNDGKAMADNGSMVRIDVFRTPKKYVFVPVYVKDTVAKELPEKYCVQGKNYVDWPEISDEDQFVFSLYQNDVVRVDHKSGMPLTYSGENIGVEKMENLIGYYSSANIALGCITIRSNDSSFSAVNVGIATLRSLEKMQVDYLGNLSKVKEKTRQTFSNMKR

SEQ ID NO: 21482 - protein, 960 aa, unidentified
  REGION 1..960: note = Cas Enzyme sequence
MKTLGLDLGISSIGWALIENNGNNVEIIDLGLRKFTAGQATEQGKTVGPPALPRREARSSRRTIRRKKARLTKIKRLLNNYKLIESEKSLFYDKKISDVWELRATAVNGILLSAEDFSRVLIHIAKHRGYMSLLDNKDIDDKDNDKDKIKKAISKTEKAIKEFNYQTYGEYVYKEALKNNAGMRNRQKEDGKVDYKYFPTLNLLKNEIDIIFEKQIQSGNKYASNKLKNEYWEIASSFKEPKSFENMVGYCTFFKEEKRAPKHSYLAERFVLLTSIFNTIVIDGDFNETKITNIKPLKDIIEFAYKYDSVTYKQLRNFLSIDDKTKFKGINYDKKRKADPESNKFINLQGFNAIKKICGEEIASNKDLSLKITQILSYYKSVNQRTAELSNMKELNVDMVNALAELENIDGFINLSDKAIDIILIYMETGLRYDEAVKNAQDDGKLPHEENLKQNLLPALNKTDIFITNPTVLRTLSETRKVINAIIRKYGMLDRINIELAREIRTEKERQKYLQAQSKNKDNKTQAEKLLKEIGVNNPSSKDVLKTRLYIQQSQQNGKCISLYSGETIKFERLLEEGYCQIDHILPQSKSMDDGFNNKVLCLAKENQEKGNKLPYEWLNELGRFEIFKDRILSMKDALGYRKVHNLLTDKINTEGFIERNLNDTRYISRTCKNYLETYLKIGEDANTRKVYAVNGILTSKLRHQWGFKDKDRGNDKHHAEDAVIIALTNAAMIKRLSDYYREREFKKHPIFTDPFDNFSKILNEKLNNLPENRLLVSRPPRKKITGAAHKETVISPKKKNDSMVKIHNGNGYAEQALMPRLDVFKKEGKYYYVPIYVADFAKSELPNRIITIGKKKSEWDILDDKYEFLFSLYKDDLIEVKQKNKDKIIGYYQKIGISGSQITYQNIDGSKNINGKGENSDPYFGGKTLEYFKKYQVDPLGFYYEIKKELRCPLSNKKH

SEQ ID NO: 21483 - protein, 1341 aa, unidentified
  REGION 1..1341: note = Cas Enzyme sequence
MGKGYYVGLDMGTGSVGWAVTDESYQILRRHGKAMWGVRLFESAKTAEERRMFRTGRRRLDRRGWRIEILQEIFAEEISRVDPGFFLRMKESKYYPEDKRDIQGNCPELPYTLFVDKTFTDKDFHKKYPTIYHLRKMLMETEDTPDMRLVYLALHHMMKHRGHFLLSGDISQVTEFKNTFNQFIENIRNEEMDFEIELDESAVQMIEETLKDKNLTRSAKKSKLVKGLNAKNVRDKAFLTLLSGGTVKLSDLFGMEELNEGERPKISFADNGYEEYAAVVEMELGELYYIVESAKAVYDWAILSDILGGSTSISDAKVRAYEKHKADLKYLKAVVKEYFPKEVYNAVFVESSDKLNNYPAYIGMTKKNGKKVSLEGKRCSREEFMDFLKKNIVVKLPDEEAKMYLQSELEKDSFLPKQVNKDNGVIPYQVHKYELKKILDNLGDKIPFLKENAEKIEKLFSFRIPYYVGPLRTGNGENSKFAWAERKSTEKIYPWNFENVIDVEQSAENFIRRMTNKCTYLIGEDVLPKDSLLYSKFMVLNELNNLRLDGQKISVELKQKIYRDVFCRSRKVTQKKLKSYLIREGIAGKNVELTGIDGDFKGSLTAYHDFKEKLTGVELTQKEKEEIILNIVLFGDDKKLLKQRLKKKFPQLTEKQINTVTALSYKGWGRLSKKLLEEVTVPAPETGEVWNIITALWETNDNFMQLLSKEYQFSDRIEEFNEEKADPEVSYQTIEDLYVSPAVKRQIWQTLQIIQEIEKVMGEKPKRVFVEMAREKQENKRTESRKKTLSDLYKKCKKEEPEWIEALCTSLEKHEEHQLRSDKLYLYYTQKGRCMYSGEPIDLEDLWDNTKYDIDHIYPQSKTMDDSLKNRVLVKKEYNAKKSDTYPIAADIQKKMMPFWKSLLTGGFVPKEKYDRLIRNNPLDANELAGFIERQIVETRQSTKAVAEILKKILPDTEIVYVKAKTVSKFRQDFDFIKVRDMNDLHHAKDAYLNIVVGNVYFVKFTKNAGWFVKENPGRTYNLEKMFIWDVARDGEIAWKAGKSGSIVQVRAMMEKNHILVTRRSYEVKGGLFDQQILKKGKGQVPVKESDERLRDIGKYGGYNKAAGAYFMLVSSKDKKGKEQRTIEFVPIYLKDRVEKDMESARNYLMEERGLREPKILIKKIKIDTLFKVDGFYMWLSGRTSNQLIFKGANQLILSKEDMKTLKKVVKYIQRQKEDKNVKISVRDGITEEELLKLYETFLDKIRHSIYGVRLSSQEKTLVNGKEKFIDLSVEAKCQVLYEILHLFQCQSGASNLKMIGGPASAGILVMNNNISKCKNISIVNQSPTGIYEKEIDLLRV

SEQ ID NO: 21484 - protein, 1020 aa, unidentified; identical to SEQ ID NO: 17049
  REGION 1..1020: note = Cas Enzyme sequence

SEQ ID NO: 21485 - protein, 1371 aa, unidentified
  REGION 1..1371: note = Cas Enzyme sequence
MNSDRKADYYIGLDMGTGSLGVAVTDPQYHLLKVKGKDFWFVREYETAQPQLERRTHRISRRRLQRHQVRIGLIRSYFADDVLKHDPLFYIRQDNSRYYREDKDSRLPTKDSLFADPNYRDKEYYKEYPTVFHLRQALLKDEISSEERYSRFLYLAIINMFEHRGHFLLNTDSGDVNFEMVKDAGETVMNYLYDSMEESIPKVSYTEVIEILADKGISRSTKKDKISSLLGIKKSNKEQTEFVKCLCGMEADARVLFRMEAEEKIKIAFQQASFEDEQEEIEVAVGEDNYAIIEYMKQLYDYSQLQSVLKGFEYLSDARVEMYDKHKKDLVLLKRVYKNNLSQEKYNIMFRSSEDGTYSAYSNSLNTENSLAAAKKYRRNMKKREKEDLYARIKKDLKGVEDADAEKILKEIELESFLLKQVTGANGVIPNQVHRKELKKILENAENHLPFLKEKDSSGYTVSERILMLFSKNIPYYVGPVGKGSKNGWAEIREEGQILPWNMEQKLDMEKTSERFITNLVRECTYLSGEKVLPKQSLLYEQYCVLNEINNLQINGKRIVPELKQDIYQDIFMGSRLGKKVTKKVLSSYLLNRGLISDESEISGIDREIHAYLGSYGKMYAVFGEKLREEAIRNAAEEMIYYGTIYGDSKAMFRKKLKQCISGGIITDVQAKRIAGYKFKDWARFSKNLLYLKGCDKHTGEIISLIRAMWEYNLNFMELINSEEFTFRDELEGRKRVWEKSLHEFQFEDLKDYYYSAPVKRMIWQTVLALQEITQIMGHNPKRIFIEMTRTEEEKGEPGRKASREKRLLKLYENIRESRDWAAEIKNAGASGSLNSKKLYLYYLQMGKDAYTGEEIDIEELFTDNRYDIDHIYPRSLTNDNNIDNNLVLVSKKINQDEKKNDYPLPEKVRSNPKVRELWSSLHKRGFMNDEKYNRLTASTPLTDEQLAGFIARQLVETAQGTKGIADLFKAMMPEAEIVYVKARNVSDFRKQSFLKSRLVNEHHHAKDAYLNIVVGNVYYTKFTRNPMNFIKNEVQRDSNNYNYNLSKMFENDVVRNGKIAWSVQKNHKPGTMQVVSEVMCKNTPLITRQAFEQKGELFNIQPVGKYSAKAGNYVPLKAKDTKLQNVEKYGGYTSLKPAYFIFIEHGPEKKRKRCFEVVQSYYASQIKKESDLIEFLEKNGYKNPRVIAGKIKKNSLIKYNGYFLYVVGMDSQKRIELSNATPMCLENKYIQYISKLEKAYNEIILSERKKTEPRLSEKVTIENNLKLYRELTDKHVNSIYRNHPRSIGDILEKGEDKFESLDLVHQIKILYNLVLYTSFNRGTFSLTDIGGPKEVGRIRISGNMTEAKELKLIHYSVTGLYKKEIDLLNQ

SEQ ID NO: 21486 - protein, 1367 aa, unidentified
  REGION 1..1367: note = Cas Enzyme sequence
MKKQKFSDYYLGFDIGTNSVGWCVTDLDYNVLRFNKKDMWGSRLFDEAKTAAERRVQRNSRRRLKRRKWRLNLLEEIFSNEILKIDSNFFRRLKESSLWLEDKSSKEKFTLFNDDNYKDYDFYKQYPTIFHLRNELIKNLEKKDIRLVYLAIHSIFKSRGHFLFEGQNLKEIKNFETLYNNLITFLEDNGINKSIDKDNLEKLEKIVCDSGKGLKDKEKEFKEIFNSDKQLVAIFKLSVGSSVSLNDLFDTGEYKKGEVEKEKISFREQIYEDDKPIYYSILGEKIELLDIAKSFYDFMVLNNILADSNYISEAKVKLYEEHKKDLKNLKYIIRKYNKGNYGKLFKDKNENNYPAYIGLNKEKSKKEVIEKSRLKIDDLIKSIKGYLPKVEEIEEKDKAIFNEILNKIELKTILPKQRISDNGTLPYQIHEAELEKILENQSKYYDFLNNGENGIITKDKLLMTFKFRIPYYIGPLNSYHKDKGGNSWIVRKEEGKILPWNFEQKVDIEKSAEEFIKRMTNKCTYLNGEDVIPKDSFLYSEYIILNELNKIQVNDEFLNEENKRKIIDELFKENKKVSEKKFKEYLLVNQMANGTVELKGIKDSFNSNYVSYIKFKDIFGEKLNLDIYKEISEKSILWKCLYGDDKKIFEKKIKNEYGDILTKDEIKKINTFKFNNWGRLSEKLLTGIEFINLETGECYSSVMEALRRTNYNLMELLSSKFTLQENIDNENKDISQFSYRDLVEESYVSPSLKRAILQTLKIYEEIKKITGRVPKKVFIEMARGGDESMKNKKIPARQEQLKKLYDSCGNDIANFSIDIKEMKSSLSLYDNNSLRQKKLYLYYLQFGKCMYTGREIDLDRLLQNNDTYDIDHIYPRSKVIKDDSFDNLVLVLKNENAEKSNEYPVKKEIQEKMKSFWRFLKEKNFISDEKYKRLTGKDDFELRGFMARQLVNVRQTTKEVGKILQQIEPEIKIVYSKAEIASSFREMFDFIKVRELNDTHHAKDAYLNIVAGNVYNTKFTEKPYRYLQEIKENYDVKKIYSYDIKNAWDKENSLEIVKKNMEKNTVNITRFIKEEKGQLFDLNPIKKGETSNEIISIKPKLYNGKEEKLNEKYGYYKSLNPAYFLYVEHKEKNKRIKSFERVNLVDVNNIKDEKSLIKYLIENKKLVEPRVIKKVYKRQVILINDYPYSIVALDSNKLMDFENLKPLFLENKYEKILKNVIKFLEDNQGKSEENYKFIYLKKKDRYEKNETLESVKDRYNLEFNEMYGKFLEKLDSKDYKNYINNKKYQDLLDVKEKFIKLNLFDKAFTLRSFLDLFNRKTMADFSKVGLTKYLGKIQKISSNVLSKNELHLLEESVTGLFVKKIKL

SEQ ID NO: 21487 - protein, 1107 aa, unidentified
  REGION 1..1107: note = Cas Enzyme sequence
MIFEETVFGFDLGKGSIGYCAKRGAEILDLGSMLIPAEHASTQDIAKRRRTFRTRQAHKKRELWLNKIWSEAGLTPLIEFYEDIDKNKSIRVKAADDKLKTEYTPKNSNTIYNSALLRVALMNYSSNPAQDLATLIQGQALNEWQIYKALHAAIQHRGYKHSDYKDHETENTENAAEALDDAKENYEAVQEYEKALQETFSAKELHYPCYFEAKLQGLISDEYPVNLNKIKLRIEDISQAESLSASRTVRRKGRVAPRELVEAELRVLFNNAKEIIPNLKNTETDYFLYGPAKEAFVTVKKNAPKKFKRQRGTEWEAQGVLAQKTPRFDNRMMDKCCLMPLRNTCNAKDSENSKFKLLMHLKNFRFTDVYGERRGFTREDFKKVFEKCFNLVQEKISSEVKSLKLTKAERDKIIKTVLDATFHDPNFNDEIKFNTSGRSSFCRPALKIINEILENTLEPSQIDISKHVQNLDETKPHLGVTKSEIDRVISRLGETWEKISIQDNRYEIDLEDDKYKEIALKIGSVNNPVVRNRLQVFINLVEALAEKHGTPDKIIFEFIRGEGGYIDGNKVVKNYNTAIKDNEKKNDKAAKDLLENGLEVNKKNIDKYKLWERQGRICPYTGEALIPEKFREYQIDHIFPYSDVITSDALFNKVLCLGLANQEKGKRTAYEWISSKGTDEWIKFQARIRNMKALPKRTSELLINTKPLELFERYTGLAETAHVARLAQNVTAKLFGWGLQTRDDERKIFVNSGAVTAKLRSKYKLERLLQNLSEEEWKNLAPELKKKNRDNKLHHALDAYCISCSQSIKEKPDSSINDSDTRRFSCEALEKSKENFEKRFKEISPFNKTRDISDLLPKETIYRLEKIQRKNKKGDLVDFNCLTYHKEFYAYLSEKITKDEVAKRLEKIWDLDLRKDLKNKLELMDFSKENWLNALKDYRHPYRKTLIKKIQVIDKETEPDVYSDNERLCLEEFKDFSPTKSLTRGQFKHTKSHKGQIIYFDEKGKARVYALFAHKNTKLALKELTEKGYELYENGCMFETGDSILVESPFKVGAKEYAAGVYILSSINSDGNIALNGKDVRTTANTLTKAHFIKIDPVKNKKEAALV

SEQ ID NO: 21488 - protein, 1129 aa, unidentified
  REGION 1..1129: note = Cas Enzyme sequence
MGRSKERDCLEVLFANIYLNLTMIFEETVFGFDLGKGSIGYCARRGTEIIDLGSMLIPAEHASTQDIAKRRRAFRTRQAHKKRELWLNKIWSEAGLIPLIEFYEDINKNKSIRVKTADDKLKAEYTAKNSNTIYNSALLRVALMNYSSNPAQDLATLIQGQALNEWQIYKALHAAIQHRGYKHSDYKDHEIENTENAAEALDDAKENYEAVQEYEKALQETFSAKELHYPCYFEAKLQGLISDEYPLNLNKIKLRIEDISQAESLSASRTVRRKGRVAPRELVAAELRVLFDNAKEIIPNLKNTETDYFLYGPAKEAFVTVKKNAPKEFKRQRGTEWEAQGVLAQKTPRFDNRMMDKCCLMPLRNTCNAKDTENSKFKLLMHLKNFRFTDVYGERRGFTREEFKKVFEKCFNLVQEKISSEVKSLKLTKAERDKIIKAVLDATFHDPNFNDEIKFNTSGRSSFCRPALKIINEILENTLEPSQIDISKHVQNSDETKPHLGVTKSEIERVTSRLGETWEKVNIQDNRYEIDLEDDKYKEIALKIGSVNNPVVRNRLQVFINLVEALAKKHGTPDKIIFEFIRGEGGYIDGNKVVKNYNTAIKDNEKKNDKAAKDLLENGLEVNKKNIDKYKLWERQGRICPYTGEALIPEKFREYQIDHIFPYSDVITSDALFNKVLCLGLANQEKGKRTAYEWISSKGTDEWIKFQARIRNMKALPKRTSELLINTKPLELFERYTGLAETAHVARLAQNVTAKLFGWGLQTRDDERKIFVNSGAVTAKLRSKYKLERLLRNLSEEEWKNLAPELKKKNRDNKLHHALDAYCISCSQSIKEKPDSSINDSDTRRFSCEALEKSKESFEKRFKEISPFNKTRDISALLPKETIYRLEKIQRKNKKGDLVNFNCLTYHKEFYAYLSEKITKDEVNKRLEKIWDLDVRKDLKNKLELMNFSKDNWINALKEYRHPYRKTLIKKIQIIDKETESEVYSDNERLCLEEFKDFSPSKSLTRGQFKHTKSHKGQIIYFDEKGKARVYALFAHKNTKLALKELTEKGYELYENGCMFETGDSILVESPFKVGAKEHPAGIYVLNSIKSNGVIAMNSGEIGVPASTLTKARFIKIDPVKNKKEAALI

SEQ ID NO: 21489 - protein, 1080 aa, unidentified
  REGION 1..1080: note = Cas Enzyme sequence
MTPEQALKKWQRDPFYTDKVVVGLDIGIQGIGVCIRKGSRIVFARTYLVSLPESAPLQGRRLKRAMRRSRASLRHRDFLYKLWCKEFNIPLVEGDAKARTNAWTLRLRAATRGVASAEAISVCLRHILGRRGFSYHRDNDDVLQPWGESTDYSTVKRWIDSACFDQNFATEVLRKLNDYEWMMKEGKNTEKGEEICQKVTERVSYYESTPLLNHIEKHLKAPFHLRQKAWDVNFPRDLIEQHAHEIIHKHEKIFGGKTRAEEAYQAYLKILNYARKEPGALAERKVKRCPYFEKLNPETLSKKKPFCAKADNFEVRHLNLVEFLALRGAIDVIGDKHKANHQFYEFCLEHLKQDTEAIKNKSKRPKLGKELRDKFEEALKIKCAKNKDCSPNEHFFDQLKDLLSPRLSSLAGRASCSEQAAKILLSRALTNGWDNLNLIESWAEFFNARRDLEKGYGLAPQVEFLLGRTSKDGKKQATDGLLRRIFTELQGELDTITPDYVVAEVIRDAPRNKEEAKERDKSLKHSKEYLDQLFERYGLEEGGNRTQRTRIELFEQQNGLCPYTGEELKNPLNPALQVDHIYPREMGGTSQRINLVLTTAHTNKLKSKRTPFQALSDFPNLEVSIKRMKWPQAKRDLFLRKELTIPDWQNLTRTSQLARELRDQIARWLGIKGQPDQIRKRIGSPSGLQTAQCRRSSSWKAKLPEVDNKKDRENQRHHLWDAIVLSHIPPADGLQTVHNGGIFYPVAPEEPGSLGWEAIDVGPDINAFEAETKDLCLVVKHRPRKSKQARTEESIYGMREDGRLIIRKSLLTGQKLVQKDAEKWIAGSGIPSAFIPKKKLEDFLNQDKDAKPLILSNGTRVDSVPTLAPQESLMALLPHKNKEGEIIGWKIMGSPYSRMEIWLAPELDKKGNPVFQKRFVPNPRGMASWHRLAKDGKRIWWGKKNNKDGENISDRRRVIGEAMKPFSKKFCTVKIGDFLRTPYDVLGNVLTPTWDKESNSFACKAASEWVWLRITQMGSSGQVGTMIAEKPKNNVIKETNPSNPSAIAAFRFFALQAEKDIKSLALVSSATNQLNKNRAK

SEQ ID NO: 21490 - protein, 959 aa, unidentified
  REGION 1..959: note = Cas Enzyme sequence
MLREFPKAGDTTIYNSALLRIALLRGQKLAGWQIYKAVRSAIQRRGYDNVPWASSSDKDNQENTAAVSEYETRLKHYFGDRKEFYFPCYYEAYRMGLWSPDKPDIFNLRLSSAPNSAHNKTEGDPQATAPRKLVEAELLAMLENAAKQFPELTGKAKEILYGTTCEPYKSVKAIGGILDQKHPRFDNRIIGKCCLIPRLNTCKAKEPLCSEVKFLLALKNMRYTYKGNTTAALEPPQFRLAYEQFKGNIKTPDSKSAKKLITARDWKKFIQTNISEDANPNETQAEIPQPEQRGRSKFCRPALDIMRRLLLSGKGPHEFYAEEIKNPRTGLTREDYAFLLAMPPEWDKICVPDGRLEEQKLDEKARLARIERIIGGVTNRIVRNRLQLLFGRLRSMTANFGKPDKVFVEVARSTFLGEDRLKEHNRMQKEGEKEWKTAREAAGEQSSLRMLLFRLQNGKDLYDTTENNALVETNLGDYEIDHIVPRSRGGSDSPLNMVLTKHELNIDKGNLTPYEWFQRKRTPAEWTAFVDAVKKINVVPDTRYGKRKRTKIELLTSPEAGELARRNTDLQATMQLEKLALQIVSLFFGWPMNAKDEKRHVFAVKGGLTAEIRRDCHLNNLLNPPLSDEDFKALRAQGPDAVKAKERELNEKNRDNPRHHALDAIVISLAGAARIDEKLNKYTLPAGISRETIAQAIQRVYPQELRTCTPKLRDTMYALRCRMENGEPTYYMTTRFNNSIKTISTLKVLKKSVLESIFDRRISHDLLEKFHEDGLTEESWRKFVLDYARTDGRRIRALCKIDSAPFTREEALAENGSPRRVVGDFMQVGKMRGQYMRRKENHKGQLVYIARRMRNNVPMWKVAPVCVFESTQKKYKDYLGKYDSVLLFKANQTVELLDSIPDVKDGIPKGLYTVKIKSDGKCQIKSVDYLKIYECSINELMNIGRMRSFRNEFSSNPHS

SEQ ID NO: 21491 - protein, 978 aa, unidentified
  REGION 1..978: note = Cas Enzyme sequence
EFPKDGDNTIYTSCLLRIALLQGKKLDGWQIYKAVWSAIQHRGYDEKNHWKNDDDSAENKKNVNEYIKYCKDNKFEEKYWLPCYVDAHRMGIWSPEDSNNLYRKRNNETNPAPARNKNHSKYHLVFPRSKVEEELKHLLSQAAKLFPKLAGKENYIVYGPGEVQYASMKKMEFSKYRGKEWDWQGLLGQKIPRFDNRMLNKCCCMSHFNVCRADDMLNQEVMFLMMLKNMRYHSKNKPDEMLTAEQIKELFNKFKDRLKFEKNEKDKVKNRKKEVIPKSLLRKWVIEKLNGEIHPAHSLIPMPNAGGRSRYCRPALEVIREVILSGKTPKQVYEECVAKNKIENPEQNSKKGRIQSDFDFLIKKGTSEKWENFYISDNRYELREMSADERKIEIEKTLNEINNPIVSHRLKWFKKELNKLAFGEPEKKNPGYGIPEKVVLEFARDEFMGKQAKEDYYKFIKEQTKERKIVVEELEKAGFSKPSGEMIRKMMLFRQQDGIDFYSMQNIKLSHLGEYEIDHVIPRSRGGSDAFYNIILTTNKNNSAKGDKTPYEWLGKGDIWDNISEKLKVNKKMGSKKKLLFMASSEEQYKLLIDKYTQLSQTAYISKLAQKVTALTFGWGMQTKDDNRNIVIATGGQTARIRSRFKLDRLLHSGMTDEEFEKALRNGEIEKKNRSNPRHHALDALVLSAVPEIRVDKNRKGKYDDIYPSWLTRDFCEKEVAHVYPKQIKFSKAQLAEVLYGKREVKKEDGLWYTYAITRQNEGTRIEDYYVKKSEKKSDIEDMEKLRNKILKKVNHIFSNDIRTDFKKKLEEKPTEEQWNDFIKNYKVNGTCPHRISVIGNPGVKGFKEKQPLPPNYKEIRPNSKQYYETKTGQKWSYTAQLICLNEKDEWEVHPVYAWDSLYERIKKAEQEFKKVVKFHSRQSVEIKNDCANGKIKKGIYILATIQNGNWGVLESQGEKIDASLNELMNIGEMWPII

SEQ ID NO: 21492 - protein, 1118 aa, unidentified
  REGION 1..1118: note = Cas Enzyme sequence
MSVFSYDLGKESIGYCVRNGYTVQEMGIDLVDSSHASITERGLSGRRRAIRTRLAHKMRETWFRWFWTEKLGLADLPVEDDRWHKEFSRDGILYNGASIRVAMLQGLTNQDETKTPLEDWQLFKGVWSLIQRRGYGAGVAWGEKEAKEGDDQKLVEDYKKKLTDSQLVETFHLPAYLETFRLGVWHPISPNTIECTQGASPLKVRNDKSSAPREMVVAELKALVLALKDLRTNNIAVQELTYETLAYGDAQTPYASYYACKPNPPLAIKPFKKLRGSFKPYKTRINGDWFPLEWEGVLSQKTPRFDNRILSKCVLLPRYSVARNKIQEGKNWYDVPIHQAKALMFLKNIRFMQEVIGDEQQKHFHTRKLTADELKTTWETFLEKPAQSISATWLNAHLPKITGAYYFDNKDARDRQYQVFKPDTDSGRSRFSRPAATLLRDCLLSGLSPQTYVDDLLDKGYYPTEQGEFKPLQPDTAEGKRRGLTPQDLHAFAKRLGGESWDNIHIADNRDDFDGWNQAKREAYIEKVLIGTCMNNVVRNRLQLFYGVFKNQVASFGTPEYVVLEFVRGDMSITQSKKKKDDYNAFLKANTEKNNRLRDELKKAGICNGQGQVAGKDILRLQLLEEQGRHCLYTGRPLSIEDVRSGGADIEHSVPFSRSGTGNRVNLTLADAHANKEKGNKTPYEYMMSKGQEAFNAFAARVMACDYLPKKKKELLLSPDAESLVSSYNGLADTAHISRLVQQVVAMYCGKGLQVKDQDRFVYVMNGQETSQIGRHLDLYKYLLDDPESIGELEPEDRVKKLRDNRKHHALDAYIISWYREYTRRKTWVKDENTTEVQKWCFDPAEVSEGKVREVGREALEQVIPKYIKRNKIDLDPKATFYGIRHIAEKNVYFAVERTNFQELMLKALDTKKREKVLNDLMDKAITNALMPFVNDTKAEWDARIKAFKHPRFKNTPNKVTVRYSSESKAEDITIYPNGRIQMGKYYNMAKAVDINEPFKNVQLKCTKENIGQILYYNQKEKVSVQPIYPYIGLKQTMKQLKEKGYKLYKNGMVFNSGCLIHLSEQLVYNNIVYEGTLELGSLKSNGQTVIKKPGHKESSPAINIKYLIDCGLQVVET

SEQ ID NO: 21493 - protein, 1111 aa, unidentified
  REGION 1..1111: note = Cas Enzyme sequence
MSVFSYDLGEESIGYCVRDGYTVQEMGIDLVDANHASITERGLSGRRRAIRTRLAHKMRETWFRWFWTEKLGLTDLRGGDTRWGKEFSKDGMLYNGASIRVAILQGLTNPNGTPLNDWQLFKGFWSLIQRRGYDAGVAWGEKEAKEGDDQKLVEDYKKKLTESQLDDNFHLPAYLETFRLGVWHPISPKMIESTLGASPLKVRNDKSSAPREMVVAELKALVEALKVLRPQNSAVQELTFETLAYGDAQMAYATYFAGRKNTPFQIKPFQKLRGSFRPYKTRINGEWFPLEWEGVLSQKTPRFDNRILSDCCLIPRFHVCRNMKKDGSWKGVVVHQAKALMMLRNLRFMDMKKQQARGLTPDELNLVWDTFLAYEKESLSSSWLNKTLPKLIEGAFHFKDNKVARNQYKQFDDWTPNDSGRSRFSRPAATLLRDCLLSGLSPQAYVDDLLAKGYYPNPDGEFKPLQAETPEGKRKGLTPQDLQDFAKRLGGDSWDNIHIADNRDSFDDWNQAKREAYIEKVLIGTCMNNVVRNRLQLFYGVFKNQVASHGTPDYVVLEFVRGDMSITQSKKKKDDYNAFLKANTEKNNRLRDELKKAGICNSQGQVAGKDILRLQLLEEQGRHCLYTGRSLSIEDVRSGLADIEHSVPFSRSGTGNRVNLTLADANANKEKGNKTPYEYMISKGQDTFNAFAARVMACDHLPKKKKELLISSDAESLVSSYNGLADTAHISRLVQQVVAMYCGKGLQVKDQDRFVYVMNGQETSQIGRHLDLYKYLLDDPESIGELEPEDRVKKFRANRKHHALDAYIISWYREYTRRKSWVKDEGTTEVQKWCFDPAEVCEAKVRHVGREALEQVIPKYIKRNKAELDLEETYYGIRHLPEQKAYFAVKRVNFQELMLKAPDAKKREKVLNDLMDKAITNALMPFVNDSKPEWENRIKAFKHPRFKNTPNKVMVKYSSAMKESDLITYTNGRIHLGEYYNVSKNVDLSAPFKNVQFKKPKEFLGQILYYDERGKIKVQAVYPHRGLSNTKKYLKSKGYNLYKDGLLFYSGCLINIPSPLEYKGIYYSGIYELQTIESAGSVKIKKPGFKDTVLRTGIARFVEAQFEVVET

SEQ ID NO: 21494 - protein, 1107 aa, unidentified
  REGION 1..1107: note = Cas Enzyme sequence
MSVFSYDLGKESIGYCVRDGYTVQEMGIDLVDANHASITERGLSGRRRAIRTRLAHKMRETWFRWFWTEKLGLTDLRGGDTRWGKEFSKDGMLYNGASIRVAILQGLTNPNGTPLNDWQLFKGFWSLIQRRGYDAGVAWGEKEAKEGDDQKLVEDYKKKLTESQLDDNFHLPAYLETFRLGVWHPISPKMIESTLGASPLKVRNDKSSAPREMVVAELKALVEALKVLRPQNSAVQELTFETLAYGDAQMAYATYFAGRKNTPFQIKPFQKLRGSFRPYKTRINGEWFPLEWEGVLSQKTPRFDNRILSDCCLIPRFHVCRNMKKDGSWKGVVVHQAKALMMLRNLRFMDMKKQQARGLTPDELNLVWDTFLAYEKESLSSSWLNKTLPKLIEGAFHFKDNKVAKNQYNWTPNDSGRSRFSRPAATLLRDCLLSGLSPQAYVDDLLSKGYYPTQDGEFKPLQAETPEGKRKGLTPQDLQDFAKRLGGDSWDNIHIADNRDSFDDWNQAKREAYIEKVLIGTCMNNVVRNRLQLFYGVFKNQVASHGTPDYVVLEFVRGDMSITQSKKKKDDYNAFLKAHTEKNNRLRDELKKAGICNSQGQVAGKDILRLQLLEEQGRHCLYTGRSLSIEDVRSGLADIEHSVPFSRSGTGNRVNLTLADANANKEKGNKTPYEYMMSKGKDAFNAFAARVMACDHLPKKKKELLISSDAESLVSSYNGLADTAHISRLVQQVVAMYCGKGLQVKDQDRFVYVMNGQETSQIGRHLDLYKYLLDDPESIGELEPEDRVKKFRANRKHHALDAYIISWYREYTRRKSWVKDEGTTEVQKWCFDPAEVCEAKVRHVGREALEQVIPKYIKRNKIDLDPKATFYGIRHSSEKNVYFAVERTNFQELMLKALDAKKREKVLNDLMDKAITNALMPFVNDTKAEWDARIKAFKHPRFKNTPNKVTVRYSSESKAEDITIYPNGRIQIGKYYNMAKVVDINEPLKNVQLKCTKENIGQILYYNQKEKVSVQPIYPYIGLKQTMKQLKEKGYKLYKNGMVFNSGCLIHLSEQLVYNNVLYEGTLELGTLKSNGQTVIKKPGHKESSPAINIKYLIDCGLEVVET

SEQ ID NO: 21495 - protein, 1177 aa, unidentified
  REGION 1..1177: note = Cas Enzyme sequence
MNVSNTTLTDGRIWAFDLGKGSIGEAVRQGSRFLHKASLLIPAEFAETKTAAGKRRMWRTRQAHKAREQWLDEVMRRAGIEPLHGRRVGKVDDNGHQKWVQTDKGDYRLEREFPPSRFGKDKAGQPKERVYPGGKAKDGAPAQTGKDFTTCYNSALLRIKLLRGEPLEPWQLYKALHSAIQKRGYGQVPWATRELKRTGRTEEEIEQEMAKKDPEYKAAVTAWGKFKQEFSDSRFHFPCYFDAAKMGLWQPDVLQERINCQAQSTRKVRFDREDVEKEIAMLARQAAQQLPQIQNSFETIKATGWAQSGKSFAVAAKDFGEFLVYGPAGAPPNDAKGDFGRYLFFRKRNGIHPGGSDDWMGATAQKVPRFDNRIINRCALLDGLQVCNVGIRYDAKQNRPYPDSLLASEVTFLMKLKNTLVSRTDGQRKLSPEEIRTVFKSVTVDAMAIPPGTKDWARKVAECYALTKTAWGSKKGVKELGLRPLAGHESIKSPKADGRSRFSRPALRLIRALILSGQNPDEFRRRLLARETTLLDEIGMDVRDLEPTSEVNGVNNFLKQPRPWILIKHLKFLEDLEKANNSWEDIHIPEQRLDSLEARHTAEDDVFDKQAAIRELIGNINDPVVRHRLGVFTRRLEELHRAHGVPATIVLEFVREDFMGDQAKRDLQKFQSDREKSRKEAREKAAELGAGERSAALKYELYKAQGCICLYCGQTLAATDMADHEIEHIVPRSQNGPDAMVNYVLAHKECNEQKDEQTPYQWKHGKEGWNAYENIVKQHAVALRNKKVQLLLREDAPELVQRYTALAETAWISKLAQTIISIHFGWRNGIDYQGENPAKRVIVISGGLTARIRRKYHLNSLLNPPPPGTLNLNEWEANAEKNRDDDRHHALDAMIISFLPAWVRDAHKEHFFRFPETVHENARAFFENEINQVAPKFIAFLKPAFEETFYGQRTIAGEQFIVGREKLAALAVKVVANKRVLKARKDIEFQRIVDPQIRSKVESFLNDNLSLTLDRWDKWCEEFRLGEGGQCVGKILATKSKAGSLDEYKDISKDRTGQFRRGAKHRGYFVFERPAPSKNEPDKMQIDVRPVFVFQNVAQIGNELSKQHGVVLLGYFESGCQVHTTGEWEYKGQKFPASNYICTSIWSNRNAKLKHPRFGEIGPVGLRILFNAGLKRV

SEQ ID NO: 21496 - protein, 1076 aa, unidentified
  REGION 1..1076: note = Cas Enzyme sequence
VQGKQGWQWGCVLATILLTSQNKGKKTMNQETSVTGKTIWAFDLGKGSIGEAVRCGNRFLHKASLLIPAEFAETKTAAGRRRMWRTRQAHKAREKWLDEVMREAGFQVLHGRNYDGTGKWKSSEPADERLEREFAEPGDPTCYTSCLLRIKLLRGERLEPWQIYKALHSAIQRRGYDPDIPWKTRNRRKVKPGEADDDDEAGTETRMQQFEKDLEVMSHGKIEYKFSCYFDAWKMGLWNPDKPNELKDHIDCHAESTRNQIVPRKLVDNEIRALTEAASKHYPKLKGQADFLLYGPAKTPYASFDAKLRKQYNLKEGSATDWQGVLGQKIPRFDNRIIGKCVLIPRMNVCKADVRLDKNDNPIPETLLASEVSFLMKLKNMRIQRGKRTEGLTAGEIKSIFESPDFQKMAITESAWKKKVCAQLGAFPLPGHGLVDAPKFSGRSRFCRPALDILKRLILSGTPPKEFHMAEVARLNGNKNPLKGLVEEDLRFLLKMGETWQGLYIPNQKLDALVRNADNTDEAIRTLIGSQNDPIVRHRLNLFVERLNELNERFGQPENVVLEFVREDFMGKKAKIEYNRFIKERAAERVKFRKEAEEAGATERAAGLKMELLRAQSGRCLYTTAALIPEELDEYVIDHIVPRAKGGPDAVINYVLTTKNANDDKADRTPYEWLFGKEGWDAYVSRVRERAGALRNKKVQLLTSPDAETLVQKYTALAETAWISKLAQALLDLRFGWQNGNDKAGIKRVIIVSGGLTGRIRRKYGLNRILNPDAEDEEEADQKNRDDDRHHALDAMVISFIPNWARDTKKTGFFKFPEGFNREFFAKEIAQVDPRNIALEKPAFEETFYGHRTIDGKDFIVGRESLGDLAAKFVANKRVLKARKDIDSRRIVSPTIRYAVESFLNATPNLTLETWDKWCADFRCGEGGPRVEKILMTKSKANSVEEYKDVSKDKTGQFRRGAKHRGYFVFERPAATKKEPNKMQIDVQPVYVFQSKLQIARILLKEPGVVLLGYFESGCLVRIPKEWEFQRTKYPAADYICTSIWTNRNAKLRHPRYGEIGPIGLRILFDAGLKRV

SEQ ID NO: 21497 - protein, 1076 aa, unidentified; identical to SEQ ID NO: 21496
  REGION 1..1076: note = Cas Enzyme sequence

SEQ ID NO: 21498 - protein, 1139 aa, unidentified
  REGION 1..1139: note = Cas Enzyme sequence
MSTIWAFDLGKGSIGEAVWDEDQKKFLHVASLLIPAEFASTKDAASRRRMWRTRQAHKAREAWLDEVWSSAGLAPLVGRRVGKVDGKWKLIREGDEKLEREFAKSGDPTCYTSCLLRIKLLRGEKLEDWQIYKALHSAIQKRGYGRVPWAAREVGKRELTEEEIAKELKKIDDELAKKDPDYKAAVDAWPKFKEDVPDEQFHFPCYYDAAKMGLWNPKSPRGLAERIDFDAESTRRVRFAREDVNREIAELTRNAAEQLPSLAKAFGGCQKNGWNGFKVSAGDIGEFLVHGPAGKPSEQAEKDFTVYLNERKERGLNPGTADDWMGATGQKTPRFDNRIINDCALLDRMQVCNVAIRFDEKNQRIYPDSLLASEVTFLMKLKNTRVEDGDDQRKLRVDEIRAIFSMASKEAGAVKRSLKSWAEAVANKYSIKGKDWGTKTELKKLNLRPLAGHEVVKPPKTEGRSRFSRPALKLAKALILSGDKPSVFLKRLLDREQALMDEMNLDVRDEPPPTKAKGEKKVKHRAWVLPSQLKFLHDLADPKTNTWEAIYFPEQRLDALEARHRKDGDVDRDAAIREIIGDNNDPVVRHRLMVFAERLVALEEAHGAPRQIVLEFVREDFMGRKAKIELARFQSSREEARKEAREQAAAAGQDERSAPLKFELAKAQGFKCLYCTDKSSFGATSLHEYQIEHIVPRSQGGPDAMVNYVLSHTKCNDDKAEKTPFQWLHGREGWDAYVERVEKCGTALRGKKMQLLLREDAAELVTRYTALAETAWISRLAQKIASIRFGWRNGNDDDGDKRVRVVSGGLTARIRRKYKLNSILNPDAESEEEADKKNRDDDRHHALDAMVISLMPQWLRDPRKEKFFRLPDGMTREHFRDHIEKLMPEMLALEQTRLEKTFYGRRKIFSRKKGKGELHLFAVGREELVSLGVKLEKGKESLRKPKDIKPHRIVEKQIRSDTAEFLAASPNLTLETWKKWCSNYRVGGNGPRVRKVLMTKTEADALEEYANLSKDDVVAQLRRSPQHTGYFVYWLPAPDKKNPDRKLAKVRPVYAFQSASIVLDELRQLGVSGARYFQSGFTVEIENPVAHPRTPLEPGRYLLNSIWEQGNVVVTSPSGRVSAPIGLAHMLNAGFKRVE

SEQ ID NO: 21499 - protein, 1074 aa, unidentified
  REGION 1..1074: note = Cas Enzyme sequence
MPAMSTIWAFDLGKGSIGEAVWNTQTKQFDHVASLLIPPDFASTKEAATRRRMWRTRQAHKAREAWLDEVWKAAGLTPLVGRRVGKVDADGNWIEPKDWNKKGPDGKKRKLTWKLRHEGDPRLEREFPAKGDTTCYTSCLLRIKLLRGEKLEDWQIYKALHSAIQKRGYDPDIAWKSRENRRTRNKKSEDEDKGTAERMAAFENELLAMSPENEDHRMPCYFDAWMMGLWNPAQPDELKDRIDHRSGSTRNRILPRHLVEREIRLLVEAAGRQLPALAGKAWYVIYGPAGRAYASYYKVERDQFKLREGGESDWRGVLGQKIPRFDNRIVEKCVLMPRFNVCKVRSDEQKAHGERGTLPQEVTFLLKLKNMRVQRSPTLQNGLTSVELAQVFNTYCDKGWKLTETQWRKFCASIFTVPVPPSLEVEPPKLAGRSRFCRPALEILKRLILSGQSPKTFHASEVGRLNGNADPRKGLVEADLKFLLDMGDTWEGIHVPNQKLDALAQRTQDSDAAILELIGSQNDPIVRHRLGAFWKRLQWMEEQFGDPQEIAIEFVREDFMGEKALMDYRKFIKDREKERKQARSDAEAAGSMERSAGLKMELLRLQGGICLYKGTPLAETALDEYEIDHIVPRSQGGPDSAVNYILTTKVANDEKGNRTPFEWLSATSGWDTYVSRVKGRQTALRNKKVRLLLLPDAAELADKYTALAETAWIAKLAQTLAGLHFGWKNGNDEQGRKRVTVISGGLTARIRRKYKLNSLLADEDASEEDAEKNRKDDRHHALDAMVLAFIPGWARNESKQKWFRFPEGVTRENTFKHWLSRTLPRNEYLEKPKLAETIYGTRRDGLETVVVQRAELVKLTYRQINPSKTVYDLKYAKEQFKSVRDPVIKRLLLDWCDRGESEEAWKKFAAEFRVPMKNGGNGPLVRRVIMNVGKVDEYVNMSKDRSGAWRKAKKSHRGQVVYLLRTQTKAGKVNESAKVCPVYVFESAQEVMRRLKKEHGANMTVHGFFQSGCMVQIDEDVPHEKMPLPAGSYLLNSIRTDGVVKLTRQDGKTYPDIPRYSVAALIKAGLSRED

SEQ ID NO: 21500 - protein, 1206 aa, unidentified
  REGION 1..1206: note = Cas Enzyme sequence
MSTIWSFDLGKASIGEAVRETETNEFLHKASLLIPAEFASTKDAAVRRRMWRTRQAHKAREAWLDEVWRAAGQEPLRKREVWRNPETKKWELKHPADERLEREFSAKGDPTCYTSCLLRIKLLRGEKLEAWQIYKALHSAIQRRGYGPVPWAGREAKRGHKSEEEIVAALLKKDQSKLSEEELVYREAVEAWPRFKQEVPDARYHFPCYYDAAKMGLWSPAAPGTLNGRVGCSATSTQKVRFDRADVEGEIAALARGATKQIPMLADTFARWQKEGCTVQWEGKPLRPIILFGKKAHSPAAKSFDVMAADFGAFLIYGPAGEPLANARNNFPAYLEFRMTRGIHPGSTDDWMGAMAQKTPRFDNRIINGCALLPPARFQVCKAGPRLNLKTGQPFPDSLLHCEAVCLMKLKNLRVTKDGEQRRLFPRELRVIFEKLRTDALAVRPDVKDWAQKVADRFAIVEKEWGDKKAFAKLGLRPLAGQEEVKAPNIRGRSRHSRPALRLIRALVLSGQRPSIFKARLRAKESELLTELGLDFRDAPLQPRAKVDGKPEPQRPAYVMPRDLKFLDDLIRSGDAWESLHFPEQRLDSLEAQHTDDEGQLDCDAAISEVLGAINDSVVRHRLGVFAGRLKALQFGTKHNPAFGVPERIVLEFVRTDFMGDEAKLKLRRFQEEREKARKDAHEQTMKLGFDGRSVGMRYQLWKAQGGICLYTGEPLMETKLADYEIDHIVPRSLGGPDAQVNYVLTFHDINNTKEKGALTPYALLHGKEGWDCYERRVKSHSTTLRNKKVQLLLREDAPELVERYTALAETAWISRLAQKVASLHFGWRNGIDYGGKETKQRVMVISGGLTARVRRKYRLNSLLAPCPQGADPVQWEEKVEKNRDDDRHHALDAMVINFLENWVRNPSKEHWFRFPPEVHRNAKAFFAEHLEKVTPEPIATEKPVLEEKFYAERVTCEGKRKKLVTKAARRLERIIELPYKTENMRRVYDSSLKTAMKRVENIRDDRLREIFRKIFIEQRPDESSWAKLCEEGFFQLSRAGRRGSKIRRLMLDRGTLEEYRDMSKDGKDGRPALRRGEPHRGFLIFWNAQKELNVRPVYAHESPAKVQSEVAPRDGAARVVAFVFSGCLIETATLVPKENVRLVERNESKQKRRIMAPSDLPAGRYILRQIVTRSHAVELDTPGGKRIMTEAEHLVKAGLKFVRTA

SEQ ID NO: 21501 - protein, 1088 aa, unidentified
  REGION 1..1088: note = Cas Enzyme sequence
MSHSAASVWSFDIGTGSFGLAVRSGNQFKDVRSLLIPDGFASIDDARTRRRMARTREAHRAREYWLRDSFAKAGLQEAVLTGRRAKKELPGATSGKPKWMTLKGDYRLEREFPPSPGQRTKDGAPSDEAGCEICYNSAVLRIRLLQNQRLEPWQIFKALHSAIQKRGYDPNLPWKAQERGKSKKTDDDEMTTMGRVNEAQKELEQLPEDCQLPCYLEAQLIGLWHPADQTHTEIRQSHHAESTKQRIFLRKTVEEELRALAAAAVKQLPALAPHTEDLLYGPGQAAYASYNNPEARTLFEHRTGTPLIRGKATDWQGVLSQKIPTFDNRALSSCALIPRFHSAKCEPKTLPDGTLVPDSLLPAEVTFLMKLKNFRFALAKGATAGFTVVQIREIFEDRVREATVKKDAEAYRLTKTQLNKIIERCGGVSLLPNQTEVEAPRLSGRSRFSKPALKLIRTLVLSGKSPEELHAEALAEVGANTNPLSGLIGSDLQFLRNIKSSGGSAATWENFYLPDESLSFVENSGVSSSAKIRSLIGRQNNPVVRHRLETFWKLLRELEAKHGTPKHIAIEFVREDFMGDKAKIELARFQKERREARAEARKEAGPGKDGLRYQLLKDQGFVCMYCESPLGLVDLPNCHLDHIVPDKMGGPGAYWNFALCCSSCNAAKGKRTPWQWFHEDHRAGWDAYVARVRARTFQLRNKKVRLLTDEDAPTQVQRYQTLAETAWIARLAQMLVCLHFGWPRNFAGGPRHVVVLPGGLTARVRRKYGLNALLGQDIAALELKLKGDADAKVEAEIDKKCRADKRHHALDAMVLSFLPQWTSDPTKQINLKLPEGINLSSFEYVLKDVEPTFIAMKKPVLRDTIYAARKVKGTSIAASRFEISKLGYGTQTPDGKLKDFSPKRLKKQSQEILDSFISMAIGEFADQNPTADEWAAFASQLKSSPNGPLVRKAMRLSNKPNLSNYKDLSKDGNGAWRTSKEGHRGQWVYVTAKGEPKVVPVLVFESPRIIKKEVQTRLDFAEFIGFFESLCCIEIAKEVEHSSKKIPPGRYTLRTLQSDGRASFDSAGGQPFDDIPLKKLLPCGFARI

SEQ ID NO: 21502 - protein, 1062 aa, unidentified
  REGION 1..1062: note = Cas Enzyme sequence
MIMNNTNEHIWGFDMGKGSLGEAVRIGYEFKHVQSLIIDPEFAEIKTAANARRQMRTRKAHLAREKFLEKCLQECGIDVLQRRKVDIVDGKWQLVSKGDVRLEKEFPSANENICYNSIALRCKLILGEKLESWQVFKALNSAIQNRGYDENLPWKETETSSKENNEYSQKLKEFEREKDELLTNLPKLDEKLRSKFDYSCFFKAYKMGLWNPENPDQVNLRIDNQAQKAKCYVIPRKYVEAEFIKLVEMASLQFPKLKNKAMYILYGITEKPYASFDPTMRKEFNLKRGADTDWTALGQKIPCFDNRIVNKCKLIPRFNVCKVKKLDEIKSENDLLHYEITLALKLLNLRFFRNNKEDSLTFEEFKKAFDLAKNNKFKLTKTNVKKLFKELGASVLNEDQSEIEAPSESGRSSFSRPAMKLLKELIFSGISPNEFYQEKIKAITNTDTNKGLVVTDLDFIKLMNATSWNGIYIPDVETYQYAISQNTNSAEQINKIIGSQNDPIVRHRLAFFYERIKSLEKKFGAPDKIVLEFVREDFLGKKAKKDLQDAIKKRAKEKLDIAKKLDEEGFKGNKMLLKLELLQKQGGICLYTGNAISPSDLPSLEIEHIVPRSRGGPDAQYNYVLTDEKTNKEKDNKTPFEWLCSDKQRWASYVDRVRSRTKELGKKRVALLLSENAEELVEKYTALAETAWIAKLAQRIACLHFGFQFGGTTGQKRVFTVSGSVTASIRGAYGLNVILHNTVIDKTKLTEVEILKKHEELEKKNRANKKHHALDAMCLCFAPTGINVKKTKSNQILPIKIAKDAEAYFRKYLDAIIPNEVATKKPRLEESIYAKRIINGKECIVKKFNLIELAYKSGLKPVFDISTIQKLVNSGSKGIINPVIRNIIKEFVDTNPSEEEWINWCNTIRIPAKHGNGTRIIRVQAFVGNPDEYKDLSKDNCGAYRKGDAHKGQIIWKSKNGKYYVAPIYTHASKQTVLESLKQKKDFVEIAGVFRSRCLVKLEDDVYNDVGIPLLPKGIYLLNTIKTNGFAVLTNANGEKTKSPISINYLMQAGMKRITMEY

SEQ ID NO: 21503 - protein, 1054 aa, unidentified
  REGION 1..1054: note = Cas Enzyme sequence
MFMDILGNKVWGFDMGKGSLGEAVRIGNEFKHVCSLLLDADFGEIKTAASLRRQYRTRKAHKAREKWLEDCLRKCGIEVLQRRQVAFVDGKWQLVSKGDIRLEKEFPTDDENICYNSIALRCKLILGEKLESWQVFKALNSAIQNRGYDSEIPWKETEVKSKDNSDYAIKLQAFEREKDELLLNLPSIDEAIRSKFDYPCFFKAYKIGLWNPVNPNQVDSKISHTANKAKGYVIPRNYVEKEFIKLVEMASLQYPKLRNKALFILYGITEKPYASFDFDLRKKFNLKRGAESDWTALGQKIPRFDNRIVDKCKLIPRFNVCKVKHIDEIQQDKDFLYYEITLAMKLLNLRFYRNASVQSLNYDEFKILFEIGKANKFKITKTNLKKFLNSINAEILDENQAEVAQPKDSGRASFSRPAMQLIKELIFSGQSPADFYARKVSSISNVETKKGLVVEDLDFIKLMGDVDWNGIFIPDVETYKFAKNFSEDNSAQINKLIGMQNDPIVRHRLSFFYDRIKYLEAKFGVPDKVVLEFVRDDFIGKEKKKELNIAIKKRYSEKLKIAEKLDEIGFKGSKMLMKLELFQKQGDICLYTGEPLLPTEIPSLEIEHIVPRSRGGPDSAYNFVLTREATNKEKANRTPFEWLSGDSQKWVSYSDRVMSRSKELGKKRCQLLLKENAEELVEKYTALAETAWIARLAQRIVCMHFGFPMGALIGKKRVFTVSGSVTSRIRGMYGLNKILHNTEIDKTLSEVDILKLNDSLETKNRTNKKHHALDAMCLCFAPTSKEVLNKNREILPVEIAKDAENYFRRYLDNIIPNKVATMKPRLEETIYSKRKIGKKEYIVRKYDLESLAYKGINPKYDVEAIKKLANSENIINVVAKKIIRDFVNDNPTEQEWKDFCNTVKMPSKNGNGSRLKRILLLVGNTAEYKDLSKDGCGAYRKGDSHKGQIIWKTKSGKFKVEPIYAHSSRAKVSKELMKKPEFDSVAGIFRTGCLVEFTNDVMNDKDEFLLERGIYSLNTIRSDGMMKCTTSNGIPSKPININYFMEAGMRCVIL

SEQ ID NO: 21504 - protein, 1059 aa, unidentified
  REGION 1..1059: note = Cas Enzyme sequence
MEKEKNNHVWGFDIGKGSLGEAVRIGGDFKHIASVLLDPEFGEIKTAALARRQMRTRKAHKAREKWLEECLEGTGVEILKRREVGIVDGQWQLISKGDERLEREFPPSGEDVCYNSIALRCKLLLGEKLEGWQVFKALNSAIQKRGYDENIPWGEAEEKSSKKDDDDYAQKLSQYEKEKSELFESFADGEKYDFPCFFKAYKMGLWSPENPTRVEVRIDCRAQKAKSYVIARKYVEREFECLVEAAAKFFPKLKGRAKFILYGVSETPYASYYGNMRKKFGLKRGAESDWTALGQKVPRFDNRIIDKCRLIPRMNVCKIRPLNEARNEKDLLYYEVTLALKLLNLRFFRNSNIEQLTFEEFKKAFEIAAGAKYKMTKTAMKKFLKSISATALGDDYAEIEPPKESGRASFSRPAMEILKELIFSGMPPREFYGRKISEISNTDKNKGVVSSDLDFIKLMGDCPWGGIFIPDVQTYQFANAAFPDPDAQINKLIGSQNNPIVRHRLTFFFERIKFLESKYGVPDKVVLEFVRDDFMGEKEKKEMRIAMKKRAEEKMRIAKDLDEHGFKGGNLLLKMELYRKQNGICLYTGDALPLSELATLEIEHIVPRSRGGPDAQYNYVITREKTNKLKGDKTPYEWLSSDAKEWASYTDRVNACAKALGKKRCRLLLEKDAEELVEKYTALAETAHIAKLAQKIVCMHFGFQFGGLSGTKRVFTVPGALTSRIRKFYGLDRILHNSASESENLSFEEFLKFSEDLEKKNRKNKKHHALDAMCLCFAPTGVDSRRAKLGEILPEKLRSEKAAREFFKSYLDKIMPVDVAPKKPRLEDGIYSKRIIGGKACMVKRNNLVDLAYKSGLKPVFDIPTLIKLVDKKEKGIINPQIRKMIGEFAATNPDESAWRKWCEEVRLQSKSGLGARVMRVLVYYGEADEYKDLSKDGCGAYRKGDGHKGQVIWESVDGKYYVEPVYVHASKAGVMAALNANPKKKRICGMFNSHCTVDVGDVYNDKGDFILPAGRYMVNTILTTGRCVLTNADGEKRNPININYLMRAGMRRVELSEL

SEQ ID NO: 21505 - protein, 1059 aa, unidentified
  REGION 1..1059: note = Cas Enzyme sequence
MEKEKNNHVWGFDIGKGSLGEAVRIGGDFKHIASVLLDPEFGEIKTAALVRRQMRTRKAHKAREKWLEECLEGMGVEILKRREVGIVDGQWQLISKGDERLEREFPPSGEDVCYNSIALRCKLLLGEKLEGWQVFKALNSAIQKRGYDENIPWGEAEEKSSKKDDDDYAQKLSQYEKEKSELFESFADGEKYDFPCFFKAYKMGLWSPENPTRVEVRIDCRAQKAKSYVIARKYVEREFECLVEAAAKFFPKLKGRAKFILYGVSETPYASYYGNMRKKFGLKRGAESDWTALGQKVPRFDNRIIDKCRLIPRMNVCKIRPLNEARNEKDLLYYEVTLALKLLNLRFFRNSNIEQLTFEEFKKAFEIAAGAKYKMTKTAMKKFLKSISATALGDDYAEIEPPKESGRASFSRPAMEILKELIFSGMPPREFYGRKISEISNTDKNKGVVSSDLDFIKLMGDCPWGGIFIPDVQTYQFANAAFPDPDAQINKLIGSQNNPIVRHRLTFFFERIKFLESKYGVPDKVVLEFVRDDFMGEKEKKEMRIAMKKRAEEKMRIAKDLDEHGFKGGNLLLKMELYRKQNGICLYTGDALPLSELATLEIEHIVPRSRGGPDAQYNYVITREKTNKLKGDKTPYEWLSSDAKEWASYTDRVNACAKALGKKRCRLLLEKDAEELVEKYTALAETAHIAKLAQKIVCMHFGFQFGGLSGAKRVFTVPGALTSRIRKFYGLDRILHNSAAESENLSFEEFLKFSEDLEKKNRKNKKHHALDAMCLCFAPTGVDSRRAKLGEILPEKLRSEKAAREFFKSYLDKIMPVDVAPKKPRLEDGIYSKRIIGGKACMVKRNNLVDLAYKSGLKPVFDIPTLIKLVDKKEKGIINPQIRKMIGEFAATNPDESAWRKWCEEVRLPSKSGLGARIMRVLVYYGEADEYKDLSKDGYGAYRKGDGHKGQVIWESVDGKYYVEPVYVHASKAGVMAALNANPKKKRICGMFNSHCTVDVGDVYNDKGDFILPAGRYMVNTIRSDNQCVLTNADGEKRNPININYLMRAGMRRVDLSEL

SEQ ID NO: 21506 - protein, 1059 aa, unidentified
  REGION 1..1059: note = Cas Enzyme sequence
MEKEKNNHVWGFDIGKGSLGEAVRIGGDFKHIASVLLDPEFGEIKTAALARRQMRTRKAHKAREKWLEECLEGTGVEILKRREVGIVDGQWQLISKGDERLEREFPPSGEDVCYNSIALRCKLLLGEKLEGWQVFKALNSAIQKRGYDENIPWGEAEEKSSKKDDDDYAQKLSQYEKEKSELFESFADGEKYDFPCFFKAYKMGLWSPENPTRVEVRIDCRAQKAKSYVIARKYVEREFECLVEAAAKFFPKLKGRAKFILYGVSETPYASYYGNMRKKFGLKRGAESDWTALGQKVPRFDNRIIDKCRFIPRMNVCKIRPLNEARNEKDLLYYEVTLALKLLNLRFFRNSNIEQLTFEEFKKAFEIAAGAKYKMTKTAMKKFLKSISATALGDDYAEIEPPKESGRASFSRPAMEILKELIFSGMPPREFYGRKISEISNTDKNKGVVSSDLDFIKLMGDCPWGGIFIPDVQTYQFANAAFPDPDAQINKLIGSQNNPIVRHRLTFFFERIKFLESKYGVPDKVVLEFVRDDFMGEKEKKEMRIAMKKRAEEKMRIAKDLDEHGFKGGNLLLKMELYRKQNGICLYTGDALPLSELATLEIEHIVPRSRGGPDAQYNYVITREKTNKLKGDKTPYEWISSDAKEWASYTDRVNACAKALGKKRCRLLLEKDAEELVEKYTALAETAHIAKLAQKIVCMHFGFQFGGVSGTKRVFTVPGALTSRIRKFYGLDRILHNSAAESENLSFEEFLKFSEDLEKKNRKNKKHHALDAMCLCFAPTGVDSRRAKLGEILPEKLRSEKAAREFFKSYLDKIMPVDVAPKKPRLEDGIYSKRIIGGKACMVKRNNLVDLAYKSGLKPVFDIPTLIKLVDKKEKGIINPQIRKMIGEFAATNPDESAWRKWCEEVRLPSKSGLGARIMRVLVYYGEADEYKDLSKDGYGAYRKGDGHKGQVIWESVDGKYYVEPVYVHASKAGVMAALNANPKKKRICGMFNSHCTVDVGDVYNDKGDFILPAGRYMVNTIRSDNQCVLTNADGEKRNPININYLMRAGMRRVDLSEL

SEQ ID NO: 21507 - protein, 1061 aa, unidentified
  REGION 1..1061: note = Cas Enzyme sequence
MKVMEDEGGNHIWGFDIGKGSLGEAVLDGSEFKHVASLLLDADFGEIETAAGLRRQMRTRKAHKAREKWLESCLSGFGIETLKRREVGIVNGQWTLISKGDERLEREFPPDGENICYNSIALRCKLLLGEKLEGWQIFKALNSAIQNRGYDENIPWKESDASPSKKEGGDYAQKLSQYSREKSELFESFEGGEKYDYPCFFKAYKMGLWSPDNPERVEVRIGSDAQKAKDYVIPRKDVEREFERLVEAASKWYPAMKGKAMYIMYGIAETPYASYKPLLRKKFDLKRGAESDWTALGQKIPRFDNRIIDKCRLIPRLNVCKIRPLSKIRGEADLLHYEITLSLKLLNLRFFRNSNVESLSFGEFKAAFEIAKGAKYKMGKAALKKFLKSISASVLSEDQSEIEAPRESGRAAFSRPAMLLLKELIFSGMTPAEFYAKKSGEISNADPNKGIVASDLDFIKLMGNCGWSGIFIPDVDTFHFANKGAEPAKLINELIGSQNNPIVRHRLSFFYERIKFLESKFGIPDKVVLEFVREDFMGKEQKKRMQIEMKKRASEKMLIAKKLDEAGYKGGNLLLKMELLEKQGGVCLYTGEPLLPSELGVLEIEHIVPRSRGGPDAQYNYVLTREKTNKEKADRTPFEWLSSDPVKWAGYSDRVKARAGQLGRKRCELLLEKNAEELVEKYTALAETAHISKLAQKIVCLHFGFQFGGLSGTKRVFTVPGALTARIRTFYGLNKILHNEDLAHETLSFEGFLKRGEELDKKNRANKKHHALDAMCLCFAPTGVNSKRARVDMLLPPKIRSEKEAELFFRKYLDKLIPVDVAPKKPKLEDGIYSMRTVGGKKIMARRVNLVDLAYKSGLKPVYDVSVLIKLLDKKERGIINPQIRKLVADFARTNPSEDEWKKWCGECRLPSKNGLGTRVIRVLLNYGEPAEYKDLSKDGRGAFRRGDGHKGQIVWESTDGKYCVLPIYVHASKAKLLAELCANPKKKRICGIFTSHCMVKVGNTYNNKGELLLPEGVYMLNTIRTDGWIQLTSANGDKSKPININYLMKAGMKKVPVKDL

SEQ ID NO: 21508 - protein, 1192 aa, unidentified
  REGION 1..1192: note = Cas Enzyme sequence
MSLIFSFDVGKASLGYCVRKGYEIEELKSIIIPSEHADYVELFGGRKRQFRTREAHEKRQNWLRALWNDLGLEGLDSKDSRLVSEFRKSEDEEVCSGVLLRIKLLEGNKLQEWQIFKALWSAIQKRGYDDKLPWASSNSSRKEKKDELIDEVDSGEKSKPENDDDAENKKGIESYEKDLVENCGTDEKFHLPCYLEAAKLCLWKNGRIISHKITYEAEKVRKSAFVAPRHLIEKEIEQLLIKAAEQIPSIKEKEFDFVFFPNEESKRENKGIPVKGKGIDFVLYGQGQKQYASYYKDSEFNRKRGTEWDTQGLLSQKIPRFDNRIIGKCSLIPRLNTCNADDILAQEFKLIQSIRNLIRPNREALPHEKFIMVFQKLRNKLVIKDAPPSINFSLTEINKALKEVDLSQISEKNLHSKQTKSSFFKINNSGRSRLSRPALSCVSELILSGKPINRFVEEICEKGTLEHTAFGLLKNKEDKSKTEVQEKKYKHLITENNPLKGITQSELVNLSSRLGDSWSNYSIQDDREVQDLSKLSLDERKKLVEKELGKISNYVVKNRLQIVINTLNDLLKIHGEPDSVVIEMPRGEDSLDGSQNNLDYIKAQKDREKINKIYIEELAKLEKSPKYLERYKLWKEQRGVCVYTGQTILDSEIDSSKLDVDHIIPRAQNGNNSIINKVLVLKTVNNEKLDRTPYEWLSSNPQKWAEFKEQFETGLLKHLPKFKKKLLLVDPSSEDGKKLIDNLNALQDTRFIAKLGKKLIGIFLGWNEGSEGSKRKLAVVKGSETAEFRREYDLNKLLGDDKEKNRNNNKHHALDAYCMSFANDEWVWTKSENGKQIRRKEHLETSEHVKKVKAEIKSWMEKVVPVDIIKGNPKKGDPKKKKPDETIYGLRLINKKLCIVRYRPLAPSKNDKDKKNDNAEKEEKLKPERIVDPFIREDLKNRFQSRNFDGKTQSEFFQKYLHPNPKRKQQNCEVKRVLYIECEINQEDLKRPLISNGRFCYQNFVDVSKNPSYSIDDLMNEKREKRKNNIQLKKIKQSRNYLIYKDLNSTKDNYGIRHVKGYESIKVAKEELEDKKFEVVNEHLFSGCLIKIHKDFEASVEIKKEKTKNKKTKNEDSTEEIQNDTKEAKTERKIMPSGIYILSSIGEATPRVSLESNNGDSMELLGRLNKLMELGFDLHEPNESKKEGRKLI

SEQ ID NO: 21509 - protein, 1192 aa, unidentified
  REGION 1..1192: note = Cas Enzyme sequence
MSLIFSFDVGKASLGYCVRKGYEIEELKSIIIPSEHADYVELFGGRKRQFRTREAHEKRQNWLRALWNDLGLEGLDSKDSRLVSEFRKSEDEEVCSGVLLRIKLLEGNKLQEWQIFKALWSAIQKRGYDDKLPWASSNSSRKEKKDELIDEVDSGEKSKPENDDDAENKKGIESYEKDLVENCGTDEKFHLPCYLEAAKLCLWKNGRIISHKITYEAEKVRKSAFVAPRHLIEKEIEQLLIKAAEQIPSIKEKEFDFVFFPNEESKRENKGIPVKGKGIDFVLYGQGQKQYASYYKDSEFNRKRGTEWDTQGLLSQKIPRFDNRIIGKCSLIPRLNTCNADDILAQEFKLIQSIRNLIRPNREALPHEKFIMVFQKLRNKLVIKDAPPSINFSLTEINKALKEVDLSQISEKNLHSKQTKSSFFKINNSGRSRLSRPALSCVSELILSGKPINRFVEEICEKGTLEHTAFGLLKNKEDKSKTEVQEKKYKHLITENNPLKGITQSELVNLSSRLGDSWSNYSIQDDREVQDLSKLSLDERKKLVEKELGKISNYVVKNRLQIVINTLNDLLKIHGEPDSVVIEMPRGEDSLDGSQNNLDYIKAQKDREKINKIYIEELAKLEKSPKYLERYKLWKEQRGVCVYTGQTILDSEIDSSKLDVDHIIPRAQNGNNSIINKVLVLKTANNEKLDRTPYEWLSSNPQKWAEFKEQFETGLLKHLPKFKKKLLLVDPSSEDGKKLIDNLNALQDTRFIAKLGKKLVGILLGWNEGAEGSKRKLVVVKGSETAEFRREYDLNKLLGDDIKKNRDNNKHHALDAYCMSFANDEWIWTKSENGKQIRRKKHLETSEHVKKVKAEIKSWMEKVVPVDIIKGNPKKGDPKKKKPDETIYGLRLINKKLCIVRYRPLAPSKNDKDKKNDNAEKEEKLKPERIVDPFIREDLKNRFQSRNFDGKTQSEFFQKYLHPNPKRKQQNCEVKRVLYIECEINQEDLKRPLISNGRFCYQNFVDVSKNPSYSIDDLMNEKREKRKNNIQLKKIKQSRNYLIYKDLNSTKDNYGIRHVKGYESIKVAKEELEDKKFEVVNEHLFSGCLIKIHKDFEASVEIKKEKTKNKKTKNEDSTEEIQNDTKEAKTERKIMPSGIYILSSIGEATPRVSLESNNGDSMELLGRLNKLMELGFDLHEPNESKKEGRKLI

SEQ ID NO: 21510 - protein, 1059 aa, unidentified
  REGION 1..1059: note = Cas Enzyme sequence
MAIPLEIAARRWREDEFYTDAVVLGIDVGLEGIGLCVRRGGGVIYRRTIMRELADSAALEGRRLLRSARRCRRRRKHRDFLLRLFCEKHLPGAWTPITKRVLEHRWRGLQGRLASPHALVQCLRHIVAHRGFSYHMGGEGAFLWGDKPDFKEARKWLQAAYCDERVADLLRLQSEDLEWKEAEREEFERLLAEAIRHSSGRGIAVTLERHLKPGGGKDRPAFRGNAWPREHVIDHLETICRKHAAFFGGEGKLEALLPKLRAIINYERKNEAERLEHARSKAGVCGFAGALLGRHDLPRAMAGDPSVRRLNLLDFLASRRFATSDGLLRETPAAFNASVLRFLDTDLAAVAAAQPRPKFDLKDLKKFLLETLNADLGLTGRQALKLEPKSALNDDYFKQLKDILVQRRSDMEKRGRISAEAAAWLVDPLLAAGDFSQSVISAQFADYRKARIGQRRQHITSPQVEFLLGRGGGREGHLQRLFSKPALREAAGKDRPDYVVIEVVGGAARSRREADEIRKAQLDARKRKEKLAADFGIPPGDLKGNTALKLDLFDQQRGRCPYCGGEMAAPHAADLDLDHIFPNQRGGTSDRRNLVLAHRKCNAAKGQRLPHEAAQAGALPLTWPEILEVVRPMRWGTVDPDGLPRTKRHIFEMLHDSTQCPDWGNLTRQSQIARELREAASAWLGIEGDAPAMARRIGTPTGLHTAVCRRSWRDQIPRKNRADLTHHLWDAITLSFIPPGKGLNTVNYGGIFYHAHPDDPSSTEMRALPVCPDLSPLESRNEECPVEHPRRSNSKQSRFDKSIYGKDSSGRFVIRKPLVKGEQPAHEAQSLAEALRVAGIPEERIPSAKELHRWITAEGTEPLRLRDGTPVRELPRPAAKAGTELTRVAHRDATGRIIGMRVATEANWRIEVWRAEVDGREKFATRVIPHPRCLVNLRRTHGRGVWRSKHPEGGTWRSQLSGTLPKFAKKVGHFEKGMVLRVPLARDGSIAESYSTAYTVHWYRVSALKSDGKVELKLVRVKPPKAETPESWPFQDISMRAFSQEPSRAAKLAMLLRGS

SEQ ID NO: 21511 - protein, 1150 aa, unidentified
  REGION 1..1150: note = Cas Enzyme sequence
MSNLASLPEEYDSLLATWKSHPFYTSAVVLGLDVGLEGIGVCVRRGREVLYAKTWLYDVPAAARLEGRRQLRGARHCRGNRNTRLHRLRQLFAKHGLPWLADDSSALRNSDPFILRHRAVSSANGLASREALSIAIRHCVAHRGHDYEYFSDEGAYPWGDTTAYDKVMSKLATLWLTKQEADKSCSDAEFFEWKDKEVEEFRRLVRQRTAGPALIAARLAEHAKGSKTHVRKRAKGEAFPRKLVRAHLDQIIARHERFIDDANGFRAALFRENKTAADRKHSIFYYHRKTKKEMQAHFEKKRARCPYAAWMGLGNPPTDSRGRPEIRRWSLLEFAAMRDVEVQAKKAPRGTTPRRWRVPLSADLVKKLLDWQKAHPDCHKASDLAEIKKEIVAAIESAHGAKMASESGKNGSDLNARFFKVLRDLLAPSAANMRANAPMSAAAAARLFEIATANGFEREAIRRRLEQCVPGAEVASLYDFRRQPTADLYGVYPQVEFLLGQRVKKAKTHPKGGKAKKRGDLAVPGKLQRLFASLFGGQITAPEYCVVEVARDLPRNQKQRKELDDRIAENEKRRNQLFAKYGVPDDGKTSTRGKLERYDQQGGLCPFTGEELPKPGTKEYAELQDEHLYPHSWGGLTVNENLALVSARVNHPKTGKGQRTPRQYAQEVLGVRFERLLEITAKMRWGTTDRDPATGEWKSFKRRVFAWEHPKEIPPFGNTTRVAQLARQLLAEAGCWMRCTDAVAQAERVGNPTGFQTAACRRAWGLVEKDRNDLTHHLVDAIILAHIPPREGQNFVQSGGIFLPTCDTKKERTTLNVLPLGPDPARVLHLSAHDATECPVLRHRSSSKARPMHDMTHLRVLPGGKLAYRAELPDKATLDPHGLRAMLMAMGIPVSWRDKEGKEHAVIPSNEALKKWLNSDGPEPLRLLNGTPVRNFWRDGGKGTLENDPTGFHAAWNDQGKLMGVKAVLGRWEALELWRGWNPKRKKWEYYKRLIPSRGVLKALRSLGYSWKKKSKRPWRDGAPKITQPLKRALGGKLPPHARRAVHPVTKQPVQIRTGDVFRVGMHDGKIAKRSQTPVETGWLRVTAVGSDQLWLTYHLKKTKVFFRPSSPDDLAFLAGLPPADDPSSYPTQRPPGPSRPSGEADFRLR

SEQ ID NO: 21512 - protein, 1346 aa, unidentified
  REGION 1..1346: note = Cas Enzyme sequence
MKDYLLKTAPNAGEQTWNATHPFYQSATVLAIDIGIEGIGLALRKGPQPLWTQTFEVSLPKAAPLEDRRLKRGGRRTRSSRRARDIQFKAWCVEFGLLTQEQADKLWKDQNRIEEEPAREANRVFDHRLRAVTTGVGSRECVAVCLRHIVKHRGFDYHQTEEGTHPWGDEWKFADILDWLRKTPINQEYADELRREMRDLPDIFNEDKFNALSRAMDGAVERYKDNPVEKMLREHCAEKGHPNLRVSGRRHNFPRELLKLHAFAILNHPKQKEMIATEKWEAAVLRLLGRRDADGNWALTERIGKGKAMTDPGCIMDYHRRTRKEAEELWERKIGKCPYSEHLNKMGHPISLEMTRSLKRDLRIRHFMLLQFLAERTFVASNYQRLHAHPDTIRWALDFLAEDEAAMSAKAARPKMTITELKTRWREAFQVRLAKDNESHNKDYFEQLKDLLCATQSDLSGRASLSAESAAILYAVATLHDTDLEAKGARGRLTGLGYYQWRVNNVSNWGLYPQVEFLLGSRTQYDAEGNSRDKRDSQACLRRGENRAAWGCALADGRAQEHGILRRLFAGQLKDAHGRPVAVRQQMNREDGLPDYVVIEVVGDMPRNLDDKRELQTAAKAKRKAKDEIFEHYHLPSGASDNLKKKTLLFDQQVNADGHLICPYTGMVLKELTPQSTELEVEHVFPQMRGGITVMDNLCVTLRTINAAKGNQTPFEIAGQTIDGVKFLQWAEMKTALSAFRWGKGKRGIFEWDQQGVPDFQNMTRMAQLARQLRTEITNWLGIRKRAAAENEDPTQCAKAIQHEIWERIGTPVGGMTHACAEVWCPKEKFPDYWREVKYGTRIDWVKERLCQRHHLWDALILSHIPPGVGMNNTFCGGIFRVTQHEETGTPVLKPLPELAPDLDTLNKKHQDECLVVSPRQRNSKQSRTLETIQSRADGSGRHWSREPLSKYTAKPTMTEAGIIQLLTDAGLPPKSFTPDGDESAGLKYLRAWWNERNPEKFSLTELEKFLEHNSVLTPEVKTLLPDWWKTDDGKSPPEKKVSVASIGDLLKKAGNSKADLSDEGRFSKSTRQAWLSARASLAELRLPSFKSGHPGQPVRRIPVIQDRKAAASYIPHHNLESRLEQHEPIGVKTTNEACRSFKLYERVTKDVSGSVVNREYWRLKIPPPRNLHNYAKMHGEPWQPEAEDMPPAEAVFVGELVKGQLLRIPIGAKMVPASRGEPATHGWWWYRVASLKDSNGQVEFKLAEYKQPKEPPSDKPDRRSANEKLIAKIWKTAPSGADVLAHFIELNQPQRVQAEGWNIFAADPKPIKKTATRVGNKKAAKPDNNLHLPYMDDPPPDTAGG

SEQ ID NO: 21513 - protein, 1044 aa, unidentified
  REGION 1..1044: note = Cas Enzyme sequence
MQAKESVNRWDQHDFYQSALVLGLDIGIEGIGVWLRCGRECLWARTYETATPESAPLRDRRLKRSARRARQSEKHREVLLKRFCTRFDLPWAAINSNPFKLRLRAITKQLASKQALVICLRHIIRHRGYDYHLTNEGNYPWGDELNLSQAVAWAQSSCCNPALAEKLRYDLANSGLSSEKLAGFSAALAKAEDEYAKQPIPTMLEAHFGEKPHLRPPARQHNFPRELVWAHLEDICRRHPQFFGGETRLNQALPQLKGILDYHRKEPGALAERKVKTCPYAPLLFDGQKLRCDVNTELPIRQFKLLEFLASRSFVSEAGHRLPVTAPLFDWLAETLAKDAAAVTAKLPRPATKDLRKEFAKLAGVKLASDKLSHNGDFFEQLKDLLSPKLSVLKARASLSAKAAQRLCEVALTDGFQPECIQHHLQSYYQWRIDSLRGYGVYPQVEFLLGRRSKSGKQAVPGKLRQILARPEIQARLGDKTVPDYVVVECVGDIPRHRLDKLEIQAEQKSKRAFKEALFAKHHIEGKATDSDRKRVLLFDQQGGSRGEANCPYTGKSLGENPLSPKLQIDHIYPRELGGISEMVNLVLTHTETNLAKGKRTPWQAYSASWDAVLAHLGKMQWNKGKKALFQRQETDCPDWKNMTRMSQLARQLKDEVAHWLDIKGQPLELARRIGTPSGFLTSVCRQSWRDKLPDKNRANQRHHLWDAAVIAHIPPGPGLNHTHYGGIFYQERGEEPGQIAWRAVPDLGPDVLAFEQAHAADCLVEKHRQRKSKAARAEETIYGMDAEGQLWSRKEIFKDGAPVKGAEQMLEHAGFPTTPKDQLPRKLMEHWLTGHQGKPLRLANKTEVRRVPVAAGEESPTALVPHKNHTGEIIGYKKAKETYWRCEIWLAPDKDKKGRPVYQRRLIPHPRGLVALRKRGLSWKHKAEGATESLRQQVCGKLAPFSKKVGSFAKGDLVRLPLDANGDICLPPATPFCWLWYRVSATSSDGKVEMKLVEFKDKSATPLPECEKDILIQKPSSPSVLASLLQLKALHGQPSHPHH

SEQ ID NO: 21514 - protein, 1333 aa, unidentified
  REGION 1..1333: note = Cas Enzyme sequence
MPTTNPYVITHVTKNWMKDEFYDSALVLGLDIGIEGIGVWLRKGREPLFARTFMVSLPEAAPLKNRRAKRAQRHARQSLRRREAMLREWVVRYGLLPQEKTDGRWWKNPAVFERAFEHRHRAITTGVASPECLVVCIRHLLRHRGFDYHLTDEGAFPWGDELDDKEIIQWAKNSCCAPEYRTHLCNLIEADAAWAKNSDGSFTEKYLKVRQALDDAVREYENRPVERMLEQHMSEKNHPHLRPRARGRNFARELVKQHLYAICEKHRHFFAPGTFDQAMRELLGDQTGPSQWKLTWMDQDGKARQTILDYHRRTREEAEELWKRKVKKCPFAPLLFEKRHPTTPQHDCAVRSDPRIRRFNLLMFLAERRIELETHDAEGRLQNPRVNLDANVVRDLLGDLEQDIRAVEALRNKQSASRPDKPGKKTFEQRWRICNDCGKETGQDETGKSSCCKAKTKPKMPLAGVAKGSFNADFFDQLGDLLRPELRSLKGRASLSGEAAEVLFKLVTRNGTDFEPARIRQALEDCGYYDWRTNLPAGLGIYPQVTFLLGNRGHYDKDGNPRQIDKTTGNPVHHGILRRLFAGQLRLDDGTLVGLKDKLDDKVVPDYVVIETIGEIPKNQKEKKEFQDEIKANRSRKTDIIEKKYGLKLDSLSDWQVKQVLLFDQQANEEGEAFSPYSGVSLGTNPLAHDLEVEHIYPERRGGISVMDNLVITWRTENQTKGDRTPWEWAKDEGWRVDVHLQKMHWSANKRALFVRQESDPPQWDNTTRMAQLARHLRAEVIHWLGLDQIQDQKERNKEIARRIGTPTGFQTSVCRESWTPPHVFPQMYRLLCDKKGVPVRDRNGQERWVKDRTNLRHHLWDAAVLSHIPPGVGLNSADCGGIFVHRRDPQNGEWSVSALADLGPDLVAFEKANADRCLVVRLRQRKSKKSRYKETIFSLPDQQNRVFAREPLSKVVTSLLKSKKKNPDAELRKLLDRPGLLNPLEITNKKTGQTKQIKLLNKADVERWLSCKDVSLDQEGFRKFIEDVGVPTEQIPDDAVKAAFMKRNGETLLRKTFKPNSLVSFIRQKCRIKDSEIEARVEIAIAERNERTVLRAANGRDGQPGQVIRSILIEQDKLPPCGFGLHFNPTAKPKRGSEVAGFKPVDNSNSVVYLRREIWIGQRTKKKGRKTTVETFYKSRLIPHPRHLASYQKLHGQPWKADPLPLGMKLAGKLAVGDLLRIPLKKEKRNRNDNLIAKRGETPLESRFYRVKSMKTNGTIEFQMAEFAEPKLVKGQIPDPATERLLETYELTCSNEADLLWLLEVTTGKRIKLPPPVVENAPTTGKREGELL

SEQ ID NO: 21515 - protein, 1333 aa, unidentified; identical to SEQ ID NO: 21514
  REGION 1..1333: note = Cas Enzyme sequence

SEQ ID NO: 21516 - protein, 1424 aa, unidentified
  REGION 1..1424: note = Cas Enzyme sequence
MQTTDRYILAPVTRNWIDHEFYKSALVLGLDIGIEGIGVWLRKGPRPIFFRTFKVTLPEAAPLEKRREKRTGRRARQSRKHRDVLLRAWCQKWGLIGEKDLQRLFADPTKGEKSETHKPFELRLRAITEGKHLASAQALVICLRHIVRHRGYDYHLTNDGEFPWGDELTVSNVVDWAKNAVCSPILKDQIFDDFLQQGWIEKSKRTENLSDERRQELEDENRMKVEDALSNSVDKFHRDPIRKAIEENLQENRHSNLRPAIRGEQYDHPRELVKKHIKEICGKHAHLFGGEDKMKAALVDLIGQRDFDERCILDYHRKTERERLQHAERKSGKCPFAKRLLGQEVVCDFNHHPDVRRFKLQLFLAERQFITKGKGKVYATVELRNWLFQEFLEPDIAATRNLWDKDWPADTKPPARPVKLTKRLLEKKTDLELLPFGSEKNRTHNGNFFDQLTDLLRQDYAVLKKRAKFSGVSAEQLFKTATKNGTVFRDENVRKNLAEYYQMRRDMQGDFFGVYPQVEFLMGHRKQYDAKGNPKDKSKDGKPRYHGILRRLLAGQLELDDGTVVDLAKELGGAMKPEYVVIETIADIPRNEKERQEYQAEQKQRRDWKRGLSEGMQLTDKQQKQCILYEQQDGLCPYTGRELNDALADDLAIDHIFPKSKGGISELRNLVLTHKTTNHAKGERLPYEAAALPNNPFGRSWKEIVADLPKMKGWRRGGRDEALEKIDIVMLEDSSQVPDWGNTTRVAQLARQLREEVICWLGIRQQFDNIADPKERDNQIANEIFRRIGTPSGFMTGCCRKSWLDQNNIPRGFKLLEIQEDGKTVKRIVKDRNDLRHHMIDAAILSHIPPGTGMNLALHGGIFIHNANTTEGDVTMEALPGLGPDLASFEVQHKDECLVSESRRMKSKAKRFEETIYSLPDKDGNMMARVKLSDLVRRLINKKSEASAEKIFELFTKAGLTGKIPLGKVCQKEGLPDKTEKNGLSVETVRRWWENCQREFFTVEEVTEFLREKGISEETLSDATIKDWKWKGKKLKQRITVDSLRWFLGSKIKSWLSDFKKQTMTLPQLKEFLLAKELNGEPLTDEAIEKWWGDKPERKIGIKEIGKLFRANRVSLCPLPDARLEELFEGGVPSDNELRLPDGTLITSIPEVADKEAPTSLMPHKNHKKEVVGFKKARESFVRVEIWFTESKDGEDKIVRYYWCRLIPHARGLAALPEREMKCTGERLSWERPLTDNELKELGLDDHPAVKRLRSSFAKKLKQWERKAAKLKSAAGELELNASVPTEEKPTPPAISLRKIYTGLPAGARPLLGKKLCRIAKGDLLRVPIRKTSGAGKGDGKFCGRNEPATGGEYWYRVTAIKADGEVSMTLAEFDKPKAEKEKKLREDEAWLAKIFMQRPMSADDLAYLLEYSRGDDQPSHSAK

SEQ ID NO: 21517 - protein, 1324 aa, unidentified
  REGION 1..1324: note = Cas Enzyme sequence
LGSPADPPFGYHTGFDLRIEITDSKIMSTMKYSLEMPPHPAGPVDWKAHPFYKSAVVLGIDIGIEGIGLWLRKGPKPIFAHTFRVSLPVSAPLKNRRQKRASRHARKSRKRRERRLQEWIVRHGLLAPERLTEKWNNPSVFERAFEHRLRAINGKLASPEALVVCLRHIVKLRGYDYHLTEDGKYPWGDELEFKAIINWAEHAYCSPDYRTSLLTKIDSDAAWAKDENGRASEKLLAVKAKLETAVKNYDSQPIERMLENHNREKGHPNLRESARGSGNNFPRELVWEHLHKICDRHRDYFPQREASFEIAMEELKKVLDYHRRTPEEAEELWLRKTKICPFAEKLHSLGKVPLQKIKCALRSDFRVRRFNLVMFLAERRLELANHERVNVRQEIVKALLNDLEKDDVFVKAVLEKAKAPPPRPDKPGKHNFEARFKLQLAGVKEGSLNKSFFDQLADLIRPELRSFRDRASLSGESAEALFQISTKENTSFEPEGIKESLRKCGYYDWRKNQDRGLGFYPQVEFLVGQRKHYTDEGAPRDAASADPKKKGNGRNDGQPQHHGILRKLFAGQLRLDDGSVVNLAREIGDSAVPDFVVLETIGDIPSHLLTPKENEKKKKKQASNRAFKLDLIEKYGLLDSSNENLLKRAKVYNQQVVLKKNPETKKGEAVAICPYTGREIGALVPALQIEHIFPESLGGISVVENLAITTKEINQAKGKSAPFEVAGKTINGVKFLDWPSMRALASKFGWSRQKFELFCREESDCPQWDNTTRMAQLARHLRTEVIHWLGLNRIADETERSKKIAEKIGTPSGFLTSVCRDTWTPPSEFPKMYREITDKQGRARWVKNRDNLRHHLWDAAVLSHIPPGVGMNSTSCGGVFVEERDSETGGFKTSALPGLGPDLSTFEKDNASRCLVSKPRQAKSKKSRYKEMIYGLADSRGVHFVREPLAKLAAKQKREQELRKMLDRPGLLKPLEVVNKKTGEKRSIQLLRDSDVEHWLVCKDISLDQKGFRDFLTDLGVPQERITDAAVKEQFVNKQTNELRVRSQFQAKHIIAFLRKKLAIPETEISDLRVEEVFRARMERATLRSANGLNGLPGQKILSIPVKQACQQFYGPHFNPTAPKKNNLRIAGFKAIDNSNSVIYLRREIWIGQRIKKKGRQSVAQTFYEHRLIPHPRHLCAYEKVHGRKWTPEPLPKGMILAGSLSVGDLLRIPLKKEKRNSSDNLIAKRGEGVLDTHFYRVKSLLTEGKVEFQLAEYNEPRVPKDKRPDAATQRLLDIFELSSSREEDLIWLLEITSGKPVPPPAPVLETTSEKQAVPPDSFL

SEQ ID NO: 21518 - protein, 1186 aa, unidentified
  REGION 1..1186: note = Cas Enzyme sequence
RQSEQHREAMLKEFCAKFDLPCTEVRDERNADGPFKVRLRAVRSKLASKEALVVCLRHIIKHRGYDYHETEGGSFPWGDELKPDAAIAWARAAYCSPADAGEILHDISDCGWKEKPMAAFQRALNAAVARYKEGIEAGLDKHFAQDKNNLREPARKKNFPRSLVWEHTENICRQQADYFGGQDRLPGALAELKKILDYHRKKPGALAERKVNRCPLASLLFNIHPPKCDPCGDERIRRFKLLEFLAKRTFVTEDGNRVHANEPLMKWLLDEVLAEDIRVLEANKVNGAPKQPRRKFDSFRADFIAKFDEAGKTKLASNTVSHNKDFFEHLTDLIRPKLTVLAKRASLCGQSADELFKRAAKNGFDAELIRRNMSEKQFGDLSYYEVRQAAAAGFGIYPQVEFLFGCRVRRGKHKDQQAVPGMLRQIFALPEVVECIGSDKKPDYAVIETVGDPPRNAEQARAIQEEQKARRKFKDDLFDKFGIADDKQDSEKRKRVLLYDQQGGSRDKAICPYTGKSLGGDPLSRDLEIDHTFPERRGGISEMVNLVLTHRKTNNERKKNQTPYEAFGGRDNTGEWRDLVARVQKMGWNKQKRDLVLRDESTCPEWDNMTRMAQLARQLREEAARWLGILGNDAKVRERIGTPTGYQTSVCRESWSDKLPADLYPKKNRYNMRHHLWDAAIISHIPPGKGLQHVRCGGIFERAGVDEHGNIAMRALPGLGPDLLGFEKAHEADCLVIKPMPRKTKKSRFQQTIYGHPDECGIMWARDPIDTLAGKQGQSPEKLKQLLRDAGIDENQLPDRRFDEWWERRQAQFFTYDEARSAVGALGLAKERQISDTDFDEWWNKGAKGDKKKLTDKSLRALLAQAHIPKDLVSNEQLQGALLNRGDPGPLTRKDGTEIRGVSGTASTMTPMAVIPHCNGKGETIGFKLATESFIRAEIWTTEKRHRNGEVIRAGDGKPELAYHRRLIPHARGLKNLSLRILKRTGKRLTWERPLTEEEIVELGLKDNPEVKRLRKDYDRARAQHEKATAKSKLAECELTLMQPGSAAAKPKPPVISLRKIYTGLPPHAKRLTNAHGADISRFEKGDLLLVPVNRAGAICELSAPVYRERWYRVMALKANGQIELKLAEFKEIKRLSEKELKEGKFLTPEQEWLSDAFLQQPGSDEVIGRLLQRTRADDQPPHSVK

SEQ ID NO: 21519 - protein, 1016 aa, unidentified
  REGION 1..1016: note = Cas Enzyme sequence
MFYDIIKKKEVFMGKKVFAFDLGKASIGYCVREDATIKEVNSIIVDKDHGEIISQRDRRRVERTLLSHRAREVYFNKIWKDCGLKPFDKEDIKFKKEFAKKDDDTIYTSCLLRILLLQNKKLAEWQIYKALHNAFQKRGYDTNIAWKSSYSDDDKENIALVEKYTQKNGVELINSEEYKYPCYYDALNLGLWEENTPNEFKRFIPQENSSKFRVKSAVAPRILVEKELIKLWQNAQKQLPQLEKYCVEEFLYGDYFIAYGSFYNPELRKFMGTERDWQGVLGQKIPRFDNRIISKCKLLPKRNVCKANTLENVSLVLLMKLKNLRVTSIYGEKIRLNPGEIKIIYENWLEKSASKNNRLDVTITKAEIEDVIGQKISDKIEPMKANISGRSSFCRRACQIMIDIIIEGELYPETIDVSKYIDPAGTKNGITETEIKTMLSKIGDWNNLYIPDNRDENAQMADSTREKTDIMIGNITNPIVRNRLQIFRDLLSRLYLDYGKPDEVIFEFIREGADNSLYGKAKAQAAEAAMNKNFKDNEKIKEELESVNAYDASNFEKLKLLKMQGGKCVYSGKPIAISNFGECEIDHIYPRTMGGNDALYNRVLCYRIENQKKAGRTPYEWLSQDETNWTLYVKRLSDIKQSLGKKKFELLTSKPEDCEKLIDSYNGLAETSHIARVAQQITAFTFGWGLQVEGEKRHIFVNNGSTTAAIRKRYGLNSLLGNDFKKNRENDKHHALDAICISYSRDFKYDKSSGKDIIMVDGFNTHDIAKAIETIIPYPYSNKKPFKGNTKPLETIYGLRTYGDKSYITQRVELISIKPDEKNIRKIIDEVIKSDLIEKLALKPTNTEWVKMLETYVHPKKKTFVKKVMIIVSEGPIERDSNGRERIGEFADFGTKGVKHQMKHSKGHRGQILYYTAKGTVKVMPVYANKSIKDVTEKLQEMGCKLYNGGQMFYSGCLIDVPNEFKAGKETYPAGVYKLRTVMANTGAIKLENNNGIEILTSATYLAQAKFSKYKC

SEQ ID NO: 21520 - protein, 1002 aa, unidentified
  REGION 1..1002: note = Cas Enzyme sequence
MKKKIFAFDMGKASIGYCVRDGHDIKAANSIIISKDHADKSPLKTRKSARKLLEFHRIREKFFNDIWKNCSLNPLDKEDERFKKEFPSQDDNTIYTSCLLRIALLQNKPLENWQIYKALHNAMQRRGYDANVPWKAALTDDDKYNAGLVKRFTTENEVELINSDEYKYPCYYDALRLGLWSEDEPDKFQKSIPADNFTKVRTTNYIAPRVMVESELTKLWENAQKQIPALLKYDTEYFLFGEYREQYGSYKNKEFRSNMGTYKDWQGVLGQKIPRFNNRIISKCKLLPKRNVCKADTSENASFVMLMKLKNLRLTDISGERVRLSVEDINKIYENWIQKIEDNGGKRDRTITMKEINKATGRAFIDKIEPLKVNLSGRSSFCRRACSIMKKVILSGELYPENIDISEFVDKPETKNGITEEEIREMLSKIGDWNNLYIPDNRDKSIESDNIRTKTDLVIGSVTNPVVRNRLQIFRDLLLDLEKKYGIPDEVIFEFVRDGADNSLLSSKKANDYQKRQKEHEKENQQIKEDLGEDLSGETFLKSKLLKEQGGKCVYSGRNISPSDFPSCDIDHIFPRSAGGNDALYNKVLCYKEYNMDKKDRTPYEWFSSDEDRWAEYVNRLNSLKNSGQKKLGQKKFELLTSPPEKCAELIESYNALAETAHIARLAQQITASVFDWHLQAEGENRHIFVNNGSTTYAIRKRYKLNRLLGDDEKKNRDNDKHHALDAICISYSRDFKYNKEIKKDVIEGFSPEIVEMAIRNIIPYPYTNRKPLKVDLNPKETVYGYRKYGDKEFITGRVDLKEIKPDSKKVKTIVDEVIKNDLLAKLETNPTAKEWDEYLTNYTHPTKKTKVKKVLTIVSEGSLEKDSNKRDRMGEYVDFGTKGVKHQFKHSKSHKGQILYFNEKGAVKVMPVYANIKTTDVKEKLQNMGCKLYNKGQMFSSGCLIEIPKEFKAGKETYTAGIYKLTSMWTSGVTEIKNGNGIKILTSAKNLVEAGFRKYNQ

SEQ ID NO: 21521 - protein, 1023 aa, unidentified
  REGION 1..1023: note = Cas Enzyme sequence
MKKKVFAFDLGKVSIGFCARDNFNILDLGSIIIDKDHAEVVSNRDRRRVYKTLQAHKAREKFFNNLWLDCGLEILDKTDKRITIEFAPKDDEIIYNSALLRVALLQNKKLEQWQIYKALHNAIQRRGYDSQLAWANAKSDDDKENEERVAKYTKDENLAELILNDEYKYPCYYDALRLGLWEEENPTTFKRHIPLNNIEKIRTSGLVAPRRFVEKELKQLYINAQKQLPSLEKYSVECFLYGEYEQAYGSYYLNEFKQYRGTEHDWQGVLGQKIPRFDNRIISKCRLLPKRNVCKADTLENVSVVLLMKLKNLRFTGEDGEKYYLSAEHIKLLYENWKEKALQANQSFKLDTTITKKEIEKVIGFGILDKIEPMKANISGRSSFCRRACNIITHIITEGVENPATMEVSLFVDPLGAKNGITEQEIREMLNKIGTWDNLFIPDNRYEMLSQASDEREKTDLLIGSLTNPIVRNRLQIFRDKLLEMKIQYGEPDEVIFEFVRDGADNSLYGSKKAQATLKAMKDNEKKNEDIAKKLKDVNAYSATNFDKLKLLEMQDGRCIYSGKEIAISDLDKCEIDHIFPRSRGGNDALYNRVLCYSIENQNKKDKTPYEWLHNNDEIWNDYVKRITELKKENKINKTKFELLTSKSEDAEKLIESYNGLAETAQIARLAQQITAFVFGWGLQTLGDKRRVFVNNGSSTASIRRRYGLNKILGDDVKKNRENDKHHALDAICISFSREFKYDPIFKKDVIKGFTYDFVKEEIDKLIPYPYANKNPFKGNTRPLETIYGYRAYNGKSYITNRIDITTIEQKDKKIKIIVDEVIKNDLLNKLEEKMSAKDWALMLENYIHPKKQTKVKKVMVVVSEGNIEKDSNGRVRLGEYVDFGTKGTKHQFKHSKGHKGQILYYNEKGTVKVMPIYANQKTQDVKDKLMQMGCKLYKGGMVFYSGCLVNVPKEFEANVYYKTIDNNGKEISKPQKEIIQPNIFKVRTIMSNGGIKLENNSGIEILSSANTLIECEITKLKS

SEQ ID NO: 21522 - protein, 1083 aa, unidentified
  REGION 1..1083: note = Cas Enzyme sequence
MEQLGDNKYAVLEQMKTIYDYAVLAGIQKGYDYLSLARVESYEKHYKDLRLLKGLYRKYKTQEEYDRMFRSEEDGTYSAYVNTSNSTDAITGERKSRRNRKGRKADDLYARIKKDFKNYTEDEEVQYVFNQIEKEQFLTKQLTGENGIIPNQVHKKEMAKILENAEKYLPFLQKKDESGLTISERVLRLFSFQIPYYVGPLGKNCKTGWAVRREEGDVLPWNIQDKIDMQATSEAFIRNLIRECTYIAGEKVLPKSSLAYEKYSVLNEINNIKIDGERIEPKLKQQIFQECFCKGKKVSRKQLCNYLVVQGIIQSADQVTGIDITINNSLASYGKMYAIFGEKLKEDRYIKIAEDIIYWGTIFADSKEMFRQHLLGYVKEGTLTEADSKRILGYKFKDWGRFSRALLELQGCDKSTGEVISLGNAMWEYSLNFMELIHSDCFTFKEALAEKRAKIQTLLSEFEYDDLKDYYFSAPVKRMIWQTILVVREIESVMECAPEKVFVEMTRNDDEKGDRGRKASRGSQLLEIYKNIKNTETHNWKEEISAADGNGRLKSKKLYLYYTQMGRDMYTGEEIDLNRLFDDNLYDIDHIYPRHYVKDDSIVNNLVLVNKSANEHLKKDIYPIPEKITSNSKVRELWEMLHGHKLISDEKYSRLVSKTAFTEKQMGDFIARQLVETGQGTKGVAELLQQLMPDTRIVYAKASNVSEFRNKNGFVKSRLVNEFHHANDAYLNIVVGNVYDVKFTQNPWNFIEKEYAKDKKKNHYNLDKMFAWDVVRGEEVAWIAKNGAQEGTIDTVRKMLWKNTPLMTRMSFEQHGEIANATLYSAKKAKAENYIPLKKDSRMADVTKYGGYTSVTITYYFVVEHREGKKKVISIEGLPLYCKEKVEKTENGLEKYCIEQLGYENVRILYRKLKIQSLLEVDGYRMYLSGKTGNQLTMRNAVNLTLPQKDISYIKKIEKYVETTQMDEILCEAENIKLYDTLKEKHVLAIYSKRPNAVGEKLQKAREKFESLCVEDQCKVLYQIVQLSKIGLASADLTLIGESAHTGVALISKNIKQPEKINLIDQSVTGVYERKRALTELEV

SEQ ID NO: 21523 - protein, 1367 aa, unidentified
  REGION 1..1367: note = Cas Enzyme sequence
MKTQKNQKYYLGLDMGTSSVGWAVTDSDYRLIRRKGKDMWGIREFDEAVAAAERRSHRTSRRRRQREVARIGLLKSYFADAVLAVDENFFTRLENSKYFLEDKDENLSSSNGIFDDENYKDEDYYKEYPTIFHLRKALLDLEQTGKTFDVRLVYLALLNMFKHRGHFLLSTTEDGLDAVQIGLAYEELLLQLNEEYGMGINSKPVEQMIEIIGDKEIGRKLKHEKMIQLFIVEKNNKKANEFLKCMCGLTVNANTFLEPDSEEKITVCFHDFSYADKIPELMEQLGDNKYAVLEQMKTIYDYAVLAGIQKGYDYLSLARVESYEKHYKDLRLLKGLYRKYKTQEEYDRMFRSEEDGTYSAYVNTSNSTDAITGERKSRRNRKGRKADDLYVRIKKDFKNYTEDEEVQYVFNQIEKEQFLTKQLTGENGVIPNQVHKKEMAKILENAEKYLPFLQEKDESGLTISERILRLFSFQIPYYVGPLGKNCKTGWAVRREEGAVLPWNLQDKIDMQATSEAFIRNLIRECTYIAGEKVLPKSSLAYEKYSVLNEINNIKIDGERIEPKLKQQIFQECFCKGKKVSRKQLCNYLVAQGIIQSADQVTGIDITINNSLASYGKMYAIFGEKLKEDRYIKIAEDIIYWGTIFADSKEMFRQHLLGYVKEGTLTEADSKRILGYKFKDWGRFSRALLELQGCDKSTGEVISLGNAMWEYSLNFMELIHSDCFTFKEALAEKRAKIQTLLSEFEYDDLKDYYFSAPVKRMIWQTILVVREIESVMGCAPEKVFVEMTRSDDEKGDRGRKASRGSQLLEIYKSIKNTEAHNWKEEISAADGNGRLKSKKLYLYYTQMGRDMYTGEEIDLNRLFDDNLYDIDHIYPRHYVKDDSIVNNLVLVNKSANEHLKKDIYPIPEKITSNSKVRELWEMLHGHKLISDEKYSRLVSKTAFTEKQMGDFIARQLVETGQGTKGVAELLQQLMPDTRIVYAKASNVSEFRNKNGFVKSRLVNEFHHANDAYLNIVVGNVYDVKFTQNPWNFIEKEYAKDKKKNHYNLDKMFDWDVVRGEEVAWIAKNGAQEGTIDTVRKMLRKNTPLMTRMSFEKNGEIAKATLYSAQKIKENPHNYISLKTQDKRMGDVTKYGGYTAVKIAYFFVVEHQEGKKKSISIEGMPIYCKDMVENTENGLKKYCSDQLGYNNVRVLCKKLKVQSLLEVDGYRMHLSGKTGNQLTMRNAVNMCLPENVTHYIKKIEKYVETTVLEDVLCKTQNEKIYEILTEKHIQTIYSKRLNPVGQKLQRAREKFQDLSMEDQCAVLYQILQLSKIDLTSADLTLIGESGRTGVMQMNKNIKQPEKIKIIDQSVTGLYERKRALTELEI

SEQ ID NO: 21524 - protein, 1353 aa, unidentified; identical to SEQ ID NO: 20351
  REGION 1..1353: note = Cas Enzyme sequence

SEQ ID NO: 21525 - protein, 1200 aa, unidentified
  REGION 1..1200: note = Cas Enzyme sequence
RYKNNIFNDDNYTDKDYFNQYPTIYHLRRELLENTDKHDVRLVFLALLNMFKHRGHFLNSGLGENSGENNISNAYLELTSLLSELTPYNLNETIDCKKIEDLLSSKDMSRTRKAEGLAQILGVDYGNKPYKELIRGLCGLKFNACVIFPEIQSDEVQKLDVCLSEASFDEKSDEIANIIGEDYFEIIMSMKEIYDIGSLAGIMKGHNYLSQARVTLYENHKEDLKILKDVIKKYCDKDEYDSFFNSDADGSYASYVGSYNSKIKQRRVGNKRSSEELYKTIKKILKNAPAEDVDVQSILKAIENETFLPKQLTASNGIIPNQVHAKEMKKILSNAESYLSFLNEKDETGLSVSEKILKLFTFQIPYYVGPTTEKSNKDGGNGWVVRKEEGQVLPWNINEKIDMKATSEAFISRMVRRCTYISDEPVLPKASLEYQSFCVLNEINNIKIDGERISVELKQDIYKDVFQKGKRVTKKQLCKYLHTRGVIEAEEQVAGIDITINNALTTYGKFKAIFGDDMSKDSVQKMVEDIVFWCTIYGDSKKFLKDRIEEKYGEKLTKEQIKRIVGFKFKDWGNLSKNFLELSGADVSTGESVSIIRALWNNNLNLMELINSRLYDYKDRLAEYQNTMIKTLSDIEAEDLDEYYFSAPVKRMVWQTILIIKELVKVLGCEPDRIFVEMTRRPDERKMRTASRRKKFEELYKKVKDEDVDWLKVIAHADETGNIRSKKMYLYLTQKGRCMYTGRHIELSDLFNNNLYDIDHIYPRHFVKDDNIDNNLVLVCKEKNAHKSDIYPLEDDILTSQKNMWSELRRSGFITEEKYNRLMGRNSFTDEQKAGFIARQLVETSQGTKGVANILQQLLPESKIVYAKASNVSEFRNTRDIPKSRLINEFHHAHDAYLNIVVGNVYYVKFTQNPLNFIKNDYDRDKVKNNYNLSRMFDWDIKRNGEVAWTAQKEGGEAGTIVTVKKMLGRNTPLMTRYSFEGKGGLTNETLYSAKKVKEEGYIPFKASDEKLQDVTKYGGFTSVTCAYFFLVEHSEKKKRIRTIESVPLYLAQKIEQDPNELEKYCEQILRLIDFDIRVRKIKIGSLIKYHDYFFYVTGKTGQRLLLRNAVNMCLKKEWVKYISKLEKVRDKAIIDEIVTKEKSELLYLELLKKFKTSIFSNRPNPVGDKLDKSKDKFLNLDIETMYIIMSNITVIFSFG

SEQ ID NO: 21526 - protein, 1353 aa, unidentified
  REGION 1..1353: note = Cas Enzyme sequence
MATFKYYLGLDMGTNSVGWAVTDANYNLLKAKGKDLWGIREFNEASTAVERRTHRISRRRRQREQVRIGLLKDYFHDAIYEVDPDFFHRLTNSKYHMEDKDAEVRYKNNIFNDDNYTDKDYFNQYPTIYHLRRELLENTDKHDVRLVFLALLNMFKHRGHFLNSGLGENSGENNISNAYLELTSLLSELTPYNLNETIDCKKIEDLLSSKDMSRTRKAEGLAQILGVDYGNKPYKELIRGLCGLKFNACVIFPEIQSDEVQKLDVCLSEASFDEKSDEIANIIGEDYFEIIMSMKEIYDIGSLAGIMKGHNYLSQARVTLYENHKEDLKILKDVIKKYCDKDEYDSFFNSDADGSYASYVGSYNSKIKQRRVGNKRSSEELYKTIKKILKNAPAEDVDVQSILKAIENETFLPKQLAASNGIIPNQVHAKEMKKILSNAESYLSFLNEKDETGLSVSEKILKLFTFQIPYYVGPTTEKSNKDGGNGWVVRKEEGQVLPWNINEKIDMKATSEAFISRMVRRCTYISDEPVLPKASLEYQSFCVLNEINNIKIDGERISVELKQDIYKDVFQKGKRVTKKQLCKYLHTRGVIEAEEQVAGIDITINNALTTYGKFKAIFGDDMSKDSVQKMVEDIVFWCTIYGDSKNFLKDRIEEKYGEKLTKEQIKRIVGFKFKDWGNLSKNFLELSGADVSTGESVSIIRALWNNNLNLMELINSRLYDYKDRLAEYQNTMIKTLSDIEAEDLDEYYFSAPVKRMVWQTILIIKELVKVLGCEPDRIFVEMTRRSDERKMRTASRRKKFEELYKKVKDEDVDWLKVIAHADETGNIRSKKMYLYLTQKGRCMYTGRHIELSDLFNNNLYDIDHIYPRHFVKDDNIDNNLVLVCKEKNAHKSDIYPLEDDILTSQKNMWSELRRSGFITEEKYNRLMGRNSFTDEQKAGFIARQLVETSQGTKGVANILQQLLPESKIVYAKASNVSEFRNTRDIPKSRLINEFHHAHDAYLNIVVGNVYYVKFTQNPLNFIKNDYDRDKVKNNYNLSRMFDWDIKRNGEVAWIAQKEGGEAGTIVTVKKMLGRNTPLMTRYSFEGKGGLTNETLYSAKKAKEEGYIPFKASDEKLQDVTKYGGFTSVTCAYFFLVEHSEKKKRSRTIESVPLYLAQKIEQDPNELEKYCEQILGLIDFDIRVRKIKIGSLINRNGYFFYLTGKTGKQLIVRNAVNMCLKKEWIKYISKLEKVRDKAIIDEIVTKEKSELLYLELLKKFKTSIFSNRPNPVGDKLDKSKDKFLNLDIEKQCIILCQILQLSSVLGSECDMTLLGESAHCGKMLISKKIGDEDIYLINQSVTGLYEKKINLRTV

SEQ ID NO: 21527 - protein, 1353 aa, unidentified
  REGION 1..1353: note = Cas Enzyme sequence
MATFKYYLGLDMGTNSVGWAVTDANYNLLKAKGKDLWGIREFNEASTAVERRTHRISRRRRQREQVRIGLLKDYFHDAIYEVDPDFFHRLTNSKYHMEDKDAEVRYKNNIFNDDNYTDKDYFNQYPTIYHLRRELLENTDKHDVRLVFLALLNMFKHRGHFLNSGLGENSGENNISNAYLELNSLLSELTPYNLNETIDCKKIEDLLSSKDMSRTRKAEGLAQILGVDYGNKPYKELIRGLCGLKFNACVIFPEIQSDEVQKLDVCLSEASFDEKSDEIANIIGEDYFEIIMSMKEIYDIGSLAGIMKGHNYLSQARVTLYENHKEDLKILKDVIKKYCDKDEYDSFFNSDADGSYASYVGSYNSKIKQRRVGNKRSSEELYKTIKKILKNAPAEDVDVQSILKAIENETFLPKQLTASNGIIPNQVHAKEMKKILSNAESYLTFLNEKDETGLSVSEKILKLFTFQIPYYVGPTTEKSNKDGGNGWVVRKEEGQVLPWNINEKIDMKATSEAFISRMVRRCTYISDEPVLPKASLEYQSFCVLNEINNIKIDGERISVELKQDIYKDVFQKGKRVTKKQLCKYLHTRGVIEAEEQVAGIDITINNALTTYGKFKAIFGDDMSKDSVQKMVEDIVFWCTIYGDSKKFLKDRIEEKYGEKLTKEQIKRIVGFKFKDWGNLSKNFLELSGADVSTGESVSIIRALWNNNLNLMELINSRLYDYKDRLAEYQNTMIKTLSDIEAEDLDEYYFSAPVKRMVWQTILIIKELVKVLGCEPDRIFVEMTRRPDERKMRTASRRKKFEELYKKVKDEDVDWLKVIAHADETGNIRSKKMYLYLTQKGRCVYTGRHIELSDLFNNNLYDIDHIYPRHFVKDDNIDNNLVLVCKEKNAHKSDIYPLEDDILTSQKNMWSELRRSGFITEEKYNRLIGRNSFTDEQKAGFIARQLVETSQGTKGVANILQQLLPESKIVYAKASNVSEFRNTRDIPKSRLINEFHHAHDAYLNIVVGNVYYVKFTQNPLNFIKNDYDRDKVKNNYNLSRMFDWDIKRNGEVAWITQKEGGEAGTIVTVKKMLGRNTPLMTRYSFEGKGGLSNETLYSAKKAKEEGYIPFKASDEKLQDVTKYGGFTSVTCAYFFLVEHSEKKKRIRTIESVPLYLAQKIEQDPNELEKYCEQILGLIDFDIRVRKIKIGSLINRNGYFFYLTGKTGKQLIVRNAVNMCLKKEWIKYISKLEKVRDKAIIDEIVTKEKSELLYLELLKKFKTSIFSNRPNPVGDKLDKSKDKFLNLDIEKQCIILCQILQLSSVLGSECDMTLLGESAHCGKMLISKKIGDEDIHLINQSVTGLYEKKINLRTV

SEQ ID NO: 21528 - protein, 1023 aa, unidentified
  REGION 1..1023: note = Cas Enzyme sequence
EPQHGESQYPKLIMLHDTSRRRMWRTRQAHKAREHWLDEVMRKSGIEVLHGRQVGKTNGKWVETAKGDPRLEREFAPPGDPTCYTSCLLRIKLLRGEKLEPWQIYKALHSAIQRRGYDPDIPWKTRQQRKDKSGAGDDEAGTQARMVEFEKKLSALSKGNPMLHYPCYFDAHEMGLWDGDSQFKDRIDCQANSTRNQIVPRKLVEKEVTDLVDAAAKQYPKLTGRAKYLLYGPTESAYASFDAKLRNKHGLREGGINDWQGVVGQKIPRFDNRIVGKCVLIPRLNVCKIRMGADGDLHPQSRIAAEAVFLMKLKNMRLQRLGGVHGLTANEISQIFNDPKRTKLGLTSTQWRKCCERFGGYPLPGQFAEVEEPRFSGRSRFCRPALEILKRLILSGDTPQQVHAKELAGLNGNANPLKGLIEEDLKFLLRMGVTWEGIYIPNQKLDALAHSTGDASEAIRQLIGSQNDPIVRHRLTLFADRLGKLAAQFGTPDYVVLEFVREDFMGRKAKFEYMKFQRDRAHDRAKAREEAAQAGATERAAGLKMELYKSQGTICLYTGESLGLTSLDEYVIDHIVPRAKGGPDAAVNYVLTTRQTNDEKLDRTPYEWLSKTPGWDAYVARVRKCTVSLRNKKVSLLTSPDAETLVDKYTALAETAWISKLAQTIIGIRFGWPAGIVDGERKVVVISGGLTGRIRRKYKLNSLLNPTATSEEEAETKNRNDDRHHALDAMVISFIPNWARNSKITGFFRFPEDVHRDLFAKEIAEVIPENVCFEKPALAETIYGARTDYGKKVIVQRAELLSLAMKPTAPGKTTFDPTYACKQAQCIRDAGVQERLLEFLANKPDETSWRKFCAEFYLKRKNGSNGPRVEYVTVTVGEPTEYKDMSKDGTGAYRKALKGHKGQIVFWDAVGDLCVAPVYPHASIHQKRMEIESIGGKSKFYGAFRSDCMIELTSELPVGHYKLVVKNEAKQKRRIAASCPLKAGQFILNTIITKSQDVEMTAPNGAKIATNLEHLVKIGFRQI

SEQ ID NO: 21529 - protein, 1035 aa, unidentified
  REGION 1..1035: note = Cas Enzyme sequence
MSKTETVWAFDLGKGSMGEAVRQGNQFLHKASLLIPAEFAETRTARDRRRMWRTRQAHKARERWLDEVMTAAGIEVLKGRQVGKVDGKWVETAKGDPRLEREFAAPGDSTCYTSCLLRIKLLRGEKLEPWQIYKALHSAIQRRGYDPDIPWKTREQRQGKKSEDEEGKTLTRMQEFEKQLLAMSPDHPEYRWPCYFDAWKMGLWSPAKPDELKERLDFNAQTTRDQIVPRKVVEAEVRALVEAASQFYPSLKGKADYLLYGPPQRAYASYYVEQRKQHGLREGGVNDWQGVVGQKIPRFDNRIIGKCVLIPRLNVCKIRKGDDGKLHPQSRIVAETVFLMKLKNMRLQTAKGVTGLTAQQISKIFADPKRKKYGLTKTQWKQWCIKFGGMPLPGNQEEVEEPHFGGRSRFCRPALEIVKRLILSGDTPPMAYEKEVARLNGNTDPLKGLVKDDLKFLLQMGPTWEGIYIPNQKLDALTRSTEDANEAIRQLIGAQNDPIVRHRLTLFADRLNLLAEKHGTPDCVVLEFVREDFMGRKAKQEYLKFQRERAKERSEAREEAAKAGATEGAAGLKMELYKAQGGICLYTGEALSVTSLDEYVIDHIVPRAKGGPDSVMNYVLTTRRANDDKLDRTPYEWLSQTPGWDAYVERVKERAVTLRNKKVSLLTRPDADTLVDKYTALAETAWISKLAQTIISLRFGWPGGIANGERKIIVVSGGLTGRIRRKYKLNSLLNPDAKSEEEAEVKNRNDDRHHALDAMVISFIPNWARDAKKTGFFRFPDGIHRELFAKEIADVIPLNVCFEKPALAETIYGARNDHGAKVIVQRTALLSLAMKPTTPGKTTFDLKYAGKQAQSVRDPIIQKRLLEFIATNPDEATWRKFCAELHIKRKDGTAGPRVEYVTVTVGEPTEYKDMSKDGTGAYRKALKGHKGQFVFVDSKGKFKVRPVYAFESAQKVGQELTQKFGQNAIKGFFQSGCLVELTAPVPHSFTPLVPGQYKLNTIFTDGRAKLTDSTGKQSLPISLEKLFSAGFKRAR

SEQ ID NO: 21530 - protein, 1035 aa, unidentified
  REGION 1..1035: note = Cas Enzyme sequence
MSKTETVWAFDLGKGSMGEAVRQGNQFLHKASLLIPAEFAETRTARDRRRMWRTRQAHKARERWLDEVMTAAGIEVLKGRQVGKVDGKWVETAKGDPRLEREFAAPGDSTCYTSCLLRIKLLRGEKLEPWQIYKALHSAIQRRGYDPDIPWKTREQRQGKKSEDEEGKTLTRMQEFEKQLLAMSPDHPEYRWPCYFDAWKMGLWSPAKPDELKERLDFNAQTTRDQIVPRKVVEAEVRALVEAASQFYPSLKGKADYLLYGPPQRAYASYYVEQRKQHGLRAGGVNDWQGVVGQKIPRFDNRIIGKCVLIPRLNVCKIRKGDDGKLHPQSRIVAETVFLMKLKNMRLQTAKGVTGLTAQQISQIFADPKRKKYGLTKTQWKQWCIKFGGMPLPGNQEEVEEPHFGGRSRFCRPALEIVKRLILSGDTPPMAYEKEVARLNGNTDPLKGLVKDDLKFLLQMGPTWEGIYIPNQKLDALTRSTEDANEAIRQLIGAQNDPIVRHRLTLFADRLNLLAEKHGTPDCVVLEFVREDFMGRKAKQEYLKFQRERAKERSEAREEAAKAGATEGAAGLKMELYKAQGGICLYTGEALSVTSLDEYVIDHIVPRAKGGPDSVMNYVLTTRRANDDKLDRTPYEWLSQTPGWDAYVERVKERAVTLRNKKVSLLTRPDADTLVDKYTALAETAWISKLAQTIISLRFGWPGGIANGERKIIVVSGGLTGRIRRKYKLNSLLNPDAKSEEEAEVKNRNDDRHHALDAMVISFIPNWARDAKKTGFFRFPDGIHRELFAKEIADVIPLNVCFEKPALAETIYGARNDHGAKVIVQRTALLSLAMKPTTPGKTTFDLKYAGKQAQSVRDPIIQKRLLEFIATNPDEATWRKFCAELHIKRKDGTAGPRVEYVTVTVGEPTEYKDMSKDGTGAYRKALKGHKGQFVFVDSKGKFKVRPVYAFESAQKVGQELTQKFGQNAIKGFFQSGCLVELTAPVPHSFTPLVPGQYKLNTIRTDGRAELTDSTGKQSLPISLEKLFSAGFKRAR

SEQ ID NO: 21531 - protein, 1058 aa, unidentified
  REGION 1..1058: note = Cas Enzyme sequence
MQPKDYVLKSANSPLPPSEPDQLCVWAFDLGKGSIGEAVRVGATFKHKASLLIPGDFAETRTARDRRRMWRTRQAHLAREQWLREVFQAAGLPVLYGRNYDAKTGDWKPGELGDPRLEREFPPRGEATCYTSCLLRIKLLRGEKLEPWQVFKAFHSAIQRRGYDPDIPWKTREARRKNERDAEDDEAGTEQRMRDFEKALHEMAPSQPDYRFPAYFDAWKMGLWNPAQPAADPKLRVDCNAETTRNQIVPRKLVEAEIRRMVDGAAKHYPALAGKAEHLLYGPAQKPYASYNTNPNKTPFLREGAATDWQGVVGQKIPRFDNRIIAKCAVIPRLNVCKLREGEKGQPHPQSLVAVEVAFLMKLKNLRFQRAHQQQSLSAAEIRAIHDDPRRKNWAITRAAWKKYCAGIGAVPLPGHEEIESPRFSGRSRFCRPALEILKRLILSGQKPSAFLCDELVRLNGNKDPHKGLVESDLKFLREMAESNDTWDGLYIPNQQLDALAQSSADPDEAIQRLIGQQNDPVVRHRLDTFAKRLKALDVHGRPDHVVLEFVREDFMGKKAKIELSKFMRDRAEERKKAREEAAKAGATEKSAGFKLELLRAQGGRCLYTDAGLEPSRLDEYEIEHIVPESRGGPDSLINKVLTTKAANREKADRTPYEWLSATAGWDAYVNRVRSRSLALRNKKVQLLISPNAEDLAERYTALAETAWIAKLAQTIVGLHFGWRNGVDYSGPQAIKRVLVVSGGLTGRIRRRYGLNRILNPNAADEEEAEKKNRNDDRHHALDAMVISFLNPQKVEPKLPDGVHREFFAKAIADVMPQNLCYEKPALAETIYGARGADAERVIVQRVELFKLAMKGIAPGKTKFDPDYLAKQIQWVRDGHVQRKLAEFHATSPDEAKWKAFCENFRLAGKNGSPGSLVRRVLMRVGSPTEFKDLSKDGTGAWRKRKKDHRGQIVVAESGDSWRVLPVYVFESSTQKLASFKQAYPDGKTLGFFQSGCLVTVSSEVLHRKKPLPAGTYKLRTLRDDGYVQIEDQQGRTYPDWPLYGLANMIAAGFRRAD

SEQ ID NO: 21532 - protein, 1101 aa, unidentified
  REGION 1..1101: note = Cas Enzyme sequence
LRHLLTHDEKPTGFTERLRKQDKELLNELGFELLNSEPRRTPMKHRQQKRRERPWLLLDDLDFLDLAWKAKDEQGKPRQYSPHDLRIPDMALRHLRKKHSLTQTPFSELVHRADPELKRREQAISDLIGEQNNPIVRERLTRYWKRLQHFQNPTISPDAKKQKAGFGLTEPECLVLEFVRDDKDNSFDGQKRLETYQEVLRRNEDRRERARKALEASKLPTSDEMIVRWMLLEDQGPFCIYTSNAISCCDLANQTIQIEHIVPRALGGPDAYWNWALCTEEANAQKSNRIPYNWFREEKTDGEWAEYKRRVLDRASKLGRRKVDLLLRADACELVGEKYTSLAATAWIARLAQSVARLHFGWPLDDEREKERVIAISGGLTARIRRKYLLDSLLGSDEDAVKLRKDIDDTLAELDGLKADTSLGEMARKQKRADLRQKLQALASESGKNRDDQRHHALDAMVLSFLPNWARDRNKQDFFRFDEVGDNALYSEEGLKEVTLARKRIQQLAAETAPIRERIKAAKETGKWDEMQRLKDGIFPQRKEMAQCFQFLDKRKQPRNIRAVRDWFRQQLEVESPVLPRSVAFKKTPVEDTLYRRAYLIDRNHVELSRIPLIELGLRPDFHDVTRCLFDLKWLHTRIQSITDHADYDRNKLKAALDDKLKVACVSCCAKGRAFGDGDWRAIATQPDVQGLFRNGNSKRTATDPAECKVKVFQVALLPAKRYPLSDLAYGTGNVYVWNPDYFDDTTGKIVRKLDSSPRGRGRRQIRQAIASQPHPDALPWDNWKNFAWDRETQANVKTLRQQLEQELAPLLPGPKPKGMTASETEIWDEKQQAFKDALDKFRQEHKLPKALFLFTWQTDRPPKKPLALLRVLFERKDRVFSAHILQKRADKIVDQTLGNYFGWFADSLFQIPGGIQQESLWKEFCAVARTVDKQRVAEFVGSNSNLSARQWIDFLKRQSGPGVTQIQRTVGENLEEYCDLSKDGTGQFVRGGNRGYLICTKADRIQAFPIRFFQSKTLVREWLTGNKWELADSQIWRSGDLLRLSKPAGTTKKTVQPNYYFLGSFSNNGKTVNLNVCFGGDVPQGISLKSLWEAGLRREE

SEQ ID NO: 21533 - protein, 1124 aa, unidentified
  REGION 1..1124: note = Cas Enzyme sequence
SNDVVKAPKPTGRSRFCRPALAILRHLLTHDEKPTGFTERLRKQDKELLNELGFELLNSEPRRTPMKHRQQKRRERPWLLLDDLDFLDLAWKAKDEQGKPRQYSPHDLRIPDMALRHLRKKHSLTQTPFSELVHRADPELKRREQAISDLIGEQNNPIVRERLTRYWKRLQHFQNPTISPDAKKQKAGFGLTEPECLVLEFVRDDKDNSFDGQKRLETYQEVLRRNEDRRERARKALEASKLPTSDEMIVRWMLLEDQGPFCIYTSNAISCCDLANQTIQIEHIVPRALGGPDAYWNWALCTEEANAQKSNRIPYNWFREEKTDGEWAEYKRRVLDRASKLGRRKVDLLLRADACELVGEKYTSLAATAWIARLAQSVARLHFGWPLDDEREKERVIAISGGLTARIRRKYLLDSLLGSDEDAVKLRKDIDDTLAELDGLKADTSLGEMARKQKRADLRQKLQALASESGKNRDDQRHHALDAMVLSFLPNWARDRNKQDFFRFDEVGDNALYSEEGLKEVTLARKRIQQLAAETAPIRERIKAAKETGKWDEMQRLKDGIFPQRKEMAQCFQFLDKRKQPRNIRAVRDWFRQQLEVESPVLPRSVAFKKTPVEDTLYRRAYLIDRNHVELSRIPLIELGLRPDFHDVTRCLFDLKWLHTRIQSITDHADYDRNKLKAALDDKLKVACVSCCAKGRAFGDGDWRAIATQPDVQGLFRNGNSKRTATDPAECKVKVFQVALLPAKRYPLSDLAYGTGNVYVWNPDYFDDTTGKIVRKLDSSPRGRGRRQIRQAIASQPHPDALPWDNWKNFAWDRETQANVKTLRQQLEQELAPLLPGPKPKGMTASETEIWDEKQQAFKDALDKFRQEHKLPKALFLFTWQTDRPPKKPLALLRVLFERKDRVFSAHILQKRADKIVDQTLGNYFGWFADSLFQIPGGIQQESLWKEFCAVARTVDKQRVAEFVGSNSNLSARQWIDFLKRQSGPGVTQIQRTVGENLEEYCDLSKDGTGQFVRGGNRGYLICTKADRIQAFPIRFFQSKTLVREWLTGNKWELADSQIWRSGDLLRLSKPAGTTKKTVQPNYYFLGSFSNNGKTVNLNVCFGGDVPQGISLKSLWEAGLRREE

SEQ ID NO: 21534 - protein, 1336 aa, unidentified
  REGION 1..1336: note = Cas Enzyme sequence
VAAATFAEFLVHGPAGEPTAEAKADFGKYLKFRKQCGIHPGSNADWMGATAQKTPRFDNRIVQACALIPRLQVCRIAPRWRATANGQKQIDPRSLLAAEVVFLLQLKNVQVDDPNESLLRFLKPSELTELLEFVRNETNAVPIADGWERKVLDCFKITKARWNKWCREKNLQPINTESSDNQSEQEPASETSHDVAAATAPENTATKQARSKSNDVVKAPKPTGRSRFCRPALAILRHLLTHDEKPTGFTERLRKQDKELLNELGFELLNSEPRRTPMKHRQQKRRERPWLLLDDLDFLDLAWKAKDEQGKPRQYSPHDLRIPDMALRHLRKKHSLTQTPFSELVHRADPELKRREQAISDLIGEQNNPIVRERLTRYWKRLQHFQNPTISPDAKKQKAGFGLTEPECLVLEFVRDDKDNSFDGQKRLETYQEVLRRNEDRRERARKALEASKLPTSDEMIVRWMLLEDQGPFCIYTSNAISCCDLANQTIQIEHIVPRALGGPDAYWNWALCTEEANAQKSNRIPYNWFREEKTDGEWAEYKRRVLDRASKLGRRKVDLLLRADACELVGEKYTSLAATAWIARLAQSVARLHFGWPLDDEREKERVIAISGGLTARIRRKYLLDSLLGSDEDAVKLRKDIDDTLAELDGLKADTSLGEMARKQKRADLRQKLQALASESGKNRDDQRHHALDAMVLSFLPNWARDRNKQDFFRFDEVGDNALYSEEGLKEVTLARKRIQQLAAETAPIRERIKAAKETGKWDEMQRLKDGIFPQRKEMAQCFQFLDKRKQPRNIRAVRDWFRQQLEVESPVLPRSVAFKKTPVEDTLYRRAYLIDRNHVELSRIPLIELGLRPDFHDVTRCLFDLKWLHTRIQSITDHADYDRNKLKAALDDKLKVACVSCCAKGRAFGDGDWRAIATQPDVQGLFRNGNSKRTATDPAECKVKVFQVALLPAKRYPLSDLAYGTGNVYVWNPDYFDDTTGKIVRKLDSSPRGRGRRQIRQAIASQPHPDALPWDNWKNFAWDRETQANVKTLRQQLEQELAPLLPGPKPKGMTASETEIWDEKQQAFKDALDKFRQEHKLPKALFLFTWQTDRPPKKPLALLRVLFERKDRVFSAHILQKRADKIVDQTLGNYFGWFADSLFQIPGGIQQESLWKEFCAVARTVDKQRVAEFVGSNSNLSARQWIDFLKRQSGPGVTQIQRTVGENLEEYCDLSKDGTGQFVRGGNRGYLICTKADRIQAFPIRFFQSKTLVREWLTGNKWELADSQIWRSGDLLRLSKPAGTTKKTVQPNYYFLGSFSNNGKTVNLNVCFGGDVPQGISLKSLWEAGLRREE

SEQ ID NO: 21535 - protein, 941 aa, unidentified
  REGION 1..941: note = Cas Enzyme sequence
LMRGEKLEPWQVFKAFHSAIQRRGYDKDIPWKNREARKAKDADDDDAGTEQRMHKFEQDLENMAPGKTHFHFPAYFDAYQIGLWNPAKPDELKLRSDCHAKTTRNQIVPRKLVEAEIRQMVDGATKHFPALAGKADYLLYGIAQQSYASTKQELRKKFKLREGGATDWQGVVGQKIPRFENRIIAKCALIPRLNVCKLREGEKGQPHEKSLAAVEVAFLMKLKNLRVQRSGGNGWLSAEEIREIYEDPKRKNWKFTKESWRKHCVTIGVVPLPGHEIVDAPRLSGRSRFCRPALEILKRLILSGKKPSEFLQEEIARLNGNKDPLKGLVEADLKFISDMAAKNDSWEGIYIPNQQLDALVELSNNSDDAIKRLIGQQNDPIVRHRLSVFYKRLQELEQTTKSRPDQVVLEFVREDFMGKKAKIEYFSFIKRRAEERIKAREEAASVGATEKSAGLKLELLRAQDGCCLYTNEGLVPSKLDEYQIDHIVPRSKGGPDAVVNYVLTTQKANEAKADRTPYDWFHQEMPDKWDAYVNRVRARATHLRNKKVQLLIALNAAELADKYTALAETAWIAKLAQSIVGLHFGWRNGVDENGNKRVTVISGGLTGRIRRKYALNQVLNPNAKSEEEAEKKNRDDDRHHALDAMVISFIPSWVRDAMKEKFFRFPEPIHQNAKGFFEKEIASVVPRNLCFEKAALAETIYGARTDHGKKVIVQRTKLVLLGMKPTTPGKSVYDLKYAVKQSQSIRDSIIQERVLEFLATNPDEAAWRKFCAEFHLKGKNGSSGSHVLFVTVNVGEPTEYKDMSKDGTGAYRKALKGHKGQIVYWDAAGELCVAPIYPHDSLFQKREKINSLGGKSKFYGFFQSDCPVRTKKEIPMENYKLVIRNEAKQKRRIVAEKPLPPCELTLRTIITKDMIAELTLADNTRVVASLDVWVAAGLERI

SEQ ID NO: 21536 - protein, 1089 aa, unidentified
  REGION 1..1089: note = Cas Enzyme sequence
ARAQGKTPEELEAEEQKQLEQADPRYREAAGKWPEFKRAVSAEFHFPCYYDAFHMGLWSPDQPDQLRLRPDHRASSTRNVRFDRADVRKELIALGNNAAAMLPQLQQAFERWQRAGWTFRHPVTGEALTKPVHARTFGEFLCDGPAGQPDETSFEAFLNQRRQAGIRIGTFEEWMAALGQKTPRFDNRILAPCVLIPRYHACKVDARLEKDRNGRLTGKLVPDSLLASEVTFLLKLKNLLVADPVKGQRKLTVQEVRDIFAFAQRRLKTLPLFTPEGEPAKEWPRKVANCFAINPSDWPKIAAEAECLKGLARLTVSDNGAPRPRTREEAEALLHAVAGGRRAAQTALPAHLLPLVKRAAAAWKQAKQQAGEIMLRPLPGHEEVKAPRTSGRSAYSRVALRILKELILSGDAPSAFHARLVRREPDLLQRLGPAPGQPLAIFDDSTASNEAQRKQHDAENRKRGLLVSELNFLLQMRKDDGSPDSWENLFIPAQTLEALQQRHTEDGRLDADAAVRELLGTIKDPVVRHRLGIFDERLRKLRFGDAREGLPGFGVPEAIVLEFVREDFMGEQAKRELQTFQKRREQARAEAEAEAAKLGLGSRSRALRYELFKAQGGICLYTGRPLSETQLDQYEIDHIVPRSLGGPDAMVNYVLTFPEVNSAKEKGKLTPYALLHGTNGWDAYIERVKARAATLRNKKVQLLTREDAPELVERYTALAETAWISRLAQTIVNLRFGWRNGVDYSGPQPVKRVIVVSGGLTARVRRKYGLDKLLYGKDISPQVLAKKVKNRDDDRHHALDAMVMTFIPNWARDPHKEGFFRFPAAFRDANGHEDYQQIQSLFARQLEKIVPRHLAYEPCALADTIYGRRLDKGEPVIVQRAPVRDLAYKQEQQRPVFNLTYAKDQIAHVRDPRLRRVLEAFVATGPDQAAWDNFCQSLAAGTCPELPGRKVLKVTLNRDEEPEEFKDLSKDGCGAFRTRKGEHRGQFVYLDARGRVRVRPVRPFESLVAVKAEVERLAAGGRVVGFFQSMCLVELDQPVTHGNFVLQPGTYRLNTIKKDGRAQVTRPSGEESPQINLAKLLAAGFRRKA

SEQ ID NO: 21537 - protein, 1339 aa, unidentified
  REGION 1..1339: note = Cas Enzyme sequence
VLKPRFVWEPSGATTYCAQSISPCRITVFLAQNPGPRLQPRRLDRYLKFVEAKAMIRPVTIWAFDLGKGSIGEAVRDVQTNQFLHTAALLLPPDLAQRGPASQSGTPASRYRAWKVRHAHRERERWLDTVWQAAGLEVLQTRQTALVCALPPKRDDTGQPLFDQGHWALVGRADYRLEREFAPALGEKTKDGAPSDAAGANLCYTSCLLRIKLLRWKPGDPPLEEWQVYKALRSAMQKRGYGRVPWAVKEARAQGKTPEELEAEEQKQLEQADPRYREAAGKWPEFKRAVSAEFHFPCYYDAFHMGLWSPDQPDQLRLRPDHRASSTRNVRFDRADVRKELIALGNNAAAMLPQLQQAFERWQRAGWTFRHPVTGEALTKPVHARTFGEFLCDGPAGQPDETSFEAFLNQRRQAGIRIGTFEEWMAALGQKTPRFDNRILAPCVLIPRYHACKVDARLEKDRNGRLTGKLVPDSLLASEVTFLLKLKNLLVADPVKGQRKLTVQEVRDIFAFAQRRLKTLPLFTPEGEPAKEWPRKVANCFAINPSDWPKIAAEAECLKGLARLTVSDNGAPRPRTREEAEALLHAVAGGRRAAQTALPAHLLPLVKRAAAAWKQAKQQAEEIMLRPLPGHEEVKAPRTSGRSAYSRVALRILKELILSGDAPSAFHARLVRREPDLLQRLGPAPGQPLAIFDDSTASNEAQRKQHDAENRKRGLLVSELNFLLQMRKDDGSPDSWENLFIPAQTLEALQQRHTEDGRLDADAAVRELLGTIKDPVVRHRLGIFDERLRKLRFGDAREGLPGFGVPEAIVLEFVREDFMGEQAKRELQTFQKRREQARAEAEAEAAKLGLGSRSRALRYELFKAQGGICLYTGRPLSETQLDQYEIDHIVPRSLGGPDAMVNYVLTFPEVNSAKEKGKLTPYALLHGTNGWDAYIERVKARAATLRNKKVQLLTREDAPELVERYTALAETAWISRLAQTIVNLRFGWRNGVDYSGPQPVKRVIVVSGGLTARVRRKYGLDKLLYGKDISPQVLAKKVKNRDDDRHHALDAMVMTFIPNWARDPHKEGFFRFPAAFRDANGHEDYQQIQSLFARQLEKIVPRHLAYEPCALADTIYGRRLDKGEPVIVQRAPVRDLAYKQEQQRPVFNLTYAKDQIAHVRDPRLRRVLEAFVATGPDQAAWDNFCQSLAAGTCPELPGRKVLKVTLNRDEEPEEFKDLSKDGCGAFRTRKGEHRGQFVYLDARGRVRVRPVRPFESLVAVKAEVERLAAGGRVVGFFQSMCLVELDQPVTHGNFVLQPGTYRLNTIKKDGRAQVTRPSGEESPQINLAKLLAAGFRRKA

SEQ ID NO: 21538 - protein, 1134 aa, unidentified
  REGION 1..1134: note = Cas Enzyme sequence
MDKTDYVLKEKPEPASNEMVWAFDLGKGSIGEAVRQGTKFLHKESLLIWAEFASTKPARDRRRMWRTRQAHKAREQWLEQIWQAAGMEVLHGQQVRRDPDTHKWIAPMPGDEHLEREFAKEGDKTCYTSCLLRIKLLRGEKQEPWQIFKALRSAIQKRGYGKIPWAEKEARRAGKSVEELEKEEEKKDANYVAALNRWRDFKKRVPADFHFPCYYDAWKMGLWDPKAPDKLASQLKHDAESTRNVRFDRADVETEIKKLASQAETQLKALAQRFEIIQREGWTQIDPSNDSKKHFPVFATSLGDFLCHGPTGVAYASYSPKQRDEANLHMGSNDDWMGALGQKIPRFDNRILNDCVLIPRFHVCKAEIRQDAKTGKPIADSLLPAEVTFLMKLKNTLVAGARAQRKLTVEEICKIYEVVSTGVQEVEADAKDWAKKVVSRLSLTDTSWGRKKGVKELGLFPLPGHGEVKPPKHSGRSAFSRPALRLLKQLILSGKSPQDFHQEQIAALGGNTDEKKGLVPRDLKFLSDMGDSWDDIHIPAQKLEALAARHTENGKLDVDKAVSVLLADINDPVVRHRLNVFAERLRFLRDKYGEPQEVVLEFVREDFMGPKRLNELLQFQRDRERARKEAREKATEAGAEEKSAALKYELCKAQGCVCLYCGQPFAASKLDDYRIEHIVPRGQNGPDAMVNYVLAHDECNEAKGDQTPFQWWHNNRSKKAPSISWDGYKKLVDSCATALRNKKVQLLLREDAPELVQRYTALAETAWVSKLAQTIASLFFGWENGNDKQGHKRVAIISGGLTGRIRRKYRLNSILNPCPNGEDPFLWEEKCEKNRKDDRHHALDAMVISFLPTWARDSKKEGFFRFPEGVHQEYFARETESVHPRNIALEKPVLEAKFYGLRTINGQKFIVGRESLARLAIKVVNNRETLKARKDIETHRIVDGQIRRDVEEFWKTSPSATLEAWKAWCQSYRLGGRGARVENILVTKSKADSIEEYKDVAKHDGDAQRGQFKRGAKHRGYFIYERPAPTKKDAQHTQIEVRPVFVFEGTQSVCTELQRHSDWKIHGYFESGCQVSLGKAWQFRGKTYPAGEYILKSVWANRNAELKHPQHGEIGPVGLKILLDAGFKRIGDKL

SEQ ID NO: 21539 - protein, 1226 aa, unidentified
  REGION 1..1226: note = Cas Enzyme sequence
RYLNTDELNEWWKHACEKAANVPLSDTWERDVLDCFKITRAEWRRWCVSKNLLPVARERSEAAAFAGEIATQSAEAASGDSGAEERSRGKSQDVVQAPKPTGRSRFCRPALAILRHLLLHREKPQDFAARLRNREPALLDALDFDVLDTAPAEERPTGNGKALKGYRKQQRTWLLTGDLDFLDHVWKATDRDGNPRDFEPHQLRIPDMTLRDLRKRHDLTETPYSELLRQNSAELERRDKAIVELIGQQKNPVVRDRLTRFWQRLKHFQNPVVPSDPKKQKPGLGLADPACLVLEFVRDDKDNSLEGRKRTEAIQQALRENEQRRDKARKALEQCGLPTTDDMVVRWLLLEAQGPACIYTNKPIRCTDLPNLQIEHIVPRSFGGPDAFWNWVLSDENANAEKGDRVPYVWFKEEKTDEEWADYKRRVLARAAQLGRRKVDLLLRPDAAELAGEKYTALAESAWTARLAQTIARLHFGWPLDDEPGEERVITISGGLTARIRRKYLLDSLLGVGNDAETLRREIDSALDELEALRTDTSLSENARKQKRAELRQRLANLAAEAEKNRDDQRHHALDAMLLTFLPNWARDRNKEDFFRFPTAIGDNDLYSKEDQPKIEAIKSELAKLYEENGAVFREIKQARLAGDSGRAEQLKASVFPIRKRIAELYRALDKLKQPRNVRAVREWFRSQLEGASPAPNGPVLPRTMAWQRTPTEATLYRRVYLIYKDCPERSLLALTDLAFAPNPRNPQQPVFDLKWLRTRIQSIAEHPGYDRKKLQSVLSAKLEATLSAKRFASCQFGPEDWQQICAQPEVAACFQPVGRGKSKRPPEPDQRLVKVCKVEVLPATRYELSELGYTSGNNYVWNPDHLAETARNILRKDDAQARTRGRRRTPAPASSPSADASPWPGFLWDREMQAKLASPEFREALEQQLVPHLLPPKPARMSDAERTDWATREERWKQAFEQFRKSHNLPKSFFVFTSDSDRPPRRPNVSLLRVLFEPKDKVFSRDALAKQAQSVVDAQLRRCLECFADSLTQVRDPRLQEKAWRDYCNVVRVVLKETLEQFTREHPTPTADQWISFFEAQTGPRIFQVMQTVGTSLEEYFDLSKDACGAFARGGNKGYWLCKRGDAIEARPIRFFENPEQVRVRLLGQGWELLDLKPWRTGDLLNLPEAAQSGARSVPAGYYFLGSFSNDTGVNLKPCFGGEVPQNVSLKALWNRGLRRCSPTA

SEQ ID NO: 21540 - protein, 1382 aa, unidentified
  REGION 1..1382: note = Cas Enzyme sequence
MSNSGTIWAFDLGKGSIGEAVRKGNEFLHKASLLIPAEFAETKTAASRRRMWRTRQAHKAREKWLNDVMREAGIEILKGRQIGKVDAEGKEIPEDQWKRTKGEWVEIAKGNPWLEREFPAPGDSTCYTSCLLRIKLLRGEKLEPWQVYKALHSAIQRRGHDPDIPWKHREQRKRKSNEPDDDEAGTQQRIDQFEKDLEAMAPGKPEYHYPCYFDAWRMGLWNPGRPNELKERTDCRAKSRREQIVPRKIVEEEIRKLVEAASKHYPKLNGQARYLLYGPAETAYASFDAKLRTKYGLKEGGASDWEGVLGQKIPRFENRILNDCALIPRLHVCRNPSPEQYKDLPEDKLLPAHVTFLMKLKNMRVEEKTPGRKQRGLTAEQIKEIFGECNPRRKYNLTSTQWRKWCDKFDVLPITDAGEKTTSADDETGKKEKKDERDAVAAPLPSGRSRFSRPALRILKALILSGIKPSLLHERLVKRDPALVAEIGIDILDAPPVNEKKTDSGKRTIRNYVKQPRPWLLVSDLSFLLAMRKTGAQEDSWEDLFIPNQRLDQVVQEISGDGNRDTKVERQRKGKAIQELIGSQNDPKVRHRLATFWDRLKLLETLPDKNGKPIGEPGQIVLEFVREDFMGEKAKGKLKKFQDDRAEARKKAREHGGLKFELYEAQGGVCLYGKEVFKNGKCIGLENGLPMPGTPGWDTLVIDHIVPREAPYNGPDAAVNYVLTTPDANNAKRKRTPFDWFHQDRLGEWDCYKNFIASKIGTLGGKKVQLLTRSDAAELVGKYTSLAETAWISKLAQTLVRLHFGWPLEHERGKERVTVVPGGLTGRIRRKYLLNTLLDERFKNLATAEIKPEDEEEAEKDRTDLRHHALDAMMISFFPDWMRNPQKSDFFRFPPPLDKPFPGKRNKHAVREFFKTQLGEVLPENLFLEKAKLAEMAYGRSFQAEEASASATAVKYKTAKMSLSDLAYGNAASGKAAYDLKQARRMANGIADDGTREKVQGFLKSRPTEAGWSEFCRNFETEFACQQKRGKPVKIEVRKVGEIRTRRRKVKEMAYEQGNSREYDVEYARQNVSEIAGDVPEQENIKAKLGEFFAGNPSEKQWKDFAETLKPIGQTRLRSKLEEGGKKAKARTVKFAFFAHRPIPMKFNLEKAQGRIDKICDEGIRQRLRAFVNQNPPPDQSAWKAFCDTFAHERKDEDGNLLKDADGKVVYGAAIKKVRVNDGSPDEYKDFSKDGTGTFYKNKKEHKGQFVYLVDDGTADGVVSVRPVYVFESVQKVKKNVEAFPQFKRLIGYFQSGCTISIIQPVPVDSYKLVILNDEKKKRRIVANAPLVPGKFLLSTIITASQAVEAEMADGTVVVSTLAPLIRAGLHRVYHKSETTRL

SEQ ID NO: 21541 - protein, 1054 aa, unidentified
  REGION 1..1054: note = Cas Enzyme sequence
MELSTQETVWAFDLGKGSIGEAVRQGTRFLHKESLLIPADFAETKTAANRRRMWRTRLAHKAREAWLDKVWRAAGLEPLGKREVWRNPQTRQWELKHPADYRLEREFAPRAGEQTQDGAPSDAAGASICYTSCLLRIKLLRGEKLEPWQIYKALWSSIQRRGYDPDIPWKTRQQRRTARAEEDEGATLTRMQEFEKRLAEMAPAQQQHRWPCYFDAWKMGLWDPARPDELKLRQDCQAQSTRDQIVPRKMVEQEVRALSDAAAKQVPALSGKGEFLLFGPSGKRYASFYPEERERHGLREGGATDWQGVLGQKIPRFDNRIIAKCVLIPRLNVCKIRKGADGDLHPNSRLAAEVVFLMKLKNMRFQQGGGVRGLTAAEIGQIFHDPKRTKLALTATQWKKWCLRLGGFPLPGQNEEVAEPRFSGRSRFCRPALQILHRLILSGHSPQAAYAEELARLNGNSAPLKGLVPDDLKFLLQMGQTWQGIYIPNQKLEALARATEEPQLAIQRLIGDQNDPVVRHRLMLFAQRLDELAEQFGTPDYVVLEFVREDFMGEQARRDYLKFQRDRARDRAEARAMAAKAGATARDAGLKMELHKAQSGICLYTGEALAPTSLDDYVIDHIVPRAKGGSDAAVNYVLTTRRANDDKADRTPYEWLAGKEGWDAYVERVRERGTTLRNKKVQLLTSPEAPALVDKYTALAETAWISKLAQTIVGLRFGWPGGISNGQRKVIVVSGGLTGRIRRKYGLNRLLNPDAESEEEAETKNRHDDRHHALDAMVISFIPNWARNARLAGSFRLPEGVHRELFEKEIAEVIPRNVALARPVLEETFYGRRTIRGRQYAVGREELSALAAKLVSGKRVLKKRGDIETLRIVDLRIRSDVEAFLEASPNLTLSAWDAWCKDYRLGPEGPAVQTVMVTKSKADSLDEYKDVSKDGSGQFRRGAKHRGYFLFEQPRATKSNPLNKQIQVRPVYVHESRKGVVAQINGKVLGYFESGCLVRLTKAWTFQGRGYTAGLYTLASIWANRNAKLRHPHFGEIGPVGLRILLDAGFHREE

SEQ ID NO: 21542 - protein, 1135 aa, unidentified
  REGION 1..1135: note = Cas Enzyme sequence
MKTAPVISNDLHPSSGQETIWAFDLGKSSIGEVVRRGAQFLHKASLLIPADFADTKPAGKRRRMWRTRTAHRERERWLEQIWAAAGLHVLYGRNRDGRTGKWKAGETADRRLEREFAEPGDDTCYTSCLLRIKMLREEKLEEWQIFKALHSAIQRRGYDKTIPWAQKEARRAGKSPEDLEKEEQKKDRGYLAALNRWSEFKTQVAPQFSFPCYYDAWRMGLWNPAEPERLRPRTTYRAESTRNVRFDRQDVEAEITRLAKNAAKSLPALAAAFARIESGGWEQTDAESGRKKRFPVRAQTFGDFLCHGPAGVAYASFSAKSRKEIGLHTGSADDWMGSLGQKIPRFDNRILDDCVLIPRFHVCKAEIRKSTVTGLPLPNTLLSAQVTFLMKLKNTVVADGPNQRKLRVDEVQKIFKTAFADARKVKPNAEDWPRKAADCFALTRADWFRTKGIKELALRPLPGHEVIKPPKDSGRSGFSRPALRLLRTLILLGKDPCAFHAEQLAKLNGNTNPLKGLVPHDLKFLLDMGGSWMDIHIRAQKLDSLAARHTEDGKLDAAAATADLLGSVNDPVVRHRLNVFAGRLRELRGRFGRPDEVVLEFIREDFMGPKRKAELLQFQRDREKARKEAREKAKEAGAEEKSAALKYELCKAQGCLCLYCGQPFAASRLEEYEIEHIVPHSQGGPDAMVNYVLAHRHCNEAKGELTPFQWKHGQEGWDGYKRLVESHAVTLRNKKVQLLLREDATDLVNRYTALAETAWISKLAQTIVSLYFGWKNGNDAEGRKRVTIVSGGLTDRVRRKYHLNSVLNPCPKDEDPFLWEEACEKNRSDDRHHALDAMVISFIPGWMRDARKEHFFRFPKPVHKNAKAFFAKEISGVMPRAVAYERAALAETIYGARPTDKGLVIVQRVALHGLAMKPIAPGKARFDTTYLRKQINAVRDAGIAATITDFLETAPDEAAWDRFCQEFRLHCQDGSPGQRVVRVSVNVGEPDEYREMSKDGTGAWRKGLGSHKGQIIFWDERGELSVRPVFAHGSVGRERRAVESLGGKAKFYAFFQSDCAVRTTKTIPAEAYRLVVKNEAKQKRRISAEKPLPACELTLRTIVTKGRIAELTLADNTRVVAPLDVWVEAGLSRTR

SEQ ID NO: 21543 - protein, 1101 aa, unidentified
  REGION 1..1101: note = Cas Enzyme sequence
MSRSLTFSFDIGYASIGWAVIASASHDDADPSVCGCGTVLFPKDDCQAFKRREYRRLRRNIRSRRVRIERIGRLLVQAQIITPEMKETSGHPAPFYLASEALKGHRTLAPIELWHVLRWYAHNRGYDNNASWSNSLSEDGGNGEDTERVKHAQDLMDKHGTATMAETICRELKLEEGKADAPMEVSTPAYKNLNTAFPRLIVEKEVRRILELSAPLIPGLTAEIIELIAQHHPLTTEQRGVLLQHGIKLARRYRGSLLFGQLIPRFDNRIISRCPVTWAQVYEAELKKGNSEQSARERAEKLSKVPTANCPEFYEYRMARILCNIRADGEPLSAEIRRELMNQARQEGKLTKASLEKAISSRLGKETETNVSNYFTLHPDSEEALYLNPAVEVLQRSGIGQILSPSVYRIAANRLRRGKSVTPNYLLNLLKSRGESGEALEKKIEKESKKKEADYADTPLKPKYATGRAPYARTVLKKVVEEILDGEDPTRPARGEAHPDGELKAHDGCLYCLLDTDSSVNQHQKERRLDTMTNNHLVRHRMLILDRLLKDLIQDFADGQKDRISRVCVEVGKELTTFSAMDSKKIQRELTLRQKSHTDAVNRLKRKLPGKALSANLIRKCRIAMDMNWTCPFTGATYGDHELENLELEHIVPHSFRQSNALSSLVLTWPGVNRMKGQRTGYDFVEQEQENPVPDKPNLHICSLNNYRELVEKLDDKKGHEDDRRRKKKRKALLMVRGLSHKHQSQNHEAMKEIGMTEGMMTQSSHLMKLACKSIKTSLPDAHIDMIPGAVTAEVRKAWDVFGVFKELCPEAADPDSGKILKENLRSLTHLHHALDACVLGLIPYIIPAHHNGLLRRVLAMRRIPEKLIPQVRPVANQRHYVLNDDGRMMLRDLSASLKENIREQLMEQRVIQHVPADMGGALLKETMQRVLSVDGSGEDAMVSLSKKKDGKKEKNQVKASKLVGVFPEGPSKLKALKAAIEIDGNYGVALDPKPVVIRHIKVFKRIMALKEQNGGKPVRILKKGMLIHLTSSKDPKHAGVWRIESIQDSKGGVKLDLQRAHCAVPKNKTHECNWREVDLISLLKKYQMKRYPTSYTGTPR

SEQ ID NO: 21544 - protein, 1101 aa, unidentified; identical to SEQ ID NO: 21543
  REGION 1..1101: note = Cas Enzyme sequence

SEQ ID NO: 21545 - protein, 1113 aa, unidentified; identical to SEQ ID NO: 19831
  REGION 1..1113: note = Cas Enzyme sequence

SEQ ID NO: 21546 - protein, 1105 aa, unidentified; identical to SEQ ID NO: 19832
  REGION 1..1105: note = Cas Enzyme sequence

SEQ ID NO: 21547 - protein, 1032 aa, unidentified
  REGION 1..1032: note = Cas Enzyme sequence
LLVQAQIITPEMKETSGHPAPFYLASEALKGHRTLAPIELWHVLRWYAHNRGYDNNASWSNSLSEDGGNGEDTERVKHAQDLMDKHGTATMAETICRELKLEEGKADAPMEVSTPAYKNLNTAFPRLIVEKEVRRILELSAPLIPGLTAEIIELIAQHHPLTTEQRGVLLQYGIKLARRYRGSLLFGQLIPRFDNRIISCCPVTWAQVYEAELKKGNSEQSARERAEKLSKVPTANCPEFYEYRMARILCNIRADGEPLSAEIRRELMNQARQEGKLTKASLEKAISSRLGKETETNVSNYFTLHPDSEEALYLNPAVEVLQRSGIGQILSPSVYRIAANRLRRGKSVTPNYLLNLLKSRGESGEALEKKIEKESKKKAKKKEADYADTPLKPKYATGRAPYARTVLKKVVEEILDGEDPTRPARGEAHPDGELKAHDGCLYCLLDTDSSVNQYQKERRLDTMTNNHLVRHRMLILDRLLKDLIQDFADGQKDRISRICVEVGKELTTFSAMDSKKIQRELTLRQKSHTDAVNRLKRDLPGKALSANLIRKCRIAMDMNWACPFTGATYGTHELENLELEHIVPHSFRQSNALSSLVLTWPGVNRMKGQRTGYDFVEQEQENPVPDKPNLHICSLNNYRELVEKLDDKKGHEDDRRRKKKRKALLMVRGLSHKHQSQNHEAMKEIGMTEGMMTQSSHLMKLACKSIKTSLPDAHIDMIPGAVTAEVRKAWDVFGVFKELCPEAADPDSGKILKENLRSLTHLHHALDACVLGLIPDIIPAHHNGLLRRVLAMRRIPEKLIPQVRPVANQRHYVLNDDGRMMLRDLSASLKENIREQLMEQRVIQHVPADMGGALLKETMQRVLSVDGSGEDAMVSLSKKKDGKKEKNQVKASKLVGVFPEGPSKLKALKAAIEIDGNYGVALDPKPVVIRHIKVFKRIMALKEQNGGKPVRILKKGMLIHLTSSKDPKHAGVWRIESIQDSKGGVKLDLQRAHCAVPKNKTHECNWREVDLISLLKKYQMKRYPTSYTGTPR

SEQ ID NO: 21548 - protein, 1109 aa, unidentified
  REGION 1..1109: note = Cas Enzyme sequence
MSRSLTFSFDIGYASIGWAVIESASHDDADPSVCGCGAVVFPKDDCQAFKRREYRRLRRNIRSRRVRIERIGRLLVQAQIITQEMKETPGHPAPFYLASEALKGHRNLAPIELWHVLRWYAHNRGYDNNVSWSGGFSEDGGNKEDTERVQHAKDLMDKHGTATMAETICRELKLEEGKADAPMNVSTPAYKNLNTAFPRLTVEKEVRRILELSAPLIPGLTSEIMELIAQHHPLTTKQRGVLIHYGIKLARRYRGSLLFGQLIPRFDNRIISRCPVSWAQVYEAELKKGNSEQNARERAEKLSKVPTANCPEFYEYRMARILCNIRADGEPLSAEIRRELMNQARQEGKLTKASLEKAISSRLGETETNVANYFTLHPDSEEALYLDPAVEVLKRSGIGETLSPSVCRLAANRLRRGKSVTPNYLLNLLKSRGESVEALEKKIEKERHQQANRKKAKKTDPDYAATPLKPRYATGRAPYARPVLKKVVEETLDGEDPTRPARGEAHPDGELKAHDGCLYCLLDTDSSVNQHQKERRLDTMTNNHLVRHRMLILDRLLKDLIQDFAGGQKDRISRICVEVGKELTAFSGMDSKKIQTELNLRQKSHTEAVNRLKRDLPGKALSANLIRKCRIAMDMNWTCPFTGATYGTHELENLELEHIVPHSFRQSNALSSLVLTWPGVNRMKGQRTGYDFVEQEQENPVPDKPNLHICSLNNYRELVEKLDDKKGHEDDRRRKKKRKALLMVRGLSHKHQSQNHEAMKEIGMTEGMMTQSSHLMKLACKSIKTSLPDAHIDMIPGAVTAEVRKAWDVFGVFKELCPEAADPDSGKILKENLRSLTHLHHALDACVLGLIPDIIPAHHNGLLRRVLAMRRIPEKLIPQVRPVANQRHYVLNDDGRMMLRDLSASLKENIREQLMEQRVIQHVPADMGGALLKETMQRVLSVDGSGEDAMVSLSKKKDGKKEKNQVKASKLVGVFPEGPSKLKALKAAIEIDGNYGVALDPKPVVIRHIKVFKRIMALKEQNGGKPVRILKKGMLIHLTSSKDPKHAGVWRIESIQDSKGGVKLDLQRAHCAVPKNKTHECNWREVDLISLLKKYQMKRYPTSYTGTPR

SEQ ID NO: 21549 - protein, 1105 aa, unidentified
  REGION 1..1105: note = Cas Enzyme sequence
MSRSLTFSFDIGYASIGWAVIASASHDDADPSVCGCGTVLFPKDDCQAFKRREYRRLRRNIRSRRVRIDRIGRLLVQAQIITPEMKETSGHPAPFYLASEALKGHRTLAPIELWHVLRWYAHNRGYDNNASWSNSLSEDGGNGEDTERVKHAQDLMDKHGTATMAETICRELKLEEGKADAPMEVSTPAYKNLNTAFPRLIVEKEVRRILELSAPLIPGLTAEIIELIAQHHPLTTEQRGVLLQYGIKLARRYRGSLLFGQLIPRFDNRIISCCPVTWAQVYEAELKKGNSEQSARERAEKLSKVPTANCPEFYEYRMARILCNIRADGEPLSAEIRRELMNQARQEGKLTKASLEKAISSRLGKETETNVSNYFTLHPDSEEALYLNPAVEVLQRSGIGQILSPSVYRIAANRLRRGKSVTPNYLLNLLKSRGESGEALEKKIEKESKKKAKKKEADYADTPLKPKYATGRAPYARTVLKKVVEEILDGEDPTRPARGEAHPDGELKAHDGCLYCLLDTDSSVNQYQKERRLDTMTNNHLVRHRMLILDRLLKDLIQDFADGQKDRISRICVEVGKELTTFSAMDSKKIQRELTLRQKSHTDAVNRLKRDLPGKALSANLIRKCRIAMDMNWACPFTGATYGTHELENLELEHIVPHSFRQSNALSSLVLTWPGVNRMKGQRTGYDFVEQEQENPVPDKPNLHICSLNNYRELVEKLDDKKGHEDDRRRKKKRKALLMVRGLSHKHQSQNHEAMKEIGMTEGMMTQSSHLMKLACKSIKTSLPDAHIDMIPGAVTAEVRKAWDVFGVFKELCPEAADPDSGKILKENLRSLTHLHHALDACVLGLIPDIIPAHHNGLLRRVLAMRRIPEKLIPQVRPVANQRHYVLNDDGRMMLRDLSASLKENIREQLMEQRVIQHVPADMGGALLKETMQRVLSVDGSGEDAMVSLSKKKDGKKEKNQVKASKLVGVFPEGPSKLKALKAAIEIDGNYGVALDPKPVVIRHIKVFKRIMALKEQNGGKPVRILKKGMLIHLTSSKDPKHAGVWRIESIQDSKGGVKLDLQRAHCAVPKNKTHECNWREVDLISLLKKYQMKRYPTSYTGTPR

SEQ ID NO: 21550 - protein, 1101 aa, unidentified
  REGION 1..1101: note = Cas Enzyme sequence
MSRSLTFSFDIGYASIGWAVIASASHDDADPSVCGCGTVLFPKDDCQAFKRREYRRLRRNIRSRRVRIDRIGRLLVQAQIITPEMKETSGHPAPFYLASEALKGHRTLAPIELWHVLRWYAHNRGYDNNASWSNSLSEDGGNGEDTERVKHAQDLMDKHGTATMAETICRELKLEEGKADAPMEVSTPAYKNLNTAFPRLIVEKEVRRILELSAPLIPGLTAEIIELIAQHHPLTTEQRGVLLQYGIKLARRYRGSLLFGQLIPRFDNRIISRCPVTWAQVYEAELNKGNSEQSARERAEKLSKVPTANCPEFYEYRMARILCNIRADGEPLSAEIRRELMNQARQEGKLTKASLEKAISSRLGKETETNVSNYFTLHPDSEEALYLNPAVEVLQRSGIGQILSPSVYRIAANRLRRGKSVTPNYLLNLLKSRGESGEALEKKIEKESKKKEADYADTPLKPKYATGRAPYARTVLKKVVEEILDGEDPTRPARGEAHPDGELKAHDGCLYCLLDTDSSVNQHQKERRLDTMTNNHLVRHRMLILDRLLKDLIQDFADGQKDRISRVCVEVGKELTTFSAMDSKKIQRELTLRQKSHTDAVNRLKRELPGKALSANLIRKCRIAMDMNWTCPFTGATYGTHELENLELEHIVPHSFRQSNALSSLVLTWPGVNRMKGQRTGYDFVEQEQENPVPDKPNLHICSLNNYRELVEKLDDKKGHEDDRRRKKKRKALLMVRGLSHKHQSQNHEAMKEIGMTEGMMTQSSHLMKLACKSIKTSLPDAHIDMIPGAVTAEVRKAWDVFGVFKELCPEAADPDSGKILKENLRSLTHLHHALDACVLGLIPYIIPAHHNGLLRRVLAMRRIPEKLIPQVRPVANQRHYVLNDDGRMMLRDLSASLKENIREQLMEQRVIQHVPADMGGALLKETMQRVLSVDGSGEDAMVSLSKKKDGKKEKNQVKASKLVGVFPEGPSKLKALKAAIEIDGNYGVALDPKPVVIRHIKVFKRIMALKEQNGGKPVRILKKGMLIHLTSSKDPKHAGVWRIESIQDSKGGVKLDLQRAHCAVPKNKTHKCNWREVDLISLLKKYQMKRYPTSYTGTPR

SEQ ID NO: 21551 - protein, 1101 aa, unidentified
  REGION 1..1101: note = Cas Enzyme sequence
MSRSLTFSFDIGYASIGWAVIASASHDDADPSVCGCGTVLFPKDDCQAFKRREYRRLRRNIRSRRVRIDRIGRLLVQAQIITPEMKETSGHPAPFYLASEALKGHRTLAPIELWHVLRWYAHNRGYDNNASWSNSLSEDGGNGEDTERVKHAQDLMDKHGTATMAETICRELKLEEGKADAPMEVSTPAYKNLNTAFPRLIVEKEVRRILELSAPLIPGLTAEIIELIAQHHPLTTEQRGVLLQYGIKLARRYRGSLLFGQLIPRFDNRIISRCPVTWAQVYEAELNKGNSEQSARERAEKLSKVPTANCPEFYEYRMARILCNIRADGEPLSAEIRRELMNQARQEGKLTKASLEKAISSRLGKETETNVSNYFTLHPDSEEALYLNPAVEVLQRSGIGQILSPSVYRIAANRLRRGKSVTPNYLLNLLKSRGESGEALEKKIEKESKKKEADYADTPLKPKYATGRAPYARTVLKKVVEEILDGEDPTRPARGEAHPDGELKAHDGCLYCLLDTDSSVNQHQKERRLDTMTNNHLVRHRMLILDRLLKDLIQDFADGQKDRISRVCVEVGKELTTFSAMDSKKIQRELTLRQKSHTDAVNRLKRELPGKALSANLIRKCRIAMDMNWTCPFTGATYGTHELENLELEHIVPHSFRQSNALSSLVLTWPGVNRMKGQRTGYDFVEQEQENPVPDKPNLHICSLNNYRELVEKLDDKKGHEDDRRRKKKRKALLMVRGLSHKHQSQNHEAMKEIGMTEGMMTQSSHLMKLACKSIKTSLPDAHIDMIPGAVTAEVRKAWDVFGVFKELCPEAADPDSGKILKENLRSLTHLHHALDACVLGLIPYIIPAHHNGLLRRVLAMRRIPEKLIPQVRPVANQRHYVLNDDGRMMLRDLSASLKENIREQLMEQRVIQHVPADMGGALLKETMQRVLSVDGSGEDAMVSLSKKKDGKKEKNQVKASKLVGVFPEGPSKLKALKAAIEIDGNYGVALDPKPVVIRHIKVFKRIMALKEQNGGKPVRILKKGMLIHLTSSKDPKHAGVWRIESIQDSKGGVKLDLQRAHCAVPKNKTHECNWREVDLISLLKKYQMKRYPTSYTGTPR

SEQ ID NO: 21552 - protein, 1105 aa, unidentified
  REGION 1..1105: note = Cas Enzyme sequence
MSRSLTFSFDIGYASIGWAVIASASHDDADPSVCGCGTVLFPKDDCQAFKRREYRRLRRNIRSRRVRIERIGRLLVQAQIITPEMKETSGHPAPFYLASEALKGHRTLAPIELWHVLRWYAHNRGYDNNASWSNSLSEDGGNGEDTERVKHAQDLMDKHGTATMAETICRELKLEEGKADAPMEVSTPAYKNLNTAFPRLIVEKEVRRILELSAPLIPGLTAEIIELIAQHHPLTTEQRGVLLQYGIKLARRYRGSLLFGQLIPRFDNRIISRCPVTWAQVYEAELKKGNSEQSARERAEKLSKVPTANCPEFYEYRMARILCNIRADGEPLSAEIRRELMNQARQEGKLTKASLEKAISSRLGKETETNVSNYFTLHPDSEEALYLNPAVEVLQRSGIGQILSPSVYRIAANRLRRGKSVTPNYLLNLLKSRGESGEALEKKIEKESKKKEADYADTPLKPKYATGRAPYARTVLKKVVEEILDGEDPTRPARGEAHPDGELKAHDGCLYCLLDTDSSVNQHQKERRLDTMTNNHLVRHRMLILDRLLKDLIQDFADGQKDRISRVCVEVGKELTTFSAMDSKKIQRELTLRQKSHTDAVNRLKRKLPGKALSANLIRKCRIAMDMNWTCPFTGATYGDHELENLELEHIVPHSFRQSNALSSLVLTWPGVNRMKDQRTGYDFVEQEQENPVPDKPNLHICSLNNYRELVEKLDDKKGHEDDRRRKKKRKALLMVRGLSHKHQSQNHEAMKEIGMTEGMTEGMMTQSSHLMKLACKSIKTSLPDAHIDMIPGAVTAEVRKAWDVFGVFKELCPEAADPDSGKILKENLRSLTHLHHALDACVLGLIPYIIPAHHNGLLRRVLAMRRIPEKLIPQVRPVANQRHYVLNDDGRMMLRDLSASLKENIREQLMEQRVIQHVPADMGGALLKETMQRVLSVDGSGEDAMVSLSKKKDGKKEKNQVKASKLVGVFPEGPSKLKALKAAIEIDGNYGVALDPKPVVIRHIKVFKRIMALKEQNGGKPVRILKKGMLIHLTSSKDPKHAGVWRIESIQDSKGGVKLDLQRAHCAVPKNKTHECNWREVDLISLLKKYQMKRYPTSYTGTPR

SEQ ID NO: 21553 - protein, 1101 aa, unidentified
  REGION 1..1101: note = Cas Enzyme sequence
MSRSLTFSFDIGYASIGWAVIASASHDDADPSVCGCGTVLFPKDDCQAFKRREYRRLRRNIRSRRVRIERIGRLLVQAQIITPEMKETSGHPAPFYLASEALKGHRTLAPIELWHVLRWYAHNRGYDNNASWSNSLSEDGGNGEDTERVKHAQDLMDKHGTATMAETICRELKLEEGKADAPMEVSTPAYKNLNTAFPRLIVEKEVRRILELSAPLIPGLTAEIIELIAQHHPLTTEQRGVLLQYGIKLARRYRGSLLFGQLIPRFDNRIISRCPVTWAQVYEAELKKGNSEQSARERAEKLSKVPTANCPEFYEYRMARILCNIRADGEPLSAEIRRELMNQARQEGKLTKASLEKAISSRLGKETETNVSNYFTLHPDSEEALYLNPAVEVLQRSGIGQILSPSVYRIAANRLRRGKSVTPNYLLNLLKSRGESGEALEKKIEKESKKKEADYADTPLKPKYATGRAPYARTVLKKVVEEILDGEDPTRPARGEAHPDGELKAHDGCLYCLLDTDSSVNQHQKERRLDTMTNNHLVRHRMLILDRLLKDLIQDFAGGQKDRISRVCVEVGKELTTFSAMDSKKIQRELTLRQKSHTDAVNRLKRELPGKALSANLIRKCRIAMDMNWTCPFTGATYGTHELENLELEHIVPHSFRQSNALSSLVLTWPGVNRMKGQRTGYDFVEQEQENPVPDKPNLHICSLNNYRELVEKLDDKKGHEDDRRRKKKRKALLMVRGLSHKHQSQNHEAMKEIGMTEGMMTQSSHLMKLACKSIKTSLPDAHIDMIPGAVTAEVRKAWDVFGVFKELCPEAADPDSGKILKENLRSLTHLHHALDACVLGLIPYIIPAHHNGLLRRVLAMRRIPEKLIPQVRPVANQRHYVLNDDGRMMLRDLSASLKENIREQLMEQRVIQHVPADMGGALLKETMQRVLSVDGSGEDAMVSLSKKKDGKKEKNQVKASKLVGVFPEGPSKLKALKAAIEIDGNYGVALDPKPVVIRHIKVFKRIMALKEQNGGKPVRILKKGMLIHLTSSKDPKHAGVWRIESIQDSKGGVKLDLQRAHCAVPKNKTHECNWREVDLISLLKKYQMKRYPTSYTGTPR

SEQ ID NO: 21554 - protein, 1109 aa, unidentified
  REGION 1..1109: note = Cas Enzyme sequence
MSRSLTFSFDIGYASIGWAVIASASHDDADPSVCGCGTVLFPKDDCQAFKRREYRRLRRNIRSRRVRIDRIGRLLVQAQIITPEMKETSGHPAPFYLASEALKGHRTLAPIELWHVLRWYAHNRGYDNNASWSNSLSEDGGNGEDTERVKHAQDLMDKHGTATMAETICRELKLEEGKADAPMEVSTPAYKNLNTAFPRLIVEKEVRRILELSAPLIPGLTAEIIELIAQHHPLTTEQRGVLLQYGIKLARRYRGSLLFGQLIPRFDNRIISRCPVSWAQVYEAELKKGNSEQNARERAEKLSKVPTANCPEFYEYRMARILCNIRADGEPLSAEIRRELMNQARQEGKLTKASLEKAISSRLGETETNVANYFTLHPDSEEALYLDPAVEVLKRSGIGETLSPSVCRLAANRLRRGKSVTPNYLLNLLKSRGESVEALEKKIEKERHQQANRKKAKKTDPDYAATPLKPRYATGRAPYARPVLKKVVEETLDGEDPTRPARGEAHPDGELKAHDGCLYCLLDTDSSVNQHQKERRLDTMTNNHLVRHRMLILDRLLKDLIQDFAGGQKDRISRICVEVGKELTAFSGMDSKKIQTELNLRQKSHTEAVNRLKRDLPGKALSANLIRKCRIAMDMNWICPFTGATYGTHELENLELEHIVPHSFRQSNALSSLVLTWPGVNRMKGQRTGYDFVEQEQENPVPDKPNLHICSLNNYRELVEKLDDKKGHEDDRKRKKKRKALLMVRGLSHKHQSQNHEAMKEIGMTEGMMTQSSHLMKLACKSIKTSLPDAHIDMIPGAVTAEVRKAWDVFGVFKELCPEAADPVSGKILKENLRSLTHLHHALDACVLGLIPDIIPAHHNGLLRRVLAMRRIPEKLIPQVRPVANQRHYVLNDDGRMILRDLSISLKENIREKLMEQRVVKHIPADMGGALLKETMQRVLSVQGNGEDAMVSLSKKKDGKKEKNQVKASKLVGVFPEGASKLKALKAAIEIEGNYGVALDPKPVVIRHIKVFKQIMSLKEQNGGKPVRILKNGMLVHLISSKDPRRTGVWRIASIKDGKVGVKLDLQRAHCAAPTNKKHECNWREVDLISLLKKYQMKIYPTSYTGTPR

SEQ ID NO: 21555 - protein, 1020 aa, unidentified; identical to SEQ ID NO: 19829
  REGION 1..1020: note = Cas Enzyme sequence

SEQ ID NO: 21556 - protein, 1326 aa, unidentified
  REGION 1..1326: note = Cas Enzyme sequence
MKNNGNNLQQGNYYLGLDVGTSSVGWAVTDTEYNVLKFKGKSMWGARLFDEASTAEDRRTHRGNRRRLARRKYRLLLLEQLFEKEIRKIDDNFFVRLHESNLWADDKSKPSKFLLFNDTNFTDKDYLKKYPTIYHLRRDLIHNPTEHDIRLVFLALHHLIKYRGHFIYDNSANGDVKTLDEAVTDFEEYLNENDIEFEIENKKEFINVLSDKHLTKKEKKISLKKLYGEITDSENINISVLIEMLSGSSISLSNLFKDIEFDGKQNLSLDSDIEETLNDVVDILGDNIDLLIHAKEVYDIAVLTSSLGNHKYLCDAKVELFEKNKKDLMILKKYIKKNHPEDYKKIFSSPTEKKNYAAYSQTNSENVCSQEEFCLFIKPYIKDMAKSENEDEVRIAKEVEDKSFLTKLKGTNNSVVPYQIHERELNQILKNIVGYLPFMNDKQEDISVVDKIKLIFKFKIPYYVGPLNTKSTRSWVYRSDEKIYPWNFSNVIDLDKTAHEFMNRLIGRCTYTNDPVLPMDSLLYSKYNVLNEINPIKVNGKAIPVEVKQAIYTDLFENSKKKVTRKSIYIYLLKNGHIEKEDIISGVDIEIKAKLKSHHDFAQIMEENKCTSDEIEKIIKGILVYSDDKSMLRRWLKNNIKGLSDNDIKYLAKLNYKEWGRLSKTLLTDIYTINPEDGEACNILDIMWNTNATLMEILNNKKYQFKQNIEDYKAENYDVKQSLHEELDDMYISPAARRSIWQALRIVDEIVDIKKYAPKKIFIEMAREKKSAMKKKRTESRKDALLELYKSCKSQADGFYDEELFEKLSNESNSRLRRDQLYLYYTQMGRSMYSGKRIDFDKLINDKNTYDIDHIYPRSKIKDDSITNRVLVEKDINGDKTDIYPISEDIRQKMQPFWKILKEKGLINEEKYKRLTRNYELTEEELSAFVARQLVETQQSTKALATLLQKEYPSAKIVYSKASNVSEFRNRKDKELPKFREINDLHHAKDAYLNIVVGNVYDTKFTEKFFLNIRNENYSLKRVFDFNVAGAWDAKGSTFDTVKKYMAKNNPIITFAPYEAKGKFFDQQIVSKGNGQCPIKQGMDIEKYGGYNKRRAAYLISVEYLDKKKIKRSLEPVYIKDIDVYREDPIRYCEVILGLKNPHILVPKILMGTSCYVDGEQIVLKNIVDSRITYHHTYQLVLNINDVKYLKKIFKYYQEVENLKKDDMDRIRVLGITKEQNIKIFEVLCEKLASSIYSTILRSVGKVAQNNRSIFKKLSIIDQCEILKEIIFAFRCNCVVSDLRKINGSKNTGILKMSRLISNNKVFRIIHQSVTGLFEKEVDLLK

SEQ ID NO: 21557 - protein, 1330 aa, unidentified
  REGION 1..1330: note = Cas Enzyme sequence
MEGQMKNNGNNLQQGNYYLGLDVGTSSVGWAVTDTEYNVLKFKGKSMWGARLFDEASTAEDRRTHRGNRRRLARRKYRLLLLEQLFEKEIRKIDDNFFVRLHESNLWADDKSKPSKFLLFNDTNFTDKDYLKKYPTIYHLRRDLIHNPTEHDIRLVFLALHHLIKYRGHFIYDNSANGDVKTLDEAVTDFEEYLNENDIEFEIENKKEFINVLSDKHLTKKEKKISLKKLYGEITDSENINISVLIEMLSGSSISLSNLFKDIEFDGKQNLSLDSDIEETLNDVVDILGDNIDLLIHAKEVYDIAVLTSSLGNHKYLCDAKVELFEKNKKDLMILKKYIKKNHPEDYKKIFSSPTEKKNYAAYSQTNSENVCSQEEFCLFIKPYIKDMAKSENEDEVRIAKEVEDKSFLTKLKGTNNSVVPYQIHERELNQILKNIVGYLPFMNDKQEDISVVDKIKLIFKFKIPYYVGPLNTKSTRSWVYRSDEKIYPWNFSNVIDLDKTAHEFMNRLIGRCTYTNDPVLPMDSLLYSKYNVLNEINPIKVNGKAIPVEVKQAIYTDLFENSKKKVTRKSIYIYLLKNGHIEKEDIISGVDIEIKAKLKSHHDFAQIMEENKCTSDEIEKIIKGILVYSDDKSMLRRWLKNNIKGLSDNDIKYLAKLNYKEWGRLSKTLLTDIYTINPEDGEACNILDIMWNTNATLMEILNNKKYQFKQNIEDYKAENYDVKQSLHEELDDMYISPAARRSIWQALRIVDEIVDIKKYAPKKIFIEMAREKKSAMKKKRTESRKDALLELYKSCKSQADGFYDEELFEKLSNESNSRLRRDQLYLYYTQMGRSMYSGKRIDFDKLINDKNTYDIDHIYPRSKIKDDSITNRVLVEKDINGDKTDIYPISEDIRQKMQPFWKILKEKGLINEEKYKRLTRNYELTEEELSAFVARQLVETQQSTKALATLLQKEYPSAKIVYSKASNVSEFRNRKDKELPKFREINDLHHAKDAYLNIVVGNVYDTKFTEKFFLNIRNENYSLKRVFDFNVAGAWDAKGSTFDTVKKYMAKNNPIITFAPYEAKGKFFDQQIVSKGNGQCPIKQGMDIEKYGGYNKRRAAYLISVEYLDKKKIKRSLEPVYIKDIDVYREDPIRYCEVILGLKNPHILVPKILMGTSCYVDGEQIVLKNIVDSRITYHHTYQLVLNINDVKYLKKIFKYYQEVENLKKDDMDRIRVLGITKEQNIKIFEVLCEKLASSIYSTILRSVGKVAQNNRSIFKKLSIIDQCEILKEIIFAFRCNCVVSDLRKINGSKNTGILKMSRLISNNKVFRIIHQSVTGLFEKEVDLLK

SEQ ID NO: 21558 - protein, 1327 aa, unidentified
  REGION 1..1327: note = Cas Enzyme sequence
MEEKMKNNGNNLQQGNYYLGLDVGTSSVGWAVTDTDYNILKFRGKSMWGARLFDEASTAEDRRTHRGNRRRLARRKYRLLLLEQLFEKEIRKIDDNFFVRLHESNLWADDKSKPSKFLLFNDTNFTDKDYLKKYPTIYHLRSDLIHNSTEHDIRLVFLALHHLIKYRGHFIYDNSANGDVKTLEEAVTDFERYLNENDIEFKIENKKEFIDVLSDKHLTKKEKKTKLKKLYGDITDSEIINISVLIEMLSGSSISLSNLFKDIEIDGKQKLSLDSDIEETLNDVVDILGDNIDLLIHAKEVYDIAVLTSSLGKHKYLCDAKVELFKKNKKDLQILKKYIKKNHPEDYKKIFSSPTEKKNYAAYSQTNSENVCSQEEFCLFIKPYIKDMAKSENEDEVRIAKEVEDKSFLTKLKGTNNSVVPYQIHERELNQILKNIVGYLPFMNDKQKEISIVDKIKLIFKFKIPYYVGPLNTKSTRSWVYRSDEKIYPWNFSNVVDLDKTAHEFMNRLIGRCTYTNDPVLPMDSLLYSKYNVLNEINPIKVNGKAIPVEVKQAIYTDLFENSKKKVTRKSIYIYLLKNGHIEKEDIISGVDIEIKAKLKSHHDFAKIMEENKCTPDEIEKIIKGILVYSDDKSMLRRWLKNNIKGLSDNDIKYLVKLNYKEWGRLSKTLLTDIYTINPEDGEACNILDIMWNTNATLMEILNNKKYQFKQNIEDYKAENYDVKQSLHEELDDMYISPAARRSIWQALRIVDEIVDIKKSAPKKIFIEMAREKKSAMKKKRTESRKDILLELYKSCKSQADGFYDEELFEKLSNESNSRLRRDQLYLYYTQMGRSMYSGKRIDFDKLINDKNTYDIDHIYPRSKIKDDSITNRVLVEKDINGEKTDIYPISEDIRQKMQPFWEILKEKGLISEEKYKRLTRNYELTDDELSSFVARQLVETQQSTKALATLLQKEYPSAKIVYSKAGNVSEFRNRKGKELPKFREINDLHHAKDAYLNIVVGNVYDTKFTEKFFLNIRNENYSLKRVFDFNVAGAWDAKGSTFDTVKKYMAKNNPIITFAPYEVKGELFDQQIVPKGKGQFPIKQGKDIDKYGGYNKLTGSFLVAVEHTNKKSRVKTLETVYLKDINLYNKNPLKYCKEVLGLIDPCIIYPKIMIGSLFNIDNRKIVITGRSGNRFVCHHTYQLSINDEYARYLKNLAKYLEEEPEGDCDREASLSISSEKNLEMYYFIKNKLGTKTYSSVLLSLKNSVDDFEINFRKLTIHDQCEVLRQLLKAFKCNRETSNIEKLNKVKQAGIIIISNSITNSKSFKLIHQSITGLFEKEVDLLK

SEQ ID NO: 21559 - protein, 1327 aa, unidentified
  REGION 1..1327: note = Cas Enzyme sequence
MEGQMKNNGNNLQQGNYYLGLDVGTSSVGWAVTDTEYNVLKFKGKSMWGARLFDEASTAEDRRTHRGNRRRLARRKYRLLLLEQLFEKEIRKIDDNFFVRLHESNLWADDKSKPSKFLLFNDTNFTDKDYLKKYPTIYHLRRDLIHNPTEHDIRLVFLALHHLIKYRGHFIYDNSANGDVKTLDEAVTDFEEYLNENDIEFEIENKKEFINVLSDKHLTKKEKKISLKKLYGEITDSENINISVLIEMLSGSSISLSNLFKDIEFDGKQNLSLDSDIEETLNDVVDILGDNIDLLIHAKEVYDIAVLTSSLGNHKYLCDAKVELFEKNKKDLMILKKYIKKNHPDDYKKIFSSPTEKKNYAAYSQTNSENICSQEEFCLFIKPYIKDMAKSENEDEVRIAKEVEDKSFLTKLKGTNNSVVPYQIHERELNQILKNIVGYLPFMNDKQEDISVVDKIKLIFKFKIPYYVGPLNTKSTRSWVYRSDEKIYPWNFSNVIDLDKTAHEFMNRLIGRCTYTNDPVLPMDSLLYSKYNVLNEINPIKVNGKAIPVEVKQAIYTDLFENSKKKVTRKSIYIYLLKNGHIEKEDIISGVDIEIKAKLKSHHDFAQIMEENKCTPEEIEKIIKGILVYSDDKSMLRRWLKNNIKGLSDNDIKYLAKLNYKEWGRLSKMLLTDIYTINPEDGEACNILDIMWNTNATLMEILNNKKYQFKQNIEDYKAENYDMKQSLHEELDDMYISPAARRSIWQALRIVDEIVDIKKSAPKKIFIEMAREKKSAMKKKRTESRKDALLELYKSCKSQADGFYDEELFEKLSNESNSRLRRDQLYLYYTQMGRSMYSGKRIDFDKLINDKNTYDIDHIYPRSKIKDDSITNRVLVEKDINGEKTDIYPISEDIRQKMQPFWKILKEKGLINEEKYKRLTRNYELTEEELSAFVARQLVETQQSTKALATLLQKEYPSAKIVYSKASNVSEFRNRKDKELPKFREINDLHHAKDAYLNIVVGNVYDTKFTEKFFLNIRNENYSLKRVFDFNVAGAWDAKGSTFDTVKKYMAKNNPIITFAPYEVKGELFDQQIVPKGKGQFPIKQGRDIEKYGGYNKLSGAFLFAVEYKGKKARERSLETVYIKDIDLYLENPIKYCESILGLKDVCIIYPKILLGSLIKVNGIKKIITGRTAAQFVCHHPYQFIIDDATSQYLKDVSKYLQEITDETGERAENLGITFDKNIEIYKLFEEKLSRKEYSSVLYSVRKTVIDSKSVFTHLDLYDQCIIIIQLLKLFKCNRESSNLEKLNGKKQVGVIHLSQKLPINGEFILIHQSVTGLFEKEVDLLK

SEQ ID NO: 21560 - protein, 1070 aa, unidentified
  REGION 1..1070: note = Cas Enzyme sequence
ILASGVRLFEELDSGDNVKRRSFRGARRLKSRRKLRIKDMRDLLIEHKFYSEDYTNINPYEARLKGLTTKLSNKELSAALIHLAKRRGSSLEVAGEETLDGVNPKAVLARHDQQLKEKYVVELQLEKLEESGKIRDNENIFRTKDYLKEANQILKNQKVNEDFIKKTLQIIERRRHFSEGPGSQKSPSPFGRWRYVESDLRDKIVKSFTNEEKKRYLKQQFTYKHLKKDYIVLKDGNIINKKPLNLIDLMRGKCSVYLDEFRAPKSSFSATLHNFLNDVNNMKIVSEENRNFTKQEKQKALETIKTEGRFRPDNINGFLKLFGFTIDDVIGFRIDTKEKPVITDFKIYRELLTIFKNNNLTLEDSLADQIAEILTKTQVIEERKEALKEYISSQKAIEEIADLTKYTGYHGFSFKAIYQLNEEMLKTNQNQQQILSSTLQRDQTQVAKLEFDNTLILSSVARRAHREALRVISELIKEFGNFKRIVIETTREKNSREERKRIQDMQKRYLKQKESALELLKDAGFSGDDVYSGQTILKIRLYEEQSAKCAYSGKHLNFVKLITDPKAYEIDHIIPRSISQDNSYSNKVLVIPEVNQLKGNTTPFGYFVSGKARKEYPINNYNAFKDIVLGNINYQKNAAKRRNLLYEEDITKYSSLEEFTNRNLVDTSYAARSLMTTIKNYFKSNKINTTVHTIRGKQTDLFRAIGRTLWIRDNKEADLELNPFLKNRDNYMHHAIDALIIAGLSNQRTFKYLFDLEKSKHETYVFSKKKGEPFTVDPVEDSELIKFIKNVGNVSKDVVRFSWKIDRKINRSFSDQTIYSTRMLNGEEYVVKKYSNIYEINKDKLEKILIDEKEKLLVYQHDRKTFEIIKQAYLQYEHEKFPLKAYLDEHGKIKKHGKGPDVTNLKYLANRLGSHIDITRDTKTNKRIVLLQISPYRIDVYKNDKNRYRFVTITYASFKKDNRGFYIDKDEYQNKLLEKQIDEKYKFLYSFNRNEIIEIKQRNQDYIRYRFIATNNDIKNIIEVKSIKKHDKDRRLLLTIGAKTESIKKYAVSPAGRVNIIKQEELTLVR

SEQ ID NO: 21561 - protein, 1071 aa, unidentified
  REGION 1..1071: note = Cas Enzyme sequence
VAKYILGLDMGITSVGWGLIDYDSGKIVDKGVRLFKEATAEDNLKRRTHRGSRRLKRRRQQRIIELKRLLKKENILTDDYTPLNNVYYLRCKGLNEKLTNAELVSVLLHIAKIRGSSLEVVEDDEKKANEDKSSKANLSVNETKLRTSKEEICEKQYKDLIENGKVRGINNIYKSSSYESELKKILDNQGLSKEVNDKIVNIIFRRRDFNEGPGSIESPTIYGRFIPHENGEIEIIPSMIEKMQGKCSIYQDEPRAPKMSFTADLFNFLNDLNNLEIQRADDYDNYITPDEKKLIINEYIIKKGKITIQKLCDVLQVKKENITGFRVNKGEPILTEFKGYQKVLKALNRIIDTEIVDAVIDVLTKYKDVEKRKEEIKKINNAEFSEEDIVKLSEITGIQQYHSLSYKAMKVIIPELYENPENQMEVITRLNLVKTSIDDLKGRTTIPSYSDRIYSPVAKRVHNETIKVVNAVIKKYGDLDSIVIEMARDRNTAEERKNIEQAQKRNQENREKAKEILDVNYSFSKLDSKLVQKILLYNQQDGKSMYSGKPINLNVLISDPNAYEIDHIIPLSISLDDSIANKVLVYRSENQQKLNNTPLQYLRSGNSNGWSVDEFREVVIKMYNDKKISLKKLQNLLCEKDITKQDVRKEFIERNLVDTRYASRVVLGLLKDYFKANNKNTKVFTIRGQITSQFRKSRNLVKSRDCFYHHIVDALIIAYFRKFNYINELMQYNFSYKVKIDEETGELIQYNDTLFSTKDDDFTIQLRKLNDLNKYSEDIKISHKVDRKPNRQFSDETIYSARKINNDYMKISKYKDIYGEEGKKFAKVIKDNLQKEKDLDKFLMKKVDPETFNLLVSIVINTTCGEKENPFVKYCEENNIDFIRKKSKNGNGPIIRSIRYYDGKVNSHLDISQKYVNLSDDKKVVLLQISPYRTDFYLTKEGNYKFLTIKYANIKENHNGYYIPKDVYESLKKSKKINDSDEFLFSLYRNDYLRITTNDPTENAPMIYRFVGTNNDLENKVEVKPIYCDKNEENRIMKTIGKKVTKIEKFDVDVLGNKIAKKRDKCLQLEL

SEQ ID NO: 21562 - protein, 1078 aa, unidentified
  REGION 1..1078: note = Cas Enzyme sequence
MAKKVLGLDIGVTSVGWAIIDVDENEIIDKGVRIFPERSAQENVKRREKRGSRRLKRRRQQRLIDMKELLKKHGVIDEKFVPLKNPYEIRCKGLTEKLANDELATAILHITKRRGSSFDSIDDIEEEDEKTSSDVVDQIEVVKAPELKSTKKILDYNEKMLINKNTNYICLIQKKRLEESGSVRGSLNNFKTSEYIKEIEKILSNQGLSQDFNKKVINLIKRKRAYFEGPGSEKSPTPYGRWYYEQGEIKYVDLIEKMRGTCSLFPLEKRAPKDSYTACLFNILNDLNNLKINQEKITQEQKEQVIELMKKEKGDFTVKKLCKFLNVEETFISGFREDKNKKNLISQFTGYKKIRNVVNNEGFNKIIFENEDYVDKIVEILTVKRGIDERKNELKKIDPEVFSEAVVDALAQITGCKEYHSLSFKAMKKMIPDLLATTDNQMQLITKYGIQKQNIGVFKGKNEIVLDQKAIISPVALRAQNEAIKIINAIRSIHGELDTIVIEMARDKNSAEEKKRINNQQKRGEELNKQALELAEGKPLTGSLALKLRLYKEQDHRCIYTGKEIDKDLLMTDPFAYEIDHIIPISISLDDSFNNKVLTTSKINSDKTNMTPFKFFSSGKIQGVSFGEFTSRVINLEKRGLISKNKLRNLLFAEDIDKQSVRAEFINRNLVDTRYATRVILNTLTNYFRANEIDTKVHAINGRITDNIRNRAGLKKCRDFFYHHIVDAIIVAAVKKHKYFSKLLNLYESSDGIIYDNETGEIITSENQKDFFDEKLFSFLSKIRRINDLTNYDETIKISHKIDKKFNRQFTDETIYSTRLIDGVDYLVARFKDIYGEEGIKLAEMIKKDEENKILMKRNDPETFELIKQIVLKTDYTEKENPFALYKEQHGEIRKKAKNGKGPVIKSVKYLKERLGNHHSITHKYQSVRPGNKVVLLQVSPYRTDFYVSPSGLYRFVTIRYANVKMSNKEGIIDLVEYEQMKQLKKIDDTYQFCFSLHRNETIKITKKGENPHAYRFVGTNDDKSNKIEVKELYCNVLKEKRQIMLTIGEKICLLEKFSCDILGNMKKIESEVLKLKI

SEQ ID NO: 21563 - protein, 1094 aa, unidentified
  REGION 1..1094: note = Cas Enzyme sequence
MERKFVLGLDIGIASVGWGIIELSTGIVVDKGVRIFPERTAAENAKRRQLRGARRLIRRRRQRIDDLRKILVENNIINDSFRPLEHPYEIRCEGLKRTLSNEELATALLHIAKRRGSFLEFDRIDKKDVVSLDDYYKIAAKTDLSGGVVEDSEEKAKENLATKAILDANSKLLKMHNIHVCELQLMRLRENGKIRANQNNFKVIEYLRELLAIFEKQTISEELKVSIIDIIFRKREYYDGPGSKKSPTPYGRYILKNGKITEYDLIEKMRGKCTLFPDEPRAPKMSYTADLFNFLNDLNNLNINGKKITTEQKKEIVEKFINEKGEISPEKLCSYLEVDPALVSGFRVKNYETPILTTFEGYKKLSKVVKNKNNPLPKEIIENKDYVDAVIDILTRKKGKNERIEELKKIDSAIFNDFVAEKIAGISGITQYHSLSLKAIKMMLPDLWNTNDNQMQIITKMNLLAGRKEIYKGQKDIPFDDKLILSPVAKRAMNEAIKIINAVRDRYGELDSIVIEMARERNSDEEKKSIKKLNKFFADLKEKARETIKGYNVELNAKLVNKIRFYNEQDCKCLYTGKAIDLELLLKDPKAYEIDHIIPISISLDDSMQNKVLVCADANRDKENMTPFKYFASGKATGWNYEEYKEYVINLHKRKAISKKKLQNLLFEEDITKYDVQKKFIQRNLVDTRYASRVILNVLQSYFKANDIKTKVFTVRGSFTNMFRKKANLQKNRDFFYHHIVDALIVASIKKLNYMDHLLNIGISKDNTAYDKETGEVLTVMNEKKFFPPDFINFLNKLRGINDATDYIKVNISHKVDRKPNRQFTDQTIYGVRIINDDYWRIGKIKDIYGDEGKKLVEDIKKGKTDRYLMKQNDPETFALLEKIVETTPVDKNENPFLKYKSEHGFIRKRSKKGEGPIVKSLKYKFDVISNYVDITHKYDVKNDKVKVVLLSVTTYRIDIYKSRVSGLYNFVTIRNHNIKSNNEGFYIDECFYNSEKARKGITDEFEFQFSLHKNEVVELTKDEPALLRFVGVNSERINRLEFKPLHCDRLVINEKEKRIRIDINKNVLNICKYNVDVLGNLYQVSQEELKLKF

SEQ ID NO: 21564 - protein, 1094 aa, unidentified
  REGION 1..1094: note = Cas Enzyme sequence
MERKFVLGLDIGVASVGWGIIELSTGIVVDKGVRIFPERTAAENAKRRQLRGARRLIRRRRQRIDDLRKILVENNIINDSFRPLEHPYEIRCEGLKRTLSNEELATALLHIAKRRGSFLEFDRIDKKDVVSLDDYYKIAAKTDLSGGVVEDSEEKAKENLATKAILDANSKLLKMHNIHVCELQLMRLRENGKIRANQNNFKVIEYLRELLAIFEKQTISEELKVSIIDIIFRKREYYDGPGSKKSPTPYGRYILKNGKITEYDLIEKMRGKCTLFPDEPRAPKMSYTADLFNFLNDLNNLNINGKKITTEQKKEIVEKFINEKGEISPEKLCSYLEVDPALVSGFRVKNYETPILTTFEGYKKLSKVVKNKNNPLPKEIIENKDYVDAVIDILTRKKGKNERIEELKKIDSAIFNDFVAEKLAGISGITQYHSLSLKAIKMMLPDLWNTNDNQMQIITKMNLLAGRKEIYKGQKDIPFDDKLILSPVAKRAMNEAIKIINAVRDRYGELDSIVIEMARERNSDEEKKSIKKLNKFFADLKEKARETIKGYNVELNAKLVNKIRFYNEQDCKCLYTGKAIDLELLLKDPKAYEIDHIIPISISLDDSMQNKVLVCADANRDKENMTPFKYFASGKATGWNYEEYKEYVINLHKRKAISKKKLQNLLFEEDITKYDVQKKFIQRNLVDTRYASRVILNVLQSYFKANDIKTKVFTVRGSFTNMFRKKANLQKNRDFFYHHIVDALIVASIKKLNYMDHLLNIGISKDNTAYDKETGEVLTVMNEKKFFPPDFINFLNKLRGINDATDYIKVNISHKVDRKPNRQFTDQTIYGVRVINDDYWRIGKIKDIYGDEGKKLVEDIKKGKTDRYLMKQNDPETFALLEKIVETTPVDKNENPFLKYKSEHGFIRKRSKKGEGPIVKSLKYKFDVISNYVDITHKYDVKNDKVKVVLLSVKTYRIDIYKSRVSGLYNFVTIRNHNIKSNKEGFYIDECFYNSEKARKGITDEFEFLFSLHKNEVVELTKDEPALLRFVGVNTEITNRLEFKPLHCDRLVINEKKKRIRIDINKNVLNICKYNVDVLGNLYQVSKEELKLKF

SEQ ID NO: 21565 - protein, 1066 aa, unidentified
  REGION 1..1066: note = Cas Enzyme sequence
MGKLVLGLDIGITSVGWGLIDIETDEIVDKGVRLFPEGTAAENLKRRTKRGGRRLKRRRQQRIIDLKKLLKKHNIINDDFVALNNPYEIRVKGLSEQLTNEEFATAFLHIVKRRGSILDTIEDDESKLKDDQSTKAVLTSNEKYLRQKDYYICQLQLERLSNGENIRGTYNNFKTSDYLKEAEAIFKNQEITNDLKKDILELIARKREYYDGPGSKNSPTPYGQWFYDKNGKIKHMDMIEKMRGKCSIFSDEPCAPKMSYRADLFNFLNDLNNLKVDGEGITTEQKNEIINEYINKKGEISPKNLIKYLGVDEYLVTGFRIDKNDNSLLTEFKGYKKILSVLKKNNSPKLKEIVENKEYVDKIIDILTRVKGITDRVSAIQEIDPNLFEKEVAEQFANISGITGYHSISYKAMNIIIPELMATNDNQMQILTRTGLINKGKKSNLKGMKNIPFDDEAILSPVAKRAQNESLKVINAIRKQYGELDSIVIETARDRNSLEEQRKITESQKRGEELNKKCEVIAKGVKLNKVLRHKIRLYMEQDAKCLYSGRPIDLYRLLHDPKAYEIDHIIPISISLDDSMNNKVLVLSEYNHLKGNATPFKFLKSGKSSGWSYEEFKTYALALKKNNQISRKKLNNLLFEEEITKFSVRRKFIERNLVDTRYASRTILDTLTNYFNANSIDTKVHTVRGAITNIFRQKSGLIKNRDYFYHHIVDALIVAGIKKQGYLNKLLLENQIKYDEETGEVLNIVSENEFFDSGYIRFISKLKKLNDYIIYDGEYKISHKVDRKPNRQFTDETIYGVRSVDGEDKILSKYKNIYGDEGIKLAKDIRESKFDKILMSKVDPKTFELLKNIVYNTPIDKEKKELNPFEIYKNEHGYIRKVSRYNDGPIVKSVKYYLKRLKSHVDISHKYNLNTNKTKVALLQVSPYRTDFYKDSVGLYKFLTIRYANIYTNKDGYYINKQWYEDELNRRGINSDFEFQFSLNRNEFVEICKQEKDYRDMMLYRFVGTNSEEANKVEVKPLHFNTNKDNRIKITINKTIVNMTKYHSDVLGNLYKVEKEALKLKL

SEQ ID NO: 21566 - protein, 1352 aa, unidentified
  REGION 1..1352: note = Cas Enzyme sequence
MKEVYNIGLDIGTSSVGYAMTDEKGRLLRFHKRPTYGSVLFEEAQTAKERRQKRSARRRLVRRRKRIKLLQALVAPDVCAADPAFFLRMNESFLWAEDSKYEKFYAKLPKALFVDGTVSVETLPTIYHIRNELVKSTKQADIRYVYLAMHHIIKYRGHFLMEGQTLSDIGAEAPQKMQELLELLTDPESFVCGLAPAENAAKEICHAMENHSLRGMARKEQIQKLLYAGKKKESKEAAQALASLLLGYKGSLKALIGYESQTDAPEKTSLGAIEGETEETYLAGMTEAQAEVFALMLELYRWQLFAEIRQNGQTISDTMVARYEKHGRDLEKLKAWVKAYQPDKFYALFRDDENAKGYAAYTDHLRKPKKFKKEKLQRCTQDEFYKVLKAMLTGNKDAEAAAAAQPMLEAIDEPNGFLPLQRINLNGQIPNQIQAEELVKILDAQGKYYPTLRENREKILSICTFRLPYYVGPLYQDKNSPFQKWIVRDMTQPAYPWNFFDVVNQTATAEGFIANLTNKCTYLPIEDVLPLHSLLYEEYLMLNELNRVRVKGNLIRDVQLKQRMLDELFAKNKSVSYKTFAKWLQLNSPYVDVTENDISGTQEPGKFTASLRTRYDLEKHGFTVNDQTTEQLETLVRWSTIFEDRSILKKLIQEKYPDITDTQLNFLVQRRYTGWGRLSEKLLTGVLGEYENQPATIMEVLRATNENFMQVLNNPQYHFQEKIAKERLMELGEPKEEIEYDEIRKLQVSPALKRGIWTAVRIVKELIDHQGCHPHAIYLENTREETPDEKKQRTQSRLNQVEQMYKELAEDKTAEKVPSECWEVLKNCKDKKKLDDQQYLYLLQLGKSLYSGKPLDFDQLSATTEIDHILPRCYIVDNSIENRALVLKGENQRKADNLLLADSIRDSQRPWWNYLRQKGFMGEKKFKNLTRSVVSEEDKQKFIARQLVETGQMVQCVTELFKRYYPDVHVSSIKAGLSSELREQYGLYKIRELNDMHHAYDAFLAATMGNFVERFIPWLDSESSAAIRVRKAQKANKGDDNKVDLSSKHGMILAKFSQDQEDPDTGEIIHNAQQGICYLKAVWGYHDGHVVFLKRQKSGAIYDESRYRAGSVKAKLCLKKDLDTMKYGGYNKEYPAYIAAISYQKGKKRVGELVNVPIYLAEAIEQNPKVLVDYLEKDYPGVQIIRPKILMNQRIEYEGSELLLRSCSEMYNARELFIPTYLHHTLWKLYKAPKQLQPDDEEHLNTLISLLIEKMEKQYPIFNGVAKRMSVIDFDTLCFQEKCIFIVETMKVMAVNGQYAMYKTALSRKELSDNQGRITNKVLNLSHITLIDQSITGLREKRTKLWPDSEPS

SEQ ID NO: 21567 - protein, 1312 aa, unidentified
  REGION 1..1312: note = Cas Enzyme sequence
VQNGFLGITVSSEQVGWAVTNPKYELERASRKDLWGVRLFDKAETAEDRRMFRTNRRLNQRKKNRIHYLRDIFHEEVNQKDPNFFQQLDESNFCEDDRTVEFNFDTNLYKNQFPTVYHLRKYLMETKDKPDIRLVYLAFSKFMKNRGHFLYKGNLGEVMDFENSMKGFCESLEKFNIDFPTLSDEQVKEVRDILCDHKIAKTVKKKNIITITKVKSKTAKAWIGLFCGCSVPVKVLFQDIDEEIVTDPEKISFEDASYDDYIANIEKGVGIYYEAIVSAKMLFDWSILNEILGDHQLLSDAMIAEYNKHHDDLKRLQKIIKGTGSRELYQDIFINDVSGNYVCYVGHAKTMSSADQKQFYTFLKNRLKNVNGISSEDAEWIDTEIKNGTLLPKQTKRDNSVIPHQLQLREFELILDNMQEMYPFLKENREKLLKIFNFVIPYYVGPLKGVVRKGESTNWMVPKKDGVIHPWNFDEMVDKEASAECFISRMTGNCSYLFNEKVLPKNSLLYETFEVLNELNPLKINGEPISVELKQRIYEQLFLTGKKVTKKSLTKYLIKNGYDKDIELSGIDNEFHSNLKSHIDFEDYDNLSDEEVEQIILRITVFEDKQLLKDYLNREFVKLSEDERKQICSLSYKGWGNLSEMLLNGITVTDSNGVEVSVMDMLWNTNLNLMQILSKKYGYKAEIEHYNKEHEKTIYNREDLMDYLNIPPAQRRKVNQLITIVKSLKKTYGVPNKIFFKISREHQDDPKRTSSRKEQLKYLYKSLKSEDEKHLMKELDELNDHELSNDKVYLYFLQKGRCIYSGKKLNLSRLRKSNYQNDIDYIYPLSAVNDRSMNNKVLTGIQENRADKYTYFPVDSEIQKKMKGFWMELVLQGFMTKEKYFRLSRENDFSKSELVSFIEREISDNQQSGRMIASVLQYYFPESKIVFVKEKLISSFKRDFHLISSYGHNHLQAAKDAYITIVVGNVYHTKFTMDPAIYFKNHKRKDYDLNRLFLENISRDGQIAWESGPYGSIQTVRKEYAQNHIAVTKRVVEVKGGLFKQMPLKKGHGEYPLKTNDPRFGNIAQYGGYTNVTGSYFVLVESMEKGKKRISLEYVPVYLHERLEDDPGHKLLKEYLVDHRKLNHPKILLAKVRKNSLLKIDGFYYRLNGRSGNALILTNAVELIMDDWQTKTANKISGYMKRRAIDKKARVYQNEFHIQELEQLYDFYLDKLENGVYKNRKNNQAELIHNEKEQFMELKTEDQCVLLTEIKKLFVCSPMQADLTLIGGSKHTGMIAMSSNVTKADFAVIAEDPLGLRNKVIYSHKGEK

SEQ ID NO: 21568 - protein, 1312 aa, unidentified
  REGION 1..1312: note = Cas Enzyme sequence
VQNGFLGITVSSEQVGWAVTNPKYELERASRKDLWGVRLFDKAETAEDRRMFRTNRRLNQRKKNRIHYLRDIFHEEVNQKDPNFFQQLDESNFCEDDRTVEFNFDTNLYKNQFPTVYHLRKYLMETKDKPDIRLVYLAFSKFMKNRGHFLYKGNLGEVMDFENSMKGFCESLEKFNIDFPTLSDEQVKEVRDILCDHKIAKTVKKKNIITITKVKSKTTKAWIGLFCGCSVPVKVLFQDIDEEIVTDPEKISFEDASYDDYIANIEKGVGIYYEAIVSAKMLFDWSILNEILGDHQLLSDAMIAEYNKHHDDLKRLQKIIKGTGSRELYQDIFINDVSGNYVCYVGHAKTMSSADQKQFYTFLKNRLKNVNGISSEDAEWIDTEIKNGTLLPKQTKRDNSVIPHQLQLREFELILDNMQEMYPFLKENREKLLKIFNFVIPYYVGPLKGVVRKGESTNWMVPKKDGVIHPWNFDEMVDKEASAECFISRMTGNCSYLFNEKVLPKNSLLYETFEVLNELNPLKINGEPISVELKQRIYEQLFLTGKKVTKKSLTKYLIKNGYDKDIELSGIDNEFHSNLKSHIDFEDYDNLSDEEVEQIILRITVFEDKQLLKDYLNREFVKLSEDERKQICSLSYKGWGNLSEMLLNGITVTDSNGVEVSVMDMLWNTNLNLMQILSKKYGYKAEIERYNKEHEKNIYNREDLMDYLNIPPAQRRKVNQLITIVKSLKKRCGVPNKIFFKVSREHQDDPKRTSSRKEQLKYLYKSLKSEDEKHLMKELDELNGHELSNDKVYLYFLQKGRCIYSGKKLNLSRLRKSNYQNDIDYIYPLSAVNDRSMNNKVLTGIQENRVDKYTYFPVDPEIQKKMKGFWMELVLQGFMSKEKYFRLSRENDFSENELVSFIEREISDNQQSGRMIASVLQYYFPESKIVFVKEKLIPSFKRDFHLISSYGHNHLQAAKDAYITIVVGNVYHTKFTMDPAIYFKNHKRKDYDLNRLFLENISRDGQIAWESGPYGSIQTVRKEYAQNHIAVTKRVVEVKGGLFKQMPLKKGHGEYPLKTNDPRFGNIAQYGGYTNVTGSYFVLVESMEKGKKRISLEYVPVYLHERLEDDPGHKLLKEYLVDHRKLNHPKILLAKVRKNSLLKIDGFYYRLNGRSGNALILTNAVELIMDDWQTKTANKISGYMKRRAIDKKARVYQNEFHIQELEQLYDFYLDKLENGVYKNRKNNQAELIHNEKEQFMELKTEDQCVLLTEIKKLFVCSPMQADLTLIGGSKHTGMIAMSSNVTKADFAVIAEDPLGLRNKVIYSHKGEK

SEQ ID NO: 21569 - protein, 1301 aa, unidentified
  REGION 1..1301: note = Cas Enzyme sequence
SEQVGWAVTNPKYELERASRKDLWGVRLFDKAETAEDRRMFRTNRRLNQRKKNRIHYLRDIFHEEVNQKDPNFFQQLDESNFCEDDRTVEFNFDTNLYKNQFPTVYHLRKYLMETKDKPDIRLVYLAFSKFMKNRGHFLYKGNLGEVMDFENSMKGFCESLEKFNIDFPTLSDEQVKEVRDILCDHKIAKTVKKKNIITITKVKSKTAKAWIGLFCGCSVPVKVLFQDIDEEIVTDPEKISFEDASYDDYIANIEKGVGIYYEAIVSAKMLFDWSILNEILGDHQLLSDAMIAEYNKHHDDLKRLQKIIKGTGSRELYQDIFINDVSGNYVCYVGHAKTMSSADQKQFYTFLKNRLKNVNGISSEDAEWIDTEIKNGTLLPKQTKRDNSVIPHQLQLREFELILDNMQEMYPFLKENREKLLKIFNFVIPYYVGPLKGVVRKGESTNWMVPKKDGVIHPWNFDEMVDKEASAECFISRMTGNCSYLFNEKVLPKNSLLYETFEVLNELNPLKINGEPISVELKQRIYEQLFLTGKKVTKKSLTKYLIKNGYDKDIELSGIDNGFHSNLKSHIDFEDYDNLSDEEVEQIILRITVFEDKQLLKDYLNREFVKLSEDERKQICSLSYKGWGNLSEMLLNGITVTDSNGVEVSVMDMLWNTNLNLMQILSKKYGYKAEIEHYNKEHEKTIYNREDLMDYLNIPPAQRRKVNQLITIVKSLKKTYGVPNKIFFKISREHQDDPKRTSSRKEQLKYLYKSLKSEDEKHLMKELDELNDHELSNDKVYLYFLQKGRCIYSGKKLNLSRLRKSNYQNDIDYIYPLSAVNDRSMNNKVLTGIQENRADKYTYFPVDSEIQKKMKGFWMELVLQGFMTKEKYFRLSRENDFSKSELVSFIEREISDNQQSGRMIASVLQYYFPESKIVFVKEKLISSFKRDFHLISSYGHNHLQAAKDAYITIVVGNVYHTKFTMDPAIYFKNHKRKDYDLNRLFLENISRDGQIAWESGPYGSIQTVRKEYAQNHIAVTKRVVEVKGGLFKQMPLKKGHGEYPLKTNDPRFGNIAQYGGYTNVTGSYFVLVESMEKGKKRISLEYVPVYLHERLEDDPGHKLLKEYLVDHRKLNHPKILLAKVRKNSLLKIDGFYYRLNGRSGNALILTNAVELIMDDWQTKTANKISGYMKRRAIDKKARVYQNEFHIQELEQLYDFYLDKLENGVYKNRKNNQAELIHNEKEQFMELKTEDQCVLLTEIKKLFVCSPMQADLTLIGGSKHTGMIAMSSNVTKADFAVIAEDPLGLRNKVIYSHKGEK

SEQ ID NO: 21570 - protein, 1129 aa, unidentified
  REGION 1..1129: note = Cas Enzyme sequence
  SITE 735: note = misc_feature - Xaa can be any naturally occurring amino acid
MTNGKILGLDIGVASVGVGIIDAKTGNVIHANSRLFSAANAENNAERRGFRGARRLTRRKKHRVKRVRDLFEKYDISTDFRNLNLNPYELRVKGLSEQLTNEELFAALRTIAKRRGISYLDDAEDDSTGSSDYAKSIDENRRLLKSMTPGQIQLERLEKYGQLRGNFTVYDENGEAHRLINVFSTSDYKNEARKILETQSNYNKQITDEFIEDYIEILTQKRKYYHGPGNEKSRTDYGRFRTDGTTLENIFGILIGKCSFYPEEYRASKASYTAQEFNFLNDLNNLKVPTETGKLSTEQKEYLVDFAKNSKTLGASKLLKEIAKLVDGDVKDISGYREDSKGKPDLHTFEPYRKLKFNLTTVDIDNLSRDILDKLADILTLNTEREGIEDAINRNLPEQFTKEQISEIVQIRKSQSSAFNKGWHSFSAKLMNELIPELYATSEEQMTILTRLEKFKATKKSSKNTKTIDEKEITDEIYNPVVAKSVRQTIKIINAAVKKYGDFDKIVIEMPRDKNADDEKKFIDKKNKENKKEKDDSLKRAAYLYNGTDKLPDDVFHGNKQLATKIRLWYQQGERCLYSGKPILIQDLVHNSNNFEIDHILPLSLSFDDSLANKVLVYAWTNQEKGQKTPYQVIDSMDAAWSFREMKDYVLKQKGIGKKKREYLLTTENIDKIEVKKKFIERNLVDTRYASRVVLNSLQTALKELGKDTKVSVVRGQFTSQLRRKWKIDKSRETXHHHAVDALIIAASSQLKLWQKHENLMFENYGENQVVNKETGEILSISDDEYKELVFQPPYQGFVNTISSKAFEDEILFSYQVDSKFNRKVSDATIYSTRKAKLGKDKKEETYVLGKIKDIYSQDGFDTFIKRYKKDKTQFLMYQKDPLTWENVIEVILRDYPTTKKSEDGKNDVKCNPFEEYRRENGLICKYSKKGKGTPIKSLKYYDKKLGNHISITPKESKNDVVLQSLNPWRADLYFNPDTLKYELMGLKYSDLSFEKGTGKYHISQEKYDEIKEKEGIGKNSEFKFTLYRNDLILIKDIKHSCEKLLRFSSKNDTSNHYVELKPVEKGYFDSEEELLPVLGKVAKSGRFIKGLSKPGISIYKVRTDVLGNKFFVKKEGDKPKLDFKNNKK

SEQ ID NO: 21571 - protein, 1392 aa, unidentified
  REGION 1..1392: note = Cas Enzyme sequence
MSNKPYSIGLDIGTNSVGWAVITDDYKVPSKKMKVLGNTDKHFIKKNLIGALLFDEGTTAEDRRLKRTARRRYTRRKNRLRYLQEIFFEEMSKLDSGFFHRLDDSFLIPEDKRGSKYPIFATLAEEKEYHKQFPTIYHLRKQLADSKEKADLRLIYLVLAHMIKYRGHFLYEEAFDIKNNDIQKIFNEFISIYDNTFEGSSLSGQNAQIEAIFTDKISKSAKRERVLRLFPDEKSTGLFSEFLKLIVGNQADFKKHFDLEEKAPLQFSKDTYDEDLENLLGQIGDDFADLFLVAKKLYDAILLSGILTVTDPSTKAPLSASMIERYENHQKDLAALKQFIKANLPEKYDEVFSDQSKDGYAGYIDGKTTQETFYKYIKNLLSKFEGTDYFLDKIEREDFLRKQRTFDNGSIPHQIHLQEMNAILRRQGEHYPFLKDNKEKIEKILTFRIPYYVGPLARGNRDFAWLTRNSDQAIRPWNFEEIVDKASSAEDFINKMTNYDLYLPEEKVLPKHSLLYETFAVYNELTKVKFIAEGLRDYQFLDSGQKKQIVNQLFKEKRKVTEKDIIHYLHTVDGYDGIELKGIEKQFNASLSTYHDLLKIIKDKEFMDDPKNEEILENIVHTLTIFEDREMIKQHLAQYASIFDEKVIKALTRRHYTGWGKLSAKLINGIHDKKSGKTILDYLIDDGYSNRNFMQLINDDGLSFKEIIQKAQVVGKTDDVKQVVQELPGSPAIKKGILQSIKIVDELVKVMGHAPESIVIEMARENQTTGRGKKNSQQRYKRIEDALKNLAPGLDSNILKEHPTDNIQLQNDRLFLYYLQNGKDMYTGEALDINQLSNYDIDHIIPQAFIKDDSLDNRVLTSSKDNRGKSDNVPSLEVVQKRKAFLQQLLDSKLISERKFNNLTKAERGGLDERDKVGFIKRQLVETRQITKHVAQILDARFNTEVTEKDKQNRIVKIITLKSNLVSNFRKEFRLYKVREINDYHHAHDAYLNAVVAKAILKKYPKLEPEFVYGDYQKYDLKRYISRFKDPKEVEKATEKYFFYSNLLNFFKEEVHYADGTIVKRENIEYSKDTGEIAWNKEKDFATIKKVLSLPQVNIVKKTEIQTHGLDRGKPKGLFNSNPSPKPSEDSKENLVPIKQGLDPRKYGGYAGISNSYAVLVKAIIEKGAKKQQKTVLEFQGISILDKINFEKNKKNYLLEKGYIKILSTITLPKYSLFEFPDGTRRRLASILSTNNKRGEIHKGNELVLPEKYTTLLYHAKNINKTLEPEHLEYVEKHRNDFAKLLESVLDFNDKYVGALKNGERIRQAFIDWETVDIEKLCFSFIGPRNSKNAGLFELTSQGSASDFEFLGVKIPRYRDYTPSSLLNATLIHQSITGLYETRIDLSKLGED

SEQ ID NO: 21572 - protein, 1377 aa, unidentified
  REGION 1..1377: note = Cas Enzyme sequence
MSNKPYSIGLDIGTNSVGWAVITDDYKVPSKKMKVLGNTDKHFIKKNLIGALLFDEGTTAEDRRLKRTARRRYTRRKNRLRYLQEIFSPEISKVDSSFFHRLDDSFLVPEDKRGSKYPIFATLAEEKEYHKNFPTIYHLRKQLANSKEKADLRLIYLALAHMIKYRGHFLYEESFDIKNNDIQKIFNEFISIYDNTFEGSSLSGQNAQVEAIFTDKISKSAKRERVLKLFPDEKSTGLFSEFLKLIVGNQADFKKHFDLEEKAPLQFSKDTYDEDLENLLGQIGDDFADLFVAAKKLYDAILLSGILTVTDPSTKAPLSASMIERYENHQKDLAVLKQFIKTNLPEKYVEVFSDQSKDGYAGYIDGKTTQEAFYKYIKNLLSKFDGADYFLDKIEREVFLRKQRTFDNGSIPHQIHLQEMNTILRRQGEHYPFLKENKEKIEKILTFRIPYYVGPLARGNRDFAWLTRNSDQAIRPWNFEEIVDKASSAEDFINKMTNYDLYLPEEKVLPKHSLLYETFAVYNELTKVKFIAEGMRDYQFLDSGQKKKIINQLFKKKRKVTEDNIIDCLQKIDNYDGIELKGIEKQFNASLSTYHDILKIIRDKEFMDDPKNGDILENVIHTLTIFEDREMIKQRLAQYNSIFDEKVIKALSRKHYTGWGKLSAKLINGIRDKQTGKTILDYLMDDGKSNRNFMQLIKDDELSFTEIIQKAQVVGDTDNLRQVVQNLPGSPAIKKGILQSIKIVDELVKVMGHAPESIVIEMARENQTTARGKKNSQQRYKRIEDSLKNLASGLDSNILKENPTDNVQLQNDRLFLYYLQNGKDMYTGEALNINQLSSYDIDHIIPQAFIKDDSLDNRVLTSSKDNRGKSDNVPSLEVVEKMKAFWQQLLDSKLISERKYNNLTKAERERGGLNELDKVGFIKRQLVETRQITKHVAQILDARFNKEVTEKNKKNRNVKIITLKSNMVSNFRKEFGLYKVREINDYHHAHDAYLNAVVAKAILKKYPKLEPEFVYGDYQKYDLKRYISKSKDPKEVEKATEKYFFYSNLLNFFKEEVHYADGTIVKRENIEYSKDTGEIAWNKEKDFATIKKVLSFPQVNIVKKTEEQTVGQNGGLFDNNIVSKEKVVDASKLIPIKSGLSPEKYGGYARPTIAYSVLVTYKQNNKIKNTMVGIPVLTKLEFERDPNLYLRNLGINNVSHVIKLVKHTVLEFKHKYGTYRRFIVSNQELKRANQIFVTTKQMKLISQYTTLDKNEHDSLLKNNQQLIQSIWNQFLEFMLATDLVNKKQYDELILTNNQTIEECRNIMNRVITTLSFTNINAGQKKIIFDDTLSLPIKRWQFADSDKMVKKIIESTLIHQSITGLYETRIDLSKLGED

SEQ ID NO: 21573 - protein, 1392 aa, unidentified
  REGION 1..1392: note = Cas Enzyme sequence
MENKNYSIGLDIGTNSVGWAVITDDYKVPSKKMKVLGNTDKHFIKKNLIGALLFDEGTTAEDRRLKRTARRRYTRRKNRLRYLQEIFAEEISKVDNSFFHRLDDSFLVPEDKRGSKYPIFATLAEEKEYHKNFPTIYHLRKQLADSKEKADLRLIYLALAHMMKYRGYFLYEESFDIKNNDIQKIFNEFISIYDNTFEGSSLSEQNVQVEAIFTDKISKSAKRERVLKLFPDEKSTGLFSEFLKLIVGNQAEFKKHFDLEEKAPLQFSKDTYDEDLENLLGQIGDGFADLFLVAKKLYDAILLSGILTVTDPSTKAPLSASMIERYESHQKDLAAFKKFIKNNLPEKYDEVFSDQSKEGYAGYIDGKTTQEAFYKYIKNLLSKLEGSDYFLEKIEREDFLRKQRTFDNGSIPHQIHLQEMNAILRRQGEHYPFLQENKEKIEKILTFRIPYYVGPLARGNRDFAWLTRNSDQAIRPWNFEEVVDKASSAEDFINKMTNYDLYLPEEKVLPKHSLLYETFAIYNELTKVKFIAEGLRDYQFLDSGQKKQIVEQLFKEKRKVSEKDIIQFLHNVDGYDGIELKGIEKQFNASLSTYHDLLKIIKDKEFMDDSKNQEILENIVHTLTIFEDREMIKQRLAQYDSLFDEKVIKALIRRHYTGWGKLSAKLINGICDKQTGNTILDYLIDDGYSNRNFMQLINDDGLSFKEIIQKAQVVGKTDDVKQVVQELPGSPAIKKGILQSVKLVDELVKVMGHAPESIVIEMARENQTTAKGKKNSQQRYKRIEDAIKNLAPGLDSTILKEHPTDNIQLQNDRLFLYYLQNGRDMYTGKPLEINQLSNYDIDHIIPQAFIKDDSLDNRVLTSSKENRGKSDNVPSLEVVEKMKAFWQQLLDSKLISYRKFNNLTKAERGGLDERDKVGFIKRQLVETRQITKHVAQILDSRFNTEVTEKDKKNHNVKIITLKSNLVSNFRKEFGLYKVREINDYHHAHDAYLNAVLAKAILKKYPKLEPEFVYGDYQKYDFKRYISRSRDPKEVEKATEKYFFYSNLLNFFKEEVHYADGTIVKRENIEYSKDTGEIAWNKEKDFATIKKVLSLPQVNIVKKTEIQTHGLDRGKPKGLFNSNPSPKPSEDSKENLVPIKQGLDPRKYGGYAGISNSYAVLVKAIIEKGAKKQQKTVLEFQGISILDKINFEKNKENYLLEKGYIKILSTITLPKYSLFEFPDGTRRRLASILSTNNKRGEIHKGNELVLPEKYTTLLYHAKNINKTLEPEHLEYVEKHRNDFAKLLESVLDFNDKYVGALKNGERIRQVFIDWETVDIEKLCFSFIGPRNSKNAGLFELTSQGSASDFEFLGVKIPRYRDYTPSSLLNATLIHQSITGLYETRIDLSKLGED

SEQ ID NO: 21574 - protein, 1369 aa, unidentified
  REGION 1..1369: note = Cas Enzyme sequence
MENKNYSIGLDIGTNSVGWAVITDDYKVPSKKMKVLGNTDKHFIKKNLIGTLLFDEGTTAEDRRLKRTARRRYTRRKNRLRYLQEIFSEEMSKVDSSFFHRLDDSFLAPEDKRESKYPIFATLQEEKEYHKQFPTIYHLRKKLAESNEKADLRLIYLDLAHMIKYRGHFLIDDSKFKVQNNDIQGLFEKFVEEYDNVQETSLSKIKLNVTEILTANIPKSEKQEQLLKNYPSEKKNTLFGNLIGLALGLTPNFKTNFSLENDAKLQISSESYEEDLGNLLALIGENFIELFSAVKNLSDGILLAGIVSDESPHAPLSAKMVIRFKEHEEDLAFLKQFIKNNLPEKYDEVFSDQSKDGYAGYIGGKTTQEAFYKYIKNLLSKFEGVDYFLDKIEREDFLRKQRTFDNGSIPHQIHLQEMNAILRRQGEHYPFLQENKEKIEKILTFRIPYYVGPLARGNRDFAWLTRNSDQAIRPWNFEEIVDKASSAESFINKMTNYDLYLPEEKVLPKHSLLYETFAVYNELTKVKFIAEGLKDYQFLDSGQKKQIVNQLFKEKRKVTEKDIIQFLHNVDGYDGIELKGIEKQFNASLSTYHDLLKIIKDKEFMDDPKNEAILENIFHTLTIFEDREMIKQRLAKYASIFDEKVIKALTRRHYTGWGKLSAKLINGICDKKTGKTILDYLIDDGYSNRNFMQLINDDVLSFREAIKKAQVVGKTDDVKQVVQELPGSPAIKKGILQSIKIVEELVKVMGHEPESIVIEMARENQTTARGKKNSQQRYKRIENALKNLAPGLDSNILKEHPTDNIQLQNDRLFLYYLQNGKDMYTGEALDINQLSSYDIDHIVPQAFIKDDSLDNRILTSSKENRGKSDNVPSLEVIQKRKAFWQQLLDSKLISERKFNNLTKAERGGLTEYDKAGFIKRQLVETRQITKHVAQILDARFNTEVNEKDKKNRKVKIITLKSNLVSNFRKEFRLYKVREINDYHHAHDAYLNAVVAKAILKKYPKLEPEFVYGDYQKYDLKRYISRFKDPKEVEKATEKYFFYSNLLNFFKEEVHYADGTIVKRENIEYSKDTGEIAWNKEKDFATIKKVLSLPQVSIVKKREEQTGGFSKESILPKGNSDKLIPRKTKDILWDTTKYGGFDSPVIAYSILLIADIEKGKAKKLKTVKTLVGITIMEKATFEDNPITFLENKGYHNVRKENILCLPKYSLFELENGRRRMLASAKELQKGNEIALPAYLTTLLYHAKNVHKLDEPEHLEYIQKHRNEFKDLLNLVSEFSQKHVLAEANLEKIKNLYADNEQADIEILANSFINLLTFTALGAPAAFKFFGKDIDRRRYTTVSEILNATLIHQSITGLYETRIDLSKLGED

SEQ ID NO: 21575 - protein, 1360 aa, unidentified
  REGION 1..1360: note = Cas Enzyme sequence
MKVLGNTDKHFIKKNLIGALLFDEGTTAEDRRLKRTARRRYTRRKNRLRYLQEIFSEEMSKVDSSFFHRLDDSFLVPEDKRGSKYPIFATLAEEKEYHKKFPTIYHLRKHLADSKEKTDLRLIYLALAHMIKYRGHFLYEESFDIKNNDIQKIFSEFISIYDNTFEGSSLSGQNAQVEAIFTDKISKSAKRERILKLFAYEKSTDLFSEFLKLIVGNQADFKKHFDLEEKAPLQFSKDTYDEDLENLLGQIGDDFADLFLVAKKLYDAILLSGILTVTDSSTKAPLSASMIERYENHQKDLAALKQFIQNNLQEKYDEVFSDQSKDGYARYINGKTTQEAFYKYIKNLLSKFEGSDYFLDKIEREDFLRKQRTFDNGSIPHQIHLQEMNAIIRRQGEHYPFLKEYKEKIGTILTFRIPYYVGPLARGNRNFAWLTRNSDQAIRPWNFEEIVDQASSAEEFINKMTNYDLYLPEEKVLPKHSLLYETFAVYNELTKVKFISEGLRDYQFLDSGQKKQIVNQLFKEKRKVTEKDIIQYLHNVDGYDGIELKGIEKQFNASLSTYHDLLKIIKDKEFMDDPKNEEILENIVHTLTIFEDREMIKQRLAQYASIFDKKVIKALTRRHYTGWGKLSAKLINGICDKKTGKTILDYLIDDGYSNRNFMQLINDDGLSFKDIIQKAQVVGKTNDVKQVVQELPGSPAIKKGILQSIELVDELVKVMGHAPESIVIEIARENQTTARGKKNSQQRYKRIEDALKNLAPGLDSNILKEHPTDNIQLQNDRLFLYYLQNGKDMYTGEALDINQLSSYDIDHIVPQAFIKDDSLDNRVLTSSKDNRGKSDNVPSLEVVQKRKAFWQQLLDSKLISEHKFNNLTKAERGGLDERDKVGFIRRQLVETRQITKHVAQILDARFNTEVNEKDKKNRTVKIITLKSNLVSNFRKEFKLYKVREINDYHHAHDAYLNAVVAKAILKKYPKLEPEFVYGDYQKYDLKRYISRSKDPKDVEKATEKYFFYSNLLNFFKEEVHYADGTIAKRENIEYSNDTGEIAWNKEKDFATIKKVLSLPQVNIVKKTEIQTHGLDRGKPRGLFNSNPSPKPSEDSKENLVPIKQGLDPRKYGGYAGISNSYAVLVKAIIEKGAKKQKKTILEFQGISILDKINFEKNKENYLLEKGYIEILSTITLPKYSLFEFPDGTRRRLASILSTNNKRGEIHKGNELVIPEKYTTLLYHAKNINKTLEPEHLEYVEKHRNDFAKLLECVLNFNDKYVGALKNGERIRQAFTDWETVDIEKLCFSFIGPGNSKNAGLFELTSQGSASDFEFLGVKIPRYRDYTPSSLLNATLIHQSITGLYETRIDLSKLGED

SEQ ID NO: 21576 - protein, 1345 aa, unidentified
  REGION 1..1345: note = Cas Enzyme sequence
MKKPYSIGLDIGTNSVGWAVVTDDYKVPAKKMKVLGNTDKSHIEKNLLGALLFDSGNTAEDRRLKRTARRRYTRRRNRILYLQEIFSEEMGKVDDSFFHRLEDSFLVTEDKRGERHPIFGNLEEEVKYHENFPTIYHLRQYLADNPEKVDLRLVYLALAHIIKFRGHFLIEGKFDTRNNDVQRLFQEFLAVYDNTFENSSLQEQNVQVEEILTDKISKSAKKDRVLKLFPNEKSNGRFAEFLKLIVGNQADFKKHFELEEKAPLQFSKDTYEEELEVLLAQIGDNYAELFLSAKKLYDSILLSGILTVTDVSTKAPLSASMIQRYNEHQMDLAQLKQFIRQKLSDKYNEVFSDVSKDGYAGYIDGKTNQEAFYKYLKGLLNKIEGSGYFLDKIEREDFLRKQRTFDNGSIPHQIHLQEMRAIIRRQAEFYPFLADNQDRIEKLLTFRIPYYVGPLARGKSDFAWLSRKSADKITPWNFDEIVDKESSAEAFINRMTNYDLYLPNQKVLPKHSLLYEKFTVYNELTKVKYKTEQGKTAFFDANMKQEIFDGVFKVYRKVTKDKLMDFLEKEFDEFRIVDLTGLDKENKVFNASYGTYHDLCKILDKDFLDNSKNEKILEDIVLTLTLFEDREMIRKRLENYSDLLTKEQVKKLERRHYTGWGRLSAELIHGIRNKESRKTILDYLIDDGNSNRNFMQLINDDALSFKEEIAKAQVIGETDNLNQVVSDIAGSPAIKKGILQSLKIVDELVKIMGHQPENIVVEMARENQFTNQGRQNSQQRLKGLTDSIKEFGSQILKEHPVENSQLQNDRLFLYYLQNGRDMYTGEELDIDYLSQYDIDHIIPQAFIKDNSIDNRVLTSSKENRGKSDDVPSEDVVRKMKSYWSKLLSAKLITQRKFDNLTKAERGGLTDDDKAGFIKRQLVETRQITKHVARILDERFYTETDENNKKIRQVKIVTLKSNLVSNFRKEFELYKVREINDYHHAHDAYLNAVIGKALLGVYPQLEPEFVYGDYPHFHGHKENKATAKKFFYSNIMNFFKKDDVRTDKNGEIIWKKDEHISNIKKVLSYPQVNIVKKVEEQTGGFSKESILPKGNSDKLIPRKTKKFYWDTKKYGGFDSPIVAYSILVIADIEKGKSKKLKTVKALVGVTIMEKMTFERDPVAFLERKGYRNVQEENIIKLPKYSLFKLENGRKRLLASARELQKGNEIVLPNHLGTLLYHAKNIHKVDEPKHLDYVDKHKDEFKELLDVVSNFSKKYTLAEGNLEKIKELYAQNNGEDLKELASSFINLLTFTAIGAPATFKFFDKNIDRKRYTSTTEILNATLIHQSITGLYETRIDLSKLGGD

SEQ ID NO: 21577 - protein, 1375 aa, unidentified
  REGION 1..1375: note = Cas Enzyme sequence
MIKKPYSIGLDIGTNSVGWAVITDDYKVPSKKMKVLGNTNKHFIKKNLIGALLFDEGTTAEDRRLKRTARRRYTRRKNRLRYLQEIFTEEMSKVDSSFFHRLDDSFLVPEDKRESKYPIFATLKEEKEYHKNFSTIYHLRKHLADSKEKADLRLIYLALAHMIKYRGHFLYEESFDIKNNDIQKIFNEFLCIYDNTFEGNSLSGQNSQVEAIFTDKITKSAKRERILKLFPEKESIGLFAEFLKLILGNQADFKKHFNLEEKAPLHFSKDTYDEDLENLLGQIGDDYTNLFLVAKKLYDAILLSGILTVTDPSTKAPLSASMIERYENHQKDLASLKQFIKNNLPEKYDEVFSDQFKDGYAGYIDGKATQEAFYKYIKNLLSKFEGADYFLEKIEREDFLRKQRTFDNSSIPHQIHLQEMNAILRRQGEHYPFLNENREKIEKILTFRIPYYVGPLASGNSDFAWLTRNSEEAIRPWNFEEIVDKASSAEDFINKMTNYDLYLPEEKVLPKHSLLYETFAVYNELTKVKFIAEGLRDYQFLDSGQKKQIVNQLFKEKRKITEKDIIHYLHNFDGYDGIELKGIEKQFNASLSTYHDLLKIIRDKEFMDDPKNEAILENIVHTLTIFEDREMIKQRLAQYNSLFNDKVIKALTRRHYTGWGKLSAKLINGIRDKQTGNTILDYLIDDDKINRNFMQLINDDGLSFKEIIQKSQVVDKTDDVKQVVQELPGSPAIKKGILQSIKIVDELVKVMGHNPESIVIEMARENQTTARGKKNSQQRYKRIEDSLKNLASGLDSNILKENPTDNVQLQNDRLFLYYLQNGKDMYTGEALDINKLSNYDIDHIIPQAFIKDDSIDNRVLTSSKDNRGKSDNVPSLEVVQKRKAFWQQLLDSKLISERKFNNLTKDERGGLDERDKVGFIKRQLVETRQITKHVAQILDSRFNTEVNEKNQKIRTVKIVTLKSNLVSNFRKEFKLYKVREINDYHHAHDAYLNAVVAKAILKKYPKLEPEFVYGEYQKYDLKRYISRSKDPKDIEKATEKYFFYSNLLNFFKEEVHYADGTIVKRENIEYSKDTGEIAWNKEKDFATIKKVLSLPQVNLVKKTEEQTVGQNGGLFDNNIVSKEKVVDASKLIPIKSGLSPEKYGGYARPTIAYSVLVTYKQNNKIKNTMVGIPVLTKLEFERDPNLYLRNLGINNVSHVIKLVKYTVLEFKHKYGTYRRFIVSNQELKRANQIFVTTKQMKLISQYTTLDKNEHDILLKNNQQLIQSIWNQFLEFMLATDLVNKKQYDELILTNNQTIEECRNIMNRVITTLSFTNINAGQKKIIFDDTLSLPIKRWQFTDSDKMVKKIIESTLIHQSITGLYETRIDLGKLGED

SEQ ID NO: 21578 - protein, 1392 aa, unidentified
  REGION 1..1392: note = Cas Enzyme sequence
MNNNNYSIGLDIGTNSVGWAVITDDYKVPSKKMKVLGNTDKHFIKKNLIGALLFDEGATAEDRRFKRTARRRYTRRKNRLRYLQEIFSEEMSKVDSSFFHRLDDSFLVPEDKRGSKYPIFATLAEEKEYHKKFPTIYHLRKHLADSKEKTDLRLIYLALAHMIKYRGHFLYEESFDIKNNDIQKIFSEFISIYDNTFEGSSLSGQNAQVEAIFTDKISKSAKRERILKLFAYEKSTDLFSEFLKLIVGNQADFKKHFDLEEKAPLQFSKDTYDEDLENLLGQIGDDFADLFLVAKKLYDAILLSGILTVTDSSTKAPLSASMIERYENHQKDLAALKQFIQNNLQEKYDEVFSDQSKDGYARYINGKTTQEAFYKYIKNLLSKFEGSDYFLDKIEREDFLRKQRTFDNGSIPHQIHLQEMNAIIRRQGEHYPFLKEYKEKIGTILTFRIPYYVGPLARGNRNFAWLTRNSDQAIRPWNFEEIVDQASSAEEFINKMTNYDLYLPEEKVLPKHSLLYETFAVYNELTKVKFISEGLRDYQFLDSGQKKQIVNQLFKEKRKVTEKDIIQYLHNVDGYDGIELKGIEKQFNASLSTYHDLLKIIKDKEFMDDPKNEEILENIVHTLTIFEDREMIKQRLAQYASIFDKKVIKALTRRHYTGWGKLSAKLINGICDKKTGKTILDYLIDDGYSNRNFMQLINDDGLSFKDIIQKAQVVGKTNDVKQVVQELPGSPAIKKGILQSIKLVDELVKVMGHAPESIVIEIARENQTTARGKKNSQQRYKRIEDALKNLAPGLDSNILKEHPTDNIQLQNDRLFLYYLQNGKDMYTGEALDINQLSSYDIDHIVPQAFIKDDSLDNRVLTSSKDNRGKSDNVPSLEVVQKRKAFWQQLLDSKLISEHKFNNLTKAERGGLDERDKVGFIRRQLVETRQITKHVAQILDARFNTEVNEKDKKNRTVKIITLKSNLVSNFRKEFKLYKVREINDYHHAHDAYLNAVVAKAILKKYPKLEPEFVYGDYQKYDLKRYISRSKDPKDVEKATEKYFFYSNLLNFFKEEVHYADGTIAKRENIEYSNDTGEIAWNKEKDFATIKKVLSLPQVNIVKKTEIQTHGLDRGKPRGLFNSNPSPKPSEDSKENLVPIKQGLDPRKYGGYAGISNSYAVLVKAIIEKGAKKQQKTVLEFQGISILDKINFEKNKENYLLEKGYIKILSTITLPKYSLFEFPDGTRRRLASILSTNNKRGEIHKGNELVIPEKYTTLLYHAKNINKALEPEHLEYVEKHRDEFAKLLDYVLDFNEKYVGALKNGERIRQAFTDWETVDIKELCFSFIGPENSKNAGLFELTSQGSASDFEFLGVKIPRYRDYTPSSLLNATLIHQSITGLYETRIDLSKLGED

SEQ ID NO: 21579 - protein, 1392 aa, unidentified
  REGION 1..1392: note = Cas Enzyme sequence
MSNKPYSIGLDIGTNSVGWAVITDDYKVPSKKMKVLGNTDKHFIKKNLIGALLFDEGTTAEDRRLKRTARRRYTRRKNRLRYLQEIFFEEMSKLDSGFFHRLDDSFLIPEDKRGSKYPIFATLAEEKEYHKQFPTIYHLRKQLADSKEKADLRLIYLVLAHMIKYRGHFLYEEAFDIKNNDIQKIFNEFISIYDNTFEGSSLSGQNAQIEAIFTDKISKSAKRERVLRLFPDEKSTGLFSEFLKLIVGNQADFKKHFDLEEKAPLQFSKDTYDEDLENLLGQIGDDFADLFLVAKKLYDAILLSGILTVTDPSTKAPLSASMIERYENNQKDLAALKQFIKANLPEKYDEVFSDQSKDGYAGYIDGKTTQETFYKYIKNLLSKFEGTDYFLDKIEREDFLRKQRTFDNGSIPHQIHLQEMNAILRRQGEHYPFLKDNKEKIEKILTFRIPYYVGPLARGNRDFAWLTRNSDQAIRPWNFEEIVDKASSAEDFINKMTNYDLYLPEEKVLPKHSLLYETFAVYNELTKVKFIAEGLRDYQFLDSGQKKQIVNQLFKEKRKVTEKDIIHYLHTVDGYDGIELKGIEKQFNASLSTYHDLLKIIKDKEFMDDPKNEEILENIVHTLTIFEDREMIKQHLAQYASIFDEKVIKALTRRHYTGWGKLSAKLINGIHDKKSGKTILDYLIDDGYSNRNFMQLINDDGLSFKEIIQKAQVVGKTDDVKQVVQELPGSPAIKKGILQSIKIVDELVKVMGHAPESIVIEMARENQTTGRGKKNSQQRYKRIEDALKNLAPGLDSNILKEHPTDNIQLQNDRLFLYYLQNGKDMYTGEALDINQLSNYDIDHIIPQAFIKDDSLDNRVLTSSKDNRGKSDNVPSLEVVQKRKAFLQQLLDSKLISERKFNNLTKAERGGLDERDKVGFIKRQLVETRQITKHVAQILDARFNTEVTEKDKQNRIVKIITLKSNLVSNFRKEFRLYKVREINDYHHAHDAYLNAVVAKAILKKYPKLEPEFVYGDYQKYDLKRYISRFKDPKEVEKATEKYFFYSNLLNFFKEEVHYADGTIVKRENIEYSKDTGEIAWNKEKDFATIKKVLSLPQVNIVKKTEIQTHGLDRGKPKGLFNSNPSPKPSEDSKENLVPIKQGLDPRKYGGYAGISNSYAVLVKAIIEKGAKKQQKTVLEFQGISILDKINFEKNKKNYLLEKGYIKILSTITLPKYSLFEFPDGTRRRLASILSTNNKRGEIHKGNELVLPEKYTTLLYHAKNINKTLEPEHLEYVEKHRNDFAKLLESVLDFNDKYVGALKNGERIRQAFIDWETVDIEKLCFSFIGPRNSKNAGLFELTSQGSASDFEFLGVKIPRYRDYTPSSLLNATLIHQSITGLYETRIDLSKLGED

SEQ ID NO: 21580 - protein, 1376 aa, unidentified
  REGION 1..1376: note = Cas Enzyme sequence
MSNKPYSIGLDIGTNSVGWAVITDDYKVPSKKMKVLGNTDKHFIKKNLIGALLFDEGTTAEDRRLKRTARRRYTRRKNRLRYLQEIFFEEMSKLDSGFFHRLDDSFLIPEDKRGSKYPIFATLAEEKEYHKQFPTIYHLRKQLADSKEKADLRLIYLVLAHMIKYRGHFLYEEAFDIKNNDIQKIFNEFISIYDNTFEGSSLSGQNAQIEAIFTDKISKSAKRERVLRLFPDEKSTGLFSEFLKLIVGNQADFKKHFDLEEKAPLQFSKDTYDEDLENLLGQIGDDFADLFLVAKKLYDAILLSGILTVTDPSTKAPLSASMIERYENHQKDLAALKQFIKANLPEKYDEVFSDQSKDGYAGYIDGKTTQETFYKYIKNLLSKFEGTDYFLDKIEREDFLRKQRTFDNGSIPHQIHLQEMNAILRRQGEHYPFLKDNKEKIEKILTFRIPYYVGPLARGNRDFAWLTRNSDQAIRPWNFEEIVDKASSAEDFINKMTNYDLYLPEEKVLPKHSLLYETFAVYNELTKVKFIAEGLRDYQFLDSGQKKQIVNQLFKEKRKVTEKDIIHYLHTVDGYDGIELKGIEKQFNASLSTYHDLLKIIKDKEFMDDPKNEEILENIVHTLTIFEDREMIKQHLAQYASIFDEKVIKALTRRHYTGWGKLSAKLINGIHDKKSGKTILDYLIDDGYSNRNFMQLINDDGLSFKEIIQKAQVVGKTDDVKQVVQELPGSPAIKKGILQSIKLVDELVKVMGYAPESIVIEMARENQTTARGKKNSQQRYKRIEDALKNLAPGLDSTILKENPTDNIQLQNDRLFLYYLQNGKDMYTGEALDINQLSSYDIDHIIPQAFIKDDSLDNRVLTSSKDNRGKSDNVPSLEVVKKRKAFWQQLLDSKLISERKFNNLTKAERGGLDERDKVGFIKRQLVETRQITKHVARILDARFNTEVSEKNQKIRTVKIITLKSNLVSNFRKEFKLYKVREINDYHHAHDAYLNAVVAKAILKKYPKLEPEFVYGDYKKYDLKRYISKSKDPKEVEKATEKYFFYSNLLNFFKEEVHYADGTIVKRENIEYSKDTGEIAWNKEKDFVTIKKVLSLPQVNIVKKTEEQTVGQNGGLFDNNIVSKKKVVDASKLIPIKSGLSPEKYGGYARPTIAYSVLVIADIEKGKAKKLKRIKEMVGITIQDKKKFEANPIAYLEECGYKNINSDLIIKLPKYSLFEFNDGQRRLLASSIELQKGNELILPYHLTALLYHAQRINKISEPIHKQYVETHQNEFEELLTTIISLSKKYIQKPNVESLLQQAFDQADKDIYQLSESFISLLKFTSFGAPGAFKFLGVEISQSSVRYKPNSQFLDTTLIHQSITGLYETRIDLSKLGED

SEQ ID NO: 21581 - protein, 1198 aa, unidentified
  REGION 1..1198: note = Cas Enzyme sequence
NDIQKIFNEFISIYDNTFEGSSLSGQNAQVETIFTDKISKSAKRERVLKLFPDEKSTGLFSEFLKLIVGNQADFKKHFDLEEKAPLQFSKDTYDEDLENLLEQIGDDFADLFVAAKKLYDAILLSGILTVTDPSTKAPLSASMIERYENHQKDLAVLKQFIKTNLPEKYVEVFSDQSKDGYAGYIDGKTTQEAFYKYIKNLLSKFDGADYFLDKIEREVFLRKQRTFDNGSIPHQIHLQEMNTILRRQGEHYPFLKENKEKIEKILTFRIPYHVGPLARGNRDFAWLTRNSDQAIRPWNFEEIVDKASSAEDFINKMTNYDLYLPEEKVLPKHSLLYETFAVYNELTKVKFIAEGMRDYQFLDSGQKKKIINQLFKKKRKVTEDDIIDCLQKIDNYDGIELKGIEKQFNASLSTYHDILKIIRDKEFMDDPKNGDILENVIHTLTIFEDREMIKQRLAQYNSIFDEKVIKALSRKHYTGWGKLSAKLIDGIRDKQTGKTILDYLMDDGKSNRNFMQLIKDDELSFTEIIQKAQVVGDTDNLRQVVQNLPGSPAIKKGILQSIKIVDELVKVMGHAPESIVIEMARENQTTARGKKNSQQRYKRIEDSLKNLASGLDSNILKENPTDNIQLQNDRLFLYYLQNGKDMYTGEALNINQLSSYDIDHIIPQAFIKDDSLDNRVLTSSKDNRGKSDNVPSLEVVEKMKAFWQQLLDSKLISERKYNNLTKAERERGGLNELDKVGFIKRQLVETRQITKHVAQILDARFNKEVTEKNKKNRNVKIITLKSNMVSNFRKEFGLYKVREINDYHHAHDAYLNAVVAKAILKKYPKLEPEFVYGDYQKYDLKRYISRSKDPKEVEKATEKYFFYSNLLNFFKEEVHYADGTIVKRENIEYSKDTGEIAWNKEKDFATIKKVLSLPQVNIVKKTEEQTVGQNGGLFDNNIVSKKKVVDASKLIPIKSGLSPEKYGGYARPTIAYSVLVTYKQNNKIKNTMVGIPVLTKLEFERDPNLYLRNLGINNVSHVIKLVKYTVLEFKHKYGTYRRFIVSNQELKRANQIFVTTKQMKLISQYTTLDKNEHDSLLKNNQQLIQSIWNQFLEFMLATDLVNKKQYDELILTNNQTIEECRNIMNRVITTLSFTNINAGQKKIIFDDTLSLPIKRWQFTDSDKMVKKIIESTLIHQSITGLYETRIDLSKLGED

SEQ ID NO: 21582 - protein, 1375 aa, unidentified
  REGION 1..1375: note = Cas Enzyme sequence
MSNKSYSIGLDIGTNSVGWAVITDDYKVPSKKMKVLGNTDKHFIKKNLIGALLFDEGTTAEDRRLKRTARRRYTRRKNRLRYLQEIFSQEISKVDSSFFHRLDDSFLVPEDKRGSKYPIFATLVEEKEYHKKFPTIYHLRKHLADSKEKTDLRLIYLALAHMIKYRGHFLYEDTFDIKNNDIKKIFNEFISIYDNTFEGSSLSGQNAPVEAIFTDKISKSAKRERVLKLFPDEKSTGLFSEFLKLILGNQADFKKHFDLEEKAPLQFSKDTYDEDLENLLGQIGDDFADLFLVAKKLYDAILLSGILTVKDLSTKAPLSASMIERYENHQKDLAALKQFIQNNLQEKYDEVFSDQSKDGYAGYIDGKTTQEAFYKYIKNLLSKFEGADYFLDKIEREDFLKKQRTFDNGSIPHQIHLQEMNAIIRRQGEHYPFLKKNKEKIEKILTFRIPYYVGPLARGNGDFAWLTRNSDQAIRPWNFEEIVDQASSAEDFINKMTNYDLYLPEEKVLPKHSLLYETFAVYNELTKVKFIAEGLTRYQFLDKKQKKDIFDTFFKAENKRKVTEKDIIHYLHNVDGYDGIELKGIEKQFNASLSTYHDLLKIIKDKAFMDDSKNEEILENIIHTLTIFEDREMIKQRLAQYDSLFDEKVIKALTRRHYTGWGKLSAKLINGIRDKKSGKTILDYLIDDGEINRNFMQLIHDDGLSFKEIIQKAQVFGKTNDVKQVVQELPGSPAIKKGILQSIKIVEELVKVMGHAPESIVIEMARENQTTAKGKKNSQQRYKRIEDALKNLAPGLDSNILKENPTDNVQLQNDRLFLYYLQNGRDMYTGKPLEINQLSNYDIDHIIPQAFIKDNSLDNRVLTSSKENRGKSDNVPSLEVVEKMKAFWQQLLDSKLISERKFNNLTKAERDRGGLNELDKVGFIKRQLVETRQITKHVAQILDARFNKEVTEKDKKNRNVKIITLKSNLVSNFRKEFGLYKVREINDYHHAHDAYLNAVLAKAILKKYPKLEPEFVYGDYQKYDLKRYISRSRDPKEVEKATEKYFFYSNLLNFFKEEVHYADGTIVRRENIEYSKDTGEIAWNKEKDFATIKKVLSLPQVNIVKKTEVQTGGFSKESILPKGNSDKLIPRKTKDILWDTTKYGGFDSPVIAYSILLIADIEKGKAKKLKTVKTLVGITIMEKAAFEKNPITFLENKGYHNVRKENILCLPKYSLFELESGRRRMLASAKELQKGNEIVLPVYLTTLLYHSKNVHKLDEPEHLEYIQKHRYEFKDLLNLVSEFSQKYVLADANLEKIKNLYADNEQADIEILANSFINLLTFTALGAPAAFKFLGKDVDRKRYTTVSEILNATLIHQSITGLYETRIDLSKLGED

SEQ ID NO: 21583 - protein, 1128 aa, unidentified
  REGION 1..1128: note = Cas Enzyme sequence
IVGNQADFKKHFDLEEKAPLQFSKDTYDEDLENLLGQIGDDFADLFLVAKKLYDAILLSGILTVTDPSTKAPLSTSMIERYENHQKDLAALKQFIKNNLPEKYDEVFSDQSKDGYAGYIDGKTTQETFYKYIKNLLSKFEGTDYFLDKIEREDFLRKQRTFDNGSIPHQIHLQEMNDILRRQGEYYPFLKDNKEKIEKILTFRIPYYVGPLARGNRDFAWLTRNSDQAIRPWNFEEIVDKASSAEEFINKMTNYDLYLPEEKVLPKHSLLYETFAVYNELTKVKFIAEGLRDYQFLDSGQKKDIFYTLFKAEDKRKVTEKDIIHYLHNVDGYDGIELKGIEKQFNASLSTYHDLLKIIKDKEFMDDPNNEEILENIVHTLTIFEDREMIKQRLAQYDSLFDEKVIKALTRRHYTGWGKLSAKLINGISDKQTGNTILDYLIDDGEINRNFMQLINDDRLSFKEIIQKAQVVGEIDDVKQVVRELPGSPAIKKGILQSIKIVDELVKVMGHAPESIVIEMARENQTTGRGKKNSQQRYKRIEDALKNLAPGLDSNILKEHPTDNIQLQNDRLFLYYLQNGKDMYTGEALDINQLSNYDIDHIIPQAFIKDDSLDNRVLTSSKDNRGKSDNVPSLEVVQKRKAFWKQLLDSKLISERKFNNLTKAERGGLDERDKVGFIKRQLVETRQITKHVAQILDARFNTEVTEKDKQNRIVKIITLKSNLVSNFRKEFRLYKVREINDYHHAHDAYLNAVVAKAILKKYPKLEPEFVYGNYQKYDLKRYISRFKDPKEVEKATEKYFFYSNLLNFFKEEVHYADGTIVKRENIEYSKDTGEIAWNKEKDFATIKKILSLPQVNIVKKREVQTGGFSKESILPKGNSDKLIPRKTKDILWETTKYGGFDSPVIAYSILLIADIEKGKAKKLKTVKTLVGITIMEKAAFEENPITFLENKGYHNVRKENILCLPKYSLFELENGRRRMLASAKELQKGNEIVLPVYLTILLYHSKNVHKLDEPEHLEYIQKHRNEFKDLLNLVSEFSQKYVLADANLEKIQNLYADNEQADIEILANSFINLLTFTALGAPAAFKFFGKDVDRKRYTTVSEILNATLIHQSITGLYETRIDLSKLGED

SEQ ID NO: 21584 - protein, 1378 aa, unidentified
  REGION 1..1378: note = Cas Enzyme sequence
MSNKPYSIGLDIGTNSVGWAVITDDYKVPSKKMKVLGNTDKHFIKKNLIGALLFDEGTTAEDRRLKRTARRRYTRRKNRLRYLQEIFSQETSKVDSSFFHRLDDSFLVPEDKRGSKYPIFATLAEEKEYHKNFPTIYHLRKQLADSKEKADLRLIYLALAHMIKYRGHFLYEESFDIKNNDIQKIFNEFISIYDNNFEGSSLSGQNAQVEAIFTDKISKSAKRERVLKLFPDEKSTGLFSEFLKLIVGNQAEFKKHFDLEEKAPLQFSKDTYDEDLENLLGQIGDDFADLFLVAKKLYDAILLSGILTVKDLSTKAPLSASMIERYENHQKDLAALKQFIQNNLQEKYDEVFSDQSKDGYAGYINGKTTQEAFYKYIKNLLSKFEGADYFLDKIEREDFLRKQRTFDNGSIPHQIHLQEMNAILRRQGEHYPFLNENREKIEKILTFRIPYYVGPLARGNRDFAWLTRNSNQAIRPWNFEEIVDQASSAEAFINKMTNYDLYLPEEKVLPKHSLLYERFAVYNELTKVKFIAEGLTRHQFLDKKQKKDIFDTFFKGENKRKVTEKDIIHYLHNVDGYDGIELKGIEKQFNASLSTYHDLLKIIKDKAFMDDAKNEVILENIVHTLTIFEDREMIKQHLAQYASIFDEKVIKALTRRHYTGWGKLSAKLINGICDKETGNTILDYLIDDGEINRNFMQLINDDGLSFKEIITKAQVVGKTDDVKQVVQELPGSPAIKKGILQSIKIVDELVKVMGHAPESIVIEMARENQTTAKGKKNSQQRYKRIEDALKNLAPGLDSNILKENPTDNVQLQNDRLFLYYLQNGRDMYTGKPLEINQLSNYDIDHIIPQAFIKDDSLDNRILTSSKDNRGKSDNVPSLEVVQKRKAFWQQLLDSKLISERKFNNLTKAEHGGLDERDKVGFIRRQLVETRQITKHVAQILDARFNTKVNEKKQKIRTVKIITLKSNLVSNFRKEFGLYKVREINDYHHAHDAYLNAVVAKAILKKYPKLEPEFVYGDYQKYDLKRYISRSKDPKEVEKATEKYFFYSNLLNFFKEEVHYANGTIVKRENIEYSKDTGEIAWNKEKDFAIIKKVLSYPQVNIVKKTEEQTVGQNGGLFDNNIVSKKKVVDASKLIPIKSGLSPEKYGGYARPTIAYSVLVIADIEKGKTKKLKRIKEMVGITIQDKKKFEANPIAYLEECGYKNINPNLIIKLPKYSLFEFNGGQRRLLASSIELQKGNELILPYHFTALLYHAQRINKFSEPIHKQYVEAHQNEFKELLTTIISLSKKYIQKPNVESLLHQAFEQADNDIYQLSESFISLLKLTSFGAPGAFKFLGVEISQSSVRYKPNSQFLDTTLIHQSITGLYETRIDLSKLGED

SEQ ID NO: 21585 - protein, 1373 aa, unidentified
  REGION 1..1373: note = Cas Enzyme sequence
MSNKPYSIGLNIGTNSVGWAVITDDYKVPSKKMKVLGNTDKHFIKKNLIGALLFDEGTTAEDRRLKRTARRRYTRRKNRLRYLQEIFSQEISKVDSSFFHRLDDSFLVPEDKRGSKYPIFATLEEEKEYHKNFPTIYHLRKYLADSKEKADLRLIYLALAHMIKYRGHFLYEDTFDIKNNDIKKIFNEFISIYDNTFEGSSLSGQNAPVEAIFTDKISKSAKRERVLKLFPDEKSTGLFSEFLKLILGNQADFKKHFDLEEKAPLQFSKDTYDEDLENLLGQIGDDFADLFLVAKKLYDAILLSGILTVKDLSTKAPLSASMIERYENHQKDLAALKQFIQNNLQEKYDEVFSDQSKDGYAGYIDGKTTQEAFYKYIKNLLSKFEGADYFLDKIEREDFLKKQRTFDNGSIPHQIHLQEMNAIIRRQGEHYPFLQENKEKIEKILTFRIPYYVGPLARGNGDFAWLTRNSDQAILPWNFEEIVDQASSAEDFINKMTNYDLYLPEEKVLPKHSLLYETFAVYNELTKVKFIAEGLRDYQFLDSGQKKQIVNQLFKEKRKVTEKDIIQYLHNVDGYDGIELKGIEKQFNASLSTYHDLLKIIKDKAFMDDAENEATLENIIHTLTIFEDREMIKQRLAQYDSLFDEKVIKALTRRHYTGWGKLSAKLINGISDKQTGNTILDYLIDDGEINRNFMQLIHDDGLSFKEIIQKAQVFGKTNDVKQVVQELPGSPAIKKGILQSIKIVDELVKVMGHAPESIVIEMARENQTTARGKKNSQQRYKRIEDSLKNLASGLDSNILKENPTDNIQLQNDRLFLYYLQNGRDMYTGKPLEINQLSNYDIDHIIPQAFIKDDSLDNRVLTSSKDNRGKSDNVPSLEVVEKMKAFWQQLLDSKLISERKFNNLTKAERERGGLNELDKVGFIKRQLVETRQITKHVAQFLDARFNKEVTEKDKKNRNVKIITLKSNLVSNFRKEFGLYKVREINDYHHAHDAYLNAVLAKAILKKYPKLEPEFVYGDYQKYDLKRYISKSREPKEGEKATQKYFFYSNLLNFFKEEVHYADGTIVKRENIEYSKDTGEIAWNKEKDFATVKKVLSLPQVNIVKKTEVQTGGFSKESILPKGNSDKLIPRKTKDILWDTTKYGGFDSPVIAYSILLIADIEKGKAKKLKTVKTLVGITIMEKATFEKNPITFLENKGYHNVRKENILCLPKYSLFELESGRRRMLASAKELQKGNEIVLPVYLTTLLYHSKNVHKLDEPEHLEYIQKHRYEFKDLLNLVSEFSQKYVLADANLEKIKNLYADNEQADIEILANSFINLLTFTALGAPAAFKFLGKDVDRKRYTTVSEILNATLIHQSITGLYETRIDLSKLGED

SEQ ID NO: 21586 - protein, 1006 aa, unidentified
  REGION 1..1006: note = Cas Enzyme sequence
LAGLEGADYFLEKINREDFLRKQRTFDNGSIPYQIHLQEMRAILDKQAKFYPFLAKNKDRIEKILTFRIPYYVGPLARGNSDFAWSIRKRNEKITPWNFEDVIDKESSAEAFINRMTSFDLYLPEEKVLPKHSFLYETFTVYNELTKVRFIAESMRDYQFLDSKQKKDIVRLYFKNKRKVTDKDIIEYLHAIDGYDGIELKGIEKQFNSSLSTYHDLLNIINDKEFLDDSSNEAIIEEIIHTLTIFEDREMIKQRLSKFENIFDKSVLKKLSRRHYTGWGKLSAKLINGIRDEKSGNTILDYLIDDGISNRNFMQLIHDDALSFKKKIKKAQIIGDKDNIKQVVQALPGSPAIKKGILQSIKIVDELVKVMGGRPESIVVEMARENQYTNQGKSNSQQRLKRLEESLKDLGSKILKENIPAKLSKIDNNALQNDRLYLYYLQNGKDMYTGEELDIDRLSNYDIDHIIPQAFLKDNSIDNKVLVSSASNRGKSDDVPSLEVVKKRKTLWYQLLKSKLISQRKFDNLTKAERGGLSPEDKAGFIQRQLVETRQITKHVARLLDERFNNKKDEDNKTIRTVKIITLKSSLVSQFRKDFELYKVREINDFHHAHDAYLNAVVASALLKKYPKLEPEFVYGDYPKYNSFRERKSATEKVYFYSNIMNIFKKSISLADGTVIERPLIEVNEETGESVWNKVADLSTVRKVLSYSQVNVVKKVEEQNHGLDRGKPKGLFNANLSSKPKQNSKENLVGAKEYLDPKKYGGYAGISNSFAILVKGTIEKGAKKKITNVLEFQGISILDRIYYRKDKLNFLLEKGYKDIELIIELPKYSLFELSDGSRRMLASILSTNNKRGEIHKGNQIFISQKFVKLLYHAKRISSTFNENHRKYVENHKKEFEELFYYILEFNENYVGAKKNGELLKSAFQSWQNHSIDELCSSFIGPTGSERKGLFELTSRGGAADFEFLGVKIPRYRDYTPSSLLKDATLIHQSVTGLYETRLDLSKLGED

SEQ ID NO: 21587 - protein, 1392 aa, unidentified
  REGION 1..1392: note = Cas Enzyme sequence
MSNKPYSIGLDIGTNSVGWAVITDDYKVPSKKMKVLGNTDKHFIKKNLIGALLFDEGTTAEDTRLKRTARRRYTRRKNRLRYLQEIFFEEMSKLDSGFFHRLDDSFLIPEDKRGSKYPIFATLAEEKEYHKQFPTIYHLRKQLADSKEKADLRLIYLVLAHMIKYRGHFLYEEAFDIKNNDIQKIFNEFISIYDNTFEGSSLSGQNAQIEAIFTDKISKSAKRERVLRLFPDEKSTGLFSEFLKLIVGNQADFKKHFDLEEKAPLQFSKDTYDEDLENLLGQIGDDFADLFLVAKKLYDAILLSGILTVTDPSTKAPLSASMIERYENHQKDLAALKQFIKANLPEKYDEVFSDQSKDGYAGYIDGKTTQETFYKYIKNLLSKFEGTDYFLDKIEREDFLRKQRTFDNGSIPHQIHLQEMNAILRRQGEHYPFLKDNKEKIEKILTFRIPYYVGPLARGNRDFAWLTRNSDQAIRPWNFEEIVDKASSAEDFINKMTNYDLYLPEEKVLPKHSLLYETFAVYNELTKVKFIAEGLRDYQFLDSGQKKQIVNQLFKEKRKVTEKDIIHYLHTVDGYDGIELKGIEKQFNASLSTYHDLLKIIKDKEFMDDPKNEEILENIVHTLTIFEDREMIKQHLAQYASIFDEKVIKALTRRHYTGWGKLSAKLINGIHDKKSGKTILDYLIDDGYSNRNFMQLINDDGLSFKEIIQKAQVVGKTDDVKQVVQELPGSPAIKKGILQSIKIVDELVKVMGHAPESIVIEMARENQTTGRGKKNSQQRYKRIEDALKNLAPGLDSNILKEHPTDNIQLQNDRLFLYYLQNGKDMYTGEALDINQLSNYDIDHIIPQAFIKDDSLDNRVLTSSKDNRGKSDNVPSLEVVQKRKAFLQQLLDSKLISERKFNNLTKAERGGLDERDKVGFIKRQLVETRQITKHVAQILDARFNTEVTEKDKQNRIVKIITLKSNLVSNFRKEFRLYKVREINDYHHAHDAYLNAVVAKAILKKYPKLEPEFVYGDYQKYDLKRYISRFKDPKEVEKATEKYFFYSNLLNFFKEEVHYADGTIVKRENIEYSKDTGEIAWNKEKDFATIKKVLSLPQVNIVKKTEIQTHGLDRGKPKGLFNSNPSPKPSEDSKENLVPIKQGLDPRKYGGYAGISNSYAVLVKAIIEKGAKKQQKTVLEFQGISILDKINFEKNKKNYLLEKGYIKILSTITLPKYSLFEFPDGTRRRLASILSTNNKRGEIHKGNELVLPEKYTTLLYHAKNINKTLEPEHLEYVEKHRNDFAKLLESVLDFNDKYVGALKNGERIRQAFIDWETVDIEKLCFSFIGPRNSKNAGLFELTSQGSASDFEFLGVKIPRYRDYTPSSLLNATLIHQSITGLYETRIDLSKLGED

SEQ ID NO: 21588 - protein, 1392 aa, unidentified
  REGION 1..1392: note = Cas Enzyme sequence
MSNKPYSIGLDIGTNSVGWAVITDDYKVPSKKMKVLGNTDKHFIKKNLIGALLFDEGTTAEDRRLKRTARRRYTRRKNRLRYLQEIFFEEMSKLDSGFFHRLDDSFLIPEDKRGSKYPIFATLAEEKEYHKQFPTIYHLRKQLADSKEKADLRLIYLVLAHMIKYRGHFLYEEAFDIKNNDIQKIFNEFISIYDNTFEGSSLSGQNAQIEAIFTDKISKSAKRERVLRLFPDEKSTGLFSEFLKLIVGNQADFKKHFDLEEKAPLQFSKDTYDEDLENLLGQIGDDFADLFLVAKKLYDAILLSGILTVTDPSTKAPLSTSMIERYENHQKDLAALKQFIKNNLPEKYDEVFSDQSKDGYAGYIDGKTTQETFYKYIKNLLSKFEGTDYFLDKIEREDFLRKQRTFDNGSIPHQIHLQEMNAILRRQGEHYPFLKDNKEKIEKILTFRIPYYVGPLARGNRDFAWLTRNSDQAIRPWNFEEIVDKASSAEDFINKMTNYDLYLPEEKVLPKHSLLYETFAVYNELTKVKFIAEGLRDYQFLDSGQKKQIVNQLFKEKRKVTEKDIIHYLHTVDGYDGIELKGIEKQFNASLSTYHDLLKIIKDKEFMDDPKNEEILENIVHTLTIFEDREMIKQHLAQYASIFDEKVIKALTRRHYTGWGKLSAKLINGIHDKKSGKTILDYLIDDGYSNRNFMQLINDDGLSFKEIIQKAQVVGKTDDVKQVVQELPGSPAIKKGILQSIKIVDELVKVMGHAPESIVIEMARENQTTGRGKKNSQQRYKRIEDALKNLAPGLDSNILKEHPTDNIQLQNDRLFLYYLQNGKDMYTGEALDINQLSNYDIDHIIPQAFIKDDSLDNRVLTSSKDNRGKSDNVPSLEVVQKRKAFLQQLLDSKLISERKFNNLTKAERGGLDERDKVGFIKRQLVETRQITKHVAQILDARFNTEVTEKDKQNRIVKIITLKSNLVSNFRKEFRLYKVREINDYHHAHDAYLNAVVAKAILKKYPKLEPEFVYGNYQKYDLKRYISRFKDPKEVEKATEKYFFYSNLLNFFKEEVHYADGTIVKRENIEYSKDTGEIAWNKEKDFATIKKVLSLPQVNIVKKTEIQTHGLDRGKPKGLFNSNPSPKPSEDSKENLVPIKQGLDPRKYGGYAGISNSYAVLVKAIIEKGAKKQQKTVLEFQGISILDKINFEKNKKNYLLEKGYIKILSTITLPKYSLFEFPDGTRRRLASILSTNNKRGEIHKGNELVLPEKYTTLLYHAKNINKTLEPEHLEYVEKHRNDFAKLLESVLDFNDKYVGALKNGERIRQAFIDWETVDIEKLCFSFIGPRNSKNAGLFELTSQGSASDFEFLGVKIPRYRDYTPSSLLNATLIHQSITGLYETRIDLSKLGED

SEQ ID NO: 21589 - protein, 1385 aa, unidentified
  REGION 1..1385: note = Cas Enzyme sequence
MTKPYSIGLDIGTNSVGWAVITDDYKVPSKKMKVLGNTNKKYIKKNLLGALLFDSGITAEGRRLKRTARRRYTRRRNRILYLQEIFSTEMATLDDAFFQRLDDSFLVPDDKRDSKYPIFGNLVEEKVYHDEFPTIYHLRKHLADSSKKADLRLVYLALAHMIKYRGHFLIEGDFNSKNNDIQKNFQDFLDTYNTIFESDLSLENSKQLEEIVKDKISKSAKKDHILKLFPGEKNSGIFSEFLKLIVGNQADFRKYFNLDEKTSLQFSKESYDEDLETLLGHIGDDYSDVFLKAKKLYDAILLSGILTVTDNETEAPLSSAMIMRYKEHEEDLALLKAYIRNISLETYNEVFKDDTKNGYAGYIDGKTSQEDFYVYLKKLLAGLEGADYFLEKIDREDFLRKQRTFDNGSIPYQIHLQEMRAILDKQAKFYPFLAKNTDRIEKILTFRIPYYVGPLARGNSDFAWSIRKRNEKITPWNFEDVIDKESSAEAFINRMTSFDLYLPEEKVLPKHSFLYETFTVYNELTKVRFIAESMRDYQFLDSKQKKDIVRLYFKNKRKVTDKDIIEYLHAIDGYDGIELKGIEKQFNSSLSTYHDLLNIINDKEFLDDSSNEAIIEEIIHTLTIFEDREMIKQRLSKFENIFDKSVLKKLSRRHYTGWGKLSAKLINGIRDEKSGNTILDYLIDDGVSNRNFMQLIHDDALSFKKKIKKAQIIGYKDNIKQVVQALPGSPAIKKGILQSIKIVDELVKVMGRRPESIVVEMARENQYTNQGKSNSQQRLKRLEESLKDLGSKILKENIPAKLSKIDNNELQNDRLYLYYLQNGKDMYTGEELDIDRLSNYDIDHIIPQAFLKDDSIDNKVLVSSASNRGKSDDVPSLEVVKKRKTHWYQLLKSKLISQRKFDNLTKAERGGLSQEEKAGFIQRQLVETRQITKHVARLLDERFNNKKDEDNKTIRTVKIITLKSSLVSQFRKDFELYKVREINDFHHAHDAYLNAVVASALLKKYPKLEPEFVYGDYPKYNSFRERKSATEKVYFYSNIMNIFKKSISLADGTVIERPLIEVNEETGESVWNKVADLSTVRKVLSYSQVNVVKKVEEQNHGLDRGKPKGLFNANLSSKPKQNSKENLVGAKEYLDPKKYGGYAGISNSFAILVKGTIEKGAKKKITNVLEFQGISILDRIYYRKDKLNFLLEKGYKDIELIIELPKYSLFELSDGSRRMLASILSTNNKRGEIHKGNQIFISQKFVKLLYHAKRISSTFNENHRKYVENHKKEFEELFYYILEFNENYVGAKKNGELLKSAFQSWQNHSIDELCSSFIGPTGSERKGLFELTSRGGAADFEFLGVKIPRYRDYTPSSLLKDATLIHQSVTGLYETRLDLSKLGED

SEQ ID NO: 21590 - protein, 1385 aa, unidentified
  REGION 1..1385: note = Cas Enzyme sequence
MTKPYSIGLDIGTNSVGWAVITDDYKVPSKKIKVLGNTSKKYIKKNLLGALLFDSGITAEGRRLKRTARRRYTRRRNRILYLQEIFSTEMATLDDAFFQRLDDSFLVPDDKRDSKYPIFGNLVEEKAYNDEFPTIYHLRKYLADSTKKADLRLVYLALAHMIKYRGHFLIEGGFNSKNNDIQKNFQDFLDTYNAIFESDLSLENSKQLEEIVKDKISKSAKKDRILKLFPGEKNSGIFSEFLKLIVGNQADFRKYFNLDEKTSLQFSKESYDEDLETLLGHIGDDYSDVFLKAKKLYDAILLSGILTVTDNETEAPLSSAMIMRYKEHEEDLALLKAYIRNISLETYNEVFKDDTKNGYAGYIDGKTSQEDFYVYLKKLLAGLEGADYFLEKINREDFLRKQRTFDNGSIPYQIHLQEMRAILDKQAKFYPFLAKNKDRIEKILTFRIPYYVGPLARGNSDFAWSIRKRNEKITPWNFEDVIDKESSAEAFINRMTSFDLYLPEEKVLPKHSFLYETFTVYNELTKVRFIAESMRDYQFLDSKQKKDIVRLYFKNKRRVTDKDIIEYLHAIDGYDGIELKGIEKQFNSSLSTYHDLLNIINDKEFLDDSSNEAIIEEIIHTLTIFEDREMIKQRLSKFENIFDKSVLKKLSRRHYTGWGKLSAKLINGIRDEKSGNTILDYLIDDGVSNRNFMQLIHDDALSFKKKIKKSQIIGDKDNIKQVVQALPGSPAIKKGILQSIKIVDELVKVMGRRPESIVVEMARENQYTNQGKSNSQQRLKRLEESLKELSSKILKENIPAKLSKIDNNALQNDRLYLYYLQNGKDMYTGEELDIDRLSNYDIDHIIPQAFLKDDSIDNKVLVSSASNRGKSDDVPSLEVVKKRKTHWYQLLKSKLISQRKFDNLTKAERGGLSQEEKAGFIQRQLVETRQITKHVARLLDERFNNKKDEDNKTIRTVKIITLKSSLVSQFRKDFELYKVREINDFHHAHDAYLNAVVASALLKKYPKLEPEFVYGDYPKYNSFRERKSATEKVYFYSNIMNIFKKSISLADGTVIERPLIEVNEETGESVWNKVADLSTVRKVLSYSQVNVVKKVEEQNHGLDRGKPKGLFNANLSSKPKPNSKENLVGAKEYLDPKKYGGYAGISNSFAVLVKGTIEKGAKKKITNILEFQGISILDRITYRKDKFNFLLEKGYKDIDLIIELPKYSLFELSDGSRRMLASILSTNNKRGEIHKGNQIFISQKFVKLLYHAKRISSTFNENHRKYVENHKKEFEELFYYILEFNENYVGAKKNGELLKSAFQSWQNHSIDELCSSFIGPTGSERKGLFELTSRGGAADFEFLGVKIPRYRDYTPSSLLKDATLIHQSVTGLYETRLDLSKLGED

SEQ ID NO: 21591 - protein, 1336 aa, unidentified
  REGION 1..1336: note = Cas Enzyme sequence
  REGION 1325..1328: note = misc_feature - Xaa can be any naturally occurring amino acid
MSNKPYSIGLDIGTNSVGWAVITDDYKVPSKKMKVLGNTDKHFIKKNLIGALLFDEGTTAEDRRLKRTARRRYTRRKNRLRYLQEIFFEEMSKLDSGFFHRLDDSFLIPEDKRGSKYPIFATLAEEKEYHKQFPTIYHLRKQLADSKEKADLRLIYLVLAHMIKYRGHFLYEEAFDIKNNDIQKIFNEFISIYDNTFEGSSLSGQNAQIEAIFTDKISKSAKRERVLRLFPDEKSTGLFSEFLKLIVGNQADFKKHFDLEEKAPLQFSKDTYDEDLENLLGQIGDDFADLFLVAKKLYDAILLSGILTVTDPSTKAPLSASMIERYENHQKDLAALKQFIKANLPEKYDEVFSDQSKDGYAGYIDGKTTQETFYKYIKNLLSKFEGTDYFLDKIEREDFLRKQRTFDNGSIPHQIHLQEMNAILRRQGEHYPFLKDNKEKIEKILTFRIPYYVGPLARGNRDFAWLTRNSDQAIRPWNFEEIVDKASSAEDFINKMTNYDLYLPEEKVLPKHSLLYETFAVYNELTKVKFIAEGLRDYQFLDSGQKKQIVNQLFKEKRKVTEKDIIHYLHTVDGYDEIELKGIEKQFNASLSTYHDLLKIIKDKEFMDDPKNEEILENIVHTLTIFEDREMIKQHLAQYASIFDEKVIKALTRRHYTGWGKLSAKLINGIHDKKSGKTILDYLIDDGYSNRNFMQLINDDGLSFKEIIQKAQVVGKTDDVKQVVQELPGSPAIKKGILQSIKIVDELVKVMGHAPESIVIEMARENQTTGRGKKNSQQRYKRIEDALKNLAPGLDSNILKEHPTDNIQLQNDRLFLYYLQNGKDMYTGEALDINQLSNYDIDHIIPQAFIKDDSLDNRVLTSSKDNRGKSDNVPSLEVVQKRKAFLQQLLDSKLISERKFNNLTKAERGGLDERDKVGFIKRQLVETRQITKHVAQILDARFNTEVTEKDKQNRIVKIITLKSNLVSNFRKEFRLYKVREINDYHHAHDAYLNAVVAKAILKKYPKLEPEFVYGDYQKYDLKRYISRFKDPKEVEKATEKYFFYSNLLNFFKEEVHYADGTIVKRENIEYSKDTGEIAWNKEKDFATIKKVLSLPQVNIVKKTEIQTHGLDRGKPKGLFNSNPSPKPSEDSKENLVPIKQGLDPRKYGGYAGISNSYAVLVKAIIEKGAKKQQKTVLEFQGISILDKINFEKNKKNYLLEKGYIKILSTITLPKYSLFEFPDGTRRRLASILSTNNKRGEIHKGNELVLPEKYTTLLYHAKNINKTLEPEHLEYVEKHRNDFAKLLESVLDFNDKYVGALKNGERIRQAFIDWETVDIEKLCFSXXXXVNFTRKCF

SEQ ID NO: 21592 - protein, 1420 aa, unidentified
  REGION 1..1420: note = Cas Enzyme sequence
MAKFNKNYSIGLDIGVSSVGYAVITEDYRVPAFRFKVLGNTEKEKIKKNLIGSTTFVPAQSAQGTRIFRVNRRRIDRRNHRISYLRDIFQKEIEKVDKNFYRRLDESFRVLGDKSEDLQIKQPFFGDKELETAYHKKYPTIYHLRKHLADADKNSPVADIREVYMALSHILKYRGHFLTLDKINPNNINMQNSWIDFIESCQEVFDLEVSEESKTITAIFKSSDNRQEKVKKILPYFQQEILKKDKSIFKQLLQLLFGLKTKFKDCFELEEEPDLNFSKESYDENLENFLGSLEEDFSDVFAKLKVLRDTILLSGMLTYTGTTHARFSATMVERYEEHRKDLQRFKSFVKQNLSEQDYLDIFGRKTPNGFDVDKETKGYVGYISNKMVLTNSQKQRTIQQNFYDYISGKITGIEGAEYFLNKISDGTFLRKLRTSDNGAIPNQIHAYELKKIIERQGRDYPFLLENKDKLLSILTFKIPYYVGPLAQGNNSRFAWIKRTTNQDVLDDNDEDTRNGKIRPWNYHKLINMDETRDAFITNLIGNDIILLNEKVLPKRSLIYEEVMLQNELTRVKYKDKYGKTHFFDSELRQEIINNLFKTNSKRVSSAMLLDYLENYTNLQAVEIVSGIEKGKSLNSTLKTYNDLKTIFSEELLDSEIYQKELEDIVKVITVFDDKKSIKNYLTKYFGHLEFLNEERINQLSKLRYTGWGRYSAKLLLDIRDEDTGFNLMQFLRNDDENRNLPQLISDSTLSFDSTIKAIQSKSTVEDDVFDEIKKLAGSPAIKRGILNSIKIVDELVQIIGYPPQNIVIEMARENMTTEEGQKKAKTRKTKLESTLKNIENSVLENGKVPHSDEQLQSEKLYLYYLQNGKDMYSLDKTGSPTSLYRDRLDQYEVDHIIPYSFLPIDSIDNKVLTHRENNQRKLNNIPDKETVANMKPFWEKLYNAKLISQTKYQRLTTSERTPDGVLTESMKAGFIERQLVETRQIIKHVARILDNRFLDTKIITLKSQLITNFRNTFHIAKIRELNDYHHAHDAYLAVVVGLTLLKAYPKLAPELIYGHHAHFNRHEENKATIRKHLYSNIMRFFNNPNSKVSKDIWDCNRDLPIIKDIIYNSQVNFVKRTIIKKGAFYNQNPVGKFNKQIAANNRYPLKTKVSSLDTSIYGGYGPMNSALSIIIIAERFNEKKCKIETVKEFHDIFIIDYKKFNNDPFQFLNDTSENGFLKKNNINRVLAFYRVPKYSLMQKIDGTRMLFESKSNLHKATQFKLTKTQNELFFHMRRLLTKSNLMDLKSESAIKESQNFILKHKEEFDNISNQLSAFSQKMLGDTTSLKNLIKGYNERKIKEIDSSEETIKYFYDNFIKMFSFVKSGAPKDINDFFNNKYTVARMRPKPDKKLLNATLIHQSITGLYETRIDLSKLGED

SEQ ID NO: 21593 - protein, 1377 aa, unidentified
  REGION 1..1377: note = Cas Enzyme sequence
MSNKPYSIGLDIGTNSVGWAVITDDYKVPSKKMKVLGNTDKHFIKKNLIGALLFDEGTTAEDRRLKRTARRRYTRRKNRLRYLQEIFSPEISKVDSSFFHRLDDSFLVPEDKRGSKYPIFATLAEEKEYHKNFPTIYHLRKQLANSKEKADLRLIYLALAHMIKYRGHFLYEESFDIKNNDIQKIFNEFISIYDNTFEGSSLSGQNAQVEAIFTDKISKSAKRERVLKLFPDEKFTGLFSEFLKLIVGNQADFKKHFDLEEKAPLQFSKDTYDEDLENLLGQIGDDFADLFVAAKKLYDAILLSGILTVTDPSTKAPLSASMIERYENHQKDLAVLKQFIKTNLPEKYVEVFSDQSKDGYAGYIDGKTTQEAFYKYIKNLLSKFDGADYFLDKIEREVFLRKQRTFDNGSIPHQIHLQEMNTILRRQGEHYPFLKENKEKIEKILTFRIPYYVGPLARGNRDFAWLTRNSDQAIRPWNFEEIVDKASSAEDFINKMTNYDLYLPEEKVLPKHSLLYETFAVYNELTKVKFIAEGMRDYQFLDSGQKKKIINQLFKKKRKVTEDDIIDCLQKIDNYDGIELKGIEKQFNASLSTYHDILKIIRDKEFMDDPKNGDILENVIHTLTIFEDREMIKQRLAQYNSIFDEKVIKALSRKHYTGWGKLSAKLINGIRDKQTGKTILDYLMDDGKSNRNFMQLIKDDELSFTEIIQKAQVVGDTDNLRQVVQNLPGSPAIKKGILQSIKIVDELVKVMGHAPESIVIEMARENQTTARGKKNSQQRYKRIEDSLKNLASGLDSNILKENPTDNVQLQNDRLFLYYLQNGKDMYTGEALNINQLSSYDIDHIIPQAFIKDDSLDNRVLTSSKDNRGKSDNVPSLEVVEKMKAFWQQLLDSKLISERKYNNLTKAERERGGLNELDKVGFIKRQLVETRQITKHVAQILDARFNKEVTEKNKKNRNVKIITLKSNMVSNFRKEFGLYKVREINDYHHAHDAYLNAVVAKAILKKYPKLEPEFVYGDYQKYDLKRYISKSKDPKEVEKATEKYFFYSNLLNFFKEEVHYADGTIVKRENIEYSKDTGEIAWNKEKDFATIKKVLSFPQVNIVKKTEEQTVGQNGGLFDNNIVSKEKVVDASKLIPIKSGLSPEKYGGYARPTIAYSVLVTYKQNNKIKNTMVGIPVLTKLEFERDPNLYLRNLGINNVSHVIKLVKHTVLEFKHKYGTYRRFIVSNQELKRANQIFVTTKQMKLISQYTTLDKNEHDSLLKNNQQLIQSIWNQFLEFMLATDLVNKKQYDELILTNNQTIEECRNIMNRVITTLSFTNINAGQKKIIFDDTLSLPIKRWQFTDSDKMVKKIIESTLIHQSITGLYETRIDLSKLGED

SEQ ID NO: 21594 - protein, 1132 aa, unidentified
  REGION 1..1132: note = Cas Enzyme sequence
IVGNQADFKKHFDLEEKAPLQFSKDTYDEDLENLLEQIGDDFADLFVAAKKLYDAILLSGILTVTDPSTKAPLSASMIERYENHQKDLAVLKQFIKTNLPEKYVEVFSDQSKDGYAGYIDGKTTQEAFYKYIKNLLSKFDGADYFLDKIEREVFLRKQRTFDNGSIPHQIHLQEMNTILRRQGEHYPFLKENKEKIEKILTFRIPYYVGPLARGNRDFAWLTRNSDQAIRPWNFEEIVDKASSAEGFINKMTNYDLYLPEEKVLPKHSLLYETFAVYNELTKVKFIAEGMRDYQFLDSGQKKKIINQLFKKKRKVTEDDIIDCLQKIDNYDGIELKGIEKQFNASLSTYHDILKIIRDKEFMDDPKNGDILENVIHTLTIFEDREMIKQRLAQYNSIFDEKVIKALSRKHYTGWGKLSAKLIDGIRDKQTGKTILDYLMDDGKSNRNFMQLIKDDELSFTEIIQKAQVVGDTDNLRQVVQNLPGSPAIKKGILQSIKIVDELVKVMGHAPESIVIEMAREDQTTARGKKNSQQRYKRIEDSLKNLASGLDSNILKENPTDNIQLQNDRLFLYYLQNGKDMYTGEALNINQLSSYDIDHIIPQAFIKDDSLDNRVLTSSKDNRGKSDNVPSLEVVEKMKAFWQQLLDSKLISERKYNNLTKAERERGGLNELDKVGFIKRQLVETRQITKHVAQILDARFNKEVTEKNKKNRNVKIITLKSNMVSNFRKEFGLYKVREINDYHHAHDAYLNAVVAKAILKKYPKLEPEFVYGDYQKYDLKRYISRSKDPKEVEKATEKYFFYSNLLNFFKEEVHYADGTIVKRENIEYSKDTGEIAWNKEKDFATIKKVLSLPQVNIVKKTEEQTVGQNGGLFDNNIVSKKKVVDASKLIPIKSGLSPEKYGGYARPTIAYSVLVTYKQNNKIKNTMVGIPVLTKLEFERDPNLYLRNLGINNVSHVIKLVKYTVLEFKHKYGTYRRFIVSNQELKRANQIFVTTKQMKLISQYTTLDKNEHDSLLKNNQQLIQSIWNQFLEFMLATDLVNKKQYDELILTNNQTIEECRNIMNRVITTLSFTNINAGQKKIIFDDTLSLPIKRWQFTDSDKMVKKIIESTLIHQSITGLYETRIDLSKLGED

SEQ ID NO: 21595 - protein, 1377 aa, unidentified
  REGION 1..1377: note = Cas Enzyme sequence
MNNKPYSIGLDIGTNSVGWRVITDDYKVPSKKMKVLGNTDKRFIKKNLIGALLFDEGTTAEARRLKRTARRRYTRRKNRLRYLQEIFAEEMSKVDSSFFHRLDDSFLIPEDKRGSKYPIFATLVEEKEYHKQFPTIYHLRKQLADSKEKADLRLIYLVLAHMIKYRGHFLYEEAFDIKNNDIQKIFNEFISIYDNTFEGSSLSGQNAQVETIFTDKISKSAKRERVLKLFPDEKSTGLFSEFLKLIVGNQADFKKHFDLEEKAPLQFSKDTYDEDLENLLGQIGDDFADLFVAAKKLYDAILLSGILTVTDPSTKAPLSASMIERYENHQKDLAVLKQFIKTNLPEKYVEVFSDQSKDGYAGYIDGKTTQEAFYKYIKNLLSKFDGADYFLDKIEREVFLRKQRTFDNGSIPHQIHLQEMNTILRRQGEHYPFLKENKEKIEKILTFRIPYYVGPLARGNRDFAWLTRNSDQAIRPWNFEEIVDKASSAEDFINKMTNYDLYLPEEKVLPKHSLLYETFAVYNELTKVKFIAEGMRDYQFLDSGQKKKIINQLFKKKRKVTEDDIIDCLQKIDNYDGIELKGIEKQFNASLSTYHDILKIIRDKEFMDDPKNGDILENVIHTLTIFEDREMIKQRLAQYNSIFDEKVIKALSRKHYTGWGKLSAKLIDGIRDKQTGKTILDYLMDDGKSNRNFMQLIKDDELSFTEIIQKAQVVGDTDNLRQVVQNLPGSPAIKKGILQSIKIVDELVKVMGHAPESIVIEMARENQTTARGKKNSQQRYKRIEDSLKNLASGLDSNILKENPTDNIQLQNDRLFLYYLQNGKDMYTGEALNINQLSSYDIDHIIPQAFIKDDSLDNRVLTSSKDNRGKSDNVPSLEVVEKMKAFWQQLLDSKLISERKYNNLTKAERERGGLNELDKVGFIKRQLVETRQITKHVAQILDARFNKEVTEKNKKNRNVKIITLKSNMVSNFRKEFGLYKVREINDYHHAHDAYLNAVVAKAILKKYPKLEPEFVYGDYQKYDLKRYISRSKDPKEVEKATEKYFFYSNLLNFFKEEVHYADGTIVKRENIEYSKDTGEIAWNKEKDFAIIKKVLSLPQVNIVKKTEEQTVGQNGGLFDNNIVSKKKVVDASKLIPIKSGLSPEKYGGYARPTIAYSVLVTYKQNNKIKNTMVGIPVLTKLEFERDPNLYLRNLGINNVSHVIKLVKHTVLEFKHKYGTYRRFIVSNQELKRANQIFVTTKQMKLISQYTTLDKNEHDSLLKNNQQLIQSIWNQFLEFMLATDLVNKKQYDELILTNNQTIEECRNIMNRVITTLSFTNINAGQKKIIFDDTLSLPIKRWQFTDSDKMVKKIIESTLIHQSITGLYETRIDLSKLGED

SEQ ID NO: 21596 - protein, 1371 aa, unidentified
  REGION 1..1371: note = Cas Enzyme sequence
MNKKPYSIGLDIGTNSVGWAVITDDYKVPSKKMKVLGNTDKHFIKKNLIGALLFDEGTTAEARRLKRTARRRYTRRKNRLRYLQEIFSEELSNVDNSFFHRLDDSFLIPEDKRGSKYPIFATLVEEKAYHKHFPTIYHLRKQLADSKEKADLRLIYLALAHMIKYRGHFLYEESFDIKNNDIQKIFNEFISIYDNIFEGSLLSGQNAQVEAIFTDKISKSAKRERVLKLFPDEKSTGLFSEFLKLIVGNQADFKKYFELEEKAPLQFSKDTYDEDLENLLGQIGDDFADLFVVAKKLYDAILLSGILTVTDPSTKAPLSASMIERYENHQNDLTALKQFIKNNLQEKYAEVFSDQSKDGYAGYIDGKTTQEAFYKYIKNLLSKFEGADYFLDKIEREDFLRKQRTFDNGSIPHQIHLQEMNAILRRQGEHYPFLKENKEKIEKILTFRIPYYVGPLARGNRDFAWLTRNSDQAIRPWNFEEIVDQTSSAEDFINKMTNYDLYLPEEKVLPKHSLLYETFAVYNELTKVKFIAEGLRDYQFLDSGQKKQIVTQLFKEKRKVTEKDIIHYLHNVDGYDGIELKGIEKQFNASLSTYHDLLKIIKDKEFMDDSKNEAILENIVHTLTIFEDREMIKQRLSQYNSVFDEKVIKALSRKHYNGWGKLSAKLINGICDKQTGNTILDYLIDDGKINRNFMQLINDDGLSFKEIIQKAQVVGKADDVKQVVQELSGSPAIKKGILQSIKIVDELVKVMGHAPDSIVIEMARENQTTTRGKKNSQQRYKRIEDSLKNLASGLDSNILKENPTDNVQLQNDRLFLYYLQNGKDMYTGEALDINKLSSYDIDHIIPQAFIKDDSLDNRVLTSSKDNRGKSDNVPSIEVVQKRKAFWQQLLDSKLISERKFNNLTKAERGGLDERDKVGFIKRQLVETRQITKHVAQILDARFNTEVNEKDKKNRNIKIITLKSNLVSNFRKEFSLYKVREINDYHHAHDAYLNAVVAKAILKKYPKLEPEFVYGEYQKYDLKRYISKYKNPKEVEKATEKYFFYSNLLNFFKEEVHYADGTIVKRENIEYSKDTGEIAWNKEKDFATIKKVLSLPQVDIVKKREVQTGGFSKESILPKGNSDKLIPRKTKDILWDTTKYGGFDSPVIAYSILLIADIEKGKAKKLKTVKTLVGITIMEKATFEKNPVTFLENKGYHNVRKENILCLPKYSLFELENGRRRLLASAKELQKGNEIVLPVYLTTLLYHSKNVHKLDEPGHLEYIQKHRNEFKDLLNLVSEFSQKYVLAEANLEKIKNLYADNEQAGIVILANSFINLLTFTALGAPATFKFFGKDVDRKRYTTISEILNATLIHQSITGLYETRIDLSKLGEE

SEQ ID NO: 21597 - protein, 1371 aa, unidentified
  REGION 1..1371: note = Cas Enzyme sequence
MENKNYSIGLDIGTNSVGWAVITDDYKVPSKKMKVLGNTDKHFIKKNLIGALLFDEGTTAEDRRLKRTARRRYTRRKNRLRYLQEIFSEEMSKVDSSFFHRLDDSFLIPEDKRESKYPIFATLTEEKEYHKQFPTIYHLRKQLADSKEKADLRLIYLALAHMIKYRGHFLYEEAFDIKNNDIQKIFSEFISIYDNTFEGSSLSGQNAQVEAIFTDKISKSAKRARVLKLFPDEKSTGLFSEFLKLIVGNQADFKKHFDLEEKAPLQFSKDTYDEDLENLLGQIGDDFADLFLVAKKLYDAILLSGILTVTDPSTKAPLSASMIERYENHQKDLATLKQFIKTNLPEKYDEVFSDQSKDGYAGYIDGKTTQEAFYKYIKNLLSKFEGADYFLEKIEREDFLRKQRTFDNGSIPHQIHLQEMNAILRRQGEHYPFLKENKEKIEKILTFRIPYYVGPLARGNRDFAWLTRNSDQAIRPWNFEEIVDKASSAEDFINKMTNYDLYLPEEKVLPKHSLLYERFAVYNELTKVKFIAEGLRDYQFLDSGQKKQIVKQLFKEKRKVTEKDIIHYLHNVDGYDGIELKGIEKQFNASLSTYHDLLKIIKNKEFMDDSKNEEILENIVHTLTIFEDREMIKQRLAQYDSLFDEKVIKALTRRHYTGWGKLSAKLINGVCDKQTGNTILDYLIDDGKINRNFMQLINDDGLSFKEITQKAQVVGKTDDVKQVVQELPGSPAIKKGILQSIKIVDELVKVMGHAPESIVIEMARENQTTARGKKNSQQRYKRIEDALKNLAPGLDSNILKEHPTDNIQLQNDRFFLYYLQNGRDMYTGKPLDINQLSSYDIDHIVPQAFIKDDSLDNRVLTSLKDNRGKSDNVPSMEVVQKRKAFWQQLLDSKLISERKFNNLTKAERGGLNELDKVGFIKRQLVETRQITKHVAQILDARFNKEVNEKDKKNRNVKIITLKSNLVSNFRKEFELYKVREINDYHHAHDAYLNAVVAKAILKKYPKLEPEFVYGDYQKYDLKRYISRSKDPKEVEKATEKYFFYSNLLNFFKEEVHYADGTIAKRENIEYSKDTGEIAWNKEKDFATIKKVLSLPQVNIVKKREVQTGGFSKESILPKGNSDKLIPRKTKDILWDTTKYGGFDSPVIAYSILLIADIEKGKAKKLKTIKTLVGITIMEKAAFEENPITFLENKGYHNVRKENILCLPKYSLFELENGRRRLLASAKELQKGNEIVLPVYLTTLLYHSKNVHKLDEPGHLEYIQKHRNEFKDLLNLVSEFSQKYVLADANLEKIKNLYADNEQADIEILANSFINLLTFTALGAPAAFKFFGKDVDRKRYTTVSEILNATLIHQSITGLYETRIDLSKLGED

SEQ ID NO: 21598 - protein, 1392 aa, unidentified
  REGION 1..1392: note = Cas Enzyme sequence
MSNKSYSIGLDIGTNSVGWAVITDDYKVPSKKMKVLGNTDKHFIKKNLIGALLFDEGTTAEDRRLKRTARRRYTRRKNRLRYLQEIFSEEMSKVDSSFFHRLDDSFLVPEDKRGSKYPIFATLAEEKEYHKKFPTIYHLRKQLADSKEKADLRLIYLVLAHMIKYRGHFLYEDTFDIKNNDIQKIFSEFISIYDNTFEGSSLSGQNAQVEAIFTDKISKSAKRERILKLFAYEKPTGLFSEFLKLIVGNQAEFKKHFDLEEKAPLQFSKDTYDEDLENLLGQIGDDFADLFLVAKKLYDAILLSGILTVTDPSTKAPLSASMIERYENHQKDLAALKQFIQNNIQEKYDEVFSDQSKDGYAGYIDGKTTQEAFYKYIKNLLSKFEGADYFLDKIEREVFLRKQRSFDNGSIPHQIHLQEMNAILRRQGEHYPFLKENKEKIEKILTFRIPYYVGPLARGNRDFAWLTRNSDEEIRPWNFEEIVDQASSAEDFINKMTNYDLYLPEEKVLPKHSLLYETFAVYNELTKVKFIAEGLRDYQFLDSGQKKQIVNQLFKEKRKVTEKDIIQYLHNVDGYDGIELKGIEKQFNASLSTYHDLLKIIKDKEFMDDPKNEEILENIVHTLTIFEDREMIEQRLTQYDSLFDEKVIKALTRRHYTGWGKFSAKLINGISDKQTGNTILDYLIDDGYSNRNFMQLINDDGLSFKDIIQKAQVVGRTNDVKQVVHELPGSPAIKKGILQSIKLVDELVKIMGHTPESIVIEMARENQTTARGKKNSQQRYKRIEDALKNLAPGLDSNILKEHPTDNIQLQNDRLFLYYLQNGKDMYTGEPLDINQLSSYDIDHIVPQAFIKDDSLDNRVLTSSKDNRGKSDNVPSLEVVQKRKAFWQQLLDSKLISERKFNNLTKAERGGLDERDKVGFIRRQLVETRQITKHVAQILDARFNTEVTEKDKKNRNVKIITLKSNLVSNFRKEFKLYKVREINDYHHAHDAYLNAVVAKAILKKYPKLEPEFVYGDYQKYDLKRYISRSKDPKDVEKATEKYFFYSNLLNFFKEEVHYADGTIVKRENIEYSKDTGEIAWNKEKDFATIKKVLSLPQVNIVKKTEIQTHGLDRGKPRGLFNSNPSPKPSEDRKENLVPIKQGLDPRKYGGYAGISNSYAVLVKAIIEKGAKKQQKTVLEFQGISILDKINFEKNKENYLLEKGYIKILSTITLPKYSLFEFPDGTRRRLASILSTNNKRGEIHKGNELVIPEKYTTLLYHAKNINKTLEPEHLEYVEKHRNDFAKLLESVLDFNDKYVGALKNGERIRQAFIDWETVDIEKLCFSFIGPRNSKNAGLFELTSQGSASDFEFLGVKIPRYRDYTPSSLLNATLIHQSITGLYETRIDLSKLGED

SEQ ID NO: 21599 - protein, 1375 aa, unidentified
  REGION 1..1375: note = Cas Enzyme sequence
MIKKPYSIGLDIGTNSVGWAVITDDYKVPSKKMKVLGNTNKHFIKKNLIGALLFDEGTTAEDRRLKRTGRRRYTRRKNRLLYLQEIFTEEMSKVDSSFFHRLDDSFLVPENKRGSKYPIFATLKEEKEYHKNFPTIYHLKKYLADSKEKVDLRLIYLALAHMIKYRGHFLYEESFDIKNNDIQKIFNEFLRIYDNTFEGNSLSRQNAQVEAIFTDKISKSTKRERVQKLFPDEKSTGLFSEFLKLIVGNQADFKKHFDLEEKAPLQFSKDTYDEDLENLLGQIGDDFADLFLVAKKLYDAILLSGILTVTDPSTKAPLSASMIERYENHQKDLAILKQFIKNNLPEKYDEVFSDQFKDGYAGYIDGKATQEAFYKYIKNLLSKFEGADYFLEKIEREDFLRKQRTFDNGSIPHQIHLQEMNAILRRQGEHYPFLNENREKIEKILTFRIPYYVGPLASGNSDFAWLTRNSEEAIRPWNFEEIVDKASSAEDFINKMTNYDLYLPEEKVLPKHSLLYETFAVYNELTKVKFIAEGLRDYQFLDSGQKKQIVNQLFKEKRKITEKDIIHYLHNVDGYDGIELKGIEKQFNASLSTYLDLLKIIRDKEFMDDPKNEAILENIVHTLTIFEDREMIKQRLAQYNSLFDDKVIKALTRRHYTGWGRLSAKLINGIRDKQTGNTILDYLIDDDKINRNFMQLINDDVLSFKETIEKAQVVGKTDDVKQVVQELPGSPAIKKGILQSIKIVDELVKVMGHTPESIVIEMARENQTTARGKKNSQQRYKRIEDSLKNLASGLDSSILKENPTDNVQLQNDRLFLYYLQNGKDMYTGEALDINKLSNYDIDHIIPQAFIKDDSLDNRVLTSSKDNRGKSDNVPSLEVVQKRKAFWQQLLDSKLISERKFNNLTKAERGGLDERDKVGFIKRQLVETRQITKHVAQILDSRFNTEVNEKNQKIRTVKIVTLKSNLVSNFRKEFKLYKVREINDYHHAHDAYLNAVVAKAILKKYPKLEPEFVYGEYQKYDLKRYISRSKDPKDIEKATEKYFFYSNLLNFFKEEVHYADGTIVKRENIEYSKDTGEIAWNKEKDFATIKKVLSYPQVNIVKKTEEQTVGQNGGLFDNNIVSKKKVVDASKLIPIKSGLSPEKYGGYARPTIAYSVLVTYKQNNKIKNTMVGIPGLTKLEFERDPNLYLRNLGINNVSHVIKLVKYTVLEFKHKYGTYRRFIVSNQELKRANQIFVTTKQMKLISQYTTLEKNEHDSLLKNNQQLIQSIWNQFLEFMLATDLVNKKQYDELILTNNQTIEECRNIMNRVITTLSFTNINAGQKKIIFDDTSSLPIKRWQFTDSDKMVKKIIESTLIHQSITGLYETRIDLSKLGED

SEQ ID NO: 21600 - protein, 1373 aa, unidentified
  REGION 1..1373: note = Cas Enzyme sequence
MENKNYSIGLDIGTNSVGFAVITDDYKVPSKKMKVLGNTDKRFIKKNLIGALLFDEGTTAEARRLKRTARRRYTRRKNRLRYLQEIFVGEMSKVDSSFFHRLDDSFLVPEDKRGSKYPIFATLVEEKEYHKKFPTIYHLRKHLADSKEKADLRLIYLVLAHMIKYRGHFLYEESFDIKNNDIQKIFNEFISIYDNTFEGSSLSGQNAQVEAIFTDKISKSAKRERVLKLFPDEKSSGLFSEFLKLVVGNQADFKKYFDLEEKAPLQFSKDTYDEDLENVLGQIGDDFADLFVAAKKLYDAILLSGILTVTDPSTKAPLSASMIERYKNHQKDLATLKQFIKTNLPKRYDEVFSDQSKDGYAGYIDGKTTQEAFYKYIKNLLSKFEGADYFLEKIEREDFLRKQRTFDNGSIPHQIHLQEMNAILRRQGEHYPFLQENKEKVEKILTFRIPYYVGPLAHGNRDFAWLTRNSDQAIRPWNFEEVVDKASSAEDFINKMTNYDLYLPEEKVLPKHSLLYETFAVYNELTKVKFIAEGLRDYQFLDSGQKKQIVNQLFKEKRKVTEKDIIHYLHNVDGYDGIELKGIEKQFNASLSTYHDLLKIIKDKEFMDDSKNEEILENIVHTLTIFEDREMIKQRLAQYDSLFDEKVIKALIRRHYNGWGKLSAKLINGICDKQTGNTILDYLIDDGKINRNFMQLINDDGLSFKEIIQKAQVVGKTDDVKQVVQELPGSPAIKKGILQSVKLVDELVKVMGHKPESIVIEMARENQTTAKGKKNSQQRYKRIEDAIKNLAPGLDSNILKEHPTDNIQLQNDRLFLYYLQNGRDMYTGKPLEINQLSNYDIDHIIPQAFIKDDSLDNRVLTSSKENRGKSDNVPSLEVVEKMKTFWQQLLDSKLISERKFNNLTKAERERDGLNELDKVGFIKRQLVETRQITKHVAQILDARFNKEVTEKDKKNRTVKIITLKSNLVSNFRKEFGLYKVREINDYHHAHDAYLNAVLAKAILKKYPKLEPEFVYGDYQKYDLKRYISRSRDSKEVEKATEKYFFYSNLLNFFKEEVHYADGTIVKRENIEYSKDTGEIAWNKEKDFATIKKVLSLPQVNIVKKREVQTGGFSKESILPKGNSDKLIPRKTKDILWETTKYGGFDSPVIAYSILLIADIEKGKAKKLKTVKTLVGITIMEKAAFEENPITFLENKGYHNVRKENILCLPKYSLFELENGRRRLLASAKELQKGNEIVLPVYLTTLLYHSKNVHKLDEPEHLEYIQKHRNEFKDLLNLISEFSQKYVLADANLEKIQNLYADNEQADIEILANSFINLLTFTALGAPAAFKFFGKDIDRKRYTTVSEILNATLIHQSITGLYETRIDLSKLGED

SEQ ID NO: 21601 - protein, 1371 aa, unidentified
  REGION 1..1371: note = Cas Enzyme sequence
MENKNYSIGLDIGTNSVGWAVITDDYKVPSKKMKVLGNTDKHFIKKNLIGALLFDEGTTAEDRRLKRTARRRYTRRKNRLRYLQEIFSQEISKVDSSFFHRLDDSFLVPEDKRESKYPIFATLTEEKEYHKQFPTIYHFRKQLADSKEKADLRLIYLALAHMIKYRGHFLYEEAFDIKNNDIQKIFSEFISIYDNTFEGSSLSGQNAQVEAIFTDKISKSAKRERVLKLFPDEKSTGLFSEFLKLIVGNQADFKKHFDLEEKAPLQFSKDTYDEDLENLLGQIGDDFADLFLVAKKLYDAILLSGILTVTDPSTKAPLSASMIERYENHQKDLATLKQFIKTNLPEKYDEVFSDQSKDGYAGYIDGKTTQEAFYKYIKNLLSKFEGADYFLEKIEREDFLRKQRTFDNGSIPHQIHLQEMNAILRRQGEHYPFLKENREKIEKILAFRIPYYVGPLARGNRDFAWLTRNSDEAIRPWNFEEIVDKASSAEDFINKMTNYDLYLPEEKVLPKHSLLYERFAVYNELTKVKFIAEGLRDYQFLDSGQKKQIVTQLFKEKRKVTEKDIIQFLHNVDGYDGIELKGIEKQFNASLSTYHDLLKIIKDKAFMDDAKNEAILENIVHTLTIFEDREMIKQRLAQYDSLFDEKVIKALTRRHYTGWGKLSAKLINGISDKQTGNTILDYLIDDGEINRNFMQLINDDGLSFKEIIQKAQVVGKTDDVKQVVQELPGSPAIKKGILQNIKLVDELVKVMGHEPESIVIEMARENQTTARGKKNSQQRYKRIEDSLKILASGLNSKILKEHPTDNNQLQNDRLFLYYLQNGKDMYTGEALDINQLSSCDIDHIIPQAFIKDDSLDNRVLTSSKENRGKSDNVPCLEVVEKMKVFWQQLLDSKLISERKFNNLTKAERGGLNERDKVGFIKRQLVETRQITKHVAQILDARFNTEVNEKKQKIRTVKIITLKSNLVSNFRKEFELYKVREINDYHHAHDAYLNAVVAKAILKKYPKLEPEFVYGDYQKYDLKRYISRSKDPKEIEKATEKYFFYSNLLNFFKEEVHYADGTIVKRENIEYSKDTGEIAWNKEKDFATIKKVLSLPQVNIVKKREVQTGGFSKESILPKGNSDKLIPRKTKDILWDTTKYGGFDSPVIAYSILLIADIEKGKAKKLKTVKTLVGITIMEKDAFEKNPIAFLENKGYHNVCKENILCLPKYSLFELENGRRRLLASAKELQKGNEIVLPVYLTTLLYHSKNVHKLDEPGHLEYIQKHRNEFKDLLNLVSEFSQKYVLADANLEKIKNLYADNEQADIEILANSFINLLTFTALGAPAAFKFFGKDVDRKRYTTVSEILNATLIHQSITGLYETRIDLSKLGED

SEQ ID NO: 21602 - protein, 1392 aa, unidentified
  REGION 1..1392: note = Cas Enzyme sequence
MSNKSYSIGLDIGTNSVGWAVITDDYKVPSKKMKVLGNTDKHFIKKNLIGALLFDEGTTAEDRRLKRTARRRYTRRKNRLRYLQEIFSEEMSKVDSSFFHRLDDSFLVPEDKRGSKYPIFATLAEEKEYHKKFPTIYHLRKHLADSKEKTDLRLIYLALAHMIKYRGHFLYEESFDIKNNDIQKIFSEFISIYDNTFEGSSLSGQNAQVEAIFTDKISKSAKRERILKLFAYEKSTDLFSEFLKLIVGNQADFKKHFDLEEKAPLQFSKDTYDEDLENLLGQIGDDFADLFLVAKKLYDAILLSGILTVTDSSTKAPLSASMIERYENHQKDLAALKQFIQNNLQEKYDEVFSDQSKDGYARYINGKTTQEAFYKYIKNLLSKFEGSDYFLDKIEREDFLRKQRTFDNGSIPHQIHLQEMNAIIRRQGEHYPFLKEYKEKIGTILTFRIPYYVGPLARGNRNFAWLTRNSDQAIRPWNFEEIVDQASSAEEFINKMTNYDLYLPEEKVLPKHSLLYETFAVYNELTKVKFISEGLRDYQFLDSGQKKQIVNQLFKEKRKVTEKDIIQYLHNVDGYDGIELKGIEKQFNASLSTYHDLLKIIKDKEFMDDPKNEEILENIVHTLTIFEDREMIKQRLAQYASIFDKKVIKALTRRHYTGWGKLSAKLINGICDKKTGKTILDYLIDDGYSNRNFMQLINDDGLSFKDIIQKAQVVGKTNDVKQVVQELPGSPAIKKGILQSIKLVDELVKVMGHAPESIVIEIARENQTTARGKKNSQQRYKRIEDALKNLAPGLDSNILKEHPTDNIQLQNDRLFLYYLQNGKDMYTGEALDINQLSSYDIDHIVPQAFIKDDSLDNRVLTSSKDNRGKSDNVPSLEVVQKRKAFWQQLLDSKLISEHKFNNLTKAERGGLDERDKVGFIRRQLVETRQITKHVAQILDARFNTEVNEKDKKNRTVKIITLKSNLVSNFRKEFKLYKVREINDYHHAHDAYLNAVVAKAILKKYPKLEPEFVYGDYQKYDLKRYISRSKDPKDVEKATEKYFFYSNLLNFFKEEVHYADGTIAKRENIEYSNDTGEIAWNKEKDFATIKKVLSLPQVNIVKKTEIQTHGLDRGKPRGLFNSNPSPKPSEDSKENLVPIKQGLDPRKYGGYAGISNSYAVLVKAIIEKGAKKQQKTVLEFQGISILDKINFEKNKENYLLEKGYIKILSTITLPKYSLFEFPDGTRRRLASILSTNNKRGEIHKGNELVIPEKYTTLLYHAKNINKTLEPEHLEYVEKHRNDFAKLLEYVLNFNDKYVGALKNGERIRQAFIDWETVDIEKLCFSFIGPRNSKNAGLFELTSQGSASDFEFLGVKIPRYRDYTPSSLLNATLIHQSITGLYETRIDLSKLGED

SEQ ID NO: 21603 - protein, 1377 aa, unidentified
  REGION 1..1377: note = Cas Enzyme sequence
MNNKPYSIGLDIGTNSVGWSVITDDYKVPSKKMKVLGNTDKRFIKKNLIGALLFDEGTTAEARRLKRTARRRYTRRKNRLRYLQEIFAEEMSKVDSSFFHRLDDSFLIPEDKRGSKYPIFATLAEEKEYHKQFPTIYHLRKQLADSKEKADLRLIYLVLAHMIKYRGHFLYEEAFDIKNNDIQKIFNEFISIYDNTFEGSSLSGQNAQVETIFTDKISKSAKRERVLKLFPDEKSTGLFSEFLKLIVGNQADFKKHFDLEEKAPLQFSKDTYDEDLENLLEQIGDDFADLFVAAKKLYDAILLSGILTVTDPSTKAPLSASMIERYENHQKDLAVLKQFIKTNLPEKYVEVFSDQSKDGYAGYIDGKTTQEAFYKYIKNLLSKFDGADYFLDKIEREVFLRKQRTFDNGSIPHQIHLQEMNTILRRQGEHYPFLKENKEKIEKILTFRIPYYVGPLARGNRDFAWLTRNSDQAIRPWNFEEIVDKASSAEDFINKMTNYDLYLPEEKVLPKHSLLYETFAVYNELTKVKFIAEGMRDYQFLDSGQKKKIINQLFKKKRKVTEDDIIDCLQKIDNYDGIELKGIEKQFNASLSTYHDILKIIRDKEFMDDPKNGDILENVIHTLTIFEDREMIKQRLAQYNSIFDEKVIKALSRKHYTGWGKLSAKLIDGIRDKQTGKTILDYLMDDGKSNRNFMQLIKDDELSFTEIIQKAQVVGDTDNLRQVVQNLPGSPAIKKGILQSIKIVDELVKVMGHAPESIVIEMARENQTTARGKKNSQQRYKRIEDSLKNLASGLDSNILKENPTDNIQLQNDRLFLYYLQNGKDMYTGEALNINQLSSYDIDHIIPQAFIKDDSLDNRVLTSSKDNRGKSDNVPSLEVVEKMKAFWQQLLDSKLISERKYNNLTKAERERGGLNELDKVGFIKRQLVETRQITKHVAQILDARFNKEVTEKNKKNRNVKIITLKSNMVSNFRKEFGLYKVREINDYHHAHDAYLNAVVAKAILKKYPKLEPEFVYGDYQKYDLKRYISRSKDPKEVEKATEKYFFYSNLLNFFKEEVHYADGTIVKRENIEYSKDTGEIAWNKEKDFATIKKVLSLPQVNIVKKTEEQTVGQNGGLFDNNIVSKKKVVDASKLIPIKSGLSPEKYGGYARPTIAYSVLVTYKQNNKIKNTMVGIPVLTKLEFERDPNLYLRNLGINNVSHVIKLVKYTVLEFKHKYGTYRRFIVSNQELKRANQIFVTTKQMKLISQYTTLDKNEHDSLLKNNQQLIQSIWNQFLEFMLATDLVNKKQYDELILTNNQTIEECRNIMNRVITTLSFTNINAGQKKIIFDDTLSLPIKRWQFTDSDKMVKKIIESTLIHQSITGLYETRIDLSKLGED

SEQ ID NO: 21604 - protein, 1376 aa, unidentified
  REGION 1..1376: note = Cas Enzyme sequence
MTKKPYSIGLDIGTNSVGWAVITDDYKVPSKKMKVLGNTDKRFIKKNLIGALLFDEGTTAEARRLKRTARRRYTRRKNRLRYLQEIFAEEMSKVDSSFFHRLDDSFLIPEDKRGSKYPIFATLAEEKEYHKQFPTIYHLRKQLADSKEKTDLRLIYLALAHMIKYRGHFLYEDTFDIKNNDIQKIFSKFISIYDNTFEGSSLSGQNAQVEAIFTDKISKSAKRERVLKLFPDEKSTGLFSEFLKLIVGNQADFKKHFDLEEKAPLQFSKDTYDEDLENLLGQIGDDFADLFLVAKKLYDAILLSGILTVTDPSTKAPLSASMIERYENHQKDLAVLKQFIKTNLPEKYVEVFSDQSKDGYAGYIEGKTTQEAFYKYIKNLLSKFEGADYFLDKIEREDFLRKQRTFDNGSIPHQIHLQEMNAILRRQEEHYPFLKENKEKIEKILTFRIPYYVGPLARGNRDFAWLTRNSDQAIRPWNFEEIVDKASSAESFINKMTNYDLYLPEEKVLPKHSLLYETFAVYNELTKVKFIAEGLRDYQFLDSVQKKQIVNQLFKEKRKVTEKDIIHYLHTVDGYDGIELKGMEKQFNASLSTYHDLLKIIKDKEFMDDPKNEEILENIVHTLTIFEDREMIKQRLAQYNSLFDEKVIKALTRRHYTGWGKLSAKLINGICDKQTGKTILDYLINDDYNNRNFMQLINDDRLSFKEIIQKAQVVGKTDDLKQVVQELPGSPAIKKGILQSIKIVDELVKVMGHAPESIVIEMARENQTTARGKKNSQQRYKRIEDSLKILASGLDSNILKEKPTDNNQLQNDRLFLYYLQNGKDMYTGEALDINQLSSYDIDHIIPQAFIKDDSLDNRVLTKSKENRGKSDNVPSLEVVQKRKAFWQQLLDSKLISERKFNNLTKAERGGLDERDKVGFIKRQLVETRQITKHVAQILDARFNTEVNEKNQKIRTVKIITLKSNLVSNFRKEFRLYKVREINDYHHAHDAYLNAVVAKAILKKYPKLEPEFVYGNYQKYDLKRYISRSKDPKEIEKATEKYFFYSNLLNFFKEEVHYADGTIVKRETIEYSKDNGEIAWNKERDFATIKKVLSYPQVNIVKKAEEQTVGQNGGLFDNNIVSKEKVVDASKLIPIKSGLSPEKYGGYARPTIAYSVLVIADIEKGKTKKLKRIKEMVGITIQDKKKFEANPIAHLEKCGYKNINPNLIIKLPKYSLFEFNGGQRRLLASSIELQKGNELILPYHFTALLYHAQRINKISEPIHKQYVEAHQNEFEELLTTIISLSKKYIQKSNVESLLQQAFEQADKDIYQLSESFISLLKLTSFGAPGAFKFLGVEISQSSVRYKPNSQFLDTTLIHQSITGLYETRIDLSKLGED

SEQ ID NO: 21605 - protein, 1388 aa, unidentified
  REGION 1..1388: note = Cas Enzyme sequence
MTKKPYSIGLDIGTNSVGWAVITDDYKVPSKKMKVRGNTDKHFIKKNLIGALLFDEGTTAEDRRLKRTARRRYTRRKNRLRYLQEIFAEEMSKVDSSFFHRLDDSFLIPEDKRGSKYPIFATLAEEKEYHKQFPTIYHLRKHLADSKEKADLRLIYLALAHMIKYRGHFLYEESFDIKNNDIQKIFNELISIYDNTFEGSSLSEQSVQVEAIFTDKISKSAKRERVLKLFSDEKSTGLFSEFLKLIVGNQADFKKHFDLEEKAPLQFSKDTYDEDLENLLGQIGDGFADLFLVAKKLYDAILLSGILTVTDPSTKAPLSASMIERYENHQEDLAALKQFIKNNLSEKYAEVFSDQFKDGYAGYIVSKTTQEAFYKYIKNLLSKFEGADYFLDKIEREDFLRKQRTFDNGSIPHQIHLQEMNAILRRQGEHYPFLKENKEKIEKILTFRIPYYVGPLARGNRDFAWLTRNSDEAIRPWNFEEIVDKASSAEDFINKMTNYDLYLPEEKVLPKHSLLYETFAVYNELTKVKFIAEGLRDYQFLDSGQKKQIVNQLFKEKRKVTEKDIIHYLHTVDGYDGIELKGIEKQFNASLSTYHDLLKIIKDKEFMDDPKNEEVLENIVHTLTIFEDREMIKQRLAQYDSLFDEKVIKALTRRHYTGWGKLSAKLINGICDKQTGNTILDYLIDDGKINRNFMQLINDDGLSFKEIIQKAQVVGKTDDVKQVVQELPGSPAIKKGILQSIKIIDELVKVMGHVPESIVIEMARENQTTAKGNSKSQQRFKRLSNAISELGSNILKEHPTDNTDLQNDRLYLYYLQNGKDMYTGKPLDINQLSSYDIDHIIPQAFIKDDSLDNRVLTSLKDNRGKSDNVPSIEVVEKMKTFWQQLLDSKLISERKFNNLTKAERGGLDERDKVGFIKRQLVETRQITKHVAQILDTRYNTEVNEKNQKIRTVKIITLKSNLVSNFRKEFRLYKVREINDYHHAHDAYLNAVVAKAILKKYPKLEPEFVYGDYQKYDLKRYISRSKDPKDIEKATEKYFFYSNLLNFFKEEVHYADGTIVKRENIEYSKDTGEIAWNKEKDFATIKKVLSLPQVNIVKKTEIQSHGLDRGKPKGLFNSNPSPKPSEDSKENLVPIKQGLDPRKYGGYTGISNSYAVLVKAIIEKGAKKQQKTILEFQGISILDKINFENNKENYLLEKGYIKILSTITLPKYSLFEFSDGTRRRLASILSTNNKRGEIHKGNELVIPEKYTTLLYHAKNINKALEPEHLEYVEKHRDEFAKLLDYVLDFNEKYVGALKNGERIRQAFTDWETVDIKELCFSFIGPENSKNAGLFELTSQGSASDFEFLGVKIPRYRDYTPSSLLNATLIHQSITGLYETRIDLSKLGED

SEQ ID NO: 21606 - protein, 1373 aa, unidentified
  REGION 1..1373: note = Cas Enzyme sequence
MTKKNYSIGLDIGTNSVGWAVITDDYKVPAKKMKVLGNTDKKYIKKNLLGALLFDSGETAEATRLKRTARRRYTRRKNRLRYLQEIFAEEMTKVDESFFQRLDESFLRWDDDNKKLGRYPIFGNKADVVKYHQEFPTIYHLRKHLADSSEKADLRLVYLALAHMIKFRGHFLIEGELNAENTDVQKIFADFVGVYDRTFDDSHLSEITVDAASILTEKISKSRRLENLIKYYPTEKKNTLFGNLIALALGLQPNFKMNFKLSEDAKLQFSKDSYEEDLGELLGKIGDDYADLFTSAKNLYDAILLSGILIVDDNSTKAPLSASMIKRYVEHQEDLEKLKEFIKANKSELYHDIFKDKNKNGYAGYIENGVKQDEFYKYLKNTLSKIAGSDYFLDKIEREDFLRKQRTFDNGSIPHQIHLQEMHAILRRQGDYYPFLKENQDRIEKILTFRIPYYVGPLARKDSRFSWAEYHSDEKITPWNFDKVIDKEKSAEKFITRMTLNDLYLPEEKVLPKHSHVYETYAVYNELTKIKYVNEQGKDSFFDSNMKQEIFDHVFKENRKVTKEKLLNYLNKEFPEYRIKDLIGLDKENKSFNASLGTYHDLKKILDKAFLDDKVNEEVIEDIIKTLTLFEDKDMIHERLQKYSDIFTADQLKKLERRHYTGWGRLSYKLINGIRNKENNKTILDYLIDDGSANRNFMQLINDDTLPFKQIIQKSQVVGDVDDIEAVVHDLPGSPAIKKGILQSVKIVDELVKVMGDNPDNIVIEMARENQTTNRGRSQSQQRLKKLQNSLKELGSNILNEEKPSYIEDKVENSHLQNDQLFLYYIQNGKDMYTGDELDIDHLSDYDIDHIIPQAFIKDDSIDNRVLTSSAKNRGKSDDVPSLDIVRARKAEWVRLYKSGLISKRKFDNLTKAERGGLTEADKAGFIKRQLVETRQITKHVAQILDARFNTESDENDKVIRDVKVITLKSNLVSQFRKDFEFYKVREINDYHHAHDAYLNAVVGTALLKKYPKLASEFVYGEYKKYDIRKFITNSSDKATAKYFFYSNLMNFFKRVIRYSNGKVIVRPVVEYSKDTEDIAWDKKSNFRTICKVLSYPQVNIVKKVETQTGGFSKESILPKGDSDKLIPRKTKKAYWDTKKYGGFDSPTVAYSVFVVADVEKGKAKKLKTVKELVGISIMERSFFEENPVEFLENKGYHNIREDKLIKLPKYSLFEFEGGKRRLLASASELQKGNEMVIPGHLVKLLYHAQRINSFNSTKYLDYVSAHKKEFEKVLSCVEDFANLYVDVEKNLSKIRAVADSMDNFSIEEISNSFINLLTLTALGAPADFNFLGEKIPRKRYTSTKECLNATLIHQSITGLYETRIDLSKIGEE

SEQ ID NO: 21607 - protein, 1368 aa, unidentified
  REGION 1..1368: note = Cas Enzyme sequence
MKSYSIGLDIGTNSVGWAVITDDYKVPAKKMKVFGNTDKKYIKKNLLGALLFDSGETAEATRLKRTVRRRYTRRKNRLRYLQEIFAEEMTKVDDSFFQRLDESFLKDDDKNFDAHPIFGNKAEEDVYHQKFPTIYHLRKYLADSTEKADLRLVYLALAHIIKFRGHFLIEGELSAENTDVQKLFTDFVGVYDRIFDDSHLSEITVDAASILTEKISKSRRLENLIKYYTTEKKNTLFGNLIALALGLQPNFKMNFKLSEDAKLQFSKDSYEEDLEELLGKIGDDYADLFTSAKNLYDAILLSGILTVDDNSTKAPLSASMLKRYVEHHEDLEKLKEFIKANKSELYHDIFKDKNKNGYAGYIENGVKQDEFYKYLKNTLSKIDGSEYFLDKIEREDFLRKQRTFDNGSIPHQIHLQEMHAILHRQGDYYSFLKENQDRIEKILTFRIPYYVGPLARKDSRFAWAEYHLDEKITPWNFDKVIDKEKSAEKFITRMTSNDLYLPEEKVLPKHSHVYETYAVYNELTKIKYVNEQGKESFFDSNMKQEIFDHVFKENRKVTKEKVLNYLNKEFPEYRIKDLIGLDKENKSFNASLGTYHDLKKILDKSFLDDKVNEEIIEDIIKTLTLFEDREMIQQRLQKYSDIFSPQQLKKFERRHYTGWGRLSYKLINGSRNKENNKTILDYLIDDGSANRNFMQLINDDTLPFKQIIQKSQVVGDIDDIKAVVHDLPGSPAIKKGILQSVKIVDELVKVMGHNPDNIVIEMARENQTTNRGRSQSQQRLKKLQNSLQELGSNILNVEKPSYIEDKVENNHLQNDKLFLYYIQNGKDMYTGDELDIDHLSDYDIDHIIPQAFIKDDSIDNRVLTSSAKNRGKSDDVPSLDIVRARKVEWIRLYKSRLISKRKFDNLTKAERGGLTEADKAGFIKRQLVETRQITKHVAQILDARFNTERDENDKVIRDVKVITLKSNLVSQFRKDFKFYKVREINDYHHAHDAYLNAVVGTALLKKYPKLASEFVYGEYKKYDIRKFITNSSDKATAKYFFYSNLMNFFKTKVKYADGTVFERPIIETNADGEIAWNKQIDFEKVRKVLSYPQVNIVKKVETQTGGFSKESILPKGDSDKLIPRKTKKVYWDTKKYGGFDSPTVAYSVFVVADVEKGKAKKLKTVKELVGISIMERSFFEENPVEFLENKGYHNIREDKLIKLPKYSLFEFEGGRRRLLASASELQKGNEMVLPGYLVELLYHAHRADNFNSTEYLKYVSEHKKEFEKVLSCVEDFANLYVDVEKNLSKIRAVADSMDNFSIEEISNSFINLLTLTALGAPADFNFLGEKIPRKRYTSTKECLNATLIHQSITGLYETRIDLSKLGEE

SEQ ID NO: 21608 - protein, 1242 aa, unidentified
  REGION 1..1242: note = Cas Enzyme sequence
MEKTYSIGLDIGTNSVGWSVITDDYKVPAKKMKVLGNTDKKYIKKNLLGALLFDSGETAEVTRLKRTSRRRYTRRKNRLRYLQEIFAKEMAKVDESFFQRLEESFLTDDDKTFDSHPIFGNKAEEDAYHQEFPTIYHLRKHLADSSEKADLRLVYLALAHMIKFRGHFLIEGELNAENTDIQKLFNDFVETYDKIADESHLSEVDASSILTNKISKSRRLENLIKQYPTEKKNTLFGNLVALVLGLQPNFKTNFKLSEDAKLQFSKDTYDEDLEELLGKIGDDYADLFTAAKNLYDAILLSGILTVDDNSTKAPLSASMIKRYEEHHEDLEKLKKFIKVNNFDKYHEIFKDKSKNGYAGYIENGVKQDIFYKHLKSIISEKNGGQYFLDKIEREDFLRKQRTFDNGSIPHQIHLQEMRAILRRQGEYYPFLKENQSKIEKILTFRIPYYVGPLARKNSRFAWAKYHSDEPITPWNFDEVVDKEKSAEKFITRMTLNDLYLPEEKVLPKHSHVYETYAVYNELTKIKYVNEQGKESFFDSNMKQEIFDHVFKENRKVTKEKLLNYLNKEFPEYRIKDLIGLDKENKSFNASLGTYHDLKKILDKSFLDDKVNEEVIEDIIKTLTLFEDKDMIHERLQKYSDIFTANQLKKLERRHYTGWGRLSYKLINGIRNKENNKTILDYLIDDGSANRNFMQLINDDTLPFKQIIQKSQVVGDVDDIEAVVHDLPGSPAIKKGILQSVKIVDELVKVMGGNPDNIVIEMARENQTTNRGRSQSQQRLKKLQSSLKELGSNIINEEKPSYIEDKVENSHLQNDQLFLYYIQNGKDMYTGDELDIDHLSDYDIDHIIPQAFIKDDSIDNRVLTSSAKNRGKSDDVPSLDIVRARKAEWVRLYKSGLISKRKFDNLTKAERGGLTEADKARFIKRQLVETRQITKHVAQILDARFNTEHDENDKVIRDVKVITLKSNLVSQFRKDFEFYKVREINDYHHAHDAYLNAVVGTALLKKYPKLAPEFVYGEYKKYDVRKLIAKSSDDHSEMGKATAKYFFYSNLMNFFKTKVKYADGSVYERPIIETNADGEVVWNKQKDFEIIRKVLSYPQVNIVKKVEEQTVGQNGGLFDNNILAKPEKDDKKKLFPIKKSLSTTSYGGYARATIAYSILIVSEFGKNKELKLLGLPLLDKVKYEKNPIAYLNSIGIINVKSIFKLPKYCLFEFQEKNTNYRRYMVSNQELKRANQLFLTCKET

SEQ ID NO: 21609 - protein, 1384 aa, unidentified
  REGION 1..1384: note = Cas Enzyme sequence
MLFNKCIIFSINLDFSNKEKCMTKPYSIGLDIGTNSVGWAVITDDYKVPSKKMKVLGNTSKKYVKKNLLGALLFESGITAEGRRLKRTARRRYTRRRNRILYLQEIFSTEMAKIDESFFQRLDDSFLVPDEKRDSKYPIFGNLVKEKTYHDEFPTIYHLRKYLADSSKKADLRLVYLALAHMIKYRGHFLIEGDFNSRNNDIKKNFQDFLDSYNAIFESDLSLENSKQLEEIVKDKISKSAKKDRLLKLFPGEKNSGIFSEFLKLIVGNQADFRKYFNLDEKTSLHFSKESYDEDLETLLGHIGDDYSDVFLKAKKVYDAILLSGILAVTDNETEAPLSSAMIMRYKEHEEDLALLKAYIRKISLETYNEVFKDDTKNGYAGYIDGKTNQEDFYVYLKKLLTGLEGADYFLEKINREDLLRKQRTFDNGSIPYQIHLQEMRAIIDKQAKFYPFLAKNKEKIEKILTFRIPYYVGPLARGNSDFAWSIRKRHEKITPWNFEDVIDKESSAEAFINRMTSFDLYLPEEKVLPNHSLLYETFTVYNELTKVRFIAEGMRDYQFLDSKQKKDIVRLYFKGKRKVTDNDIIDYLHAIDGYDGIELKGIEKQFNSSLSTYHDLLNIINEKEFLDDSSNEAIIEEIIHTLTIFEDREMIKQRLSKFDNIFDKSVLKKLSRRHYTGWGKLSAKLINGIRDEKSGKTILDYLIDDGISNRNFMQLIHDDTLSFKKKIQKAQIIGDQDNIKQVVQSLPGSPAIKKGILQSIKIVDELVKVMGRNPESIVVEMARENQYTNQGKSNSQQRLKRLEESLKELGSKILKENVPAKLSKIDNNSLQNERLYLYYLQNGKDMYTGDDLDIDRLSNYDIDHIIPQAFLKDNSIDNKVLVSSASNRGKSDDVPSLDVVKKRKTFWHQLLKSKLISQRKFDNLTKAERGGLSPEDKAGFIQRQLVETRQITKHIARLLDERFNNKKDEDNKALRTVKIITLKSSLVSQFRKDFELYKVREINDFHHAHDAYLNAVVASALLKKYPKLEPEFVYGDYPKYNSFRERKSATEKVYFYSNIMNTFKKSITLADGTVIDRPLIEVNEETGESVWNKESDLATVRRVLSYPQVNVVKKVEVQSGGFSKELVQPHGNSDKLIPRKTKKMLWDTKKYGGFDSPVVAYSVLVMAEREKGKSKKLKPVKELIGITIMEKESFEKNTVDFLERRGLRNIQVENIIQLPKFSLFELENGRRRLLASAKELQKGNEFILPDKLVKLLYHAKNIYNTLEPEHLEYVETHRTDFGKILDTVSVFSEKYILAEANLEKMKEIYRKNVDTEIDELVTSFINLLTFTSIGAPATFKFFGRSIERRRYSSIAEILNATLIHQSVTGLYETRIDLGKLGED

SEQ ID NO: 21610 - protein, 902 aa, unidentified
  REGION 1..902: note = Cas Enzyme sequence
MTNGKILGLDIGIASVGVGIIEAKTGKVVHANSRLFSAANAENNAERRGFRGSRRLNRRKKHRVKRVRDLFEKYEIVTDFRNLNLNPYELRVKGLTEQLTNEELFAALRTISKRRGISYLDDAEDDSTGSTDYAKSIDENRRLLKTKTPGQIQLERLEKYGQLRGNFTVYDENGEAHRLINVFSTSDYEKEARKILETQADYNKKITAEFIDDYVEILTQKRKYYHGPGNEKSRTDYGRFRTDGTTLENIFGILIGKCSFYPDEYRASKASYTAQEYNFLNDLNNLKVPTETGKLSTEQKEALVEFAKSTATLGPAKLLKEIAKILDCKVDEIKGYREDDKGKPDLHTFEPYRKLKFNLDSVNIDDLSREVLDKLADILTLNTEREGIEDAIRHNLPNQFTEGQISEIIKVRKSQSTAFNKGWHSFSAKLMNELIPELYATSDEQMTILTRLEKFKVNKKSSKNTKTIDEKEVTDEIYNPVVAKSVRQTIKIINAAVKKYGDFDKIVIEMPRDKNADDEKKFIDKRNKENKKEKDDALKRAAYLYNGTDKLPDEVFHGNKQLETKIRLWYQQGERCLYSGKPIPIQELVHNSNNFEIDHILPLSLSFDDSLANKVLVYAWTNQEKGQKTPYQVIDSMDAAWSFREMKDYVLKQKGLGKKKRDYLLTTENIDKIEVKKKFIERNLVDTRYASRVVLNSLQSALRELGKDTKISVIRGQFTSQLRRKWKIDKSRETYHHHAVDALIIAASSQLKLWEKQDNPMFVDYGNNQVVDKQTGEILSVSDDEYKELVFQPPYQGFVNMISSKGFEDEILFSYQVDSKYNRKVSDATIYSTRKAKIGKDKKEETYVLGKIKDIYSQNGFDTFIKKYNKDKTQFLMYQKDPLTWENVIEVILRDYPTDRKS

SEQ ID NO: 21611 - protein, 1130 aa, unidentified
  REGION 1..1130: note = Cas Enzyme sequence
MTNGKILGLDIGIASVGVGIIEAKTGKVVHANSRLFSAANAENNAERRGFRGSRRLNRRKKHRVKRVRDLFEKYEIVTDFRNLNLNPYELRVKGLTEQLTNEELFAALRTISKRRGISYLDDAEDDSTGSTDYAKSIDENRRLLKTKTPGQIQLERLEKYGQLRGNFTVYDENGEAHRLINVFSTSDYEKEARKILETQADYNKKITAEFIDDYVEILTQKRKYYHGPGNEKSRTDYGRFRTDGTTLENIFGILIGKCSFYPDEYRASKASYTAQEYNFLNDLNNLKVPTETGKLSTEQKEALVEFAKSTATLGPAKLLKEIAKILDCKVDEIKGYREDDKGKPDLHTFEPYRKLKFNLDSVNIDDLSREVLDKLADILTLNTEREGIEDAIRHNLPNQFTEGQISEIIKVRKSQSTAFNKGWHSFSAKLMNELIPELYATSDEQMTILTRLEKFKVNKKSSKNTKTIDEKEVTDEIYNPVVAKSVRQTIKIINAAVKKYGDFDKIVIEMPRDKNADDEKKFIDKRNKENKKEKDDALKRAAYLYNGTDKLPDEVFHGNKQLETKIRLWYQQGERCLYSGKPIPIQELVHNSNNFEIDHILPLSLSFDDSLANKVLVYAWTNQEKGQKTPYQVIDSMDAAWSFREMKDYVLKQKGLGKKKRDYLLTTENIDKIEVKKKFIERNLVDTRYASRVVLNSLQSALRELGKDTKISVIRGQFTSQLRRKWKIDKSRETYHHHAVDALIIAASSQLKLWEKQDNPMFVDYGNNQVVDKQTGEILSVSDDEYKELVFQPPYQGFVNMISSKGFEDEILFSYQVDSKYNRKVSDATIYSTRKAKIGKDKKEETYVLGKIKDIYSQNGFDTFIKKYNKDKTQFLMYQKDPLTWENVIEVILRDYPTTKKSEDGKNDVKCNPFEEYRRENGLVCKYSKKGKGTPIKSLKYYDKKLGNCIDITPEGSKNEVVLQSLNPWRADVYFNPETLKYELLGLKYSDLSFEKGTGKYHISQEKYDVIKEKEGIGKKSEFKFTLYRNDLILIKDTASGEQEIYRFLSRTMPNVKHYAELKPYDKEKFDNVQELVEALGEADKVGRCIKGLNKSNLSIYKVRTDVLGNKYFVKKEGDKPKLDFKNNKK

SEQ ID NO: 21612 - protein, 1363 aa, unidentified
  REGION 1..1363: note = Cas Enzyme sequence
MTKPYSIGLDIGTNSVGWAVITDDYKVPSKKMKVLGNTNKKYIKKNLLGALLFDSGITAEGRRLKRTARRRYTRRRNRILYLQEIFSTEMATLDDAFFQRLDDSFLVPDDKRDSKYPIFGNLAEEKAYHDKFPTIYHLRKQLADSSQKADLRLVYLALAHMIKYRGHFLIEGAFNLKNNDIQKNFQDFLDTYNAIFESDLSLENSKQLEEIVKDKISKSAKKDRILKLFPGEKNSGIFSEFLKLIVGNQADFRKYFNLDEKAPLHFSKESYDEDLETLLGYIGDDYSDVFLKAKKLYDAILLSGILTVTDNGTEAPLSSAMIMRYKEHEEDLASLKAYIRNISLETYNEVFKDDTKNGYAGYIDGKTSQEDFYVYLKKLLASLEGADYFLEKIDREDFLRKQRTFDNGSIPYQIHLQEMRAILDKQAKFYPFLAKNKERIEKILTFRIPYYVGPLARGNSDFAWSIRKRNEKITPWNFEDVIDKESSAEAFINRMTSFDLYLPEEKVLPKHSLLYETFTVYNELTKVRFIAESMRDYQFLDSKQKKDIVRLYFKGKRKVTDKDIIEYLHAIDGYDGIELKGIEKQFNSSLSTYHDLLNIINDKEFLDDSSNETIIEEIIHTLTIFEDREMIKQRLSKFENIFDKSVLKKLSRRHYTGWGKLSAKLINGIRDEKSGNTILDYLIDDGVSNRNFMQLIHDDALSFKKKIKKAQIIGDKDNNKQVVKSLPGSPAIKKGILQSIKIVDELVKVMGREPESIVVEMARENQYTNQGKSNSQQRLKRLEESLKGLGSKILKENVPTRLSKIDNNALQNDRLYLYYLQNGKDMYTGEELDIDRLSNYDIDHIIPQAFLKDNSIDNKVLVSSASNRGKSDDVPSLEVVKKRKTLWYQLLKSKLISQRKFDNLTKAERGGLSPEDKAGFIQRQLVETRQITKHVARLLDEKFNNKKDENNRAVRTVKIITLKSSLVSQFRKDFELYKVREINDFHHAHDAYLNAVVASALLKKYPKLEPEFVYGDYPKYNSFRERKSATEKVYFYSNIMNIFKKSISLADGTVIERPLIEVNVETGESVWNKESDLATVRRVLSYPQVNVVKKVEVQSGGFSKELVQPHGNSDKLIPRKTKKMIWDTKKYGGFDSPIVAYSVLVMAEREKGKSKKLKPVKELVGITIMEKESFENNTIDFLERRGFRNIQDENIILLPKFSLFELENGRRRLLASAKELQKGNEFILPNKLVKLLYHAKNIHNTLEPEHLEYVESHRADFGKILDVVSVFSEKYILAEAKLEKIKEIYRKNIDTEIHEMAIAFINLLTFTSIGAPATFKFFGHNIERKRYSSVAEILNATLIHQSVTGLYETRIDLGKLGED

SEQ ID NO: 21613 - protein, 1363 aa, unidentified
  REGION 1..1363: note = Cas Enzyme sequence
MTKPYSIGLDIGTNSVGWAVITDDYKVPSKKMKVLGNTNKKYIKKNLLGALLFDSGITAEGRRLKRTARRRYTRRRNRILYLQEIFSTEMATLDDAFFQRLDDSFLVPDDKRDSKYPIFGNLAEEKAYHDKFPTIYHLRKQLADSSQKADLRLVYLALAHMIKYRGHFLIEGDFNLKNNDIQKNFQDFLDTYNAIFESDLSLENSKQLEEIVKDKISKSAKKDRILKLFPGEKNSGIFSEFLKLIVGNQADFRKYFNLDEKAPLHFSKESYDEDLETLLGYIGDDYSDVFLKAKKLYDAILLSGILTVTDNGTEAPLSSAMIMRYKEHEEDLASLKAYIRNISLETYNEVFKDDTKNGYAGYIDGKTSQEDFYVYLKKLLASLEGADYFLEKIDREDFLRKQRTFDNGSIPYQIHLQEMRAILDKQAKFYPFLAKNKERIEKILTFRIPYYVGPLARGNSDFAWSIRKRNEKITPWNFEDVIDKESSAEAFINRMTSFDLYLPEEKVLPKHSLLYETFTVYNELTKVRFIAESMRDYQFLDSKQKKDIVRLYFKGKRKVTDKDIIEYLHAIDGYDGIELKGIEKQFNSSLSTYHDLLNIINDKEFLDDSSNETIIEEIIHTLTIFEDREMIKQRLSKFKNLFDKSVLKKLSRRHYTGWGKLSAKLINGIRDEKSGNTILDYLIDDGVSNRNFMQLIHDDALSFKKKIKKAQIIGDKDNNKQVVKSLPGSPAIKKGILQSIKIVDELVKVMGREPESIVVEMARENQYTNQGKSNSQQRLKRLEESLKGLGNKILKENVPTRLSKIDNNALQNDRLYLYYLQNGKDMYTGEELDIDRLSNYDIDHIIPQAFLKDNSIDNKVLVSSASNRGKSDDVPSLEVVKKRKTLWYQLLKSKLISQRKFDNLTKAERGGLSPEDKAGFIQRQLVETRQITKHVARLLDEKFNNKKDENNRAVRTVKIITLKSSLVSQFRKDFELYKVREINDFHHAHDAYLNAVVASALLKKYPKLEPEFVYGDYPKYNSFRERKSATEKVYFYSNIMNIFKKSISLADGTVIERPLIEVNVETGESVWNKESDLATVRRVLSYPQVNVVKKVEVQSGGFSKELVQPHGNSDKLIPRKTKKMIWDTKKYGGFDSPIVAYSVLVMAEREKGKSKKLKPVKELVGITIMEKESFENNTIDFLERRGFRNIQDENIILLPKFSLFELENGRRRLLASAKELQKGNEFILPNKLVKLLYHAKNIHNTLEPEHLEYVESHRADFGKILDVVSVFSEKYILAEAKLEKIKEIYRKNIDTEIHEMAIAFINLLTFTSIGAPATFKFFGHNIERKRYSSVAEILNATLIHQSVTGLYETRIDLGKLGED

SEQ ID NO: 21614 - protein, 1363 aa, unidentified
  REGION 1..1363: note = Cas Enzyme sequence
MTKPYSIGLDIGTNSVGWAVITDDYKVPSKKMKVLGNTSKKYIKKNLLGALLFDSGITAEGRRLKRTARRRYTRRRNRILYLQEIFSTEMATLDDAFFQRLDDSFLVPDDKRDSKYPIFGNLVEEKVYHDEFPTIYHLRRHLADSSKKADLRLVYLALAHMIKYRGHFLIEGDFNSKNNDIQKNFQDFLDTYNTIFESDLSLENSKQLEEIVKDKISKSAKKDRILKLFPGEKNSGIFSEFLKLIVGNQADFRKYFNLDEKTSLQFSKESYDEDLETLLGHIGDDYSDVFLKAKKLYDAILLSGILTVTDKGTEAPLSSAMIMRYKEHEEDLALLKAYIRNISLETYNEVFKDNTKNGYAGYIDGKTSQEDFYVYLKKLLAGLEGADYFLEKIDREDFLRKQRTFDNGSIPYQIHLQEMRAILDKQAKFYPFLAKNKERIEKILTFRIPYYVGPLARGNSDFAWSIRKRNEKITPWNFEDVIDKESSAEAFINRMTSFDLYLPEEKVLPKHSLLYETFTVYNELTKVRFIAESMRDYQFLDSKQKKDIVRLYFKGKRKVTDKDIIEYLHAIDGYDGIELKGIEKQFNSSLSTYHDLLNIINDKEFLDDSSNETFIEEIIHTLTIFEDREMIKQRLSKFDNIFDKSVLKKLSRRHYTGWGKLSAKLINGIRDEKSGNTILDYLIDDGVSNRNFMQLIHDDALSFKKKIKKAQIIGDKDNNKQVVKSLPGSPAIKKGILQSIKIVDELVKVMGREPESIVVEMARENQYTNQGKSNSQQRLKRLEESLKGLGSKILKENVPTRLSKIDNNALQNDRLYLYYLQNGKDMYTGEELDIDRLSNYDIDHIIPQAFLKDNSIDNKVLVSSASNRGKSDDVPSLEVVKKRKTLWYQLLKSKLISQRKFDNLTKAERGGLSPEDKAGFIQRQLVETRQITKHVARLLDEKFNNKKDENNRAVRTVKIITLKSSLVSQFRKDFELYKVREINDFHHAHDAYLNAVVASALLKKYPKLEPEFVYGDYPKYNSFRERKSATEKVYFYSNIMNIFKKSISLADGTVIERPLIEVNVETGESVWNKESDLATVRRVLSYPQVNVVKKVEVQSGGFSKELVQPHGNSDKLIPRKTKKMIWDTKKYGGFDSPIVAYSVLVMAEREKGKSKKLKPVKELVGITIMEKESFENNTIDFLERRGFRNIQDENIILLPKFSLFELENGRRRLLASAKELQKGNEFILPNKLVKLLYHAKNIHNTLEPEHLEYVESHRADFGKILDVVSVFSEKYILAEAKLEKIKEIYRKNIDTEIQEMAIAFINLLTFTSIGAPATFKFFGHNIERKRYSSVAEILNATLIHQSVTGLYETRIDLGKLGED

SEQ ID NO: 21615 - protein, 1338 aa, unidentified
  REGION 1..1338: note = Cas Enzyme sequence
MGKSSPSSYSIGLDIGVKGVGWDVIGADGLHIKLKGRPAWGVRLFDEGNHAADRRVKRSGRRRYVRRRHRLNMLQELLGSDMQEVDPLFFRKMKESALWDEDRQIPNGLEVLLRDIVVDGEPYHKKFPTIYHLREYLMETDKKVDFRLVYLALHHTMKYRGNFLYEGQPLSAKGNLEEEIREAINTYLRFIDPNSEKGCTEGVIRSITAAVADTALGRMDTRNTIRDLLVKEGCDRTLATEFGKALAGSKIDAVKLFMLEGVEKIEIALSSENLEDDIALVPNEEAQIILELLGRAYSASVLDEILGGCDSISKSMIKRYSEHAKQLRSFKQLVRDYAPERYSEMFRKEGGGLKNYSNYIIGENSTRKDFERKAYACSRDDFLAAAKKLLESMPEDVHVDARHQELLQAINSGTFLSKLRTRKNGAIPYQLHSQEMSRIIELQSAHYPTLKAGYAGGTHRLIQILEFRIPYFVGPLSYNPNASESDRFDWLTRRIQGEKITPWNFDEVINREQTAEDFITRMTGTCTYLLGEDVLPKHSVLYQDFELLNELNKISIDGKPIAIDVKKKAFDELFMRQKRVSHKAFADWLIRENHHPRDTAVKIAGTQKESEFACSRSTLIDMQKIFNGKAEENIGRCEDIILWSTLFNEESMVEAKIRREYPEVTDVQFKAIKKLRYKGWGRLSQKLLSGLKVQDRSDAKVSIISLMRDTRMNFMEIVNAKEYDFAKLIEQNNEESLVANLNFSPKLLDDIVASSAVKRGIWQALLIVKELTQVMGAPPENIFIEMARGDEAKHRTVSRYARLKNLLKALDEDLEYSAILKEFNAKSKNQKAFDNRSLYLYFMQLGKCLYCGKGLDVERLNIYQVDHIIPRSLTKDDSFENLALVHQECNQTKGDSLTINADVRHKMGAFWRMLEGKRLMGSKKYCNLTRCEFKERDIERFVARQLVETRQINRRVVEILHVLYPESEIHGIKAGVVSDLRKRLALPKIRELNDTHHAMDAHLTALMGLFIQKCYPGWRSESSYGEYMKFARTERKSRFGMFVSQFPKTHADTTTGEILWDGEVLERTLRNLMEEKRYFITKRSSAKSGAFYDETVYASPQNDATARKLIPKGKGLETSKYGGYSGERESYSVLIEYQRTTKNRSMRLVSIPVRIAMLGKSAVGDFLQQNYSDCRIVRDNIKAGHQIYCNGNPLYISSANEAHNARQIFLSYEEQKQLREVLIEENPAGELDKEALELCKAIAGIIEGCYPIYKNIGTRILSDLETFENLEPEEKQEFLLELLRVTAASPGNGNFSKYKVGGLKGRVGRLSRFTFGGFQDMEFLDLSITGIYEGRFRV

SEQ ID NO: 21616 - protein, 1352 aa, unidentified
  REGION 1..1352: note = Cas Enzyme sequence
MKEVYNIGLDIGTSSVGYAMTDEKGRLLRFHKRPTYGSVLFEEAQTAKERRQKRSARRRLARRRKRIKLLQALVAPDVCAADPAFFLRMNESFLWAEDSKYEKFYAKLPKALFVDGTVSVETLPTIYHIRNELVKSTKQADIRYVYLAMHHIIKYRGHFLMEGQTLSDIGAEAPQKMQELLELLTDPESFVCGLAPAENAAKEICHTMENHSLRGMARKEQIQKLLYAGKKKESKEAAQALASLLLGYKGSLKALIGYESQTDAPEKTSLGAIEGETEETYLAGMTEAQAEVFALMLELYRWQLFAEIRQNGQTISDTMVARYEKHGRDLEKLKAWVKAYQPDKFYALFRDDENAKGYAAYTDHLRKPKKFKKEKLQRCTQDEFYKVLKAMLTGNKDAEAAAAAQPMLEAIDEPNGFLPLQRINLNGQIPNQIQAEELVKILDAQGKYYPTLRENREKILSICTFRLPYYVGPLYQDKNSPFQKWIVRDKTQPAYPWNFFDVVNQTKTAEGFIANLTNKCTYLPIEDVLPLHSLLYEEYLMLNELNRVRVKGNLIRDVQLKKRMMDELFAKNKSVSYKVFAKWLRQNSPYTDVTENDISGTQEPNKFTASLRTRYDLEKHGFTVNDQTTEQLETLVRWSTIFEDRSILKKLIQEKYPDVTDTQLSFLVQRRYTGWGRLSEKLLTDVLGEYENQPATIMEVLRATNENFMQVLNNPQYHFQEKIAKERLMELGEPKEKIEYDEIRKLQVSPALKRGIWTAVRIVKELIEHQGCHPHAIYLENTREETPDEKKQRTQSRLNQVEQMYKELAEDKTAEKVPSECWEVLKNCKDKKKLDDQQYLYLLQLGKSLYSGKPLDFDQLSATTEIDHILPRCYIVDNSIENRALVLKGENQRKADNLLLADSIRDSQRPWWNYLRQKGFMGEKKFKNLTRSMVSADDKQKFVARQLVETGQMVQCVTELFKRYYPDVHVSGIKAGLSSELREQYGLYKIRELNDMHHAYDAFLAATMGNFVERFVPWLDSESSAAIRVRKAQKANKGDDNKVDLSSKHGMILAKFSQDQEDPDTGEIIHNAQQEICYLKAVWGYHDGHVVFLKRQKSGAIYDESRYRAGSVKAKLCLKKDLDTMKYGGYNKEYPAYIAAISYQKGKKRVGELVNVPIYLAEAIEQNPKVLVDYLEKDYPGVQIIRPTILMNQRIEYEGSELLLRSCSEMYNARELFIPTYLHHTLWKLYKAPKQLQPDDEEHLNTLISLLIEKMEKQYPIFNGVAKRMSVIDFDTLCFQEKCIFIVETMKVMAVNGQYAMYKTALSRKELSDNQGRITNKVLNLSHITLIDQSITGLREKRTKLWPDSEPS

SEQ ID NO: 21617 - protein, 1352 aa, unidentified
  REGION 1..1352: note = Cas Enzyme sequence
MKEVYNIGLDIGTSSVGYAMTDEKGRLLRFHKRPTYGSVLFEEAQTAKERRQKRSARRRLARRRKRIKLLQALVAPDVCAADPAFFLRMNESFLWAEDSKYEKFYAKLPKALFVDGTVSVETLPTIYHIRNELVKSTKQADIRYVYLAMHHIIKYRGHFLMEGQTLSDIGAEAPQKMQELLELLTDPESFVCGLAPAENAAKEICHTMENHSLRGMARKEQIQKLLYAGKKKESKEAAQALASLLLGYKGSLKALIGYESQTDAPEKTSLGAIEGETEETYLAGMTEAQAEVFALMLELYRWQLFAEIRQNGQTISDTMVARYEKHGRDLEKLKAWVKAYQPDKFYALFRDDENAKGYAAYTDHLRKPKKFKKEKLQRCTQDEFYKVLKAMLTGNKDAEAAAAAQPMLEAIDEPNGFLPLQRINLNGQIPNQIQAEELVKILDAQGKYYPTLRENREKILSICTFRLPYYVGPLYQDKNSPFQKWIVRDMTQPAYPWNFFDVVNQTKTAEGFIANLTNKCTYLPIEDVLPLHSLLYEEYLMLNELNRVRVKGNLIRDVQLKQRMLDELFAKNKSVSYKTFAKWLQLNSPYVDVTENDISGTQEPGKFTASLRTRYDLEKHGFTVNDQTAEQLETLVRWSTIFEDRSILKKLIQEKYPDITDTQLNFLVQRRYTGWGRLSEKLLTGVLGEYENQPATIMDVLRATNENFMQVLNNPQYHFQEKIAKERLMELGEPKEEIEYDEIRKLQVSPALKRGIWTAVRIVKELIEHQGCHPHAIYLENTREETPDEKKQRTQSRLNQVEQMYKELAEDKTAEKVPSECWEVLKNCKDKKKLDDQQYLYLLQLGKSLYSGKPLDFDQLSATTEIDHILPRCYIVDNSIENRALVLSGENQRKADNLLLANSIRDSQRPWWNYLRQKGFMGEKKFKNLTRSVVSDEDKQGFIARQLVETGQMVQCVTELFKRYYPDVHVSGIKAGLSSELREQYGLYKIRELNDMHHAYDAFLAATMGNFVERFMPWLDSESSAAIRFRKAQEANKGDDNKVDLSSKHGMILAKFSQDQEDPDTGEIIHNAQQGICYLKAVWGYHDGHVVFLKRQKSGAIYDESRYRAGSVKAKLCLKKDLDTMKYGGYNKEYPAYIAAISYQKGKKRVGELVNVPIYLAEAIEQNPKVLVDYLEKDYPGVQIIRPKILMNQRIEYEGSELLLRSCSEMYNARELFIPTYLHHTLWKLYKAPKQLQPDDEKHLNTLISLLIEKMEKQYPIFNGVAKRMSVIDFDTLCFQEKCIFIVETMKVMAVNGQYAMYKTALSRKELSDNQGRITNKVLNLSHITLIDQSITGLREKRTKLWPDSEPS

SEQ ID NO: 21618 - protein, 1361 aa, unidentified
  REGION 1..1361: note = Cas Enzyme sequence
MKEVYNIGLDIGTSSVGYAMTDEKGRLLRFHKRPTYGSVLFEEAQTAKERRQKRSARRRLARRHKRIKLLQALVAPDVCVADPEFFLRMNESFLWAEDSKYEKLYAKLPKALFVDGTVSVETLPTIYHIRNELVKSTKQADIRYVYLAMHHIIKYRGHFLMEGQTLSDIGAEAPQKMHELLELLTDPESFACGLAPAENAAKEICHAMENHALRGMARKEQIQKLLYAGKKKESKEAAQSLASLLLGYKGSLKALIGYENQTDAPEKTSLGAIEGETEETYLAGMTEAQAEVFTRILELYRWQLFAEIRQNGQTISDTMVARYEKHGHDLEKLKAWVKAYQPDKFYALFRDDENAKGYAAYTDHLRKPKKFKKEKLQRCTQDEFYKVLKAMLTGNKDAEAAAAAQPMLEAIDEPNGFLPLQRINLNGQIPNQIQAEELVKILDAQGKYYPTLRENREKILSICTFRLPYYVGPLYQDKNSPFQKWIVRDMTQPAYPWNFFDVVNQTATAEGFIANLTNKCTYLPIEDVLPLHSLLYEEYLMLNELNRVRVKGNLIRDVQLKKRMMDELFAKNKSVSYKVFAKWLRQNSPYTDVTENDISGTQEPNKFTASLRTRYDLEKHGFTVNGQTTEQLETLVRWSTIFEDRSILKKLIQEKYPDVTDTQLSFLVQRRYTGWGRLSGKLLNGVLGEYENQPATIMDVLRATNENFMQVLNNPQYHFQEKIAKERLMELGEPKEEIEYDEIRKLQVSPALKRGIWTAVRIVKELIAHQGCHPHAIYLENTREETPDEKKQRTQSRLNQVEQMYKELAEDKTAEKVPSECWEVLKNCKDKKKLDDQQYLYLLQLGKSLYSGKPLDFDQLSATTEIDHILPRCYIVDNSIENRALVLKGENQRKADNLLLADSIRDSQRPWWNYLRQKGFMGEKKFKNLTRSMVSADDKQKFVARQLVETGQMVQCVTELFKRYYPDVHVSGIKAGLSSELREQYGLYKIRELNDMHHAYDAFLAATMGNFVERFIPWLDNESSAAIRFRKAQGAKKDDDKVDLSSKHGMILARFSRDQVDADTREIIRNAQQEICYLKAVWGYHDGHVVFLKRQKSGKITEDSRYRAGNKSAKMPLKKGLPCQRYGGFDSINPAFMTAIQYTQGKKVYHRVVGIPVYANVPVEKADELIRAFAADKIPGVTVVRPRLLMNQMLEWDGGIFVLRGGQTIDILTSKKNAARVTITNGKQLFVSGKDMTTIALLFRGKKDDLNPEQLKETVLHLLEKFKTQYAVFYQKCKADDINRILKNLETPEQLTDADWTAMVSELLNAMGKQRKVSKEWITCEDWRIRGIPTKDVDLIDQSITGLREKRTKLWPDSEPS

SEQ ID NO: 21619 - protein, 1365 aa, unidentified
  REGION 1..1365: note = Cas Enzyme sequence
MKEVYNIGLDIGTSSVGYAMTDEKGRLLRFHKRPTYGSVLFEEAQTAKERRQKRSARRRLARRRKRIKLLQALVAPDVCAADPEFFLRMNESFLWSEDSKYEKLYAKLPKALFVDGTVSVETLPTIYHIRNELVKSTKQADIRYVYLAMHHIIKYRGHFLMEGQTLSDIGAEAPQKMQDLLELLTDPENFPCGFVPAENAAKEICHTMENHSLRGMARKEQIQKLLYAGKKKGSKETAQALASLLLGYKGSLKALIGYESQTDAPEKTSLGVIEGEKEETYLAGMTEAQAEVFTRILELYRWQLFAEIRQNGQTISDMMVARYEKHKADLKRLKKWIRTYRKDEYVTLFRDDNDPSGYAAYTHHLTSPARFQQEKFTRCRQEGAKIKSIPEGFYNKCRRILESKKIDLPENARAEANEMLEEMKADNVFLPLQRINLNGQIPNQIQAEELAKILDAQGKYYPTLRENREKILSICTFRLPYYVGPLYQDKNSPFQKWIVRDMTQPAYPWNFFDVVNQTATAEGFIANLTNKCTYLPIEDVLPLHSLLYEEYLMLNELNRVRVKGNLIRDVQLKQRMLDELFAKNKSVSYKTFARWLQLNSPYVDVTENDISGTQEPGKFTASLRTRYDLEKHGFTVNGQTTEQLETLVRWSTIFEDRSILKKLIQEQYPEVTDNQLRFLVQRRYTGWGRLSEKLLTGVLGEYENQPATIMDVLRATNENFMQVLNNPQYHFQEKIAKERLMELGEPKEEIEYDEIRKLQVSPALKRGIWTAVRIVKELIEHQGCHPHAIYLENTREETPDEKKQRTQSRLNQVEQMYKELAEDKTAEKVPSECWNVLKNCKDKKKLDDQQYLYLLQLGKSLYSGKPLDFDQLSATTQIDHILPQCYIVDNSIENRALVLSGENQRKADNLLLADSIRNSQRPWWNYLRQKGFMGEKKFKNLTRSVVSDEDKQRFIARQLVETGQMVQCVTELFKRYYPDVHVSGIKAGLSSELREQYGLYKIRELNDMHHAYDAFLAATMGNFVERFVPWLDSESSAAIRVRKAQKANKGDDNKVDLSSKHGMILAKFSRDQVDPDTGEIIHNAQQEICYLKAVWGYHDGHVVFLKRQKSGAIYDESRYRAGSVKAKLCLKKDLDTMKYGGYNKEYPAYIAAISYQKGKKRVGELVNVPIYLAEAIEQNPKVLVDYLEKDYPGVQIIRPKILIRQKIEYEGNELTLGSCTETYNAKELFLPTFLHPILAKIYNASCVLTDADENQLNTLIDVLLEKLSSQYPIYSGALKALEAKKSEILSLSIADKGRFIAETMKIASAGKEYAKYSTSLPKLGIADKGRLNNKLPHPEKIILIDQSITGLREKRTKLWPDSEPS

SEQ ID NO: 21620 - protein, 1353 aa, unidentified
  REGION 1..1353: note = Cas Enzyme sequence
MKEVYNIGLDIGTSSVGYAMTDEKGRLLRFHKRPTYGSVLFEEAQTAKERRQKRSARRRLARRRKRIKLLQALVAPDVCAADPAFFLRMNESFLWAEDSKYEKFYAKLPKALFVDGTVSVETLPTIYHIRNELVKSTKQADIRYVYLAMHHIIKYRGHFLMEGQTLSDIGAEAPQKMQELLELLTDPGNFPCGFVPAENAAKEICHTMENHSLRGMARKEQIQKLLYAGKEKGSKETAQALASLLLGYKGSLKALIGYESQTDAPEKTSLGAIEGETEETYLAGMTEAQAEVFALMLELYRWQLFAEIRQNGQTISDTMVARYEKHGRDLEKLKAWVKAYQPDKFYALFRDDENAKGYAAYTDHLRKPKKFKKEKLQRCTQDEFYKVLKAMLTGNKDAEAAAAAQPMLEAIDEPNGFLPLQRINLNGQIPNQIQAEELAKILDAQGKYYPTLRENREKILSICTFRLPYYVGPLYQDKNSPFQKWIVRDMTQPAYPWNFFDVVNQTETAEGFIANLTNKCTYLPIEDVLPLHSLLYEEYLMLNELNRVRVKGNLIRDVQLKKRMMDELFAKNKSVSYKVFAKWLRQNSPYTDVTENDISGTQESGKFTASLRTRYDLEKHGFTVNDQTMEQLETLVRWSTIFEDRSILKKLIQEQYPEVTDNQLRFLVQRRYTGWGRLSEKLLTGVLGEYENQPATIMDVLRATNENFMQVLNNPQYHFQEKIAKERLMELGEPKEEIEYDEIRKLQVSPALKRGIWTAVRIVKELIEHQGCHPHAIYLENTREETPDEKKQRTQSRLNQVEQMYKELAEDKTAEKVPSECWEVLKNCKDKKKLDDQQYLYLLQLGKSLYSGKPLDFDQLSATTEIDHILPRCYIVDNSFENRALVLKGENQRKADNLLLADSIRDLQRPWWNYLRQKGLMGEKKFKNLTRSMVSADDKQKFVARQLVETGQMVQCVTELFKRYYPDVHVSGIKAGLSSELREQYGLYKIRELNDMHHAYDAFLAATMGNFVERFMPWLDSESSAAIRFRKAQEARKDDDDNKVDLSSKHGMILAKFSRDQVDADTREIIRNAQQDICYLKAVWGYHDGHVVFLKRQKSGKITEASRYRAGHASAKLPLKKGMSCQRYGGFDSIKPAYIAAISYQKGKQRAGALVNVPIYLAEAIEKNPNALLGYLEKDYPGVQIIRPKILMNQRIEYEGSELLLRSCSEMYNARELFIPTYLHHTLWKLYKAPKQLQPDDEEHLNTLISLLIEKMEKQYPIFNGVAKRMSVIDFDTLCFQEKCIFIVETMKVMAVNGQYAMYKTALSRKELSDNQGRITNKVLNLSHITLIDQSITGLREKRTKLWPDSEPS

SEQ ID NO: 21621 - protein, 1353 aa, unidentified
  REGION 1..1353: note = Cas Enzyme sequence
MKEVYNIGLDIGTSSVGYAMTDEKGRLLRFHKRPTYGSVLFEEAQTAKERRQKRSARRRLARRRKRIKLLQALVAPDVCAADPEFFLRMNESFLWSEDSKYEKLYAKLPKALFVDGTVSVETLPTIYHIRNELVKSTKQADIRYVYLAMHHIIKYRGHFLMEGQTLSDIGAEAPQKMQDLLELLTDPENFPCGFVPAENAAKEICHTMENHSLRGMARKEQIQKLLYAGKKKGSKETAQALASLLLGYKGSLKALIGYESQTDAPEKTSLGAIEGETEETYLAGMTEAQAEVFTRILELYRWQLFAEIRQNGQTISDTMVARYEKHGRDLEKLKAWVKAYQPDKFYALFRDDENAKGYAAYTDHLRKPKKFKKEKLQRCTQDEFYKVLKAMLTGNKDAEAAAAAQPMLEAIDEPNGFLPLQRINLNGQIPNQIQAEELAKILDAQGKYYPTLRENREKILSICTFRLPYYVGPLYQDKNSPFQKWIVRDKTQPAYPWNFFDVVNQTATAEGFIANLTNKCTYLPIEDVLPLHSLLYEEYLMLNELNRVRVKSNLIRDVQLKQRMLDELFAKNKSVSYKTFAKWLQLNSPYVDVTENDISGTQEPNKFTASLRTRYDLEKHGFTVNDQTMKQLETLVRWSTIFEDRSILKKLIQEQYPEVTDNQLRFLVQRRYTGWGRLSEKLLTGVLGEYENQPATIMDVLRATNENFMQVLNNPQYHFQEKIAKERLMELGEPKEEIEYDEIRKLQVSPALKRGIWTAVRIVKELIEHQGCHPHAIYLENTREETPDEKKQRTQSRLNQVEQMYKELAEDKTAEKVPSECWNVLKNCKDKKKLDDQQYLYLLQLGKSLYSGKPLDFDQLSATTQIDHILPQCYIVDNSIENRALVLSGENQRKADNLLLADSIRNSQRPWWNYLRQKGFMGEKKFKNLTRSVVSDEDKQRFIARQLVETGQMVQCVTELFKRYYPDVHVSGIKAGLSSELREQYGLYKIRELNDMHHAYDAFLAATMGNFVERFMPWLDSESSAAIRFRKAQEARKDDDDNKVDLSSKHGMILAKFSRDQVDADTREIIRNAQQEICYLKAVWGYHDGHVVFLKRQKSGKITEASRYRAGHASAKLPLKKGMSCQRYGGFDSIKPAYIAAISYQKGKQRAGALVNVPIYLAEAIEQNPKVLVDYLEKDYPGVQIIRPKILMNQRIEYEGSELLLRSCSEMYNARELFIPTYLHHTLWKLYKAPKQLQQDDEEHLNTLISLLIEKMEKQYPIFNGVAKRMSVIDFDTLCFQEKCIFIVETMKVMAVNGQYAMYKTALSRKELSDNQGRITNKVLNLSHITLIDQSITGLREKRTKLWPDFEPS

SEQ ID NO: 21622 - protein, 1352 aa, unidentified
  REGION 1..1352: note = Cas Enzyme sequence
MKEVYNIGLDIGTSSVGYAMTDEKGRLLRFHKRPTYGSVLFEEAQTAKERRQKRSARRRLARRRKRIKLLQALVAPDVCAADPAFFLRMNESFLWAEDSKYEKFYAKLPKALFVDGTVSVETLPTIYHIRKELVKSTKQADIRYVYLAMHHIIKYRGHFLMEGQTLSDIGAEAPQKMQDLLELLTDPENFPCEFVPAENAAKEICHTMENHSLRGMARKEQIQKLLYAGKKKGSKETAQALASLLLGYKGSLKALIGYESQTDAPEKTSLGAIEGETEETYLAGMTEAQAEVFTRILELYRWQLFAEIRQNGQTISDMMVARYEKHGRDLEKLKAWVKAYQPDKFYALFRDDENAKGYAAYTDHLRKPKKFKKEKLQRCTQDEFYKVLKAMLTGNKDAEAAAAAQPMLEAIDDPNGFLPLQRINLNGQIPNQIQAEELAKILDAQGKYYPTLRENREKILSICTFRLPYYVGPLYQDKNSPFQKWIVRDKTQPAYPWNFFDVVNQTATAEGFIANLTNKCTYLPIEDVLPLHSLLYEEYLMLNELNRVRVKSNLIRDVQLKQRMLDELFAKNKSVSYKTFAKWLQLNSPYVDVTENDISGTQEPNKFTASLRTRYDLKKHGFTVNDQTMKQLETLVRWSTIFEDRSILKKLIQEQYPEVTDNQLRFLVQRRYTGWGRLSEKLLTGVLGEYENQPATIMDVLRATNENFMQVLNNPQYHFQEKIAKERLMELGEPKEEIEYDEIRKLQVSPALKRGIWTAVRIVKELIEHQGCHPHAIYLENTREETPDEKKQRTQSRLNQVEQMYKELAEDKTAEKVPSECWEVLKNCRDKKKLDDQQYLYLLQLGKSLYSGKPLDFDQLSATTQIDHILPQCYIVDNSIENRALVLSGENQRKADNLLLADSIRDSQRPWWNYLRQKGFMGEKKFKNLTRSVVSEEDKQKFIARQLVETGQMVQCVTELFKRYYPDVHVRGIKAGLSSELREQYGLYKIRELNDMHHAYDAFLAATMGNFVERFVPWLDSESSAAIRVRKAQKANKGDDNKVDLSSKHGMILAKFSRDQVDPDTGEIIHNAQQEICYLKAVWGYHDGHVVFLKRQKSGAIYDESRYRAGSVKAKLCLKKDLDTMKYGGYNKEYPAYIAAISYQKGKKRVGELVNVPIYLAEAIEQNPKVLVDYLEKDYPGVQIIRPKILMNQRIEYEGSELLLRSCSEMYNARELFIPTYLHHTLWKLYKAPKQLQPDDEEHLNTLISLLIEKMEKQYPIFNGVAKRMSVIDFDTLRFQEKCIFIVETMKVMAVNGQYAMYKTALSRKELSDNQGRITNKVLNLSHITLIDQSITGLREKRTKLWPDSEPS

SEQ ID NO: 21623 - protein, 1198 aa, unidentified
  REGION 1..1198: note = Cas Enzyme sequence
MTKPYSIGLDIGTNSVGWAVITDDYNVPSKKMKVLGNTSKKYIKKNLLGALLFDSGITAEGRRLKRTARRRYTRRRNRILYLQEIFSTEMATLDDAFFQRLDDSFLVPDDKRDSKYPIFGNLVEEKAYHDEFPTIYHLRKYLADSTKKADLRLVYLALAHMIKYRGHFLIEGEFNSKNNDIQKNFQDFLDTYNAIFESDLSLENSKQLEEIVKDKISKSAKKDRILKLFPGEKNSGIFSEFLKLIVGNQADFKKYFNLDEKAPLHFSKESYDEDLETLLGYIGDDYSDVFLKAKKLYDAILLSGILTVTDNGTEAPLSSAMIMRYKEHEEDLALLKAYVRNISLETYNEVFKDDTKNGYAGYIDGKTNQEDFYVYIKKLLAGLEGVDYFLEKIDREDFLRKQRTFDNGSIPYQIHLQEMRAILDKQAKFYPFLAKNKERIEKILTFRIPYYVGPLARGNSDFAWSIRKRNEKITPWNFEDVIDKESSAEAFINRMTSFDLYLPEEKVLPKHSLLYETFTVYNELTKVRFIAESMRDYQFLDSKQKKDIVRLYFKNKRKVTDKDIIEYLHAIDGYDGIELKGIEKQFNSSLSTYHDLLNIINDKKFLDDSSNETIIEEIIHTLTIFEDREMIKQRLSKFDNIFDKSVLKKLSRRHYTGWGKLSAKLINGIRDEKSGNIILDYLIDDGVSNRNFMQLIHDDALSFKKKIKKAQIIGDKDNIKQVVKSLPGSPAIKKGILQSIKIVDELVKVMGREPESIVVEMARENQYTNQGKSNSQQRLKRLEESLKGLGSKILKENVPTRLSKIDNNALQNDRLYLYYLQNGKDMYTGEELDIDRLSNYDIDHIIPQAFLKDDSIDNKVLVSSASNRGKSDDVPSLEVVKKRKTLWYQLLKSKLISQRKFDNLTKAERGGLSQEEKAGFIQRQLVETRQITKHVARLLDEKFNNKKDENNRAVRTVKIITLKSSLVSQFRKDFELYKVREINDFHHAHDAYLNAVVASALLKKYPKLEPEFVYGDYPKYNSFRERKSATEKVYFYSNIMNIFKKSISLADGTVIERPLIEVNEETGESVWNKVADLSTVRKVLSYSQVNVVKKVEEQNHGLDRGKPKGLFNANLSSKPKQNSKENLVGAKEYLDPKKYGGYAGISNSFAILVKGTIEKGAKKKITNVLEFQGISILDRIYYRKDKLNFLLEKGYKDI

SEQ ID NO: 21624 - protein, 1338 aa, unidentified
  REGION 1..1338: note = Cas Enzyme sequence
MLRGEDLSMEKEYTIGLDIGTNSVGWAVLTDDYRLVARKMSIQGDSNRKKIKKNFWGARLFEEGKTAQFRRIKRTNRRRIARRRQRVLALQDIFAEEIHKKDPNFFARLEEGDRVEADKRFAKFPVFATLSEEKNYHRQYPTIYHLRHDLANSKEQADIRLVYLAIAHCLKYRGHFLFEGELDTENTSVTENYQQFLQAYQQFFPEPIGDLDDAVPILTERLSKAKRVEKVLAYYPSEKSTGNFAQFLKLMVGNQANFKKTFDLEEEMKLNFTRDCYEEDLNELLEKTSDDYAELFLKAKGVYDAILLSQILSKSDDETKAKLSANMKLRFEEHQRDLKQLKELVRRDLPKKYDDFFKNRSKNGYAGYVKGKATQEDFYKFLRTELAGLEESQSIMEKIDLEIYLLKQRTFANGVIPHQIHLVEMREIMDRQKRFYPFLKGAQGKIEKLLTFRIPYYVGPLAQEGQSPFAWIKRKSPSQITPWNFAEVVDKENSAIEFIERMTNQDTYLPKEKVLPKQSLIYQRFMIFNELTKVSYTDERGKSHYFSSEQKRKIFNELFKQHPRVTEKQLRKFLELNEQIDSTEIKGIETSFNASYSTYHDLLKLSDQMDTLLDDPDMTTMFEEIIKILTIFEDREMIREQLKPYETVLGLPAIKKLAKKHYTGWGRLSEKMIQGMREKQSRKTILDYLIDDDDFPCNRNRNFMQLINDDHLSFKETIANELIMSDSNVLLDQVKAIPGSPAVKKGIWQSIKIVEEIIGIIGKAPKNIVIEMARENQRTSRSRPRLKALEEALKNIDSPLLKDYPTDNQALQKDRLYLYYLQNGKDMYTGEPLEIHRLSEYDIDHIIPRSFIVDNSLDNKVLVSSKVNRGKLDNAPDPLVVKRMRSHWEKLHQAKLISDKKLANLTKQNLTEADKARFIQRQLVETRQITKHVANLLHQHFNLPEEVSATEKTSIITLKSTLTSQFRQMFDIYKVREINHHHHAHDAYLNGVVAMTLLKKYPKLAPEFVYGSYIKGDINQINKATAKKEFYSNIMKFFESEEIICDEQGEVIWNKKRDLSTIKKTIGAHQVNIVKKVEKQKGGFYKETINSKANPEKLIPRKASLDPLKYGGYGSPLVAYTVIFIFEKGKQKKVTKGIEGITVMEQLRFEQDPREFLKTKGYEGVKQWLILPKYILFEAQGGYRRMIASHQETQKANSLILPENLVTLLYHARHYDEINHKVSFDYVNAHKEGFNDIFDFISDFGVRYILAPQHLEKIKVAYEKNKEVDLKEMIDAILSLLKFTLFGASVEFKFFDIKILKRYKSLTDIWEATIIYQSVTGLYERRVEIRKLWDGERL

SEQ ID NO: 21625 - protein, 1500 aa, unidentified
  REGION 1..1500: note = Cas Enzyme sequence
VKIERSTFMTETLDTKQEKKGKKGGLTIGLDIGTASVGWAVIDNQFNLVQGKKRIIDIDEDGVRKTRKSRTNLWGARTFDEGQTAEDRRLQRGTRRRLARRNERLKLLRGMFAAEINKFDESFFIRLAESFYQNEDEENKHVITDYPLFHGTLGSGETFANDKAYHKKYPTIYHLRKDLIYNPAQKDLRLVYLALHHILKYRGHFVNDGQTFDLEHGSIDIKKSFTDLYRAFNVYVNEPMTDSGEKLTRTLNRAQEEAVQTILADRKKSKSLKAYELAEALITSDNKLQKQQKALYMAIVGNGIDLAKIFANENYSNKVDEAIFPKAADFKYSNDKYDEHIANISAVLNEEEMAIIEYGKQVHESIILSQILTQPTLAASMVEKYELHKQQLGDLKTLTKSIDHALYEQVFKVGGVYTKYVDGVGNPSKKLTQEDFYNALKKLLEGAIPQLVFPKKEATTFNFDGVILNEQQKETLIAIDEAMQLERYLPKQRTNANGAIPYQIHEYELVKIIENQKVYYPFLGDALQITREDDAAGTVKKKEYKIQILMKFRIPYYVGPLAQSVGWVRDDDGELIETKGHSSNSWVVRNSTEKLTPWNFDEVINKEASAENFIARMTGFCTYLPTEKVLPKNSLLYQEFTIYNELMSCGYYHNSKKVYFSPELKADIVTKLFQQQKKVSAKDMVKFLINEHQIQLTDEKSLFGIDKHVKSPSYNTSFSTYIDLVRCGISVTQIAENREKFEQIITWQTVLEDKAMLKKRIKQTNADVWHNFLTPVQINKLANKHYTGWGRLSKKILDGIKTSDADGLTIINHLKNRPYSNFMRLLEDPKIAETIAKAQGDLGKQQTFNYELVEKLAGSPKIKKSIWQTLQIITELERYLGVENIDRIVIEMARENTGRRTKTRQQQIEKFQKEFFTNTGKKLDEQIKTAFVNETKEAFNDEKCYLYFLQNGKCMYSGQKLSLESLSTYEVDHIIPQTYIKDDSIDNKVLVLKAENQNKGGDVPSQTIVNRMRPYWELLAKNHQVSKKKLANLTRGKLSDETKAGFINRQLVETRQITKHIAHILSEYFKDKQVDILTPKAQLVSQFREGIVYLPAGEQSDVTTRTTNVEVLPAESDKFVKVRLHDKWHKNRELNDYHHAHDAYLVAIVGTYLYAVRPDLRGIWVYNTYKKDEYAMMGRYVGARKEAYRQLLSGMVAPQWSNIDLNTGEVSPCYPDVDNWSRDDVLQKITQTLQLRNINIVKKTEMQDGKFGDVSLFKSPHNIKDKKKAQQNNFAHGLKCRLDPIRYGGTKGAISAFAVLIKNKKGSITSVSVPAMQAHAYLKEKNKLSFLQQHVDENIIAIVRAQVTKYTKYVLPEGSMRLMASFQEASNGRQLPMMAVPANIKEDTITEAQGHHLLQTYETLVQFIRQNKLFVEAKLSLLNHDGVITENFKKSAPEQQQKILAELFRVVKGSNQNLKALQVAGLGTTAQQLNGAKDRMCAQTQIIDQSVTGLYETRRK

SEQ ID NO: 21626 - protein, 1364 aa, unidentified
  REGION 1..1364: note = Cas Enzyme sequence
MKEVYNIGLDIGTSSVGYAMTDEKGRLLRFHKRPTYGSVLFEEAQTAKERRQKRSARRRLARRRKRIKLLQALVAPDVCAADPAFFLRMNESFLWAEDSKYEKFYAKLPKALFVDGTVSVETLPTIYHIRNELVKSTKQADIRYVYLAMHHIIKYRGHFLMEGQTLSDIGAEAPQKMQELLELLTDPESFVCGLAPAENAAKEVCHTMENHSLRGMARKEQIQKLLYAGKKKESKEAAQALASLLLGYKGSLKALIGYESQTDAPEKTSLGAIEGETEETYLAGMTEAQAEVFTRILELYRWQLFAEIRQNGQTISDMMVARYEKHKADLKRLKKWIRTYRKDEYVTLFRDDNDPSGYAAYTHHLTSPARFQQEKFTRCRQEGAKIKSIPEGFYNKCRRILESKKIDLPENARAEANEMLEEMKADNVFLPLQRINLNGQIPNQIQAEELAKILDAQGKYYPTLRENREKILSICTFRLPYYVGPLYQDKNSPFQKWIVRDMTQPAYPWNFFDVVNQTATAEGFIANLTNKCTYLPIEDVLPLHSLLYEEYLMLNELNRVRVKGNLIRDVQLKKRMMDELFAKNKSVSYKVFAKWLRQNSPYTDVTENDISGTQEPGKFTASLRTRYDLEKHGFTVNDQTTEQLETLVRWSTIFEDRSILKKLIQEKYPDITDTQLNFLVQRRYTGWGRLSEKLLTGVLGEYENQPATIMDVLRATNENFMQVLNNPQYHFQEKIAKERLMELGEPKEEIEYDEIRKLQVSPALKRGIWTAVRIVKELIEHQGCHPHAIYLENTREETPDEKKQRTQSRLNQVEQMYKELAEDKTAEKVPSECWEVLKNCRDKKKLDDQQYLYLLQLGKSLYSGKPLDFDQLSTTTEIDHILPRCYIVDNSIENRALVLKGENQRKGDSLLLEDSIRDSQRPWWNYLRQKGLMGEKKFKNLTRSVVSEEDKQKFIARQLVETGQMVQCVTELFKRYYPDVHVSGIKAGLSSELREQYGLYKIRELNDMHHAYDAFLAATMGNFVERFMPWLDNESSAAIRFRKAQGAKKDDDKVDLSSKHGMILARFSRDQVDADTGEIIRNAQQDICYLKAVWGYHDGHVVFLKRQKSGKITEASRYRAGHASAKLPLKKGMSCQRYGGFDSIKPAYIAAISYQKGKQRAGALVNVPIYLAEAIEKNPKVLVDYLEKDYPGVQIIRSKILIRQKIEYEGNELTLGSCTETYNAKELFLPTFLHPILAKIYNASCALTDADENQLNTLIDVLLEKLSSQYPIYSGALKALEAKKSEILSLSIADKGKFIAETMKITSAGKEYAKYSTSLPKLGIADKGRLNNKLPHPEKIILIDQSITGLREKRTKLWPDSEPS

SEQ ID NO: 21627 - protein, 921 aa, unidentified
  REGION 1..921: note = Cas Enzyme sequence
MPKQRTSDNSIIPYNIHLQELRRIISNVSRWYPFLSETNDDGFSISEKIEMIQCFRVPYFVGPLNPHSPYAWAIRSTNEKVLPWNIEKVMNYDASADVFITRMTNFCSYLVGEKVLPKNSILYSYFMLYNELNNLKIDGNTISVSLKRRIVKDLFEESDKKVTKKRLLTYLKTIGEIDNIESHEIKGIDEDVKSSLKPVHLLRSIIGDKINNRKMAESIIRTITVFEEPKRIEYILSRDYEKDLLPAEIKKLSKLTFSGWGRLSEKFLTGLFDTCRETGTTTNIMGMLESTQDNLMEIIHKYSFLKQANDLNMQNASAGGIEYMDLEKMSLPPAVKHGVWRSISVVRDLIDCIGHDPKKVFVETTRENLDPKKKIRTESRKLKLDALYKKCNEDAEWIASLSTQTDESLKSRRLFLYYTQLGKCMYCGRKIDIAELGNTDSVDLDHIYPQSKVVDDSIHNNMVLSCKKCNGDKSNAYPISLEVQHKMRKTWDQLRSKDYITAEKYSRLIRTDSFSDDELNRFINRQVVETSQAVKGTITILKRLMPDSDIVYVKAGMVSDFRHEMGFIKCREINDYHHAKDAYLNIVVGNVYDVKFTKDVAHFIHTKEQYNLKRMFEHPVSRNGTDAWIPGDNGSEKTVKKYMRRDNILFVRSPFIQKGELFDAQLMKKSDTLYPKKKGLSASEYGGYNKLTGACYSLVEYERKKKIVRSLEVVPVMDVKLLSDPSVLSAYFSERLSSDVKVIIPLIRMNSLIEWEGYPLHIGGRSGDTIVYVNALQLLVPDEVYEYSKILSKYSKDQKERTYHSASYYKITKEKNVSMFNYFVDKTFNLPYSKWFTALNSNLCKCKERFETSDELTQAAVLIEIIHSFQCKPIYTDLKKIGGVGLTGRIQIGKVLPSGVDISLVNQSPSGLKTNKMRLSL

SEQ ID NO: 21628 - protein, 1371 aa, unidentified
  REGION 1..1371: note = Cas Enzyme sequence
MNLRNVESYQIGLDIGTGSVGWAVLDDKGDLCRFKGKPTWGSRVFPSAQTAADTRVHRGQRRRYDRRRQRLDLLQGLFAEEMAKVDPEFFIRLNQARLLPEDRDPAHAAYRWPLFNDGDFTEADYYQRFPTIYHLRAHLMESDEKADIRLVYLAFHNIVKHRGNFLHQDNPALSAKNANMGDAVGELCHALGEWCAKYDVECACNQDALARILSDASLQVAEKREQVENALGIEKEYKKLEKAVSAAVVGYAAEFSHIFFADAEGSKFALSNDEKVEAYACPDEGRDLFEAMQKVYSSYVLMSILSEAQGEMLSLCKVREYDRYGCDLETLKDLVRAYGPERYDEFFRGSFYEGTHDYDPGKAKGYTKYNLGTSKLSHEDFLKEVQKLLMDIGAQADKRYAAIERAIEAGTFLRRLKTSDNGTIPYQLHREEMLAIIERQAPYYPFLASEKDELESLVTFRIPYYIGPLTRKNAAVDARGETRFAWSSRKPGMENERVYPWNWEKVIDKDQSAEDFIRRMTGTCTYLKGEPVLARCSLDYEMFCVLNELAGARWTQDGDKSYRFDTADRLGIVEDLFKKRKRVTYEAVEKWLAKTHGPEGGKSVGGAYHVSGGQGEDAFESQLSSHRDFCKILEVDDLSEADAIMAEDVILWNTVFEDRSILKRKIKLAYGDRLSDAQIRKLCKKRYAGWGRLSAELLRGLRSATDNGPKTIMDILLEGDPNHARRMGAAMNLMEILHDDLLEFQAKIDERNRERALESGGMTVDEVTGSPALRRGINQALRVVDEIAQIAGKPPAHIYIEVTRDEDPRNKGRRSTSRYKALEAALASLKGQYADVCTELKERDPRALDDERLTLYFMQCGKCMYSGKPLDINKLSTYQVDHILPQSYTKDDSFENKVLVYADENQRKLDSLLLDQKLIGRMQGFWRTLRDAGLIGDKKFNNLTRTSVGDEMMKKFINRQLVETSQIVKQVQQLLQTRYPESDVQPVKAGVSHQLREQCRLAKSREINDFHHAHDAYLACQVGRFIRYRHSAVYSEPVKMAAVVRQFIKKQADDYRRTREMPGSAGFIVSSFLTPGFDVETGEVFRDAWNAEFEIDRIKRCFDYKDCFISRMPEETHGAFWDATIYSPKMAGKTLNLPLKKGLDPQKYGSYSREQFAYFFVYEATKPKKNQRVLEFAPVPVRVASALASDPQALDNYARELAEGAGLVFERIRRRKVYKYQQIIIGDSRLYITGKKEVRNAQQFAFSQDETELIWRIEKSKDCSLDELLGLLRSLQGKYAHYASRLGQQMKVAEMEDAFAKASDADQRRALLSLVSIAAAHTNMIDLSSVGGSKYSGCMNASFSKELSAGKICFVDSSVTGMFERRETVGL

SEQ ID NO: 21629 - protein, 1333 aa, unidentified
  REGION 1..1333: note = Cas Enzyme sequence
MARMPRSQRRRYVRRRWRLDLLQSLFQDEIEKVDPEFFIRLRQSRLIKEDRAEGHRDYGHPLFNDSDFTEREYYKRFPTIYHLRKWLMETDGQADIRLIYLAIHNIVKHRGNFLREEQKSLSAKTAKPDVALHSFFEALNAWCATRGYELVIDVTAKILGVLADEKAAPTSKKKDIRTLLGVSMGDDSAANRRCNDALAAGMVGLKAEFKNVFGEFQAEKTAIHLSNDEDVDALREACPDDSIELFNRLCDVYSAYVLQGLLSYAPGETISVNMVEKYEQYGKDLALLKELVRRYASKSYDSFFRGPTYPDTNIYDASKAKGYTKYNLGTSKLSYDDFSKEVKSLLGKTDAVNDERYQSMMEAFDKQQFLRRLKTSDNGSIYYQLHFEELQAILKTQGRFYPFLKTDEKKIESLVSFRIPYYVGPLSSRNAAVDQHGKQRFAWAERKPGQEDTPITPWNWDSVIDRNKSAEKFIKRMTGMCTYLQGEEVLPRCSLLYEEFCVLNELNGLRLTIDGDREHRLDTAQREGIVHDLFHHKRSVSYKQIEDWIIREEGFRYPHISGGQGVSGLESKMGSYIFFCKDVFGVDELDRKDYDMVEEIILWNTLFEDRRILKEKLVQKYGEQAGGPLSDEQIKRICKKRFTGWGRLSEKFLIGLKVKTDVGPKSIMDVLREGDPNSDSRRGHAMVMMEALRDENLGFQKRVDEFNRNYFEANGKLVEINELPGSPAIRRSLNQAMRIVDEIAKIAGHAPANIFIEVTRDDDERKKGRRTTRRYDELKKALEAFKSDDPEIWREICETAPKDLDERLTLYFMQRGKCLYSGRPIDMNRLAESGLYEVDHIIPRAYIKDDSFENKALVYREENQRKTDALLIDQGVRRKMHDYWNMLHDAKLIGDKKYNNLMRSTISEQTMKGFVARQLVETSQMVKLVQSMLEVRYPETKIVPVKASISHNLREAADFIKCREANDFHHAHDAYLALRVGMFIQKRHPGVYENPIGLTRAMRKYAQSQAEIFRSTHHLPGSAGFIVNSFMSSGFDKETGEIFKDDWDAEAEVEGIRRALNYRQCFISRMPYEDTGVFWDATIYSPRDQKKKPVLPLKNGLDPQKYGGFSREQFAYFFVYEARKPRGNKPLFRFAQVPVWLARRMEGDSSALESYARGLAANEKLEYVGIERAKILKRQLIEIDGDRLIVTGIKEVRNGKELAFTSDELALINRITSRKESDKDNILLEKIWNRLVSFSDQIGSHLMAQLKLRNHSEKFAGIDAKSRGSVILGLIKVINAAGNTVDLSAVGDGKYVGQIRITHSKVLSDPNTDFYIIDQSVTGMFERRTRIGL

SEQ ID NO: 21630 - protein, 1389 aa, unidentified
  REGION 1..1389: note = Cas Enzyme sequence
MNLRNVQGDYSIGLDMGTGSDGWAVTDGEGRLLHFKKQPTWGSRLFDSAETAASARIPRSQRRRYVRRRWRLDLLQGLLQEEVEKVDPDFFLRLRQSRLVDSDLNKTTVAYRWPIFNEIDFTEVDYYDQFPTIYHLRKHLLESPEQADIRLVYLALHNIVKCRGNFLREGSSLSAKNAKPDDAVKEFCQALKAWSEGRDGEYAPISVDDVVAALTAKGASNSERAAAIADYMTVSFGDRAADKKLKKALATAMVGLKAEFKDVFGEFPAEKTKISLSNDEEVDALREACPDDSKDMFDSLCGVYAAYVLQGLLSYAPGETISANMVAKYDRYGADLKLLKALVREYKGAKAYDSFFRGPLYSDKSGYNVAQSKGYTRYNLGKTSYDDFAKEVKKLFAGTAAEGDVRYLDMIDAFENQRFLRRLKTSDNGSIYYQLHLEEMESILDNQAKFYPVLKEQREKLLKLVTFRIPYYVGPLTQRNARLDAHDNPRFAWSERKPGMEDATITPWNWDSVIDKSKSAENFIKRMTGICTYLQGEDVLPKCSLLYEEFCVLNELNGVRWTEDGDYEQRLDEEQRRGIVEDLFHRFRTVSYERIENWLVENGYASSAHVVGGQGVSGLESKMSSYIFFAKDVFKTGKIEQSDYPMVEKIIQWNTLFEDRGILREKLQEKYGAEGEGRLDDAQINAICKKRFTGWGRLSEKFLTGLKVDTQLDEKSIMDILREGDPNSDNRRGRAMVLMEILHDDRLGFQKEIDAFNRAYFEQAGDALGINDLPGSPAMRRSLNQAIRIVDEVVRIAGKAPAHIFIEVTRDDDMKKKGSRTKRRYDNLKDALANFKEQDPQWTKRVLVELKDVSPDELDERLTLYFMQNGKCLYSGKPIDITQLSNAGLYEVDHIIPRSYIKDDSYENKALVLREENQRKTDAMLLDPAIRQRMSGYWRALHDAGLIGDKKFKSLMRSSVNENAMRGFIARQLVETSQMVKAAQSLLSAKYPNTKIVPVKASMSHNLRDAAGFVKCREANDFHHAHDAYLACRVGLFISKWHPGIYEQPIAYAHAMRKYVRDQAELFNARHEAPGSSGFVIGSFMGKHVDEDTGELWDGAAEVEGIRKALNYRQCYITRMPVEDSGAFWNATIYSPRDPKMGPKLSLPLKNALDPQRYGGYSSQQFAYFFIYEARDKKGCTVFRFAEVPVWLAPRIRVDEGALEAHARRLAEGEKLQFVSIQRAKLLKKQLIEIDDDRLIITGAEEVRNATQYAFSAKEQGLIIRAKEIAQGKVVVGADSSAPLDELFADMIARGKNVAAGLMKKLNLLEKRSEFAALSPEQKSTIILQLAAIVNAANRQIDISSIGGAKTAGQYKVTFSKVLSDSNADFYIIDQSVTGMFERRTRVGL

SEQ ID NO: 21631 - protein, 1401 aa, unidentified
  REGION 1..1401: note = Cas Enzyme sequence
MNLRNYSGDYNIGLDMGTGSVGWAVTDAQGKLLHFKKQPTWGSRLFDSAQPASEARVHRGQRRRYVRRRWRLDLLQKLFEPAMSEVDPGFFMRLNQSRTIEGDPIFTKDFTKDDYYDRFPTIYHLRTYLMDTDEQADLRLVYLAIHNIVKHRGNFLRQGEKLTAKTAKTSDALKNLNGALKAWCESREHEFTKLDELSVAKILADERSSRSQKAKDIQALVKVDTADAAANKKLAKGLSSAVVGLQCEFKDVFGEFECGATKLALSDDEKLEALQAACPDDCVELLESICGVYSAYVLQGLLSYAEGQTISVNMIEKYNCYANDLDRLKTLVHEYAPGSYESFFRGATYHDSNSDDPSRDYDASKAQGYTAYDLHKLSYDDFAKSVKKLFTGTGAETDERYIAMMDAFDKQRFLRRLKTSDNGAIYYQLHLEELQAILKNQGRFYPFLKDEAAKIESLVTFRIPYYVGPLTPKNAAQDKHGNHRFQWSERKPGMEDATIAPWNWDTVIDKNKSAENFIMRMTGDCTYLAGEKVLPKQSLLYEEFCVLNELNGVRWSEDGDDWQRLDAAQREGIVHELFHKKRRVTYKMIADWLVKEGDATNPVVRGGQGESGLESKMGSYIFFAKDIFGVDELSRAEYPVIETIILWNTLFEDRSILKEKLQDEFGPSGNGMLDAEQIKKICKKRLTGWGRLSEKFLTGIRIDTQAGRSMSIMDVLREGNPSSERRLGETMVMMEILHDNTLGFQEKVDEHNRKYYAEHEKSLGVNELPGSPAIRRSLNQAIRIVDEIAKIAGHAPANVFVEVTRDEDEKKKGKRTTKRWDAIEDALKAFKAEGGNLAVMDDFKELKAANVDLDERLTLYLMQNGKCLYSGRAIDLNKLMTGSGEYEVDHIIPRAYIKDDSLENKALVYREENQHKTDQLLIDKSIRRKMGETWKQLHQAKLIGDKKYRNLLRPSINENAMKGFVARQLVETSQMVKMAQALLEARYADEGTKIVPVKASVSHNLREAAGLVKCREANDFHHAHDAYLACRLGLFIQMRHPGMYENPIGYSHVIKKYVREQSELFKKTHRMPGSAGFVVNSFMTAGFDPETGEVFDDAWTEDDEIKRYRGKYLPDGWNAAAEVEGIRRALNYRQCYISRMPQEDTGAFWKATIYSLRDPKMGAKLELSTKQGLDAKQYGGFSSQQFAYFFIYEAKKKGKPVFRFSQVPVWLAARIEGDSAALGEYARGLAEKEGLEYVGITRSKIYKKQLIEVDGDRLIITGAKEVRSGSQLAFSQDEMLLLNMSKTDEKPSILPLLEGLVNKIGYAADATCGKLSRQLKLSRLSSVSALDESQQRELTFGLIRIENGTDRVVDLSGIGGPAKAGAMVTDISKLINDPAIPFFIVDQSVTGMFERRTRVGL

SEQ ID NO: 21632 - protein, 1401 aa, unidentified
  REGION 1..1401: note = Cas Enzyme sequence
MNLRNYSGDYNIGLDMGTGSVGWAVTDAQGKLLHFKKQPTWGSRLFDSAQPASEARVHRGQRRRYVRRRWRLDLLQKLFEPAMSEVDPGFFMRLNQSRTIEGDPIFTKDFTKADYYDRFPTIYHLRAYLMDTDEQADLRLVYLAIHNIVKHRGNFLRQGEKLTAKTAKTSDALKNLNGALKAWCESREYEFAKLDEPSVAKILADERSSRSQKAKDIQALVKVDTADAAANKKLAKALSNAVVGLQCEFKDVFGDFECEATKLAPSDDEKLEALQAACPDDCVELLESVCGVYSAYVLQGLLSYAEGRTISVNMIEKYNCYADDLDRLKTLVREYAPGSYESFFRGATYHDSNSDDPSRDYDAFKAQGYTAYDLHKLSYDDFAKSVKKLFAGTGAETDERYTAMMDAFDKQRFLRRLKTSDNGAICYQLHLEELQAILKNQGRFYPFLKDEAAKIESLVTFRIPYYVGPLTPKNAAQDKHGNHRFQWSERKPGMEDATITPWNWDTVIDKNKSAENFILRMTGDCTYLAGEKVLPKQSLLYEEFCVLNELNGVRWSEDGDDWQRLDAAQREGIVHELFHKKRRVTYKMIADWLVKEGDATNPVVRGGQGESGLESKMDSYIFFAKDIFGVDELSRAEYPVIEKIILWNTLFEDRSILKEKLQDEFGPSGNGMLDAEQIKKICKKRLTGWGRLSEKFLTGIRIDTQAGRSMSIMDVLREGNPSSERRLGETMVMMEILHDNTLGFQEKVDEHNRKYYAEHEKSLGVNELPGSPAIRRSLNQAIRIVDEIAKIAGHAPANVFVEVTHDEDEKKKGKRTTKRWDAIEDALKAFKAEGCDLAVMDDFKELKAANVDLDERLTLYLMQNGKCLYSGRAIDLNKLMAGSGEYEVDHIIPRAYIKDDSLENKALVYREENQHKTDQLLIDKSIRWKMGETWKQLHQAKLIGDKKYRNLLRSSINENAMKGFVARQLVETSQMVKMAQALLEARYADEGTKIVPVKASVSHNLREAAGLVKCREANDFHHAHDAYLACRLGLFIQMRHPGMYENPIGYSHVIKKYVREQSELFKKTHRMPGSAGFVVNSFMTAGFDPETGEVFDDAWTEDDEVKRYRGKYLPDGWNAAAEVESIRRALNYRQCYISRMPQEDTGAFWKATIYSPRDPKMGAKLELSTKQGLDAKQYGGFSSQQFAYFFIYEAKKKGKPVFRFSQVPVWLAARIEGDSAALGEYARELAEKEGLEYVGITRPKIYKKQLIEVDGDRLIITGAKEVRSGSQLAFSQDEMLLLNMSKKDERLSVLPLLEGLVHKIDHAANATCGKLSRQLKLSRLSSVSVLDELQQRELAFGLIRIENGADRVVDLSGIGGPAKAGAMVTDMSKLINEPAAPFFIIDQSVTGMFERRTRVGL

SEQ ID NO: 21633 - protein, 1408 aa, unidentified
  REGION 1..1408: note = Cas Enzyme sequence
MNLRNYSGEYSIGLDMGTNSVGWAVTDEHGKLLHFKKQPTWGSRLFDAAQPASEARVHRGQRRRYVRRRWRLDLLQKLFEPAMNEVDPGFFMRLNQSRTVEGDPIFTKDFTKADYYERFPTIYHLRAYLMDTDEQADLRLVYLAIHNIVKHRGNFLRQGEKLTAKTAKTSDALKRLNGSLQTWCESREYEAQKINESAVAKILADEKSSRSQKAKDIQALVKVDTGDAAANKKLAKGLSNAVVGLQCEFKDVFGEFECEATKLALSDDEKLEALQAACPDDCVELFEAICGVYSACVLQGLLSYAEGQTISKNMIAKYKQYNRDLETLKYLVHGAPKDKADKFVGYAPGAYDAFFRGSTYHDANTDDPSRDYDVSKAQGYTAYDLHKLSYDDFAKSVKKLFTGTGAETDERYIAMMDAFDKQRFLRRLKTSDNGAIYYQLHLEELQAILKNQGRFYPFLKDEAGKIESLVTFRIPYYVGPLTPKNAAQDKHGKHRFQWSERKPGMEDTTITPWNWDTVIDKNKSAENFILRMTGDCTYLAGEKVLPKQSLLYEEFCVLNELNGVRWSEDGDDWQRLDAAQREGLVHELFHKKRRVTYKMIADWLVKEGDATNPVVRGGQGESGLESKMGSYIFFAKDIFGVDELSRAEYPVIEKIILWNTLFEDRSILKEKLQDEFGPSGNGMLDAEQIKKICKKRLTGWGRMSEKFLTGIRIDTQAGRSMSIMDVLREGNPSSERRLGETMVMMEILHDNTLGFQEKVDEHNRKYYAENEKSLGVNELPGSPAIRRSLNQAIRIVDEIAKIAGHAPANVFVEVTRDEDEKKKGKRTTKRWDAIEDALKAFKAEGGDLSVMGDFKELKAAGVDLDERLTLYLMQNGKCLYSGRAIDLNKLMAGSGEYEVDHIIPRAYIKDDSLENKALVYREENQHKTDQLLIDKSIRWKMGETWKQLHQAKLIGDKKYRNLLRSSINENAMKGFVARQLVETSQMVKMAQALLEARYVDEGTKIVPIKASVSHNLREAAGLVKCREANDFHHAHDAYLACRLGLFIQMRHPGMYENPIGYSHVIKKYVREQSELFKKTHRMPGSAGFVVNSFMTAGFDPETGEVFDDAWSEDDEVKRYRGKYLPDGWNAAAEVEGIRRALNYRQCYVSRMPQEDTGAFWDATVYSPRSGKSLSLSLKQGLAADRFGSYSREQFAYFYIYEALKKDKPFYKFCQVPVSMRLRVAQEPSLLDEIAARDAEESKLQFVRIDRDKIFKKQLFEINGCRLILTGSEEFRNGREVAFSIRQLEALSGSIGNAECEDLLDEIWMDFLSEMGPARGFLFKGLKLANYNERFYGLRAEEKRSVLLGLIKLVNADANVVDLSLIGGPKNAGKIRPPRSKLLNDRYTDFYIVDQSVTGMFERRTRVGL

SEQ ID NO: 21634 - protein, 1396 aa, unidentified
  REGION 1..1396: note = Cas Enzyme sequence
MNLRNYSGEYSIGLDMGTNSVGWAVADEHGKLLHFKKQPTWGSRLFDAAQPASEARVHRGQRRRYVRRRWRLDLLQKLFEPAMNEVDPGFFMRLNQSRTIEGDPIFTKDFTKADYYDRFPTIYHLRAYLIESDEQADLRLVYLAIHNIVKHRGNFLRQGEKLTAKTAKTSDVLKNLNGALKAWCESREYEFVKLDELSVAKILADERSSRSQKAKDIQALVKVDTGDATANKKLAKALSNAVVGLQCEFKDVFGEFECEATKLALSDDEKLETLQAACPDDCVELLESVCGVYSAYVLQGLLSYAEGQTISINMIKKYEQYAEDLALLKLLVRKYALNSYESFFRGATYHDSNGDDPSRDYDASKAQGYTAYDLHKLSYDDFAKSVKKLFAGTGAETDERYIAMMDAFDKQRFLRRLKTSDNGAIYYQLHLEELQAILKNQGRFYLFLKDEASKIESLVTFRIPYYVGPLTPKNAAKDKHGNHRFQWSERKPGMEEATITPWNWDTVIDKNKSAENFILRMTGDCTYLAGEKVLPKQSLLYEEFCVLNELNGVRWSEDGDDWQRLDAAQREGIVHELFHKKRCITYKMIADWLVKEGDATNPVVRGGQGESGLESKMGSYIFFAKDIFGVDELSRAEYPVIEKIILWNTLFEDRSILKEKLQDEFGPSGNGMLDAEQIKKICKKRLTGWGRLSEKFLTGIRIDTQVGRSMSIMDVLREGNPSSERRLGETMVMMEILHDNTLGFQEKVDEHNRKYYAEHEKSLGVNELPGSPAIRRSLNQAIRIVDEIAKIAGHAPANVFVEVTRDEDEKKKGKRTTKRWDTIEDALKAFKAEGGDLAVMDDFKELKATNADLDERLTLYLMQNGKCLYSGRAIDLNKLMAGSGEYEVDHIIPRAYIKDDSLENKALVYREENQHKTDQLLIDKGIRWKMGETWKQLHRAKLIGDKKYRNLLRSSINENAMKGFVARQLVETSQMVKMAQALLEARYADEGTKIVPVKASVSHNLREAAGLVKCREANDFHHAHDAYLACRLGLFIQMRHPGMYENPIGYSHVIKKYVREQSELFKKTHRMPGSAGFVVNSFMTAGFDPETGEVFDDAWAEDDEVKRYRGKYLPDGWNAAAEVEGIRRALNYRQCYISRMPYVDTGAYWNANPISKRKAPKIEIKKGLDPLLYGGYDSKSAAYFFIYEVRDKKTKPVLKMAMMPVYKMKELESDPVAFEDYCRELASGTSCVFTRIVIPRLLKWQLVEIAGSRLCVNAEEEMKSASQLAFSQEELLKISRVCREGFFDADTNLFVYRAVARSLEKSECPMLASDLGLEDKYETFSALGVAQQKDLLIKLIRLCVGNKKSVPIDIKALGGGKAAGRLRPARNKVPEGLVIIDQSVTGMFERRTRVGL

SEQ ID NO: 21635 - protein, 1157 aa, unidentified
  REGION 1..1157: note = Cas Enzyme sequence
VFGEFECEATKLALSDDEKLEALQAACPDDCVELFEAICGVYSACVLQGLLSYAEGQTISKNMIAKYKQYNRDLETLKYLVHGAPKDKADKFVGYAPGAYDAFFRGSTYHDANTDDPSRDYDVSKAQGYTAYDLHKLSYDDFAKSVKKLFTGTGAETDERYIAMMDAFDKQRFLRRLKTSDNGAIYYQLHLEELQAILKNQGRFYPFLKDEAGKIESLVTFRIPYYVGPLTPKNAAQDKHGKHRFQWSERKPGMEDTTITPWNWDTVIDKNKSAENFILRMTGDCTYLAGEKVLPKQSLLYEEFCVLNELNGVRWSEDGDDWQRLDAAQREGLVHELFHKKRRVTYKMIADWLVKEGDATNPVVRGGQGESGLESKMGSYIFFAKDIFGVDELSRAEYPVIEKIILWNTLFEDRSILKEKLQDEFGPSGNGMLDAEQIKKICKKRLTGWGRMSEKFLTGIRIDTQAGRSMSIMDVLREGNPSSERRLGETMVMMEILHDNTLGFQEKVDEHNRKYYAENEKSLGVNELPGSPAIRRSLNQAIRIVDEIAKIAGHAPANVFVEVTRDEDEKKKGKRTTKRWDAIEDALKAFKAEGGDLSVMGDFKELKAAGVDLDERLTLYLMQNGKCLYSGRAIDLNKLMAGSGEYEVDHIIPRAYIKDDSLENKALVYREENQHKTDQLLIDKSIRWKMGETWKQLHQAKLIGDKKYRNLLRSSINENAMKGFVARQLVETSQMVKMAQALLEARYVDEGTKIVPIKASVSHNLREAAGLVKCREANDFHHAHDAYLACRLGLFIQMRHPGMYENPIGYSHVIKKYVREQSELFKKTHRMPGSAGFVVNSFMTAGFDPETGEVFDDAWSEDDEVKRYRGKYLPDGWNAAAEVEGIRRALNYRQCYVSRMPQEDTGAFWDATVYSPRSGKSLSLSLKQGLAADRFGSYSREQFAYFYIYEALKKDKPFYKFCQVPVSMRLRVAQEPSLLDEIAARDAEESKLQFVRIDRDKIFKKQLFEINGCRLILTGSEEFRNGREVAFSIRQLEALSGSIGNAECEDLLDEIWMDFLSEMGPARGFLFKGLKLANYNERFYGLRAEEKRSVLLGLIKLVNADANVVDLSLIGGPKNAGKIRPPRSKLLNDRYTDFYIVDQSVTGMFERRTRVGL

SEQ ID NO: 21636 - protein, 1401 aa, unidentified
  REGION 1..1401: note = Cas Enzyme sequence
MNLRNCSGDYNIGLDMGTGSVGWAVTDDQGKLLHFKKQPTWGSRLFDSAQLASEARVHRGQRRRYVRRRWRLDLLQKLFEPAMSEVDPGFFMRLNQSRTIEGDPIFTKDFTKADYYDRFPTIYHLRAYLMDTDEQVDLRLVYLAIHNIVKHRGNFLRQGEKLTAKTAKTSDALERLNDSLQAWCESREYDVTKINKSAVAKILADERSSRSQKAKDIQALVKVGTADAAANKKLAKALSNAVVGLQCEFKDVFGDFECEATKLALSDDEKLEALQAACPDDCVELLESVCGVYSAYVLQGLLSYAEGQTISVNMIEKYNCYANDLDRLKTLVREYAPGSYESFFRGATYHDSNSDDPSRDYDASKAQGYTAYDLHKLSYDDLAKSVKKLFAGTGAETDERYIAMMDAFDKQRFLRRLKTSDNGAIYYQLHLEELQAILKNQGRFYPFLKDEAAKIESLVTFRIPYYVGPLTPKNAAQDKHGNHRFQWSERKPGMEDATITPWNWDTVIDKNKSAENFIMRMTGDCTYLAGEKVLPKQSLLYEEFCVLNELNGVRWSEDGDDWQRLDAAQREGIVHELFHKKRRVTYKMIADWLVKEGDATNPVVRGGQGESGLESKMGSYIFFAKDIFGVDELSRAEYPVIEKIILWNTLFEDRSILKEKLQDEFGPSGNGMLDAEQIKKICKKRLTGWGRLSEKFLTGIRIDTQAGRSMSIMDVLREGNPSSERRLGETMVMMEILHDNTLGFQEKVDEHNRKYYAENEKSLGVNELPGSPAIRRSLNQAIRIVDEIAKIAGHAPANVFVEVTRDEDEKKKGKRTTKRWDAIEDALKAFKAEGGDLVVMDDFKELKAANVDLDERLTLYLMQNGKCLYSGRAIDLNKLMAGSGEYEVDHIIPRAYIKDDSLENKALVYREENQHKTDQLLIDKSIRWKMGETWKQLHQAKLIGDKKYRNLLRSSINENAMKGFVARQLVETSQMVKMAQALLEARYADEGTKIVPVKASVSHNLREAAGLVKCREANDFHHAHDAYLACRLGLFIQMRHPGMYENPIGYSHVIKKYVREQSELFKKTHRMPGSAGFVVNSFMTAGFDPETGEVFDDAWTEDDEVKRYRGKYLPDGWNAAAEVESIRRALNYRQCYISRMPQEDTGAFWKATIYSPRDPKMGAKLELSTKQGLDAKQYGGFSSQQFAYFFIYEAKKKGKPVFRFSQVPVWLAARIEGDSAALGEYARELAEKEGLEYVGITRSKIYKKQLIEVDGDRLIITGAKEVRSGSQLAFSQDEMLLLNMSKKDERLSVLPLLEGLVHKIDHAANATCGKLSRQLKLSRLSSVSVLDELQQRELAFGLIRIENGADRVVDLSGIGGPAKAGAMVTDMSKLINEPAAPFFIIDQSVTGMFERRTRVGL

SEQ ID NO: 21637 - protein, 1367 aa, unidentified
  REGION 1..1367: note = Cas Enzyme sequence
MQLRHAENYNIGLDLGTGSVGWAVTDENGELYHFKKQPTWGSRLFPSAGSAADARVHRGQRRRYDRRRQRLDLLQEFFLEPMADVDPEFFVRLRQSQLWPDDRDPQYAAYHWPLFNDENFNERDYYKKFPTIYHLRVWLMETDEQADLRLVYLALHNIVKTRGNFLHQDNERLSAKNANMEESVERLCNALAEWMAEIDPESACEPKPAKLRAVLENASLSRGTMRDEAIPFLGLETDAAHKRIAKQVISAVLGYKADLKKVFALETDDPSFDLSNDAAVEEFRNSVPDEGIELFDSLLAAYSSFVLQGILKGGDGRTISYCKVNEYEQYGKDLRMLKRLVRQYAPARYDEFFRGPHYEGALSKDYDPSKAKGYTLYNLGTTKLSYDDFAAQVKNLFKGTGAESDERYVKMMTRFDDQTFLRRLKTSDNGSIPFQLHLEEMKAIIANQGRYYPFLKEHEKKIESLVTFRIPYYVGPLTQKNAAVANGQTRFAWSVRNPGKENVPIRPWNWEEVIDKHASAAAFIQRMTGTCTYLQGEPVLPRASLLYEKFCVLNELNGARWTQDGDDWHRFSYDLRVRIFDELFTRGSVSYKKVEQWLRSENIALHAHVKGGQGETGFESKPGSYLFFKKVLGAEDFDAQTLDMVETLILWNTLFEDRDILKEEIQRHYGDVLSPAQIKQICKKRFTGWGRLSKRLLTGITVPTDNGAKSIMDILEEGDPNNVHPGQAMVLMEVLRDENLGFEKAIDQANKEWLESHGELGIDEMPGSPALRRSVNQALKIVDEIVSITGCAPANIYIETTRDDDVKKRGQRTKKRYDALKEALKKLGAEADASVKKELASRSSAEFNNERLVLYFMQNGKSLYSGAPLDIRKLSTYQVDHIIPQSYTKDDSFENKALVLAEENQRKTDSLLLSESIRRKMSPTWRALYEAGLMGRKKFNNLMRGTISNAQMKGFINRQIVETSQVVKFVRTMLQERYPETNVRSIKASLSHQLRVRRGLVKSRIANDFHHAHDAYLAEEMGRFIELRHSIVFDNPVALQHVIRKYIREQAERYAKTKRLPEDASFIVQSFLTSGFSKETGEIFRDTWDADAEVARIKKFMNYRQCFISRMPSEETGPFWDATIYSPKSGRTKPTIPLKGGLDPARYGGYSSLKNAYFFVYKATGPKGSVLRYAGAPVSVVSRIKRGKLSLSGYAEQLARDEGLTFESIVRKKILQDQLIEIDGERFYIRGNKEVRNAIEPCFSLAEAEAIEADDPTGYGSVLDEAFEVLLRFLHTYATRQEGLLRIVERANAFYSLCEGDKQQIIHEILNLVNAQKNVANLKLINGPSFAGKIQLTFSKELSSGKQTAFIDQSVTGMFERRQEIGL

SEQ ID NO: 21638 - protein, 1374 aa, unidentified
  REGION 1..1374: note = Cas Enzyme sequence
MKLRNIQGDYNIGLDLGSASVGWAVTSIDGELLMQNGKPTWGSRVFPKGETAADARLKRGQRRRYERRRWRLDLLQRFFEEEMSAVDPTFFIRLKQSRLMPSDRGEACRDYHSPLFVSAEAERECYQRFPTIYHLRAWLMTTDDKADLREIYLALHNIVKHRGNFLHQDNPGLSATAANMGESIEALCVALDDRCAALDMLCSCDTASLQKELEDPSTSRAHKRESVEKLFGFDKDAQKTMGKNIAKAIVGYKADFSLALAAEFEDASFSLSDDEKVEAALSAVPDDAAALFDAIRSVYSAYVLSGILSSGDGSPLTSGVLESVRGGTISFCKVREYEQYKQDLALLKQLVRTYAPREFDGFFRGEMYPDTHRYDPSKAKGYTRYNLTHTVAYADFFKEVKTRLDKTDAVSDARYQDMLSRFGEERFLRRLKTSDNGSIPYQLHLEEMDAILENQGGHYPFLREYREKIESLVSFRIPYYVGPLTQKNAALDHHGDPRFAWATRKPGMENEPVYPWNWEEVIDKGHAAHAFIQRMTSDCTYLMGEDVLPRNSLLYEEFCVLNELNGARYSVDGDDWRRFDYADRMGIMDDLFRQRRSVTYKMVGDWMRANRGWAHVHVRGGQGDARFESSLPAYRFFCKDIFNVDELPAETVPMAETIILWSTLFEDRSILKEQLERTFSDRLSAEQIKAICKKRLTGWGELSEKFLAGLKVGADGGPRSIMDILREGSPTGGEQGRTMVLMEILHDERLGFEKAVEAANAEKLAAAGRLEVEDLPGSPALRRTVNQAVRVVEEIVRIAGKAPAHIFVENTRDEDPSKRGKRTKRRYDAAREAVDAFKKENAELARAFKECKVPDFDNERLVLYFMQGGKSLYSGVPLDVRRLSEYEVDHIIPQSYIKDDSFENKALVFKSENQTKTNQLLLPQAVRSKMAGYWRELHDHGLIGDKKFNNLMCSDVSERRIKGFIARQLVETAQIVKLTKMVLENRLPESRVLPIKASLSHELREAKCYHKCREINDFHHAHDALLAAEIGRFLLLRHSGMYDNPIGYAHVVKSFVRAQAEESKKTGRMPGSAGFVVSSFLHSGFDKETGEVFKDAWDAEFECGRIHRYLNYRQVYLSRMPEETAGAFWDATIYSPRSKMKLSLPLKEGLDPAVYGGYSSEKYAYFFCYYAKDKKGKRIIDFAPVPVSRAAGGKVDIESLGREVALGRGYQFERIARAKIAVKQLIEVDGCRLFITGADQVRSAVPLAFSQDETEFMVGVYKGEDCDEGMLDRVLEKTVKGIERFDGRLCSNLKLIDRASAFRMLNYEDKVLVLKGLISLSSASSNMADMRPVGGAKTAGQLKIIFRNVLSNQGITFIDQSVTGMFERKTYIGL

SEQ ID NO: 21639 - protein, 1432 aa, unidentified; identical to SEQ ID NO: 21257
  REGION 1..1432: note = Cas Enzyme sequence

SEQ ID NO: 21640 - protein, 1332 aa, unidentified
  REGION 1..1332: note = Cas Enzyme sequence
MQRNYTIGLDIGTNSVGWAVMKDDYTLIRKRMKVLGNTDIKKIKKNFWGVRLFDEGETAKETRLKRGTRRRYQRRRNRLIYLQDIFQQPMLAIDENFFQRLDDSFFVPDDKSYDRHPIFGSLEEEVTYHNTYPTIYHLRKHLADNPEKADLRLVYTALAHIVKYRGHFLIEGELNTENTSISETFEQFLDTYNDIFKEQLVGDISKVEEILSSKQSRSRKHEQIMELFPDEGKLGNFGRFMTLIVGNTSNFKPVFDLDDEYKLKLSDETYEEDLDTLLGMTDDVFLDVFMAAKNVYDAVEMSAIISTDTGNSKAVLSNQMINFYDEHKVDLAQLKQFFKTHLPDKYYECFSDPSKNGYAGYIDGKTNQEDFYKYIEKVMKTVKSDEKDYFLDKIDREVFLRKQRSFYNSVIPHQIHLQEMQAILDRQSQYYSFLAENRDKIESLVTFRIPYYVGPLTASDQSEFAWMERQSDEPIRPWNFDEIVNKERSAEKFIERMTNMDTYLLEEKVLPKRSLLYQTFEVYNELTKVRYTNEQGKTEKLNRQQKAEIIETLFKQKNRVREKDIANYLEQYGYVDGTDIKGVEDKFNASLSTYNDLVKIDGAKAYLDNPEYTDMWEDIIKILTVFEDKAMRKKQLQTYSDTLSPEILKKLERKHYTGWGRFSKKLINGLRDEGSNKTILDYLKSDEGSSGPTNRNFMQLIRDNTLSFKKKIEDAQTIEDTTHIYDTVADLPGSPAIKKGIRQALKIVEEIIDIIGYEPENIVVEMARESQTTKKGKDLSQERLEKLTEAIKEFDGPTDIKVKDLKNENLRNDRLYLYYLQNGRDMYTNEPLDINNLSKYDIDHIIPQSFTTDNSIDNKVLVSRTKNQGNKSDGVPSINIVHKMKPFWRQLHKAGLISDRKLKNLTKTEHGGLTEADKAHFLNRQLVETRQITKHVANLLDSQYNTAEEQRINIVLLKSSMTSRFRREFEMYKVREINDYHHGHDAYLNAVVATTIMKVYPNLKPQFVYGQYKKTSMFKEEKATARKHFYSNITKFFKKEKVVNEETGEILWDTERHLSTIKRVLSWKQMNIVKKVEKQKGQLWKETIYPKGDSSKLIPVKEGMDPQKYGGLSQVSEAFAVVITHEKGKKKQLKSDLISIPIVDQKAYEQHPTAYLEEAGYNNPTVLHELFKYQLFELEDGSRRMIASAKEFQKGNQMVLPLELVELLYHANRYDKVKFPDSIEYVHDNLAKFDDLLEYVIDFSNKYINADKNVQKIQKIYKEHGTEDVELTVESFVNLMTFTAMGAPATFKFYGESITRSRYTSITEFRGSTLIFQSITGLYETRYKLEDN

SEQ ID NO: 21641 - protein, 1367 aa, unidentified
  REGION 1..1367: note = Cas Enzyme sequence
MNLRNIPSYNVGLDIGTGSVGWAVTDENGNLCHFKNRPTWGSRIFPSANTAAETRLKRGQRRRYDRRRQRLDLLQSLFDEEMEKVDPEFFIRLRQSKLRVEDREEGHREYRYPFFNSSDFTERMYYKSYPTIYHLRKHLIESDQQEDLRLIYLAFHNIVKTRGNFLYQDTPSLSAKDASMSEAIEELLNALVLWADAAYDFEIDEVDSEKLRKVFEDSSLTRAEKKDEALKILTLEDKKIAKELINAVLGYKANFNTIFKIEAEKSAFSFDNDEQKEAFISSVPDEGMALYEALQKAYSAYILMDIIEDANGKSVSYSMVEKYNKYGEDLKTLKDLVKEYCPTKYSEFFRGEHYDAPYQKDYDKSKAKGYTKYNEVRGAKYDDFKKEVENLFKDTAAISDSRYKEMMTKFVNGKFLRRLKTSDNGSIPFQLHLEEMNAIVDAQEKFYPFLSDIRHKLNSLVTFRIPYYVGPLTQKGAALDASGKPRFAWSKRQEGKEGDKIYPWNWEEIIDKGASAREFIQRMTGTCTYLYGEPVLPKCSLLYEKFCVLNELNGARWSQDNDKWYRFDAEDRLSIYEELFERYKSVSFKKVEDWLKQRGETFPHVKGGQGEGKFESKLSSHHFFKELLGTDEWSDQTKQMIEELILWNTLFEDKKILKEETTKKYGDVLTAEQIKKFCGHRFTGWGRLSKKLLTGIKTEVDFRKMSVMDLLVEGDPYGEHVGSSLILMEILHNKNFEFNKEIEAHNEKYFSKDQSVEDLPGSPAVRRSVNQALRIVEEIEKIAGKPAAHIYIESTRDEDEKKRGKRTTKRNENIKKMLSELKEEYKNADIFTQLDKHSDEQLSKRLSLYFMQNGKSMYSGKAIEINLIADNTYCQIDHVLPQSYIKDDSFENTVLVLSEENQRKGDSLLLDADIRRKMAGLWHELHRVKLIGDKKYKNLTRSVVTDRQMEGFINRQLVETSQIVKFVRMLLKSQYPDTEICSIKASLSHEIREKYNLPKIREVNDYHHAHDAFLACEMGRFLSIRYEEAFTNPVGLTKLMRKFVKKESEEAQKQHRIPGTTPFFVASFSKPGFDLETGEVIKDEWNPIEEVEKIKRTFGFKQCFVSRMPEMTSGTFWDETVYSPKNKTMKLALPVKGNLLPEKYGSYSSIQLSFSAICRGKKKNKSQYYIVDIPRTKSTELYKNSITTSNYLAKVLRSSGVEFEELIYPALLKNQVIEYGGQRFYVVSSGELRNGVAPSFSYDDYAMISNYFDGNKDENATALIIYDLLSKTISSRMPVLADRLKLDSKRAAFSALDCEDSKKVLVSLLNTINGSKVPSDTTKIGGPTRTERICISIAAQLNKNPAEFSVIEQSVTGMFERRRRIGL

SEQ ID NO: 21642 - protein, 1365 aa, unidentified
  REGION 1..1365: note = Cas Enzyme sequence
MNLRNIPSYNVGLDIGTGSVGWAVTDENGNLCHFKNRPTWGSRIFPSANTAAETRLKRGQRRRYDRRRQRLDLLQSLFDEEMIKVDPEFFIRLRQSKLRVEDREEGHREYRYPFFNSSDFTERMYYKAYPTIYHLRKHLIESNQQEDLRLIYLAFHNIVKTRGNFLYQDTPSLSAKDASMSEAIEELLNALVLWADAAYDFEIDEVDSEKLRKVFEDTSLTRAEKKDEALKILTLEEKKIAEELIKAVLGYEANFNIIFKIEAEKFKFSFDNDEKKEAFISSVPDEGMALYEALQKAYSAYILMDIIEDANGKSVSYSMVAKYNKYGEDLKTLKDLVKEYCSTKYSEFFRGEHYDAPYQKDYDKSKAKGYTKYNEVRGAKYDDFKKEVENLFKDTAAISDSRYREMMTKFANGKFLRRLKTSDNGSIPFQLHLEEMNAIIDAQEKFYPFLSEIRHKLNSLVTFRIPYYVGPLTQKGAALDASGKPRFAWSKRQEGKEGDKIYPWNWEEIIDKGASAREFIQRMTGTCTYLYGEPVLPKCSLLYEKFCVLNELNGARWSQDNDKWYRFDAEDRLSIYEELFERYKSVSFKKLEDWLKQRGEAFPHVKGGQGEGKFESKLSSHHFFKELLGTDEWSDQTKQMIEELILWNTLFEDKKILKEETTKKYGDVLTAEQIKKFCGHRFTGWGRLSKKLLTGIKTEVDFRKMSVMDLLVEGDPYGEHVGSSLILMEILHNKNFEFNKEIEAHNEKYFSKDQSVEDLPGSPAVRRSVNQALRIVEEIAKIAGKPAAHIYIESTRDEDEEKRGKRTSKRNENIKKMLSEIKDEYKNADIFKQLAEHSDGQLGKRLSLYFMQNGKSMYSGKAIDIRRISDNTYCQIDHVLPQSYIKDDSFENTVLVLSDENQRKGDSLLLDADVRRKMADLWHELHRVKLIGDKKYKNLTRSVVTDRQMEGFINRQLVETSQIVKFVRMLLKSQYPDTEICSIKASLSHEIREKYNLPKIREVNDYHHAHDAFLACEMGRFLSIRYEEAFTNPVGLTKLMRKFVKKESEEAQKQHRIPGTTPFFVASFSKPGFDLETGEVTRDEWNPIEEVEKIRRTFDFKDCYISRMPEMTNGTFWDETIYSPKGKVKTLIETKKNLSVEKYGGYSGENSAFFFIYKSKGESEHLNFAPFPLSLATRKDDIYHLIETYAVDLCREAKETFTGIIIPQIYKYQKIEWNGQQFYITGKQEIRSAASIFFSQQDQLCLIKYDSNSSSVGEEMLEVFERFSQRAYKQSEKLYKQLKLEDSRQVICDLSNQQVYEIICGLASIFNGKINMLNLSMIGGSKYSGCMRPSISSEINKKENAFFVIDQSVTGMFERRRRIGL

SEQ ID NO: 21643 - protein, 1365 aa, unidentified
  REGION 1..1365: note = Cas Enzyme sequence
MNLRNIPSYNVGLDIGTGSVGWAVTDENGNLCHFKNRPTWGSRIFPSANTAAETRLKRGQRRRYDRRRQRLDLLQSLFDEEMIKVDPEFFIRLRQSKLRVEDREEGHREYRYPFFNSSDFTERMYYKAYPTIYHLRKHLIESNQQEDLRLIYLAFHNIVKTRGNFLYQDTPSLSAKDASMSEAIEELLNALVLWADAAYDFEIDEVDSEKLRKVFEDTSLTRAEKKDEALKILTLEEKKIAEELIKAVLGYEANFNIIFKIEAEKFKFSFDNDEKKEAFISSVPDEGMALYEALQKAYSAYILMDIIEDANGKSVSYSMVAKYNKYGEDLKTLKDLVKEYCSTKYSEFFRGEHYDAPYQKDYDKSKAKGYTKYNEVRGAKYDDFKKEVENLFKDTAAISDSRYREMMTKFANGKFLRRLKTSDNGSIPFQLHLEEMNAIIDAQEKFYPFLSEIRHKLNSLVTFRIPYYVGPLTQKGAALDASGKPRFAWSKRQEGKEGDKIYPWNWEEIIDKGASAREFIQRMTGTCTYLYGEPVLPKCSLLYEKFCVLNELNGARWSQDNDKWYRFDAEDRLSIYEELFERYKSVSFKKLEDWLKQRGEAFPHVKGGQGEGKFESKLSSHHFFKELLGTDEWSDQTKQMIEELILWNTLFEDKKILKEETTKKYGDVLTAEQIKKFCGHRFTGWGRLSKKLLTGIKTEVDFRKMSVMDLLVEGDPYGEHVGSSLILMEILHNKNFEFNKEIEAHNEKYFSKDQLVEDLPGSPAVRRSVNQALRIVEEIAKIAGKPAAHIYIESTRDEDEKKRGKRTTKRNENIRKMLSELKEEYKNADIFTQLAKHSDEQLSKRLSLYFMQNGKSMYSGKAIDINRIADNTYCQIDHVLPQSYIKDDSFENTVLVLSEENQRKGDSLLLDADIRRKMAGIWHELHRVKLIGDKKYKNLTRSVVTDRQMEGFINRQLVETSQIVKFVRMLLKSQYSDTEICSIKASLSHEIREKYNLPKIREVNDYHHAHDAFLACEMGRFLSIRYEEAFTNPVGLTKLVRKFVKKESEEAQKQHRIPGTTPFLVASFSKPGFDLETGEVTRDEWNPIEEVEKIKKTFDFKDCFISRMPEMTSGTFWDETVYSPKGKVKTLIETKKNLSVEKYGGYSGENSAFFFIYKSKGESEHLNFAPFPLSLATREDDVHQLIESYAVELCREAKEIFTGIVIPQIYKYQKIEWNGQQFYLTGKKEIRSAVSVFFSQDEMSKLISHQNDISLENGEMVEILDNFLLRAQKRSEKLYKQLKIDENKGKVVELSSSQIYELLCGLTSIFNGKINMLNLSSIGGSKYAGCIQPAINKEINKKENTFYVIDQSVTGMFERRRRIGL

SEQ ID NO: 21644 - protein, 1367 aa, unidentified
  REGION 1..1367: note = Cas Enzyme sequence
MNLRNIPSYNVGLDIGTGSVGWAVTDENGNLCHFKNRPTWGSRIFPSANTAAETRLKRGQRRRYDRRRQRLDLLQSLFDEEMEKVDPEFFIRLRQSKLRVEDREEGHREYRYPFFNSSDFTERMYYKSYPTIYHLRKHLIESDQQEDLRLIYLAFHNIVKTRGNFLYQDTPSLSAKDASMSEAIEELLNALVLWADAAYDFEIDEVDSEKLRKVFEDSSLTRAEKKDEALKILTLEDKKIAKELINAVLGYKANFNTIFKIEAEKSAFSFDNDEQKEAFISSVPDEGMALYEALQKAYSAYILMDIIEDANGKSVSYSMVEKYNKYGEDLKTLKDLVKEYCPTKYSEFFRGEHYDAPYQKDYDKSKAKGYTKYNEVRGAKYDDFKKEVENLFKDTAAISDSRYKEMMTKFVNGKFLRRLKTSDNGSIPFQLHLEEMNAIVDAQEKFYPFLSDIRHKLNSLVTFRIPYYVGPLTQKGAALDASGKPRFAWSKRQEGKEGDKIYPWNWEEIIDKGASAREFIQRMTGTCTYLYGEPVLPKCSLLYEKFCVLNELNGARWSQDNDKWYRFDAEDRLSIYEELFERYKSVSFKKVEDWLKQRGETFPHVKGGQGEGKFESKLSSHHFFKELLGTDEWSDQTKQMIEELILWNTLFEDKKILKEETTKKYGDVLTAEQIKKFCGHRFTGWGRLSKKLLTGIKTEVDFRKMSVMDLLVEGDPYGEHVGSSLILMEILHNKNFEFNKEIEAHNEKYFSKDQSVEDLPGSPAVRRSVNQALRIVEEIEKIAGKPAAHIYIESTRDEDEKKRGKRTTKRNENIKKMLSELKEEYKNADIFTQLDKHSDEQLSKRLSLYFMQNGKSMYSGKAIEINLIADNTYCQIDHVLPQSYIKDDSFENTVLVLSEENQRKGDSLLLDADIRRKMAGLWHELHRVKLIGDKKYKNLTRSVVTDRQMEGFINRQLVETSQIVKFVRMLLKSQYPDTEICSIKASLSHEIREKYNLPKIREVNDYHHAHDAFLACEMGRFLSIRYEEAFTNPVGLTKLMRKFVKKESEEAQKQHRIPGTTPFFVASFSKPGFDLETGEVIKDEWNPIEEVEKIKRTFGFKQCFVSRMPEMTSGTFWDETVYSPKNKTMKLALPVKGNLLPEKYGSYSSIQLSFSAICRGKKKNKSQYYIVDIPRTKSTELYKNSITTSNYLAKVLRSSGVEFEELIYPALLKNQVIEYGGQRFYVVSSGELRNGVAPSFSYDDYAMISNYFDGNKDENATALIVYDLLSKTISSRMPVLADRLKLDSKRAAFSALDCEDSKKVLVSLLNTINGSKVPSDTTKIGGPTRTERICISIAAQLNKNPAEFSVIEQSVTGMFERRRRIGL

SEQ ID NO: 21645 - protein, 1365 aa, unidentified
  REGION 1..1365: note = Cas Enzyme sequence
MNLRNIPSYNVGLDIGTGSVGWAVTDENGNLCHFKNRPTWGSRIFPSANTAAETRLKRGQRRRYDRRRQRLDLLQSLFDEEMIKVDPEFFIRLRQSKLRVEDREEGHREYRYPFFNSSDFTERMYYKAYPTIYHLRKHLIESNQQEDLRLIYLAFHNIVKTRGNFLYQDTPSLSAKDASMSEAIEELLNALVLWADAAYDFEIDEVDSEKLRKVFEDTSLTRAEKKDEALKILTLEEKKIAEELIKAVLGYEANFNIIFKIEAEKFKFSFDNDEKKEAFISSVPDEGMALYEALQKAYSAYILMDIIEDANGKSVSYSMVAKYNKYGEDLKTLKDLVKEYCSTKYSEFFRGEHYDAPYQKDYDKSKAKGYTKYNEVRGAKYDDFKKEVENLFKDTAAISDSRYREMMTKFANGKFLRRLKTSDNGSIPFQLHLEEMNAIIDAQEKFYPFLSEIRHKLNSLVTFRIPYYVGPLTQKGAALDASGKPRFAWSKRQEGKEGDKIYPWNWEEIIDKGASAREFIQRMTGTCTYLYGEPVLPKCSLLYEKFCVLNELNGARWSQDNDKWYRFDAEDRLSIYEELFERYKSVSFKKLEDWLKQRGEAFPHVKGGQGEGKFESKLSSHHFFKELLGTDEWSDQTKQMIEELILWNTLFEDKKILKEETTKKYGDVLTAEQIKKFCGHRFTGWGRLSKKLLTGIKTEVDFRKMSVMDLLVEGDPYGEHVGSSLILMEILHNKNFEFNKEIEAHNEKYFSKDQSVEDLPGSPAVRRSVNQALRIVEEIAKIAGKPAAHIYIESTRDEDEEKRGKRTSKRNENIKKMLSEIKDEYKNADIFKQLAEHSDGQLGKRLSLYFMQNGKSMYSGKAIDIRRISDNTYCQIDHVLPQSYIKDDSFENTVLVLSDENQRKGDSLLLDADVRRKMADLWHELHRVKLIGDKKYKNLTRSVVTDRQMEGFINRQLVETSQIVKFVRMLLKSQYPDTEICSIKASLSHEIREKYNLPKIREVNDYHHAHDAFLACEMGRFLSIRYEEAFTNPVGLTKLMRKFVKKESEEAQKQHRIPGTTPFFVASFSKPGFDLETGEVTRDEWNPIEEVEKIRRTFDFKDCYISRMPEMTNGTFWDETIYSPKGKVKTLIETKKNLSVEKYGGYSGENSAFFFIYKSKGESEHLNFAPFPLSLATREDDVHQLIESYAVELCREAKEIFTGIVIPQIYKYQKIEWNGQQFYLTGKKEIRSAVSVFFSQDEMSKLISHQNDISLENGEMVEILDNFLLRAQKRSEKLYKQLKIDENKGKVVELSSSQIYELLCGLTSIFNGKINMLNLSSIGGSKYAGCIQPAINKEINKKENTFYVIDQSVTGMFERRRRIGL

SEQ ID NO: 21646 - protein, 1367 aa, unidentified
  REGION 1..1367: note = Cas Enzyme sequence
MNLRNIPSYNVGLDIGTGSVGWAVTDENGNLCHFKNRPTWGSRIFPSANTAAETRLKRGQRRRYDRRRQRLDLLQSLFDEEMTKVDPEFFIRLRQSKLRVEDREEGHREYRYPFFNSSDFTERMYYKSYPTIYHLRKHLIESDQQEDLRLIYLAFHNIVKTRGNFLYQDTPSLSAKDASMSEAIEELLNALVLWADAAYDFEIDEVDSEKLRKVFEDSSLTRAEKKDEALKVLTLEDKKIAKELINAVLGYKANFNTIFKIEAEKSAFSFDNDEQKEAFIASVPDEGMALYEALQKAYSAYILMDIIEDANGKSVSYSMVAKYNKYGEDLKTLKDLVKEYCSTKYSEFFRGERYEAPYQKDYDKSKAKGYTKYNEVRGAKYDDFKKEVENLFKGTAATSDPRYQDMMTKFANGKFLRRLKTSDNGSIPFQLHLEEMNAIIDAQEKSYPFLSEIRHKLNSLVTFRIPYYVGPLTQKGAALDAFGKPRFAWSKRQEGKEGDKIYPWNWEEIIDKGASARKFIQRMTGTCTYLYGEPVLPKCSLLYEKFCVLNELNGARWSQDNDKWYRFDANDRLSIYEELFERYKSVSFKKLEDWLRQRGEAFPHVKGGQGEGKFESKLSSHHFFKELLGTDEWSDQTKQMIEELILWNTLFEDKKILKEETTKKYGDVLTAEQIKKFCGHRFTGWGRLSKKLLTGIKTEVDFRKMSVMDLLVEGDPYGEHVGSSLILMEILHNKNFEFNKEIEAHNEKYFSKDQSVEDLPGSPAVRRSVNQALRIVEEIAKIAGKPATHIYIESTRDEDEKKRGKRTTKRNENIKKMLSELKDEYKNADIFTQLSKHSDEQLSKRLSLYFMQNGKSMYSGKAIDINRIADNTYCQIDHVLPQSYIKDDSFENTVLVLSEENQRKGDSLLLDADIRRKMAGIWHELHRVKLIGDKKYKNLTRSVVTDRQMEGFINRQLVETSQIVKFVRMLLKSQYPDTEICSIKASLSHEIREKYDFPKIREVNDYHHAHDAFLACEMGRFLSIRYKEAFTNPVGLTKLMRKFVKKESEEAQKQHRIPGTTPFFVASFSRPGFDLETGEVTRDEWNPIEEVEKIKRTFGFKQCFVSRMPEMTSGTFWDETVYSPKNKTMKLALPVKGNLLPEKYGSYSSIQLSFSAICKGKKKNKSQYYVVDIPRTKSTELYKNSITTSNYLAKVLESSGVEFEELIYPALLKNQVIEYGGQRFYVVSSGELRNGVAPSFSYDDYAMISNYFDGNQDENATALIIYDLLSKTISSRMPVLADRLKLDSKRAAFSALDCEDSKKVLVSLLNTINGSKVPSDTTKIGGPTRTERICISISAQLNKNPAEFSVIEQSVTGMFERRRRIGL

SEQ ID NO: 21647 - protein, 1192 aa, unidentified
  REGION 1..1192: note = Cas Enzyme sequence
MGDSIKNLCVSLKEWCEEGEIDCAPKSRDMQTVLEDISSRRTEKRERLMPLFGFGSQDKQRAKELAGAILGYKVDFGKIFEIEGETLKFDLGNDEAIEGFLAVCPDEALTLFEAIRSAYSSYVLLGILKGADGRTISYCKVREYERYAQDLQMLKALVREYVPEQYDPFFRGPHYAAPWQKDYDASKAEGYTRYNLGTSKRSYDDFKKDVKKLFAGTHAENDERYKSMMQSFDDDVFLRRLKTSDNGSIPYQLHLEEMDAIIDRQGAHHPFLLENREKIESLVSFRIPYYVGPLTTKNARRAGDLADGEMRFAWSVRQEGKESERIYPWNWEDVIDKDKSAENFIRRMTGTCTYLQGEPVLPRCSLLYEKFCVLNELNGARWSQDGDDERRFCASDRAGIYEDLFKHGSVTYKKVEDWLVRHHRSHPHVRGGQGEARFESKLSSHMFFCNVLGVDDLEGDTVTMVERLILWNTLFEDRDILKEKIQREYGDRLTASQIKQICKKRFTGWGRLSEKLLCGLKAKTANGPMSIMDILEDGNPEGGHVGNAMVLMEVLRDEHFEFERLIDEYNIEKARGKGGLSVDDLPGSPALRRSVNQAMRIVAEIASIAGKPPANIFIEVTRDDDFKKKGFRTTRRYDNLREALASLKAEGAASLSELKRIGVDGLDTALSLYFMQNAKCMYCGEPLDIRHVMSGDHSYQIDHIIPQSYVKDDSFENRVLVHSHCNQSKSDALLIDSTIRKKMGHYWRELFDAGLIGEKKYRNLMRDHITEKQMQGFINRQLVETSQIVKFVRLMLADAYPETHVESIKASLSHQLREERGFVKCREANSYHHAHDALLAAEIGRFIQLRHGNLFENPIAATRAMRAFIKSQSEQYKKTRKMPGSASFIIGSFLTSGFDKETGEVFKDTWDADAECEKIRRFLNYRDCYISRMPEVTSGAFWDATVYSPKGGKSKMDLPLKKGLDPKKYGSYSGQQFAFFAISVVKKKAKQMYCFVPIPVSVAYGSGDEYELVSEYVKSLAQEQGMEFVSLARESIYKYQLIELNGDRLYITGLKKARNALEMAFTNAEYSLIRDMVDGKETLQESRIALFDHISRFCKLRSRRLAALIKFDYLREGFENASEEDQARSILNILKLINASDRMTDLSGIGGSKCAGCIQPTFTKELNSSDSNLVIIDQSVTGMFERRHRLEL

SEQ ID NO: 21648 - protein, 1380 aa, unidentified
  REGION 1..1380: note = Cas Enzyme sequence
MNLRNYGGDYSVGLDMGTGSVGWCVVDKNGRLLHFKKQPTWGSRLFDSAQPASEARVHRGQRRRYVRRRWRLDLLQGLFKEEMDKVDPEFFMRLNMSRLVEGDPIFNGNDFTIDDYYKRFPTIYHLRKWLMETDEKADLRLVYLAMHNIVKHRGNFLRQEEKNLKSSNADPSKATAAFFSALREWCSARGLEEPAKKDDQLAKVLTNEQKLNRSTLAQEIQPLIVISASDDPDFDPKKASKALANAMVGLAAEFKDVFGDFACEKTKISLGSDEDLEALRDTCPDDCTELLDALCGVYSAYVLQGLLSYASGESISANMIAKFNRYDEDLQTLKDLVHEYCDQVQFKAFFRGPTYRELDENDLSDRYSYDKAQGYTAYNLHKLGYDEFKKEVEKLLKGTGAQDDERYIDMMARFERQQFLRRLKTSDNGAIYYQLHLEELETIIKSQGRFYPFLKDDAGKIMSLVSFRIPYYVGPLTDRNARVDAHGNKRFQWSERKPGMEDATVTPWNWDKVIDKNKSAENFIMRMTGDCTYLAGEKTLPKCSLLYEEFCVLNELNGVRWSDDGDDWRRFDAAQREGIIRDLFHRYRRVTYKKIADWLVQQGEANNPRVKGGQGESALESKLGSLLFFTKDILHVDDVVPGTKLYEDVETIILWSTLFEDRSILKEKLEDEFGPSGSGLLDAAQIKAICKKRLTGWGRLSKRFLCGIRVDAQSGRSVSIMDVLREGNPNSTRRCGETMVMMEALRDEDLGFQKAVDDANRAYYAEQGSELGVNDLPGSPAIRRSLNQAIRIVDEIAGIAGHAPSNIFIEVTRDEDEKSKGKRTRRRYDQLKEALEAFKKDDPRIWEEIKEASPNDLDERLTLYFMQRGRCLYSGRPIDINQLSNAGLYEVDHIIPRAYIKDDSLENKALVYREENQRKTNELLLDESIRRKMSSEWRVLHDAHLIGDKKFNNLLRSRITEGAMKGFVARQLVETSQMVKLAQSLLEARYANEETKVVPVKASMSHNLREAVGFVKCREANDFHHAHDAYLACRIGLFIQMRHPGIYDNPIGYTRVVKDYVGSQAKVFNRTHQMPGSAGFVINSFLTSGFDKETGEIFKDTWDADAEVEGMRRALNYRQCYISRMPQEDTGAFWKATIYSPRNPKMGPKLALAVKRGLDPKQFGGFSSQQFAYFFIYEAKKKGKPCFQFAEVPVWLAERINARPEALVEYASGLAEGAGLDFVRVVRSKIYKKQLIELDGERFFITGKKEMRNAVEAAFSTSQLALLEGGVADCSFTDVLDILRAVQSAASSRLLRQIKMDDLITNGDKLSGEESLELAKRILLLVNGTSNMVDLSAADGSKFSGCIQPNYSKLLNDPKTNFYIIDQSVTGMFERRTRVG

SEQ ID NO: 21649 - protein, 1380 aa, unidentified
  REGION 1..1380: note = Cas Enzyme sequence
MNLRNYGGDYSVGLDMGTGSVGWCVVDKNGRLLHFKKQPTWGSRLFDSAQPASEARVHRGQRRRYVRRRWRLDLLQGLFKEEMDKVDPEFFMRLNMSRLVEGDPIFNGNDFTIDDYYKRFPTIYHLRKWLMETDEKADLRLVYLAMHNIVKHRGNFLRQEEKNLKSSNADPSKATAAFFSALREWCSARGLEEPAKKDDQLAKVLTNEQKLNRSTLAQEIQPLIVISASDDPDFDPKKASKALANAMVGLAAEFKDVFGDFACEKTKISLGSDEDLEALRDTCPDDCTELLDALCGVYSAYVLQGLLSYASGESISANMIAKFNRYDEDLQTLKDLVHEYCDQAQFKAFFRGPTYRELDENDLSDRYSYDKAQGYTAYNLHKLGYDEFKKEVEKLLKGTGAQDDERYIDMMARFERQQFLRRLKTSDNGAIYYQLHLEELETIIKNQGRFYPFLKDDAGKIMSLVSFRIPYYVGPLTDRNARVDAHGNKRFQWSERKPGMEDATVTPWNWDKVIDKNKSAENFIMRMTGDCTYLAGEKTLPKCSLLYEEFCVLNELNGVRWSDDGDDWRRFDAAQREGIIRDLFHRYRRVTYKKIADWLVQQGEANNPRVKGGQGESALESKLGSLLFFTKDILHVDDVVPGTKLYEDVETIILWSTLFEDRSILKEKLEDEFGPSGSGLLDAAQIKAICKKRLTGWGRLSKRFLCGIRVDAQSGRSVSIMDVLREGNPNSTRRCGETMVMMEALRDEDLGFQKAVDDANRAYYAEQGSELGVNDLPGSPAIRRSLNQAIRIVDEIAGIAGHAPSNIFIEVTRDEDEKSKGKRTRRRYDQLKEALEAFKKDDPRIWEEIKEASPNDLDERLTLYFMQRGRCLYSGRPIDINQLSNAGLYEVDHIIPRAYIKDDSLENKALVYREENQRKTNELLLDESIRRKMSSEWRVLHDAHLIGDKKFNNLLRSRITEGAMKGFVARQLVETSQMVKLAQSLLEARYANEETKVVPVKASMSHNLREAVGFVKCREANDFHHAHDAYLACRIGLFIQMRHPGIYDNPIGYTRVVKDYVGSQAKVFNRTHQMPGSAGFVINSFLTSGFDKETGEIFKDAWDADAEVEGMRRALNYRQCYISRMPQEDTGAFWKATIYSPRNPKMGPKLALAVKRGLDPKQFGGFSSQQFAYFFIYEAKKKGKPCFQFAEVPVWLAERINARPEALVEYASGLAEGAGLDFVRVVRSKIYKKQLIELDGERFFITGKKEMRNAVEAAFSTSQLALLEGGVADCSFTDVLDILRAVQSAASSRLLRQIKMDDLITNGDKLSGEESLELAKRILLLVNGTSNMVDLSAADGSKFSGCIQPNYSKLLNDPKTNFYIIDQSVTGMFERRTRVG

SEQ ID NO: 21650 - protein, 1022 aa, unidentified
  REGION 1..1022: note = Cas Enzyme sequence
LKNYLENIEFVSRAELSEFFAKNNHDIIDIRVRALDEMVTPVELTAALLHIAKRRGYKAFYELSDENNNAKDKKAKEEEEKDIYKALTNTADVIKNGGYRSIAEAIMKDSEHFSDKISGRYKYRNIKEKDEKGKKKSDGKISENDILFPTEMFEDEVRKILGKQKEFYPQLTDESIDKIFDIIFSRRDFEDGPGNTDDENRPYKGFVDSIGNCPYYKNEKRGHRYTVIGDLFALANKLSQYKYVEKNTGEVVKLPRDLMRNIVNQSLQSGSITKTKINELAKELNIVILNTKTAKNENIADCIKYLKAVKPIFESYGFDWDKLISEEYTDQNSLLNRVGDTISFNITPKRRIDALNKIDELKGKDELIKKLSKQNFSGTAKVSDKYMIDAINAFFDGTLVGEFQANVQQDEFSVSIKTEKLLKLKPFDNNSEYAQNPVVFRAINETRKVVNAIVQKYGAPNAMNIEIASELNKSFDTRQKISTQQNKNEKERKNAIKQISLITGLDEREIRPQYIERYLLGELQGWRCMYSNEEITNKKEAILNKGKQYEIDHIVPFSRILDDTLNNKALVLARENQKKGARTPLMYLSAEKEKEFKQRVNKLFKGNKITEKKYRYFMLESLVGEDAEKILGDWKTRNLNDTRYIAKFLVKYFNDNLYFAREKGDDKRPVVYAVKGAITSSLRRQWLNKETWGRYDKGELKKITYFDHAVDAIVIANCLPAYVIIAAENHKLRDIYYSAGKIKTEEYRKSLDNCVDTLMKYYGMSPTVSRKLLEKVKETPSLLKNIRFEVEYRVRDYELMKYFFNYDTKVSEDTLDQIFRNDLYKIYDHQFADSIEMPIVSIKPERKYSGQMVKDGFIKKKDAISGKNSVKTIGENNSTVLNDSRFYCVDVYRTCNDETNLNFIKYTDLLKRNNHLYLRSDYRYPDDYAMHEMYLFYGDYIEITKKNKICCGYYFSLKNSSRNELYMSKGNTRRKLNNMKENEVCSITKKDTVKKFEIDILGKKLGEVKKCGEPLSLLPEKN

SEQ ID NO: 21651 - protein, 1095 aa, unidentified
  REGION 1..1095: note = Cas Enzyme sequence
MKYIIGLDIGIGSVGWAVVRNDDDCKRLEDFGVRIFESGEIIESNKNIRKSQRRRKYRGMRRRIRRRNHRKERLKNYLENIEFVSRAELSEFFAKNNHDIIDIRVRALDEKVTPVELTAALLHIAKRRGYKAFYELSDENNNAKDKKAKEEEEKDIYKALTNTADVIKNGGYRSIAEAIMKDSEHFSDKISGRYKYRNIKEKDEKGKKKSDSKISENDILFPTEMFEDEVRKILGKQKEFYPQLTDESIDKIFDIIFSRRDFEDGPGNTDDENRPYKGFVDSIGNCPYYKNEKRGHRYTVIGDLFALANKLSQYKYVEKNTGEVVKLPRDLMRNIVNQSLQSGSITKTKINELAKGLNIVILNTKTAKNENIADCIKYLKAVKPIFESYGFDWDKLISEEYTDQNSLLNRVGDTISFNITPKRRIDALNKIDELKGKDELIKKLSKQNFSGTAKVSDKYMIDAINAFFDGTLVGEFQANVQQDEFSVSIKTEKLLKLKPFDNNSEYAQNPVVFRAINETRKVVNAIVQKYGAPNAMNIEIASELNKSFDTRQKISTQQNKNEKERKNAIKQISLITGLDEREIRPQYIERYLLGELQGWRCMYSNEEITNKKEAILNKGKQYEIDHIVPFSRILDDTLNNKALVLARENQKKGARTPLMYLSAEKEKEFKQRVNKLFKGNKITEKKYRYFMLESLVGEDAEKILGDWKTRNLNDTRYIAKFLVKYFNDNLYFAREKGDDKRPVVYAVKGAITSSLRRQWLNKETWGRYDKGELKKITYFDHAVDAIVIANCLPAYVIIAAENHKLRDIYYSAGKIKTEEYRKSLDNCVDTLMKYYGMSPTVSRKLLEKVKETPSLLKNIRFEVEYRVRDYELMKYFFNYDTKVSEDTLDQIFRNDLYKIYDHQFADSIEMPIVSIKPERKYSGQMVKDGFIKKKDAISGKNSVKTIGENNSTVLNDSRFYCVDVYRTCNDETNLNFIKYTDLLKRNNHLYLRSDYRYPDDYAMHEMYLFYGDYIEITKKNKICCGYYFSLKNSSRNELYMSKGNTRRKLNNMKENEVCSITKKDTVKKFEIDILGKKLGEVKKCGEPLSLLPEKN

SEQ ID NO: 21652 - protein, 1094 aa, unidentified
  REGION 1..1094: note = Cas Enzyme sequence
MKYIIGLDIGIGSVGWAVVRNDDDCKRLEDFGVRIFESGEIIESNKNIRKSQRRRKYRGMRRRIRRRNHRKERLKNYLENIGFVSRAELSEFFAKNNHDIIDIRVRALDEMVTPVELTAALLHIAKRRGYKAFYELSDENNNAKDKKAKEEEKDIYKALTNTADVIKNGGYRSIAEAIMKDSEHFSDKISGRYKYRNIKEKDEKGKKKSDGKISENDILFPTEMFEDEVRKILGKQKEFYPQLTDESIDKIFDIIFSRRDFEDGPGNTDDENRPYKGFVDSIGNCPYYKNEKRGHRYTVIGDLFALANKLSQYKYVEKNTGEVVKLPRDLMRNIVNQSLQSGSITKTKINELAKEFNIVILNTKTAKNENIADCIKYLKAVKPIFESYGFDWDKLISEEYTDQNSLLNRVGDTISFNITPKRRIDALNKIDELKGKDELIKKLSKQNFSGTAKVSDKYMIDAINAFFDGTLVGEFQANIQQDEFSVSIKTEKLLKLKPFDNNSEYAQNPVVFRAINETRKVVNAIVQKYGAPNAMNIEIASELNKSFDTRQKISTQQNKNEKERKNAIKQISLITGLDEREIRPQYIERYLLGELQGWRCMYSNEEITNKKEAILNKGKQYEIDHIVPFSRILDDTLNNKALVLARENQKKGARTPLMYLSAEKEKEFKQRVNKLFKGNKITEKKYRYFMLESLVGEDAEKILGDWKTRNLNDTRYIAKFLVKYFNDNLYFAREKGDDKRPVVYAVKGAITSSLRRQWLNKETWGRYDKGELKKITYFDHAVDAIVIANCLPAYVIIAAENHKLRDIYYSAGKIKTEEYRKSLDNCVDTLMKYYGMSPTVSRKLLEKVKETPSLLKNIRFEVEYRVRDYELMKYFFNYDTKVGEDTLDQIFRNDLYKIYDHQFADSIEMPIVSIKPERKYSGQMVKDGFIKKKDAISGKNSVKTIGENNSTVLNDSRFYCVDVYRTCNDETNLNFIKYTDLLKRNNHLYLRSDYRYPDDYAMHEMYLFYGDYIEITKKNKICCGYYFSLKNSSRNELYMSKGNTRRKLNNMKENEVCSITKKDTVKKFEIDILGKKLGEVKKCGEPLSLLPEKN

SEQ ID NO: 21653 - protein, 1093 aa, unidentified
  REGION 1..1093: note = Cas Enzyme sequence
MKYIIGLDIGIGSVGWAVVRNDDDCKRLEDFGVRIFESGEIIESNKNIRNSQRRRKYRGMRRRIRRRNHRKERLKNYLENIEFISRAELSEFFAKNNHDIIDIRVRALDEKVTPVELTAALLHIAKRRGYKAFYELSDENNNAKDKKAKEEKDIYKALTNTADVIKNGGYRSIAEAITKDSEHFSDKISGRYKYRNIKEKDEKGKKESSGKISENDILFPTEMFEDEVRKILGKQKEFYPQLTDESIDKIFDIIFSRRDFEDGPGNTDDENRPYKGFVDSIGNCPYYKNEKRGHRYTVIGDLFALANKLSQYKYVEKNTGEVVKLPRDLMRNIVNQSLQSGSITKTKINELAKEFNIVILNTKTAKNENIADCIKYLKAVKPIFESYGFDWDKLISEEYTDQNSLLNRVGDTISFNITPKRRIDALNKIDELKGKDELIKKLSEQNFSGTAKVSDKYMIDAINAFFDGTLVGEFQANVQQDEFSVSIKTEKLLKLKPFDNNSEYAQNPVVFRAINETRKVVNAIVQKYGAPNAMNIEIASELNKSFDTRQKISTQQNKNEKERKNAIKQISLITGLDEREIRPQYIERYLLGELQGWRCMYSNEEITNKKEAILNKGKQYEIDHIVPFSRILDDTLNNKALVLARENQKKGARTPLMYLSAEKEKEFKQRVNKLFKDNKITEKKYRYFMLESLVGEDAEKILGDWKTRNLNDTRYIAKFLVKYFNDNLYFAREKGDDKRPVVYAVKGAITSSLRRQWLNKETWGRYDKGELKKITYFDHAVDAIVIANCLPAYVIIATENHKLRDIYYSAGKIKTEEYRKSLDNCVDTLMKYYGMSPAVSRKLLEKVKETPSLLKNIRFEVEYRVRDYELMKYFFNYDTKVGEDTLDQIFRNDLYKIYDHQFADSIEMPIVSIKPERKYSGQMVKDGFIKKKDAISGKNSVKTIGENNSTVLNDSRFYCVDVYRTCNDETNLNFIKYTDLLKRNNHLYLRSDYRYPDDYAMHEMYLFYGDYIEITKKNKICCGYYFSLKNSSRNELYMSKGNTRRKLNNMKENEVCSITKKDTVKKFEIDILGKKLGEVKKCGEPLSLLPEKN

SEQ ID NO: 21654 - protein, 1095 aa, unidentified; identical to SEQ ID NO: 21651
  REGION 1..1095: note = Cas Enzyme sequence

SEQ ID NO: 21655 - protein, 1123 aa, unidentified
  REGION 1..1123: note = Cas Enzyme sequence
LINLYIKFLSSNLIIILKNIFVNRKERIMKYIIGLDIGIGSVGWAVVRNDDDCKRLEDFGVRIFESGEIIESNKNIRKSQRRRKYRGMRRRIRRRNHRKERLKNYLENIEFVSRAELSEFFAKNNHDIIDIRVRALDEKVTPVELTAALLHIAKRRGYKAFYELSDENNNAKDKKAKEEEEKDIYKALTNTADVIKNGGYRSIAEAIMKDSEHFSDKISGRYKYRNIKEKDEKGKKKSDGKISENDILFPTEMFEDEVRKILGKQKEFYSQLTDESIDKIFDIIFSRRDFEDGPGNTDDENRPYKGFVDSIGNCPYYKNEKRGHRYTVIGDLFALANKLSQYKYVEKNTGEVVKLPRDLMRNIVNQSLQSGSITKTKINELAKEFNIVILNTKTAKNENIADCIKYLKAVKPIFESYGFDWDKLISEEYTDQNSLLNRVGDTISFNITPKRRIDALNKIDELKGKDELIKKLSKQNFSGTAKVSDKYMIDAINAFFDGTLVGEFQANVQQDEFSVSIKTEKLLKLKPFDNNSEYAQNPVVFRAINETRKVVNAIVQKYGAPNAMNIEIASELNKSFDTRQKISTQQNKNEKERKNAIKQISLITGLDEREIRPQYIERYLLGELQSWRCMYSNEEITNKKEAILNKEKQYEIDHIVPFSRILDDTLNNKALVLARENQKKGARTPLMYLSAEKEKEFKQRVNKLFKGNKITEKKYRYFMLESLVGEDAEKILGDWKTRNLNDTRYIAKFLVKYFNDNLYFAREKGDDKRPVVYAVKGAITSSLRRQWLNKETWGRYDKGELKKITYFDHAVDAIVIANCLPAYVIIAAENHKLRDIYYSAGKIKTEEYRKSLDNCVDTLMKYYGMSPAVSRKLLEKVKETPSLLKNIRFEVEYRVRDYELMKYFFNYDTKVGEDTLDQIFRNDLYKIYDHQFADSIEMPIVSIKPERKYSGQMVKDGFIKKKDAISGKNSVKTIGENNSTVLNDSRFYCVDVYRTCNDETNLNFIKYTDLLKRNNHLYLRSDYRYPDDYAMHEMYLFYGDYIEITKKNKICCGYYFSLKNSSRNELYMSKGNTRRKLNNMKENEVCSITKKDTVKKFEIDILGKKLGEVKKCGEPLSLLPEKN

SEQ ID NO: 21656 - protein, 1109 aa, unidentified
  REGION 1..1109: note = Cas Enzyme sequence
IILKNIFVNRKERIMKYIIGLDIGIGSVGWAVVRNDDDCKRLEDFGVRIFESGEIIESNKNIRNSQRRRKYRGMRRRIRRRNHRKERLKNYLENIEFVSRAELSEFFAKNNHDIIDIRVRALDEMVTPVELTAALLHIAKRRGYKAFYELSDENNNAKDKKAKEEEEKDIYKALTNTADVIKNGGYRSIAEAIMKDSEHFSDKISGRYKYRNIKEKDEKGKKKSDGKISENDILFPTEMFEDEVRKILGKQKEFYPQLTDESIDKIFDIIFSRRDFEDGPGNTDDENRPYKGFVDSIGNCPYYKNEKRGHRYTVIGDLFALANKLSQYKYVEKNTGEVVKLPRDLMRNIVNQSLQSGSITKTKINELAKELNIVILNTKTAKNENIADCIKYLKAVKPIFESYGFDWDKLISEEYTDQNSLLNRVGDTISFNITPKRRIDALNKIDELKGKDELIKKLSKQNFSGTAKVSDKYMIDAINAFFDGTLVGEFQANVQQDEFSVSIKTEKLLKLKPFDNNSEYAQNPVVFRAINETRKVVNAIVQKYGAPNAMNIEIASELNKSFDTRQKISTQQNKNEKERKNAIKQISLITGLDEREIRPQYIERYLLGELQGWRCMYSNEEITNKKEAILNKGKQYEIDHIVPFSRILDDTLNNKALVLARENQKKGARTPLMYLSAEKEKEFKQRVNKLFKGNKITEKKYRYFMLESLVGEDAEKILGDWKTRNLNDTRYIAKFLVKYFNDNLYFAREKGDDKRPVVYAVKGAITSSLRRQWLNKETWGRYDKGELKKITYFDHAVDAIVIANCLPAYVIIAAENHKLRDIYYSAGKIKTEEYRKSLDNCVDTLMKYYGMSPAVSRKLLEKVKETPSLLKNIRFEVEYRVRDYELMKYFFNYDTKVGEDTLDQIFRNDLYKIYDHQFADSIEMPIVSIKPERKYSGQMVKDGFIKKKDAISGKNSVKTIGENNSTVLNDSRFYCVDVYRTCNDETNLNFIKYTDLLKRNNHLYLRSDYRYPDDYAMHEMYLFYGDYIEITKKNKICCGYYFSLKNSSRNELYMSKGNTRRKLNNVKENEVCSITKKDTVKKFEIDILGKKLGEVKKYGEPLSLLPEKN

SEQ ID NO: 21657 - protein, 1095 aa, unidentified
  REGION 1..1095: note = Cas Enzyme sequence
MKYIIGLDIGIGSVGWAVVRNDDDCKRLEDFGARIFESGEIIESNKNIRKSQRRRKYRGMRRRIRRRNHRKERLKNYLENIKFVNRAELSEFFAKNNHDIIDIRVRALDEKVTPVELTAALLHIAKRRGYKAFYELSDENNNAKDKKAKEEEEKDIYKALTNTADVIKNGGYRSIAEAIMKDSEHFSDKISGRYKYRNIKEKDEKGKKKSDGKISENDILFPTEMFEDEVRKILSKQKEFYSQLTDESIDKIFDIIFSRRDFEDGPGNTDDENRPYKGFVDSIGNCPYYKNEKRGHRYTVIGDLFALANKLSQYKYVEKNTGEVVKLPRDLMRNIVNQSLQSGSITKTKINELAKELNIVILNTKTAKNENIADCIKYLKAVKPIFESYGFDWDKLISEEYTDQNSLLNRVGDTISFNITPKRRIDALNKIDELKGKDELIKKLSKQNFSGTAKVSDKYMIDAINAFFDGTLVGEFQANVQQDEFSVSIKTEKLLKLKPFDNNSEYAQNPVVFRAINETRKVVNAIVQKYGAPNAMNIEIASELNKSFDTRQKISTQQNKNEKERKNAIKQISLITGLDEREIRSQYIERYLLGELQGWRCMYSNEEITNKKEAILNKGKQYEIDHIVPFSRILDDTLNNKALVLARENQKKGARTPLMYLSAEKEKEFKQRVNKLFKGNKITEKKYRCFMLESLVGEDAEKILGDWKTRNLNDTRYIAKFLVKYFNDNLYFAREKGDDKRPVVYAVKGAITSSLRRQWLNKETWGRYDKGELKKITYFDHAVDAIVIANCLPAYVIIAAENHKLRDIYYSAGKIKTDEYRKSLDNCVDTLMKYYGMSPTVSRKLLEKVKETPSLLKNIRFEVEYRVRDYELMKYFFNYDTKVGKDTLDQIFRNDLYKIYDHQFADSIEMPIVSIKPERKYSGQMVKDGFIKKKDAISGKNSVKTIGENNSTVLNDSRFYCVDVYRTCNDETNLNFIKYTDLLKRNNHLYLRSDYRYPDDYAMHEMYLFYGDYIEITKKNKICCGYYFSLKNSSRNELYMSKGNTRRKLNNMKENEVCSITKKDTVKKFEIDILGKKLGEVKKCGEPLSLLPEKN

SEQ ID NO: 21658 - protein, 1092 aa, unidentified
  REGION 1..1092: note = Cas Enzyme sequence
MKYIIGLDIGIGSVGWAVVRNDDDCKRLEDFGVRIFESGEIIESNKNIRKSQRRRKYRGMRRRIRRRNHRKERLKNYLENIGFVSRAELSEFFAKNNHDIIDIRVRALDEMVTPVELTAALLHIAKRRGYKAFYELSDENNNAKDKKAKEEEKDIYKALTNTADVIKNGGYRSIAEAIMKDSEHFSDKISGRYKYRNIKEKDEKGKKKSDGKISENDILFPTEMFEDEVRKILGKQKEFYPQLTDESIDKIFDIIFSRRDFEDGPGNTDDENRPYKGFVDSIGNCPYYKNEKRGHRYTVIGDLFALANKLSQYKYVEKNTGEVVKLPRDLMRNIVNQSLQSGSITKTKINELAKEFNIVILNTKTAKNENIADCIKYLKAVKPIFESYGFNWDKLISEEYTDQNSLLNRVGDTISFNITPKRRIDALNKIDELKGKDELIKKLSKQNFSGTAKVSDKYMIDAINAFFDGTLVGEFQANVQQDEFSVSIKTEKLLKLKPFDNNSEYAQNPVVFRAINETRKVVNAIVQKYGAPNAMNIEIASELNKSFDTRQKISTQQNKNEKERKNAIKQISLITGLDEREIRPQYIERYLLGELQGWRCMYSNEEITNKKEAILNKGKQYEIDHIVPFSRILDDTLNNKALVLARENQKKGARTPLMYLSAEKEKEFKQRVNKLFKGNKITEKKYRYFMLESLVGEDAEKILGDWKTRNLNDTRYIAKFLVKYFNDNLYFAREKGDDKRPVVYAVKGAITSSLRRQWLNKETWGRYDKGELKKITYFDHAVDAIVIANCLPAYVIIAAENHKLRDIYYSAGKIKTEEYRKSLDNCVDTLMKYYGMSPAVSRKLLEKVKETPSLLKNIRFEVEYRVRDYELMKYFFNYDTKVGEDTLDQIFRNDLYKIYDHQFADSIEMPIVSIKPERKYSGQMVKDNFLKKRVANSENKYVKTIDKNNDAVLDNSYYYCVEVYRTRSGNIDLQGIKYTDLVNKNKKLYLKPCYKYPENYYKYIMYLFKGDYLRIKGPKSTRLGFYKAVNNINQNSIKITRYNSKYTRAFREESTTISADAEIEKIYVDILGKKGKVLTKHGEPLSLLPEKN

SEQ ID NO: 21659 - protein, 1094 aa, unidentified
  REGION 1..1094: note = Cas Enzyme sequence
MKYIIGLDIGIGSVGWAVVRNDDDCKRLEDFGVRIFESGEIIESNKNIRKSQRRRKYRGMRRRIRRRNHRKERLKNYLENIGFVSRAELSEFFAKNNHDIIDIRVRALDEMVTPVELTAALLHIAKRRGYKAFYELSDENNNAKDKKAKEEEKDIYKALTNTADVIKNGGYRSIAEAIMKDSEHFSDKISGRYKYRNIKEKDEKGKKKSDGKISENDILFPTEMFEDEVRKILGKQKEFYPQLTDESIDKIFDIIFSRRDFEDGPGNTDDENRPYKGFVDSIGNCPYYKNEKRGHRYTVIGDLFALANKLSQYKYVEKNTGEVVKLPRDLMRNIVNQSLQSGSITKTKINELAKEFNIVILNTKTAKNENIADCIKYLKAVKPIFESYGFDWDKLISEEYTDQNSLLNRVGDTISFNITPKRRIDALNKIDELKGKDELIKKLSKQNFSGTAKVSDKYMIDAINAFFDGTLVGEFQANIQQDEFSVSIKTEKLLKLKPFDNNSEYAQNPVAFRAINETRKVVNAIVQKYGAPNAMNIEIASELNKSFDTRQKISTQQNKNEKERKNAIKQISLITGLDEREIRPQYIERYLLGELQGWRCMYSNEEITNKKEAILNKGKQYEIDHIVPFSRILDDTLNNKALVLARENQKKGARTPLMYLSTEKEKEFKQRVNKLFKGNKITEKKYRYFMLESLVGEDAEKILGDWKTRNLNDTRYIAKFLVKYFNDNLYFAREKGDDKRPVVYAVKGAITSSLRRQWLNKETWGRYDKGELKKITYFDHAVDAIVIANCLPAYVIIAAENHKLRDIYYSAGKIKTEEYRKSLDNCVDTLMKYYGMSPAVSRKLLEKVKETPSLLKNIRFEVEYRVRDYELMKYFFNYDTKVGEDTLDQIFRNDLYKIYDHQFADSIEMPIVSIKPERKYSGQMVKDRFIKKKDAISGKNSVKTIGENNSTVLNDSRFYCVDVYRTCNDETNLNFIKYTDLLKRNNHLYLRSDYRYPDDYAMHEMYLFRGDYVEITKKNIIRCGYYFSLKDSSKNELYISKGNTRRKLNNMKEKEACSITKKDTVKKFEIDILGKKLGKVKKYGKPLSLLPEKN

SEQ ID NO: 21660 - protein, 1109 aa, unidentified; identical to SEQ ID NO: 21656
  REGION 1..1109: note = Cas Enzyme sequence

SEQ ID NO: 21661 - protein, 1092 aa, unidentified
  REGION 1..1092: note = Cas Enzyme sequence
MKYIIGLDIGIGSVGWAVVRNDDDCKRLEDFGVRIFESGEIIESNKNIRNSQRRRKYRGMRRRIRRRNHRKERLKNYLENIEFVSRAELSEFFAKNNHDIIDIRVRALDEMVTPVELTAALLHIAKRRGYKAFYELSDENNNAKDKKAKEEEKDIYKALTNTADVIKNGGYRSIAEAIMKDSEHFSDKISGRYKYRNIKEKDEKGKKESSGKISENDILFPTEMFEDEVRKILGKQKEFYSQLTDESIDKIFDIIFSRRDFEDGPGNTDDENRPYKGFVDSIGNCPYYKNEKRGHRYTVIGDLFALANKLSQYKYVEKNTGEVVKLPRDLMRNIVNQSLQSGSITKTKINELAKELNIVILNTKTAKNENIADCIKYLKAVKPIFESYGFDWDKLISEEYTDQNSLLNRVGDTISFNITPKRRIDALNKIDELKGKDELIKKLSEQNFSGTAKVSDKYMIDAINAFFDGTLVGEFQANVQQDEFSVSIKTEKLLKLKPFDNNSEYAQNPVVFRAINETRKVVNAIVQKYGAPNAMNIEIASELNKSFDTRQKISTQQNKNEKERKNAIKQISLITGLDEREIRPQYIERYLLGELQGWRCMYSNEEITNKKEAILNKGKQYEIDHIVPFSRILDDTLNNKALVLARENQKKGARTPLMYLSAEKEKEFKQRVNKLFKGNKITEKKYRYFMLESLVGEDAEKILGDWKTRNLNDTRYIAKFLVKYFNDNLYFAREKGDDKRPVVYAVKGAITSSLRRQWLNKETWGRYDKGELKKITYFDHAVDAIVIANCLPAYVIIAAENHKLRDIYYSAGKIKTEEYRKSLDNCVDTLMKYYGMSPAVSRKLLEKVKETPSLLKNIRFEVEYRVRDYELMKYFFNYDTKVGEDTLDQIFRNDLYKIYDHQFVDSIEMPIVSIKPERKYSGQMVKDNFLKKRVANSENKYVKTIDKNNDAVLDNSYYYCVEVYRTRSGNIDLQGIKYTDLVNKNKKLYLKPCYKYPENYYKYIMYLFKGDYLRIKGPKSTRLGFYKAVNNINQNSIKITRYNSKYTRAFREESTTISADAEIEKIYVDILGKKGKVLTKHGEPLSLLPEKN

SEQ ID NO: 21662 - protein, 1094 aa, unidentified
  REGION 1..1094: note = Cas Enzyme sequence
MKYIIGLDIGIGSVGWAVVRNDDDCKRLEDFGVRIFESGEIIESNKNIRNSQRRRKYRGMRRRIRRRNHRKERLKNYLENIEFVSRAELSEFFAKNNHDIIDIRVRALDEMVTPVELTAALLHIAKRRGYKAFYELSDENNNAKDKKAKEEEKDIYKALTNTADVIKNGGYRSIAEAIMKDSEHFSDKISGRYKYRNIKEKDEKGKKESSGKISENDILFPTEMFEDEVRKILGKQKEFYSQLTDESIDKIFDIIFSRRDFEDGPGNTDDENRPYKGFVDSIGNCPYYKNEKRGHRYTVIGDLFALANKLSQYKYVEKNTGEVVKLPRDLMRNIVNQSLQSGSITKTKINELAKELNIVILNTKTAKNENIADCIKYLKAVKPIFESYGFDWDKLISEEYTDQNSLLNRVGDTISFNITPKRRIDALNKIDELKGKDELIKKLSKQNFSGTAKVSDKYMIDAINAFFDGTLVGEFQANVQQDEFSVSIKTEKLLKLKPFDNNSEYAQNPVVFRAINETRKVVNAIVQKYGAPNAMNIEIASELNKSFDTRQKISTQQNKNEKERKNAIKQISLITGLDEREIRPQYIERYLLGELQGWRCMYSNEEITNKKEAILNKEKQYEIDHIVPFSRILDDTLNNKALVLARENQKKGARTPLMYLSAEKEKEFKQRVNKLFKGNKITEKKYRYFMLESLVGEDAEKILGDWKTRNLNDTRYIAKFLVKYFNDNLYFAREKGDDKRPVVYAVKGAITSSLRRQWLNKETWGRYDKAELKKITYFDHAVDAIVIANCLPAYVIIAAENHKLRDIYYSAGKIKTEEYRKSLDNCVDTLMKYYGMSPAVSRKLLEKVQETPSLLKNIRFEVEYRVRDYELMKYFFNYDTKVGEDTLDQIFRNDLYKIYDHQFADSIEMPIVSIKPERKYSGQMVKDRFIKKKDAISGKNSVKTIGENNSTVLNDSRFYCVDVYRTCNDETNLNFIKYTDLLKRNNHLYLRSDYRYPDDYAMHEMYLFRGDYIEITKKNIIRCGYYFSLKDSSKNELYISKGNTRRKLNNMKEKEACSITKKDTVKKFEIDILGKKLGEVKKYGEPLSLLPEKN

SEQ ID NO: 21663 - protein, 1095 aa, unidentified
  REGION 1..1095: note = Cas Enzyme sequence
MKYIIGLDIGIGSVGWAVVRNDDDCKRLEDFGVRIFESGEIIESNKNIRNSQRRRKYRGMRRRIRRRNHRKERLKNYLENIEFVSRAELSEFFAKNNHDIIDIRVRALDEMVTPVELTAALLHIAKRRGYKAFYELSDENNNAKDKKAKEEEEKDIYKALTNTADVIKNGGYRSIAEAIMKDSEHFSDKISGRYKYRNIKEKDEKGKKKSDGKISENDILFPTEMFEDEVRKILGKQKEFYPQLTDESIDKIFDIIFSRRDFEDGPGNTDDENRPYKGFVDSIGNCPYYKNEKRGHRYTVIGDLFALANKLSQYKYVEKNTGEVVKLPRDLMRNIVNQSLQSGSITKTKINELAKELNIVILNTKTAKNENIADCIKYLKAVKPIFESYGFDWDKLISEEYTDQNSLLNRVGDTISFNITPKRRIDALNKIDELKGKDELIKKLSKQNFSGTAKVSDKYMIDAINAFFDGTLVGEFQANVQQDEFSVSIKTEKLLKLKPFDNNSEYAQNPVVFRAINETRKVVNAIVQKYGAPNAMNIEIASELNKSFDTRQKISTQQNKNEKERKNAIKQISLITGLDEREIRPQYIERYLLGELQGWRCMYSNEEITNKKEAILNKGKQYEIDHIVPFSRILDDTLNNKALVLARENQKKGARTPLMYLSAEKEKEFKQRVNKLFKGNKITEKKYRYFMLESLVGEDAEKILGDWKTRNLNDTRYIAKFLVKYFNDNLYFAREKGDDKRPVVYAVKGAITSSLRRQWLNKETWGRYDKGELKKITYFDHAVDAIVIANCLPAYVIIAAENHKLRDIYYSAGKIKTEEYRKSLDNCVDTLMKYYGMSPAVSRKLLEKVKETPSLLKNIRFEVEYRVRDYELMKYFFNYDTKVGEDTLDQIFRNDLYKIYDHQFADSIEMPIVSIKPERKYSGQMVKDRFIKKKDAISGKNSIKTIGENNSTVLNDSRFYCVDVYRTCNDETNLNFIKYTDLLKRNDHLYLRSDYRYPDDYAMHEMYLFRGDYIEITKKNKICCGYYFSLKDSSKNELYISKGNTRRKLNNMKEKEACSITKKDTVKKFEIDILGKKLGEVKKYGEPLSLLPEKN

SEQ ID NO: 21664 - protein, 1092 aa, unidentified
  REGION 1..1092: note = Cas Enzyme sequence
MKYIIGLDIGIGSVGWAVVRNDDDCKRLEDFGVRIFESGEIIESNKNIRKSQRRRKYRGMRRRIRRRNHRKERLKNYLENIEFVSRAELSEFFAKNNHDIIDIRVRALDEKVTPVELTAALLHIAKRRGYKAFYELSDENNNAKDKKAKEEEKDIYKALTNTADVIKNGGYRSIAEAIMKDSEHFSDKISGRYKYRNIKEKDEKGKKKSDGKISENDILFPTEMFEDEVRKILGKQKEFYPQLTDESIDKIFDIIFSRRDFEDGPGNTDDENRPYKGFVDSIGNCPYYKNEKRGHRYTVIGDLFALANKLSQYKYVEKNTGEVVKLPRDLMRNIVNQSLQSGSITKTKINELAKEFNIVILNTKTAKNENIADCIKYLKAVKPIFESYGFNWDKLISEEYTDQNSLLNRVGDTISFNITPKRRIDALNKIDELKGKDELIKKLSKQNFSGTAKVSDKYMIDAINAFFDGTLVGEFQANVQQDEFSVSIKTEKLLKLKPFDNNSEYAQNPVVFRAINETRKVVNAIVQKYGAPNAMNIEIASELNKSFDTRQKISTQQNKNEKERKNAIKQISLITGLDEREIRPQYIERYLLGELQGWRCMYSNEEITNKKEAILNKGKQYEIDHIVPFSRILDDTLNNKALVLARENQKKGARTPLMYLSAEKEKEFKQRVNKLFKGNKITEKKYRYFMLESLVGEDAEKILGDWKTRNLNDTRYIAKFLVKYFNDNLYFAREKGDDKRPVVYAVKGAITSSLRRQWLNKETWGRYDKGELKKITYFDHAVDAIVIANCLPAYVIIAAENHKLRDIYYSAGKIKTEEYRKSLDNCVDTLMKYYGMSPAVSRKLLEKVKETPSLLKNIRFEVEYRVRDYELMKYFFNYDTKVGEDTLDQIFRNDLYKIYDHQFADSIEMPIVSIKPERKYSGQMVKDNFLKKRVANSENKYVKTIDKNNDAVLDNSYYYCVEVYRTRSGNIDLQGIKYTDLVNKNKKLYLKPCYKYPENYYKYIMYLFKGDYLRIKGPKSTRLGFYKAVNNINQNSIKITRYNSKYTRAFREESTTISADAEIEKIYVDILGKKGKVLTKHGEPLSLLPEKN

SEQ ID NO: 21665 - protein, 1094 aa, unidentified
  REGION 1..1094: note = Cas Enzyme sequence
MKYIIGLDIGIGSVGWAVVRNDDDCKRLEDFGVRIFESGEIIESNKNIRKSQRRRKYRGMRRRIRRRNHRKERLKNYLENIEFVSRAELSEFFAKNNHDIIDIRVRALDEKVTPVELTAALLHIAKRRGYKAFYELSDENNNAKDKKAKEEEKDIYKALTNTADVIKNGGYRSIAEAIMKDSEHFSDKISGRYKYRNIKEKDEKGKKKSDSKISENDILFPTEMFEDEVRKILGKQKEFYPQLTDESIDKIFDIIFSRRDFEDGPGNTDDENRPYKGFVDSIGNCPYYKNEKRGHRYTVIGDLFALANKLSQYKYVEKNTGEVVKLPRDLMRNIVNQSLQSGSITKTKINELAKEFNIVILNTKTAKNENIADCIKYLKAVKPIFESYGFDWDKLISEEYTDQNSLLNRVGDTISFNITPKRRIDALNKIDELKGKDELIKKLSKQNFSGTAKVSDKYMIDAINAFFDGTLVGEFQANVQQDEFSVSIKTEKLLKLKPFDNNSEYAQNPVVFRAINETRKVVNAIVQKYGAPNAMNIEIASELNKSFDTRQKISTQQNKNEKERKNAIKQISLITGLDEREIRPQYIERYLLGELQGWRCMYSNEEITNKKEAILNKGKQYEIDHIVPFSRILDDTLNNKALVLARENQKKGARTPLMYLSAEKEKEFKQRVNKLFKGNKITEKKYRYFMLESLVGEDAEKTLGDWKTRNLNDTRYIAKFLVKYFNDNLYFAREKGDDKRPVVYAVKGAITSSLRRQWLNKETWGRYDKGELKKITYFDHAVDAIVIANCLPAYVIIAAENHKLRDIYYSAGKIKTEEYRKSLDNCVDTLMKYYGMSPAVSRKLLEKVKETPSLLKNIRFEVEYRVRDYELMKYFFNYDTKVGEDTLDQIFRNDLYKIYDHQFADSIEMPIVSIKPERKYSGQMVKDGFIKKKDAISGKNSVKTIGENNSTVLNDSRFYCVDVYRTCNDETNLNFIKYTDLLKRNNHLYLRSDYRYPDDYAMHEMYLFYGDYIEITKKNKICCGYYFSLKNSSRNELYMSKGNTRRKLNNVKENEVCSITKKDTVKKFEIDILGKKLGEVKKYGEPLSLLPEKN

SEQ ID NO: 21666 - protein, 1094 aa, unidentified
  REGION 1..1094: note = Cas Enzyme sequence
MKYIIGLDIGIGSVGWAVVRNDDDCKRLEDFGVRIFESGEIIESNKNIRNSQRRRKYRGMRRRIRRRNHRKERLKNYLENIEFVSRAELSEFFAKNNHDIIDIRVRALDEKVTPVELTAALLHIAKRRGYKAFYELSDENNNAKDKKAKEEEKDIYKALTNTADIIKNGGYRSIAEAIMKDSEHFSDKISGRYKYRNIKEKDEKGKKESSSKISENDILFPTEMFEDEVRKILGKQKEFYPQLTDESIDKIFDIIFSRRDFEDGPGNTDDENRPYKGFVDSIGNCPYYKNEKRGHRYTVIGDLFALANKLSQYKYVEKNTGEVVKLPRDLMRNIVNQSLQSGSITKTKINELAKEFNIVILNTKTAKNENIADCIKYLKAVKPIFESYGFDWDKLISEEYTDQNSLLNRVGDTISFNITPKRRIDALNKIDELKGKDELIKKLSKQNFSGTAKVSDKYMIDAINAFFDGTLVGEFQANIQQDEFSVSIKTEKLLKLKPFDNNSEYAQNPVVFRAINETRKVVNAIVQKYGAPNAMNIEIASELNKSFDTRQKISTQQNKNEKERKNAIKQISLITGLDEREIRPQYIERYLLGELQGWRCMYSNEEITNKKEAILNKGKQYEIDHIVPFSRILDDTLNNKALVLARENQKKGARTPLMYLSAEKEKEFKQRVNKLFKGNKITEKKYRYFMLESLVGEDAEKILGDWKTRNLNDTRYIAKFLVKYFNDNLYFAREKGDDKRPVVYAVKGAITSSLRRQWLNKETWGKYDKGELKKITYFDHAVDAIVIANCLPAYVIIAAENHKLRDIYYSAGKIKTEEYRKSLDNCVDTLMKYYGMSPTVSRKLLEKVKETPSLLKNIRFEVEYRVRDYELMKYFFNYDTKVGEDTLDQIFRNDLYKIYDHQFADSIEMPIVSIKPERKYSGQMVKDGFIKKKDAISGKNSVKTIGENNSTVLNDSRFYCVDVYRTCNDETNLNFIKYTDLLKRNNHLYLRSDYRYPDDYAMHEMYLFYGDYIEITKKNKICCGYYFSLKNSSRNELYMSKGNTRRKLNNMKENEVCSITKKDTVKKFEIDILGKKLGEVKKCGEPLSLLPEKN

SEQ ID NO: 21667 - protein, 1094 aa, unidentified
  REGION 1..1094: note = Cas Enzyme sequence
MKYIIGLDIGIGSVGWAVVRNDDDCKRLEDFGVRIFESGEIIESNKNIRNSQRRRKYRGMRRRIRRRNHRKERLKNYLENIEFVSRAELSEFFAKNNHDIIDIRVRALDEKVTPVELTAALLHIAKRRGYKAFYELSDENNNAKDKKAKEEEKDIYKALTNTADVIKNGGYRSIAEAIMKDSEHFSDKISGRYKYRNIKEKDEKGKKKSDSKISENDILFPTEMFEDEVRKILGKQKEFYSQLTDESIDKIFDIIFSRRDFEDGPGNTDDENRPYKGFVDSIGNCPYYKNEKRGHRYTVIGDLFALANKLSQYKYVEKNTGEVVKLPRDLMRNIVNQSLQSGSITKTKINELAKELNIVILNTKTAKNENIADCIKYLKAVKPIFESYGFDWDKLISEEYTDQNSLLNRVGDTISFNITPKRRIDALNKIDELKGKDELIKKLSKQNFSGTAKVSDKYMIDAINAFFDGTLVGEFQANVQQDEFSVSIKTEKLLKLKPFDNNSEYAQNPVVFRAINETRKVVNAIVQKYGAPNAMNIEIASELNKSFDTRQKISTQQNKNEKERKNAIKQISLITGLDEREIRPQYIERYLLGELQGWRCMYSNEEITNKKEAILNKGKQYEIDHIVPFSRILDDTLNNKALVLARENQKKGARTPLMYLSAEKEKEFKQRVNKLFKGNKITEKKYRYFMLESLVGEDAEKILGDWKTRNLNDTRYIAKFLVKYFNDNLYFAREKGDDKRPVVYAVKGAITSSLRRQWLNKETWGRYDKGELKKITYFDHAVDAIVIANCLPAYVIIAAENHKLRDIYYSAGKIKTEEYRKSLDNCVDTLMKYYGMSPAVSRKLLEKVKETPSLLKNIRFEVEYRVRDYELMKYFFNYDTKVGEDTLDQIFRNDLYKIYDHQFADSIEMPIVSIKPERKYSGQMVKDGFIKKKDAISGKNSVKTIGENNSTVLNDSRFYCVDVYRTCNDETNLNFIKYTDLLKRNNHLYLRSDYRYPDDYAMHEMYLFYGDYIEITKKNKICCGYYFSLKNSSRNELYMSKGNTRRKLNNVKENEVCSITKKDTVKKFEIDILGKKLGEVKKYGEPLSLLPEKN

SEQ ID NO: 21668 - protein, 1092 aa, unidentified
  REGION 1..1092: note = Cas Enzyme sequence
MKYIIGLDIGIGSVGWAVVRNDDDCKRLEDFGVRIFESGEIIESNKNIRKSQRRRKYRGMRRRIRRRNHRKERLKNYLENIEFVSRAELSEFFAKNNHDIIDIRVRALDEKVTPVELTAALLHIAKRRGYKAFYELSDENNNAKDKKAKEEEKDIYKALTNTADVIKNGGYRSIAEAIMKDSEHFSDKISGRYKYRNIKEKDEKGKKKSDGKISENDILFPTEMFEDEVRKILGKQKEFYSQLTDESIDKIFDIIFSRRDFEDGPGNTDDENRPYKGFVDSIGNCPYYKNEKRGHRYTVIGDLFALANKLSQYKYVEKNTGEVIKLPRNLMRNIVNQSLQSGSITKTKINELAKEFNIVILNTKTAKNENIADCIKYLKAVKPIFESYGFDWDKLISEEYTDQNSLLNRVGDTISFNITPKRRIDALNKIDELKGKDELIKKLSKQNFSGTAKVSDKYMIDAINAFFDGTLVGEFQANVQQDEFSVSIKTEKLLKLKPFDNNSEYAQNPVVFRAINETRKVVNAIVQKYGAPNAMNIEIASELNKSFDTRQKISTQQNKNEKERKNAIKQISLITGLDEGEIRPQYIERYLLGELQGWRCMYSNEEITNKKEAILNKEKQYEIDHIVPFSRILDDTLNNKALVLARENQKKGARTPLMYLSAEKEKEFKQRVNKLFKDNKITEKKYRYFMLESLVGEDAEKILGDWKTRNLNDTRYIAKFLVKYFNDNLYFAREKGDDKRPAVYAVKGAITSSLRRQWLNKETWGRYDKGELKKITYFDHAVDAIVIANCLPAYVIIAAENHKLRDIYYSAGKIKTEEYRESLDNCVDTLMKYYGMSPTVSRKLLEKVKETPSLLKNIRFEVEYRVRDYELMKYFFNYDTKVGEDTLDQIFRNDLYKIYDHQFADSIEMPIVSIKPERKYSGQMVKDNFLKKRVANSENKYVKTIDKNNDAVLDNSYYYCVEVYRTRSGNTDLQGIKYTDLVNKNKKLYLKPCYKYPENYYKHIMYLFKGDYLRIKGPKSTRLGFYKAVNNINQNSIKITRYNSKYTRAFREESTAISADAEIEKIYVDILGKKGKVLTKCGEPLSLLPEKN

SEQ ID NO: 21669 - protein, 1095 aa, unidentified; identical to SEQ ID NO: 21657
  REGION 1..1095: note = Cas Enzyme sequence

SEQ ID NO: 21670 - protein, 1095 aa, unidentified
  REGION 1..1095: note = Cas Enzyme sequence
MKYIIGLDIGIGSVGWAVVRNDDDCKRLEDFGVRIFESGEIIESNKNIRNSQRRRKYRGMRRRIRRRNHRKERLKNYLENIEFVSRAELSEFFAKNNHDIIDIRVRALDEMVTPVELTAALLHIAKRRGYKAFYELSDENNNAKDKKAKEEEEKDIYKALTNTADVIKNGGYRSIAEAIMKDSEHFSDKISGRYKYRNIKEKDEKGKKKSDGKISENDILFPTEMFEDEVRKILGKQKEFYPQLTDESIDKIFDIIFSRRDFEDGPGNTDDENRPYKGFVDSIGNCPYYKNEKRGHRYTVIGDLFALANKLSQYKYVEKNTGEVVKLPRDLMRNIVNQSLQSGSITKTKINELAKELNIVILNTKTAKNENIADCIKYLKAVKPIFESYGFDWDKLISEEYTDQNSLLNRVGDTISFNITPKRRIDALNKIDELKGKDELIKKLSKQNFSGTAKVSDKYMIDAINAFFDGTLVGEFQANVQQDEFSVSIKTEKLLKLKPFDNNSEYAQNPVVFRAINETRKVVNAIVQKYGAPNAMNIEIASELNKSFDTRQKISTQQNKNEKERKNAIKQISLITGLDEREIRPQYIERYLLGELQGWRCMYSNEEITNKKEAILNKGKQYEIDHIVPFSRILDDTLNNKALVLARENQKKGARTPLMYLSAEKEKEFKQRVNKLFKGNKITEKKYRYFMLESLVGEDAEKILGDWKTRNLNDTRYIAKFLVKYFNDNLYFAREKGDDKRPVVYAVKGAITSSLRRQWLNKETWGRYDKGELKKITYFDHAVDAIVIANCLPAYVIIAAENHKLRDIYYSAGKIKTEEYRKSLDNCVDTLMKYYGMSPAVSRKLLEKVKETPSLLKNIRFEVEYRVRDYELMKYFFNYDTKVGEDTLDQIFRNDLYKIYDHQFADSIEMPIVSIKPERKYSGQMVKDRFIKKKDAISGKNSIKTIGENNSTVLNDSRFYCVDVYRTCNDETNLNFIKYTDLLKRNNHLYLRSDYRYPDDYAMHEMYLFRGDYIEITKKNKICCGYYFSLKDSSKNELYISKGNTRRKLNNMKEKEACSITKKDTVKKFEIDILGKKLGEVKKYGEPLSLLPEKN

SEQ ID NO: 21671 - protein, 1095 aa, unidentified
  REGION 1..1095: note = Cas Enzyme sequence
MKYIIGLDIGIGSVGWAVVRNDDDCKRLEDFGVHIFESGEIIESNKNIRKSQRRRKYRGMRRRIRRRNHRKERLKNYLENIEFVSRAELSEFFAKNNHDIIDIRVRALDEMVTPVELTAALLHIAKRRGYKAFYELSDENNNAKDKKAKEEEEKDIYKALTNTADVIKNGGYRSIAEAIMKDSEHFSDKISGRYKYRNIKEKDEKGKKKSDGKISENDILFPTEMFEDEVRKILGKQKEFYPQLTDESIDKIFDIIFSRRDFEDGPGNTDDENRPYKGFVDSIGNCPYYKNERRGHRYTVIGDLFALANKLSQYKYVEKNTGEVVKLPRDLMRNIVNQSLQSGSITKTKINELAKEFNIVILNTKTAKNENIADCIKYLKAVKPIFESYGFDWDKLISEEYTDQNSLLNRVGDTISFNITPKRRIDALNKIDELKGKDELIKKLSKQNFSGTAKVSDKYMIDAINAFFDGTLVGEFQANVQQDEFSVSIKTEKLLKLKPFDNNSEYAQNPVVFRAINETRKVVNAIVQKYGAPNAMNIEIASELNKSFDTRQKISTQQNKNEKERKNAIKQISLITGLDEREIRPQYIERYLLGELQGWRCMYSNEEITNKKEAILNKGKQYEIDHIVPFSRILDDTLNNKALVLARENQKKGARTPLMYLSAEKEKEFKQRVNKLFKGNKITEKKYRYFMLESLVGEDAEKILGDWKTRNLNDTRYIAKFLVKYFNDNLYFAREKGDDKRPVVYAVKGAITSSLRRQWLNKETWGRYDKGELKKITYFDHAVDAIVIANCLPAYVIIAAENHKLRDIYYSAGKIKTEEYRKSLDNCVDTLMKYYGMSPAVSRKLLEKVKETPSLLKNIRFEVEYRVRDYELMKYFFNYDTKVGEDTLDQIFRNDLYKIYDHQFADSIEMPIVSIKPERKYSGQMVKDGFIKKKDAISGKNSVKTIGENNSTVLNDSRFYCVDVYRTCNDETNLNFIKYTDLLKRNNHLYLRSDYRYPDDYAMHEMYLFYGDYIEITKKNKICCGYYFSLKNSSRNELYMSKGNTRRKLNNVKENEVCSITKKDTVKKFEIDILGKKLGEVKKYGEPLSLLPEKN

SEQ ID NO: 21672 - protein, 1092 aa, unidentified; identical to SEQ ID NO: 17822
  REGION 1..1092: note = Cas Enzyme sequence

SEQ ID NO: 21673 - protein, 1091 aa, unidentified
  REGION 1..1091: note = Cas Enzyme sequence
MKYIIGLDIGIGSVGWAVVRNDDDCKRLEDFGVRIFESGEIIESNKNIRNSQRRRKYRGMRRRIRRRNHRKERLKNYLENIEFVSRAELSEFFAKNNHDIIDIRVRALDEMVTPVELTAALLHIAKRRGYKAFYELSDENNNAKDKKAKEEKDIYKALTNTADVIKNGGYRSIAEAIMKDSEHFSDKISGRYKYRNIKEKDEKGKKESGGKISENDILFPTEMFEDEVRKILGKQKEFYPQLTDESIDKIFDIIFSRRDFEDGPGNTDDENRPYKGFVDSIGNCPYYKNEKRGHRYTVIGDLFALANKLSQYKYVEKNTGEVVKLPRDLMRNIVNQSLQSGSITKTKINELAKEFNIVILNTKTAKNENIADCIKYLKAVKPIFESYGFDWDKLISEEYTDQNSLLNRVGDTISFNITPKRRIDALNKIDELKGKDELIKKLSKQNFSGTAKVSDKYMIDAINAFFDGTLVGEFQANVQQDEFSVSIKTEKLLKLKPFDNNSEYAQNPVVFRAINETRKVVNAIVQKYGAPNAMNIEIASELNKSFDTRQKISTQQNKNEKERKNAIKQISLITGLDEREIRPQYIERYLLGELQGWRCMYSNEEITNKKEAILNKGKQYEIDHIVPFSRILDDTLNNKALVLARENQKKGARTPLMYLSAEKEKEFKQRVNKLFKDNKIAEKKYRYFMLESLVGEDAEKILGDWKTRNLNDTRYIAKFLVKYFNDNLYFAREKGDDKRPVVYAVKGAITSSLRRQWLNKETWGRYDKGELKKITYFDHAVDAIVIANCLPAYVIIAAENHKLRDIYYSAGKIKTEEYRKSLDNCVDTLMKYYGMSPAVSRKLLEKVKETPSLLKNIRFEVEYRVRDYELMKYFFNYDTKVGEDTLDQIFRNDLYKIYDHQFADSIEMPIVSIKPERKYSGQMVKDNFLKKRVANSENKYVKTIDKNNDAVLDNSYYYCVEVYRTRSGNIDLQGIKYTDLVNKNKKLYLKPCYKYPENYYKYIMYLFKGDYLRIKGPKSTRLGFYKAVNNINQNSIKITRYNSKYTRAFREESTTISADAEIEKIYVDILGKKGKVLTKHGEPLSLLPEKN

SEQ ID NO: 21674 - protein, 1095 aa, unidentified
  REGION 1..1095: note = Cas Enzyme sequence
MKYIIGLDIGIGSVGWAVVRNDDDCKRLEDFGVRIFESGEIIESNKNIRKSQRRRKYRGMRRRIRRRNHRKERLKNYLENIKFVNRAELSEFFAKNNHDIIDIRVRALDEKVTPVELTAALLHIAKRRGYKAFYELSDENNNAKDKKAKEEEKKDIYKALTNTADVIKNGGYRTIAEAIMKDSEHFSDKISGRYKYRNIKEKDEKGKKKSDGKISENDILFPTEMFEDEVRKILSKQKEFYSQLTDESIDKIFDIIFSRRDFEDGPGNTDDENRPYKGFVDSIGNCPYYKNEKRGHRYTVIGDLFALANKLSQYKYVEKNTGEVVKLPRDLMRNIVNQSLQSGSITKTKINELAKELNIVILNTKTAKNENIADCIKYLKAVKPIFESYGFDWDKLISEEYTDQNSLLNRVGDTISFNITPKRRIDALNKIDELKGKDELIKKLSKQNFSGTAKVSDKYMIDAINAFFDGTLVGEFQANVQQDEFSVSIKTEKLLKLKPFDNNSEYAQNPVVFRAINETRKVVNAIVQKYGAPNAMNIEIASELNKSFDTRQKISTQQNKNEKERKNAIKQISLITGLDEREIRSQYIERYLLGELQGWRCMYSNEEITNKKEAILNKGKQYEIDHIVPFSRILDDTLNNKALVLARENQKKGARTPLMYLSAEKEKEFKQRVNKLFKGNKITEKKYRCFMLESLVGEDAEKILGDWKTRNLNDTRYIAKFLVKYFNDNLYFAREKGDDKRPVVYAVKGAITSSLRRQWLNKETWGRYDKGELKKITYFDHAVDAIVIANCLPAYVIIAAENHKLRDIYYSAGKIKTDEYRKSLDNCVDTLMKYYGMSPTVSRKLLEKVKETPSLLKNIRFEVEYRVRDYELMKYFFNYDTKVGKDTLDQIFRNDLYKIYDHQFADSIEMPIVSIKPERKYSGQMVKDGFIKKKDAISGKNSVKTIGENNSTVLNDSRFYCVDVYRTCNDETNLNFIKYTDLLKRNNHLYLRSDYRYPDDYAMHEMYLFYGDYIEITKKNKICCGYYFSLKNSSRNELYMSKGNTRRKLNNMKENEVCSITKKDTVKKFEIDILGKKLGEVKKCGEPLSLLPEKN

SEQ ID NO: 21675 - protein, 1094 aa, unidentified
  REGION 1..1094: note = Cas Enzyme sequence
MKYIIGLDIGIGSVGWAVVRNDDDCKRLEDFGVRIFESGEIIESNKNIRKSQRRRKYRGMRRRIRRRNHRKERLKNYLENIGFVSRAELSEFFAKNNHDIIDIRVRALDEMVTPVELTAALLHIAKRRGYKAFYELSDENNNAKDKKAKEEEKDIYKALTNTADVIKNGGYRSIAEAIMKDSEHFSDKISGRYKYRNIKEKDEKGKKKSDGKISENDILFPTEMFEDEVRKILGKQKEFYPQLTDESIDKIFDIIFSRRDFEDGPGNTDDENRPYKGFVDSIGNCPYYKNEKRGHRYTVIGDLFALANKLSQYKYVEKNTGEVVKLPRDLMRNIVNQSLQSGSITKTKINELAKGLNIVILNTKTAKNENIADCIKYLKAVKPIFESYGFDWDKLISEEYTDQNSLLNRVGDTISFNITPKRRIDALNKIDELKGKDELIKKLSKQNFSGTAKVSDKYMIDAINAFFDGTLVGEFQANVQQDEFSVSIKTEKLLKLKPFDNNSEYAQNPVVFRAINETRKVVNAIVQKYGAPNAMNIEIASELNKSFDTRQKISTQQNKNEKERKNAIKQISLITGLDEREIRPQYIERYLLGELQGWRCMYSNEEITNKKEAILNKGKQYEIDHIVPFSRILDDTLNNKALVLARENQKKGARTPLMYLSAEKEKEFKQRVNKLFKGNKITEKKYRYFMLESLVGEDAEKILGDWKTRNLNDTRYIAKFLVKYFNDNLYFAREKGDDKRPVVYAVKGAITSSLRRQWLNKETWGRYDKGELKKITYFDHAVDAIVIANCLPAYVIIAAENHKLRDIYYSAGKIKTEEYRKSLDNCVDTLMKYYGMSPTVSRKLLEKVKETPSLLKNIRFEVEYRVRDYELMKYFFNYDTKVSEDTLDQIFRNDLYKIYDHQFADSIEMPIVSIKPERKYSGQMVKDGFIKKKDAISGKNSVKTIGENNSTVLNDSRFYCVDVYRTCNDETNLNFIKYTDLLKRNNHLYLRSDYRYPDDYAMHEMYLFYGDYIEITKKNKICCGYYFSLKNSSRNELYMSKGNTRRKLNNMKENEVCSITKKDTVKKFEIDILGKKLGEVKKCGEPLSLLPEKN

SEQ ID NO: 21676 - protein, 1092 aa, unidentified
  REGION 1..1092: note = Cas Enzyme sequence
MKYIIGLDIGIGSVGWAVVRNDDDCKRLEDFGVRIFESGEIIESNKNIRKSQRRRKYRGMRRRIRRRNHRKERLKNYLENIGFVSRAELSEFFAKNNHDIIDIRVRALDEMVTPVELTASLLHIAKRRGYKAFYELSDENNNAKDKKAKEEEKDIYKALTNTADVIKNGGYRSIAEAIMKDSEHFSDKISGRYKYRNIKEKDEKGKKKSDGKISENDILFPTEMFEDEVRKILGKQKEFYPQLTDESIDKIFDIIFSRRDFEDGPGNTDDENRPYKGFVDSIGNCPYYKNEKRGHRYTVIGDLFALANKLSQYKYVEKNTGEVVKLPRDLMRNIVNQSLQSGSITKTKINELAKEFNIVILNTKTAKNENIADCIKYLKAVKPIFESYGFDWDKLISEEYTDQNSLLNRVGDTISFNITPKRRIDALNKIDELKGKDELIKKLSKQNFSGTAKVSDKYMIDAINAFFDGTLVGEFQANVQQDEFSVSIKTEKLLKLKPFDNNSEYAQNPVVFRAINETRKVVNAIVQKYGAPNAMNIEIASELNKSFDTRQKISTQQNKNEKERKNAIKQISLITGLDEREIRPQYIERYLLGELQGWRCMYSNEEITNKKEAILNKGKQYEIDHIVPFSRILDDTLNNKALVLARENQKKGARTPLMYLSAEKEKEFKQRVNKLFKDNKIAEKKYRYFMLESLVGEDAEKILGDWKTRNLNDTRYIAKFLVKYFNDNLYFAREKGDDKRPVVYAVKGAITSSLRRQWLNKETWGRYDKGELKKITYFDHAVDAIVIANCLPAYVIIAAENHKLRDIYYSAGKIKTEEYRKSLDNCVDTLMKYYGMSPAVSRKLLEKVKETPSLLKNIRFEVEYRVRDYELMKYFFNYDTKVGEDTLDQIFRNDLYKIYDHQFADSIEMPIVSIKPERKYSGQMVKDNFLKKRVANSENKYVKTIDKNNDAVLDNSYYYCVEVYRTRSGNIDLQGIKYTDLVNKNKKLYLKPCYKYPENYYKYIMYLFKGDYLRIKGPKSTRLGFYKAVNNINQNSIKITRYNSKYTRAFREESTTISADAEIEKIYVDILGKKGKVLTKHGEPLSLLPEKN

SEQ ID NO: 21677 - protein, 1094 aa, unidentified
  REGION 1..1094: note = Cas Enzyme sequence
MKYIIGLDIGIGSVGWAVVRNDDDCKRLEDFGVRIFESGEIIESNKNIRKSQRRRKYRGMRRRIRRRNHRKERLKNYLENIGFVSRAELSEFFAKNNHDIIDIRVRALDEMVTPVELTASLLHIAKRRGYKAFYELSDENNNAKDKKAKEEEKDIYKALTNTADVIKNGGYRSIAEAIMKDSEHFSDKISGRYKYRNIKEKDEKGKKKSDGKISENDILFPTEMFEDEVRKILGKQKEFYPQLTDESIDKIFDIIFSRRDFEDGPGNTDDENRPYKGFVDSIGNCPYYKNEKRGHRYTVIGDLFALANKLSQYKYVEKNTGEVVKLPRDLMRNIVNQSLQSGSITKTKINELAKEFNIVILNTKTAKNENIADCIKYLKAVKPIFESYGFDWDKLISEEYTDQNSLLNRVGDTISFNITPKRRIDALNKIDELKGKDELIKKLSKQNFSGTAKVSDKYMIDAINAFFDGTLVGEFQANVQQDEFSVSIKTEKLLKLKPFDNNSEYAQNPVVFRAINETRKVVNAIVQKYGAPNAMNIEIASELNKSFDTRQKISTQQNKNEKERKNAIKQISLITGLDEREIRPQYIERYLLGELQGWRCMYSNEEITNKKEAILNKGKQYEIDHIVPFSRILDDTLNNKALVLARENQKKGARTPLMYLSAEKEKEFKQRVNKLFKGNKITEKKYRYFMLESLVGEDAEKILGDWKTRNLNDTRYIAKFLVKYFNDNLYFAREKGDDKRPVVYAVKGAITSSLRRQWLNKETWGRYDKSELKKITYFDHAVDAIVIANCLPAYVIIATENHKLRDIYYSAGKIKTEEYRKSLDNCVDTLMKYYGMSPTVSRKLLEKVKETPSLLKNIRFEVEYRVRDYELMKYFFNYDTKVGEDTLDQIFRNDLYKIYDHQFADSIEMPIVSIKPERKYSGQMVKDGFIKKKDAISGKNSVKTIGENNSTVLNDSLFYCVDVYRTCNDETNLNFIKYTDLLKRNNHLYLRSDYRYPDDYAMHEMYLFYGDYIEITKKNKICCGYYFSLKNSSRNELYMSKGNTRRKLNNMKENEVCSITKKDTVKKFEIDILGKKLGEVKKYGEPLSLLPEKN

SEQ ID NO: 21678 - protein, 929 aa, unidentified
  REGION 1..929: note = Cas Enzyme sequence
MKYIIGLDIGIGSVGWAVVRNDDDCKRLEDFGVRIFESGEIIESNKNIRKSQRRRKYRGMRRRIRRRNHRKERLKNYLENIEFVSRAELSEFFAKNNHDIIDIRVRALDEKVTPVELAAALLHIAKRRGYKAFYELSDENNNAKDKKAKEEEKDIYKALTNTADVIKNGGYRSIAEAIMKDSEHFSDKISGRYKYRNIKEKDEKGKKKSDGKISENDILFPTEMFEDEVRKILGKQKEFYPQLTDESIDKIFDIIFSRRDFEDGPGNTDDENRPYKGFVDSIGNCPYYKNEKRGHRYTVIGDLFALANKLSQYKYVEKNTGEVVKLPRDLMRNIVNQSLQSGSITKTKINELAKELNIVILNTKTAKNENIADCIKYLKAVKPIFESYGFDWDKLISEEYTDQNSLLNRVGDTISFNITPKRRIDALNKIDELKGKDELIKKLSKQNFSGTAKVSDKYMIDAINAFFDGTLVGEFQANVQQDEFSVSIKTEKLLKLKPFDNNSEYAQNPVVFRAINETRKVVNAIVQKYGAPNAMNIEIASELNKSFDTRQKISTQQNKNEKERKNAIKQISLITGLDEREIRPQYIERYLLGELQGWRCMYSNEEITNKKEAILNKGKQYEIDHIVPFSRILDDTLNNKALVLARENQKKGARTPLMYLSAEKEKEFKQRVNKLFKDNKITEKKYRYFMLESLVGEDAEKILGDWKTRNLNDTRYIAKFLVKYFNDNLYFAREKGDDKRPVVYAVKGAITSSLRRQWLNKETWGRYDKGELKKITYFDHAVDAIVIANCLPAYVIIAAENHKLRDIYYSAGKIKTEEYRKSLDNCVDTLMKYYGMSPTVSRKLLEKVKETPSLLKNIRFEVEYRVRDYELMKYFFNYDTKVGEDTLDQIFRNDLYKIYDHQFADSIEMPIVSIKLKENIQVRWLRIVS

SEQ ID NO: 21679 - protein, 1552 aa, unidentified
  REGION 1..1552: note = Cas Enzyme sequence
MKSQEMTWGYDLGKGSIGEVVRLKAAGKIEFPHKKVWLFPADFARRGPATKAGTPASRYRAWKTRQSHKRRENWLDKIWEAAGLTALHGRQVAVVDGKWRLTQKGDLQLENEASGATPEDCCSSSLLRVRLLRAGEKLAEWQVYKALRAAIQKRGYSSVPWERGSKPKENLTPEEKAAMEKGNARWTKFTGLPELKRLGKDFQLPCYYDAFHLGLWSPSTPDKDCNANPNAIANENTRNVIFDGAAVEREVLLLAEKAVALFPQLHDGFRKVMDDYKQSVRHRVAEINARRALRHKAPLHIPLKGGAASFEALLAFGVGGQPDISGDKRRIASWDRNIQKDMGLKPGSPQDHKAGLGQIVARFENRLRAECALIRRQHDLPPLAVCRNPSRERIQNAKSDDDPCLLPAQFTFLSKLKNLWVEEIAEPHGQRKLSPEEIRKIFAEQNPKRAYSLTPGQWRDWCGQFAVQPALDLKEKIEDAENTPGDSQEPKTKKKKAFVVDPPSNEGRSRFSRPALRILIKLILSGLKPSELRELLERRDEQLLNALSLDILDAAPIEVVQQSGREFKIFRKQPRTWLLISDLHFFSRMKNNEGQEDWDTFFVPSSNLDRLAAESNAAETEREHAIEKLISQQNNPIVRHRLTAFWERLQAMEKKFGVPDRIVLELIRDDPENSWLGKDTVKEIIKFQDKNREDREKARKRLEELPQYKNEGPSETTLTKFILWEQQGGECLYGRQVKEAENVYLETGLPISNLEQFRIDHIVPRALGGPDSIHNKVLTDDDTNARKGDRTPFQWFHDDRIDQWQAFRDRVLKPNKKLGGKKIRLLLSANAEEMVQRYTPLAETAWIARVAQVIAGLHFGWVNGIDENGKRRITRVSGGLTGRARRQYSLNSLTGEHSDQTLPTDKEERKDWEVQSEAERASKDRKDKRHHALDAMVLTFLEEWVNDPEREAEFRFTDLGDNPAYLPKDQFGRKRLYEEIARLHDEFKKCRTTGRGEEIQREITHCSDRLSAMRQRRNWRPVREFFEKQLKGTSPDGQPVIPVYRHFEKPRLEATLHRGTWMLEENSKAGESTAENFDEAFKAEKMALSDLAYRDGNFDLEHGRRRAAAIASHKDYDAKAVRKVIQDFLRSEPSEPEWKTFVTSEQMPALIKPKKGESDTRRLLVYRLKEVRTKRVPVFETGLSKQSVAVFDVDHFDDQITRLVSKPERPKKGDKKHPAAAASPPVLPQANTELQSLLRRLKPEIEQFFCEHDPDMSDKSSAEEKAFKSALIDFAKQHGLDKHLPFYLSKPQERPTDDPLERRTLSGFLIRNEKRFSVSAAQKEASAIIDPWIRIQLRYFYRTNPLPKEWRIFCDSFCQVKREDFKTFVSGGTRSAVDFVEFYRASRKSGRAGQSITTVHQLIGEKLEEYVDLSKDQTGQYAKGGNRGYFIYKRKQDQDFVWRATPVRVFQSTKAIKEQLLANSEIEPLWETEPDGKKVWRLWRTNMLFKLPQEVETGKNKVEAGYYFLSSISCRDGKNDYIDLNSPIGKKVPRALIFHELMKAGLHYAPTD

SEQ ID NO: 21680 - protein, 1553 aa, unidentified
  REGION 1..1553: note = Cas Enzyme sequence
MTWGYDLGKGSIGEVVRLKKTGKVDFPHKKVWLFPPDFGRRGPTTKTGTPASRYRAWKTRNAHKKREEWLDEIWQAGGMTILHGRQVAVAGGTWRLVQKGDPRLESEAVGTKPEDCCSSCLLRIRLLRPGEKLVDWQIYKALRAAIQKRGYTSVPWERGGKPKENLTSEEQAETDKGNARWTKFAGLPEIQRLGKDFQLPCYYDAFHLELWSPGTPHKDCNGVVNAAANEHTRKVIFDGAAVEREVLLLAKNAVALFPQLQDGFQKVMDKYKQSVRERVANINARRALHNKPVIHIPLRGGATSFGELLAFGVGGRPNTPDDKRRIASWDPTIQKDMGLKPGSPQDQKAGLGQIVARFENRLRAECALIRRRPGLPPLAVCRNPSKEKIAKAKADDDPCLLPAQFTFLSKLKNVCVEEKVEPHKQRKLYPAEITRIFAEHNPKRKYSITPGQWREWCNEFGVQPALDLKEKIEDAEDAAGNNQESKAKKKKAFVVDPPSNEGRSRFSRPALRILNKLILSGLKPSEMRTLLEKRDEQLLNGLKMDILDVPPITVVGEKGREFIKQPRTWLLVSDLDFFSRMRNAEGQEDWDNFFIPSSNLDRLAAESNATQKERHDSIKKLIGQQSNPIVRHRLTAFWERLKAMESKFGIPDRIVLELIRDDPENSWLGKDTVKEIIKFQAKNRERREEARKLLKQMPQYKNEEPSETTVTKFMLWQQQGGECLYGRQVKEAGNVYVETGLPFTQLEQFRIDHIVPRALGGSDSIHNKVLTDDDTNARKGDRTPFQWFHDDRVEQWQAFRDRVLKPNKSLGGKKIRLLLSANAEELVSRYTPLAETAWIARLAQVVAGLHFGWVNGIDEKGKRRITRVSGGLTGRVRRQYNLNTLTGEHADRPLPTDKEERKDWEVQGEAERATKDRKDRRHHALDAMVLTFLEEWVNDPEREGEFRFRDLGDNPAYLPQDHFARRREYERIAQLQEDFKTCRTTGRGDEIQREITRCRDRLAQMRQRRNWRPVREFFEKQLKGTSPDGQPVIPVYRHYERPRMEATLHRGTWMLEENSKAEQSTVEDFDKAFKTEKMPLVNLPYRVREDVSEKLFDLEHARRRAAAIASHKDYNEEVVRKIIQEFLRSNPTEKDWQQFATSEQIPALIKRKKGEPETRNILLYKLKEVRTKRVSVFETGLGKKSVAVFDSDHFDDQLARLVIKPERPKKGDIKIAATPSSSSASPRPNTGLQSLLRELKPRIEQFFREHDPDMSEKSEAEEKAFKVALDEFAKTQGFDKHLPFYLSTPQEKPDDDPWEKKTLRGFLVRNEKRFSGSAAQKEAFAVIDPWIRIQLRYFYRTNPVPKHWRKFCDVFCQVKREHFKTFVTDADRSAVDFIEFYRAAKESGGGVQPIKSVHQLIGENLEEYVDVSKDHTGQYAKGGNRGYFIYKCKQDEESVWRAEPVRAFQSVQKIKERLLADSTVQPLWETEPNGKKVWRLWRTNMLLRLRQAVETGREGKKKRIEEGYYFLGSIQCEDSNDYINLKSPIGKKVPAALVFHDVMKAGLEFMSGD

SEQ ID NO: 21681 - protein, 996 aa, unidentified
  REGION 1..996: note = Cas Enzyme sequence
MRKILGLDLGTTSVGWALLDENEKGFVGICDMGVRRFQEVTNTNGKTNKLKNKERREHRSARKQIERKARRKVKVAGVLKRAGFIPFTQADTDKWEEWNRNCNIGDPHELRVKALDQEITKEEFGKVMVHLAQRRGFKSNRKAPLKDDDIGVVHSSIEKHKEALLSADYRTIGEYINAQPEKRGRYLDRSMFYDEFEELWKCQSKYDQSSFNQEFKSELWNALFDQRDLKSQTHLVGKCDLEPLRNRCRKSSLAFQEYRILCSLANLQVIEPIDGESQSLTNEQKSALFSQLNRKEYLTWTAVKKTIGVGRSDIINLKQDGVKNLTGNKTAHSVIDAIGEERWVSLSDNDKNRLVTELTDIETDESLTKRLTEGWGFDEVITEKLLTTKPENGVGNYSHKAITRLLPHLKEGKNLWQSKEACGYTEQDLKEENDFMEQPEDIRNPVVMKVIHETRKVVNAVIRKYGKPYEIRIEMARDLKESEGKRIEYQIAINKNKKINEDAEETLVKEFKEFSRTSPTRDDIVKYRLWEECGEVCPYSGQKIDSSELFGNKFQVEHIIPYSVSFDNSYGNKTICHVDWNKRKTSRTPYLAFGQSDEWSSMLERVNKSKMAFGKRMRFKSKNEEFDNFSTRQLNDTRYACKAVAKLVGSLGVKVGVSQGKITHAVRHQWGLNRLLNNENLKNRDDHRHHALDALITALISPSLFKRITHISQSLGDASLSSHLFKLPMPWKGFVNEVQSKLSDIIVSHAPHNKIAGAFHEDTAYGKRKDGTLTLRKSLNPEDRDFITIAQIKKEQIRDEAVRSILEQRLDSFGFYSLDGDNKKQKECLSQALATPLLHKDGKTPIKKVRLELNKSESSLLPILVNGKEMKYHFKGNNHHVEIFEDSKGEWNGRIISNYEAMQRVKEGKSQYDRSKEGHKFVMTLAKHEMVEITSKDKKEYYRLQKMRSNGGRVALAPHFSALKKAPKMSSIGNIGKLKPRKISVSPIGEITVKND

SEQ ID NO: 21682 - protein, 1399 aa, unidentified
  REGION 1..1399: note = Cas Enzyme sequence
MQDIKEKIMKKPYSIGLDIGTNSVGWAVITDEYKVPAKKMKVLGNTNKESIKKNLIGALLFDAGNTAADCRLKRTARRRLTRRRSRILYLQEIFANEMNKVDESFFHRLDDSFLVPEDKRGSKYPIFGTFEEEKEYHKQFPTIYHLRKSLADLKEKADLRLIYLALAHIIKYRGHFLYEDTFDIKNNDIQKIFNEFTSIYNNIFEESSLSKENAQVEEIFTDKISKSAKKDRVLKLFPDEKSTGLFSEFLKLIVGNKADFKKHFDLEEMAPLQFSKDTYDEDLESLLGQIGDDYADLFVVAKKLYDAILLAGILSVKDPVTKAPLSASMIERFDNHQNDLSALKQFIRRNLPEKYAEVFSDDLKDGYAGYIDGKTTQEGFYKYIKNLISKIEGADYFLEKIEREDFLRKQRTFDNGSIPHQIHLQEMNAILHNQGEYYPFLKANKEKIEQILTFRIPYYVGPLARGNSDFAWLTRNSDDAIRPWNFEEMVDKARSAEDFINKMTNFDLYLPEEKVLPKHSLLYETFAVYNELTKVKFIAEGMKDYEFLDSGQKRKIVENIFKNQRKVTEKDIINYLHNVYGYDGIEIKGIEKQFNASLSTYHDLLKIIKDKEFIDDPKNEEILEKIIHTLTIFEDREMIKQRLAQYNSVFDEKVIKALSRKHYTGWGKLSAKLINGIRDKQTGNSILDYLMDDGKSNRNFMQLIKDDGLSFKEIIQNAQVVGETDNLRQVVQNLPGSPAIKKGILQSIKLVDELVKVMGSDPESIVIEMARENQTTAKGKKNSQQRYKRIEDSLKNLAFGLDSKILKEHPTDNIQLQNDRLFLYYLQNGKDMYTGNPLDINQLSSYDIDHIIPQAFIKDDSLDNRVLTSSKDNRGKSDNVPDLEIVEKMKGFWQQLLKSKLISERKFNNLTKAERGGLDRQDKVGFIKRQLVETRQITKHVAQILDARFNTEVNVKKQKIRTVKIITLKSNLVSNFRKEFGLYKVREINNYHHAHDAYLNAVVAKAILKKYPKLEPEFVYGDYQKHDLKRYISRSKDPKEIEKATEKFFFYTNLLNFFKKEMHYADGTIVKRDKIEYSEETGEIAWDKEKGFATIEKVLALPQVNIVKKTEIQTHGLDRGKPRGLFNSNPSPKPSEDSKENLVPIKQGLDPRKYGGYAGISNSYAVLVKAIIEKGVKKQRKTILEFQGISILDKINFEKNQANYLLKKGYTEILSTITLPKYSLFEFPDGTRRRLASILSTNNKRGEIHKGNELVLPAKYTTLLYHAKRINKSLEPEHLEYVTKHRAEFAELLEYVLRFNDKYVGALKNGERIREAFTNWETVDIKDLCFSFIGPENSKNAGLFELTSQGSASDFEFLGVKIPRYRDYTPSSLLSSTIIHQSITGLYETRIDLSKLGEE

SEQ ID NO: 21683 - protein, 1374 aa, unidentified
  REGION 1..1374: note = Cas Enzyme sequence
MQDIKEKIMKKPYSIGLDIGTNSVGWAVITDDYKVPAKKMKVLGNTNKESIKKNLIGALLFDAGNTAADRRLKRTARRRYTRRRNRILYLQEIFAAEMNKVDESFFHRLDDSFLVPEDKRGSKYPIFGTSEEEKEYHKQFPTIYHLRKILADSKEKVDLRLIYLALAHIIKYRGHFLYEDSFDIKNNDIQKIFNEFTSLYNNTFEESSLSKGNAQVEEIFTDKISKSAKRDRVLKLFPDEKSTGLFSEFLKLIVGNQADFKKHFDLEEKAPLQFSKDTYEEDLESLLGQIGDVYADLFVVAKKLYDAILLAGILSVKDPGTKAPLSASMIERYDNHQNDLSALKQFVRRNLPEKYAEVFSDDSKDGYAGYIDGKTTQEGFYKYIKNLISKIEGAEYFLEKIEREDFLRKQRTFDNGSIPHQIHLQEMNAILRHQGEYYPFLKENKDKIEQILTFRIPYYVGPLARGNSDFAWLSRNSDEAIRPWNFEEMVDKSSSAEDFIHRMTNYDLYLPEEKVLPKHSLLYETFTVYNELTKVKYISEGMKDYQFLDSGQKKQIVNKFFKEKRKVTEKDIIHYLHNVDGYDGIELKGIEKHFNSSLSTYHDLLKIIKDKEFMDDPKNEEIFENIVHTLTIFEDREMIKQRLNQYDSIFDEKVIKALTRRHYTGWGKLSAKLINGIRDKKTSKTILDYLIDDGYSNRNFMQLINDDGLSFKETIQKAQVVGETNDVKQVVQELPGSPAIKKGILQSIKIVDELVKVMGHAPESVVIEMARENQTTNKGKSKSQQRLKTLSDAISELGSNILKEHPTDNIQLQNDRLFLYYLQNGKDMYTGEALDINQLSNYDIDHIIPQAFIKDDSLDNRVLTSSKDNRGKSDNVPSLEIVEKMKGFWQQLLDSKLISERKFNNLTKAERGGLDERDKVGFIKRQLVETRQITKHVAQILDDRFNAEVNEKNQKLRSVKIITLKSNLVSNFRKEFGLYKVREINDYHHAHDAYLNAVVAKAILKKYPKLEPEFVYGDYQKYDLKRYISKTKDPKEIEKATEKYFFYSNLLNFFKYKVYYADGTIIQRGNVEYSKDTGEIAWNKKRDFAIVRKVLSYPQVNIVKKTEEQTGGFSKESILPKGNSDKLIPRKTKNVQLDTTKYGGFDSPVIAYSILLVADVEKGKSKKLKTVKSLIGITIMEKVKFEANPVAFLEGKGYQNVVEENIIRLPKYSLFELENGRRRMLASAKELQKGNEMVLPSYLIALLYHAKRIQKKDEPEHLEYIKQHHSEFNDLLNFVSEFSQKYVLAESNLEKIKNLYIDNEQTNMEEIANSFINLLTFTAFGAPAVFKFFGKDIERKRYSTVTEILKATLIHQSITGLYETRIDLSKLGEE

SEQ ID NO: 21684 - protein, 1359 aa, unidentified
  REGION 1..1359: note = Cas Enzyme sequence
MQDIKEKIMKKPYSIGLDIGTNSVGWAVITDDYKVPAKKMKVLGNTNKKTIKKNLIGALLFDAGNTAADRRLKRTARRRYTRRRNRILYLQEIFAAEMNKVDESFFHRLDDSFLVPEDKGGSKYPIFGTLEEEKEYHEQFPTIYHLRKILADSKEKADLRLIYLALAHIIKYRGHFLYEDTFDIKNNDIQKIFNEFTSIYDNTFEESSLSKGNAQVAEIFTDKISKSAKRDRILKLFPDEKSTGLFSEFLKLIVGNQADFKKHFDLEEKAPLQFSKDAYEEDLESLLGQIGDVYADLFVVAKKLYDAILLAGILSVKDPGTKAPLSASMIERYDNHQNDLSALKQFVRRNLPEKYAEVFSDDSKDGYAGYIDGKTTQEEFYKYIKNLISKIEGAEYFLEKIEREDFLRKQRTFDNGSIPHQIHLQEMNAILRHQGEYYPFLKENKDKIEQILTFRIPYYVGPLARGNSDFAWLTRNSDEAIRPWNFEEMVDKASSAEDFIHRMTNYDLYLPEEKVLPKHSLLYETFTVYNELTKVKYIAEGMKDYQFLDSGQKKQIVNQLFKEKRKVTEKDIIHYLHNVDGYDGIELKGIEKHFNSSLSTYHDLLKIIKDKEFMDDPKNEEIFENIVHTLTIFEDREMIKQRLNQYDSIFDEKVIKALTRRHYTGWGKLSAKLINGIRDKKTSKTILDYLIDDGYSNRNFMQLINDDGLSFKETIQKAQVVGETNDVKQVVQELPGSPAIKKGILQSIKIVDELVKVMGHAPESVVIEMARENQTTNKGKSKSQQRLKTLSDAISELGSNILKEHPTDNIQLQNDRLFLYYLQNGKDMYTGEALDINQLSNYDIDHIIPQAFIKDDSLDNRVLTSSKDNRGKSDNVPSLEIVEKMKGFWQQLLASKLISERKFNNLTKAERGGLDERDKVGFIKRQLVETRQITKHVAQILDDRFNVEVNEKNQKLRSVKIITLKSNLVSNFRKEFGLYKVREINDYHHAHDAYLNAVVAKAILKKYPKLEPEFVYGDYQKYDLKRYISRTKDPKEIEKATEKYFFYSNLLNFFKDKVFYADGTIIQRGNVEYSKDSGEIAWNKKRDFAIVRKVLSCPQVNIVKKTEEQTGGFSKESILPKGNSDKLIPRKTKNIQLDTTRYGGFDSPVIAYSILLIADVEKGKSKKLKTVKSLIGITIMERVKFEANPVAFLEGKGYQNVVEENIIRLPKYSLFELENGRRRMLASAKELQKGNEMVLPSYLITLLYHAKRIQKKDEPEHLEYIKQHHSEFNDLLNFVSEFSQKYVLAESNLDKIKNLYIDNEQTNMEEIANSFINLLTFTAFGAPAVFKFFGKDIERKRYLTVTEILKATLIHQSII

SEQ ID NO: 21685 - protein, 1374 aa, unidentified
  REGION 1..1374: note = Cas Enzyme sequence
MQDIKEKIMKKPYSIGLDIGTNSVGWAVITDDYKVPAKKMKVLGNTNKESIKKNLIGALLFDAGNTAADRRLKRTARRRYTRRRNRILYLQEIFAAEMNKVDESFFHRLDDSFLVPEDKRGSKYPIFGTLEEEKEYHKQFPTIYHLRKILADSKEKVDLRLIYLALAHIIKYRGHFLYEDSFDIKNNDIQKIFNEFTILYDNTFEESSLSKGNAQVEEIFTDKISKSAKRDRVLKLFPDEKSTGLFSEFLKLIVGNQADFKKHFDLEEKAPLQFSKDTYEEDLESLLGQIGDVYADLFVVAKKLYDAILLAGILSVKDPGTKAPLSASMIERYDNHQNDLSALKQFVRRNLPEKYAEVFSDDSKDGYAGYIDGKTTQEGFYKYIKNLISKIEGAEYFLEKIEREDFLRKQRTFDNGSIPHQIHLQEMNAILRHQGEYYPFLKENKDKIEQILTFRIPYYVGPLARGNSDFAWLSRNSDEAIRPWNFEEMVDKSSSAEDFIHRMTNYDLYLPEEKVLPKHSLLYETFTVYNELTKVKYIAEGMKDYQFLDSGQKKQIVNQLFKEKRKVTEKDIIHYLHNVDGYDGIELKGIEKHFNSSLSTYHDLLKIIKDKEFMDDPKNEENFENIVHTLTIFEDRVMIKQRLNQYDSIFDEKVIKALTRRHYTGWGKLSAKLINGIRDKKTSKTILDYLIDDGYSNRNFMQLINDDGLSFKETLQKAQVVGETNDVKQVVQELPGSPAIKKGILQSIKIVDELVKVMGHAPESVVIEMARENQTTNKGKSKSQQRLKTLSDAISELGSNILKEHPTDNIQLQNDRLFLYYLQNGKDMYTGEALDINQLSNYDIDHIIPQAFIKDDSLDNRVLTSSKDNRGKSDNVPSLEIVEKMKGFWQQLLYSKLISERKFNNLTKAERGGLDERDKVGFIKRQLVETRQITKHVAQILDDRFNAEVNEKNQKLRSVKIITLKSNLVSNFRKEFGLYKVREINDYHHAHDAYLNAVVAKAILKKYPKLEPEFVYGDYQKYDLKRYISRTKDPKEIEKATEKYFFYSNLLNFFKDKVYYADGTIIQRGNVEYSKDTGEIAWNKKRDFAIVRKVLSYPQVNIVKKTEEQTGGFSKESILPKGNSDKLIPRKTKNVQLDTTKYGGFDSPVIAYSILLAADVEKGKSKKLKTVKSLIGITIMEKVKFEANPVAFLEGKGYQNVVEENIIRLPKYSLFELENGRRRMLASAKELQKGNEMVLPSYLIALLYHAKRIQKKDEPEHLEYIKQHHSEFNDLLNFVSEFSQKYVLAESNLEKIKNLYIDNEQTNMEEIANSFINLLTFTAFGAPAVFKFFGKDIERKRYSTVTEILKATLIHQSLTGLYETRIDLSKLGEE

SEQ ID NO: 21686 - protein, 1399 aa, unidentified
  REGION 1..1399: note = Cas Enzyme sequence
MQDIKEKIMKKPYSIGLDIGTNSVGWAVITDDYNVPSKKMKVLGNTNKESIKKNLIGALLFDAGNTAADCRLKRTARRRLTRRRSRILYLQEIFANEMNKVDESFFHRLDDSFLVPEEKRGSKYPIFGTFEEEKEYHKQFPTIYHLRKSLADSKEKADLRLIYLALAHIIKYRGHFLYEDTFDIKNNDIQKIFNEFTSIYDNTFEESSLSKENAQVEEIFTDKISKSSKRDRVLKLFPNEKSTGLFSEFLKLIVGNQADFKKHFDLEEKAPLQFSKDTYDEDLESLLGQIGDVYADLFVVAKKLYDAILLAGILSVKDPATKAPLSASMIERYDNHKNDLSALKQFIRRNLSEKYAEVFSDDSKDGYAGYIVGKTTQEGFYKYIKNLVSNFEEADYFLEKIEREDFLRKQRTFDNGSIPLQIHFQEMNAILHHQGEYYPFLKANKEKIEQILTFRIPYYVGPLARGNSEFAWLTRNSDDAIRPWNFEEIVDKASSAEDFINKMTNYDLYLPEEKVLPKHSLLYETFTVYNELTKVKFIAEGMKDNEFLDSGQKRKIVENIFKNQRKVTEKDIIHYLHNVDGYDGIELKGIEKQFNASLSTYHDLLKIIRDKEFMDDPKNEEILENIIHTLTIFEDREMIKQRLAQYKSVFDEKVIKALSRKHYTGWGKLSAKLINGIRDKQTGNSILDYLIDDGKSNRNFMQLIKDDGLSFKEIIQNSQVVGDTDNLRQVVQNLPGSPAIKKGILQSIKLVDELVKVMGSDPDSIVVEMARENQTTAKGKKNSQQRYKRIEDSLKILSSGLDSKILKEHPTDNVQLQNDRLFLYYLQNGKDMYTGEAIDINQLSSYDIDHIIPQAFIKDDSIENRVLTSSKDNRGKSNNVPDLEIVEKMKGFWQQLLKSKLISERKFNNLTKAERGGLDDRDKAGFIKRQLVETRQITKHVAQILDARFNTEVNDKKQKIRTVKIITLKSNLVSNFRKEFGLYKVREINNYHHAHDAYLNAVVAKAILKKYPKLEPEFVYGDYQKHDLKRYISRSKDPKEIEKATEKYFFYSNLLNFFKEEVHYADGTIIKREKIEYSKDTGEIAWNKEKDFATIKKVLALPQVNIVKKTEIQTHGLDRGKPRGLFNSNPSPKPSEDSKENLVPIKQGLDPRKYGGYAGISNSYAVLVKAIIEKGVKKQRKTILEFQGISILDKINFEKNQANYLLKKGYTEILSTITLPKYSLFEFPDGTRRRLASILSTNNKRGEIHKGNELVLPAKYTTLLYHAKRINKSLEPEHLEYVTKHRAEFAELLEYVLRFNDKYVGALKNGERIREAFTNWETVDIKDLCFSFIGPENSKNAGLFELTSQGSASDFEFLGVKIPRYRDYTPSSLLNSTIIHQSITGLYETRIDLSKLGEE

SEQ ID NO: 21687 - protein, 1391 aa, unidentified
  REGION 1..1391: note = Cas Enzyme sequence
MKKPYSIGLDIGTNSVGWAVITDDYNVPAKKMKVLGNTNTKAIKKNLLGALLFDAGNTAADCRFKRTARRRLTRRRNRILYLQEIFAAEMNKLDESFFHRLDDSFLVPEDKRGSKYPIFGTLEEEKEYHKQFPTIYHLRKSLADSKEKADLRLIYLALAHIIKYRGHFLYEDTFDIKNNDIQKIFNEFTCIYDNIFEESSLSKENAQVEEIFTDKISKSSKRDRVLKLFPDEKSTGLFSEFLKLIVGNQADFKKHFDLEEKALLQFSKDTYDEDLESLLGQIGDDYADLFVVAKKLYDAILLAGILSVKDPATKAPLSASMIERYDNHKNDLSALKQFIRRNLSEKYAEIFSDDSKDGYAGYIVGKTTQEGFYKYIKNLVSKFEGADYFLEKIERDDFLRKQRTFDNGSIPHQIHLQEMNAILRNQGEYYPFLKTNKEKIEQILTFRIPYYVGPLARGNSDFAWLTRNSDDAIRPWNFEEMVDKARSAEDFINKMTNFDLYLPEEKVLPKHSLLYETFAVYNELTKVKFIAEGMKDYEFLDSGQKRKIVENIFKNQRKVTEKDIINYLHNVYGYDGIEIKGIEKQFNASLSTYHDLLKIIKDKEFIDDPKNEEILEKIIHTLTIFEDREMIKQRLAQYNSVFDEKVIKALSRKHYTGWGKLSAKLINGIRDKQTGNSILDYLMDDGKSNRNFMQLIKDDGLSFKEIIQNAQVVGETDNLRQVVQNLPGSPAIKKGILQSIKLVDELVKVMGSDPESIVIEMARENQTTAKGKKNSQQRYKRIEDSLKNLAFGLDSKILKEHPTDNIQLQNDRLFLYYLQNGKDMYTGNPLDINQLSSYDIDHIIPQAFIKDDSLDNRVLTSSKDNRGKSDNVPDLEIVEKMKGFWQQLLKSKLISERKFNNLTKAERGGLDRQDKVGFIKRQLVETRQITKHVAQILDARFNTEVNVKKQKIRTVKIITLKSNLVSNFRKEFGLYKVREINNYHHAHDAYLNAVVAKAILKKYPKLEPEFVYGDYQKHDLKRYISRSKDPKEIEKATEKFFFYTNLLNFFKKEMHYADGTIVKRDKIEYSEETGEIAWDKEKGFATIEKVLALPQVNIVKKTEIQTHGLDRGKPRGLFNSNPSPKPSEDSKENLVSIKQGLDPRKYGGYAGISNSYAILVKAIIEKGIKKQQKTILEFQGISILDKINFEKNQENYLLKKGYTEILSTITLPKYSLFEFPDGTRRRLASILSTNNKRGEIHKGNELVLPAKYTTLLYHAKRINKSLEPEHLEYVNKHRAEFAELLDYVLRFNDKYVGALKNGERIRESFINWETVDIKDICFSFIGPENSKNAGLFELTSQGSASDFEFLGVKIPRYRDYTPSSLLNSTLIHQSITGLYETRIDLSKLGEE

SEQ ID NO: 21688 - protein, 1374 aa, unidentified
  REGION 1..1374: note = Cas Enzyme sequence
MQDIKEKIMKKPYSIGLDIGTNSVGWAVITDDYKVPAKKMKVLGNTNKESIKKNLIGALLFDAGNTAADRRLKRTARRRYTRRRNRILYLQEIFAAEMNKVDESFFHRLDDSFLVPGDKRGSKYPIFGTLEEEKEYHKQFPTIYHLRKILADSKEKVDLRLIYLALAHIIKYRGHFLYEDSFDIKNNDIQKIFNEFTILYDNTFEESSLSKGNAQVEEIFTDKISKSAKRDRVLKLFPDEKSTGLFSEFLKLIVGNQADFKKHFDLEEKAPLQFSKDTYEEDLESLLGQIGDVYADLFVVAKKLYDAILLAGILSVKDPGTKAPLSASMIERYDNHQNDLSALKQFVRRNLPEKYAEVFSDDSKDGYAGYIDGKTTQEGFYKYIKNLISKIEGAEYFLEKIEREDFLRKQRTFDNGSIPHQIHLQEMNAILRHQGEYYPFLKENKDKIEQILTFRIPYYVGPLARGNSDFAWLSRNSDEAIRPWNFEEMVDKSSSAEDFIHRMTNYDLYLPEEKVLPKHSLLYETFTVYNELTKVKYIAEGMKDYQFLDSGQKKQIVNQLFKEKRKVTEKDIIHYLHNVDGYDGIELKGIEKHFNSSLSTYHDLLKIIKDKEFMDDPKNEEIFENIVHTLTIFEDRVMIKQRLNQYDSIFDEKVIKALTRRHYTGWGKLSAKLINGIRDKKTSKTILDYLIDDGYSNRNFMQLINDDGLSFKETIQKAQVVGETNDVKQVVQELPGSPAIKKGILQSIKIVDELVKVMGHAPESVVIEMARENQTTNKGKSKSQQRLKILSDAISELGSNILKEHPTDNIQLQNDRLFLYYLQNGKDMYTGEALDINQLSNYDIDHIIPQAFIKDDSLDNRVLTSSKDNRGKSDNVPSLEIVEKMKGFWQQLLDSKLISERKFNNLTKAERGGLDERDKVGFIKRQLVETRQITKHVAQILDDRFNAEVNEKNQKLRSVKIITLKSNLVSNFRKEFGLYKVREINDYHHAHDAYLNAVVAKAILKKYPKLEPEFVYGDYQKYDLKRYISRTKDPKEIEKATEKYFFYSNLLNFFKDKVYYADGTIIQRGNVEYSKDTGEIAWNKKRDFAIVRKVLSYPQVNIVKKTEEQTGGFSKESILPKGNSDKLIPRKTKNVQLDTTKYGGFDSPVIAYSILLVADVEKGKSKKLKTVKSLIGITIMEKVKFEANPVAFLEGKGYQNVVEENIIRLPKYSLFELENGRRRMLASAKELQKGNEMVLPSYLIALLYHAKRIQKKDEPEHLEYIKQHHSEFNDLLNFVSEFSQKYVLAESNLEKIKNLYIDNEQTNMEEIANSFINLLTFTAFGAPAVFKFFGKDIERKRYSTVTEILKATLIHQSLTGLYETRIDLSKLGEE

SEQ ID NO: 21689 - protein, 1374 aa, unidentified
  REGION 1..1374: note = Cas Enzyme sequence
MQYIREKIMKKPYSIGLDIGTNSVGWAVITDDYRVPAKKMKVLGNTNKKTIKKNLIGALLFDAGNTAADRRLKRTARRRYTRRRNRILYLQEIFATEMNKVDENFFHRLDDSFLVPEDKRGSKYPIFGTLEEEKDYHKQFPTIYHLRKSLADSKEKADLRLIYLALAHIIKYRGHFLYEDSFDIKNNDIQKIFNEFTSLYDNTFEESSLSKGNAQVEEIFTDKISKSAKRDRILKLFPDEKSTGIFSEFLKLIVGNQADFKKHFDLEEKAPLQFSKDTYDEDLENLLGQIGDMYADLFVVAKKLYDAILLAGILSVKDTATKAPLSASMIERYDNHQNELSALKQFIKRNLSEKYDEVFSDESKDGYAGYIDGKTTQEGFYKYIKNLISKFEGATYFLEKIEREDFLRKQRTFDNGSIPHQIHLQEMNAILRHQGEYYPFLKENKEKIEQILTFRIPYYVGPLARGNRNFAWLTRNSDEAIRPWNFEKIVDKANSAKDFINKMTNYDLYLPEEKVLPKHSPLYETFTVYNELTKVKFIAEGMRNYQFLDSGQKKKIVDQLFKEKRKVTEKDIINYLHNVDGYDGIEIKGIEKQFNASLSTYHDLLKIIKDKEFLDDPKNGDILENIVHTLTIFEDREMIKRCLTQYHSILDEKVIKILARRHYTGWGKLSAKLINGIRDKQTGKTILDYLIDDGYSNRNFMQLINDDGLSFKEVIQKAQVVGKTDDLKQVVQELPGSPAIKKGILQSIKIVDELVKVMGHSPESVVIEMARENQTTNKGRNKSQLRLKTLSDAISELGSNILKEHPTDNIQLQNDRLFLYYLQNGKDMYTGEALDINQLSNYDIDHIIPQAFIKDDSLDNRVLTSSKDNRGKSDNVPGLEIVEKMKGFWQQLLKSKLISERKFNNLTKAERGGLDERDKVGFIKRQLVETRQITKHVAQILNARFNAEVNEKNQKIRTVKIITLKSNLVSNFRKEFGLYKVREINDYHHAHDAYLNAVVAKAILKKYPKLEPEFVYGDYQKYDLKRYISRTKDPKEIEKATEKYFFYSNLLNFFKEEVQYADGTVVKRENIEYSKDTGEIAWDKEKDFAIIRKVLSIPQVNIVKKTEEQTGGFSKESILPKGNSDKLIPRKTKKIFWDTTKYGGFDSPVIAYSILLIADIEKGKGKKLKTVKTLVGITIMEKATFEKNPITFLENKGYHNVRKENILFLPKYSLFELENGRRRMLASAKELQKGNEMVLPSYLISLLYHAKKIQKKDEPEHFEYIQQHHTEFNDLLNFVSEFSQKYVLAESNLEKIKKIYSDSEQSNMEELANSFINLLTFTAFGAPAVFKFFGTDIERKRYSSVTEIFNATLIHQSITGLYETRIDLSKLGEV

SEQ ID NO: 21690 - protein, 1374 aa, unidentified; identical to SEQ ID NO: 21689
  REGION 1..1374: note = Cas Enzyme sequence

SEQ ID NO: 21691 - protein, 1278 aa, unidentified
  REGION 1..1278: note = Cas Enzyme sequence
  REGION 1254..1262: note = misc_feature - Xaa can be any naturally occurring amino acid
MQYIREKIMKKPYSIGLDIGTNSVGWAVITDDYRVPAKKMKVLGNTNKKTIKKNLIGALLFDAGNTAADRRLKRTARRRYTRRRNRILYLQEIFATEMNKVDENFFHRLDDSFLVPEDKRGSKYPIFGTLEEEKDYHKQFPTIYHLRKSLADSKEKADLRLIYLALAHIIKYRGHFLYEDSFDIKNNDIQKIFNEFTSLYDNTFEESSLSKGNAQVEEIFTDKISKSAKRDRILKLFPDEKSTGIFSEFLKLIVGNQADFKKHFDLEEKAPLQFSKDTYDEDLENLLGQIGDMYADLFVVAKKLYDAILLAGILSVKDTATKAPLSASMIERYDNHQNELSALKQFIKRNLSEKYDEVFSDESKDGYAGYIDGKTTQEGFYKYIKNLISKFEGATYFLEKIEREDFLRKQRTFDNGSIPHQIHLQEMNAILRHQGEYYPFLKENKEKIEQILTFRIPYYVGPLARGNRNFAWLTRNSDEAIRPWNFEKIVDKANSAKDFINKMTNYDLYLPEEKVLPKHSPLYETFTVYNELTKVKFIAEGMRNYQFLDSGQKKKIVDQLFKEKRKVTEKDIINYLHNVDGYDGIEIKGIEKQFNASLSTYHDLLKIIKDKEFLDDPKNGDILENIVHTLTIFEDREMIKRCLTQYHSILDEKVIKILARRHYTGWGKLSAKLINGIRDKQTGKTILDYLIDDGYSNRNFMQLINDDGLSFKEVIQKAQVVGKTDDLKQVVQELPGSPAIKKGILQSIKIVDELVKVMGHSPESVVIEMARENQTTNKGRNKSQLRLKTLSDAISELGSNILKEHPTDNIQLQNDRLFLYYLQNGKDMYTGEALDINQLSNYDIDHIIPQAFIKDDSLDNRVLTSSKDNRGKSDNVPGLEIVEKMKGFWQQLLKSKLISERKFNNLTKAERGGLDERDKVGFIKRQLVETRQITKHVAQILNARFNAEVNEKNQKIRTVKIITLKSNLVSNFRKEFGLYKVREINDYHHAHDAYLNAVVAKAILKKYPKLEPEFVYGDYQKYDLKRYISRTKDPKEIEKATEKYFFYSNLLNFFKEEVQYADGTVVKRENIEYSKDTGEIAWDKEKDFAIIRKVLSIPQVNIVKKTEEQTGGFSKESILPKGNSDKLIPRKTKKIFWDTTKYGGFDSPVIAYSILLIADIEKGKGKKLKTVKTLVGITIMEKATFEKNPITFLENKGYHNVRKENILFLPKYSLFELENGRRRMLASAKELQKGNEMVLPSYLISLLYHAKKIXXXXXXXXXSILNIFSNIILNLMIY

SEQ ID NO: 21692 - protein, 1404 aa, unidentified
  REGION 1..1404: note = Cas Enzyme sequence
VRISCGKQLHPFAKAIHKTTNEGKRRTIMKEVYNIGLDIGTSSVGYAMTDEKGRLLRFHKRPTYGSVLFEEAQTAKERRQKRSARRRLARRHKRIKLLQALVAPDVCVADPEFFLRMNESFLWAEDSKYEKFYAKLPKALFVDGTVSVETLPTIYHIRNELVKSTKQADIRYVYLAMHHIIKYRGHFLMEGQTLSDIGAEAPQKMQELLELLTDPESFACGLAPAENAAKEICHAMENHALRGMARREQIQKLLYAGKKKESKETVQALASLLLGYKGSLKALIGYENQTDAPEKTSLGAIEGETEETYLAGMTEAQAEVFTRILELYRWQLFAEIRQNGQTISDMMVARYEKHKSDLKRLKKWIRTYRKDEYATLFRDDNDPSGYAAYTHHLSRPTRFQQEKFTRCRQEGAKIKSIPEGFYNKCRRILESKKIDLPENARAEANEMLEEMKADNVFLPLQRINLNGQIPNQIQAEELAKILDAQGKYYPTLRENREKILSICTFRLPYYVGPLYQDKNSPFQKWIVRDMTQPAYPWNFFDVVNQTATAEGFIANLTNKCTYLPIKDVLPLHSLLYEEYLMLNELNRVRVKGNLIRDVQLKKRMMDELFAKNKSVSYKVFAKWLRQNSPYTDVTENDISGTQEPGKFTASLRTRYDLEKHGFTVSEQTMEQLETLVRWSTIFEDRSILKKLIQEHYPEITDNQLSFLVQRRYTGWGRLSEKLLTGVLGEYENQPATIMEVLRATNENFMQVLNNPQYHFQEEIAKERLMELGEPKEEIEYDEIRKLQVSPALKRGIWTAVRIVQELIAHQHGCHPHAIYLENTREETPDEKKQRTQSRLNQVEQMYKELAEDETAEKVPSECWEVLKDCRDKKKLDDQQYLYLLQLGKSLYSGKPLDFDRLSATTEIDHILPRCYIVDNSIENRALVLSGENQRKADNLLLADSIRDSQRPWWNYLRQKGLMGEKKFKNLTRSVVRYEDKQKFAARQLVETGQMVQCVTELFKRYYPDVHVSGIKAGLSSELREQYGLYKIRELNDMHHAYDALLAATMGNFVERFMPWLDSESSAAIRFRKAQEARKDDDDNKVDLSSKHGMILAKFSQDQVDADTGEIIHNAQQEICYLKAVWGYHDGHVVFLKRQKSGKITEDSRYRAGNKSAKMPLKKGLPCQRYGGFDSINPAFMTAIQYTQGKKVYHRVVGIPIYANVPVEKADELIRAFAADKIPGVTVVRPRLLMNQMLEWDGGIFVLRGGQTIDILTSKKNAARVTITNGKQLFVSGKDMTTIALLFRGKKDDLNPEQLKETVLHLLEKFKTQYAVFYQKCKADDINRILKSIETPEQLTTADWTAMVSELLNAMGKQRKASKEWITCEDWRIRAIPTKDVELIDQSITGLREKRTKLWPDSEPS

SEQ ID NO: 21693 - protein, 1337 aa, unidentified; identical to SEQ ID NO: 21339
  REGION 1..1337: note = Cas Enzyme sequence

SEQ ID NO: 21694 - protein, 1337 aa, unidentified
  REGION 1..1337: note = Cas Enzyme sequence
MKKDYVIGLDIGTNSVGWAVMTEDYQLVKKKMPIYGNTEKKKIKKNFWGVRLFEEGHTAEDRRLKRTARRRISRRRNRLRYLQAFFEEAMTALDENFFARLQESFLVPEDKKWHRHPIFAKLEDEVAYHETYPTIYHLRKKLADSSEQADLRLIYLALAHIVKYRGHFLIEGKLSTENTSVKEQFQQFMVIYNQTFVNGESRLVSAPLPESVLIEEELTEKASRTKKSEKVLQQFPQEKANGLFGQFLKLMVGNKADFKKVFGLEEEAKITYASESYEEDLEGILAKVGDEYSDVFLAAKNVYDAVELSTILADSDKKSHAKLSSSMIVRFTEHQEDLKNFKRFIRENCPDEYDNLFKNEQKDGYAGYITHAGKVSQLKFYQYVKKIIQDIAGAEYFLEKIAQENFLRKQRTFDNGVIPHQIHLAELQAIIHRQAAYYPFLKENQKKIEQLVTFRIPYYVGPLSKGDASTFAWLKRQSEEPIRPWNLQETVDLDQSATAFIERMTNFDTYLPSEKVLPKHSLLYEKFMVFNELTKISYTDDRGIKANFSGKEKEKIFDYLFKTRRKVKKKDIIQFYRNEYNTEIVTLSGLEEDQFNASFNTYQDLLKCGLTRAELDHPDNAEKLEDIIKILTIFEDRQRIRTQLSTFKGQFSEEVLKKLERKHYTGWGRLSKKLINGIYDKESGKTILDYLIKDDGVSKHYNRNFMQLINDSQLSFKNAIQKAQSSEHEETLSETVNELAGSPAIKKGIYQSLKIVDELVAIMGYAPKRIVVEMARENQTTSTGKRRSIQRLKIVEKAMAEIGSNLLKEQPTTNEQLRDTRLFLYYMQNGKDMYTGDELSLHRLSHYDIDHIIPQSFMKDDSLDNLVLVGSTENRGKSDDVPSKEVVKKMKAYWEKLYAAGLISQRKFQRLTKGEQGGLTLEDKAHFIQRQLVETRQITKNVAGILDQRYNAKSKEKKVQIITLKASLTSQFRSIFGLYKVREVNDYHHGQDAYLNCVVATTLLKVYPNLAPEFVYGEYPKFQAFKENKATAKAIIYTNLLRFFTEDEPRFTKDGEILWSNSYLKTIKKELNYHQMNIVKKVEVQKGGFSKESIKPKGPSNKLIPVKNGLDPQKYGGFDSPVVAYTVLFTHEKGKKPLIKQEILGITIMEKTRFEQNPILFLEEKGFLRPRVLMKLPKYTLYEFPEGRRRLLASAKEAQKGNQMVLPEHLLTLLYHAKQCLLPNQSESLAYVEQHQPEFQEILERVVDFAEVHTLAKSKVQQIVKLFEANQTADVKEIAASFIQLMQFNAMGAPSTFKFFQKDIERARYTSIKEIFDATIIYQSTTGLYETRRKVVD

SEQ ID NO: 21695 - protein, 1074 aa, unidentified
  REGION 1..1074: note = Cas Enzyme sequence
LEEEAKITYASESYEEDLEGILAKVGDEYSDVFLAAKNVYDAVELSTILADSDKKSHAKLSSSMIVRFTEHQEDLKKFKRFIRENCPDEYDNLFKNEQKDGYAGYIAHAGKVSQLKFYQYVKKIIQDIAGAEYFLEKIAQENFLRKQRTFDNGVIPHQIHLAELQAIIHRQAAYYPFLKENQEKIEQLVTFRIPYYVGPLSKGDASTFAWLKRQSEEPIRPWNLQETVDLDQSATAFIERMTNFDTYLPSEKVLPKHSLLYEKFMVFNELTKISYTDDRGIKANFSGKEKEKIFDYLFKTRRKVKKKDIIQFYRNEYNTEIVTLSGLEEDQFNASFSTYQDLLKCGLTRAELDHPDNAEKLEDIIKILTIFEDRQRIRTQLSTFKGQFSAEVLKKLERKHYTGWGRLSKKLINGIYDKESGKTILGYLIKDDGVSKHYNRNFMQLINDSQLSFKNAIQKAQSSEHEETLSETVNELAGSPAIKKGIYQSLKIVDELVAIMGYAPKRIVVEMARENQTTSTGKRRSIQRLKIVEKAMAEIGSNLLKEQPTTNEQLRDTRLFLYYMQNGKDMYTGDELSLHRLSHYDIDHIIPQSFMKDDSLDNLVLVGSTENRGKSDDVPSKEVVKDMKAYWEKLYAAGLISQRKFQRLTKGEQGGLTLEDKAHFIQRQLVETRQITKNVAGILDQRYNANSKEKKVQIITLKASLTSQFRSIFGLYKVREVNDYHHGQDAYLNCVVATTLLKVYPNLAPEFVYGEYPKFQTFKENKATAKAIIYTNLLRFFTEDEPRFTKDGEILWSNSYLKTIKKELNYHQMNIVKKVEVQKGGFSKESIKPKGPSNKLIPVKNGLDPQKYGGFDSPIVAYTVLFTHEKGKKPLIKQEILGITIMEKTRFEQNPILFLEEKGFLRPRVLMKLPKYTLYEFPEGRRRLLASAKEAQKGNQMVLPEHLLTLLYHAKQCLLPNQSESLTYVEQHQPEFQEILERVVDFAEVHTLAKSKVQQIVKLFEANQTADVKEIAASFIQLMQFNAMGAPSTFKFFQKDIERARYTSIKEIFDATIIYQSTTGLYETRRKVVD

SEQ ID NO: 21696 - protein, 1337 aa, unidentified
  REGION 1..1337: note = Cas Enzyme sequence
MKKDYVIGLDIGTNSVGWAVMTEDYQLVKKKMPIYGNTEKKKIKKNFWGVRLFEEGHTAEDRRLKRTARRRISRRRNRLRYLQAFFEEAMTDLDENFFARLQESFLVPEDKKWHRHPIFAKLEDEVAYHETYPTIYHLRKKLADSSEQADLRLIYLALAHIVKYRGHFLIEGKLSTENISVKEQFQQFMIIYNQTFVNGESRLVSAPLPESVLIEEELTEKASRTKKSEKVLQQFPQEKANGLFGQFLKLMVGNKADFKKVFGLEEEAKITYASESYEEDLEGILAKVGDEYSDVFLAAKNVYDAVELSTILADSDKKSHAKLSSSMIVRFTEHQEDLKKFKRFIRENCPDEYDNLFKNEQKDGYAGYIAHAGKVSQLKFYQYVKKIIQDIAGAEYFLEKIAQENFLRKQRTFDNGVIPHQIHLAELQAIIHRQAAYYPFLKENQEKIEQLVTFRIPYYVGPLSKGDASTFAWLKRQSEEPIRPWNLQETVDLDQSATAFIERMTNFDTYLPSEKVLPKHSLLYEKFMVFNELTKISYTDDRGIKANFSGKEKEKIFDYLFKTRRKVKKKDIIQFYRNEYNTEIVTLSGLEEDQFNASFSTYQDLLKCGLTRAELDHPDNAEKLEDIIKILTIFEDRQRIRTQLSTFKGQFSAEVLKKLERKHYTGWGRLSKKLINGIYDKESGKTILGYLIKDDGVSKHYNRNFMQLINDSQLSFKNAIQKAQSSEHEETLSETVNELAGSPAIKKGIYQSLKIVDELVAIMGYAPKRIVVEMARENQTTSTGKRRSIQRLKIVEKAMAEIGSNLLKEQPTTNEQLRDTRLFLYYMQNGKDMYTGDELSLHRLSHYDIDHIIPQSFMKDDSLDNLVLVGSTENRGKSDDVPSKEVVKDMKAYWEKLYAAGLISQRKFQRLTKGEQGGLTLEDKAHFIQRQLVETRQITKNVAGILDQRYNANSKEKKVQIITLKASLTSQFRSIFGLYKVREVNDYHHGQDAYLNCVVATTLLKVYPNLAPEFVYGEYPKFQTFKENKATAKAIIYTNLLRFFTEDEPRFTKDGEILWSNSYLKTIKKELNYHQMNIVKKVEVQKGGFSKESIKPKGPSNKLIPVKNGLDPQKYGGFDSPIVAYTVLFTHEKGKKPLIKQEILGITIMEKTRFEQNPILFLEEKGFLRPRVLMKLPKYTLYEFPEGRRRLLASAKEAQKGNQMVLPEHLLTLLYHAKQCLLPNQSESLTYVEQHQPEFQEILERVVDFAEVHTLAKSKVQQIVKLFEANQTADVKEIAASFIQLMQFNAMGAPSTFKFFQKDIERARYTSIKEIFDATIIYQSTTGLYETRRKVVD

SEQ ID NO: 21697 - protein, 1337 aa, unidentified; identical to SEQ ID NO: 21696
  REGION 1..1337: note = Cas Enzyme sequence

SEQ ID NO: 21698 - protein, 1047 aa, unidentified
  REGION 1..1047: note = Cas Enzyme sequence
  SITE 1047: note = misc_feature - Xaa can be any naturally occurring amino acid
MSKLVLGLDVGIASVGWGIIDYETNKIIASGVRLFSERDKKQNETRRNSRSSRRLIRRREHRLERIKKILFEDKIITENFIPLENPYEIRVKGLNNKLSNEELATAILHIAKRRGVSGNWTVEESKKAAAEEESLKKILNENREQLKNKYICEIQLDRLKNDGKVRGNTNCFNTSDYLKELDKIFENQNIKKETKEKIREIVEDRREYYEGPGNEKSITPYGRFVIKDGKVIELNFIEKMRGNCRVFPEEKRASKNSYDACLYNLLNDLNNLTIDGKIIDTNTKKIIIEEYINKKGNITVKQLLKVLNVNDSLLVHGFRTNKSEEPIITSFDGYKKVLSKVEKEKLNPIVCENKELFNQISDVLTSYKGIEQRKEKIKELSDKLNDKDLEILANLTGFTQYHSLSHKALKLFINEMMETNYNQMQLLQINNWFNKKTILKSQKNISFNEQDILSPVAKRSHKEAIKVLNAIRKEYGELDSIVIEMAREKNSEDKKAKIKEIQKSNELLNQKVKEVLNGKQVNYQIQLKIRLYLDQECKTAYTGEIIDLDKLVNDPTAYEIDHIIPLSISLDDSYNNKVLVTHKENQDKGQRTPYEYFKSGKINENYENFKARILSNNNISRRKKQNLFFERDINQYDVRKKFINRNLVDTRYATRSLLNNVTNYYKSNEIDTKVYTINGNITNLFRKKTILSKDRDKDATHHAIDALIIAGIKKMKLMDNLLNLEIKDDIVYDKETGEVMTLENEKDFFDETFMNFLSSLKEVQPKFSHKIDSKVNRALSDETIYSTRRINDTEYTVGKYKNIYDKDGEKLAKDIRSNKAEKLLIYRNDKKSYDVLKSIVEEYSNDKNPFATYFKEHNEYIRKYSKKGNGAPIINIKYIDDKVGEKVIDLTDKFTNSTRRIIKKQLNPYRVDIYKTEDNKHKILEVKQIDITYKNGKYYIDKNKYEQLKKDHNINEKDKFMFTLYKDTIIKVNDALIRYAGINNIKSGVIYYKTIDQSKIYTNGKEFTRPYINIKNATILEKYNVDVLGNMHKSVNETCKLEIEMIX

SEQ ID NO: 21699 - protein, 1044 aa, unidentified; identical to SEQ ID NO: 15517
  REGION 1..1044: note = Cas Enzyme sequence

SEQ ID NO: 21700 - protein, 1044 aa, unidentified
  REGION 1..1044: note = Cas Enzyme sequence
MNKEIVLGLDIGIGSIGWGLIDKQTGEIIDKGVRLFSEANPENNVDRRLFRSTRRTIRRKEFRLYRTRRVLLEMGLIDDIAFLPLDNPYEIRCKGLENKLRNDELATAILHLMKRNGFRYEIVDDKESSGVSRISDEYLCQHQLKILQAYGKVRGQENRYHFKLYEKEFKKLLEIQNIDSSFQERLLDIFTRRRHYAEGPGCKTSPSAYGRYLSFNSQPINLIEKMRGHCSVFQDELRAPKVCPSAELFNFLSDINNITIHGNHIPVDKKVDMIETFVLGKNKITIKQLENFLGESLANIDGLRVNASGEPLITEFKSLKKIKDAIKKADLSDYPINSIEDFYILDDIFEILTQEKTIEGREERLNKLSIPELSNEHLKCFAKIKETTGYHSLSLKALREINSEMLQTSKNAQQIIVTLRNNNEQFDQGLRLPENTIMSPVVRKALNQTFLIVKAIIKKYGHLHSIIVEMAREKNSGDLKKKISETQKRRVQEKEKVLTLLEGLNIQEIKGDLIEKILLYIEQDSKSIYSGKPMNLNEIINDPSAYEIDHIIPYSLSLDDSRSNKVLVYSHENQNKGRRTPFQVFQNKPADWWTWTEFEAFSRFQYIKNRSKLSKLLEKRDIESYDVQEEFISRNLNDTRYICKQALLTLKMYFSHHDIDTKVHVVNGLLTNRVRRIANLKKDRNFHCHHAIDALIIASFLKSKYLENGLNNELIDYDTGEIFTNYSNDDIFGPVVENVVKQLISLDQIDDFRFSYKVDAKANRSLFDSTLYGTRLEKNDLYVIKKYANIYDKPGEKLAENIRKNKDIENLLIYRNDKNTFVLLQKIVASYPNEKNPFSAYKNEHGDYVRKVSKKGKKAPAVISIRYVEDKANISLPLSNKYPKPVAGRGYPIKLQLSPYRMDLYLNEDDGKYRFLTIRYSDVRQKGNEYIINEAWYEKEKERYGIGSNFHFVNSFYRCDLIKCTFRDGTTKLDVFKVVNNQLSQRIEIDSFGQNIIDYSNGVPKKKRVTISIGRNVSIVQKYGTDILGNLYLIRNEPLKLRWQ

SEQ ID NO: 21701 - protein, 1057 aa, unidentified
  REGION 1..1057: note = Cas Enzyme sequence
MGYILGLDLGITSVGFGIIEEDTYKIIKYGVRLFDEGTADNNLTRRQNRSSRRLKSRRKNRINAIKYLLLNNNVIPNVNFDILDNVYELRVKGLTQKLTNLELANVLVNLAKRRGSSLDVAVDENDNESVVAASALTKNTAELKKNNLYICQAQLAKIKSGVKLRNHDNIYKSDDYKKELRQILSNQDLSNELNDKIVEIIMRRRNFSEGPGSYEFPTKYGSYRVDYVDGIKTIKHVNLIEEMRGKCSIFRNEPRIAKCSFEACLFNLLNDLNNLTINGNGKITKEQKLQIINDYVIPKGKITIPQLVKYLGVEEKDITGFRKNKSEKNIITTFDTYSKMINFLPKDILNVTAYVDSIIELLTKTAVVEERIEEIKKLNLGLNDDIINQLANMTKVNGYHSLSKKAMDIIIPEMIETDKNQMQIIHDNNLDKNDCQEKGAKIKFDSSAILSPVTKRVHMQAIQVVNELRKEYGEFDSIVIETTRAKNSSDEKKDIQEDKKRLEEQKRKSDELLIDLDKNPDNYNTLTKLKLRLYKEQEGKTIYAGLPIDLDLLLNDPTAYQIEHIIPYAVSFDNSMNNKSLASAKENQDKGKRTPWQYFSSGMVSECEGPINDWESFEAFVNSLKISKNKKNNLLNQEDVTKFDNMKAFVARNLSDTSYGVRTVMNTMQQYFNDNNINTNVFTVKGRLTNIFRSRVGLKKDRDYFIHHAVDALIIAGSKNQSVFNNAYLLSSTKDGILIKKTGEVFDYSQDPFDDPRFLNYISSLKKIEGKPEDFSYKVDKKTNRQFADQTIYSTRNYDGVDYVVKKYKDIYGKDGESLKKLFDDKKEQTLLMARNDIQTFELFKKIYENYKNEKNPFAKYKDEFGPIKKYCKDGKGPEIYQVKYISDKLGNHLDISDKYNVENGNKKVVLLQISPYRTDVYQSKETGLYNFITIRRYHIYQENDMNIIKPELYQKLLSDKKIDETYEFKFSLNRNDIINLVTIDNQADHIDEMLYRFIGTNNDKTNKIEIRYIEKMTLKQIMVSIGKKIVKFEKYNVSPTGKKAKAEKEVLKLKWK

SEQ ID NO: 21702 - protein, 1016 aa, unidentified
  REGION 1..1016: note = Cas Enzyme sequence
MGYILGLDLGITSVGFGIIEEDTYKIIKYGVRLFDEGTADNNLTRRQNRSSRRLKSRRKNRINAIKYLLLNNNVIPNVNFDILDNVYELRVKGLTQKLTNLELANVLVNLAKRRGSSLDVAVDENDNESVVAASALTKNTAELKKNNLYICQAQLAKIKSGVKLRNHDNIYKSDDYEKELRQILSNQDLSNELNDKIVEIIMRRRNFSEGPGSYEFPTKYGSYRVDYVDGIKTIKHVNLIEEMRGKCSIFRNEPRIAKCSFEACLFNLLNDLNNLTINGNGKITKEQKLQIINDYVIPKGKITIPQLVKYLGVEEKDITGFRKNKSEKNIITTFDTYFKMINFLPKDILNVTAYVDSIIELLTKTAVVEERIEEIKKLNLGLNDDIINQLANMTKVNGYHSLSKKAMDIIIPEMIETDKNQMQIIHDNNLDKNDCQEKGSKIKFDSSAILSPVTKRVHMQAIQVVNELRKEYGEFDSIVIETTRAKNSSDEKKDIQEDQKRLEEQKRKSDELLIDLDKNPDNYNTLTKLKLRLYKEQEGKTIYAGLPIDLDLLLNDPTAYQIEHIIPYAVSFDNSMNNKSLASAKENQDKGKRTPWQYFSSGMVSECEGPINDWESFEAFVNSLKISKNKKNNLLNQEDVTKFDNMKAFVARNLSDTSYGVRTVMNTMQQYFNDNNINTNVFTVKGRLTNIFRSRVGLKKDRDYFIHHAVDALIIAGSKNQSVFNNAYLLSSTKDGILIKKTGEVFDYSQDPFDDPRFLNYISSLKKIEGKPEDFSYKVDKKTNRQFADQTIYSTRNYDGVDYVVKKYKDIYGKDGESLKKLFDDKKEQTLLMARNDIQTFELFKKIYENYKNEKNPFAKYKDEFGPIKKYSKDGKGPEIYQVKYISDKLGNHLDISDKYNVENGNKKVVLLQISPYRTDVYQSKETGLYNFITIRRYHIYQENDMNIIKPELYQKLLSDKKIDETYEFKFSLNRNDIINLVTIDNQADHIDEMLYNLLELIMIRQIKLRLDILKK

SEQ ID NO: 21703 - protein, 1057 aa, unidentified
  REGION 1..1057: note = Cas Enzyme sequence
MGYILGLDLGITSVGFGIIEEDTYKIIKYGVRLFDEGTADNNLKRRQNRSSRRLKSRRKNRINAIKYLLLNNNVIPNVNFDILDNVYELRVKCLTQKLTNLELANVLVNLAKRRGSSLDVAVDENDNESVVAASALTKNTAELKKNNLYICQAQLAKIKSGVKLRNHDNIYKSDDYEKELRQILSNQDLSNELNDKIVEIIMRRRNFSEGPGSYEFPTKYGSYRVDYVDGIKTIKHVNLIEEMRGKCSIFRNEPRIAKCSFEACLFNLLNDLNNLTINGNGKITKEQKLQIINDYVIPKGKITIPQLVKYLGVEEKDITGFRKNKSEKNIITTFDTYSKMINFLPKDILNVTAYVDSIIELLTKTAVVEERIEEIKKLNLGLNDDIINQLANMTKVNGYHSLSKKAMDIIIPEMIETDKNQMQIIHDNNLDKNDCQEKGSKIKFDSSAILSPVTKRIHMQAIQVVNELRKEYGEFDSIVIETTRAKNSSDEKKDIQEDRKRLEEQKRKSDELLIDLDKNPDNYNTLTKLKLRLYKEQEGKTIYAGLPIDLDLLLNDPTAYQIEHIIPYAVSFDNSMNNKSLASAKENQDKGKRTPWQYFSSGMVSECEGPINDWESFEAFVNSLKISKNKKNNLLNQEDVTKFDNMKAFVARNLSDTSYGVRTVMNTMQQYFNDNNINTNVFTVKGRLTNIFRSRVGLKKDRDYFIHHAVDALIIAGSKNQSVFNNAYLLSTTKDGILIKKTGEVFDYSQDPFDDPRFLNYISSLKQIEGKPEDFSYKVDKKTNRQFADQTIYSTRNYDGVDYVVKKYKDIYGKDGESLKKLFDDKKEQTLLMARNDIQTFELFKKIYENYKNEKNPFAKYKDEFGPIKKYSKDGKGPEIYQVKYISDKLGNHLDISDKYNVENGNKKVVLLQISPYRTDVYQSKETGLYNFITIRRYHIYQENDMNIIKPELYQKLLSDKKIDETYEFKFSLNRNDIINLVTIDNQADHIDEMLYRFIGTNNDKTNKIEIRYIEKMTLKQIMVSIGKKIVKFEKYNVSPTGKKAKAEKEVLKLKWK

SEQ ID NO: 21704 - protein, 949 aa, unidentified
  REGION 1..949: note = Cas Enzyme sequence
LTAEDFEKEDNASASIEEVLRTQGELLKHQYVCNIQLNRYQESRQSGVGKTRGQDNRFRNKDYLRELEALLEKQGEYYPVLNAHKEELLKIYKSKREFYEGPGGKNSPTPYGRYRYDKEGKITEVNLIELMRGKCTFFPDEPRIASNSYTACLFNLLNDLNNMGIGGESLSLDHKKELVEHYIDIGKNVSLQAISKITGVKAELLRGYRTDKSDKPQFTEFVGYKEMLKIMGKAEIRTDFLQGNRKLVDEVAEILTSEKDIEKRAERMMAIGILESAAHELKKLSKFTRYHSLSQKAIESILDDLWETDQNQMQLFTLSGMLKQNHDDLIGVNIPFDGSGWIVSPITKRAVGEAVKILNATRTSLRKQYNCEFEEIVIEMAREKNSDEQAAFIKKNQKQNEDLKKQIDSIVDLKKINGKQFEILKLLIEQDFTCAYSLQKVGLAHVFNGMLEIDHVLPRSLSFDDSQANKVAVLLQENQKKGQATPFQYLKSGRGKISYEEYKAWVLRNDAYTKKKKKRENLLYEGNPQQDLTGFINRNLVDTRYACKEVLNLLQAYFRENKIDTKVSVIKGSFTYSFRKKARLDKNRSESYAHHAQDALIVAGLSNTQLIKSVNSLMRTDSIMDNGKTAWLEENGKWINQVTGEVFSDDDFNNGQYIRFIKNVDSVRPKYSHKVDRKPNRALYDQQIKSTREKAGATYVISKYKNIYAQGPGSCGEKLKKRIQESPEDLLMYQHDRRTFDNLVEIVKAYSESKNPFAAYFSEHGPIRKYSRSGNGPAIVDIKYFDRMLGSHRPNKKQEGKNLSVYLSIKSLRADFYLDQGTYKFISVPYDMVNFVAENHVIDSGKYETAKQNKKISPSAEFLFSLHTGEMFSYDKDDEKYEWVYNCMNNDSRNVVETRFIDRPSPGNTQAKRMITISKKIGNLMKFHVDVLGNRHEVKREVFRKIVTI

SEQ ID NO: 21705 - protein, 1062 aa, unidentified
  REGION 1..1062: note = Cas Enzyme sequence
MSKVLGLDIGISSVGWGIIDQESGEIIDAGVRLFEEATRNANEERRSFRGSRRLKRRRSHRLEMAKLLFKDFHLPTNGIGKVNPYQARYKAIFGSVTKEELVAALYHLVKKRGTTLDTPDEEKTSGSELSTKEQLARNKKLLENKFVCEIQLERLSNSFEKIRNHENRFRTEDYVKEAKAILKKQGQVYPEITDEFITRFIELIERRRQYYEGPGSEKSPTPYGPYSIDKEGKLTYTSMIDKMRGKCTYFPDQLRIAKMSFTADLFNLLSGDLNKLQINGEYLTYEDKVHLVDTIIKKGKNLTLPQILKYKGVSGEADVRGYRIDLKTDKPTFTEFAGFKKILKIVKENSLPTSLLENIDLLDEIVEILTAEKSFLRREEKLKNILQGKYSEKTIKDIVNAFIDTTEFKGYHSLSKKAISLIMNDLWHTNKNQMELFNEYGLEQRRLLKIQKSRQIKFDDDAILSTVAKRAHREAIKIVNAVRKKYGEMDSIVVETAREKNSDEKRRLYAEFQRKIGKHEKEMTKLLGVKTLAELHLNSKQHLALKLWQSQDGKCIYSGKSISIHDIVTDFSLFEIDHILPISISFDDSQSNKVLCYRSENQKKGQKTPYQYFSTGKASRTFDQFKVEVMNLYKSKKINNKKKDYLLEQRDIQKNEEIQKEFINRNLVDTQYAMRSFSMTLRTFFKTHDIDTKVFSIRGSFTAALRRRARLNKDREESYAHHAIDALIVAAIGRMPAFKFFREFDLTENGIIFNKETGEIVDEEKFFGHNFITFLRNLMNYESKIKYSHKVDRKANRSMSNQTIYSTRDKDGEIYYLGKTGNVYQLDKNGVTQLLKRIEKNPDSFLIAQHNPDLFKHILQIIDEYRNEDNPFKAYYDENGFIMKDGKVPVKSLRYYDKKLGVHMNISNKYPNAKNPVVLRTIKSIRIDLYRNKDGQYKYIGVPYYWFKQKGNQFVLDMDKYMEEKMKEYKLIDKSYEFQYSLYKNDLFSFEKNGKVFYRIFRGDNNPRQNIIEVDYIFKKKEERKEGFLSPSTIKNVIKYNVDVLGNTYKIEKEKFIDTLQF

SEQ ID NO: 21706 - protein, 1337 aa, unidentified
  REGION 1..1337: note = Cas Enzyme sequence
MKKDYVIGLDIGTNSVGWAVMTEDYQLVKKKMPIYGNTEKKKIKKNFWGVRLFEEGHTAEDRRLKRTARRRISRRRNRLRYLQAFFEEAMTALDENFFARLQESFLVPEDKKWHRHPIFAKLEDEVAYHETYPTIYHLRKKLADSSEQADLRLIYLALAHIVKYRGHFLIEGKLSTENISVKEQFQQFMIIYNQTFVNGESRLVSAPLPESVLIEEELTEKASRTKKSEKVLQQFPQEKANGLFGQFLKLMVGNKADFKKVFGLEEEAKITYASESYEEDLEGILAKVGDEYSDVFLAAKNVYDAVELSTILADSDKKSHAKLSSSMIVRFTEHQEDLKKFKRFIRENCPDEYDNLFKNEQKDGYAGYIAHAGKVSQLKFYQYVKKIIQDIAGAEYFLEKIAQENFLRKQRTFDNGVIPHQIHLAELQAIIHRQAAYYPFLKENQEKIEQLVTFRIPYYVGPLSKGDASTFAWLKRQSEEPIRPWNLQETVDLDQSATAFIERMTNFDTYLPSEKVLPKHSLLYEKFMVFNELTKISYTDDRGIKANFSGKEKEKIFDYLFKTRRKVKKKDIIQFYRNEYNTEIVTLSGLEEDQFNASFSTYQDLLKCGLTRAELDHPDNAEKLEDIIKILTIFEDRQRIRTQLSTFKGQFSAEVLKKLERKHYTGWGRLSKKLINGIYDKESGKTILDYLIKDDGVSKHYNRNFMQLINDSQLSFKNAIQKAQSSEHEETLSETVNELAGSPAIKKGIYQSLKIVDELVAIMGYAPKRIVVEMARENQTTSTGKRRSIQRLKIVEKAMAEIGSNLLKEQPTTNEQLRDTRLFLYYMQNGKDMYTGDELSLHRLSHYDIDHIIPQSFMKDDSLDNLVLVGSTENRGKSDDVPSKEVVKDMKAYWEKLYAAGLISQRKFQRLTKGEQGGLTLEDKAHFIQRQLVETRQITKNVAGILDQRYNANSKEKKVQIITLKASLTSQFRSIFGLYKVREVNDYHHGQDAYLNCVVATTLLKVYPNLAPEFVYGEYPKFQAFKENKATAKTIIYTNLMRFFTEDEPRFMKDGEILWSNSYLKNIKKELNYHQMNIVKKVEVQKGGFSKESIKPKGPSNKLIPVKNGLDPQKYGGFDSPVVAYTVLFTHEKGKKPLIKQEILGITIMEKTRFEQNPILFLEEKGFLRPRVLMKLPKYTLYEFPEGRRRLLASAKEAQKGNQMVLPEHLLTLLYHAKQCLLPNQSESLAYVEQHQPEFQEILERVVDFAEVHTLAKSKVQQIVKLFEANQTADVKEIAASFIQLMQFNAMGAPSTFKFFQKDIERARYTSIKEIFDATIIYQSTTGLYETRRKVVD

SEQ ID NO: 21707 - protein, 1359 aa, unidentified
  REGION 1..1359: note = Cas Enzyme sequence
MNLRNIPSYNVGLDIGTGSVGWAVTDENGNLCHFKNRPTWGSRIFPSANTAAETRLKRGQRRRYDRRRQRLDLLQSLFDEEMTKVDPEFFIRLRQSKLRVEDREEGHREYRYPFFNSSDFTERMYYKSYPTIYHLRKHLIESDQQEDLRLIYLAFHNIVKTRGNFLYQDTPSLSAKDASMSEAIEELLNALVLWAGTAYDFEIDSEKLRKVFEDSSLTRAEKKDEALKVLTLEDKKIAKELINAVLGYKANFSTIFKIEAEKSAFSFDNDEQREAFIASVPDEGMVLYEALQKAYSAYILMDIIEDANGKSVSYSMVAKYNKYGEDFKNLKDLVKEYCSTKYSEFFRGERYEAPYQKDYDKSKAKGYTKYNEVRGAKYDDFKKEVENLFKDTAATSDPRYQDMMTKFANGKFLRRLKTSDNGSIPFQLHLEEMNAIIDAQEKFYPFLSEIRYKLNFLVTFRIPYYVGPLTQKGAALDTSGKPRFAWSKRQEGKEGEKIYPWNWEDIIDKGASAREFIQRMTGTCTYLYGEPVLPKCSLLYEKFCVLNELNGAKWSQDNDKWYRFDADDRLSIYEELFERYKSVSFKKLEDWLKQRGEAFPHVKGGQGEGKFESKLSSHHFFKELLGTDEWSDQTKQMIEELILWNTLFEDKKILKEETTKKYGDVLTAEQIKKFCGHRFTGWGRLSKKLLTGIKTEVDFRKMSVMDLLIEGDPYGEHVGSSLILMEILHNKNFEFSKEIEAHNEKYFSKDQSVEDLPGSPAVRRSVNQALRIVEEIAKIAGKPAAHIYIESTRDDEEKKRSEKRADKIKRLLSELRPEDKNTDVLKELNEYVGKNLDKRLTLYFMQNGKSMYSGKAIDIRRVSDNTYCQIDHILPQSYIKDDSLENTVLVLSDENQHKGDSLLLDADIRRKMAGIWHELHRVKLIGDKKYKNLTRSVVTDRQMEGFINRQLVETSQIVKFVRMLLKSQYPDTEICSIKASLSHEIREKYDLPKIREVNDYHHAHDAFLACEMGRFLSIRYKEAFTNPVGLTKLMRKFVKKESEEAQKQHRIPGTTPFFVASFSRPGFDLETGEVTRDEWNPIEEVEKIKKTFDFKQCFVSRMPEMTSGAFWDETVYSPKGKEKTLIEMKKDLSVEKYGGYSGENSAFFFIYKSKGESEHLNFAPFPLSLATRKDDIYHLIETYAIDLCREAKETFTGIIIPQIYKYQKIEWNGQQFYLTGKKEIRSAASIFFSQQDQLCLIKYGSNSSSVSEEMLEAFERFSQRAYKQSEKLYKQLKLEDSRQVICDLSNQQVYEIICGLASIFNGKINMLNLSVIGGSKYSGCMHPSISSEINKRENTFFVIDQSVTGMFERRRRIGL

SEQ ID NO: 21708 - protein, 1387 aa, unidentified
  REGION 1..1387: note = Cas Enzyme sequence
MNLRDADSYNVGLDLGTGSVGWAVTDEDGELLHFKGRPTWGSRVFPPGKPAAQTRLARGQRRRYERRRWRLNLLQDMFREEMAGIDDEFFIRLNQSRLHPEDRMDGHADYRWPFFNATDFTERDYYAKFPTIYHLRAWLMQTNDQADLRLIYLAFHNIVKTRGNFLHQDNRKLSASNADMTSSIETLCLTLTDWCDAHDIETSCCDHIEDMCKTLEDPTTNRGEKQSAFQDQLCFDKENRKTLGAQISKAIIGYKAEFASIFFEEADESKFSLSNDDAVEAYLSHIPDDGMALFDAIRGVYSAFILSGILSFGGDRPIKSGILKGSTGKTISYCKVREYEQYNSDLTLLKALTRKFAPDKFNEFFRGEFYPGTHNYDPSKAKGYTKYNLLRAGASYDDFKKNVIKLFEGTQAAADPQYKKMMASFGEERFLRRLKTSDNGSIPYQLHLEEMNAIITNQGHFYPFLLAQRDKIESLVSFRIPYYVGPLTQKNAARDQDGKLRFAWSVHRQGKENEPVYPWNWDQVIDKNRSAQKFIERMTSDCTYLVDEPVLPKCSLLYEEYCVLNELNGTHYSADGDKQRRFDCADRQGIIDDLFKQKHLVTYKSVEDWMRENRKWTSIHVSGGQGETKFESNLSSYRFFCKDVFHVDELPESLVPKVEQIILWNTLFEDRSILKEELKRNFGDILSAEQVKTICHRRFRGWGRLSRKFLIGLKTDTDHGPKSIMDIMREGCPTSGESYRQSMVLMEIIHDSNLDFMQLIEQENQKKLAAKGKFEVNDLPGSPANRRTVNQATRIVEEIARIAGKAPTHIFIETTRDEDPKNKGKRTKRRWEKLNDTLKAFKDENSELIKEFEERNAKEFDDDRLMLYFMQGGKSLYSGKPIDIERLSEYQIDHIIPQSYIKDDSLENKALVLSKENQSKTNSLLISPSIRQRMAGYWRELHRLGLIGDKKFNNLLCSNISDRKIKGFISRQLVETSQSTKLTKIMLENRFPETRVLGIRAGLSHELREVKHYPKCREINDFHHAHDALLAAEIGRFLLKRHSEMYDNPVGYAHVVRNFIHAEALEASRTGHMPSSAGFIISSFLHSGFDKGTGEVFKDSWDAEYECERIGKFFNYKQVFISRMPEETNGAFWDATVYSPRDKSKKISSSSLPVKQGLDPAKYGAFSNEQFAYFFIYKEKDKKGKCQLVFSSVPVRISAQIELGGIKALENYAKKEAAEHGAEFVGVIRNKIYKYQQIEIGSDRFFITGKKEVRNARQFAFTQDETELFTQIKRGFFTDEMDLESLFGTLQDKFIKLSPKLAQILKISSIGDSFSKLDKSAQAKVLCSLVSIAAAKTNMIDMTLVGGSKTAGCIRIAKKKYLNNEEGITFVDQSVTGMFERRTHIGL

SEQ ID NO: 21709 - protein, 1033 aa, unidentified
  REGION 1..1033: note = Cas Enzyme sequence
  REGION 977..980: note = misc_feature - Xaa can be any naturally occurring amino acid
LIHISNHRGYQAFYNLTEEELTDLPASEKKEYQQELSGIEQVTSIMEQGGYRSVAEMILNDEAFAPEDAGPMRSYRSHPYKEIRYPISREMLKKEADEILRVQAEFYPCLNEPYQVTWRKERRTPSNREFLEWLIFRQRDFEDGPGDCDDVMRKYTGFLQALGKCPFYRSENRGPRMTVLGDLYTLVNSLSQYRYLNTKTSELGLPKALAQELLENALKDAALSADKIKELAKKYNIKIDNKSVKTADRAPNCIKFMCRVRPVLEKYNIDWVSALGGTSLEDVLDEGTMLNQIGRVLSLYQTPHRRKEELMKISGVSQDLAERLTAIRLSGTAKVSAHYMQDAVKAFQLGERYGEFQWKKMNELEQALTGQARGVHVKLPPFSADAEFAKNSVVMRSLNETRKVINAIIGKYGSPWAINVEVASELGRSWAERAEWDKKNKQNWAQSEKEKKRICEIMGYDSPDQVKGSMLERFRLAEQQNWQCLYTGKPITDKRAALDPKNYNFEVDHIIPFSLILDNTLQNKALVCADANQTKGQRTPLMYLHDAAQWEQFIGRVNQMAKNHIISDRKRQYLLLDQLENSQLLDEWKSRNLNDTRYIAKYLRGYLERELAPAAEHRTPFVFPVKGGLTSRFRRVWLDKETWGGENKENLRDITTLHHAADAVVIANISPATALIAEDNMRLNRILKNDRGRQTPEYCAQLERSLQTLEQYYHIPRAKAEAYLKRQNRISARIANLNIEVNIRFGKPGEEMDLDTYRSNVLHYYHDDAPFAANLIPPLTSRKQERKIQGCLTTGNALGTMTVDGELYEAERIDVMKLTQKDLPRLCTNDGDLRDSLMELLATAGDKPLKDVLPKQSENEFRTQKGRLIRKVTLKGKQLSQYKIKQIAENNYSVLDTTKYYCTEVYRDTVGKTKVRAIARADLVRRDKKLWLTCPYPADYAEHIMYLFKNDYIRVETPNGLQFEGFYQSLAGIKQAXXXXQAKFSGMEKNASKSRQFSISGIATVTKYDISILGKKGGEIPCGEPLSLLPEKK

SEQ ID NO: 21710 - protein, 945 aa, unidentified
  REGION 1..945: note = Cas Enzyme sequence
MLKYRLGLDIGIGSIGWAIISGDSKVARIENFGVRIFESGEDPRQNERKSQQRRGFRGARRLIRRKKHRKERIKGHLQNIGLVKIEELNQYFETNNQDIYEIRVKALNEKISPKEIGACLIHFANNRGYKDFYALEVESLDAEEEADYEALNNFDKLYKSSNFRTPAECILEKFKKDGQPYPDFRNNHFKSVHYLINREYLKNEMHQILEEQSKYYECLSSANIERLDAIIFDQRDFEDGPGDKNDAYRRYKGFLLSVGKCMYYKDLDRGFRSTVISDVYAVINTLSQYRYEDSEPGDYYLKPEAARELVQTLLKTGNLTMTEAKKIVKKHGITMSKSDFSDDSALSKAIKYLKVIKNMIECCGLDWNGFISEDQFDVDNYSRLHQMGELISKYQTPKRRKDELKKLSWMTEPLLKELCAKKISGTSNVSYKYMCEAIQAFMNGETYGNFQANKLKERQENISPEYRSMLLKTLDDPEIKDNPVVFRAINETRKLINAIIRKYGSPECINLEVASELNRSFTERAVIQKNQKENEKNNDRVKKEIADLLQIEVGDASGPQIDKYKLYYQQNCKCLYSGKTLGDIELVLRDKSHRYEVDHIVPYSLILDNTLHNKALVLGNENQVKKQRTPLMYMGNQQKEDFIARINEMHNKKQKQISDKKYKYLMLENLNDENMLRDWKSRNINDTRYITKYLIGYLKSNLQFNSNRPEPVYGIKGGITSKFRRIWLRDTNWGKEIKDRESYLNHAVDAVVIANLTPAYVEISSDNMKLGQMSRRYRNTTNDEYQKYLKDCLVKMSEFYGFKPEYTQRLLTKTNRVPSFVDQLEKEVAIRFDEENPELFDERVQAFYGGVSDFVIKPHLPIVSQKQERKYRGKISDAEPIKVCEIDGVLMKINRANISDLKPKDMVRLRTADTDLIESLEEVFETFPTVDAYLKTYNLKQFKTV

SEQ ID NO: 21711 - protein, 1143 aa, unidentified
  REGION 1..1143: note = Cas Enzyme sequence
MRYVIGLDIGIGSIGWAAVCCDEKRKLLDFGTRIFESGEEKNGKERTSQYRRSYRASRRLVRRRAHRKSRIKAHLENIGLVKAIDVGDYFQTGKNNIINTRVKGLDEKLTPEEIAACLIYFCNHRGYQDFYEADTEWMTAEEKKEYEEEKSGAAAIDSIMQSGKYRTIAEMIQQDKYFTGEGEFYKYRNSKYSEQQLRINREYLKMECGMILKKQQEYYPAILTDRNIQTASDIIFNQRMFEDGPGYGIKGSAYRRYAGFLDTFGKCRFFPDEVRGCRFTALADVYALVNVLSQYRYFDSDGNRRLPSGLASEMIHFALENGSITKNNVKALAKKHGVDVDMKENGKSDSFSSALRYIKVVKPLFEQCGMDWQHAISEDIFDKSSLLNRLGVCLSQNITPRRRREALKQIDGIPAALVQKLVSKRFSGTCNVSDKYMKGAIEAFFEGDIYGDYQATFVKEQESTESDHPKYIKLPPFDKNFEFVKNPVVCRAINETRKIVNGIIGKYGSPYAINIEVASELNRCFNDRMEIQKNQKNNEKETARIRKAIAELLHIDESAVTHPQIERYFLGEQQGWKCMYSGRDIDAAACLQNAYKQFEVDHIIPYSLILDNTRQNKVLVYADENQRKGQRTPLMYLSGAEAESFIGRVNAMYKGNKGKSISQKKYDYLMQQSFSEELLGEWKSRNLNDTRYISKFLVRYFKENLVFWHGENESYRRTEVYAVKAAITSQFRRLWLNEGTWGTYDKADLKKETYLDHAADAVVIACCIPAYVEIASVQNKLRGIYKRSKCENEEYCAVMEDCLKTMTLYYGLDRKEVMTLLRRKDRTPCLIPNLREEVDIRFIEPYTYRLFNPQEDLTDEEITEIFHAKCTEFYADDPGFASSLQPVITSHKQEKSISGGITLDQPVSLVEINGVSHKLSRKSVVELTKKQLEDIYTGDTAMMDTLNELMKDCKDDCTVGKVLENRGETCLVLPGGRKVNRVKVVEKSAFGGNILDKTIADGGHTLMNAQNYYCIELYRDKAGKLNMRGITYADLVKSDGKLWLSERCVTPADYAKHEMYLFKWDYIEVTDKKGNLKFRGYVVGSYNVNRKLLYCAFDNTQTREKPLSIVKTDSVKKIYIDLLGKKGGEISCGEPLLSITEKE

SEQ ID NO: 21712 - protein, 1350 aa, unidentified
  REGION 1..1350: note = Cas Enzyme sequence
MNKPYSIGLDIGTNSVGWAVITDNYKVPSKKIKVEGNTDKKYIKKNLLGALLFEGGETAKETRTKRGQRRRYTRRRNRLLYLQEMFKSEMDKVDPNFFMRLEESFLWPEDKQGSKHPIFGTVKEELEYHEAFPTIYHLRKELADSDAKADIRLVYLALAHIIKYRGHFLFEKVDPKNANLKGNFSKFVEVYNEVFDDDKDCSVEVESILGVKSTKSKKIEDILKLYPGLKKADLFAKFISLAVGISVSFQKEFELENECKLQIPKESFEEDLDGLQGQIPDEFFEVLFAAKALYDSILLSSILTDISGTNAPLSSSMIRRFKEHKEDLEQLKRFFKSHSNYDYNSFFNDNTKPYYAGYIDGKTSQVEFYKAVKKLFEKDHDANWIIDKIDREDFLRKQRTFDNGAIPHQIHLAELKAIIEKQKKYYPFLEKEADRIESILTFRIPYYVGPLSNGHSKFGWVVRKGNEAIKPWNLEEQIDKGETAERFINRMTNRCTYLPSENVLPKHSLLYEKFMVFNELTKIRYVLENNKHFAVDTEMKMKIFEMLFKKNRKVTEKQLLAFFDKEYPDFHITKVMGLDRKKPEFNSSYATYHDLKKIVSQEYLDNPENADAIEDIIHTLTLFEDREIIREKLSVYKDYFTREQLKKLERRHYTGWGKLSKKLICGIRDKQTHKTIMEFLEDDGFTNRNLMQLVTADELSFAKEIKDASSIDTTLSLRELVQEIPGSPAIKKGIHQSLKIVEEIRRIMGYDPENIVIEMAREAQTTAEGERRSRERMRILEKALGEFEGKVNVSLPKENKLLSNNRLYLYYLQNGKDIYSGADLDINLLSTYDIDHIIPQSFIKDDSLDNIVLTTSEDNRGKLDNVPSPEVVRKMKGYWQQLLKAKLISDRKYNNLTKAERGGLTEEDKKTFIRRQLVETRQITKHVARILDERFNHEKNESGEPIRKVRVITLKSKLVSDFRKKFELYKVREINDFHHAHDAYLNAVVGTLLLKKYPKLESEFVYGAFKKVTTRQIYEKATRRYLFYSNILNFLNGPLEDRVTEDGELIWDNNKDLPNIKKWLYVPQVNVVKKTEVQTVGQNGGLFDNNIVPRTKIKNPEKYVEIKKNKGLDVTKYGGYSGETIAYSVFVVGKRKAKNGKIKAVKELVGITVRNQKQYEKNKLEYLLNLGFEEINLSLLFEFPKYTLFQMEDGRKRMLASSTELQKANMFYFEEKFVKLLYHAKNISDDNSKVHEEYLSEHRNEFLSLFKIIIEFSKKYIVKDKVEQKLVNAVEKDFESASINQLSESFVNLLEYVNRGPASQFDFLGVVINRENLRYQTVTECLNAIVCFESITGLYETRIDLSKFGE

SEQ ID NO: 21713 - protein, 1350 aa, unidentified
  REGION 1..1350: note = Cas Enzyme sequence
MNKPYSIGLDIGTNSVGWAVITDNYKVPSKKIKVEGNTDKKYIKKNLLGALLFEGGETAKETRTKRGQRRRYTRRRNRLLYLQEMFKSEMDKVDPNFFMRLEESFLWPEDKQGSKHPIFGTVKEELEYHEAFPTIYHLRKELADSDAKADIRLVYLALAHIIKYRGHFLFEKVDPKNANLKGNFSKFVEVYNEVFDDDKDCSVEVESILGVKSTKSKKIEDILKLYPGLKKADLFAKFISLAVGISVSFQKEFELENECKLQIPKESFEEDLDGLQGQIPDEFFEVLFAAKALYDSILLSSILTDISGINAPLSSSMIRRFKEHKEDLEQLKRFFKSHSNYDYNSFFNDNTKPYYAGYIDGKTSQVEFYKAVKKLFEKDHDANWIIDKIDREDFLRKQRTFDNGAIPHQIHLAELKAIIEKQKKYYPFLEKEADRIESILTFRIPYYVGPLSNGHSKFGWVVRKGNEAIKPWNLEEQIDKGETAERFINRMTNRCTYLPSENVLPKHSLLYEKFMVFNELTKIRYVLENNKHFAVDTEMKMKIFEMLFKKNRKVTEKQLLAFFDKEYPDFHITKVMGLDRKKPEFNSSYATYHDLKKIVSQEYLDNPENADAIEDIIHTLTLFEDREIIREKLSVYKDYFTREQLKKLERRHYTGWGKLSKKLICGIRDKQTHKTILEFLEDDGFTNRNLMQLVTADELSFAKEIKDASSIDTTLSLRELVQEIPGSPAIKKGIHQSLKIVEEIRRVMGYDPENIVIEMAREAQTTAEGERRSRERMRILEKALGEFEGKVNVSLPKENKLLSNNRLYLYYLQNGKDIYSGADLDINLLSTYDIDHIIPQSFIKDDSLDNIVLTTSEDNRGKLDNVPSPEVVRKMKGYWQQLLKAKLISDRKYNNLTKAERGGLTEEDKKTFIRRQLVETRQITKHVARILDERFNHEKNESGEPIRKVRVITLKSKLVSDFRKKFELYKVREINDFHHAHDAYLNAVVGTLLLKKYPKLESEFVYGAFKKVTTRQIYEKATRRYLFYSNILNFLNGPLEDRVTEDGELIWDNNKDLPNIKKWLYVPQVNVVKKTEVQTVGQNGGLFDNNIVPRTKIKNPEKYVEIKKNKGLDVTKYGGYSGETIAYSVFVVGKRKAKNGKIKAVKELVGITVRNQKQYEKNKLEYLLNLGFEEINLSLLFEFPKYTLFQMEDGRKRMLASSTELQKANMFYFEEKFVKLLYHAKNISDDNSKVHEEYLSEHRNEFLSLFKIIIEFSKKYIVKDKVEQKLVNAVEKDFESASINQLSESFVNLLEYVNRGPASQFDFLGVVINRENLRYQTVTECLNAIVCFESITGLYETRIDLSKFGE

SEQ ID NO: 21714 - protein, 1365 aa, unidentified
  REGION 1..1365: note = Cas Enzyme sequence
MIKLFCKLLNLGGYFMNKPYSIGLDIGTNSVGWAVITDDYKVPSKKMKVEGNTDKKYIKKNLLGSLLFEGGETAKETRTKRGQRRRYTRRRNRLIYLQEIFKSEMDKVDPNFFMRLEESFLWPEDKQGSKHPIFGTVKEEVEYHEAFPTIYHLRKELADSDAKADIRLVYLALAHIIKYRGHFLFEKVDPKNANLKGNFSKFVEVYNEVFDDDKDCSVEVESILGAKSTKSKKIEDILNLYPGLKKADLFAKFISLAVGTSVSFQKEFELENECKLQIPKESFEEDLEGLQGQIPDEFFEVLYAAKALYDSILLSSILTDISGTNAPLSSSMIRRFKEHKEDLEQLKRFFKSHSNYDYNSFFNDNTKPYYAGYIDGKTSQVEFYKAVKKLFEKDHDANWIIDKIDREDFLRKQRTFDNGAIPHQIHLAELKAIIEKQKKYYPFLEKEADRIESILTFRIPYYVGPLSNGYSKFGWVVRKGNEAIKPWNLEEQIDKSATAERFITRMTNRCTYLPSENVLPKHSLLYEKFMVFNELTKIRYVLENNKHFAVDTEMKMKIFEMLFKKNRKVTEKQLLAFFDKEYPDFHITKVMGLDRKKPEFNSSYATYHDLKKIVSQEYLDNPENADAIEDIIHTLTLFEDREIIREKLSVYKDYFTREQLKKLERRHYTGWGKLSKKLICGIRDKQTHKTIMEFLEDDGYSNRNLMQLVTADELSFAKEIKDASSIDTTLSLRELVQEIPGSPAIKKGIHQSLKIVEEIRRVMGYDPENIVIEMAREAQTTAEGERRSRERMRILEKALGEFEGKVNVSLPKENKLLSNNRLYLYYLQNGKDIYSGADLDINLLSTYDIDHIIPQSFIKDDSLDNIVLTTSEDNRGKLDNVPSPEVVRKMKGYWQQLLKAKLISDRKYNNLTKAERGGLTEEDKKTFIRRQLVETRQITKHVARILDERFNHEKNESGEPIRKVRVITLKSKLVSDFRKKFELYKVREINDFHHAHDAYLNAVVGTLLLKKYPKLESEFVYGAFKKFETRKIYEKATRRYLFYSNILNFLNGPLEDRVTEDGELIWDNNKDLPNIKKCLYVPQVNVVKKTEVQTVGQNGGLFDNNIVPRTKIKNPEKYVEIKKNKGLDVTKYGGYSGETIAYSVFVVGKRKAKNGKIKAVKELVGITVRNQKQYENNKLKYLLNMGFEEINPSLLFEFPKYTLFQMEDGRKRMLASSTELQKANMIYFEEKFVKLLYHAKNISDENSKIHENYLSEHRNEFLSLFKIIIEFSKKYIVKDKVEQKLVNVVEKEFEAASIHQLSESFVNLLEYVNRGPASQFNFLGVVINRENLRYQTVTECLNAIVCFESITGLYETRINLSKYGE

SEQ ID NO: 21715 - protein, 1353 aa, unidentified
  REGION 1..1353: note = Cas Enzyme sequence
MAVFKYYLGLDMGTNSVGWAVTDIQYNILKVKGKDLWGIREFNEASTAVERRTHRVSRRARQRKTVLIGLLKYYFHDEICKKDPYFFQRLDNSKYHLEDKDDEVKYTYNIFNDINYTDADYFKQYPTIFHLRNELIFNPNEHDIRLVYLALLNMFKHRGHFLNDSLIDDDSEMKIDEAYLELANLLSEYTEYYLKTDVNITELENILSDRDESRTKKSEKIVELLKIDSKNKPYKEMIRGLCGLKFNAITIFSDVQLEDGQKLDICLSDASFEEKADEIASILGEDYFQIILSMKRLYDIGSLSEIMKGYSYLSEARVASYKKHKEDLCCLKRVIKKYCNKECYEKIFNSDEDGSYASYVGSFNSNSKQRRVGNKRSIEDLYKEIKKILKAVPQEDADVQRILTSIDNETFLPKQLTASNGVIPNQIHEKEMKKILSNAENYLPFLKEKDEKNQTVSERILMLFTFRIPYYVGPTTENSQKNGGNGWVIRKEAGQVLPWNIEEKIDMKATSEAFISRMIRRCTYISGKPVLPRASLEYQSFCVLNAINNITIDGYRISVELKQDIYNDLFLKGKKVTKKQLCKYLYLRGLITSENQVSGIDIEINNTLSTYKIFKNIFGDDIIYDSTKIMIEDIVFWCTVYGESKKFLRERLCEKYGDKLSQDQIKRILGLKFKDWGNLSKEFLELSGVNKKTNESMSIIKALWENNLNMMELINSDLFDFKEKIVEYQTDLMKTIYNIEVDDLENYYFSAPVKRMVWQTILVVKELVGVLGCEPTRIFIEMTRRHDEITKRTINRKKKFEALYKSVKDEDTDWMNVIADADDTGRIRSKKMYLYLTQKGRCMYTGKHIEISDLFNNNLYDIDHIYPRHFVKDDNIDNNLVLVCKEKNAHKRDIYPLEEQIYSSQKGMWSELKKLGFINEEKYNRLTGRNSFTDEQKAGFIARQLVETSQGTKGVANILQQLLPESKIVYAKASNVSEFRQSRDIPKSRLVNEFHHAHDAYLNIVVGNVYYVKFTQDPLKFIKNDYDKDKINNNYNLSKMFDWDVKRKGEVAWIAQKKNGDVGTIATVKKVLSKNTPLMTRYCFEGRGKISKEERHSAKEAKQVGYLPYKTSDLKIKDVTKYGGFTSITVAYYFVVEHDEKKKRIRTIESVPLYLAAKINSNHEELDKYCKNELGLVNFNIRVRKIRIGSLLKQNGYFFYITGKTGNRLIVRNAVNICFRKEWIKYSSKIEKYQEKKIIDDIITKDKNELFYDEFIKKYENSIFANRPNSILEKLKKAFPVFKESNIEQQCSILYQLLNLSKILGSECDLRLIGESPNCGKMLINKKIGDDDIYLINQSVTGLYENKINLRTV

SEQ ID NO: 21716 - protein, 1226 aa, unidentified
  REGION 1..1226: note = Cas Enzyme sequence
  REGION 332..340: note = misc_feature - Xaa can be any naturally occurring amino acid
MNYNLFCDEDYNDRDYFKNYPTIYHLRKKLCESDEKAEPRLIYLALHHIIKYRGNFLYEGQELHLEPSNKEDDLKTLFDVLGKNNDTIYDISDEQIQFILKTVVENISRTAKVSKCISQLKLNNEDKKVVKEFINGLVGNKFNVSKLYIRDEDLQFDNEDLKMQFSNKSYEENITEYENILKEKMEFIDLMQQFYSWIELSKIVGSDSQHASISDAMVNIYENHGKDLRILKEMMLKIGKEEYDEMFKPTSKNIVNYYNYINPVAWSGDKTDGFYKYVKKAIEKSDDSRKDEILEKIANETFMLKQTSKNNAYIPYQMQKDELIKILDHQEXXXXXXXXXLKENRDKIISILEFRIPYYYGPLNGNEQFGWLKRKKGKENERILPWNHQEIVDIQETAAQFINRLTNYCTYLPMEKVMPKKSLTCSMYEVLAEVNKIRIDGKLLPIDTKNKMIEDLFYKSKRKTVKEKDLINWLKQNQLKVGEITGYQKEKAFSSSLATWIDFKEIFGEINDSNYSLIEKIIEDMTIFNEGSILKERLKNVHNLDQNKIKKIMKLKYSGWSRLSKKLIDGIRADNKFGSSVSVLDVMKESHMVLMEIINDKELGFKQIIEKENFKDETDSFTYEDIENLAGSPALKRGIWQTLQVIEEIKHYMGYEPKNIYIEFAREDQEKVRSTTRVKKLKSIYKDLKNQLDNHGNEVFANLNKQDEKNSIETRLYLYYTQLGKCMYSKEELDIDKLSDYEIDHIFPRTLTTDNSLDNLVLVKKKENQRKLDDLVLPLEIRNKMEVFWKKLYDNGLITQTKYYRLIRNEFRPDQIDKFISRQLVETRQITKHVANIIENHYKGTKVFTVRADLSHEFREKYGIYKNRNVNDFHHAHDAYIACIIGRYIQVRFPGLEAKYIYGQYMRNLKKKKYDVDKENHGFIINSMKYECIDEDTGEVIWNPERILDYIKCFNYRDVYITKKLDTNNDKLFDVKILKNDKNSLKRETFAKIPVNKFRKDIHKYGGFSSLKNDIVAVEGKKGKKIERKVVNLPILLRNASIEEQQNYIMENNGYSDVKIIKKIKKNQLIEIDGICYYLKSADELDTAYQLILSRDDNEMIYRIDRAIQNNDFSYFDNKKENIDELYRLICHKMIENYPKYKKKVYGFIKEREEKFFELDNSQKCIVIFEMISIMKRGEQYINIPFEPYNLKNERKGRLNGQSILLDNTYFYDVSITGIYSKKYKL

SEQ ID NO: 21717 - protein, 1338 aa, unidentified
  REGION 1..1338: note = Cas Enzyme sequence
MSIVKNREKIKYYIGVDVGTNSVGWAVIDENGYLLNKGKHHLWGSRLFDQAQTAQNRRNYRSSRRRYNKRRERIRLLQMIMSDMVLKVDSSFFIRLEKTTFLDKEDKKAILKDNYKMNYNLFCDEDYNDKDYFKNYPTIYHLRKKLCESDEKAEPRLIYLALHHIIKYRGNFLYEGQELHLEPSNKEDDLKILFDVLGKNNDTIYNISDEQIQFILKTVVENISRTAKVSKCISQLKLNNEDKKVVKEFINGLVGNKFNVSKLYIRDEDLQFDNEDLKMQFSNKSYEENITEYENILKEKMEFIDLMQQFYSWIELSKIVGSDSQHASISDAMVNIYENHGKDLRILKEMMLKIGKEEYDEMFKPTSKNIVNYYNYINPVAWSGDKTDGFYKYVKKAIEKSDDSRKDEILEKIANETFMLKQTSKNNAYIPYQMQKDELIKILDHQEKYYPVLKENRDKIISILEFRIPYYYGPLNGNEQFGWLKRKKGKENERILPWNHQEIVDIQETAAQFINRLTNYCTYLPMEKVMPKKSLTCSMYEVLAEVNKIRIDGKLLPIDTKNKMIEDLFYKSKRKTVKEKDLINWLKQNQLKVGEITGYQKEKAFSSSLATWIDFKEIFGEINDSNYNLIEKIIEDMTIFNEGSILKERLKNVHNLDQNKIKKIMKLKYSGWSRLSKKLIDGIRADNKFGSSVSVLDVMKESHMVLMEIINDKELGFKQIIEKENFKDETDSFTYEDIENLAGSPALKRGIWQTLQVIEEIKHYMGYEPKNIYIEFAREDQEKVRSTTRVKKLKSIYKDLKNLLDNHGNEVFANLNKQDEKNSIETRLYLYYTQLGKCMYSKEELDIDKLSDYEIDHIFPRTLTTDNSLDNLVLVKKKENQRKLDDLVLSLEIRNKMEVFWKKLYDNGLITQTKYYRLIRNEFRPDQIDKFISRQLVETRQITKHVANIIENHYKGTKVFTVRADLSHEFREKYGIYKNRNVNDFHHAHDAYIACIIGRYIQVRFPGLEAKYIYGQYMRNLKKKKYDVDKENHGFIINSMKYECIDEDTGEVIWNPERILDYIKCFNYRDVYITKKLDTNNDKLFDVKILKNDKNSLKRETFAKIPVNKFRKDIHKYGGFSSLKNDIVAVEGKKGKKIERKVVNLPILLRNASIEEQQNYIMENNGYSDVKIIKKIKKNQLIEIDGICYYLKSADELDTAYQLILSRDDNEMIYRIDRAIQNNDFSYFDNKKENIDELYRLICHKMIENYPKYKKKVYGFIKEREEKFFELDNPQKCIVIFEMISIMKRGEQYINIPFEPYNLKNERKGRLNGQSILLDNTYFYDVSITGIYSKKYKL

SEQ ID NO: 21718 - protein, 1333 aa, unidentified
  REGION 1..1333: note = Cas Enzyme sequence
MSIVKNRENIKYYIGVDIGTNSVGWAVIDENGNLLKKGKHHLWGSRLFDQAQTAQNRRNYRSSRRRYNKRRQRIGLLRLIMSDMVLEVDPSFFIRLEKTTFLDKEDKKAILKDNYKMNYNLFCDEDYNDKKYFKDYPTIYHLRKKLCESDEKADPRLIYLALHHIVKYRGNFLYEGQELHLEPSNKEEDLKILFNMLSKNNDTTYDISDEQIQFILKTVVENISKTAKVDECMSHLKLNSEDKKIVKEFMRGLVGNKFNVSKLYMHEDLQFDDEDLKLQFSDKSYEEKIMEYENVLEEKMEFIDLMQQFYSWIELSKIVGSDSQHASISGAMVNIYERHREDLKTLKEVMLKIGKKEYDEMFKPTSKNVVNYYNYVNPVACSGDKTDGFYKYVKKAIEKSDDSRKDEILQKIANETYMLKQTSKNNAYIPYQMQKDELIKILDHQEKYYPVLKENRDKIISILEFRIPYYYGPLDGNKQFGWLIKKKGKENERILPWNHQEIVDVQETAAQFIKKLTNYCTYLPIEKVMPQKSLTCSMYEVLSEVNKIRIDGKLLSIDTKNRLIEDLFFKRKTVKEKDLINWLKQNQLTVGEITGYQKEKAFSSSLAPWIDFKEIFDEINDSNYDLIEKIIEDMTIFNEGSILKERLKKAYNLDQNKVKKIMKLKYSGWSRLSKKLINGIRADNKFGSSVSILEVMKESHMALMEIINDQDLGFKQIIEKENFKNETGSFEYEDIENLAESPALKRGIWQTLQVIEEIKNYMGHEPKNIYIEFAREEQEKVRTTTRVKKLKSIYNDIKNQLDVHGKEVYSNLNKQDEKSSIEKRLYLYYTQLGKCMYSGESLDIDKLSDYEIDHIFPRTLTSDDSLDNLVLVKKKENQRKLDDLVLPLEIRNKMEVFWKKLYDNGLITQTKYYRLMRDEFRRDQIDKFINRQLVETRQIIKHVANIIENHYEDTKVFTVRANLSHEFREKYGIYKNRNVNDFHHAHDAYIACIIGRYIQIRFPGLEAKYVYGQYMQNVKKTKNNIDKENHGFIINSMKYECIDEDTGEVIWNPERILDYIKCFNYRDVYITKKLDTNNRELFNVTILPNDKNSEKGKTKATIPVNKLRSNVRKYGGFSGLQSDIVAIEGKKGKKIDRRLINLPILLRYVSIEDQCKYIMENNKYSDIKIIKKIKKNQLIEIDGGLYYLSSATELVNAHQLILNNKENEIIFEINNAMIKNDYSYFENREIEITKLYNLLCDKMKKYYPKYKGIYEKILTKNIDFNILEIDLKCRVILEVLKILKAGAINGNLKFEPYNMADREGRLSKQSIHLDNTYFYDVSITGIYSKKYKL

SEQ ID NO: 21719 - protein, 1335 aa, unidentified
  REGION 1..1335: note = Cas Enzyme sequence
MSIVKNRGKIKYYIGVDIGTNSVGWAVIDENGYLLNKGKHHLWGSRLFDQAQTAQNRRNYRSSRRRYNKRKERIRLLQMIMSDMVLEVDSSFFIRLEKTTFLDKEDKKAILKDNYKMNYNLFCDEDYNDKDYFKVYPTIYHLRKKLCESDEKADPRLIYLALHHIVKYRGNFLYEGQELHLEPSNKEEDLKILFDILGKNNDTVYDISEEQIQFILKTVVENISKTAKVDECMSQLKLNSEDKKIVKEFMRGLVGNKFNVSKLYMHEDLQFDDEDLKLQFSDKSYEEKIMEYENVLEEKMEFIDLMQRFYSWIELSKIVGSDSQHASISGAMVNIYESHREDLRTLKEVMLKIGKKEYDEMFKPTSKNVVNYYNYVNPVACSGDKTDGFYKYVKKAIEKSDDSRKDEILQKIANETYMLKQTSKNNAYIPYQMQKDELIKILDHQEKYYPVLKENRDKIISILEFRIPYYYGPLDGNKQFGWLIKKKGKENERILPWNHQEIVDVQETAAQFIKKLTNYCTYLPIEKVMPQKSLTCSMYEVLSEVNKIRIDGKLLSIDTKNRLIEDLFFKRKTVKEKDLINWLKQNQLTVGEITGYQKEKAFSSSLAPWIDFKEIFDEINDSNYDLIEKIIEDMTIFNEGSILKERLKKAYNLNQNKVKKIMKLKYSGWSRLSKKLINGIRADNKFGSSVSILDVMKESHMALMEIINDQDLGFKQIIEKENFKNETGSFEYEDIENLAGSPALKRGIWQTLQVIEEIKNYMGHEPKNIYIEFAREEQEKVRTTTRVKKLKSIYNDIKNQLDVHGKEVYSNLNKQDEKSSIEKRLYLYYTQLGKCMYSGESLDIDKLSDYEIDHIFPRTLTSDDSLDNLVLVKKKENQRKLDDLVLPLEIRNKMEVFWKKLYDNGLITQTKYYRLMRDEFRRDQIDKFINRQLVETRQIIKHVANIIENHYEDTKVFTVRANLSHEFREKYGIYKNRNVNDFHHAHDAYIACIIGRYIQIRFPGLEAKYVYGQYMQNVKKTKNNIDKENHGFIINSMKYECIDEDTGEVIWNPERILDYIKCFNYRDVYITKKLDTNNRELFNVTILPNDKNSEKGKTKATIPVNKLRSNVRKYGGFSGLQSDIVAIEGKKGKKIDRRLINLPILLRYVSIEDQCKYIMENNKYSDVKIIKKIKKNQLIEIDGICYYLKSADELDTAYQLILSRDDNEMIYRIDRAIQNNDFSYFDNKKENIDELYRLICHKMIENYPKYKKKVYEFIKEREEEFFELDNSQKCIVIFEMIRVMKRGEQYINIPFEPYNLKNDRKGRLNCQSILLDNTYFYDVSITGIYSKKYKL

SEQ ID NO: 21720 - protein, 1352 aa, unidentified
  REGION 1..1352: note = Cas Enzyme sequence
MQEKPYYLGLDMGTNSVGWAVTDQHYNLLKAKGKDLWGIREFIEADTSVERRTHRISRRRRQREQARIGLLNDYFHDAIIAIDPSFFQRLENSKYHLEDKDQNVRYKYNIFNDPDYTDADYYTQYPTIYHLRKELLENPKPHDVRLVYLALLNMFKHRGHFLNSGISDGNNERSLKDAYINFAISVSELTEDYFNQDVDYSTIEGILSSRDLNRTKKAEELSTVLGIDFKNKKYKEYLRAICGLKINAYTLFSDQLPDDTTKIDLCVSDASFDEKSEELVSLIGEDLFQIILNIKEIYDIGSLAGILKGYTYLSQARVAAYDKHKHDLKLLKSSIKKYCTKEEYNNFFNSDADGSYASYIGSFNSGNKERRVGSKRTSEDLYKEIKKLLKGANKSDPAINEIFTSIETESFLPKQLTASNGIIPNQVHSKEMARILTNAENYLPFLKETDENNLSISNRILQLYKFQIPYYIGPVTEKSQRDGGNGWVIRKDNGRVFPWNIEEKIDVKATSEAFISRMVRRCTYMNGKQVLPKASLEYESFRVLNEINNLRIDGERIPVTLKQDIYTDLFQKGKKVTKKQLCNYLATRGLIESSEQVTGIDIAINNSLSTYGKFKAIFGEDIKLDHIQHMIDDIVFWCTVYGDSKQFLKEQIEDKYKGKLSPEQMKRILGFKFKDWGNLSKEFFELKGADKSTGEAVSIIRALWENNLNLMELINSSEFDFKEQLADYEANSLKTLSDFEPEDLNDYYFSAPVRRMIWQTTLIIKELVHVLGKEPARIFIEMTREKDASRGRTLSRKKKFEDLYKNVKDENTDWAKVIEHADESGTIRSKKMYLYLTQKGRCMYTGNHIELSDLFNDNLYDIDHIYPRHFVKDDNIDNNLVLVTKEKNAHKSDNYPLEAEIFNKQRNMWTQLRKEGFISEEKYNRLMGRNAFTDEQKAGFIARQLVETSQGTKGVAELFHQLLPNSKIVYAKAGNVSDFRRNRELPKSRLVNDFHHAHDAYLNIVVGNVYYVKFTQNPINYIKNSYNKDMNKNNYNLSRMFDWDVKRGDEVAWIAQKQDGAAGTISTVKKMLSKNTPLMTRLSYEGKGALANETLYSAEKAKGEGYIPFKSSDTKIQDVTKYGGFTSVTGAYFFLVEHDEKKKRIRTIESVPLYLADKIDKDSSELERYCDKLGLVNYDVRVRKIKIGSLIKYNGYFCYITGKTGYRLIVRNATNLCLTSNWRKYIKKIEKYKETTIIDNVITAEENIKLYNELLNKFTVGIFGRRPNPIGEKMDSARDKFASLSIENQCLALYQILQLTAILGNESDLQLIGASTHAGKMLISKKIGTDEIYLINQSPTGLFETKIDLQTI

SEQ ID NO: 21721 - protein, 1352 aa, unidentified
  REGION 1..1352: note = Cas Enzyme sequence
MLEKPYYLGLDMGTNSVGWAVTDQQYNLLKAKGKDLWGIREFAEADTSVERRTHRISRRRRQREQARIGLLNDYFHDAIIAIDPSFFQRLENSKYHLEDKDQNVRYKYNIFNDPDYTDADYYTQYPTIYHLRKELLENPKPHDVRLVYLALLNMFKHRGHFLNSGISDGNNERSLKDAYINFAISVSELTEDYFNQDVDYSTIEGILSSRDLNRTKKAEELSTVLGIDFKNKKYKEYLRAICGLKINAYTLFSDQLPDDTTKIDLCVSDASFDEKSEELVSLIGEDLFQIILNIKEIYDIGSLAGILKGYTYLSQARVAAYDKHKHDLKLLKSSIKKYCTKEEYNNFFNSDADGSYASYIGSFNSGNKERRVGSKRTSEDLYKEIKKLLKGANKSDPAINEIFTSIETESFLPKQLTASNGIIPNQVHSKEMARILTNAENYLPFLKETDENNLSISNRILQLYKFQIPYYIGPVTEKSQRDGGNGWVIRKDNGRVFPWNIEEKIDVKATSEAFISRMVRRCTYMNGKQVLPKASLEYESFRVLNEINNLRIDGERIPVTLKQDIYTDLFQKGKKVTKKQLCNYLATRGLIESSEQVTGIDIAINNSLSTYGKFKAIFGEDIKLDHIQHMIEDIVFWCTVYGDSKQFLKEQIEDKYKGKLSPEQMKRILGFKFKDWGNLSKEFFELKGADKSTGEAVSIIRALWENNLNLMELINSPEFDFKEQLADYEANSLKTLSDFEPEDLNDYYFSAPVRRMIWQTTLIIKELVHVLGKEPARIFIEMTREKDASRGRTLSRKKKFEDLYKNVKDENTDWAKVIEHADESGTIRSKKMYLYLTQKGRCMYTGNHIELSDLFNDNLYDIDHIYPRHFVKDDNIDNNLVLVTKEKNAHKSDNYPLEAEIFNKQRNMWTQLRKEGFISEEKYNRLMGRNAFTDEQKAGFIARQLVETSQGTKGVAELFHQLLPNSKIVYAKAGNVSDFRRNRELPKSRLVNDFHHAHDAYLNIVVGNVYYVKFTQNPINYIKNSYNKDMNKNNYNLSRMFDWDVKRGDEVAWIAQKQDGATGTISTVKKMLSKNTPLMTRLSYEGKGALANETLYSAEKAKGEGYIPFKSSDTKIQDVTKYGGFTSVTGAYFFLVEHDEKKKRIRTIESVPLYLADKIDKDSSELERYCDKLGLVNYDVRVRKIKIGSLIKYNGYFCYITGKTGYRLIVRNATNLCLASNWRKYIKKIEKYKETTIIDNVITAEENIKLYNELLNKFTVGIFGRRPNPIGEKMDSARDKFASLSIENQCLALYQILQLTAILGNESDLQLIGASTHAGKMLISKKIGTDEIYLINQSPTGLFETKIDLQTI

SEQ ID NO: 21722 - protein, 1029 aa, unidentified
  REGION 1..1029: note = Cas Enzyme sequence
LKSSIKKYCTKEEYNNFFNSDADGSYASYIGSFNSGNKERRVGSKRTSEDLYKEIKKLLKGANKSDPAINEIFTSIETESFLPKQLTASNGIIPNQVHSKEMARILTNAENYLPFLKETDENNLSISNRILQLYKFQIPYYIGPVTEKSQRDGGNGWVIRKDNGRVFPWNIEEKIDVKATSEAFISRMVRRCTYMNGKQVLPKASLEYESFRVLNEINNLRIDGERIPVTLKQDIYTDLFQKGKKVTKKQLCNYLATRGLIESSEQVTGIDIAINNSLSTYGKFKAIFGEDIKLDHIQHMIEDIVFWCTVYGDSKQFLKEQIEDKYKGKLSPEQMKRILGFKFKDWGNLSKEFFELKGADKSTGEAVSIIRALWENNLNLMELINSPEFDFKEQLADYEANSLKTLSDFEPEDLNDYYFSAPVRRMIWQTTLIIKELVHVLGKEPARIFIEMTREKDASRGRTLSRKKKFEDLYKNVKDENTDWAKVIEHADESGTIRSKKMYLYLTQKGRCMYTGNHIELSDLFNDNLYDIDHIYPRHFVKDDNIDNNLVLVTKEKNAHKSDNYPLEAEIFNKQRNMWTQLRKEGFISEEKYNRLMGRNAFTDEQKAGFIARQLVETSQGTKGVAELFHQLLPNSKIVCAKAGNVSDFRRNRELPKSRLVNDFHHAHDAYLNIVVGNVYYVKFTQNPINYIKNSYNKDMNKNNYNLSRMFDWDVKRGDEVAWIAQKQDGATGTISTVKKMLSKNTPLMTRLSYEGKGALANETLYSAEKAKGEGYIPFKSSDTKIQDVTKYGGFTSVTGAYFFLVEHDEKKKRIRTIESVPLYLADKIDKDSSELERYCDKLGLVNYDIRVRKIKIGSLLNRNGYFAYLTGKTGKQLILRNATNLCLDKKWTRYIKKIEKYKETNVLDSIITSETMVNLYNELLNKFTVGIYGRRPNPIGEKMDSAKNTFTSYTLDNQCNLIYQILQLSKILGFETDLSLLRTNKQSGKPTREGGMQISKKIDNTTSMYLINQSPTGLFETKIDLQTI

SEQ ID NO: 21723 - protein, 1352 aa, unidentified
  REGION 1..1352: note = Cas Enzyme sequence
MLEKPYYLGLDMGTNSVGWAVTDQQYNLLKAKGKDLWGIREFAEADTSVERRTHRISRRRRQREQARIGLLNDYFHDAIIAIDPSFFQRLENSKYHLEDKDQNVRYKYNIFNDPDYTDADYYTQYPTIYHLRKELLENPKPHDVRLVYLALLNMFKHRGHFLNSGISDGNNERSLKDAYINFAISVSELTEDYFNQDVDYSTIEGILSSRDLNRTKKAEELSTVLGIDFKNKKYKEYLRAICGLKINAYTLFSDQLPDDTTKIDLCVSDASFDEKSEELVSLIGEDLFQIILNIKEIYDIGSLAGILKGYTYLSQARVAAYDKHKHDLKLLKSSIKKYCTKEEYNNFFNSDADGSYASYIGSFNSGNKERRVGSKRTSEDLYKEIKKLLKGANKSDPAINEIFTSIETESFLPKQLTASNGIIPNQVHSKEMARILTNAENYLPFLKETDENNLSISNRILQLYKFQIPYYIGPVTEKSQRDGGNGWVIRKDNGRVFPWNIEEKIDVKATSEAFISRMVRRCTYMNGKQVLPKASLEYESFRVLNEINNLRIDGERIPVTLKQDIYTDLFQKGKKVTKKQLCNYLATRGLIESSEQVTGIDIAINNSLSTYGKFKAIFGEDIKLDHIQHMIDDIVFWCTVYGDSKQFLKEQIEDKYKGKLSPEQMKRILGFKFKDWGNLSKEFFELKGADKSTGEAVSIIRALWENNLNLMELINSPEFDFKEQLADYEANSLKTLSDFEPEDLNDYYFSAPVRRMIWQTTLIIKELVHVLGKEPARIFIEMTREKDASRGRTLSRKKKFEDLYKNVKDENTDWAKVIEHADESGTIRSKKMYLYLTQKGRCMYTGNHIELSDLFNDNLYDIDHIYPRHFVKDDNIDNNLVLVTKEKNAHKSDNYPLEAEIFNKQRNMWTQLRKEGFISEEKYNRLMGRNAFTDEQKAGFIARQLVETSQGTKGVAELFHQLLPNSKIVYAKAGNVSDFRRNREFPKSRLVNDFHHAHDAYLNIVVGNVYYVKFTQNPINYIKNSYNKDMNKNNYNLSRMFDWDVKRGDEVAWIAQKQDGAAGTISTVKKMLSKNTPLMTRLSYEGKGALANETLYSAEKAKGEGYIPFKSSDTKIQDVTKYGGFTSVTGAYFFLVEHDEKKKRIRTIESVPLYLADKIDKDSSELERYCDKLGLVNYDVRVRKIKIGSLIKYNGYFCYITGKTGYRLIVRNATNLCLASNWRKYIKKIEKYKETTIIDNVITAEENIKLYNELLNKFTVGIFGRRPNPIGEKMDSARDKFASLSIENQCLALYQILQLTAILGNESDLQLIGASTHAGKMLISKKIGTDEIYLINQSPTGLFETKIDLQTI

SEQ ID NO: 21724 - protein, 1352 aa, unidentified; identical to SEQ ID NO: 21721
  REGION 1..1352: note = Cas Enzyme sequence

SEQ ID NO: 21725 - protein, 1352 aa, unidentified
  REGION 1..1352: note = Cas Enzyme sequence
MQEKPYYLGLDMGTNSVGWAVTDQHYNLLKAKGKDLWGIREFIEADTSVERRTHRISRRRRQREQARIGLLNDYFHDAIIAIDPSFFQRLENSKYHLEDKDQNVRYKYNIFNDPDYTDADYYTQYPTIYHLRKELLENPKPHDVRLVYLALLNMFKHRGHFLNSGISDGNNERSLKDAYINFAISVSELTEDYFNQDVDYSTIEGILSSRDLNRTKKAEELSTVLGIDFKNKKYKEYLRAICGLKINAYTLFSDQLPDDTTKIDLCVSDASFDEKSEELVSLIGEDLFQIILNIKEIYDIGSLAGILKGYTYLSQARVAAYDKHKHDLKLLKSSIKKYCTKEEYNNFFNSDADGSYASYIGSFNSGNKERRVGSKRTSEDLYKEIKKLLKGANKSDPAINEIFTSIETESFLPKQLTASNGIIPNQVHSKEMARILTNAENYLPFLKETDENNLSISNRILQLYKFQIPYYIGPVTEKSQRDGGNGWVIRKDNGRVFPWNIEEKIDVKATSEAFISRMVRRCTYMNGKQVLPKASLEYESFRVLNEINNLRIDGERIPVTLKQDIYTDLFQKGKKVTKKQLCNYLATRGLIESSEQVTGIDIAINNSLSTYGKFKAIFGEDIKLDHIQHMIEDIVFWCTVYGDSKQFLKEQIEDKYKGKLSPEQMKRILGFKFKDWGNLSKEFFELKGADKSTGESVSIIRALWENNLNLMELINSSEFDFKEQLADYEANSLKTLSDFEPEDLNDYYFSAPVRRMIWQTTLIIKELVHVLGKEPARIFIEMTREKDASRGRTLSRKKKFEDLYKNVKDENTDWAKVIEHADESGTIRSKKMYLYLTQKGRCMYTGNHIELSDLFNDNLYDIDHIYPRHFVKDDNIDNNLVLVTKEKNAHKSDNYPLEAEIFNKQRNMWTQLRKEGFISEEKYNRLMGRNAFTDEQKAGFIARQLVETSQGTKGVAELFHQLLPNSKIVYAKAGNVSDFRRNRELPKSRLVNDFHHAHDAYLNIVVGNVYYVKFTQNPINYIKNSYNKDMNKNNYNLSRMFDWDVKRGDEVAWIAQKQDGAAGTISTVKKMLSKNTPLMTRLSYEGKGALANETLYSAEKAKGEGYIPFKSSDTKIQDVTKYGGFTSVTGAYFFLVEHDEKKKRIRTIESVPLYLADKIDKDSSELERYCDKLGLVNYDVRVRKIKIGSLIKYNGYFCYITGKTGYRLIVRNATNLCLTSNWRKYIKKIEKYKETTIIDNVITAEENIKLYNELLNKFTVGIFGRRPNPIGEKMDSARDKFASLSIENQCLALYQILQLTAILGNESDLQLIGASTHAGKMLISKKIGTDEIYLINQSPTGLFETKIDLQTI

SEQ ID NO: 21726 - protein, 1352 aa, unidentified; identical to SEQ ID NO: 20366
  REGION 1..1352: note = Cas Enzyme sequence

SEQ ID NO: 21727 - protein, 1352 aa, unidentified
  REGION 1..1352: note = Cas Enzyme sequence
MQEKPYYLGLDMGTNSVGWAVTDQHYNLLKAKGKDLWGIREFIEADTSVERRTHRISRRRRQREQARIGLLNDYFHDAIIAIDPSFFQRLENSKYHLEDKDQNVRYKYNIFNDPDYTDADYYTQYPTIYHLRKELLENPKPHDVRLVYLALLNMFKHRGHFLNSGISDGNNERSLKDAYINFAISVSELTEDYFNQDVDYSTIEGILSSRDLNRTKKAEELSTVLGIDFKNKKYKEYLRAICGLKINAYTLFSDQLPDDTTKIDLCVSDASFDEKSEELVSLIGEDLFQIILNIKEIYDIGSLAGILKGYTYLSQARVAAYDKHKHDLKLLKSSIKKYCTKEEYNNFFNSDADGSYASYIGSFNSGNKERRVGSKRTSEDLYKEIKKLLKGANKSDPAINEIFTSIETESFLPKQLTASNGIIPNQVHSKEMARILTNAENYLPFLKETDENNLSISNRILQLYKFQIPYYIGPVTEKSQRDGGNGWVIRKDNGRVFPWNIEEKIDVKATSEAFISRMVRRCTYMNGKQVLPKASLEYESFRVLNEINNLRIDGERIPVTLKQDIYTDLFQKGKKVTKKQLCNYLATRGLIESSEQVTGIDIAINNSLSTYGKFKAIFGEDIKLDHIQHMIEDIVFWCTVYGDSKQFLKEQIDDKYKGKLSPEQMKRILGFKFKDWGNLSKEFFELKGADKSTGEAVSIIRALWENNLNLMELINSSEFDFKEQLADYEANSLKTLSDFEPEDLNDYYFSAPVRRMIWQTTLIIKELVHVLGKEPARIFIEMTREKDASRGRTLSRKKKFEDLYKNVKDENTDWAKVIEHADESGTIRSKKMYLYLTQKGRCMYTGNHIELSDLFNDNLYDIDHIYPRHFVKDDNIDNNLVLVTKEKNAHKSDNYPLEAEIFNKQRNMWTQLRKEGFISEEKYNRLMGRNAFTDEQKAGFIARQLVETSQGTKGVAELFHQLLPNSKIVYAKAGNVSDFRRNRELPKSRLVNDFHHAHDAYLNIVVGNVYYVKFTQNPINYIKNSYNKDMNKNNYNLSRMFDWDVKRGDEVAWIAQKQDGAAGTISTVKKMLSKNTPLMTRLSYEGKGALANETLYSAEKAKGEGYIPFKSSDTKIQDVTKYGGFTSVTGAYFFLVEHDEKKKRIRTIESVPLYLADKIDKDSSELERYCDKLGLVNYDVRVRKIKIGSLIKYNGYFCYITGKTGYRLIVRNATNLCLTSNWRKYIKKIEKYKETTIIDNVITAEENIKLYNELLNKFTVGIFGRRPNPIGEKMDSARDKFASLSIENQCLALYQILQLTAILGNESDLQLIGASTHAGKMLISKKIGTDEIYLINQSPTGLFETKIDLQTI

SEQ ID NO: 21728 - protein, 1359 aa, unidentified
  REGION 1..1359: note = Cas Enzyme sequence
MLNTPYYLGLDMGTNSVGWAVTDKNYNLLRAKGKDLWGIREFSDSATSVDRRSYRIRRRRRQREQARIGLLKYYFNDSIIAKDPSFFQRLENSKYHLEDKDEAVKYKFNIFNDKTYTDIDYYTQYPTIYHLRKELLESSEPHDVRLVYLALLNMFKHRGHFLNAEIGDVAEERKLKDAYIDFCSCVSELTNESFNLDIDYSAVEEILSSRDISRTKKSEALASILNIDVKNKKYKEYVKAICGLKVNAYTLFSEQLSDEVKRIDICVSDASFDTKREDYISILGEDLFQIILYIKEIYDIGSLAGILKGYSYLSFARVATYEKHKSDLRKLKDCIRKYCSKEDYNQFFNSDAAGFYASYIGSFNSGKKQRRVGKNTTSEDLYKEIKKILKNADKNDPEIIDIFSSIDTESFLPKQLTASNGVIPNQVHYKEMAKILSNAESYLPFLREKNESNLSVSERILQIYKFQIPYYIGPVTEKSHRDGGNGWVIRKSNGRVLPWNINEKIDVKATSEAFISRMVRRCTYMNGAQVLPKASLEYESFRVLNEINNLRIDGERIPVDLKQAIYIDIFQKGKKITADILHKYLFNKGYIQSSEQVTGIDININNSLSTYGKFKVIFGEDIKLDSVQHMIEDIVFWCTVYGDSKKFLQEQIEEKYSDKISKEQLKRILGFKFKDWGSLSKEFFELKATDKSTGENISIIRALWENNLNLMELINSSKFNFKERLEEYRITSLKTLSDFEPEDLREYYFSAPVRKMIWQTMLVIKELVHVLGHEPERIFIEIPRDKDPSIGRTISRKKKFEELYKNVKDESVDWMNVIEHADDSGSLRSKKMYLYLTQKGRCMYTGEHIELSDLFNKSLYDIDHIYPRHFVKDDNIDNNLVLVKREKNAHKSDNYPLEAEIFNNQKKMWAQLRKEDFINEEKYKRLMGRNPFTDEQKAGFIARQLVETQQGTKGVAELLQQLLPNSKIVYTKAGNVSDFRHSREIPKSRLINDFHHAHDAYLSIVVGNVYYVKFTQNPINFIKNAYNKDSSKNNYNLTRMFDWDVKRRDEVAWIAQNKNGTVGTIAIVKKMLKRNTPLMTRLSYEGKGGLTKETLYSAEKAKGEGYIPFKSSDKKMQDVTKYGGFTSVKGAYFFLVEHDEKKKQIRTIESVPLYLADKIEKDPAELERYCQKLGLVNYNIRVRKIKIGTLIKRNGYFAYLTGKTGKQLILRNATNLCLDSKWGTYIKKIEKYKDTGVLDNTLDTDTNIKLYNELLDKFTTGIYGKRPNPIGDKMLSAKNTFTSFTLDNQCNLIYQILQLSKILGFETDLSLLHTNKKSDKPTREGGMQISKKVSNTTSMYLINQSPTGLFEKQIDLLTV

SEQ ID NO: 21729 - protein, 1359 aa, unidentified
  REGION 1..1359: note = Cas Enzyme sequence
MLEKPYYLGLDMGTNSVGWAVTDQQYNLLKAKGKDLWGIREFAEADTSVERRTHRISRRRRQREQARIGLLNDYFHDAIIAIDPSFFQRLENSKYHLEDKDQNVRYKYNIFNDPDYTDADYYTQYPTIYHLRKELLENPKPHDVRLVYLALLNMFKHRGHFLNSGISDGNNERSLKDAYINFAISVSELTEDYFNQDVDYSTIEGILSSRDLNRTKKAEELSTVLGIDFKNKKYKEYLRAICGLKINAYTLFSDQLPDDTTKIDLCVSDASFDEKSEELVSLIGEDLFQIILNIKEIYDIGSLAGILKGYTYLSQARVAAYDKHKHDLKLLKSSIKKYCTKEEYNNFFNSDADGSYASYIGSFNSGNKERRVGSKRTSEDLYKEIKKLLKGANKSDPAINEIFTSIETESFLPKQLTASNGIIPNQVHSKEMARILTNAENYLPFLKETDENNLSISNRILQLYKFQIPYYIGPVTEKSQRDGGNGWVIRKDNGRVFPWNIEEKIDVKATSEAFISRMVRRCTYMNGKQVLPKASLEYESFRVLNEINNLRIDGERIPVTLKQDIYTDLFQKGKKVTKKQLCNYLATRGLIESSEQVTGIDIAINNSLSTYGKFKAIFGEDIKLDHIQHMIEDIVFWCTVYGDSKQFLKEQIEDKYKGKLSPEQMKRILGFKFKDWGNLSKEFFELKGADKSTGEAVSIIRALWENNLNLMELINSPEFDFKEQLADYEANSLKTLSDFEPEDLNDYYFSAPVRRMIWQTTLIIKELVHVLGKEPARIFIEMTREKDASRGRTLSRKKKFEDLYKNVKDENTDWAKVIEHADESGTIRSKKMYLYLTQKGRCMYTGNHIELSDLFNDNLYDIDHIYPRHFVKDDNIDNNLVLVTKEKNAHKSDNYPLEAEIFNKQRNMWTQLRKEGFISEEKYNRLMGRNAFTDEQKAGFIARQLVETSQGTKGVAELFHQLLPNSKIVCAKAGNVSDFRRNRELPKSRLVNDFHHAHDAYLNIVVGNVYYVKFTQNPINYIKNSYNKDMNKNNYNLSRMFDWDVKRGDEVAWIAQKQDGATGTISTVKKMLSKNTPLMTRLSYEGKGALANETLYSAEKAKGEGYIPFKSSDTKIQDVTKYGGFTSVTGAYFFLVEHDEKKKRIRTIESVPLYLADKIDKDSSELERYCDKLGLVNYDIRVRKIKIGSLLNRNGYFAYLTGKTGKQLILRNATNLCLDKKWTRYIKKIEKYKETNVLDSIITSETMVNLYNELLNKFTVGIYGRRPNPIGEKMDSAKNTFTSYTLDNQCNLIYQILQLSKILGFETDLSLLRTNKQSGKPTREGGMQISKKIDNTTSMYLINQSPTGLFETKIDLQTI

SEQ ID NO: 21730 - protein, 1392 aa, unidentified
  REGION 1..1392: note = Cas Enzyme sequence
MTNKTWYLGLDIGSASVGWAATDTEYKIIRKNKKRLWGVRLFEEATTAEDRRGYRSSRRRLARRKWRLNLLEELFAAEVEKVDENFFLRLKESQYHYEDKTHKVPYAIFNDKDYTDKDYYKDYPTIYHLRSKLMSEKNPDIRKVFLAIHHILKNRGHFLLQGQSFKDGNLNNLIKELLELDILHVGFDVTEEVVSKIADISLEKKTLTDKVNDLKKLYPKEKQLLEVFRLIFGGKTSLDKLFAIEEYKELDTTIKSISFKEKIYEEVRHDYEQVLSNYIELLDLAKLVYDSIILSDIKKEGKTLSESKVELYEKHKNDLLKLKNLVKNDSKLSEEKKVEVYASIFKEDKDKGTNYVNYIRKSEEGKGCNYEDFKKFLVKELAKLEESSVKAEIIKDLDLEQFLPLQRTKDNSVVPYQIHKEELVKILDNAVKYHDFLDEKDESGYSVREKVVQLLEFRIPYYVGPLNSSKKAKEDGFAWSVRNKGYENTPVTPWNYSKVIDESASAEKFITNLTNKCTYLKGEDVLPKNSLLYSEFALLNELNALKYDGNRISLEARNTIIEKLFKQQGKKVTKNSIKNLLKAEGYIDGKGEISGIDITVKNDIKAYRDFKKILGDKFNSEHVENIILWITLYGESRKLIKAKIESVYGDIYSNDEITKMSRLVYKDWGRFSRKLLTELVSKKLYNEETGECLNIIGAMRQNNILFMELLADRFDYSEQISKFNKELQEEITEITPEILDDLYVSPAVKRSIWQTVRIVEELKKIIGCAPAKIFVETTRSNQDKKKPTDSRKKQLELAYKAAKKDIKELEKEIDELKFDTLNNRLSAEEPSELKAKKLYLYYTQLGRCMYSGKPITFKDLNTKKYDIDHIYPQSKVKDDSFTNTVLVERELNAKKGDRYPLSSDFQTPSNRKLWKFLKEKGLITNEKYNRLVRTEEFSDEELSGFIARQLVETSQSIKAVASILGELNPETSICYSKAENVSSFRQNFGKIKDGNRDSKNNEQLVKVREINDLHHAKDAYLNVVVGNVYDTKFTRNVFNFIKDKKDGRKYSLNKVFYENVSDKKTVAWEMDKTIHQVKKVMDNNSILVTRRTSEQKGGLFDATVYKAKVAAKAKEGVYYPLKTSNSVVKDVDKYGGFTKIKIAYYSIFEYVLVNKKGGEKITRIVPIPIYISQNIKDDTTLLEFGRSQIITKSGEEIKDFKLRYRKLCKDSYILLNDYPYYVGGKFNDYIYIDSAVQLILNNDIEKYIKLISKYQNWKKDNKDGELWEDITAEKNIELYCELVEKMNKQIFVKKKQNKYGEFIDESSLRNFEKLDIDNQVIVLMEVLNILTNKRQPSLDKKLIGVTASRGYSSLDLSNLNQYSVVEQSITGFYEKEITIIGDKGNDMENNNS

SEQ ID NO: 21731 - protein, 1397 aa, unidentified
  REGION 1..1397: note = Cas Enzyme sequence
MTNKTWYLGLDIGSASVGWAATDTEYKIIRKNKKRLWGARLFEEATTAEDRRGYRSSRRRLARRKWRLNLLEELFAAEVKKVDENFFLRLKESQYHYEDKTHKVPYAIFNDNEYTDKDYYKDYPTIYHLRSKLMSEKNPDIRKVFLAIHHILKNRGHFLLQGQSFKDGNLKDLIKELLELDILNVGFDVSEEVVAKIADISLEKKTLTDKVNNLKELYPKEKQLLEVFRLIFGGKTSLDKLFAIEEYKELDATIKSISFKEKIYEEVRHDYEQVLSNYIELLDLAKLVYDSIILSDIKKEGKTLSESKVELYEKHKNDLLKLKNLVKNDSKLSEEKKVEVYTSIFKEDKDKGTNYVNYIRKSEEGKGCNYEDFKKFLVKELAKLEESSVKAEIIKELDLEQFLPLQRTKDNSVVPYQIHKEELVKILDNAVKYHDFLDEKDESGYSVREKVVQLLEFRIPYYVGPLNSSKKAKEGGFAWSVRNKGYENIPVTPWNYSKVIDESASAEKFITNLTNKCTYLKGEDVLPKNSLLYSEFALLNELNALKYDGNRISLEARNTIIEKLFKQQGKKVTKNSIKNLLKAEGYIDGKGEISGIDITVKNDIKAYRDFKKILGDKFNSEHVENIILWITLYGESRKLIKAKIESVYGDIYSNDEITKMSRLVYKDWGRFSRKLLTELVSKKLYNEETGECLNIIGAMRQNNILFMELLADRFDYSEQISKFNKELQEEVTEITPEILDDLYVSPAVKRSIWQTVRIVEELKKIIGCAPAKIFVETTRSNQEKKKPTDSRKKQLELAYKAVKKDVKELEKEIGAINFDVLNDRLSSVEPSKLKAKKLYLYYTQLGRCMYSGESIIISELLDNNNNNNKYDIDHIYPQSKVKDDSFTNTVLVKRDRNEKKGDRYPLSSDFQTPSNRRLWKFLKEKKLITDEKYNRLVRTEEFSDEELSGFIARQLVETAQSIKAVAKILGELNPETSICYSKAENVSSFRQNFGKIKDGNSKSKNNEQLVKVREINDLHHAKDAYLNVVVGNVYDTKFTRNVFNFIKDKKDGRKYSLNKVFYENVSDTKTVAWEMDKTIHQVKKVMDNNSILVTRRTSEQKGGLFDATVYKAKVAAKAKEGVYYPLKTSNSVVKDVDKYGGFTKIKIAYYSIFEYVLVNKKGEEKITRIIPIPIYISQNIKDDNTLLEFGRSQIITKPGEEIKDFKLRYRKLCKDSYILLNDYPYYIGGKFNDYIYIDSAVQLILNNDIEKYIKLISKYQNWKKDNKDGELWGEITAEKNIDLYCKLVEKMNKQIFVKKKQNKYGEFIDESSLRNFEKLGIDNQVIVLMEVLNILTNKRQPSLDKKLIGVTVSRGYSSLDLSKLNQYSVVEQSITGFYEKEITIIGDKGNDMENNNS

SEQ ID NO: 21732 - protein, 1391 aa, unidentified
  REGION 1..1391: note = Cas Enzyme sequence
MINKTWYLGLDIGTASVGWAATDTEYKIIRKNKKRLWGVRLFEEAKTAEERRGYRSSRRRLARRKWRLNLLEELFATEVKKVDDNFFLRLKESQYHYEDKTHQVPYAIFNDKDYTDKDYYKEYPTIYHLRTKLMSEDNPDIRKVFLAIHHILKNRGHFLLQGQSFKDGNLNNLIKELLKLDILHIGFDETEEVVSKIATISLEKKTLTDKVNDLKKLYPKEKQLLEVFRLIFGGKTSLDKLFAIDEYKELDASVKSVSFKEKIYEEVRHDYEQVLSNYIELLDLAKLVYDSIILSDIKKEGKTLSESKVELYNKHRDDLTKLKNLVKNDTKLSEDKKVEIYAEIFKEDKDKGTNYVNYIRKSDEGKGCNYEDFKKFLVKELAKLEESTAKDEILRDLELELFLPLQRTKDNSVVPYQIHKEELVKILDNAAKYHSFLDEKDESGYSLREKVIQLLEFRIPYYVGPLNSSKKAKEDGFAWSVRNKGYENTPVTPWNYEKVIDESASAEKFITNLTNKCTYLKGEDVLPKSSLLYSEFALLNELNALKYDGNRISLEARNAIIEKLFKQQGKKVTKTSIKNLLKAEGYIDGKGEITGIDITVKNDLKSYRDFKKILGNKFNSEHVENIILWITLYGESRKLIKAKIEAVYGDIYSKEEIAKMSRLVYKDWGRFSRKLLTDLVSKKLYNEETGECLNIIGAMRQNNILFMELLADRFDYSQQIIDYNKELQKEVTEITPEILDDLYVSPSVKRSIWQTVRIVEELKKIIGCAPAKIFVETTRSNQEKKKPTDSRKKQLELFYKAVKKDVKELEKEIGSLNFDKLNERLSSVEPSKLKAKKLYLYYTQLGRCMYSGETIDITQLNTTAYDIDHIYPQSKVKDDSFTNTVLVKREYNAAKTDRYPLGNDIQTPSNRNFWKFLKEKGLITDEKYNRLVRTEEFSDEELTGFIARQLVETSQSVKAVASILGELNPETSICYSKAENVSSFRQNFGKIKEGNRKSDNTEQLIKVREINDYHHAKDAYLNIVVGNVYDTKFTRNVFNFIKDKKDGRKYSLNNVFYENVSNSNSVAWKMNKTVHQVEKVMNNNNILMTRRTSEQKGGLFNATVYKAKVASKAKEGVYYPLKTSNNVIKDVTKYGGFTSIGIAYYSIFEYILVSKKGEEKITRIIPIPIYISQNIKDDGTLLEFGKTQINIKSNEEIKDFKLKYKKLCIGSIIFINNYPYYIGGKSGDTFYYDNAVQVILDKESEKYIKNISKYQNWKKENKDGELWESITKEKNIKLYNTLVEKMNSGIFAKKKPNKFEELNIDEVRNNFNNVSLDNQAKVLLEILNLLTNKKSIFDLKLINIALGRSRYNFNITSQSQFSIVEQSVTGFYEKEITIIGDKENDMENNNS

SEQ ID NO: 21733 - protein, 1262 aa, unidentified
  REGION 1..1262: note = Cas Enzyme sequence
MTENEPDIRKVFLAIHHILKNRGHFLLQGQSFKDGNINNLIKELLELDILHHDIEVNDEIVENIKNIAIEKKNLTEKVNGLKKLFPKEKQLLEVFRVILGGKSSLDKIFAIEEYKELDASVKSISFKEKVYEEVRHDYEQILSNYIELLDLAKLVYDSIILSDVKKEGKTLSESKVELFEKHKADLAKFKALVKNDSKLSEEKKNELYRIIFKEDNDKGTNYVNYIKDSKEEKGCSYEDFKKFLVKELAKLVDSEEKNKVLTELELETFLPLQRTKDNSVVPYQIHREELIKILENVEKYYSFLKEKDESGYTVKEKIIQLLEFRIPYYVGPLNSHKKANEGGYAWSVRNKGEENTPVTPWNYSKVIDESASAEKFITNLTNKCTYLKGEEVLPKHSLLYSEFALLNELNALRYDGNRISIEARNTIIEKLFKEQGKKVTKKSIKELLKAEGYINGKGEITGIDITVKNDLKSYRDFKKILGDKFNTEHVENIIIWITLYGESRKLIKAKIEAVYGDKYTKEEIAKMSRLTYKDWGRFSRKLLTEIVSEKLFNEETGECLNIINAMRYNNILFMELLADRFDYMSQIEDFNKTLQKEVTEITPDILEDLYVSPAVKRSIWQTIRIVEELKKIIGCAPSKIFVETTRSNTTDKKPTDSRKKQLEAVYKNIKDKEIQELEKEINSTIDFSIKKDRLSAVEPSKLKAKKLYLYYTQLGRCMYSGESIDINKLFDNNKYDIDHIYPQSKVKDDSFTNTVLVKKVSNAEKTDKYPLGQDIQTKENKRFWKFLKEKKLIFEEKYNRLVRTEEFSDEELSGFIARQLVETSQSVKAVASVLGELNTETVICYSKAENVSAFRQNFGKIKDGNRKSKNTEQLIKVREINDYHHAKDAYLNVVVGNVFDVRFTRNAYNFIKDKKDGRKYSLNNMFYTDVRNSNTIAWEMDKTVHQVDKVMNNNNILVTRRTAEQKGALYNATVYKAKVAAKAKEGTYYPLKTSDNIIKDVTKYGGFTSIGIAYYSIFEYILETKKGEEKITRIIPIPIYISQNITDDNILLEYARKQIILKQNEKLKDFKLKYKKLCIGTLIIIDNYPYYIGGKFNNNIYIDSAVQILVDSNTEKYIKVIFKYKDWKEKSKDGKVWEIITDEKNIKLYIMLVEKMNTSIFKKKKQNKYSELIDNQSVEKFKKLDIDTQIIVISQVLNLLTNKVQPKLDRKLIGVTASRGNCNSIISNLNQFSIIEQSVTGFYEKEITIIGDKGNDMENNNS

SEQ ID NO: 21734 - protein, 1395 aa, unidentified
  REGION 1..1395: note = Cas Enzyme sequence
MTNKTWYLGLDIGSASVGWAATDTEYKIIRKNKKRLWGARLFEEATTAEDRRGYRSSRRRLARRKWRLNLLEELFAAEVKKVDENFFLRLKESQYHYEDKTHKVPYAIFNDNEYTDKDYYKNYPTIYHLRSKLMSEKNPDIRKVFLAIHHILKNRGHFLLQGQSFKDGNLKDLIKELLELDILNVGFDVSEEVVAKIADISLEKKTLTDKVNNLKQLYPKEKQLLEVFRLIFGGKTSLDKLFAIEEYKELDATIKSISFKEKIYEEVRYDYEQVLSNYIELLDLAKLVYDSIILSDTKKEGKTLSESKIELYEKHKNDLLKLKNLVKNDSKLSEEKKVELYTSIFKEDKDKGTNYVNYIRKSEEGKGCNYEDFKKFLVKELAKLEESSVKAEIIKELDLEQFLPLQRTKDNSVVPYQIHKEELVKILDNAVKYHDFLDKKDESGYSVREKVVQLLEFRIPYYVGPLNSSKKAKEDGFAWSVRNKGYENIPVTPWNYSKVIDESESAEKFIENLTNKCTYLKGEDVLPKNSLLYSEFALLDELNRLKYDGNRISLEARNTIIEKLFKQQGKKVTKNSIKNLLKAEGYIDGKGEIEGIDITVKTDLRAYRDFKKILGDKFNSEHVENIILWITLYGESRKLIKAKIESVYGDIYSKDEITKMSRLVYKDWGKYSRKLLTELVSKKLYNEETGECLNIIGAMRQNNILFMELLADRFDYSEQISKFNKKLQEEVTEITPEILDDLYVSPAVKRSIWQTVRIVEELKKIIGCAPAKIFVETTRSNQGKKEPTDSRKKQLELAYKAAKKDVKELEKEIGVINFDVLNDRLSSEEPSKLKAKKLYLYYTQLGRCMYSGESIIISELLDNNNNNKYDIDHIYPQSKVKDDSFTNTVLVKRDRNEKKGDRYPLSSDFQTPSNRRLWKFLKEKKLITDEKYNRLVRTEEFSDEELSGFIARQLVETAQSIKAVAKILGELNPETSICYSKAENISSFRRNFGKIKDGNSKSKNNEQLVKVREINDLHHAKDAYLNVVVGNVYDTKFTRNVFNFIKDKKDGRKYSLNNVFYENVSDTKTVAWKMDKTIHRVKKVMDNNSILVTRRTSEQKGGLFKATVYKAKIAAKAKEGVYYPLKTSDKFIKDVKKYGGYTSIGIAYYSIFEYILVNKKGEEKVTRIIPIPIYVSQNIRDNSTLIEFGRRQINIKDGEEIKDFKLKYAKLCIGSEIRMNNYPYYIGGKSKDTFYYDSAVQVIIDNQSEQYLKILSKYQNWKKENKDGELWKNITKESNLELYNKLVEKMNSKIFTKKKPNKYNELNSEEIRSNFNSITAEEQVKVLLEILNLLTNKKSTFDLKNIKLGAARGQQLFDLTKLNQFSIMEQSVTGLYEKEITIIGDKGNDMENNNS

SEQ ID NO: 21735 - protein, 1392 aa, unidentified
  REGION 1..1392: note = Cas Enzyme sequence
MANKTWYLGLDIGSASVGWAATDTEYKIIRKNKKRLWGVRLFEEATTAEDRRGYRSSRRRLARRKWRLNLLEELFASEVKKVDENFFLRLKESQYHYEDKTHKVPYAIFNDKDYTDKDYYKDYPTIYHLRSKLMTEKTPDIRKVFLAIHHIIKNRGHFLLQGQSFKDGNLNNLIKELLELDILHVGFEVTEEVVGKIADISLEKKTLTDKVNDLKKLYPKEKQLLEVFRLIFGGKTSLDKLFAIDEYKELDASIKSVSFKEKIYEEVRHDYEQVLSNYIELLDLAKLVYDSIILSDIKKEGKTLSESKVELFEKHRDDLLKLKNLVKNDSKLSEDKKVELYALIFKEDKDKGTNYVNYIRKSEEGKGCNYEDFKKFLVKELVKLEESSVKTEIIKDLELEQFLPLQRTKDNSVVPYQIHKEELVKILDNAAKYHSFLEKKDESGYNVREKVIQLLEFRIPYYVGPLNSSKKAKEGGFAWSVRNKGYEDTPVTPWNYSKVIDESASAEKFITNLTNKCTYLKGEDVLPKSSLLYSEFALLNELNALKYDGNRISLEARNTIIEKLFKQQGKKVTKTSIKNLLKAEGYIDGKGEISGIDITVKNDLKSYRDFKKILGNKFNSEHVENIILWITLYGESRKLIKAKVESVYGEVYSKDEITKMSRLVYKDWGRFSRKLLTELVSKKLYNEETGECLNIIGAMRQNNILFMELLADRFDYSKQIVEFNKELQEDVTEITPEILDDLYVSPAVKRSIWQTVRIVEELKKIIGCAPTKIFVETTRSNQEKKKPTDSRKKQLELVYKAVKKDVKELEKEIGAINFDVLNDRLSSVEPSKLKAKKLYLYYTQLGRCMYSEEPINISELFDNNKYDIDHIYPQSKIKDDSFTNTVLVKRESNAAKTDRYPLGSDIQTPSNRRFWKFLKEKGLITDEKYNRLVRTEEFSDEELSGFIARQLVETSQSVKAVASILGELNPETSICYSKAENVSSFRQNFGKIKDGNSKSNNNEQLVKVREINDFHHAKDAYLNVVVGNVYDTKFTRNVFNFIKDKKDGRKYSLNKVFYENVKDSKTVAWEMDKTIHQVEKVMNNNNILVTRRTSEQKGGLFNATVYKAKVAAKAKEGVYYPLKTSDRFIKDVKKYGGYTSIGIAYYSIFEYALVNKKGEEKITRIIPIPIYISQNIKEDDALLEFGMSQINVKSGEEIKDFKLKYKKLSIGSLIFINNYPYYIGGKSGDTFYYDNAVQVVLDSQSEKYLKILSKYQSWKKENKDGQLWESITDEKNIELYNTLVEKMNSGIFTKKKPSKFSELNSEEIRNNFIKITVEEQAKVLLEVLNLLTNKKSIFDLKLINIALGRSRYNFNITPQMHFSIIEQSVTGFYEKEITIIGDKGNDMENNNS

SEQ ID NO: 21736 - protein, 905 aa, unidentified
  REGION 1..905: note = Cas Enzyme sequence
MTNKTWYLGLDIGTASVGWAATDNEYKIIRKNKKRLWGVRLFEEATTAEERRGYRSGRRRLARRKWRLNLLEELFTQEIVKIDANFFLRLKESQYHYEDKTHQVPYAIFNDKDYTDKDYYKQYPTIYHLRTKLMTEENPDIRKVFLAIHHILKNRGHFLLQGQSFKEGNLNNLIKELLNLDILHIYIEITEGNINKITEIALEKKTLTDKVNDLKKLYPKEKQLLEAFRLIFGGKTSLDKLFAIDEYKELDASVKSVSFKEKIYEEVRHDYEQVLSNYIELLDLAKLVYDSIILSDIKKEGKTLSESKVELYHKHREDLTKLKTLVKNDSKLSEDKKVELYSAIFKEDKDKGTNYVNYIRKSEEGKGCNYEDLKKFLVKEVAKLEESSAKEEILRDLELELFLPLQRTKDNSVVPYQIHKEELVKILDNAAKYHKFLNEKDDSGYSIIEKVIQLLEFKIPYYVGPLNSSKKAKVDGFAWSVRNKGYENTPVTPWNYEKVIDESASAEKFIINLTNKCTYLKGEDVLPKSSLLYSEFALLNELNALKYDGNRISLEARNVIIEKLFKEQGKKVTKTSIKNLLKAEGYIDGKGEITGIDITVKNDLKSYRDFKKILGDKFNTEHVENIILWISLYGESRKLIKTKIEAVYGDIYSKEEIAKMSRLVYKDWGRFSRKLLTELVSKKLYNEETGECLNIIGAMRQNNILFMELLADRFDYSQQIIDYNKELQKEVTEITPEILDDLYVSPSVKRSIWQTVRIVEELKKIIGCAPAKIFVETTRSNQEKKKPTDSRKKQLELFYKVVKKDVKDLEKEIGSLNFDKLNERLSSVEPSKLKAKKLYLYYTQLGRCMYSGETIDITQLNTTAYDIDHIYPQSKVKDDSFTNTVLVKREYNAAKTDRYPLGSDI

SEQ ID NO: 21737 - protein, 1344 aa, unidentified
  REGION 1..1344: note = Cas Enzyme sequence
MSQNNNKIYNIGLDIGDASVGWAVVDEHYNLLKRHGKHMWGSRLFTQANTAVERRSSRSTRRRYNKRRERIRLLRGIMEDMVLDVDPTFFIRLANVSFLDQEDKKDYLKENYHSNYNLFIDKDFNDKTYYDKYPTIYHLRKHLCESKEKEDPRLIYLALHHIVKYRGNFLYEGQKFSMDVSNIEDKMIDVLRQFNEINLFEYVEDRKKIDEVLNVLKEPLSKKHKADKAFALFDTTKDNKAAYKELCAALAGNKFNVTKMLKEAELHDEDEKDISFKFSDATFDDAFVEKQPLLGDCVEFIDLLHDIYSWVELQNILGSAHTSEPSISAAMIQRYEDHKNDLKLLKDVIRKYLPKKYFEVFRDEKSKKNNYCNYINHPSKTPVDEFYKYIKKLIEKIDDPDVKTILNKIELESFMLKQNSRTNGAVPYQMQLDELNKILENQSVYYSDLKDNEDKIRSILTFRIPYYFGPLNITKDRQFDWIIKKEGKENERILPWNANDIVDVDKTADEFIKRMRNFCTYFPDEPVMAKNSLTVSKYEVLNEINKLRINDHLIKRDMKDKMLHTLFMDHKSISANAMKKWLVKNQYFSNTDDIKIEGFQKENACSTSLTPWIDFTKIFGKINESNYDFIEKIIYDVTVFEDKKILRRRLKKEYDLDEEKIKKILKLKYSGWSRLSKKLLSGIKTKYKDSTRTPETVLEVMERTNMNLMQVINDEKLGFKKTIDDANSTSVSGKFSYAEVQELAGSPAIKRGIWQALLIVDEIKKIMKHEPAHVYIEFARNEDEKERKDSFVNQMLKLYKDYDFEDETEKEANKHLKGEDAKSKIRSERLKLYYTQMGKCMYTGKSLDIDRLDTYQVDHIVPQSLLKDDSIDNKVLVLSSENQRKLDDLVIPSSIRNKMYGFWEKLFNNKIISPKKFYSLIKTEFNEKDQERFINRQIVETRQITKHVAQIIDNHYENTKVVTVRADLSHQFRERYHIYKNRDINDFHHAHDAYIATILGTYIGHRFESLDAKYIYGEYQKIFRNNKNKDKEFNKNKDGFILNSMRNLYEDKDTGEVVWDPEWISRIKKCFYYKDCFVTKKLEENNGTFFNVTVLPNDTNSDKDNTLATVPVNKYRSNVNKYGGFSGVNSFIVAIKGKKKKGKKVIEVNKLTGIPLMYKNADEETKINYLKQAEDLEEVQIGKEILKNQLIEKDGGLYYIVAPTEIINAKQLILNESQTKLVCEIYKAMKYKNYDNLDSEKIIDLYRLLINKMELYYPEYRKQLVKKFEDRYEQLKVISIEEKCNIIKQILATLHCNSSIGKIMYSDFKISTTIGRLNGRTISLDDISFIAESPTGMYSKKYKL

SEQ ID NO: 21738 - protein, 1348 aa, unidentified
  REGION 1..1348: note = Cas Enzyme sequence
  REGION 293..300: note = misc_feature - Xaa can be any naturally occurring amino acid
MAAFKYYLGLDMGTNSVGWAVTDPNYNLLKAKGKDLWGIREFNEASTAVERRTHRISRRRRQREQVRIGLLKDYFHDAIGEVDPDFFQRLANSKYHLEDKDTEVRYKNNVFNDDDYTDKDYFDQYPTIYHLRKELIESTDKHDVRLVFLALLNMFKHRGHFLNSGLGENSGENNINNAYLELTNLLSEFTQYNLNETIDGKKIEDLLSRRDMSRTRKAEGLAEILGVDYKNKPYKELIRGLCGLKFNACAIFPEIQSDEVPKLDICLSEASFDEKSDEIANILGEDYFEIIMXXXXXXXXIMKGHNYLSQARVTSYEKHKEDLRLLKNVIRKYCSKEDYDNFFNSEADGSYASYVGSYNSKTKQRRVGNKRSSEELYKAIKKLLKNVPAEDADVQRILMSIENETFLPKQLTASNGVIPNQVHAKEIKKILSNAERYLPFLREKDETGLSVSEKIMKLFSFQIPYYVGPTTEKSSKDGGNGWVVRKEEGQVLPWNIDEKIDMKATSEAFISRMVRRCTYISGEPVLPKSSLEYQSFCVLNEINNIKIDGERISVELKQDIYKEVFQKGKRVTKKQLCKYLHTRGIIEAEEQVTGIDVTINNALTTYGKFKAILGDDISKDSVQKMVEDIVFWCTVYGDSKKFLKDRIEEKYGEKLTKEQIKRIVGFKFKDWGNLSKNFLELSGADVSTGESVSIIRALWNNNLNLMELINSRLYNYKERLAEYQNTMMKTLSDIEAEDLDEYYFSAPVKRMIWQTILIIKELVKVLGCEPDRIFVEMTRRPDERKMRTESRRKKFEELYKKVKDEDVDWMKVIAHADETGSIRSKKMYLYLTQKGRCMYTGKHIELSDLFNNNLYDIDHVYPRHFVKDDNIDNNLVLVCKEKNAHKSDIYPLEDEILASQKNMWSELRRSGFITEEKYNRLIGRNPFTDEQKAGFIARQLVETSQGTKGVANILQQLLPESKIVYAKASNVSEFRNTRDIPKSRLINEFHHAHDAYLNIVVGNVYYVKFTQNPLNFIKNDYDRDKTKNNYNLSKMFDWDVERNGEVAWIAQKKDGEAGTIATVKKVLGRNTPLMTRYSFEGKGGLTNETLYGAKKAKEEGYIPFKSSDEKMKDVTKYGGFTSVTGAYFFLVEHTEKKKRSRMIESVPLYLAQKIEQNPHELEKYCEQVLGLIDFDIRVRKIKIGSLIKRKGYFFYITGKTGKQLIVRNAVNMYLKREWVKYISKLEKAVDKNIVEGIITKEKNELLYSELIEKFKNSIFSNRPNPVGDKLDKAKEKFINLDIEKQCIVLCQILQLSSVLGSECDMTLLGESAHCGKILISKKIGDEDIYLINQSVTGLYEKKINLRTV

SEQ ID NO: 21739 - protein, 1353 aa, unidentified
  REGION 1..1353: note = Cas Enzyme sequence
MAAFKYYLGLDMGTNSVGWAVTDPNYNLLKAKGKDLWGIREFNEASTAVERRTHRISRRRRQREQVRIGLLKDYFHDAIGEVDPDFFQRLANSKYHLEDKDTEVRYKNNVFNDDDYTDKDYFDQYPTIYHLRKELIESTDKHDVRLVFLALLNMFKHRGHFLNSGLGENSGENNINNAYLELTNLLSEFTQYNLNETIDGKKIEDLLSRRDMSRTRKAEGLAEILGVDYKNKPYKELIRGLCGLKFNACAIFPEIQSDEVPKLDICLSEASFDEKSDEIANILGEDYFEIIMAMKDIYDIGSLAGIMKGHNYLSQARVTSYEKHKEDLRLLKNVIRKYCSKEDYDNFFNSEADGSYASYVGSYNSKTKQRRVGNKRSSEELYKAIKKLLKNVPAEDADVQRILMSIENETFLPKQLTASNGVIPNQVHAKEIKKILSNAESYLPFLREKDETGLSVSEKIMKLFSFQIPYYVGPTTEKSSKDGGNGWVVRKEEGQVLPWNIDEKIDMKATSEAFISRMVRRCTYISGEPVLPKSSLEYQSFCVLNEINNIKIDGERISVELKQDIYKEVFQKGKRVTKKQLCKYLHTRGIIEAEEQVTGIDVTINNALTTYGKFKAILGDDISKDSVQKMVEDIVFWCTVYGDSKKFLKDRIEEKYGEKLTKEQIKRIVGFKFKDWGNLSKNFLELSGADVSTGESVSIIRALWNNNLNLMELINSRLYNYKERLAEYQNTMMKTLSDIEAEDLDEYYFSAPVKRMIWQTILIIKELVKVLGCEPDRIFVEMTRRPDERKMRTESRRKKFEELYKKVKDEDVDWMKVIAHADETGSIRSKKMYLYLTQKGRCMYTGKHIELSDLFNNNLYDIDHVYPRHFVKDDNIDNNLVLVCKEKNAHKSDIYPLEDEILASQKNMWSELRRSGFITEEKYNRLIGRNPFTDEQKAGFIARQLVETSQGTKGVANILQQLLPESKIVYAKASNVSEFRNTRDIPKSRLINEFHHAHDAYLNIVVGNVYYVKFTQNPLNFIKNDYDRDKTKNNYNLSKMFDWDVERNGEVAWIAQKKDGEAGTIATVKKVLGRNTPLMTRYSFEGKGGLTNETLYGAKKAKEEGYIPFKSSDEKMKDVTKYGGFTSVTGAYFFLVEHTEKKKRSRMIESVPLYLAQKIEQNPHELEKYCEQVLGLIDFDIRVRKIKIGSLIKRKGYFFYITGKTGKQLIVRNAVNMYLKREWVKYISKLEKAVDKNIVEGIITKEKNELLYSELIEKFKNSIFSNRPNPVGDKLDKAKEKFINLDIEKQCIVLCQILQLSSVLGSECDMTLLGESAHCGKILISKKIGDEDIYLINQSVTGLYEKKINLRTV

SEQ ID NO: 21740 - protein, 1358 aa, unidentified; identical to SEQ ID NO: 20347
  REGION 1..1358: note = Cas Enzyme sequence

SEQ ID NO: 21741 - protein, 1353 aa, unidentified
  REGION 1..1353: note = Cas Enzyme sequence
MAAFKYYLGLDMGTNSVGWAVTDPNYNLFKAKGKDLWGIREFNEASTAVERRTHRISRRRRQREQVRIGLLKDYFHDTIGEVDPDFFQRLANSKYHLEDKDTEVRYKNNVFNDDDYTDKDYFDQYPTIYHLRKELIESTDKHDVRLVFLALLNMFKHRGHFLNSGLGENSGENNINNAYLELTNLLSEFTQYNLNETIDGKKIEDLLSRRDMSRTRKAEGLAEILGVDYKNKPYKELIRGLCGLKFNACAIFPEIQSDEVPKLDICLSEASFDEKSDEIANILGEDYFEIIMAMKDIYDIGSLAGIMKGHNYLSQARVASYEKHKEDLKLLKNVIRKYCSKEDYDNFFNSEADGSYASYVGSYNSKTKQRRVGNKRSSEELYKAIKKLLKNVPAEDADVQRILMSIENETFLPKQLTASNGVIPNQVHAKEMKKILSNAERYLPFLREKDETGLSVSEKIMKLFSFQIPYYVGPTTEKSNKDGGNGWVVRKEEGQVLPWNIDEKIDMKATSEAFISRMVRRCTYISGEPVLPKSSLEYQSFCVLNEINNIKIDGERISVQLKQDIYKEVFQKGKRVTKKQLCKYLHTRGIIEAEEQVTGIDVTINNALTTYGKFKAILGDDISKDSVQKMVEDIVFWCTVYGDSKKFLKDRIEEKYGEKLTKEQIKRIVGFKFKDWGNLSKNFLELNGADVSTGESVSIIRALWNNNLNLMELINSRLYNYKERLAEYQNTMMKTLSDIEAEDLDEYYFSAPVKRMIWQTILIIKELVKVLGCEPDRIFVEMTRRPDERKMRTESRRKKFEELYKKVKDEDVDWMKVIAHADETGSIRSKKMYLYLTQKGRCMYTGKHIELSDLFNNNLYDIDHVYPRHFVKDDNIDNNLVLVCKEKNAHKSDIYPLEDEILASQKNMWSELRRSGFITEEKYNRLIGRNSFTDEQKAGFIARQLVETSQGTKGVANILQQLLPESKMVYAKASNVSEFRNTRDIPKSRLINEFHHAHDAYLNIVVGNVYYVKFTQNPLNFIKNDYDRDKTKNNYNLSKMFDWDVERNGEVAWIAQKKDGEAGTIATVKKVLGRNTPLMTRYSFEGKGGLTNETLYSAKKAKEEGYIPFKSSDEKMKDVTKYGGFTSVTGAYFFLVEHTEKKKRSRTIESVPLYLAQKIEQNPHELEKYCEQVLGLIDFDIRVRKIKIGSLVKRNGYFFYITGKNGKQLIVRNAVNMYLKREWVKYISKLEKAVDKNIVEEVIAKDKNELLYSELINKFKTGIFANRPNPVGDKLDKAKEKFLSLDIEQQCTVLCQILQLSSILGSASDMTLLGESAHCGKMQISKKIGDEDIYLINQSVTGLYEKKINLRIV

SEQ ID NO: 21742 - protein, 1353 aa, unidentified; identical to SEQ ID NO: 21741
  REGION 1..1353: note = Cas Enzyme sequence

SEQ ID NO: 21743 - protein, 1353 aa, unidentified
  REGION 1..1353: note = Cas Enzyme sequence
MAAFKYYLGLDMGTNSVGWAVTDPNYNLFKAKGKDLWGIREFNEASTAVERRTHRISRRRRQREQVRIGLLKDYFHDTIGEVDPDFFQRLANSKYHLEDKDTEVRYKNNVFNDDDYTDKDYFDQYPTIYHLRKELIESTDKHDVRLVFLALLNMFKHRGHFLNSGLGENSGENNINNAYLELTNLLSEFTQYNLNETIDGKKIEDLLSRRDMSRTRKAEGLAEILGVDYKNKPYKELIRGLCGLKFNACAIFPEIQSDEVPKVDICLSEASFDEKSDEIANILGEDYFEIIMAMKDIYDIGSLAGIMKGHNYLSQARVASYEKHKEDLKLLKNVIRKYCNKEDYDNFFNSEADGSYASYVGSYNSKTKQRRVGNKRSSEELYKAIKKLLKNVPAEDADVQRILMSIENETFLPKQLTASNGVIPNQVHAKEMKKILSNAERYLPFLREKDETGLSVSEKIMKLFSFQIPYYVGPTTEKSNKDGGNGWVVRKEEGQVLPWNIDEKIDMKATSEAFISRMVRRCTYISGEPVLPKSSLEYQSFCVLNEINNIKIDGERISVELKQDIYKEVFQKGKRVTKKQLCKYLHTRGIIEAEEQVTGIDVTINNALTTYGKFKAILGDDISKDSVQKMVEDIVFWCTVYGDSKKFLKDRIGEKYGEKLTKEQIKRIVGFKFKDWGNLSKNFLELSGADVSTGESVSIIRALWNDNLNLMELINSRLYNYKERLAEYQNTMMKTLSDIEAEDLDEYYFSAPVKRMIWQTILIIKELVKVLGCEPDRIFVEMTRRPDERKMRTESRRKKFEELYKKVKDEDVDWMKVIAHADETGSIRSKKMYLYLTQKGRCMYTGKHIELSDLFNNNLYDIDHVYPRHFVKDDNIDNNLVLVCKEKNAHKSDIYPLEDEILASQKNMWSELRRSGFITEEKYNRLIGRNSFTDEQKAGFIARQLVETSQGTKGVANILQQLLPESKIVYAKASNVSEFRNTRDIPKSRLINEFHHAHDAYLNIVVGNVYYVKFTQNPLNFIKNDYDRDKTKNNYNLSKMFDWDVERNGEVAWIAQKKDGEAGTIATVKKVLGRNTPLMTRYSFEKKGRLTKEERHSAIDAKKDQYLPFKTSDSKMQDVTKYGGFNDIAGTYFFLVEHTEKKNRIRTIESVPLYIAKKIDQNPIELEKYCEQVLGLIDFDIRVRKIKIGSLIKRNNYFCYITGKKPGRLIVRNAVNLCLKNEWIKYISKLEKYNEKNVIDEMITKEKNQLLYLELINKFRNSIFSKRPNGIGKKLEDARNIFNDLSTKEQCIVLYKVLQLSAVMGYEADLSLIKYSKSAGAMPISKKIGDEDIYLINQSVTGLYEKKINLRTV

SEQ ID NO: 21744 - protein, 1358 aa, unidentified
  REGION 1..1358: note = Cas Enzyme sequence
MAAFKYYLGLDMGTNSVGWAVTDPNYNLLKAKGKDLWGIREFNEASTAVERRTHRISRRRRQREQVRIGLLKDYFHDAIGEVDPDFFQRLANSKYHLEDKDTEVRYKNNVFNDDDYTDKDYFDQYPTIYHLRKELIESTDKHDVRLVFLALLNMFKHRGHFLNSGLGENSGENNINNAYLELANLLSELTQYNLNETIECKKIEDVLSRRDMSRTRKAEGLAEILGVDYKNKPYKELIRGLCGLKFNACAIFPEIQSDEVPKLDICLSEASFDEKSDEIANILGEDYFEIIMAMKDIYDIGSLAGIRKGYNYLSQARVASYERHKEDLKLLKEVIKKYCSKDDYDSFFNSDADGSYASYVGSYNSKTKQRRVGNKRSSEELYKAIKKLLKNVPAEDADVQRILMSIENETFLPKQLTASNGVIPNQVHAKEMKKILSNTERYLPFLREKDETGLSVSEKIMKLFSFQIPYYVGPTTEKSNKDGGNGWVVRKEEGQVLPWNIDEKIDMKATSEAFISRMVRRCTYISGEPVLPKSSLEYQSFCVLNEINNIKIDGERISVQLKQDIYKEVFQKGKRVTKKQLCKYLHTRGIIEAEEQVTGIDVTINNALTTYGKFKAILGDDISKDSVQKMVEDIVFWCTVYGDSKKFLKDRIEEKYGEKLTKEQIKRIVGFKFKDWGNLSKNFLELNGADVSTGESVSIIRALWNNNLNLMELINSRLYNYKERLAEYQNTMMKTLSDIEAEDLDEYYFSAPVKRMIWQTILIIKELVKVLGCEPDRIFVEMTRRPDERKMRTESRRKKFEELYKKVKDEDVDWMKVIAHADETGSIRSKKMYLYLTQKGRCMYTGKHIELSDLFNNNLYDIDHIYPRHFVKDDNIDNNLVLVCKEKNAHKSDIYPLEDEILASQKNMWSELRRSELRRSGFITEEKYNRLIGRNPFTDEQKAGFIARQLVETSQGTKGVANILQQLLPESKIVYAKASNVSEFRNTRDIPKSRLINEFHHAHDAYLNIVVGNVYYVKFTQNPLNFIKNDYDRDKTKNNYNLSKMFDWDVERNGEVAWIAQKKDGEAGTIATVKKVLERNTPLMTRYSFEKKGRLTKEERHSAIDAKKDQYLPFKTSDSKMQDVTKYGGFNDIAGTYFFLVEHTEKKNRIRTIESVPLYIAKKIDQNPIELEKYCEQVLGLVDFDIRVRKIKIGSLIKRNNYFCYITGKKPGRLIVRNAVNLCLKNEWIKYISKLEKYNEKNVIDEMITKEKNQLLYLELINKFRNSIFSKRPNGIGKKLEDARNIFNDLSTEEQCIVLYKVLQLSAVMGYEADLSLIKYSKSAGAMQISKKIGDEDIYLINQSVTGLYEKKINLRTV

SEQ ID NO: 21745 - protein, 1353 aa, unidentified
  REGION 1..1353: note = Cas Enzyme sequence
MAAFKYYLGLDMGTNSVGWAVTDPNYNLFKAKGKDLWGIREFNEASTAVERRTHRISRRRRQREQVRIGLLKDYFHDTIGEVDPDFFQRLANSKYHLEDKDTEVRYKNNVFNDDDYTDKDYFDQYPTIYHLRKELVESTDKHDVRLVFLALLNMFKHRGHFLNSGLGENSGENNINNAYLELANLLSELTQYNLNETIDGKKIEDLLSRRDMSRTRKAEGLAEILGVDYKNKPYKELIRGLCGLKFNACAIFPEIQSDEVPKVDICLSEASFDEKSDEIANILGEDYFEIIMAMKDIYDIGSLAGIMKGHNYLSQARVASYEKHKEDLKLLKNVIRKYCNKEDYDNFFNSEADGSYASYVGSYNSKTKQRRVGNKRSAEELYKAIKKLLKNVPAEDADVQRILMSIENETFLPKQLTASNGVIPNQVHAKEMKKILSNAERYLPFLREKDETGLSVSEKILKLFSFQIPYYVGPTTEKSNKDGGNGWVVRKEEGQVLPWNIDEKIDMKATSEAFISRMVRRCTYISGEPVLPKASLEYQSFCVLNEINNIKIDGERISVELKQDIYKEVFQKGKRVTKKQLCKYLHTRGIIEAEEQVTGIDVTINNALTTYGKFKAILGDDISKDSVQKMIEDIVFWCTVYGDSKKFLKDRIEEKYGEKLTKEQIKRIVGFKFKDWGNLSKNFLELSGADVSTGESVSIIRALWNDNLNLMELINSRLYNYKERLAEYQNTMMKTLSDIEAEDLDEYYFSAPVKRMIWQTILIIKELVKVLGCEPDRIFVEMTRRPDERKMRTESRRKKFEELYKKVKDEDVDWMKVIAHADETGSIRSKKMYLYLTQKGRCMYTGKHIELSDLFNNNLYDIDHVYPRHFVKDDNIDNNLVLVCKEKNAHKSDIYPLEDEILASQKNMWSELRRSGFITEEKYNRLIGRNSFTDEQKAGFIARQLVETSQGTKGVANILQQLLPESKIVYAKASNVSEFRNTRDIPKSRLINEFHHAHDAYLNIVVGNVYYVKFTQNPLNFIKNDYDRDKTKNNYNLSKMFDWDVERNGEVAWIAQKKDGEAGTIATVKKVLERNTPLMTRYSFEKKGRLTKEERHSAIDAKKDQYLPFKTSDSKMQDVTKYGGFNDIAGTYFFLVEHTEKKNRIRTIESVPLYIAKKIDQNPIELEKYCEQVLGLVDFDIRVRKIKIGSLIKRNNYFCYITGKKPGRLIVRNAVNLCLKNEWIKYISKLEKYNEKNVIDEMITKEKNQLLYLELINKFRNSIFSKRPNGIGKKLEDARNIFNDLSTEEQCIVLYKVLQLSAVMGYEADLSLIKYSKSAGAMQISKKIGDEDIYLINQSVTGLYEKKINLRTV

SEQ ID NO: 21746 - protein, 1353 aa, unidentified
  REGION 1..1353: note = Cas Enzyme sequence
MAAFKYYLGLDMGTNSVGWAVTDPNYNLFKAKGKDLWGIREFNEASTAVERRTHRISRRRRQREQVRIGLLKDYFHDTIGEVDPDFFQRLANSKYHLEDKDTEVRYKNNVFNDDDYTDKDYFDQYPTIYHLRKELIESTDKHDVRLVFLALLNMFKHRGHFLNSGLGENSGENNINNAYLELTNLLSEFTQYNLNETIDGKKIEDLLSRRDMSRTRKAEGLAEILGVDYKNKPYKELIRGLCGLKFNACAIFPEIQSDEVPKLDICLSEASFDEKSDEIANILGEDYFEIIMAMKDIYDIGSLAGIMKGHNYLSQARVASYEKHKEDLKLLKNVIRKYCSKEDYDNFFNSEADGSYASYVGSYNSKTKQRRVGNKRSSEELYKAIKKLLKNVPAEDADVQRILMSIENETFLPKQLTASNGVIPNQVHAKEMKKILSNAERYLPFLREKDETGLSVSEKIMKLFSFQIPYYVGPTTEKSNKDGGNGWVVRKEEGQVLPWNIDEKIDMKATSEAFISRMVRRCTYISGEPVLPKSSLEYQSFCVLNEINNIKIDGERISVQLKQDIYKEVFQKGKRVTKKQLCKYLHTRGIIEAEEQVTGIDVTINNALTTYGKFKAILGDDISKDSVQKMVEDIVFWCTVYGDSKKFLKDRIEEKYGEKLTKEQIKRIVGFKFKDWGNLSKNFLELNGADVSTGESVSIIRALWNNNLNLMELINSRLYNYKERLAEYQNTMMKTLSDIEAEDLDEYYFSAPVKRMIWQTILIIKELVKVLGCEPDRIFVEMTRRPDERKMRTESRRKKFEELYKKVKDEDVDWMKVIAHADETGSIRSKKMYLYLTQKGRCMYTGKHIELSDLFNNNLYDIDHVYPRHFVKDDNIDNNLVLVCKEKNAHKSDIYPLEDEILASQKNMWSELRRSGFITEEKYNRLIGRNPFTDEQKAGFIARQLVETSQGTKGVANILQQLLPESKIVYAKASNVSEFRNTRDIPKSRLINEFHHAHDAYLNIVVGNVYYVKFTQNPLNFIKNDYDRDKTKNNYNLSKMFDWDVERNGEVAWIAQKKDGEAGTIATVKKVLERNTPLMTRYSFEKKGRLTKEERHSAIDAKKDQYLPFKTSDSKMQDVTKYGGFNDIAGTYFFLVEHTEKKNRIRTIESVPLYIAKKIDQNPIELEKYCEQVLGLVDFDIRVRKIKIGSLIKRNNYFCYITGKKPGRLIVRNAVNLCLKNEWIKYISKLEKYNEKNVIDEMITKEKNQLLYLELINKFRNSIFSKRPNGIGKKLEDARNIFNDLSTEEQCIVLYKVLQLSAVMGYEADLSLIKYSKSAGAMQISKKIGDEDIYLINQSVTGLYEKKINLRTV

SEQ ID NO: 21747 - protein, 995 aa, unidentified
  REGION 1..995: note = Cas Enzyme sequence
  REGION 334..337: note = misc_feature - Xaa can be any naturally occurring amino acid
VGSYNSKTKQRRVGNKRSSEELYKAIKKLLKNVPAEDADVQRILMSIENETFLPKQLTASNGVIPNQVHAKEMKKILSNAERYLPFLREKDETGLSVSEKIMKLFSFQIPYYVGPTTEKSNKDGGNGWVVRKEEGQVLPWNIDEKIDMKATSEAFISRMVRRCTYISGEPVLPKSSLEYQSFCVLNEINNIKIDGERISVQLKQDIYKEVFQKGKRVTKKQLCKYLHTRGIIEAEEQVTGIDVTINNALTTYGKFKAILGDDISKDSVQKMVEDIVFWCTVYGDSKKFLKDRIEEKYGEKLTKEQIKRIVGFKFKDWGNLSKNFLELNGADVSXXXXSVSIIRALWNNNLNLMELINSRLYNYKERLAEYQNTMMKTLSDIEAEDLDEYYFSAPVKRMIWQTILIIKELVKVLGCEPDRIFVEMTRRPDERKMRTESRRKKFEELYKKVKDEDVDWMKVIAHADETGSIRSKKMYLYLTQKGRCMYTGKHIELSDLFNNNLYDIDHVYPRHFVKDDNIDNNLVLVCKEKNAHKSDIYPLEDEILASQKNMWSELRRSGFITEEKYNRLIGRNSFTDEQKAGFIARQLVETSQGTKGVANILQQLLPESKMVYAKASNVSEFRNTRDIPKSRLINEFHHAHDAYLNIVVGNVYYVKFTQNPLNFIKNDYDRDKTKNNYNLSKMFDWDVERNGEVAWIAQKKDGEAGTIATVKKVLGRNTPLMTRYSFEGKGGLTNETLYSAKKAKEEGYIPFKSSDEKMKDVTKYGGFTSVTGAYFFLVEHTEKKKRSRTIESVPLYLAQKIEQNPHELEKYCEQVLGLIDFDIRVRKIKIGSLVKRNGYFFYITGKNGKQLIVRNAVNMYLKREWVKYISKLEKAVDKNIVEEVIAKDKNELLYSELINKFKTGIFANRPNPVGDKLDKAKEKFLSLDIEQQCTVLCQILQLSSILGSASDMTLLGESAHCGKMQISKKIGDEDIYLINQSVTGLYEKKINLRIV

SEQ ID NO: 21748 - protein, 1353 aa, unidentified
  REGION 1..1353: note = Cas Enzyme sequence
MAAFKYYLGLDMGTNSVGWAVTDPNYNLFKAKGKDLWGIREFNEASTAVERRTHRISRRRRQREQVRIGLLKDYFHDAIGEVDPDFFQRLANSKYHLEDKDTEVRYKNNVFNDDDYTDKDYFDQYPTIYHLRKELIESTDKHDVRLVFLALLNMFKHRGHFLNSGLGENSGENNINNAYLELTNLLSEFTQYNLSETIDGKKIEDLLSRRDMSRTRKAEGLAEILGVDYKNKPYKELIRGLCGLKFNACAIFPEIQSDEVPKVDICLSEASFDEKSDEIANILGEDYFEIIMAMKDIYDMGSLAGIMKGHNYLSQARVASYEKHKEDLKLLKNVIRKYCSKEDYDNFFNSEADGSYASYVGSYNSKTKQRRVGNKRSSEELYKAIKKLLKNVPAEDADVQRILMSIENETFLPKQLTASNGVIPNQVHVKEMKKILSNAERYLPFLREKDETGLSVSEKIMKLFSFQIPYYVGPTTEKSNKDGGNGWVVRKEEGQVLPWNIDEKIDMKATSEAFISRMVRRCTYISGEPVLPKSSLEYQSFCVLNEINNIKIDGEKISVELKQDIYKEVFQKGKRVTKKQLCKYLHTRGIIEAEEQVTGIDVTINNALTTYGKFKAILGDDISKDSVQKMIEDIVFWCTVYGDSKKFLKDRIEEKYGEKLTKEQIKRIVGFKFKDWGNLSKNFLELSGADVSTGESVSIIRALWNDNLNLMELINSRLYNYKERLAEYQNTMMKTLSDIEAEDLDEYYFSAPVKRMIWQTILIIKELVKVLGCEPDRIFVEMTRRPDERKMRTESRRKKFEELYKKVKDEDVDWMKVIAHADETGSIRSKKMYLYLTQKGRCMYTGKHIELSDLFNNNLYDIDHVYPRHFVKDDNIDNNLVLVCKEKNAHKSDIYPLEDEILASQKNMWSELRRSGFITEEKYNRLIGRNSFTDEQKAGFIARQLVETSQGTKGVANILQQLLPESKIVYAKASNVSEFRNTRDIPKSRLINEFHHAHDAYLNIVVGNVYYVKFTQNPLNFIKNDYDRDKTKNNYNLSKMFDRDVERNGEVAWIAQKKDGEAGTIATVKKVLGRNTPLMTRYSFEGKGGLTNETLYSAKKAKEEGYIPFKSSDEKMKDVTKYGGFTSVTGAYFFLVEHTEKKKRSRMIESVPLYLAQKIEQNPHELEKYCEQVLGLIDFDIRVRKIKIGSLVKRNGYFFYITGKNGKQLIVRNAVNMYLKREWVKYISKLEKAVDKNIVEEVIAKDKNELLYSELINKFKTGIFANRPNPVGDKLDKAKEKFLSLDIEQQCTVLCQILQLSSILGSASDMTLLGESAHCGKMQISKKIGDEDIYLINQSVTGLYEKKINLRIV

SEQ ID NO: 21749 - protein, 1326 aa, unidentified
  REGION 1..1326: note = Cas Enzyme sequence
LFKAKGKDLWGIREFNEASTAVERRTHRISRRRRQREQVRIGLLKDYFHDAIGEVDPDFFQRLANSKYHLEDKDTEVRYKNNVFNDDDYTDKDYFDQYPTIYHLRKELIESTDKHDVRLVFLALLNMFKHRGHFLNSGLGENGGENNINNAYLELTNLLSEFTQYNLNETIDGKKIEDLLSRRDMSRTRKAEGLAEILGVDYKNKPYKELIRGLCGLKFNACAIFPEIQSDEVPKLDICLSEASFDEKSDEIANILGEDYFEIIMAMKDIYDIGSLAGIRKGYNYLSQARVASYERHKEDLKLLKEVIKKYCSKDDYDSFFNSDADGSYASYVGSYNSKTKQRRVGNKRSSEELYKAIKKLFKNVPVEDADVQSILTSIENETFLPKQLTVSNGVIPNQVHAEEMKKILSNAENYLPFLKEKDETGLSVSEKILKLFSFQIPYYVGPTTEKSNKDGGNGWVVRKEEGQVLPWNIDEKIDMKATSEAFISRMVRRCTYISGEPVLPKASLEYQSFCVLNEINNIKIDGERISVELKQDIYKEVFQKGKRVTKKQLCKYLHTRGIIEAEEQVTGIDVTINNALTTYGKFKAILGDDISKDSVQKMVEDIVFWCTVYGDSKKFLKDRIEEKYGEKLTKEQIKRIVGFKFKDWGNLSKNFLELNGADVSTGESVSIIRALWNNNLNLMELINSRLYNYKERLAEYQNTMMKTLSDIEAEDLDEYYFSAPVKRMIWQTILIIKELVKVLGCEPDRIFVEMTRRPDERKMRTESRRKKFEELYKKVKDEDVDWMKVIAHADETGSIRSKKMYLYLTQKGRCMYTGKHIELSDLFNNNLYDIDHVYPRHFVKDDNIDNNLVLVCKEKNAHKSDIYPLEDEILASQKNMWSELRRSGFITEEKYNRLIGRNSFTDEQKAGFIARQLVETSQGTKGVANILQQLLPESKMVYAKASNVSEFRNTRDIPKSRLINEFHHAHDAYLNIVVGNVYYVKFTQNPLNFIKNDYDRDKTKNNYNLSKMFDWDVERNGEVAWIAQKKDGEAGTIATVKKVLGRNTPLMTRYSFEGKGGLTNETLYSAKKAKEEGYIPFKSSDEKMKDVTKYGGFTSVTGAYFFLVEHTEKKKRSRTIESVPLYLAQKIEQNPHELEKYCEQVLGLIDFDIRVRKIKIGSLVKRNGYFFYITGKNGKQLIVRNAVNMYLKREWVKYISKLEKAVDKNIVEEVIAKDKNELLYSELINKFKTGIFANRPNPVGDKLDKAKEKFLSLDIEQQCTVLCQILQLSSILGSASDMTLLGESAHCGKMQISKKIGDEDIYLINQSVTGLYEKKINLRIV

SEQ ID NO: 21750 - protein, 1353 aa, unidentified
  REGION 1..1353: note = Cas Enzyme sequence
MAAFKYYLGLDMGTNSVGWAVTDPNYNLFKAKGKDLWGIREFNEASTAVERRTHRISRRRRQREQVRIGLLKDYFHDAIGEVDPDFFQRLANSKYHLEDKDTEVRYKNNVFNDDDYTDKDYFDQYPTIYHLRKELIESTDKHDVRLVFLALLNMFKHRGHFLNSGLGENGGENNINNAYLELTNLLSEFTQYNLNETIDGKKIEDLLSRRDMSRTRKAEGLAEILGVDYKNKPYKELIRGLCGLKFNACAIFPEIQSDEVPKLDICLSEASFDEKSDEIANILGEDYFEIIMAMKDIYDIGSLAGIRKGYNYLSQARVASYERHKEDLKLLKEVIKKYCSKDDYDSFFNSDADGSYASYVGSYNSKTKQRRVGNKRSSEELYKAIKKLFKNVPVEDADVQSILTSIENETFLPKQLTVSNGVIPNQVHAEEMKKILSNAENYLPFLKEKDETGLSVSEKILKLFSFQIPYYVGPTTEKSNKDGGNGWVVRKEEGQVLPWNIDEKIDMKATSEAFISRMVRRCTYISGEPVLPKASLEYQSFCVLNEINNIKIDGERISVELKQDIYKEVFQKGKRVTKKQLCKYLHTRGIIEAEEQVTGIDVTINNALTTYGKFKAILGDDISKDSVQKMIEDIVFWCTVYGDSKKFLKDRIEEKYGEKLTKEQIKRIVGFKFKDWGNLSKNFLELSGADVSTGESVSIIRALWNDNLNLMELINSRLYNYKERLAEYQNTMMKTLSDIEAEDLDEYYFSAPVKRMIWQTILIIKELVKVLGCEPDRIFVEMTRRPDERKMRTESRRKKFEELYKKVKDEDVDWMKVIAHADETGSIRSKKMYLYLTQKGRCMYTGKHIELSDLFNNNLYDIDHVYPRHFVKDDNIDNNLVLVCKEKNAHKSDIYPLEDEILASQKNMWSELRRSGFITEEKYNRLIGRNPFTDEQKAGFIARQLVETSQGTKGVANILQQLLPESKIVYAKASNVSEFRNTRDIPKSRLINEFHHAHDAYLNIVVGNVYYVKFTQNPLNFIKNDYDRDKTKNNYNLSKMFDWDVERNGEVAWIAQKKDGEAGTIATVKKVLERNTPLMTRYSFEKKGRLTKEERHSAIDAKKDQYLPFKTSDSKMQDVTKYGGFNDIAGTYFFLVEHTEKKNRIRTIESVPLYIAKKIDQNPIELEKYCEQVLGLVDFDIRVRKIKIGSLIKRNNYFCYITGKKPGRLIVRNAVNLCLKNEWIKYISKLEKYNEKNVIDEMITKEKNQLLYLELINKFRNSIFSKRPNGIGKKLEDARNIFNDLSTEEQCIVLYKVLQLSAVMGYEADLSLIKYSKSAGAMQISKKIGDEDIYLINQSVTGLYEKKINLRTV

SEQ ID NO: 21751 - protein, 1353 aa, unidentified
  REGION 1..1353: note = Cas Enzyme sequence
MAAFKYYLGLDMGTNSVGWAVTDPNYNLFKAKGKDLWGIREFNEASTAVERRTHRISRRRRQREQVRIGLLKDYFHDAIGEVDPDFFQRLANSKYHLEDKDTEVRYKNNVFNDDDYTDKDYFDQYPTIYHLRKELIESTDKHDVRLVFLALLNMFKHRGHFLNSGLGENGGENNINNAYLELTNLLSEFTQYNLNETIDGKKIEDLLSRRDMSRTRKAEGLAEILGVDYKNKPYKELIRGLCGLKFNACAIFPEIQSDEVPKLDICLSEASFDEKSDEIANILGEDYFEIIMAMKDIYDIGSLAGIRKGYNYLSQARVASYERHKEDLKLLKEVIKKYCSKDDYDSFFNSDADGSYASYVGSYNSKTKQRRVGNKRSSEELYKAIKKLFKNVPVEDADVQSILTSIENETFLPKQLTVSNGVIPNQVHAEEMKKILSNAENYLPFLKEKDETGLSVSEKILKLFSFQIPYYVGPTTEKSNKDGGNGWVVRKEEGQVLPWNIDEKIDMKATSEAFISRMVRRCTYISGEPVLPKASLEYQSFCVLNEINNIKIDGERISVELKQDIYKEVFQKGKRVTKKQLCKYLHTRGIIEAEEQVTGIDVTINNALTTYGKFKAILGDDISKDSVQKMIEDIVFWCTVYGDSKKFLKDRIEEKYGEKLTKEQIKRIVGFKFKDWGNLSKNFLELSGADVSTGESVSIIRALWNDNLNLIELINSRLYNYKERLAEYQNTMMKTLSDIEAEDLDEYYFSAPVKRMIWQTILIIKELVKVLGCEPDRIFVEMTRRPDERKMRTESRRKKFEELYKKVKDEDVDWMKVIAHADETGSIRSKKMYLYLTQKGRCMYTGKHIELSDLFNNNLYDIDHVYPRHFVKDDNIDNNLVLVCKEKNAHKSDIYPLEDEILASQKNMWSELRRSGFITEEKYNRLIGRNPFTDEQKAGFIARQLVETSQGTKGVANILQQLLPESKIVYAKASNVSEFRNTRDIPKSRLINEFHHAHDAYLNIVVGNVYYVKFTQNPLNFIKNDYDRDKTKNNYNLSKMFDWDVERNGEVAWIAQKKDGEAGTIATVKKVLERNTPLMTRYSFEKKGRLTKEERHSAIDAKKDQYLPFKTSDSKMQDVTKYGGFNDIAGTYFFLVEHTEKKNRIRTIESVPLYIAKKIDQNPIELEKYCEQVLGLVDFDIRVRKIKIGSLIKRNNYFCYITGKKPGRLIVRNAVNLCLKNEWIKYISKLEKYNEKNVIDEMITKEKNQLLYLELINKFRNSIFSKRPNGIGKKLEDARNIFNDLSTEEQCIVLYKVLQLSAVMGYEADLSLIKYSKSAGAMQISKKIGDEDIYLINQSVTGLYEKKINLRTV

SEQ ID NO: 21752 - protein, 1353 aa, unidentified
  REGION 1..1353: note = Cas Enzyme sequence
MAAFKYYLGLDMGTNSVGWAVTDPNYNLFKTKGKDLWGIREFNEASTAVERRTHRISRRRRQREQVRIGLLKDYFHDAIGEVDPDFFQRLANSKYHLEDKDTEVRYKNNVFNDDDYTDKDYFDQYPTIYHLRKELIESTDKHDVRLVFLALLNMFKHRGHFLNSGLGENGGENNINNAYLELTNLLSEFTQYNLNETIDGKKIEDLLSRRDMSRTRKAEGLAEILGVDYKNKPYKELIRGLCGLKFNACAIFPEIQSDEVPKLDICLSEASFDEKSDEIANILGEDYFEIIMAMKDIYDIGSLAGIRKGYNYLSQARVASYERHKEDLKLLKEVIKKYCSKDDYDSFFNSDADGSYASYVGSYNSKTKQRRVGNKRSSEELYKAIKKLFKNVPVEDADVQSILTSIENETFLPKQLTVSNGVIPNQVHAEEMKKILSNAENYLPFLKEKDETGLSVSEKILKLFSFQIPYYVGPTTEKSNKDGGNGWVVRKEEGQVLPWNIDEKIDMKATSEAFISRMVRRCTYISGEPVLPKASLEYQSFCVLNEINNIKIDGERISVELKQDIYKEVFQKGKRVTKKQLCKYLHTRGIIEAEEQVTGIDVTINNALTTYGKFKAILGDDISKDSVQKMIEDIVFWCTVYGDSKKFLKDRIEEKYGEKLTKEQIKRIVGFKFKDWGNLSKNFLELSGADVSTGESVSIIRALWNDNLNLMELINSRLYNYKERLAEYQNTMMKTLSDIEAEDLDEYYFSAPVKRMIWQTILIIKELVKVLGCEPDRIFVEMTRRPDERKMRTESRRKKFEELYKKVKDEDVDWMKVIAHADETGSIRSKKMYLYLTQKGRCMYTGKHIELSDLFNNNLYDIDHVYPRHFVKDDNIDNNLVLVCKEKNAHKSDIYPLEDEILASQKNMWSELRRSGFITEEKYNRLIGRNPFTDEQKAGFIARQLVETSQGTKGVANILQQLLPESKIVYAKASNVSEFRNTRDIPKSRLINEFHHAHDAYLNIVVGNVYYVKFTQNPLNFIKNDYDRDKTKNNYNLSKMFDWDVERNGEVAWIAQKKDGEAGTIATVKKVLERNTPLMTRYSFEKKGRLTKEERHSAIDAKKDQYLPFKTSDSKMQDVTKYGGFNDIAGTYFFLVEHTEKKNRIRTIESVPLYIAKKIDQNPIELEKYCEQVLGLVDFDIRVRKIKIGSLIKRNNYFCYITGKKPGRLIVRNAVNLCLKNEWIKYISKLEKYNEKNVIDEMITKEKNQLLYLELINKFRNSIFSKRPNGIGKKLEDARNIFNDLSTEEQCIVLYKVLQLSAVMGYEADLSLIKYSKSAGAMQISKKIGDEDIYLINQSVTGLYEKKINLRTV

SEQ ID NO: 21753 - protein, 1353 aa, unidentified
  REGION 1..1353: note = Cas Enzyme sequence
MAAFKYYLGLDMGTNSVGWAVTDPNYNLFKAKGKDLWGIREFNEASTAVERRTHRISRRRRQREQVRIGLLKDYFHDAIGEVDPDFFQRLANSKYHLEDKDTEVRYKNNVFNDDDYTDKDYFDQYPTIYHLRKELIESTDKHDVRLVFLALLNMFKHRGHFLNSGLGENGGENNINNAYLELTNLLSEFTQYNLNETIDGKKIEDLLSRRDMSRTRKAEGLAEILGVDYKNKPYKELIRGLCGLKFNACAIFPEIQSDEVPKLDICLSEASFDEKSDEIANILGEDYFEIIMAMKDIYDIGSLAGIMKGHNYLSQARVASYEKHKEDLKLLKNVIRKYCSKEDYDNFFNSEADGSYASYVGSYNSKTKQRRVGNKRSSEELYKAIKKLLKNVPAEDADVQRILMSIENETFLPKQLTASNGVIPNQVHAKEMKKILSNAERYLPFLREKDETGLSVSEKIMKLFSFQIPYYVGPTTEKSNKDGGNGWVVRKEEGQVLPWNIDEKIDMKATSEAFISRMVRRCTYISGEPVLPKSSLEYQSFCVLNEINNIKIDGERISVQLKQDIYKEVFQKGKRVTKKQLCKYLHTRGIIEAEEQVTGIDVTINNALTTYGKFKAILGDDISKDSVQKMVEDIVFWCTVYGDSKKFLKDRIEEKYGEKLTKEQIKRIVGFKFKDWGNLSKNFLELNGADVSTGESVSIIRALWNDNLNLMELINSRLYNYKERLAEYQNTMMKTLSDIEAEDLDEYYFSAPVKRMIWQTILIIKELVKVLGCEPDRIFVEMTRRPDERKMRTESRRKKFEELYKKVKDEDVDWMKVIAHADETGSIRSKKMYLYLTQKGRCMYTGKHIELSDLFNNNLYDIDHVYPRHFVKDDNIDNNLVLVCKEKNAHKSDIYPLEDEILASQKNMWSELRRSGFITEEKYNRLIGRNPFTDEQKAGFIARQLVETSQGTKGVANILQQLLPESKIVYAKASNVSEFRNTRDIPKSRLINEFHHAHDAYLNIVVGNVYYVKFTQNPLNFIKNDYDRDKTKNNYNLSKMFDWDVERNGEVAWIAQKKDGEAGTIATVKKVLERNTPLMTRYSFEKKGRLTKEERHSAIDAKKDQYLPFKTSDSKMQDVTKYGGFNDIAGTYFFLVEHTEKKNRIRTIESVPLYIAKKIDQNPIELEKYCEQVLGLVDFDIRVRKIKIGSLIKRNNYFCYITGKKPGRLIVRNAVNLCLKNEWIKYISKLEKYNEKNVIDEMITKEKNQLLYLELINKFRNSIFSKRPNGIGKKLEDARNIFNDLSTEEQCIVLYKVLQLSAVMGYEADLSLIKYSKSAGAMQISKKIGDEDIYLINQSVTGLYEKKINLRTV

SEQ ID NO: 21754 - protein, 1104 aa, unidentified
  REGION 1..1104: note = Cas Enzyme sequence
MSRYVLGLDIGITSVGYGVIDIDNNLFVDYGVRLFKEGTAAENETRRTKRGSRRLKRRKSNRLNDMKNLLKENELYFEDYRNYNPYEVRVKGLKEKLLPEELCTAIMHITKSRGTTLEALADESQDDEGTKATLSKNAKELSNGKYVCEVQLDRLNNNHRIRGAENNFKTEDYVKELKEILKHQDLNEELCNQIIEIVSRRRRYDQGPGSEKSPTPYGSYRLVDGVLKHVNLIDEMRGRCSVYPNEFRAPKQSYTAELFNLLNDLNNLTIKGEKITVEEKKKVIAVVNEKGNITVKQLLKLLDAQEDEVTGFRIDKNDKPLITEFKGYSKVLKVFKKYNQQELLEDKLIVDQVIDICTKSKGIDERKKDIKELYPEFDNELIEELASIKGVSAYHSLSFKAMHMINKEMLTTEMNQIQVLHEIEMFDKNRKSLKGKKNIEPDEEAILSPVAKRAHRETFKVINALRKKYGEFDSIVIEMTRDKNSKEQVKRINDSQKRFKSENDRVDGIIKNSGIDPERVNGKTKTKIRLYLQQDCKTAYTQQDIDLHTLIFDDKAYEIDHIIPISVSLDDSLTNKVLASRLENQQKGNLTPMMAYLKGKFTGGNLEKYKLFVSSNKNFNGKKRNNLLTEQDITKEDVARKFINRNLVDTSYACRTVLNTLQRYFKDNEIDTKVHTIRGQSTNIFRKRINLQKDREQDYFHHAIDALIVASLKKMNIVNSYLMHYNYSDLYDEETGEVFDVLPDKQFIDQRYISFISDLKNIYQESNQYNLGYITQEQMHYPLIKVSHKIDTKPNRQIADETIYSTRNIEGQDMLVEKIKNIYDPKEKKAIELVNNIINDDTDKYIMKHKDPQTFEKIKEVVLNHFNDYKDSKEYYVIDKKGKYSLKEESPLTSYYNENGTITKYSKKNNGPAITSMKFYSEKLGNHLAITSNYNTNNKKVILKQISPYRTDFYVSPEGKYKFVTIRYKDVFYKETIHKFVIDENWYHEEKTKKGIQDGWKFVCSMHRDELIGLIKPEGKKFVYDASINGGQTQYHNGKHYEILKFTATNDDKANIFEVKPINTICKKQLRPSAGSMLHIQKFATDVLGNIYEVKDNRLKLEFD

SEQ ID NO: 21755 - protein, 1104 aa, unidentified
  REGION 1..1104: note = Cas Enzyme sequence
MSRYVLGLDIGITSVGYGVIDVDNDLFVDYGVRLFKEGTAAENETRRTKRGSRRLKRRKSNRLNDMKNLLKKNDLYFDNYRNYNPYEMRVKGLNEKLSSKELCTAIMHITKSRGTTLEVLADESQDDEGTKATLSKNAKELSNGKYICEVQLDRLNKDHKVRGTENNFKTEDYVKELKEILKHQDLNEELCNQIIEIVSRRRRYDQGPGSEKSPTPYGSYRLVDGVLKHVNLIDEMRGRCSVYPNEFRAPKQSYTAELFNLLNDLNNLTIKGEKITVEEKKKVIAVVNEKGNITVKQLLKLLDAQEDEVTGFRIDKNDKPLITEFKGYSKVLKVFKKYNQQELLEDKLIVDQVIDICTKSKGIDERKKDIKELYPEFDNELIEELASIKGVSAYHSLSFKAMHMINKEMLTTEMNQIQVLHEIEMFDKNRKSLKGKKNIEPDEEAILSPVAKRAHRETFKVINALRKKYGEFDSIVIEMTRDKNSKEQVKRINDSQKRFKSENDRVDGIIKNSGIDPERVNGKTKTKIRLYLQQDCKTAYTQQDIDLHTLIFDDKAYEIDHIIPISVSLDDSLTNKVLASRLENQQKGNLTPMMAYLKGKFTGGNLEKYKLFVSSNKNFNGKKRNNLLTEQDITKEDVARKFINRNLVDTSYACRTVLNTLQRYFKDNEIDTKVHTIRGQSTNIFRKRINLQKDREQDYFHHAIDALIVASLKKMNIVNSYLMHYNYSDLYDEETGEVFDVLPDKQFIDQRYISFISDLKNIYQESNQYNLGYITQEQMHYPLIKVSHKIDTKPNRQIADETIYSTRNIEGQDMLVEKIKNIYDPKEKKAIELVNNIINDDTDKYIMKHKDPQTFEKIKEVILNHFNDYKDSKEYYVIDKKGKYSLKEESPLTSYYNENGTITKYSKKNNGPAITSMKFYSEKLGNHLAITSNYNTNNKKVILKQISPYRTDFYVSPEGKYKFVTVRYKDVFYKETIHKFVIDENWYHEEKNKKGILEDWKFVCSMHRDELIGLIKPEGKKFVYDASINGGQTQYHDGKHYEILKFTATNNDKANMFEVKPINTICKKQLMPSVGPFIKIQKFATDVLGNIYEVKDNRLKLEFD

SEQ ID NO: 21756 - protein, 1104 aa, unidentified
  REGION 1..1104: note = Cas Enzyme sequence
MSRYVLGLDIGITSVGYGVIDIDNNLFVDYGVRLFKEGTAAENETRRTKRGSRRLKRRKSNRLNDMKNLLKENELYFEDYRNYNPYEVRVKGLKEKLLPEELCTAIMHITKSRGTTLEALADESQDDEGTKATLSKNAKELSNGKYVCEVQLDRLNNNHRIRGAENNFKTEDYVKELKEILKHQDLNEELCNQIIEIVSRRRRYDQGPGSEKSPTPYGSYRLVDGVLKHVNLIDEMRGRCSVYPDEFRAPKQSYTAELFNLLNDLNNLTIKGEKITVEEKEKVVAFVNEKGSITVKQLLKLLDAQEDEVTGFRIDKNDKPLITEFKGYSKVLKVFKKYNQQELLEDKLIVDQVIDICTKSKGIDERKKDIKELYPEFDNELIEELASIKGVSAYHSLSFKAMHMINKEMLTTEMNQIQVLHEIEMFDKNRKSLKGKKNIEPDEEAILSPVAKRAHRETFKVINALRKQYGEFDSIVIEMTRDKNSKEQVKRINDNQKRFKNENDQVDEIIKNAGIDPERVNGKTKTKVRLYLQQYCKTAYTQQDIDLHTLIFDDKAYEIDHIIPISISLDDSLSNKVLASRLENQQKGNLTPMMAYLKGKFTDGNLERYKLFVNSNKNFNHKKRSNLLDEQDITKEDVARKFINRNLVDTSYACRTVLNTLQHYFKDNEIDTKVHTIRGQSTNIFRKRINLQKDREQDYFHHAIDALIVASLKKMNIVNSYLMHYDYSDLYDEETGEVFDVLPDKQFIDQRYISFISDLKNIYQESNQYNLGYITQEQMHYPLIKVSHKIDTKPNRQIADETIYSTRNIEGQDMLVEKIKNIYDPKEKKAIELVNNIINDDTDKYIMKHKDPQTFEKIKEVVLNHFNDYKDSKEYYVIDKKGKYSLKEESPLTSYYNENGAITKYSKKNNGPAITSMKFYSEKLGNHLAITSNYNANNKKVILKQISPYRTDFYLSPEGKYKFVTIRYKDVFYKETIHKFVIDENWYHEEKTKKGIQDGWKFVCSMHRDELIGLIKPEGKKFVYDASINGGQTQYHDGKHYEILKFTATNNDKANMFEVKPINTNCSKRLMPSVGTFIKIQKFATDVLGNMYEVKDNRLKLEFD

SEQ ID NO: 21757 - protein, 953 aa, unidentified
  REGION 1..953: note = Cas Enzyme sequence
LDRLNKDHKVRGTENNFKTEDYVKELKEILKHQDLNEELCDQIIEMVSRRRRYDQGPGSEKSPTPYGSYRMVDGVLKHVNLIDEMRGRCSVYPNEFRAPKQSYTAELFNLLNDLNNLTIKGEKITVEEKEKVVAFVNEKGNITVKQLLKLLDAQEDEVTGFRIDKNDKPLITEFKGYSKVLKVFKKYNQQEVLEDKSIVDQIIDICTKAKGIDERKKDIKELYPQFDDDLIEGLASIKGVSAYHSLSFKAMHMINKEMLTTEMNQMQVLYEIDQYDKNRKSLKGKKNIEPDEKAILSPVAKRAHRETFKVINALRKKYGEFDSIVIEMTRDKNSKEQVKRINDNQKRFKNENDQVDEIIKNVGIDPERVNGKTKMKVRLYLQQDCKTAYTQQDIDLHTLIFDDKAYEIDHIIPISVSLDDSLSNKVLASRLENQQKGNLTPMMAYLKGKFTDGNLEKYKLFVNSNKNFNHKKRSNLLDEQDITKEDVARKFINRNLVDTSYACRTVLNTLQHYFKDNEIDTKVHTIRGQSTNIFRKRINLQKDREQDYFHHAIDALIVASLKKMNIVNSYLMHYDYSDLYDEETGEVFDVLPDKQFIDQRYISFISDLKNIYQESNQYNLGYITQEQMHYPLIKVSHKIDTKPNRQIADETIYSTRNIEGQDMLVEKIKNIYDPKEKKAIELVNNIINDDTDKYIMKHKDPQTFEKIKEVVLNHFNDYKDSKEYYVIDKNGKYSLKEESPLTSYYNENGAITKYSKKNNGPAITSMKFYSEKLGNHLAISSNYNTNNKKVILKQISPYRTDFYVSPEGKYKFVTVRYKDVFYKETIHKFVIDKNWYHEEKIKKGILEDWRFVCSMHRDELIGLIKPEGKKFVYDASINGGQTQYHNGKHYEILKFTATNDDKTNIFEVKPINTICKKQLRPSAGSMLHIRKFATDVLGNIYEVKDNRLKLEFD

SEQ ID NO: 21758 - protein, 1104 aa, unidentified
  REGION 1..1104: note = Cas Enzyme sequence
MSRYVLGLDIGITSVGYGVIDIDNNLFVDYGVRIFKEGTAAENETRRTKRGSRRLKRRKSNRLNDMKNLLKKNDLYFDNYRNYNPYEMRVKGLNEKLSSKELCTAIMHITKSRGTTLEALADESQDDEGTKATLSKNAKELSNGKYVCEVQLDRLNNNHRIRGAENNFKTEDYVKELKEILKHQDLNEELCNQIIEIVSRRRRYDQGPGSEKSPTPYGSYRMVDGVLKHVNLIDEMRGRCSVYPNEFRAPKQSYTAELFNLLNDLNNLTIKGEKITVEEKKKVIAVVNEKGNITVKQLLKLLDAQEDEVTGFRIDKNDKPLITEFKGYSKVLKVFKKYNQQELLEDKLIVDQVIDICTKSKGIDERKKDIKELYPEFDNELIEELASIKGVSAYHSLSFKAMHIINKEMLTTEMNQIQVLHEIEMFDKNRKSLKGKKNIEPDEEAILSPVAKRAHRETFKVINALRKKYGEFDSIVIEMTRDKNSKEQVKRINDSQKRFKSENDRVDGIIKNSGIDPERVNGKTKTKIRLYLQQDCKTAYTQQDIDLHTLIFDDKAYEIDHIIPISVSLDDSLTNKVLASRLENQQKGNLTPMMAYLKGKFTGGNLEKYKLFVSSNKNFNGKKRNNLLTEQDITKEDVARKFINRNLVDTSYACRTVLNTLQRYFKDNEIDTKIHTIRGQSTNIFRKRINLQKDREQDYFHHAIDALIVASLKKMNIVNSYLMHYNYSDLYDEETGEVFDVLPDKQFIDQRYISFISDLKNIYQESNQYNLGYITQEQMHYPLIKVSHKIDTKPNRQIADETIYSTRNIEGQDMLVEKIKNIYDSKEKKAIELVNNIINDDTDKYIMKHKDPQTFEKIKEVVLNHFNDYKDSKEYYVIDKKGKYSLKEESPLTSYYNENGAITKYSKKNNGPAITSMKFYSEKLGNHLAITGNYNTNNKKVILKQISPYRTDFYVSPEGKYKFVTVRYKDVFYKETIHKFVIDENWYHEEKNKKGILEDWKFVCSMHRDELIGLIKPEGKKFVYDASINGGQTQYHDGKHYEILKFTATNNDKANMFEVKPINTICKKQLMPSVGPFIKIQKFATDVLGNIYEVKDNRLKLEFD

SEQ ID NO: 21759 - protein, 1104 aa, unidentified
  REGION 1..1104: note = Cas Enzyme sequence
MSGYVLGLDIGITSVGYGVIDIDNNLFVDYGVRLFKEGTAAENETRRTKRGSRRLKRRKSNRLNDMKNLLKENELYFEDYRNYNPYEVRVKGLKEKLLPEELCTAIMHITKSRGTTLEALADESQDDEGTKATLSKNAKELNDGKYICEVQLDRLNKDHKVRGTENNFKTEDYVKELKEILKHQDLNEELCDQIIEMVSRRRRYDQGPGSEKSPTPYGSYRMVDGVLKHVNLIDEMRGRCSVYPNEFRAPKQSYTAELFNLLNDLNNLTIKGEKITVEEKEKVVAFVNEKGNITVKQLLKLLDAQEDEVTGFRIDKNDKPLITEFKGYSKVLKVFKKYNQQEVLEDKSIVDQIIDICTKAKGIDERKKDIKELYPQFDDDLIEGLASIKGVSAYHSLSFKAMHMINKEMLTTEMNQMQVLYEIDQYDKNRKSLKGKKNIEPDEKAILSPVAKRAHRETFKVINALRKKYGEFDSIVIEMTRDKNSKEQVKRINDNQKRFKNENDQVDEIIKNVGIDPERVNGKTKMKVRLYLQQDCKTAYTQQDIDLHTLIFDDKAYEIDHIIPISVSLDDSLSNKVLASRLENQQKGNLTPMMAYLKGKFTDGNLEKYKLFVNSNKNFNHKKRSNLLDEQDITKEDVARKFINRNLVDTSYACRTVLNTLQHYFKDNEIDTKVHTIRGQSTNIFRKRINLQKDREQDYFHHAIDALIVASLKKMNIVNSYLMHYDYSDLYDEETGEVFDVLPDKQFIDQRYISFISDLKNIYQESNQYNLGYITQEQMHYPLIKVSHKIDTKPNRQIADETIYSTRNIEGQDMLVEKIKNIYDPKEKKAIELVNNIINDDTDKYIMKHKDPQTFEKIKEVVLNHFNDYKDSKEYYVIDKNGKYSLKEESPLTSYYNENGAITKYSKKNNGPAITSMKFYSEKLGNHLAISSNYNTNNKKVILKQISPYRTDFYVSPEGKYKFVTVRYKDVFYKETIHKFVIDKNWYHEEKIKKGILEDWRFVCSMHRDELIGLIKPEGKKFVYDASINGGQTQYHNGKHYEILKFTATNDDKTNIFEVKPINTICKKQLRPSAGSMLHIRKFATDVLGNIYEVKDNRLKLEFD

SEQ ID NO: 21760 - protein, 1106 aa, unidentified
  REGION 1..1106: note = Cas Enzyme sequence
MGRLVLGLDIGITSVGYGVIDIDNNVFVDYGVRLFKESDSENNVARRAHRGGRRLKRRRKNRLDDMKKLLFDAGILTKDYNPIKNIYEVRVKGLTEKLTNNELAAALLHITKNRGTTIEALESADADKEALGTKSVLAKNKEELREYEYICKVQLHRLKEYGNVRGTENNFKTIDYVKEARAILEYQGIDVELSDRILHIIQRRREYYEGPGSEKSPTKYGRWIEKGVEPIDLIEKMRGKCSIFHDELRAPKSSYSAELFNLLNDLNNISINGEKLTQEDKELVISEVNKIGEIKVNKLLKILNTKEEDVEGFRIDKNGKMLITDMKCYDQFKKIFDKNNEYAYRENKEIIDQIAEINTSKKGISERCEAIQKKFPAFDLNLVRDLAGMKGMTQYHSLSLKAIKIINDEMMKCPYNQMQVIHELGLQHYRKSYKGMKKIQADDEAILSPVAKRAQRETFKVINRLREIYGEFESIVVETTRDKNSAEKKKRIKNTQKYYEGRNKNVDKLLKEKGYDPALVNGKTKMKIKLYLDQDGKSAYTLVPLDLNLLISDPHAYEIDHIIPISISLDDSFNNKVLITHEENQIKGNRTPVFTYLNGLFKNCDLNTYKSAVKNNHNISRKKKHYMLYDKDITKYSNMKEFIARNLVDTSYANRVVLNTLTSYFKDNDISTNVHTIKGFATSLFRKRINLPKDREEDYLHHAIDALIIASVKKQPIFRDYLAKYNLDELYNKETGELIKVEDDDRVIDPVYIEFISNLKTIYEQSNQYYNGYISREEMKFKPIKISHKVDTKPNRQISDETIYSTRNVNGVERVVKKAKDIYDPKFAALTNDIINNQYHDKWIMAEKDEQTFEIIKSIVMEHFNTYKDDKDIYKSEVKKGVTVWSLKGSNNPLSHFKEEHGKVRKYSKKGNGPEITAMKYYEDELGNHVDITSKYNVHDKNVVLLQISPYRTDFYLSPKGKYVFVTIRYSNVFYKESMKKYVIDEDWYENEKKRKKIDESYQFVCSLHHDELLGVKLKDGKAYIYDQSTEGDGIKRHHHGQYEILKFTATNNDKNNKIEVKPIYTYCKKQCMPSCGTFIKLTKFATDVLGNLYEVKDNVLKLEFD

SEQ ID NO: 21761 - protein, 1106 aa, unidentified
  REGION 1..1106: note = Cas Enzyme sequence
MGRLVLGLDIGITSVGYGVIDIDNNVFVDYGVRLFKESDSENNVARRAHRGGRRLKRRRKNRLDDMKKLLFDAGILTKDYNPIKNIYEVRVKGLTEKLTNNELAAALLHITKNRGTTIEALESADADKEALGTKSVLAKNKEELREYEYICKVQLHRLKEYGNVRGTENNFKTIDYVKEARAILEYQGIDVELSDRILHIIQRRREYYEGPGSEKSPTKYGRWIEKGVEPIDLIEKMRGKCSIFHDELRAPKSSYSAELFNLLNDLNNISINGEKLTQEDKELVISEVNKIGEIKVNKLLKILNTKEEDVEGFRIDKNGKMLITDMKCYDQFKKIFDKNNEYAYRENKEIIDQIAEINTSKKGISERCEAIQKKFPAFDLNLVRDLAGMKGMTQYHSLSLKAIKIINDEMMKCPYNQMQVIHELGLQHYRKSYKGMKKIQADDEAILSPVAKRAQRETFKVINRLREIYGEFESIVVETTRDKNSAEKKKRIKNTQKYYEGRNKNVDKLLKEKGYDPALVNGKTKMKIKLYLDQDGKSAYTLVPLDLNLLISDPHAYEIDHIIPISISLDDSFNNKVLITHEENQIKGNRTPVFTYLNGLFKNCDLNTYKSAVKNNHNISRKKKHYMLYDKDITKYSNMKEFIARNLVDTSYANRVVLNTLTSYFKDNDISTNVHTIKGFATSLFRKRINLPKDREEDYLHHAIDALIIASVKKQPIFRDYLAKYNLDELYNKETGELIKVEDDDRVIDPVYIEFISNLKTIYEQSNQYYNGYISREEMKFKPIKISHKVDTKPNRQISDETIYSTRNVNGVERVVKKAKDIYDPKFAALTNDIINNQYHDKWIMAEKDEQTFEIIKSIVMEHFNTYKDDKDIYKSEVKKGVTVWSLKGSNNPLSHFKEEHGKVRKYSKKGNGPEITAMKYYEDELGNHVDITSKYNVHDKNVVLLQISPYRTDFYLSPKGKYVIVTIRYNNVFYKESVKKYVIDKDWYESEKKRKKIDESYQFVCSLHHDELLGVKLKDGKAYIYDQSTEGDGIKRHHHGQYEILKFTATNNDKNNKIEVKPIYTYCKKQCMPSCGTFIKLTKFATDVLGNLYEVKDNVLKLEFD

SEQ ID NO: 21762 - protein, 1116 aa, unidentified
  REGION 1..1116: note = Cas Enzyme sequence
MILDIVYLEDHMNKLVLGLDIGITSVGYGVIDMESNDFVDYGVRLFKEGTAEDNEKRRTARSRRRLLSRRHTRIEDMKKLLKQYGIIDEDYRPLPHVYELRMKGLTQKLSNDELASAILHLVKHRGSSIETVDDNEEGAKETEKAKEVLGKNAKLLAEGKFVCEVQYARLQEGGSVRGHDNNFKTKDYVAEAEEILRHQDIDETLKKKIILMIQRKRAYYEGPGSEKSPTPYGRFILEDGKIKQIDLIEKMIGRCSVFPDELRAPKLSISAELFNFLNDVNNLTIKEEKITPEQKEEVLQHISKKGNITFKQLLKKLNVDQEDVHGYRIDKNGKPLLTEFKGYKKLRSIFEGAGEIVSLEDVELLDKVMEIITKCKGIEERKQALQKLGLTSSVIEPLSELTGITGYHALSFKALRMLNQEMYQSDRNQMQLLHEMKLFDQQRKSHKGEKNITADDEAILSPVARRAQHEAFKVVNQLRRIYGEFDSIVVEMTREKNSSEHRKNIQERQKYFESRNKKVDELLSDRGLDPEKVNGKTKLKIRLYQEQDGKSAYTLQPLDLDRIIKDQTYTEIDHIIPVSISLDDSQNNKVLITRTENQLKGNLTPLGAYQKGRFAGLNCTMSHYIETVKGMKNISSKKRRNLLFSEDITKYSVIQQFINRNLVDTSYACRVVLNTLSDYFKDNGIDTKVHTINGRLTDKFRQQINLPKDRDEDYLHHAIDALIVASIKKLNLLKGYLSQFTLDEMYDEKTGEIKEIPGEESFFDPAYIRYISDLKTIYQQSSQYYRGIIDRSIMAYPPIKISHKINTKPNRQVSDETIYSTRELDGKEMIIQKYKDIYDPKFKALTQDILNGKVEKYLMARNDPQTFESIAEIIRHHYEQFKDSKDHYKMKSGKIELVGENPLTAYKEEFGPVKKYSKKGNGPAITSMKYADGKLGSHIDISQNYRSDHKRVILKQVSPYRTDFYLCSDGKYRFVTIRYKDIFYKAEKQKYVIDREWYLQEKARKKIDDKAKFVCSLHRDELIGITKKYGDKFIYDESTENGGDTLYHDGVHPEILKFTATNNDETNRIEVKPTYTYCKKQLMVAVASFTSLRKFTTDVLGNLYEVKQNVLKMEFE

SEQ ID NO: 21763 - protein, 1426 aa, unidentified
  REGION 1..1426: note = Cas Enzyme sequence
MYNIGLDIGTGSVGWCLTDENGYLLKVNRKGNNGNTYRNSAWGVRLFESADTAADCRIKRSTRRRYNRRRTRIIELRKIMSDMIMPIDPNFYARLDEAFLWNEDKSDKAKAPFLLFNDNGYDDVKYYTDYPTIYHLRKHLLETKEKADPRFIYLALHHMMKYRGHFLFEGQSFEAIDNIEDTFIELEHLVNVYVKEKEDTDNNAENNALYQEMKNYLADNKVKNKDKKEYITDTFIKADYDNKYSKELAAAVLGYEFNVGIIVNDNSLTDEDGKALKAKFADAKYEEQEEKLSDKLGERYYIIETLKKIYSWKVLHSILGDNKYLSYAMVDKYEKHSEQLKALKYLFHKYTSQDEYSEFFHQEKNKEGKYIVNYANYIKGIKRLSNETNKKYNTKQQLYQSIKEILGERAADDEVYKKILVEMEQETFLEKINNVDNSAIPYQLNLMEMDKVLTQQGVYYKELRDNEELLLKILSSKIPYYVGPLNNNSNGNRNFAWMTKRAGKENEKVYPWNIKDVVDIDVTAEDFITRMTNYCTYLPNEKVLPKESLLYQKYMLLEELSQIRIDGRKLSKEDRKAIINDLFIGERRAKVSDKNFKEYLNKINYVKINDKGYDVTGYQSDDGFACALSSYNKFRRVLGYVDERNEKMIEDIIYWLTVFEDKDIVKRKINKQYPDRLTDEQLKKILKLKFKGWGRFSRKFLAGIKGDMGTTIIDMLEDADDRFLYCNYCPNLMQIINKDEKIKQIIDDNRPRYDGTEDLLDVIQDMHTSPANRRGIWQTMKVIEEIIEYMGEKPQQIYIEFAREDDPKAKNKRTDSRKRAIDKALKKLKEDVVDEYNENVYKELKQYEKRLDEEKVYLYFMQNGKDLYFPDKELNLDELEKLEIDHIIPYSLSDDDSLDNKALVLKGNNQNKGNKIVKEAFPQLFSNSGTVNYWKNLKKAGLISEKKFNNLQKNNVDDILTKGFINRQLVETRQIVKSVANLILDYYNEQIDVIEVRASLSTSVRKMLTYEKKDNNGFWEENKDNCMFYKNRDMNDYHHAHDAYLANIIGMYIQKNYPHLQKELNYSQYRRVWRKYYENTKNNNGVNWFATLGKFSSNNEEADWYGQDIIAYMRKIFCYRDVIISKKVEENTGAFYSETKYPREDKAGSKLVPLKQGDNMRGANNLKELDTRKYGGYKGGEKAYFVLVRYCIEKALKKSVKKEYHMEFVEIPVYIARGIKNNDINLYDYVCDILNEANKNSVADVEILRNKVPKYQMIIGENGEEYYLVSATEVINSKQFVLGGANQQYNRLLNYIKYGKNDKWQYIQTELLDEQLIGLYNLLIAKIKDEYKGFSKEAVRIQENNSFDKLDVKDKKEFIAEMIKLVQPDSDYPYLGKYATGLSNRMGRKTGEKVGKKITLVDKSVTGLYERRTTFELEDDSSTKSR

SEQ ID NO: 21764 - protein, 1424 aa, unidentified; identical to SEQ ID NO: 21220
  REGION 1..1424: note = Cas Enzyme sequence

SEQ ID NO: 21765 - protein, 1425 aa, unidentified
  REGION 1..1425: note = Cas Enzyme sequence
MYNIGLDIGTGSVGWCLTDENGYLLKVNRKGNNGNTYRNSAWGVRLFESADTAADCRIKRSTRRRYNRRRTRIIELRKIMSDMIMPIDPNFYARLDEAFLWNEDKSDKAKAPFLLFNDKEYNDKKYYEDFKTIYHLRKYLINTTNKVDARLIYLALHHMMKYRGHFLYEGQTFESIDNVEDVFVELNNLVNAYIKECEDKDGNEYNDVYREIKKCLADNEIKNKDKKELIAAMFMRADYSKKYSKEVAVAILGYEFNVGIIVGENELTGEDNKPLKTKFSDANYEEQEENISSVLGEKYSIIEALKKIYSWKVLHGILGDNTYISSAMVAKYNIHKQQLSELKQLFHKYASQDEYSDFFHKEKDKSGNYIVNYANYIKGIKRLTNKDNKNYSAKQQLYISIRKILDDRALKDETYQKILKEMEEETFLEKINNVDNSAIPYQLNLMEMDKILTQQGVYYKELKDNKEQLLKMLISKIPYYVGPLNNHNKGNRNFAWMTRKTGKESEKLYPWNVKGVVDIDVTAEDFITRMTNYCTYLPNEKVLPKESLLYQKYMLLEELSQIKIDDNKLSKEDRKAIINDLFIGERRAKVSDKNFKEYLNKINYVKINDKGYDVTGYQSDDGFACALSSYNKFRRVLGYVDERNEKMIEDIIYWLTVFEDKDIVKRKINKQYPDRLTDEQLKKILKLKFKGWGRFSRKFLAGIKGDMGTTIIDMLEDADDRFLYCNYCPNLMQIINKDEKIKQIIDDNRPRYDGTEDLLDVIQDMHTSPANRRGIWQTMKAIEEIIEYMGEKPQQIYIEFAREDDPKAKNKRADSRKRAIDKALKKLKEDVVDEYNENVYKELKQYEKRLDEEKVYLYFMQNGKDLYFPDKELNLDELEKLEIDHIIPYSLSDDDSLDNKALVLKGNNQNKGNKIVKEAFPQLFSNSGTVNYWKNLKKAGLISEKKYNNLQKNNVDDILTKGFINRQLVETRQIVKSVANLILDYYNEQIDVIEVKASLSTSVRKMLTYEKKDSNGFWEENKDNCMFYKNRDMNDYHHAHDAYLANIIGMYIQKNYPRLQKELNYSQYRRVWHKYYENTKNNNGVNWFATLGKFSSNNEEADWYGQDIIAYMRKIFCYRDVLISKKVEENTGAFYSETKYPREDKADSKLVPLKQGDNMRGANNLKELDTRKYGGYKGGEKAYFVLVKYCIEKALKKSVKKEYHMEFVEIPVYIARGIKNNDINLYDYVCDILNEANKNSVADVEILRNKVPKYQMIIGENGEEYYLVSATEVINSKQFVLGGANQQYNRLLNYIKYGKNDKWQYIQTELLDEQLIGLYNLLIAKIKDEYKGFSKEAVRIQENNSFDKLDVKDKKEFIAEMIKLVQPDSDYPYLGKYATGLSNRMGRKTGEKVGKKITLVDKSVTGLYERRTTFELEDDSSTKSC

SEQ ID NO: 21766 - protein, 1425 aa, unidentified
  REGION 1..1425: note = Cas Enzyme sequence
MYNIGLDIGTGSVGWCLTDENGYLLKVNRKGNNGNTYRNSAWGVRLFESADTAADCRIKRSTRRRYKRRRTRIIELRKIMSDMIMPIDPNFYARLDEAFLWNEDKSDKAKAPFLLFNDNGYDDVKYYTDYPTIYHLRKHLLETKEKADPRFIYLALHHMMKYRGHFLFEGQSFEAIDNIEDTFIELEHLVNVYVKEKEDTDNNAENNALYQEMKNYLADNKVKNKDKKEYITDTFIKADYDNKYSKELAAAVLGYEFNVGIIVNDNSLTDEDGKALKAKFADAKYEEKEEKLSDTLGERYYIIETLKKIYSWKVLHSILGDNKYLSYAMVDKYEKHSEQLKALKYLFHKYTSQDEYSEFFHQEKNKEGKYIVNYANYIKGIKRLSNETNKKYNTKQQLYQSIMKILGERAADDEVYKKILVEMEQETFLEKINNVDNSAIPYQLNLMEMDKILTQQGVYYKELRDNKELLLKMLTSKIPYYVGPLNNNSNGNRNFAWMTKKDGKENEKVYPWNVKDVVDIDVTAEDFITRMTNYCTYLPNEKVLPKESLLYQRYMLLEELSQIRIDGRKLSKEDRKAIINDLFIGKGRVKVSDKDFKEYLNKVNYVKVNGKGYDVTGYQSDDGFACALSSYNKFRRILGHIDEQNEKMIEDIIYWITVFEDKDIVKRKINKQYADRLSAEQLKKILKLKFKGWGRYSSKLLNGIKGDMGTTIIEMLEDADERFAYCDYCPNFMQIINKDEKIKQIIDDNRPRYDGTKDLLDVIQDMHTSPANRRGIWQTMKAIEEIIEYMGEKPQQIYIEFAREDDPKAKNKRADSRKRAIDKALKKLKEDVVDEYNEKVYKELKQYEKRLDEEKVYLYFMQNGKSLYTGKELNLNEPENLEIDHIIPYSLSDDDSLDNKALVLKKENQNKGNKIVKEAFTQSFSDSEMMDYWKNLKKSGLISEKKYNNLQKNNVDDILTKGFINRQLVETRQIVKSVANLILDYYNEQIDVIEVKASLSTSVRKMLTYEKKDNNGFWIENKDNCMFYKNRDMNDYHHAHDAYLANIIGLYIQKNYPRLQKELNYSQYRRIWRKYYENTKNNNGVNWFATLGKFSSNNEEADWYGQDIIAYMRKIFCYRDVLISKKVEENTGAFYSETKYPREDKAGSKLVPLKQGNNMRGANNLKELDARKYGGYKGGEKAYFVLVKYCIEKALKKKVKKEYHMEFVEIPVYIARGIKNKDINLYDYVCDILNEANKNSVADVEILRNKVPKYQMIIGENGEEYYLVSATEVINSKQFVLGGANQQYNRLLNYIKYGKNDKWQYIQTELLDEQLIGLYNLLIAKIKDEYKGFSKEAVRIQENNSFDKLDVKDKKEFIAEMIKLVQPDSDYPYLGKYATGLSNRMGRKTGEKVGKKITLVDKSVTGLYERRTTFELEDDSSTKSC

SEQ ID NO: 21767 - protein, 1426 aa, unidentified
  REGION 1..1426: note = Cas Enzyme sequence
MYNIGLDIGTGSVGWCLTDENGYLLKVNRKGNNGNTYKNSAWGVRLFESADTAADCRIKRSTRRRYKRRRTRIIELRKIMSDMIMPIDPNFYARLDEAFLWNEDKSDKAKAPFLLFNDNGYDDVKYYTDYPTIYHLRKHLLETKEKADPRFIYLALHHMMKYRGHFLFEGQSFKAIDNIEDTFIELEHLVNVYVKEKEDTDNNAENNALYQEIKNYLADNKVKNKDKKEYITDTFIKADYDNKYSKELAAAVLGYEFNVGIIANDNSLTDEDGKALKAKFADAKYEEKEEKLSDTLGERYYIIETLKKIYSWKVLHSILGDNKYLSYAMVDKYEKHSEQLKALKYLFHKYTSQDEYSEFFHQEKNKEGKYIVNYANYIKGIKRLSNETNKKYNTKQQLYQSIKEKLGERAADDEVYKKILVEMEQETFLEKINNVDNSAIPYQLNLMEMDKILTQQGVYYKELRDNKELLLKMLSSKIPYYVGPLNNNSNGNRNFAWMTKKAGKENEKVYPWNVKDVVDIDVTAEDFITKMTNYCTYLPDEKVLPKESLLYQRYMLLEELSQIRIDGKKLSKEDRKAIINDLFIGKGRVKVSDKDFKEYLNKVNYVKVNGKGYDVTGYQSDDGFACALSSYNKFRRILGHIDEQNGKMIEDIIYWITVFEDKDIVKRKINKQYADRLSAEQLKKILKLKFKGWGRYSSKLLNGIKGDMGTTIIEMLEDADKRFAYCDYCPNFMQIINKDEKIKQIIDDNRPRYDGTKDLLDVIQDMHTSPANRRGIWQTMKAIEEIIEYMGEKPQQIYIEFAREDDPKAKNKRADSRKRAIDKALKKLKEDVVDEYNENVYKELKQYEKRLDEEKVYLYFMQNGKDLYFPDKELNLDELEKLEIDHIIPYSLSDDDSLDNKALVLKGNNQNKGNKIVKEAFPQLFSNNGTVNYWKNLKKAGLISEKKYNNLQKNNVDDILTKGFINRQLVETRQIVKSVANLILDYYNEQIDVIEVKASLSTSVRKMLTYEKKDNNGFWIENKDNCMFYKNRDMNDYHHAHDAYLANIIGLYIQKNYPRLQKELNYSQYRRIWRKYYENTKNNNGVNWFATLGKFSSNNEEADWYGQDIIAYMRKIFCYRDVLISKKVEENTGAFYSETKYPREDKAGSKLVPLKQGNNMRGDNNLKELDTRKYGGYKGGEKAYFVLVKYCIEKALKKSVKKEYHMEFVEIPVYIARGIKNNDINLYDYVCDILNEANKNSVADVEILRNKVPKYQMIIGENGEEYYLVSATEVINSKQFVLGGANQQYNRLLNYIKYGKNDKWQYIQTELLDEQLIGLYNLLIAKIKDEYKGFSKEAVRIQENNSFDKLDVKDKKEFIAEMIKLVQPDSDYPYLGKYATGLSNRMGRKTGEKVGKKITLVDKSVTGLYERRTTFELEDDSSTKSC

SEQ ID NO: 21768 - protein, 1425 aa, unidentified
  REGION 1..1425: note = Cas Enzyme sequence
MYNIGLDIGTGSVGWCLTDENGYLLKVNRKGNNGNTYRNSAWGVRLFESADTAADCRIKRSTRRRYKRRRTRIIELRKIMSDMIMPIDPNFYARLDEAFLWNEDKSDKAKAPFLLFNDNGYDDVKYYTDYPTIYHLRKHLLETKEKADPRFIYLALHHMMKYRGHFLFEGQSFEAIDNIEDTFIELEHLVNVYVKEKEDTDNNAENNALYQEIKNYLADNKVKNKDKKEYITDTFIKADYDNKYSKELAAAVLGYEFNVGIIVNDNSLTDEDGKALKAKFADAKYEEKEEKLSDTLGERYYIIETLKKIYSWKVLHSILGDNKYLSYAMVDKYEKHSEQLKALKYLFHKYTSQDEYSEFFHQEKNKEGKYIVNYANYIKGIKRLSNETNKKYNTKQQLYQSIKEKLGERAADDEVYKKILVEMEQETFLEKINNVDNSAIPYQLNLMEMDKILTQQGVYYKELRDNKELLLKMLSSKIPYYVGPLNNNSNGNRNFAWMTKKAGKENEKVYPWNVKDVVDIDVTAEDFITKMTNYCTYLPDEKVLPKESLLYQRYMLLEELSQIRIDGKKLSKEDRKAIINDLFIGKGRVKVSDKDFKEYLNKVNYVKVNGKGYDVTGYQSDDGFACALSSYNKFRRILGYIDEQNEKMIEDIIYWITVFEDKDIVKRKINKQYADRLSAEQLKKILKLKFKGWGRYSSKLLNGIKGDMGTTIIEMLEDADERFAYCDYCPNFMQIINKDEKIKQIIDDNRPRYDGTKDLLDVIQDMHTSPANRRGIWQTMKAIEEIIEYMGEKPQQIYIEFAREDDPKAKNKRADSRKRAIDKALKKLKEDVVDEYNEKVYKELKQYEKRLDEEKVYLYFMQNGKSLYTGKELNLNEPENLEIDHIIPYSLSDDDSLDNKALVLKKENQNKGNKIVKEAFTQSFSDSEMMDYWKNLKKAGLISEKKYNNLQKNNVDDILTKGFINRQLVETRQIVKSVANLILDYYNEQIDVIEVKASLSTSVRKMLTYEKKDNNGFWIENKDNCMFYKNRDMNDYHHAHDAYLANIIGLYIQKNYPRLQKELNYSQYRRIWRKYYENTKNNNGVNWFATLGKFSSNNEEADWYGQDIIAYMRKIFCYRDVIISKKVEENTGAFYSETKYPREDKAGSKLVPLKQGNNMRGANNLKELDTRKYGGYKGGEKAYFVLVKYCIEKALKKSVKKEYHMEFVEIPVYIARGIKNNDINLYDYVCDILNEANKNSVADVEILRNKVPKYQMIIGENGEEYYLVSATEVINSKQFVLGGANQQYNRLLNYIKYGKNDKWQYIQTELLDEQLIGLYNLLIAKIKDEYKGFSKEAVRIQENNSFDKLDVKDKKEFIAEMIKLVQPDSDYPYLGKYATGLSNRMGRKTGEKVGKKITLVDKSVTGLYERRTTFELEDDSSTKSR

SEQ ID NO: 21769 - protein, 1446 aa, unidentified
  REGION 1..1446: note = Cas Enzyme sequence
MYNIGLDIGTGSVGWCLTDNNGHLLKINRKGDNGKTYRNSAWGVRLFESANTAADCRIKRSTRRRYNRRRTRIIELRKIMSDMIMPIDPNFYARLDEAFLWNEDKSDKAKAPFLLFNDNGYDDVKYYTDYPTIYHLRKHLLEMEGRADARLIYLALHHMMKYRGHFLFEGQSFEAIDNIEDTFIELEHLVNVYVKEKEDTDNNSKNNALYQTIKNYLADNKVKNKDKKEDITDTFIKAGYDNKYSKELAAAVLGYEFNMGIIVNDNNLTDENGKALKVKFADAKYEEQEEKLSDTLGERYYVVETLKKIYSWKVLHSILGDNKYLSYAMVDKYEKHSEQLKALKYLFHKYTSQDKYNDFFHKEKCYKNDKDEKDANEEKNNNEKKCDKWKYIVNYANYIKGIKRLSNETNKKYNTKQQLYQSIKEKLGESAADDEVYKNILVEMEQETFLEKINNVDNSAIPYQLNLMEMDKILTQQGVYYKELRDNKELLLKMLSSKIPYYVGPLNNNSNGNRNFAWMTKKAGKENEKVYPWNVKDVVDIDVTAEDFITRMTNYCTYLPNEKVLPKESLLYQRYMLLEELSQIRIDGKKLSKEDRKAIIDDLFIGKGRVKVSDKDFKEYLDKVNYVKVNGKGYDVTGYQSDDGFACALSSYNKFRRILGYVDERNEKMIEDIIYWLTVFEDKDIVKRKINKQYADKFSDEQLKKILKLKFKGWGRYSAKLLNGIKGDMGTTIIEMLEDADERFAYCDYCPNFMRIINKDAKIKQIIDDNRPIYDGTKDLLEVIQDMHTSPANRRGIWQTMKVIEEIIEYIGEKPRQIYIEFAREDDFKAKNKRTDSRKKTVDKALKKLKKEVVDEYNENVYKELKQYENRLDEEKVYLYFMQNGKSLYTEEKLNLNEPENLEIDHIIPYSLSDDDSLDNKALVLKDENQKKGNKIVKETFPQSFSDIKMINYWKNLKKVGLISEKKYNNLQKNNVNDILTKGFINRQLVETRQIVKSVANLILDYYNEQIDVIEVKASLSTSVRKMLTYEKKDNNGFWEENKDNCMFYKNRNMNDYHHAHDAYLANIIGMYIQKNYPHLQKELNYSQYRRVWRNYYENTKNNNGVNWFATLGKFSSNNEEADWYGQDIIAYMRKIFCYRDVIISKKVEENTGAFYSETKYPREDKAGSKLVPLKQGNNMRGADNLKELDTRKYGGYKGGEKAYFVLVKYCIEKALKKKVKKEYHMEFVEIPVYIARDIKNKDINLYDYVCDILNEAYKNSVVDVEMLRNKVPKYQMIIGENGEEYYLVGATEVINSKQFVLGGANQQYNRLLNYIMYGKNDKWQYIQTELLDEQLTGLYDLLLSKIKDEYKGFSKEAIRIQDDNSFYKLDVKNKKEFIAEMIKLVQPDSNYPYLGKYSTGLSDRMGRKSKEKVGKKITLVDKSVTGLYERRTTFELEDDSSTKSR

SEQ ID NO: 21770 - protein, 1446 aa, unidentified
  REGION 1..1446: note = Cas Enzyme sequence
MYNIGLDIGTGSVGWCLTDNNGHLLKINRKGDNGKTYRNSAWGVRLFASADTAADCRIKRSTRRRYNRRRTRVIELRKIMSEMIMQVDPNFYARLDEAFLWNEDKSDKAKAPFLLFNDKELYDIKYYKKYPTIYHLRKYLLETKEKADPRFIYLALHHMMKYRGHFLFEGQSFEAIDNIKDTFIELEQLINAYVKGKEEIEDNNKNNDKYEAIKICLADNKVKNKDKKENITDIFIKAGYDNKYSKELAAAVLGYEFNVGIIVNDNSLTDEDGKALKAKFADAKYEEQEEKLSDTLGERYYIVEALKKIYSWKVLHSILGDNKYLSYAMVDKYEKHSEQLKALKYLFHKYTSQDKYNDFFHKEKCYKNDKDEKDANEEKNNNEKKCDKWKYIVNYANYIKGIKRLSNETNKKYNTKQQLYQSIKEKLGERAADDEVYKNILTEMEQETFLEKINNVDNSAIPYQLNLIEMDKILTQQGVYYKELKDNKEILLKMLTSKIPYYVGPLNNNNKGNRNFAWMTKKAGKENEKVYPWNVKDVVDIDVTAEDFITRMTNYCTYLPNEKVLPKESLLYQRYMLLEELSQIRIDGKKLSKEDRKAIIEDLFIGKGRVKVSDKDFKEYLEKVNYVKVNGKGYDVTGYQSDDGFACALSSYNKFRRILGYVDERNEKMIEDIIYWLTVFEDKDIVKRKINKQYADKFSDEQLKKILKLKFKGWGRYSAKLLNGIKGDMGTTIIEMLEDADERFAYCDYCPNFMRIINKDEKIKQIIDDNRSIYDGTKDLLDIIQDMHTSPANRRGIWQTMKVIEEIIEYMGEKPQQIYIEFAREDDFKAKNKRTDSRKKAVDKALNKLKEEVIDEYNENVYKELKQYEKRLDEEKVYLYFMQNGKSLYTGEELNLNEPENLEIDHIIPYSLSDDDSLDNKALVLKKENQNKGNKIVKEAFPQSFSDSEMIDYWKNLKKARLISEKKFNNLQKNNVDDILTKGFINRQLVETRQIVKSVANLILDYYNEQIDVIEVKANLSVSVRKMLTYEKKDNNGFWVENNDNSMFYKNRHMNDYHHAHDAYLANIIGMYIQKNYPHLQKELNYSQYRKIWRKYYENVKNNNGVNWFATLGKFSSNNKETAWYGEDIIDYMRKIFCYRDVIISKKLEENTGAFYSETKYPREDKADSKLVPLKQGNNMRGANNLKELDTRKYGGYKGGEKAYFVLVKYCIEKALKKKVKKEYHMEFVEIPVYIARDIKNKDINLYDYVCDILSEAYKNSVVDVEILRNKVPKYQMIIGENGEEYYLVGATEVINSKQFVLGGANQQYNRLLNYIMYGKNDKWQYIQTELLDEQLTGLYDLLLSKIKDEYKGFSKEAIRIQEDNSFYKLDVKNKKEFIAEMIKLVQPDSNYPYLGKYSTGLSDRMGRKSKEKVGKKITLVDKSVTGLYERRTTFELEDDSSTKSR

SEQ ID NO: 21771 - protein, 1425 aa, unidentified; identical to SEQ ID NO: 21766
  REGION 1..1425: note = Cas Enzyme sequence

SEQ ID NO: 21772 - protein, 1426 aa, unidentified; identical to SEQ ID NO: 21767
  REGION 1..1426: note = Cas Enzyme sequence

SEQ ID NO: 21773 - protein, 1424 aa, unidentified
  REGION 1..1424: note = Cas Enzyme sequence
MYNIGLDIGTGSVGWCLTDENGYLLKVNRKGNNGNTYRNSAWGVRLFESADTAADCRIKRSTRRRYNRRRTRIIELRKIMSDMIMPIDPNFYARLDEAFLWNEDKSDKAKAPFLLFNDKEYNDKKYYEDFKTIYHLRKYLINTTNKVDARLIYLALHHMMKYRGHFLYEGQTFESIDNVEDVFVELNNLVNAYIKECEDKDGNEYNDVYREIKKCLADNEIKNKDKKELIAAMFMRADYSKKYSKEVAVAILGYEFNVGIIVGENELTGEDNKPLKTKFSDANYEEQEENISSVLGEKYSIIEALKKIYSWKVLHGILGDNTYISSAMVAKYNIHKQQLSELKQLFHKYASQDEYSDFFHKEKDKSGNYIVNYANYIKGIKRLTNKDNKNYSAKQQLYISIRKILDDRALKDETYQKILKEMEEETFLEKINNVDNSAIPYQLNLMEMDKILTQQGVYYKELKDNKEQLLKMLTSKIPYYVGPLNNHNKGNRNFAWMTRKTGKESEKLYPWNVKGVVDIDVTAEDFITRMTNYCTYLPNEKVLPKESLLYQKYMLLEELSQIKIDDNKLSKEDRKAIINDLFIGERRAKVSDKNFKEYLNKINYVKINDKGYDVTGYQSDDGFACALSSYNKFRRVLGYVDERNEKMIEDIIYWLTVFEDKDIVKRKINKQYPDRLTDEQLKKILKLKFKGWGRFSRKFLAGIKGDMGTTIIDMLEDADDRFLYCNYCPNLMQIINKDEKIKQIIDDNRPRYDGTEDLLDVIQDMHTSPANRRGIWQTMKAIEEIIEYMGEKPQQIYIEFAREDDPKAKNKRADSRKRAIDKALKKLKEDVVDEYNEKVYKELKQYEKRLDEEKVYLYFMQNGKSLYTGKELNLNEPENLEIDHIIPYSLSDDDSLDNKALVLKKENQNKGNKIVKEAFTQSFSDSEMMDYWKNLKKAGLISEKKYNNLQKNNVDDILTKGFINRQLVETRQIVKSVANLILDYYNEQIDVIEVKASLSTSVRKMLTYEKKDNNGFWIENKDNCMFYKNRDMNDYHHAHDAYLANIIGLYIQKNYPRLQKELNYSQYRRIWRKYYENTKNNNGVNWFATLGKFSSNNEEADWYGQDIIAYMRKIFCYRDVLISKKVEENTGAFYSETKYPREDKAGSKLVPLKQGNNMRGANNLKELDTRKYGGYKGGEKAYFVLVKYCIEKALKKSVKKEYHMEFVEIPVYIARGIKNNDINLYDYVCDILNEANKNSVADVEILRNKVPKYQMIIGENGEEYYLVSATEVINSKQFVLGGANQQYNRLLNYIKYGKNDKWQYIQTELLDEQLIGLYNLLIAKIKDEYKGFSKEAVRIQENNSFDKLDVKDKKEFIAEMIKLVQPDSDYPYLGKYATGLSNRMGRKTGEKVGKKITLVDKSVTGLYERRTTFELEDDSSTKSC

SEQ ID NO: 21774 - protein, 1446 aa, unidentified
  REGION 1..1446: note = Cas Enzyme sequence
MYNIGLDIGTGSVGWCLTDNNGHLLKINRKGDNGKTYRNSAWGVRLFASADTAADCRIKRSTRRRYNRRRTRVIELRKIMSEMIMPVDPNFYARLDEAFLWNEDKSDKAKAPFLLFNDKELYDIKYYKKYPTIYHLRKYLLETKEKADPRFIYLALHHMMKYRGHFLFEGQSFEAIDNIKDTFIELEQLINVYVKGKEEIEDNNKNNDKYEAIKICLADNKVKNKDKKENITDIFIKAGYDNKYSKELAAAVLGYEFNVGIIVNDNSLTDEDGKALKAKFADARYEEQEEKLSDTLGERYYVVETLKKIYSWKVLHSILGDNKYLSYAMVDKYEKHSEQLKALKYLFHKYTSQDKYNDFFHKEKCYKNDKDEKDANEEKNNNEKKCDKWKYIVNYANYIKGIKRLSNETNKKYNTKQQLYQSIKEKLGESAADDEVYKNILVEMEQETFLEKINNVDNSAIPYQLNLMEMDKILTQQGVYYKELRDNKELLLKMLSSKIPYYVGPLNNNSNGNRNFAWMTKKAGKENEKVYPWNVKDVVDIDVTAEDFITRMTNYCTYLPNEKVLPKESLLYQRYMLLEELSQIRIDGKKLSKEDRKAIIDDLFIGKGRVKVSDKDFKEYLDKVNYVKVNGKGYDVTGYQSDDGFACALSSYNKFRRILGYVDERNEKMIEDIIYWLTVFEDKDIVKRKINKQYADKFSDEQLKKILKLKFKGWGRYSAKLLNGIKGDMGTTIIEMLEDADERFAYCDYCPNFMRIINKDAKIKQIIDDNRPIYDGTKDLLEVIQDMHTSPANRRGIWQTMKVIEEIIEYIGEKPRQIYIEFAREDDFKAKNKRTDSRKKTVDKALKKLKKEVVDEYNENVYKELKQYENRLDEEKVYLYFMQNGKSLYTEEKLNLNEPENLEIDHIIPYSLSDDDSLDNKALVLKDENQKKGNKIVKETFPQSFSDIKMINYWKNLKKVGLISEKKYNNLQKNNVDDILTKGFINRQLVETRQIVKSVANLILDYYNEQIDVIEVKASLSTSVRKMLTYEKKDNNGFWEENKDNCMFYKNRDMNDYHHAHDAYLANIIGMYIQKNYPHLQKELNYSQYRRVWRKYYENTKNNNGVNWFATLGKFSSNNEEADWYGQDIIAYMRKIFCYRDVIISKKVEENTGAFYSETKYPREDKAGSKLVPLKQGNNMRGADNLKELDTRKYGGYKGGEKAYFVLVKYCIEKALKKKVKKEYHMEFVEIPVYIARDIKNKDINLYDYVCDILSEAYKNSVVDVEILRNKVPKYQMIIGENGEEYYLVGATEVINSKQFVLGGANQQYNRLLNYIMYGKNDKWQYIQTELLDEQLTGLYDLLLSKIKDEYKGFSKEAIRIQEDNSFYKLDVKNKKEFIAEMIKLVQPDSNYPYLGKYSTGLSDRMGRKSKEKVGKKITLVDKSVTGLYERRTTFELEDDSSTKSR

SEQ ID NO: 21775 - protein, 1425 aa, unidentified
  REGION 1..1425: note = Cas Enzyme sequence
MYNIGLDIGTGSVGWCLTDNNGHLLKINRKGDNGKTYRNSAWGVRLFASADTAADCRIKRSTRRRYNRRRTRVIELRKIMSEMIMPVDPNFYARLDEAFLWNEDKSDKAKAPFLLFNDKDLYDIKYYKKYPTIYHLRKYLLETKEKADPRFIYLALHHMMKYRGHFLFDGQSFEAIDNIKDTFIELEQLINAYVKGKEEIEDNNKNNDKYEAIKICLADNKVKNKDKKENITDIFIKAGYDNKYSKELAAAVLGYEFNVGIIVNDNSLTDEDGKALKAKFADAKYEEQEEKLSDTLGERYYIVEALKKIYSWKVLHSILGDSMFLSCAMVDKYEKHGEQLTALKNLFHKYVSQDEYSEFFHQEKNKEGKYIVNYANYIKGIKRLNNESNKNSNANQQLYQSIKKILGKRAADDEVYKNILTEMEQETFLEKINNVDNSAIPYQLNLIEMDKILTQQGVYYKELKDNKEILLKMLTSKIPYYVGPLNNNNKGNRNFAWMTKKAGKENEKVYPWNVKDVVDIDVTAEDFITRMTNYCTYLPNEKVLPKESLLYQRYMLLEELSQIRIDGKKLSKEDRKAIIDDLFIGKGRVKVSDKDFKEYLDKVNYVKVNGKGYDVTGYQSDDGFACALSSYNKFRRILGYVDERNEKMIEDIIYWLTVFEDKDIVKRKINKQYADKFSDEQLKKILKLKFKGWGRYSAKLLNGIKGDMGTTIIEMLEDADERFAYCDYCPNFMRIINKDEKIKQIIDDNRSIYDGTKDLLEVIQDMHTSPANRRGIWQTMKVIEEIIEYMGGKPQHIYIEFAREDDFKAKNKRTDSRKKTVDKALKKLKKEVVDEYNENVYKELKQYENRLDEEKVYLYFMQNGKSLYTEEELNLNEPENLEIDHIIPYSLSDDDSLDNKALVLKDENQKKGNKIVKETFPQSFSDIKMINYWKNLKKVGLISEKKYNNLQKNNVDDILTKGFINRQLVETRQIVKSVANLILDYYNEQIDVIEVKASLSTSVRKMLTYEKKDNNGFWEENKDNCMFYKNRNMNDYHHAHDAYLANIIGMYIQKNYPHLQKELNYSQYRRVWRKYYENTKNNNGVNWFATLGKFSSNNKETAWYGEDIIDYMRKIFCYRDVIISKKLEENTGAFYSETKYPREDKADSKLVPLKQGNNMRGANNLKELDTRKYGGYKGGEKAYFVLVKYCIEKALKKKVKKEYHMEFVEIPVYIARDIKNKDINLYDYVCDILSEAYKNSVVDVEILRNKVPKYQMIIGENGEEYYLVGATEVINSKQFVLGGANQQYNRLLNYIMYGKNDKWQYIQTELLDEQLTGLYDLLLSKIKDEYKGFSKEAIRIQEDNSFYKLDVKNKKEFIAEMIKLVQPDSNYPYLGKYSTGLSDRMGRKSKEKVGKKITLVDKSVTGLYERRTTFELEDDSSTKSR

SEQ ID NO: 21776 - protein, 1446 aa, unidentified
  REGION 1..1446: note = Cas Enzyme sequence
MYNIGLDIGTGSVGWCLTDNNGHLLKINRKGDNGKTYRNSAWGVRLFASADTAADCRIKRSTRRRYNRRRTRVIELRKIMSEMIMPVDPNFYARLDEAFLWNEDKSDKAKAPFLLFNDKDLYDIKYYKKYPTIYHLRKYLLETKEKADPRFIYLALHHMMKYRGHFLFEGQSFEAIDNIKDTFIELEQLINAYVKGKEEIEDNNKNNDKYEAIKICLADNKVKNKDKKENITDIFIKAGYDNKYSKELAAAVLGYEFNVGIIVNDNSLTDEDGKALKAKFADAKYEEQEEKLSDTLGERYYIVEALKKIYSWKVLHSILGDNKYLSYAMVDKYEKHSEQLKALKYLFHKYTSQDKYNDFFHKEKCYKNDKDEKDANEEKNNNEKKCDKWKYIVNYANYIKGIKRLSNETNKKYNTKQQLYQSIKEKLGERAADDEVYKNILTEMEQETFLEKINNVDNSAIPYQLNLIEMDKILTQQGVYYKELKDNKEILLKMLTSKIPYYVGPLNNNNKGNRNFAWMTKKAGKENEKVYPWNVKDVVDIDVTAEDFITRMTNYCTYLPNEKVLPKESLLYQRYMLLEELSQIRIDGKKLSKEDRKAIIEDLFIGKGRVKVSDKDFKEYLEKVNYVKVNGKGYDVTGYQSDDGFACALSSYNKFRRILGYVDERNEKMIEDIIYWLTVFEDKDIVKRKINKQYADKFSDEQLKKILKLKFKGWGRYSAKLLNGIKGDMGTTIIEMLEDADERFAYCDYCPNFMRIINKDEKIKQIIDDNRSIYDGTKDLLDIIQDMHTSPANRRGIWQTMKVIEEIIEYMGEKPQQIYIEFAREDDFKAKNKRTDSRKKAVDKALNKLKEEVIDEYNENVYKELKQYEKRLDEEKVYLYFMQNGKSLYTGEELNLNEPENLEIDHIIPYSLSDDDSLDNKALVLKKENQNKGNKIVKEAFPQSFSDSEMIDYWKNLKKARLISEKKFNNLQKNNVDDILTKGFINRQLVETRQIVKSVANLILDYYNEQIDVIEVKANLSVSVRKMLTYEKKDNNGFWVENNDNSMFYKNRHMNDYHHAHDAYLANIIGMYIQKNYPHLQKELNYSQYRKIWRKYYENVKNNNGVNWFATLGKFSSNNKETAWYGEDIIDYMRKIFCYRDVIISKKLEENTGAFYSETKYPREDKADSKLVPLKQGNNMRGANNLKELDTRKYGGYKGGEKAYFVLVKYCIEKALKKKVKKEYHMEFVEIPVYIARDIKNKDINLYDYVCDILSEAYKNSVVDVEILRNKVPKYQMIIGENGEEYYLVGATEVINSKQFVLGGANQQYNRLLNYIMYGKNDKWQYIQTELLDEQLTGLYDLLLSKIKDEYKGFSKEAIRIQEDNSFYKLDVKNKKEFIAEMIKLVQPDSNYPYLGKYSTGLSDRMGRKSKEKVGKKITLVDKSVTGLYERRTTFELEDDSSTKSR

SEQ ID NO: 21777 - protein, 1446 aa, unidentified
  REGION 1..1446: note = Cas Enzyme sequence
MFNIGLDIGTASVGWCLTDENGHLLKVNRKGDNGKTYRNSAWGVRLFESADTAADCRIKRSTRRRYNRRRMRIIELRKIMSDMIMPVDPNFYARLDEAFLWNEDKSDKAKAPFLLFNDNGYDDVKYYTDYPTIYHLRKHLLETKEKVDPRFIYLALHHMMKYRGHFLFEGQSFEAIDNIEDTFIELEHLVNVYVKEKEDTDNNAENNALYQEIKNYLADNKVKNKDKKEYITDTFIKADYDNKYSKELAAAVLGYEFNVGIIVNDNSLTDEDGKALKAKFADAKYEEKEEKLSDTLGERYYIIETLKKIYSWKVLHSILGDNKYLSYAMVDKYEKHSEQLKALKYLFHKYTSQDKYNDFFHKEKCYKNDKDEKDADEEKNNNEKKCDKWKYIVNYANYIKGIKRLSNETNKKYNTKQQLYQSIKEILGERAADDEVYKKILVEMEQETFLEKINNVDNSAIPYQLNLMEMDKILTQQGVYYKELRDNKELLLKMLSSKIPYYVGPLNNNSNGNRNFAWMTKKAGKENEKVYPWNVKDVVDIDVTAEDFITKMTNYCTYLPDEKVLPKESLLYQRYMLLEELSQIRIDGKKLSKEDRKAIIDDLFIGKGRVKVSDKDFKEYLNKVNYVKVNGKGYDVTGYQSDDDFACALSSYNKFRRILGHIDEQNGKMIEDIIYWITVFEDKDIVKRKINKQYADRLSAEQLKKILKLKFKGWGRYSSKLLNGIKGDMGTTIIEMLEDADERFAYCDYCPNFMQIINKDEKIKQIIDDNRPRYDGTKDLLDVIQDMHTSPANRRGIWQTMKAIEEIIEYMGEKPQQIYIEFAREDDPKAKNKRADSRKRAIDKALKKLKEDVVDEYNENVYKELKQYEKRLDEEKVYLYFMQNGKSLYTGKELNLNEPENLEIDHIIPYSLSDDNSLDNKALVLKKENQNKGNKIVKEAFPQSFSDSKMIDYWKNLKKAGLISEKKFNNLQKNNVEDILTKGFINRQLVETRQIVKSVANLILDYYNEQIDVIEVKASLSTSVRKMLTYEKKDNNGFWEENKDNCMFYKNRDMNDYHHAHDAYLANIIGMYIQKNYPHLQKELNYSQYRRVWRKYYENTKNNNGVNWFATLGKFSSNNEEADWYGQDIIAYMRKIFCYRDVLISKKVEENTGAFYSETKYPREDKAGSKLVPLKQGDNMRGANNLKELDTRKYGGYKGGEKAYFVLVKYCIEKALKKSVKKEYHMEFVEIPVYIARGIKNNDINLYDYVCDILNEANKNSVADVEILRNKVPKYQMIIGENGEEYYLVSATEVINSKQFVLGGANQQYNRLLNYIKYGKNDKWQYIQTELLDEQLIGLYNLLIAKIKDEYKGFSKEAVRIQENNSFDKLDVKDKKEFIAEMIKLVQPDSDYPYLGKYATGLSNRMGRKTGEKVGKKITLVDKSVTGLYERRTTFELEDDSSTKSR

SEQ ID NO: 21778 - protein, 1425 aa, unidentified
  REGION 1..1425: note = Cas Enzyme sequence
MYNIGLDIGTGSVGWCLTDENGYLLKVNRKGNNGNTYRNSAWGVRLFESADTAADCRIKRSTRRRYNRRRTRIIELRKIMSDMIMPIDPNFYARLDEAFLWNEDKSDKAKAPFLLFNDNGYDDVKYYTDYPTIYHLRKHLLETKEKVDPRFIYLVLHHMMKYRGHFLFEGQSFEAIDNIEDTFIELEHLVNVYVKEKEDTDNNAENNALYQEIKNYLADNKVKNKDKKEYITDTFIKADYDNKYSKELAAAVLGYEFNVGIIVNDNSLTDEDGKALKAKFADAKYEEKEEKLSDTLGERYYIIETLKKIYSWKVLHSILGDNKYLSYAMVDKYEKHSEQLKALKYLFHKYTSQDEYSEFFHQEKNKEGKYIVNYANYIKGIKRLSNETNKKYNTKQQLYQSIKEILGERAADDEVYKKILVEMEQETFLEKINNVDNSAIPYQLNLMEMDKILTQQGVYYKELRDNKELLLKMLTSKIPYYVGPLNNNNKGNRNFAWMTKKAGKENEKVYPWNVKDVVDIDVTAEDFITRMTNYCTYLPDEKVLPKESLLYQRYMLLEELSQIRIDGRKLSKEDRKAIIDDLFIGKGRVKVSDKDFKEYLNKINYVKINDKGYDVTGYQSDDGFACALSSYNKFRRVLGYVDERNEKMIEDIIYWLTVFEDKDIVKRKINKQYPDRLTDEQLKKILKLKFKGWGRFSRKFLAGIKGDMGTTIIDMLEDADDRFLYCNYCPNLMQIINKDEKIKQIIDDNRPRYDGTEDLLDVIQDMHTSPANRRGIWQTMKAIEEIIEYMGEKPQQIYIEFAREDDPKAKNKRADSRKRAIDKALKKLKEDVVDEYNEKVYKELKQYEKRLDEEKVYLYFMQNGKSLYTGKELNLNEPENLEIDHIIPYSLSDDDSLDNKALVLKKENQNKGNKIVKEAFTQSFSDSEMMDYWKNLKKAGLISEKKYNNLQKNNVDDILTKGFINRQLVETRQIVKSVANLILDYYNEQIDVIEVKASLSTSVRKMLTYEKKDNNGFWIENKDNCMFYKNRDMNDYHHAHDAYLANIIGLYIQKNYPRLQKELNYSQYRRIWRKYYENTKNNNGVNWFATLGKFSSNNEEADWYGQDIIAYMRKIFCYRDVLISKKVEENTGAFYSETKYPREDKAGSKLVPLKQGNNMRGANNLKELDTRKYGGYKGGEKAYFVLVKYCIEKALKKSVKKEYHMEFVEIPVYIARGIKNNDINLYDYVCDILNEANKNSVADVEILRNKVPKYQMIIGENGEEYYLVGATEVANSKQFVLGGANQRYNRLLNYISYGKNDKWQYIQTELLDEQLIGLYNLLIAKIKDEYKGFSKEVVKIQENNSFDKLDVKNKKEFIAEMIKLVQPDSRYPDLGKYATGLSDRMGRKSKEKVGKKITLVDKSVTGLYERRTTFELEDDSSTKSR

SEQ ID NO: 21779 - protein, 1425 aa, unidentified
  REGION 1..1425: note = Cas Enzyme sequence
MYNIGLDIGTGSVGWCLTNENGYLLKVNRKGNNGNTYRNSAWGVRLFESADTAADCRIKRSTRRRYKRRRTRIIELRKIMSDMIMPIDPNFYARLDEAFLWNEDKSDKAKAPFLLFNDNGYDDVKYYTDYPTIYHLRKHLLETKEKADPRFIYLALHHMMKYRGHFLFEGQSFEAIDNIEDTFIELEHLVNVYVKEKEDTDNNAENNALYQEMKNYLADNKVKNKDKKEYITDTFIKADYDNKYSKELAAAVLGYEFNVGIIVNDNSLTDEDGKALKAKFADAKYEEKEEKLSDTLGERYYIIETLKKIYSWKVLHSILGDNKYLSYAMVDKYEKHSEQLKALKYLFHKYTSQDEYSEFFHQEKNKEGKYIVNYANYIKGIKRLSNETNKKYNTKQQLYQSIMKILGERAADDEVYKKILVEMEQETFLEKINNVDNSAIPYQLNLMEMDKILTQQGVYYKELRDNKELLLKMLTSKIPYYVGPLNNNSNGNRNFAWMTKKDGKENEKVYPWNVKDVVDIDVTAEDFITRMTNYCTYLPNEKVLPKESLLYQRYMLLEELSQIRIDGRKLSKEDRKAIINDLFIGKGRVKVSDKDFKEYLNKVNYVKVNGKGYDVTGYQSDDGFACALSSYNKFRRILGHIDEQNEKMIEDIIYWITVFEDKDIVKRKINKQYADRLSAEQLKKILKLKFKGWGRYSSKLLNGIKGDMGTTIIEMLEDADERFAYCDYCPNFMQIINKDEKIKQIIDDNRPRYDGTKDLLDVIQDMHTSPANRRGIWQTMKAIEEIIEYMGEKPQQIYIEFAREDDPKAKNKRADSRKRAIDKALKKLKEDVVDEYNEKVYKELKQYEKRLDEEKVYLYFMQNGKSLYTGKELNLNEPENLEIDHIIPYSLSDDDSLDNKALVLKKENQNKGNKIVKEAFTQSFSDSEMMDYWKNLKKSGLISEKKYNNLQKNNVDDILTKGFINRQLVETRQIVKSVANLILDYYNEQIDVIEVKASLSTSVRKMLTYEKKDNNGFWIENKDNCMFYKNRDMNDYHHAHDAYLANIIGLYIQKNYPRLQKELNYSQYRRIWRKYYENTKNNNGVNWFATLGKFSSNNEEADWYGQDIIAYMRKIFCYRDVLISKKVEENTGAFYSETKYPREDKAGSKLVPLKQGNNMRGANNLKELDARKYGGYKGGEKAYFVLVKYCIEKALKKKVKKEYHMEFVEIPVYIARGIKNKDINLYDYVCDILNEANKNSVADVEILRNKVPKYQMIIGENGEEYYLVSATEVINSKQFVLGGANQQYNRLLNYIKYGKNDKWQYIQTELLDEQLIGLYNLLIAKIKDEYKGFSKEAVRIQENNSFDKLDVKDKKEFIAEMIKLVQPDSDYPYLGKYATGLSNRMGRKTGEKVGKKITLVDKSVTGLYERRTTFELEDDSSTKSC

SEQ ID NO: 21780 - protein, 1425 aa, unidentified
  REGION 1..1425: note = Cas Enzyme sequence
MYNIGLDIGTGSVGWCLTDNNGHLLKINRKGDNGKTYRNSAWGVRLFASADTAADCRIKRSTRRRYNRRRTRIIELRKIMSEMIMPVDPNFYARLDEAFLWNDDKSDKAKAPFLLFNDKDLYDIKYYKKYPTIYHLRKYLLETKEKADPRFIYLALHHMMKYRGHFLYEGQTFEAIDNIEDAFIELEQLINVYVNKNEEIENNVKNNDLYKSIKNYLADNKIKNKDKKEYITDIFIKAGYDKKYSKELAAAVLGYEFNVGIIVNDNSLTDEDGKTLKVKFADPKYEEKEEKLNDTLGEIYYIVEVLKKIYSWKVLHSILGDSMYLSYAMADKYEKHREQLMALKKLFHKYVSQDEYSEFFHQEKNKEGKYIVNYANYIKGIKRLNNETNKNSNANQQLYQSIKKILDKRAADDEVYKNILTEMEQETFLEKINNVDNSAIPYQLNLIEMDKILTQQGVYYKELKDNKEILLKMLTSKIPYYVGPLNNNNKGNRNFAWMTKKAGKENEKVYPWNVKDVVDIDVTAEDFITRMTNYCTYLPNEKVLPKESLLYQRYMLLEELSQIRIDGKKLSKEDRKAIINDLFIGKGSVKVSDKDFKEYLDKVNYVKVNGKGYDVTGYQSDDGFACALSSYNKFRRILGYVDERNEKMIEDIIYWLTVFEDKDIVKRKINKQYADKFSDEQLKKILKLKFKGWGRYSAKLLNGIKGDMGTTIIEMLEDADERFAYCDYCPNFMRIINKDEKIKQIIDDNRSIYDGTKDLLDIIQDMHTSPANRRGIWQTMKVIEEIIEYMGEKPQQIYIEFAREDDFKAKNKRTDSRKKAVDKALNKLKEEVIDEYNENVYKELKQYEKRLDEEKVYLYFMQNGKSLYTGEELNLNEPENLEIDHIIPYSLSDDDSLDNKALVLKKENQNKGNKIVKEAFPQSFSDSEMIDYWKNLKKARLISEKKFNNLQKNNVDDILTKGFINRQLVETRQIVKSVANLILDYYNEQIDVIEVKANLSVSVRKMLTYEKKDNNGFWVENNDNSMFYKNRHMNDYHHAHDAYLANIIGMYIQKNYPHLQKELNYSQYRKIWRKYYENAKNNNGVNWFATLGKFSSNNKETAWYGEDIIAYMRKIFCYRDVIISKKLEENTGAFYSETKYPREDKADSKLVPLKQGNNMRGADNLKELDTRKYGGYKGGEKAYFVLVKYCIEKALKKKVKKEYHMEFVEIPVYIARDIKNKDINLYDYVCDILSEAYKNSVVDVEILRNKVPKYQMIIGENGEEYYLVGATEVINSKQFVLGGANQQYNRLLNYIMYGKNDKWQYIQTELLDEQLTGLYDLLLSKIKDEYKGFSKEAIRIQEDNSFYKLDVKNKKEFIAEMIKLVQPDSNYPYLGKYSTGLSDRMGRKSKEKVGKKITLVDKSVTGLYERRTTFELEDDSSTKSR

SEQ ID NO: 21781 - protein, 1425 aa, unidentified
  REGION 1..1425: note = Cas Enzyme sequence
MYNIGLDIGTGSVGWCLTDNNGHLLKINRKGDNGKTYRNSAWGVRLFASADTAADCRIKRSTRRRYNRRRTRVIELRKIMSEMIMPVDPNFYARLDEAFLWNEDKSDKAKAPFLLFNDKELYDIKYYKKYPTIYHLRKYLLETKEKADPRFIYLALHHMMKYRGHFLYEGQTFEAIDNIKDTFIELEQLINVYVKEKEETEYNNKNNNQYEAIKNCLADNKVKNKDKKENITDIFIKVGYDNKYSKELAAAVLGYEFNVGIIVNDNSLTDEDGKALKAKFADAKYEEQEEKLSDTLGERYYIVEALKKIYSWKVLHSILGDSMFLSCAMVDKYEKHGEQLKALKNLFHKYVSQDEYSEFFHQEKNKEGKYIVNYANYIKGIKRLNNETNKNSNANQQLYQSIKKILDKRAADDEVYKNILTEMEQETFLEKINNVDNSAIPYQLNLIEMDKILTQQGVYYKELKDNKELLLKMLTSKIPYYVGPLNNNNKGNRNFAWMTKKAGKENEKVYPWNVKDVVDIDVTAEDFITRMTNYCTYLPNEKVLPKESLLYQRYMLLEELSQIRIDGKKLSKEDRKAIIDDLFIGKGRVKVSDKDFKEYLDKVNYVKVNGKGYDVTGYQSDDGFACALSSYNKFRRILGYVDERNEKMIEDIIYWLTVFEDKDIVKRKINKQYADKFSDEQLKKILKLKFKGWGRYSAKLLNGIKGDMGTTIIEMLEDADERFAYCDYCPNFMRIINKDEKIKQIIDDNRSIYDGTKDLLDIIQDMHTSPANRRGIWQTMKVIEEIIEYMGEKPQQIYIEFAREDDFKAKNKRTDSRKKAVDKALNKLKEEVIDEYNENVYKELKQYEKRLDEEKVYLYFMQNGKSLYTGEELNLNEPENLEIDHIIPYSLSDDDSLDNKALVLKKENQNKGNKIVKEAFPQSFSDSEMIDYWKNLKKAGLISEKKYNNLQKNNVDDILTKGFINRQLVETRQIVKAVANLIRDYYNEQIDVIEVKANLSTSVRNMLTYEKKDNNGFWVENKDNCMFYKNRHMNDYHHAHDAYLANIIGMYIQKNYPYLQKELNYSQYRKIWRKYYENAKNNNGVNWFATLGKFSSNNEDTGWYGEGIIAYMRKIFCYRDVIISKKLEENTGAFYSETKYPREDKADSKLVPLKQGNNMRGANNLKELDTRKYGGYKGGEKAYFVLVKYCSEKVLKKSVKKEYHMEFVEIPVYIARGIKNNNINLYDYVCDTLKGTNKNNISDVAILRDKVPKYQMIIGENGEEYYLVSATEVINSKQFVLGGANQQYNRLLNYITYGENDKWQYIQTELLDDQLTGLYDLLLSKIKDEYKGFSKEAIRIQENNSFYKLDVKNKKEFIAEMIKLVQPDSNYPYLGKYATGLSDRMGRKAGEKVGKKITLVDKSVTGLYERRTTFELEDDSSTKSR

SEQ ID NO: 21782 - protein, 965 aa, unidentified
  REGION 1..965: note = Cas Enzyme sequence
  REGION 119..134: note = misc_feature - Xaa can be any naturally occurring amino acid
  REGION 945..947: note = misc_feature - Xaa can be any naturally occurring amino acid
NKYSKELAAAVLGYEFNVGIIVNDNSLTDEDGKALKAKFADAKYEEQEEKLSDKLGERYYIVEALKKIYSWKVLHSILGDSMLLSYAMVDKYEKHREQLTALKNLFHKYVSQDEYSEFXXXXXXXXXXXXXXXXYIVNYANYIKGIKRLSNETNKKYNTKQQLYQSIMKILGERAADDEVYKKILVEMEQETFLEKINNVDNSAIPYQLNLMEMDKILTQQGVYYKELRDNKELLLKMLTSKIPYYVGPLNNNNKGNRNFAWMTKKAGKENEKVYPWNVKDVVDIDVTAEDFITRMTNYCTYLPDEKVLPKESLLYQRYMLLEELSQIRIDGRKLSKEDRKAIIDDLFIGKGRVKVSDKDFKEYLDKVNYVKVNSKGYDVTGYQSDDGFACALSSYNKFRRILGHIDEQNEKMIEDIIYWITVFEDKDIVKRKINKQYADRLSAEQLKKILKLKFKGWGRYSSKLLNGIKGDMGTTIIEMLEDADERFAYCDYCPNFMQIINKDEKIKQIIDDNRPRYDGTKDLLDVIQDMHTSPANRRGIWQTMKAIEEIIEYMGEKPQQIYIEFAREDDPKAKNKRADSRKRAIDKALKKLKEDVVDEYNENVYKELKQYEKRLDEEKVYLYFMQNGKSLYTGKELNLNEPENLEIDHIIPYSLSDDNSLDNKALVLKKENQNKGNKIVKEAFPQSFSDSKMIDYWKNLKKAGLISEKKFNNLQKNNVEDILTKGFINRQLVETRQIVKSVANLILDYYNEQIDVIEVKASLSTSVRKMLTYEKKDNNGFWEENKDNCMFYKNRDMNDYHHAHDAYLANIIGMYIQKNYPHLQKELNYSQYRRVWRKYYENTKNNNGVNWFATLGKFSSNNEEADWYGQDIIAYMRKIFCYRDVLISKKVEENTGAFYSETKYPREDKAGSKLVPLKQGDNMRGANNLKELDTRKYGGYKGGXXXSLFCTCKILYRKGTEEEC

SEQ ID NO: 21783 - protein, 1446 aa, unidentified
  REGION 1..1446: note = Cas Enzyme sequence
MYNIGLDIGTGSVGWCLTDNNGHLLKINRKGDNGKTYRNSAWGVRLFASADTAADCRIKRSTRRRYNRRRTRVIELRKIMSEMIMPVDPNFYARLDEAFLWNEDKSDKAKAPFLLFNDKELYDIKYYKKYPTIYHLRKYLLETKEKADPRFIYLALHHMMKYRGHFLFEGQSFEAIDNIKDTFIELEQLINVYVKGKEEIEDNNKNNDKYEAIKICLADNKVKNKDKKENITDIFIKAGYDNKYSKELAAAVLGYEFNVGIIVNDNSLTDEDGKALKAKFADAKYEEQEEKLSDTLGERYYVVETLKKIYSWKVLHSILGDNKYLSYAMVDKYEKHSEQLKALKYLFHKYTSQDKYNDFFHKEKCYKNDKDEKDANEEKNNNEKKCDKWKYIVNYANYIKGIKRLSNETNKKYNTKQQLYQSIKEKLGESAADDEVYKNILVEMEQETFLEKINNVDNSAIPYQLNLMEMDKILTQQGVYYKELRDNKELLLKMLSSKIPYYVGPLNNNSNGNRNFAWMTKKAGKENEKVYPWNVKDVVDIDVTAEDFITRMTNYCTYLPNEKVLPKESLLYQRYMLLEELSQIRIDGKKLSKEDRKAIIDDLFIGKGRVKVSDKDFKEYLDKVNYVKVNGKGYDVTGYQSDDGFACALSSYNKFRRILGYVDERNEKMIEDIIYWLTVFEDKDIVKRKINKQYADKFSDEQLKKILKLKFKGWGRYSAKLLNGIKGDMGTTIIEMLEDADERFAYCDYCPNFMRIINKDAKIKQIIDDNRPIYDGTKDLLEVIQDMHTSPANRRGIWQTMKVIEEIIEYIGEKPRQIYIEFAREDDFKAKNKRTDSRKKTVDKALKKLKKEVVDEYNENVYKELKQYENRLDEEKVYLYFMQNGKSLYTEEKLNLNEPENLEIDHIIPYSLSDDDSLDNKALVLKDENQKKGNKIVKETFPQSFSDIKMINYWKNLKKVGLISEKKYNNLQKNNVDDILTKGFINRQLVETRQIVKSVANLILDYYNEQIDVIEVKASLSTSVRKMLTYEKKDNNGFWEENKDNCMFYKNRDMNDYHHAHDAYLANIIGMYIQKNYPHLQKELNYSQYRRVWRKYYENTKNNNGVNWFATLGKFSSNNEEADWYGQDIIAYMRKIFCYRDVIISKKVEENTGAFYSETKYPREDKAGSKLVPLKQGNNMRGADNLKELDTRKYGGYKGGEKAYFVLVKYCIEKALKKKVKKEYHMEFVEIPVYIARDIKNKDINLYDYVCDILSEAYKNSVVDVEILRNKVPKYQMIIGENGEEYYLVGATEVINSKQFVLGGANQQYNRLLNYIMYGKNDKWQYIQTELLDEQLTGLYDLLLSKIKDEYKGFSKEAIRIQEDNSFYKLDVKNKKEFIAEMIKLVQPDSNYPYLGKYSTGLSDRMGRKSKEKVGKKITLVDKSVTGLYERRTTFELEDDSSTKSR

SEQ ID NO: 21784 - protein, 1424 aa, unidentified
  REGION 1..1424: note = Cas Enzyme sequence
MYNIGLDIGTGSVGWCLTDENGYLLKVNRKGNNGNTYRNSAWGVRLFESADTAADCRIKRSTRRRYNRRRTRIIELRKIMSDMIMPIDPNFYARLDEAFLWNEDKSDKAKAPFLLFNDKEYNDKKYYEDFKTIYHLRKYLINTTNKVDARLIYLALHHMMKYRGHFLYEGQTFESIDNVEDVFVELNNLVNAYIKECEDKDGNEYNDVYREIKKCLADNEIKNKDKKELIAAMFMRADYSKKYSKEVAVAILGYEFNVGIIVGENELTGEDNKPLKTKFSDANYEEQEENISSVLGEKYSIIEALKKIYSWKVLHGILGDNTYISSAMFAKYNIHKQQLSELKQLFHKYASQDEYSDFFHKEKDKSGNYIVNYANYIKGIKRLTNKDNKNYSAKQQLYISIRKILDDRALKDETYQKILKEMEEETFLEKINNVDNSAIPYQLNLMEMDKILTQQGVYYKELRDNKELLLKMLTSKIPYYVGPLNNNNKGNRNFAWMTKKAGKENEKVYPWNVKDVVDIDVTAEDFITRMTNYCTYLPDEKVLPKESLLYQRYMLLEELSQIRIDGRKLSKEDRKAIIDDLFIGKGRVKVSDKDFKEYLNKINYVKINDKGYDVTGYQSDDGFACALSSYNKFRRVLGYVDERNEKMIEDIIYWLTVFEDKDIVKRKINKQYPDRLTDEQLKKILKLKFKGWGRFSRKFLAGIKGDMGTTIIDMLEDADDRFLYCNYCPNLMQIINKDEKIKQIIDDNRPRYDGTEDLLDVIQDMHTSPANRRGIWQTMKVIEEIIEYMGEKPQQIYIEFAREDDLKAKNKRTDSRKRVIDKALKKLKEEVVDEYNENVYKELKQYEKRLDEEKVYLYFMQNGKSLYTGEELNLNEPGNLEIDHIIPYSLSDDDSLDNKALVLKRENQNKGNKIVKEAFLQSFSDSKMIDYWKNLKKAGLISEKKFNNLQKNNVEDILTKGFINRQLVETRQIVKSVANLILDYYNEQIDVIEVKASLSTSVRKMLTYEKKDSNGFWEENKDNCMFYKNRDMNDYHHAHDAYLANIIGMYIQKNYPHLQKELNYSQYRRVWRKYYENTKNNNGVNWFATLGKFSSNNEEADWYGQDIIAYMRKIFCYRDVLISKKVEENTGAFYSETKYPREDKADSKLVPLKQGNNMRGANNLKELDTRKYGGYKGGEKAYFVLVKYCIEKALKKKVKKEYHMEFVEIPVYIARGIKNKDINLYDYVCDILNEANKNSVADVEILRNKVPKYQMIIGENGEEYYLVGATEVANSKQFVLGGANQRYNRLLNYISYGKNDKWQYIQTELLDEQLIGLYNLLIAKIKDEYKGFSKEVVRIQENNSFDKLDVKNKKEFIAEMIKLVQPDSRYPDLGKYATGLSDRMGRKSKEKVGKKITLVDKSVTGLYERRTTFELEDDSSTKSR

SEQ ID NO: 21785 - protein, 1425 aa, unidentified
  REGION 1..1425: note = Cas Enzyme sequence
MYNIGLDIGTGSVGWCLTDENGYLLKVNRKGNNGNTYRNSAWGVRLFESADTAADCRIKRSTRRRYNRRRTRIIELRKIMSDMIMPIDPNFYARLDEAFLWNEDKSDKAKAPFLLFNDNGYDDVKYYTDYPTIYHLRKHLLEMEGRADARLIYLALHHMMKYRGHFLFEGQSFEAIDNIEDTFIELEHLVNVYVKEKEDTDNNSKNNALYQTIKNYLADNKVKNKDKKEDITDTFIKAGYDNKYSKELAAAVLGYEFNIGIIVNDNNLTDENGKALKVKFADAKYEEQDEKLSDTLGERYYVVETLKKIYSWKVLHSILGDNKYLSYAMVDKYKKHGEQLTALKELFHKYTSQDEYNDFFHHEKDENGKYIVNYANYIKGIKRLSNETNKKYNTKQQLYQSIKEKLGERAADDEVYKKILVEMEQETFLEKINNVDNSAIPYQLNLMEMDKILTQQGVYYKELRDNKELLLKMLTSKIPYYVGPLNNNNKGNRNFAWMTKKAGKENEKVYPWNVKDVVDIDVTAEDFITRMTNYCTYLPDEKVLPKESLLYQRYMLLEELSQIRIDGRKLSKEDRKAIIDDLFIGKGRVKVSDKDFKEYLNKINYVKINDKGYDVTGYQSDDGFACALSSYNKFRRVLGYVDERNEKMIEDIIYWLTVFEDKDIVKRKINKQYPDRLTDEQLKKILKLKFKGWGRFSRKFLAGIKGDMGTTIIDMLEDADDRFLYCNYCPNLMQIINKDEKIKQIIDDNRPRYDGTEDLLDVIQDMHTSPANRRGIWQTMKAIEEIIEYMGEKPQQIYIEFAREDDPKAKNKRADSRKRAIDKALKKLKEDVVDEYNEKVYKELKQYEKRLDEEKVYLYFMQNGKSLYTGKELNLNEPENLEIDHIIPYSLSDDDSLDNKALVLKKENQNKGNKIVKEAFTQSFSDSEMMDYWKNLKKAGLISEKKYNNLQKNNVDDILTKGFINRQLVETRQIVKSVANLILDYYNEQIDVIEVKASLSTSVRKMLTYEKKDNNGFWIENKDNCMFYKNRDMNDYHHAHDAYLANIIGLYIQKNYPRLQKELNYSQYRRIWRKYYENTKNNNGVNWFATLGKFSSNNEEADWYGQDIIAYMRKIFCYRDVLISKKVEENTGAFYSETKYPREDKAGSKLVPLKQGNNMRGANNLKELDTRKYGGYKGGEKAYFVLVKYCIEKALKKSVKKEYHMEFVEIPVYIARGIKNNDINLYDYVCDILNEANKNSVADVEILRNKVPKYQMIIGENGEEYYLVSATEVINSKQFVLGGANQQYNRLLNYIKYGKNDKWQYIQTELLDEQLIGLYNLLIAKIKDEYKGFSKEAVRIQENNSFDKLDVKDKKEFIAEMIKLVQPDSDYPYLGKYATGLSNRMGRKTGEKVGKKITLVDKSVTGLYERRTTFELEDDSSTKSC

SEQ ID NO: 21786 - protein, 1446 aa, unidentified
  REGION 1..1446: note = Cas Enzyme sequence
MYNIGLDIGTGSVGWCLTDNNGHLLKINRKGDNGKTYRNSAWGVRLFASADTAADCRIKRSTRRRYNRRRTRVIELRKIMSEMIMPVDPNFYARLDEAFLWNEDKSDKAKAPFLLFNDKDLYDIKYYKKYPTIYHLRKYLLETKEKADPRFIYLALHHMMKYRGHFLFEGQSFEAIDNIKDTFIELEQLINAYVKGKEEIEDNNKNNDKYEAIKICLADNKVKNKDKKENITDIFIKAGYDNKYSKELAAAVLGYEFNVGIIVNDNSLTDEDGKALKAKFADAKYEEQEEKLSDTLGERYYIVEALKKIYSWKVLHSILGDNKYLSYAMVDKYEKHSEQLKALKYLFHKYTSQDKYNDFFHKEKCYKNDKDEKDANEEKNNNEKKCDKWKYIVNYANYIKGIKRLSNETNKKYNTKQQLYQSIKEKLGERAADDEVYKNILTEMEQETFLEKINNVDNSAIPYQLNLIEMDKILTQQGVYYKELKDNKEILLKMLTSKIPYYVGPLNNNNKGNRNFAWMTKKAGKENEKVYPWNVKDVVDIDVTAEDFITRMTNYCTYLPNEKVLPKESLLYQRYMLLEELSQIRIDGKKLSKEDRKAIIEDLFIGKGRVKVSDKDFKEYLDKVNYVKVNGKGYDVTGYQSDDGFACALSSYNKFRRILGYVDERNEKMIEDIIYWLTVFEDKDIVKRKINKQYADKFSDEQLKKILKLKFKGWGRYSAKLLNGIKGDMGTTIIEMLEDADERFAYCDYCPNFMRIINKDEKIKQIIDDNRSIYDGTKDLLDIIQDMHTSPANRRGIWQTMKVIEEIIEYMGEKPQQIYIEFAREDDFKAKNKRTDSRKKAVDKALNKLKEEVIDEYNENVYKELKQYEKRLDEEKVYLYFMQNGKSLYTGEELNLNEPENLEIDHIIPYSLSDDDSLDNKALVLKKENQNKGNKIVKEAFPQSFSDSEMIDYWKNLKKARLISEKKFNNLQKNNVDDILTKGFINRQLVETRQIVKSVANLILDYYNEQIDVIEVKANLSVSVRKMLTYEKKDNNGFWVENNDNSMFYKNRHMNDYHHAHDAYLANIIGMYIQKNYPHLQKELNYSQYRKIWRKYYENVKNNNGVNWFATLGKFSSNNKETAWYGEDIIDYMRKIFCYRDVIISKKLEENTGAFYSETKYPREDKADSKLVPLKQGNNMRGANNLKELDTRKYGGYKGGEKAYFVLVKYCIEKALKKKVKKEYHMEFVEIPVYIARDIKNKDINLYDYVCDILSEAYKNSVVDVEILRNKVPKYQMIIGENGEEYYLVGATEVINSKQFVLGGANQQYNRLLNYIMYGKNDKWQYIQTELLDEQLTGLYDLLLSKIKDEYKGFSKEAIRIQEDNSFYKLDVKNKKEFIAEMIKLVQPDSNYPYLGKYSTGLSDRMGRKSKEKVGKKITLVDKSVTGLYERRTTFELEDDSSTKSR

SEQ ID NO: 21787 - protein, 1425 aa, unidentified
  REGION 1..1425: note = Cas Enzyme sequence
MYNIGLDIGTGSVGWCLTDENGYLLKVNRKGNNGNTYRNSAWGVRLFESADTAADCRIKRSTRRRYNRRRTRIIELRKIMSDMIMPIDPNFYARLDEAFLWNEDKSDKAKAPFLLFNDNGYDDVKYYTDYPTIYHLRKHLLETKEKADPRFIYLALHHIMKYRGHFLFEGQSFEAIDNIEDTFIELEHLVNVYVKEKEDTDNNAENNALYQEIKNYLADNKVKNKDKKEYITDTFIKADYDNKYSKELAAAVLGYEFNVGIIVNDNSLTDEDGKALKAKFADAKYEEQEEKLSDKLGERYYIVEALKKIYSWKVLHSILGDSMLLSYAMVDKYEKHREQLTALKNLFHKYVSQDEYSEFFHQEKNKEGKYIVNYANYIKGIKRLSNETNKKYNTKQQLYQSIKEKLGERAADDEVYKKILVEMEQETFLEKINNVDNSAIPYQLNLMEMDKILTQQGVYYKELRDNKELLLKMLTSKIPYYVGPLNNNNKGNRNFAWMTKKAGKENEKVYPWNVKDVVDIDVTAEDFITRMTNYCTYLPDEKVLPKESLLYQRYMLLEELSQIRIDGRKLSKEDRKAIIDDLFIGKGRVKVSDKDFKEYLNKVNYVKVNSKGYDVTGYQSDDGFACALSSYNKFRRILGYVDERNEKMIEDIIYWLTVFEDKDIVKRKINKQYPDRLTDEQLKKILKLKFKGWGRFSRKFLAGIKGDMGTTIIDMLEDADDRFLYCNYCPNLMQIINKDEKIKQIIDDNRPRYDGTEDLLDVIQDMHTSPANRRGIWQTMKAIEEIIEYMGEKPQQIYIEFAREDDPKAKNKRADSRKRAIDKALKKLKEDVVDEYNEKVYKELKQYEKRLDEEKVYLYFMQNGKSLYTGKELNLNEPENLEIDHIIPYSLSDDDSLDNKALVLKKENQNKGNKIVKEAFTQSFSDSEMMDYWKNLKKAGLISEKKYNNLQKNNVDDILTKGFINRQLVETRQIVKSVANLILDYYNEQIDVIEVKASLSTSVRKMLTYEKKDNNGFWIENKDNCMFYKNRDMNDYHHAHDAYLANIIGLYIQKNYPRLQKELNYSQYRRIWRKYYENTKNNNGVNWFATLGKFSSNNEEADWYGQDIIAYMRKIFCYRDVLISKKVEENTGAFYSETKYPREDKAGSKLVPLKQGNNMRGANNLKELDTRKYGGYKGGEKAYFVLVKYCIEKALKKSVKKEYHMEFVEIPVYIARGIKNNDINLYDYVCDILNEANKNSVADVEILRNKVPKYQMIIGENGEEYYLVSATEVINSKQFVLGGANQQYNRLLNYIKYGKNDKWQYIQTELLDEQLIGLYNLLIAKIKDEYKGFSKEAVRIQENNSFDKLDVKDKKEFIAEMIKLVQPDSDYPYLGKYATGLSNRMGRKTGEKVGKKITLVDKSVTGLYERRTTFELEDDSSTKSC

SEQ ID NO: 21788 - protein, 1162 aa, unidentified
  REGION 1..1162: note = Cas Enzyme sequence
NDNSLTDEDGKALKAKFADAKYEEKEEKLSDTLGERYYIIETLKKIYSWKVLHSILGDNKYLSYAMVDKYEKHSEQLKALKYLFHKYTSQDEYSEFFHQEKNKEGKYIVNYANYIKGIKRLSNETNKKYNTKQQLYQSIKEILGERAADDEVYKKILVEMEQETFLEKINNVDNSAIPYQLNLMEMDKILTQQGVYYKELRDNKELLLKMLTSKIPYYVGPLNNNNKGNRNFAWMTKKAGKENEKVYPWNVKDVVDIDVTAEDFITRMTNYCTYLPDEKVLPKESLLYQRYMLLEELSQIRIDGRKLSKEDRKAIIDDLFIGKGRVKVSDKDFKEYLNKVNYVKVNSKGYDVTGYQSDDGFACALSSYNKFRRILGYVDERNEKMIEDIIYWLTVFEDKDIVKRKMNKQYADKLSDEQLKKILKLKFKGWGRYSAKLLNGIKGDMGTTIIEMLEDTDERFAYCDYCPNFMRIINKDEKIKQIIDDNRPIYDGTKDLLDVIQDMHTSPANRRGIWQTMKVIEEIIEYMGEKPQQIYIEFAREDDLKAKNKRTDSRKRVIDKALKKLKEEVVDEYNENVYKELKQYEKRLDEEKVYLYFMQNGKSLYTGEELNLNEPGNLEIDHIIPYSLSDDDSLDNKALVLKRENQNKGNKIVKEAFLQSFSDSKMIDYWKNLKKAGLISEKKFNNLQKNNVEDILTKGFINRQLVETRQIVKSVANLILDYYNEQIDVIEVKASLSTSVRKMLTYEKKDSNGFWEENKDNCMFYKNRDMNDYHHAHDAYLANIIGMYIQKNYPHLQKELNYSQYRRVWRKYYENTKNNNGVNWFATLGKFSSNNEEADWYGQDIIAYMRKIFCYRDVLISKKVEENTGAFYSETKYPREDKAGSKLVPLKQGNNMRGANNLKELDTRKYGGYKGGEKAYFVLVKYCIEKALKKKVKKEYHMEFVEIPVYIARGIKNKDINLYDYVCDILNEANKNSVADVEILRNKVPKYQMIIGENGEEYYLVGATEVANSKQFVLGGANQRYNRLLNYISYGKNDKWQYIQTELLDEQLIGLYNLLIAKIKDEYKGFSKEVVRIQENNSFDKLDVKNKKEFIAEMIKLVQPDSRYPDLGKYATGLSDRMGRKSKEKVGKKITLVDKSVTGLYERRTTFELEDDSSTKSR

SEQ ID NO: 21789 - protein, 1424 aa, unidentified
  REGION 1..1424: note = Cas Enzyme sequence
MYNIGLDIGTGSVGWCLTDENGYLLKVNRKGNNGNTYRNSAWGVRLFESADTAADCRIKRSTRRRYNRRRTRIIELRKIMSDMIMPIDPNFYARLDEAFLWNEDKSDKAKAPFLLFNDKEYNDKKYYEDFKTIYHLRKYLINTTNKVDARLIYLALHHMMKYRGHFLYEGQTFESIDNVEDVFVELNNLVNAYIKECEDKDGNEYNDVYREIKKCLADNEIKNKDKKELIAAMFMRADYSKKYSKEVAVAILGYEFNVGIIVGENELTGEDNKPLKTKFSDANYEEQEENISSVLGEKYSIIEALKKIYSWKVLHGILGDNTYISSAMFAKYNIHKQQLSELKQLFHKYASQDEYSDFFHKEKDKSGNYIVNYANYIKGIKRLTNKDNKNYSAKQQLYISIRKILDDRALKDETYQKILKEMEEETFLEKINNVDNSAIPYQLNLMEMDKILTQQGVYYKELRDNKELLLKMLTSKIPYYVGPLNNNNKGNRNFAWMTKKAGKENEKVYPWNVKDVVDIDVTAEDFITRMTNYCTYLPDEKVLPKESLLYQRYMLLEELSQIRIDGRKLSKEDRKAIIDDLFIGKGRVKVSDKDFKEYLNKINYVKINDKGYDVTGYQSDDGFACALSSYNKFRRVLGYVDERNEKMIEDIIYWLTVFEDKDIVKRKINKQYPDRLTDEQLKKILKLKFKGWGRFSRKFLAGIKGDMGTTIIDMLEDADDRFLYCNYCPNLMQIINKDEKIKQIIDDNRPRYDGTEDLLDVIQDMHTSPANRRGIWQTMKVIEEIIEYMGEKPQQIYIEFAREDDLKAKNKRTDSRKRVIDKALKKLKEEVVDEYNENVYKELKQYEKRLDEEKVYLYFMQNGKSLYTGEELNLNEPGNLEIDHIIPYSLSDDDSLDNKALVLKRENQNKGNKIVKEAFLQSFSDSKMIDYWKNLKKAGLISEKKFNNLQKNNVEDILTKGFINRQLVETRQIVKSVANLILDYYNEQIDAIEVKASLSTSVRKMLTYEKKDSNGFWEENKDNCMFYKNRDMNDYHHAHDAYLANIIGMYIQKNYPHLQKELNYSQYRRVWRKYYENTKNNNGVNWFATLGKFSSNNEEADWYGQDIIAYMRKIFCYRDVLISKKVEENTGAFYSETKYPREDKAGSKLVPLKQGNNMRGANNLKELDTRKYGGYKGGEKAYFVLVKYCIEKALKKKVKKEYHMEFVEIPVYIARGIKNKDINLYDYVCDILNEANKNSVADVEILRNKVPKYQMIIGENGEEYYLVGATEVANSKQFVLGGANQRYNRLLNYISYGKNDKWQYIQTELLDEQLIGLYNLLIAKIKDEYKGFSKEVVRIQENNSFDKLDVKNKKEFIAEMIKLVQPDSRYPDLGKYATGLSDRMGRKSKEKVGKKITLVDKSVTGLYERRTTFELEDDSSTKSR

SEQ ID NO: 21790 - protein, 1446 aa, unidentified
  REGION 1..1446: note = Cas Enzyme sequence
MYNIGLDIGTGSVGWCLTDNNGHLLKINRKGDNGKTYRNSAWGVRLFASADTAADCRIKRSTRRRYNRRRTRVIELRKIMSEMIMPVDPNFYARLDEAFLWNEDKSDKAKAPFLLFNDKELYDIKYYKKYPTIYHLRKYLLETKEKADPRFIYLALHHMMKYRGHFLFEGQSFEAIDNIKDTFIELEQLINVYVKGKEEIEDNNKNNDKYEAIKICLADNKVKNKDKKENITDIFIKAGYDNKYSKELAAAVLGYEFNVGIIVNDNSLTDEDGKALKAKFADAKYEEQEEKLSDTLGERYYVVETLKKIYSWKVLHSILGDNKYLSYAMVDKYEKHSEQLKALKYLFHKYTSQDKYNDFFHKEKCYKNDKDEKDANEEKNNNEKKCDKWKYIVNYANYIKGIKRLSNETNKKYNTKQQLYQSIKEKLGESAADDEVYKNILVEMEQETFLEKINNVDNSAIPYQLNLMEMDKILTQQGVYYKELRDNKELLLKMLSSKIPYYVGPLNNNSNGNRNFAWMTKKAGKENEKVYPWNVKDVVDIDVTAEDFITRMTNYCTYLPNEKVLPKESLLYQRYMLLEELSQIRIDGKKLSKEDRKAIIDDLFIGKGRVKVSDKDFKEYLDKVNYVKVNGKGYDVTGYQSDDGFACALSSYNKFRRILGYVDERNEKMIEDIIYWLTVFEDKDIVKRKINKQYADKFSDEQLKKILKLKFKGWGRYSAKLLNGIKGDMGTTIIEMLEDVDERFAYCDYCPNFMRIINKDAKIKQIIDDNRPIYDGTKDLLEVIQDMHTSPANRRGIWQTMKVIEEIIEYIGEKPRQIYIEFAREDDFKAKNKRTDSRKKTVDKALKKLKKEVVDEYNENVYKELKQYENRLDEEKVYLYFMQNGKSLYTEEKLNLNEPENLEIDHIIPYSLSDDDSLDNKALVLKDENQKKGNKIVKETFPQSFSDIKMINYWKNLKKVGLISEKKYNNLQKNNVDDILTKGFINRQLVETRQIVKSVANLILDYYNEQIDVIEVKASLSTSVRKMLTYEKKDNNGFWEENKDNCMFYKNRDMNDYHHAHDAYLANIIGMYIQKNYPHLQKELNYSQYRRVWRKYYENTKNNNGVNWFATLGKFSSNNEEADWYGQDIIAYMRKIFCYRDVIISKKVEENTGAFYSETKYPREDKAGSKLVPLKQGNNMRGADNLKELDTRKYGGYKGGEKAYFVLVKYCIEKALKKKVKKEYHMEFVEIPVYIARDIKNKDINLYDYVCDILSEAYKNSVVDVEILRNKVPKYQMIIGENGEEYYLVGATEVINSKQFVLGGANQQYNRLLNYIMYGKNDKWQYIQTELLDEQLTGLYDLLLSKIKDEYKGFSKEAIRIQEDNSFYKLDVKNKKEFIAEMIKLVQPDSNYPYLGKYSTGLSDRMGRKSKEKVGKKITLVDKSVTGLYERRTTFELEDDSSTKSR

SEQ ID NO: 21791 - protein, 1446 aa, unidentified
  REGION 1..1446: note = Cas Enzyme sequence
MFNIGLDIGTASVGWCLTDENGHLLKVNRKGDNGKTYRNSAWGVRLFESADTAADCRIKRSTRRRYNRRRMRIIELRKIMSDMIMPVDPNFYARLDEAFLWNEDKSDKAKAPFLLFNDNGYDDVKYYTDYPTIYHLRKHLLETKEKVDPRFIYLALHHMMKYRGHFLFEGQSFEAIDNIEDTFIELEHLVNVYVKEKEDTDNNAENNALYQEMKNYLADNKVKNKDKKEYITDTFIKADYDNKYSKELAAAVLGYEFNVGIIVNDNSLTDEDGKALKAKFADAKYEEKEEKLSDTLGERYYIIETLKKIYSWKVLHSILGDNKYLSYAMVDKYEKHSEQLKALKYLFHKYTSQDKYNDFFHKEKCYKNDKDEKDADEEKNNNEKKCDKWKYIVNYANYIKGIKRLSNETNKKYNTKQQLYQSIKEILGERAADDEVYKKILVEMEQETFLEKINNVDNSAIPYQLNLMEMDKILTQQGVYYKELRDNKELLLKMLTSKIPYYVGPLNNNNKGNRNFAWMTKKAGKENEKVYPWNVKDVVDIDVTAEDFITRMTNYCTYLPDEKVLPKESLLYQRYMLLEELSQIRIDGRKLSKEDRKAIINDLFIGKGKVKVSDKDFKEYLNKVNYVKVNGKGYDVTGYQSDDGFACALSSYNKFRRILGHIDEQNEKMIEDIIYWITVFEDKDIVKRKINKQYADRLSAEQLKKILKLKFKGWGRYSSKLLNGIKGDMGTTIIEMLEDADERFAYCDYCPNFMQIINKDEKIKLIIDDNRPRYDGTKDLLDVIQDMHTSPANKRGIWQTMKVIEEIIEYMGEKPQQIYIEFAREDDPKAKNKRTDSRKKAVDKALNKLKEEVIDEYNEKVYKELKQYEKRLDEEKVYLYFMQNGKSLYTGKELNLNESENLEIDHIIPYSLSDDNSLDNKALVLKKENQNKGNKIVKEAFPQSFSDSKMIDYWKNLKKAGLISEKKFNNLQKNNVEDILTKGFINRQLVETRQIVKSVANLILDYYNEQIDVIEVKASLSTSVRKMLTYEKKDNNGFWEENKDNCMFYKNRDMNDYHHAHDAYLANIIGMYIQKNYPHLQKELNYSQYRRVWRKYYENTKNNNGVNWFATLGKFSSNNEKADWYGQGIIAYMRKIFCYRDVIISKKVEENTGAFYSETKYPREDKTDSKLVPLKQGNNMRGANNLKELDTRKYGGYKGGEKAYFVLVKYCIEKALKKSVKKEYHMEFIGIPVYIARGIKNKDINLYDYVCDILNEANKNSVADVEILRNKVPKYQMIIGENGEEYYLVGATEVINSKQFVLGGANQRYNRLLNYITYGENDKWQYIQTELIDEQLIGLYNLLIAKIKDEYKGFSKEAVRIQENNSFDKLDVKNKKEFIAEMIKLVQPDSHYPDLGKYATGLSNRMGRKSKEKVGKKITLVDKSVTGLYERRTTFELEDDSSTKSR

SEQ ID NO: 21792 - protein, 1425 aa, unidentified
  REGION 1..1425: note = Cas Enzyme sequence
MYNIGLDIGTGSVGWCLTDENGYLLKVNRKGNNGNTYRNSAWGVRLFESADTAADCRIKRSTRRRYKRRRTRIIELRKIMSDMIMPIDPNFYARLDEAFLWNEDKSDKAKAPFLLFNDNGYDDVKYYTDYPTIYHLRKHLLETKEKADPRFIYLALHHMMKYRGHFLFEGQSFEAIDNIEDTFIELEHLVNVYVKEKEDTDNNAENNALYQEIKNYLADNKVKNKDKKEYITDTFIKADYDNKYSKELAAAVLGYEFNVGIIVNDNSLTDEDGKALKAKFADAKYEEKEEKLSDTLGERYYIIETLKKIYSWKVLHSILGDNKYLSYAMVDKYEKHSEQLKALKYLFHKYTSQDEYSEFFHQEKNKEGKYIVNYANYIKGIKRLSNETNKKYNTKQQLYQSIMKILGERAADDEVYKKILVEMEQETFLEKINNVDNSAIPYQLNLMEMDKILTQQGVYYKELRDNKELLLKMLTSKIPYYVGPLNNNSNGNRNFAWMTKKDGKENEKVYPWNVKDVVDIDVTAEDFITRMTNYCTYLPNEKVLPKESLLYQRYMLLEELSQIRIDGRKLSKEDRKAIINDLFIGKGRVKVSDKDFKEYLNKVNYVKVNGKGYDVTGYQSDDGFACALSSYNKFRRILGHIDEQNEKMIEDIIYWITVFEDKDIVKRKINKQYADRLSAEQLKKILKLKFKGWGRYSSKLLNGIKGDMGTTIIEMLEDADERFAYCDYCPNFMQIINKDEKIKQIIDDNRPRYDGTKDLLDVIQDMHTSPANRRGIWQTMKAIEEIIEYMGEKPQQIYIEFAREDDPKAKNKRADSRKRAIDKALKKLKEDVVDEYNEKVYKELKQYEKRLDEEKVYLYFMQNGKSLYTGKELNLNEPENLEIDHIIPYSLSDDDSLDNKALVLKKENQNKGNKIVKEAFTQSFSDSEMMDYWKNLKKSGLISEKKYNNLQKNNVDDILTKGFINRQLVETRQIVKSVANLILDYYNEQIDVIEVKASLSTSVRKMLTYEKKDNNGFWIENKDNCMFYKNRDMNDYHHAHDAYLANIIGLYIQKNYPRLQKELNYSQYRRIWRKYYENTKNNNGVNWFATLGKFSSNNEEADWYGQDIIAYMRKIFCYRDVLISKNVEENTGAFYSETKYPREDKAGSKLVPLKQGNNMRGANNLKELDTRKYGGYKGGEKAYFVLVKYCIEKALKKKVKKEYHMEFVEIPVYIARGIKNKDINLYDYVCDILNEANKNSVADVEILRNKVPKYQMIIGENGEEYYLVSATEVINSKQFVLGGANQQYNRLLNYIKYGKNDKWQYIQTELLDEQLIGLYNLLIAKIKDEYKGFSKEAVRIQENNSFDKLDVKDKKEFIAEMIKLVQPDSDYPYLGKYATGLSNRMGRKTGEKVGKKITLVDKSVTGLYERRTTFELEDDSSTKSC

SEQ ID NO: 21793 - protein, 1425 aa, unidentified
  REGION 1..1425: note = Cas Enzyme sequence
MYNIGLDIGTGSVGWCLTDENGYLLKVNRKGNNGNTYRNSAWGVRLFESADTAADCRIKRSTRRRYNRRRTRIIELRKIMSDMIMPIDPNFYARLDEAFLWNEDKSDKAKAPFLLFNDNGYDDVKYYTDYPTIYHLRKHLLETKEKVDPRFIYLVLHHMMKYRGHFLFEGQSFEAIDNIEDTFIELEHLVNVYVKEKEDTDNNAENNALYQEIKNYLADNKVKNKDKKEYITDTFIKADYDNKYSKELAAAVLGYEFNVGIIVNDNSLTDEDGKALKAKFADAKYEEKEEKLSDTLGERYYIIETLKKIYSWKVLHSILGDNKYLSYAMVDKYEKHSEQLKALKYLFHKYTSQDEYSEFFHQEKNKEGKYIVNYANYIKGIKRLSNETNKKYNTKQQLYQSIKEILGERAADDEVYKKILVEMEQETFLEKINNVDNSAIPYQLNLMEMDKILTQQGVYYKELRDNKELLLKMLTSKIPYYVGPLNNNNKGNRNFAWMTKKAGKENEKVYPWNVKDVVDIDVTAEDFITRMTNYCTYLPDEKVLPKESLLYQRYMLLEELSQIRIDGRKLSKEDRKAIIDDLFIGKGRVKVSDKDFKEYLNKINYVKINDKGYDVTGYQSDDGFACALSSYNKFRRVLGYVDERNEKMIEDIIYWLTVFEDKDIVKRKINKQYPDRLTDEQLKKILKLKFKGWGRFSRKFLAGIKGDMGTTIIDMLEDADDRFLYCNYCPNLMQIINKDEKIKQIIDDNRPRYDGTEDLLDVIQDMHTSPANRRGIWQTMKAIEEIIEYMGEKPQQIYIEFAREDDPKAKNKRADSRKRAIDKALKKLKEDVVDEYNEKVYKELKQYEKRLDEEKVYLYFMQNGKSLYTGKELNLNEPENLEIDHIIPYSLSDDDSLDNKALVLKKENQNKGNKIVKEAFTQSFSDSEMMDYWKNLKKAGLISEKKYNNLQKNNVDDILTKGFINRQLVETRQIVKSVANLILDYYNEQIDVIEVKASLSTSVRKMLTYEKKDNNGFWIENKDNCMFYKNRDMNDYHHAHDAYLANIIGLYIQKNYPRLQKELNYSQYRRIWRKYYENTKNNNGVNWFATLGKFSSNNEEADWYGQDIIAYMRKIFCYRDVLISKKVEENTGAFYSETKYPREDKAGSKLVPLKQGNNMRGANNLKELDTRKYGGYKGGEKAYFVLVKYCIEKALKKSVKKEYHMEFVEIPVYIARGIKNNDINLYDYVCDILNEANKNSVADVEILRNKVPKYQMIIGENGEEYYLVGATEVANSKQFVLGGANQRYNRLLNYISYGKNDKWQYIQTELLDEQLIGLYNLLIAKIKDEYKGFSKEVVRIQENNSFDKLDVKNKKEFIAEMIKLVQPDSRYPDLGKYATGLSDRMGRKSKEKVGKKITLVDKSVTGLYERRTTFELEDDSSTKSR

SEQ ID NO: 21794 - protein, 1424 aa, unidentified
  REGION 1..1424: note = Cas Enzyme sequence
MYNIGLDIGTGSVGWCLTDENGYLLKVNRKGNNGNTYRNSAWGVRLFESADTAADCRIKRSTRRRYNRRRTRIIELRKIMSDMIMPIDPNFYARLDEAFLWNEDKSDKAKAPFLLFNDKEYNDKKYYEDFKTIYHLRKYLINTTNKVDARLIYLALHHMMKYRGHFLYEGQTFESIDNVEDVFVELNNLVNAYIKECEDKDGNEYNDVYREIKKCLADNEIKNKDKKELIAAMFMRADYSKKYSKEVAVAILGYEFNVGIIVGENELTGEDNKPLKTKFSDANYEEQEENISSVLGEKYSIIEALKKIYSWKVLHGILGDNTYISSAMVAKYNIHKQQLSELKQLFHKYASQDEYSDFFHKEKDKSGNYIVNYANYIKGIKRLTNKDNKNYSAKQQLYISIRKILDDRALKDKTYQKILKEMEEETFLEKINNVDNSAIPYQLNLMEMDKILTQQGVYYKELKDNKEHLLKMLTSKIPYYVGPLNNHNKGNRNFAWMTRKTGKESEKLYPWNVKGVVDIDVTAEHFITRMTNYCTYLPNEKVLPKESLLYQKYMLLEELSQIKIDDNKLSKEDRKAIINDLFIGERRAKVSDKNFKEYLNKINYVKINDKGYDVTGYQSDDGFACALSSYNKFRRVLGYVDGRNEKMIEDIIYWLTVFEDKDIVKRKINKQYPDRLTDEQLKKILKLKFKGWGRFSRKFLAGIKGDMGTTIIDMLEDADDRFLYCNYCPNLMQIINKDEKIKQIIDDNRPRYDGTEDLLDVIQDMHTSPANRRGIWQTMKVIEEIIEYMGEKPQQIYIEFAREDDLKAKNKRTDSRKRVIEKALKKLKEEVVDEYNENVYKELKQYEKRLDEEKVYLYFMQNGKSLYTGEELNLNEPGNLEIDHIIPYSLSDDDSLDNKALVLKRENQNKGNKIVKEAFLQSYSDSDMKSYWKALKKAGLMSEKKYNNLMKDNVNEVLTRGFINRQLVETRQIVKLVANLILDYYNEQIDVIEVKASLSTSVRKMLTYEKKDNNGFWEENKDNCMFYKNRDMNDYHHAHDAYLANIIGMYIQKNYPHLQKELNYSQYRRVWRKYYENTKNNNGVNWFATLGKFSSNNEEADWYGQDIIVYMRKIFCYRDVLISKKVEENTGAFYSETKYPREDKAGSKLVPLKQGDNMRGANNLKELDTRKYGGYKGGEKAYFVLVKYCIEKALKKSVKKEYHMEFVEIPVYIARGIKNNDINLYDYVCDILNEANKNSVADVEILRNKVPKYQMIIGENGEEYYLVSATEVINSKQFVLGGANQRYNRLLNYIKYGKNDKWQYIQTELLDEQLIGLYNLLIAKIKDEYKGFSKEAVRIQENNSFDKLDVKDKKEFIAEMIKLVQPDSDYPYLGKYATGLSNRMGRKTGEKVGKKITLVDKSVTGLYERRTTFELEDDSSTKSR

SEQ ID NO: 21795 - protein, 1438 aa, unidentified
  REGION 1..1438: note = Cas Enzyme sequence
MNFNRKCSENYCLGLDVGTASVGYCVIDENGKLFKINRKGDNGNNKRNSLWGVRTFKSGEPAKGCRINRSTRRRYSRTHTRILELRKIMSDMVCKVDENFFARLDESFLWKEDKSDKAKSDYILFADKDCTDKDYYEKYQTIYHLRKHLLGTTEKADARFIYLALHHMLKYRGNFLYEGQKFTELDDFKIIYEQFLTSLKEYLEIECNYDQISCEEIEKKLKEKKSKKEKYNEVSEILKKLGLNKKYAEAVANAIIGYKFNVATIMNDKNLCDENGKEMSVSFASADYEEEEQKLSDELGEKFSVIENLKRLYSWYVIKQIMQGSDKKRVNYLSEAMVAKYEKHHAELKELKELFRDYKTQKEYSEFFHKELKAEQKDGKMSPAFLKSFGKIKKGEYVPNYANYIKGMKRCGDTQSKARENLYKCIKALLGDVAKDDERYIRICAEMENDSYLEKINDVSNSVIPYQLNEMEMEKILDIQGEFYPELKKNKELILKMLTSKIPYFVGPLNPGSRFAWMSKKAGMENKSVYPWNVEEVVDVDKTAEKFITRMTNYCTYLPDEKVLPKHSIIYQWYEVLTELSQISIDKIKLGKEIRDDIIQNLFLKKVSVSGENLKEHLKKSGTYNDIDNRVIRGYQGGDNFASSMSSYITFKKIFGEINMSNIDMIEQIIYWLTIFDDKKIIKRKIEQNYKDKINDSQLKRILKIKYTGWGQLSKKFLTGIKGDTGHTIIEMLEEGDLRWKEIPNLIQIINRDEKIKTVIEENRLRYNGEDDLPDIIDKLHTSPANKRGIKQCMKVIEEIIEYMGRKPEQIFIEFAREEGEKVETKKVKDKLDKAIGKLKQEFKDYYNDDIKQELKDNEKRLDEEKVRLYFSQNGKSLYSAPSASNQLSLDNLNQYDVDHIIPYSISQDDSMDNKVLVEKIENQNKGNRIVSDAFGNKADYKEMQNYWEMLYKAGLISEKKYNNLNKSLDEVFSKGFINRQLVETRQIVKNVANLISDYYDDKIEVIEVKAQLSSYIRNKFTQEKKDDDGFWIENTENAMFFKNRGLNDYHHAHDAYLACIIGLYIQKVYPGWKNELNFKKYRREFEKYYEEQKKYNTKSKKEIYISMLSRFTKNYEKAGWNGEEIIEYMRKIFCYRDVMISKKTEENTGSFYNQTRYPKEKLDGNKKETKLIPLKSGNSLRGKEGLKELSVEKYGGYQGGECAYFVLVKYYTVKNKKKTEEKQWKMEFVGIPTYISYEINKENINLKQYICDKLKNNTVEILRNKICKYQELMDEEGNRYFLVGPTEVANAKQFVLGSRYQKFNRLYSYINSENWHYIRTDELEKEIDEFFKLLQNKIHNEFKGYIKDIDKVIGANTSKLDIDKKIDYFNEIYKIVQANSSRPAVSKFNIAGISDGLGRKRSLPFKDKIIIVDKSVTGIYERRTCFELENGGNTKSC

SEQ ID NO: 21796 - protein, 1438 aa, unidentified
  REGION 1..1438: note = Cas Enzyme sequence
MSFNRKCSANYCLGLDVGTASVGYCVIDENGKLFKINRKCDTGNNKRNSLWGVRTFKSGETAKGCRINRSARRRYSRTHTRILELRKIMSDVVCKVDENFFARLDESFLWKEDKSDKAKSDYILFADKDYTDKEYYKKYQTIYHLRKHLLETTEKADARFIYLALHHMLKYRGNFLYEGQKFTELDDFKIIYEQFVTSLKEYLEIECNYDEISCEEIEKKLKEKKSKKEKNDEVSEILKKLGLNKKYAGAVANAIIGYKFNVATIMNDKNLCDENGKEMSVSFASADYEEEEQKLSDELGEKFSVIENLKRLYSWYVIKQIMQGSDKNRVNYLSEAMVAKYEKHHAELKELKELFRDYKTQKEYSEFFHKELKAEQKDGKMSPAFLKSFGKIKKGEYVPNYANYIKGMKRCGDTQSKARENLYKCIKALLGDVAKDDERYIRICAEMENDSYLEKINDVSNSVIPYQLNEMEMEKILDVQGRFYPELNDNKELILKMLTSKIPYFVGPLNSGSRFAWMSKKGGMENISVYPWNVEEVVDVDKTAEKFITRMTNYCTYLPSEKVLPKHSIIYQWYEVLTELSQISIDKIKLGKEMRDDIIQNLFLKKVSVSEKNLIEHLKKSGTYNDIDNRVIRGYQGGDNFASSMSSYITFKKIFGEINMSNIDMIEQIIYWLTIFDDKKIIKRKIEQNYRERINDSQLKRIVKIKYTGWGQLSKKFLTGIKGDTGHTIIEMLEEGDPRWKELPNLIQIINKDEKIKTVIEENRLRYNGEDDLPDIIDKLHTSPANKRGIKQCMKVIEEIIEYMGRKPEQIFIEFAREEGEKVETKKVKDKLDKAIGKLKQEFKDYYNDDIKQELKDNEKRLDEEKVRLYFSQNGKSLYSAPSASNQLSLDNLNQYDVDHIIPYSISQDDSMDNKVLVKKIENQNKGNRIVSDAFGNKADYKEMQNYWEMLYKAGLISEKKYNNLNKSLDEVFSKGFINRQLVETRQIVKNVANLISDYYDDKIEVIEVKAQLSSYIRNKFTQEKKDDDGFWIENTENAMFFKNRGLNDFHHAHDAYLACIIGLYIQKVYPGWKNELNFKKYRREFEKYYEEQKKYNTKSKKEIYISMLSRFTKNYEKAGWNGEEIIDYMRKIFCYRDVMVSKKTEENTGSFYNQTRYPKEKLDGNKKETKLIPLKSGNNLRGKEELKELSVEKYGGYQGGECAYFVLVKYYTVKKKKKTEEKQWKMEFVGIPTYISYEINKGNINLKQYVCDKLKNDTVEILRGKICKYQELMDEEGNRYFLVGPTEVANAKQFVLGSRYQKFNRLYSYINSENWHYIRTDELEKEIDEFFKLLQNKIHNEFKGYIKDIDKVIGANTSKLDIDKKIDYFNEIYKIVQANSSRPAVSKFNIAGISDGLGRKRSLPFKDKIIIVDKSVTGIYERRTCFELENGGNTKSC

SEQ ID NO: 21797 - protein, 1374 aa, unidentified
  REGION 1..1374: note = Cas Enzyme sequence
  REGION 1368..1374: note = misc_feature - Xaa can be any naturally occurring amino acid
MNFNRKCSENYCLGLDVGTASVGYCVIDENGKLFKINRKGDNGNNKRNSLWGVRTFKSGEPAKGCRINRSTRRRYSRTHTRILELRKIMSDMVCKVDENFFARLDESFLWKEDKSDKAKSDYILFADKDCTDKDYYEKYQTIYHLRKHLLETTEKADARFIYLALHHMLKYRGNFLYEGQKFTELDDFKIIYEQFLTSLKEYLEIECNYDQISCEEIEKKLKEKKSKKEKYNEVSEILKKLGLDKKYAEAVANAIIGYKFNVATIINDKNLCDENGKEMSVSFASADYEEEEQKLSDELGEKFSVIENLKRLYSWYVIKQIMQGSDKNRVNYLSEAMVAKYEKHHAELKELKELFRDYKTQKEYSEFFHKELKAEQKDGKMSPAFLKSFGKIKKGEYVPNYANYIKGMKRCGDTQSKARENLYKCIKALVGDVAKDDERYIRICAEMENDSYLEKINDVSNSVIPYQLNEMEMEKILDIQGEFYPELKKNKELILKMLTSKIPYFVGPLNPGSRFAWMSKKAGMENKSVYPWNVEEVVDVDKTAEKFITRMTNYCTYLPCEKVLPKHSIIYQWYEVLTELSQISIDKIKFGKEIRDDIIQNLFLKKVSVSGNNLKEHLKKSGTYNDIDNRVIKGYQGGDNFASSMSSYITFKKIFGEINMSNIDMIEQIIYWLTIFDDKKIIKRKIEQNYKDKINDSQLKRILKIKYTGWGQLSKKFLTGIKGDTGHTIIEMLEEGDLRWKEIPNLIQIINRDEKIKTVIEENRLRYNGEDDLPDIIDKLHTSPANKRGIKQCMKVIEEIIEYMGRKPEQIFIEFAREEGEKVETKKVKDKLDKAIGKLKQEFKDYYNDDIKQELKDNEKRLDEEKVRLYFSQNGKSLYSAPSASNQLSLDNLNQYDVDHIIPYSISQDDSMDNKVLVKKIENQNKGNRIVSDAFGNKADYKEMQNYWEMLYKAGLISEKKYNNLNKSLDEVFSKGFINRQLVETRQIVKNVANLISDYYDDKIEVIEVKAQLSSYIRNKFTQEKKDDDGFWIENTENAMFFKNRGLNDYHHAHDAYLACIIGLYIQKVYPGWKNELNFKKYRREFEKYYEEQKKYNTKSKKEIYISMLSRFTKNYEKAGWNGEEIIEYMRKIFCYRDVMISKKTEENTGSFYNQTRYPKEKLDGNKKETKLIPLKSGNNLRGKEGLKELSVEKYGGYQGGECAYFVLVKYYTVKKKKKTEEKQWKMEFVGIPTYISYEINKENINLKQYICDKLKNNTVEILRNKICKYQELMDEEGNRYFLVGPTEVANAKQFVLGSRYQKFNRLYSYINSENWHYIRTDELEKEIDEFFKLLQNKIHNEFKGYIKDIDKVIGANTSKLDIDKKIXXXXXXX

SEQ ID NO: 21798 - protein, 1438 aa, unidentified
  REGION 1..1438: note = Cas Enzyme sequence
MDFNRKCSENYCLGLDVGTASVGYCVIDENGKLFKINRKCDNGNNKRNSLWGVRTFKSGEPAKGCRINRSARRRYSRTHTRILELRKIMSDMVCKVDENFFARLDESFLWKEDKSDKAKSDYILFADKDCTDKDYYEKYQTIYHLRKHLLETTEKADARFIYLALHHMLKYRGNFLYEGQKFTELDDFKIIYEQFLTSLKEYLEIECNYDQISCEEIEKKLKEKKSKKEKYNEVSEILKKLGLNKKYAEAVANAIIGYKFNVATIMNDKNLCDENGKEMSVSFASADYEEEEQKLSDELGEKFSVIENLKRLYSWYVIKQIMQGSDKNRVNYLSEAMVAKYEKHHAELKELKELFRDYKTQKEYSEFFHKELKAEQKDGKMSPAFLKSFGKIKKGEYVPNYANYIKGMKRCGDTQSKARENLYKCIKALLGDVAKDDERYIRICAEMENDSYLEKINDVSNSVIPYQLNEMEMEKILDIQGEFYPELKKNKELILKMLTSKIPYFVGPLNPGSRFAWMSKKAGMENKSVYPWNVEEVVDVDKTAEKFITRMTNYCTYLPCEKVLPKHSIIYQWYEVLTELSQISIDKIKFGKEIRDDIIQNLFLKKVSVSGNNLKEHLKKSGTYNDIDNRVIKGYQGGDNFASSMSSYITFKKIFGEINMSNIDMIEQIIYWLTIFDDKKIIKRKIEQNYKDKINDSQLKRILKIKYTGWGQLSKKFLTGIKGDTGHTIIEMLEEGDLRWKEIPNLIQIINRDEKIKTVIEENRLRYNGEDDLPDIIDKLHTSPANKRGIKQCMKVIEEIIEYMGRKPEQIFIEFAREEGEKVETKKVKDKLDKAIGKLKQEFKDYYNDDIKQELKDNEKRLDEEKVRLYFSQNGKSLYSAPSASNQLSLDNLNQYDVDHIIPYSISQDDSMDNKVLVKKIENQNKGNRIVSDAFGNKADYKEMQNYWEMLYKAGLISEKKYNNLNKSLDEVFSKGFINRQLVETRQIVKNVANLISDYYDDKIEVIEVKAQLSSYIRNKFTQEKKDDDGFWIENTENAMFFKNRGLNDYHHAHDAYLACIIGLYIQKVYPGWKNELNFKKYRREFEKYYEEQKKYNTKSKKEIYISMLSRFTKNYEKAGWNGEEIIEYMRKIFCYRDVMISKKTEENTGSFYNQTRYPKEKLDGNKKETKLIPLKSGNNLRGKEGLKELSVEKYGGYQGGECAYFVLVKYYTVKNKKKTEEKQWKMEFVGIPTYISYEINKGNINLKQYICDKLKNNTVEILRNKICKYQELMDEEGNRYFLVGPTEVANAKQFVLGSRYQKFNRLYSYINSENWHYIRTDELEKEIDEFFKLLQNKIHNEFKGYIKDIDKVIGANTSKLDIDKKIDYFNEIYKIVQANSSRPAVSKFNIAGISDGLGRKRSLPFKDKIIIVDKSVTGIYERRTCFELENGGNTKSC

SEQ ID NO: 21799 - protein, 1425 aa, unidentified
  REGION 1..1425: note = Cas Enzyme sequence
MYNIGLDIGTGSVGWCLTDENGYLLKVNRKGNNGNTYRNSAWGVRLFESADTAADCRIKRSTRRRYNRRRTRIIELRKIMSDMIMPIDPNFYARLDEAFLWNEDKSDKAKAPFLLFNDKEYNDKKYYEDFKTIYHLRKYLINTTNKVDARLIYLALHHMMKYRGHFLYEGQTFESIDNVEDVFVELNNLVNAYIKECEDKDGNEYNDVYREIKKCLADNEIKNKDKKELIAAMFMRADYSKKYSKEVAVAILGYEFNVGIIVGENELTGEDNKPLKTKFSDANYEEQEENISSVLGEKYSIIEALKKIYSWKVLHGILGDNTYISSAMVAKYNIHKQQLSELKQLFHKYASQDEYSDFFHKEKYKSGNYIVNYANYIKGIKRLTNKDNKNYSAKQQLYISIRKILDDRALKDETYQKILKEMEEETFLEKINNVDNSAIPYQLNLMEMDKILTQQGVYYKELKDNKEQLLKMLTSKIPYYVGPLNNHNKGNRNFAWMTRKTGKESEKLYPWNIKDVVDIDVTAEDFITRMTNYCTYLPDEKVLPKESLLYQRYMLLEELSQIRIDGKKLSKEDRKAIIDDLFIGKGRVKVSDKDFKEYLNKVNYVKVNGKGYDVTGYQSDDGFACALSSYNKFRRILGHIDEQNEKMIEDIIYWLTVFEDKDIVKRKINKQYPDRLTDEQLKKILKLKFKGWGRFSRKFLAGIKGDMGTTIIDMLEDADDRFLYCNYCPNLMQIINKDEKIKQIIDDNRPRYDGTEDLLDVIQDMHTSPANRRGIWQTMKAIEEVIEYMGEKPQQIYIEFAREDDPKAKNKRADSRKRAIDKALKKLKEDVVDEYNENVYKELKQYEKRLDEEKVYLYFMQNGKDLYFPDKELNLDELEKLEIDHIIPYSLSDDDSLDNKALVLKGNNQNKGNKIVKEAFPQLFSNSGTVNYWKNLKKAGLISEKKYNNLQKNNVDDILTKGFINRQLVETRQIVKSVANLILDYYNEQIDVIEVKASLSTSVRKMLTYEKKDSNGFWEENKDNCMFYKNRDMNDYHHAHDAYLANIIGMYIQKNYPHLQKELNYSQYRRVWRKYYENTKNNNGVNWFATLGKFSSNNEEADWYGQDIIAYMRKIFCYRDVLISKKVEENTGAFYSETKYPREDKAGSKLVPLKQGNNMRGANNLKELDTRKYGGYKGGEKAYFVLVKYCIEKALKKSVKKEYHMEFVEIPVYIARGIKNNDINLYDYVCDILNEANKNSVADVEILRNKVPKYQMIIGENGEEYYLVSATEVINSKQFVLGGANQQYNRLLNYIKYGKNDKWQYIQTELLDEQLIGLYNLLIAKIKDEYKGFSKEAVRIQENNSFDKLDVKDKKEFIAEMIKLVQPDSDYPYLGKYATGLSNRMGRKTGEKVGKKITLVDKSVTGLYERRTTFELEDDSSTKSR

SEQ ID NO: 21800 - protein, 1356 aa, unidentified
  REGION 1..1356: note = Cas Enzyme sequence
MKKTGKIKNSVLQETHYNVGLDIGTSSVGYAVVDADTGKVLVFKKKNMLGGRLFNEGETAKATRVNRSTRRRYDRRRERIKLLRCLMWEMVDEKDPDFFARLDEGFLMREDKTIQSKSNLFNDKNYTDKDYYKEYATIYHLRKELFENDEQKDIRLVYLALHHLIKYRGHFLYEGQNFQEINNDINELFVRLYDQLAENCQYNCKIHNNQIEEIVEILKDTKQTKSEKKEVLKPVITKTMRETEKKAAQEIVNAILGKKINFNILFGMDTIIDNEDKALKLSFAEEKYDEQEDYIYEQLQEKAEILDTLKEIYSWFALQDILKGEKTVASAMVKKYEKHKKDLKILRNAVRKYCTPEEYKNFFIEKITDTKKLKKSVNYVNYIGADGRGNTENLYNEIKKLLEDKDNADKEIQYILKEIDAENFLPLLRTKENISIPYQLTVLEAARIIDNQGKYYPQLSANKDKILSIIEFRIPYYVGPMNTKNRNERFSWACRKEGKQEEKIYPWNWKDIIDEDKTAARFIERMRNTCTYLPGEDVLPRYSLLYSEFVMLNELNKIKVNGKFIEHDMKQKMIEGLFKKQKNVTEKSLINYLKKMNYMNTDQYEIEGYQKEKAFASSLASYIDFTRIFGEIHSGNRQMIEEIIEWLTLFEEKSIVKRQIQNKYGTQVTAQQLEAVCKLRYKGWGNCSAKLLKGLKTTIDGDKASIIDILNTTNYNFIQIITNKRYEFAKQIDEYNEDNTMTDITIEDISRLHGSPAIKKGIWQTVKVMNELVQIMGHEPDNIFIEFAKGEDDKVRTKTRSAKIDKGYKKWKEEFKGEGFSTEVEKELKNKKYKDRLNEEKMYLYFLQNGKCMYSGETLDIDKLSLYHIDHILPQTYTTDDSIENKVLVLGIANENKADNLLISQKIRNDRKEFWHYLYECGLMGEKKYKNLTRSAIGEGEIKGFINRQLVETRQIIKNVTQLFTQRYANSNVVAIRAGLSSNYREKYGLYKSREINDFHHAHDAFLAVRIGMFLMKRFPGMENELIYDAFLKYRSGQNKDSLLKSNHGYLMTLFDEVQCDENGVVIWNPDEDKAYIKSVLYSGNCQISRKKEELTGKFYNETIYPAGLGDLIPLKKNLSVEKYGGYSGKQSAYFAAVQDENGKKQKKIIGIPIYIKELEKTQQGALDAYIKKELNTTAYRMLKDKIYKYQEIIVNGNDLYITGESEVINAKQFFFGEHYYYLYEVLLQCLADKLPEDEKAKYEEKLVEVYNYILSKAERQYKEYASAFAKIKQAVDFSKLSYEDKIGCLKEILNITGANAGCADMRKYCPQDSKIKGIDRIGRKNGYTFKMNSTNNSIVFVDKSVTGLYERRYTL

SEQ ID NO: 21801 - protein, 1350 aa, unidentified
  REGION 1..1350: note = Cas Enzyme sequence
MKKTGKIKNSVLQETHYNVGLDIGTSSVGYAVVDADTGKVLVFKKKNMLGGRLFNEGETAKATRVKRSTRRRYDRRRERIKLLRCLMWEMVDEKDPDFFARLDEGFLMREDKTIQSKSILFNDKSYTDKDYYKEYATIYHLRKELFENDEQKDIRLVYLALHHLIKYRGHFLYEGQNFQEINNDINELFVRLYEQLAENCQYNCEIHNNQIEEIVEILKDTKQTKSEKKEVLKPVITKTMRETEKKAAQEIVNAILGKKINFNILFGVDTIIDNEDKALKLSFAEEKYDEQEDYIYEQLQEKAEILDTLKEIYSWFTLQDILKGEKTVASAMVKKYEKHKKDLKILRNAVRKYCTPEEYRNFFIEKTTNTKKLNYVNYIGADGRGNTENLYNEIKKLLEDKDNVDKDIQYILKEIDAENFLSLLRTKENISIPYQLTVLEAARIIDNQGKYYPQLSANKDKILSIIEFRIPYYVGPMNTKNRNERFSWACRKEGKQEEKIYPWNWKDIIDEDKTAARFIERMRNTCTYLPGEDVLPRYSLLYSEFVMLNELNKIKVNGKFIEHGMKQKMIEGLFKKQKNITEKSLINYLKKMNYMNTDQYKIEGYQKEKAFASSLASYIDFTRIFGEIHSGNRQMIEEIIEWLTLFEEKSIVKRQIQNKYGTQVTAQQLEAVCKLRYKGWGNCSAKLLKGLKTTIDGDKASIIDILNTTNYNFIQIITNKKYEFAKQIDEYNEDNTMTDITIEDISRLHGSPAIKKGIWQTVKVMNELVQIMGHEPDNIFIEFARGEDDKVRTKNRSTQIDRSYKKWKKEFKGEKFSTEVEKELKNKKYKDRLNEEKMYLYFLQNGKCMYSGETLDIDKLSLYHIDHILPQTYTTDDSIENKVLVLGIANENKADNLLISQKIRNDRKAFWHYLYECGLMGEKKYKNLTRNAIGEGEIKGFINRQLVETRQIIKNVTQLFTQRYANSNVLAVRAGLSSNYREKYGLYKSREINDFHHAHDAFLAVRIGMFLTKRFPGMEKDLIYDAFLRYRSKQNKSSLLKSKHGYLMTFFDEVQCDENGVVIWNPDEDKAYIKSVLYSGNCQISRKKEELTGKFYNETIYPANYKKEKIPLKKNLSVEKYGGYSVKQSAYFIAVQDENGKKIVGIPIHIKELEKTQSGAIDAYIKKELKTTSYRVLKDKICKYQEIIVNGNAMYLTAADEVINAKQFFFGDHYYDLYEALLKCLADKVPEDEKDQYDEKLVEVYNYIISKAERQYREYESAFEKIKQAVDFSMLSYDDKIGYLKEIFKITKASASCADITKYCSKDSEIKGITEIGRKKKYTFNSRKGKRNIIFVDKSVTGLYERRYTL

SEQ ID NO: 21802 - protein, 1356 aa, unidentified
  REGION 1..1356: note = Cas Enzyme sequence
MKKTGKIKNSVLQETHYNVGLDIGTSSVGYAVVDADTGKVLVFKKKNMLGGRLFNKGETAKATRVNRSTRRRYDRRRERIKLLRCLMWEMVDEKDPDFFARLDEGFLMREDKTIQSKSILFNDKNYTDKDYYKEYATIYHLRKELFENDEQKDIRLVYLALHHLIKYRGHFLYEGQNFQEINNDINELFVRLYEQLAENCQYKCEIHNNQIEEIVEILKDTKQTKSEKKEVLKLVITKTMRETEKKAAQEIVNAILGKKINFNILFGVDTIIDNEDKALKLSFAEEKYDEQEDYIYEQLQEKAEILDTLKEIYSWFALQDILKGEKTVASAMVKKYEKHKKDLKILRNVVRKYCTPEEYKNFFIEKITDTKKLKKSVNYVNYIGADGRGNTENLYNEIKKLLEDKDNADKDIQYILKEIDAENFLPLLRTKENISIPYQLTVLEAARIIDNQGKYYPQLSANKDKILSIIEFRIPYYVGPMNTKNRNERFSWACRKEGKQEEKIYPWNWKDIIDEDKTAARFIERMRNTCTYLPGEDVLPRYSLLYSEFVMLNELNKIKVNGKFIEHGMKQKMIEGLFKKQKNITEKSLINYLKKMNYMNTDQYKIEGYQKEKAFASSLASYIDFTRIFGEIHSGNRQMIEEIIEWLTLFEEKSIVKRQIQNMYGTQVTPQQLDAICKLRYKGWGNCSAKLLKGLKTTIDGNKVSIVDILNMTNYNFMQIITSKKYEFAKQIEEYNEDNEMTEITIEDINRLHGSPAIKRGIWQTVKVMNEIVQIMGHEPDNIFIEFARGEDDKVRTKNRSAQIDRSYKKWKKEFKGEKFSTEVEKELKNKKYKDRLNEEKMYLYFLQNGKCMYSGETLDIDKLSLYHIDHILPQTYTTDDSIENKVLVLGIANENKADNLLISQKIRNDRKEFWHYLYECGLMGEKKYKNLTRNAIGESEIKSFINRQLVETRQIIKNVTQLFTQRYANSNVVAIRAGLSSNYREKYGLYKSREINDFHHAHDAFLAVRIGMFLMKKYPGMENELIYDAFLKYRSGQNKDSLLKSNHGYLMTLFDEVQCDENGVVIWNPDEDKAYIKSVLYSGNCQISRKKEELTGKFYNETIYPAGLGDLIPLKKNLSVEKYGGYSGKQSAYFAAVQDENGKKQKKIIGIPIYIKELEKNQPGTIDAYIKKELNTTAYRMLKDKIYKYQEIIVNGNDLYITGESEVINAKQFFVGEYYYYLYEVLLKCLADKVPEDEKAKYEEKLVEVYNYILSKAERQYKEYASAFAKIKQAVDFSKLSYEDKIGCLKEILNITGANAGCADMRKYCPQDSKIKGIDRIGRKNGYTFKMNSTNNSIVFADKSVTGLYERRYTL

SEQ ID NO: 21803 - protein, 1362 aa, unidentified
  REGION 1..1362: note = Cas Enzyme sequence
MKKTGKIKNSVLQETHYNVGLDIGTSSVGYAVVDADTGKVLVFKKKNMLGGRLFNKGETAKATRVNRSTRRRYDRRRERIKLLRCLMWEMVDEKDPDFFARLDEGFLMREDKTIQSKSILFNDKNYTDKDYYKEYATIYHLRKELFENDEQKDIRLVYLALHHLIKYRGHFLYEGQNFQEINNDINELFVRLYEQLAENCQYKCEIHNNQIQEIVEILKDTKQTKSEKKEVLKPVITKTMRETEKKAAQEIVNAILGKKINFNILFGVDTIIDNEDKALKLSFAEEKYDEQEDYIYEQLQEKAEILDTLKEIYSWFALQDILKGEKTVASAMVKKYEKHKKDLKILRNAVRKYCTPEEYKNFFIEKITDTKKLKKSVNYVNYIGADGRGNTENLYNEIKKLLEDKDNADKDIQYILKEIDAENFLPLLRTKENISIPYQLTVLEAARIIDNQGKYYPQLLANKDKILSIIEFRIPYYVGPMNTKNRNERFSWACRKEGKQEEKIYPWNWKDIIDEDKTAARFIERMRNTCTYLPGEDVLPRYSLLYSEFVMLNELNKIKVNGKFIEHDMKQKMIEGLFKKQKNVTEKSLINYLKKMNYMNTDQYKIEGYQKEKAFASSLASYIDFTRIFGEIHSGNRQMIEEIIEWLTLFEEKSIVKRQIQNKYGTQVTAQQLEAVCKLRYKGWGNCSAKLLKGLKTTIDGDKASIIDILNTTNYNFIQIITNKKYEFAKQIDEYNEDNTMTDITIEDISRLHGSPAIKKGIWQTVKVMNELVQIMGHEPDNIFIEFARGEDDKVRTKNRSAQIDRSYKKWKKEFKGEGFSTEVEKELKNKKYKDRLNEEKMYLYFLQNGKCMYSGETLDIDKLSLYHIDHILPQTYTTDDSIENKVLVLGIENENKADNLLISQKIRNDRKEFWRYLYECGLMGEKKYKNLTRNAIGEGEIKGFINRQLVETRQIIKNVTQLFTQRYANSNVLAVRAGLSSNYREKYGLYKSREINDFHHAHDAFLAVRIGMFLTKRFPGMEKDLIYDAFLRYRSKQNKSSLLKSKHGYLMTFFDEVQCDENGVVIWNPDEDKAYIKSVLYSGNCQISRKKEELTGKFYNETIYPAGSGDLIPLKKNLSVEKYGGYLGKQNAYYVAVQDENGKKQKKIIGIPIYVKELEKTQPGAIDAYIKKQLNTISYRILKDNICKYQEIIVNGNAMYLTGAKEKKNEMSNAKQFFFGDHYYNLYETLLKCFADKVPEDEKEEYDKKMIEVYNYIIAKGERQYKECAFAFEKIKQALDFPMLSYNDKIDCLREILKITQANSTCANIKKYCKQSANVTGTERVGRIERVINIDDSKRNKSVAVFVDKSVTGLYERRYTL

SEQ ID NO: 21804 - protein, 1157 aa, unidentified
  REGION 1..1157: note = Cas Enzyme sequence
  SITE 280: note = misc_feature - Xaa can be any naturally occurring amino acid
  SITE 349: note = misc_feature - Xaa can be any naturally occurring amino acid
  SITE 689: note = misc_feature - Xaa can be any naturally occurring amino acid
  SITE 703: note = misc_feature - Xaa can be any naturally occurring amino acid
  SITE 751: note = misc_feature - Xaa can be any naturally occurring amino acid
  SITE 860: note = misc_feature - Xaa can be any naturally occurring amino acid
  SITE 881: note = misc_feature - Xaa can be any naturally occurring amino acid
  REGION 893..894: note = misc_feature - Xaa can be any naturally occurring amino acid
  SITE 919: note = misc_feature - Xaa can be any naturally occurring amino acid
  SITE 985: note = misc_feature - Xaa can be any naturally occurring amino acid
  SITE 1081: note = misc_feature - Xaa can be any naturally occurring amino acid
MNENNKKLIIGLDLGIASVGISVVDKDTKKIIHRQSHLFQILSKPKTLTSPGGYGEGARGDKRRQRRTIQRRKQRRLDFISLINDTEIKSGKRKGEIRKANPEYKAIFNFNADVEKNVSYPIYELAVKGLTSELTPKELFKVLYSKLSFRGVNFTLPNEDENLLSVAEELLDILNKNKKLRSPSARVILDAEKTNNKAIPMQFSLKRNKKDLVKIIDNCSYLKGTNFKNDFLGDDESDDIVIKSGIFSRVRDFSQGPGSEKSTTDYGVYKKDGQQVNNLXEESIGKCPVHTEQQRSLKCQSLPEIANLLSQLNSMKISNEKLTPEQKEKVISNVIKELAPPSPTKIINXLKLDKNSLTHYPKSKDGKKHNIEKCENLIRLYKRQVLIFIDFAKAIEEIYYVDKITSKHLIHFYNKDELVNANKDYKLSILEIKKYDHKKIIKNYEDYCRLNPVTTTKTPEVMSKELENFQKNNISGTHSFSLLALKEYINKNINDIKSMSTFYRKETNIFEMNQYSFEKNGKKIKYINNRLMDNVDFISPNIKNTMSECCKLVNKVLKKYVYNGSMYDLDAIIIETTNDTKYALNGLENNKAIIKEQIANEKIKAEIKNQYPSIKDVNIEKIILLRKQQGIDLYDGKSINELDVIDNPANYEIDHILPISRSQNNNRENKVITKTENNRSKGNKTPIEXLSSKTNFNDLKILXKEILNDEPKKLNFMEMENFSIKERFFIARNLTETQYIMRRIKIAFEAXKSYMKENFNNDNNIYGKLSDLEIITVSGSVTQRLRKEKYLNLPKKDRNVTQRLRKEKYLNLPKKDRNISLEHHSIDASICAVLGTIDEFRETIRSFIRSIDDETGEVKXAYNTKKPIDIFDQSKVKHEIXENLSKSISESNXXLSHKSSCKLNKCKTIEEKIEKMKSXKPKKLSGETIYGHIKVGGINKTKERYDLLELKDTEIPELKIIFQKSYEESKCLNANNYFESLKKIXNKYYDENNPKLNPFHKYMDEHKDEEDFRLAILKRCVKISDDNLQADISRLTFIGEKLSGIDLAKISNNAFITQLIAKCVYLIENKEGNKKFLNENXFNEGKRIIDEECSQIIDIIEIGTIYSIDGSLYRVTGCDKSNDYLQCSSIDRTKLPIKKPFSTFSKLNAKKINIIKN

SEQ ID NO: 21805 - protein, 1386 aa, unidentified
  REGION 1..1386: note = Cas Enzyme sequence
MKKILGLDLGTTSIGWAIVNEAEDDKEQSEIIKLGVRVNPLSTDEQTNFEKGKSITTNADRTLKRSMRRNLQRFKLRKENLIEILKENGFITNDSLLSENGNKSTFETYRLRANAASKQISLEEFARVLLMINKKRGYKSSRKAKSQDEGQLIDGMEIAKKLYNDNLTPGQLVLDLLKENKKYIPDFYRSDLQAEFDKVFDKQVFFHSNILSNELKEELKGKKRDAVWAICAKTFKDKGIELIGSKRQGKAAEQKNENYTWRVKGLTEKLNLEQLVIVLQQINMQLNSSSGYLGSISDRSKELYFNKETVGQSLMRQLDINPHTRLKNQVFYRQDYLDEFNTIWEVQSKFHKILTIELKTEIRDIIIFYQRRLKSQKGLISFCEFENRQIELIIDGKKKTKTIGNKVCPKSSPLFQEFKIWQILNNIEVFEKSNLIKRLLYQEEKDVLFKELNLKEKLSKNDALKILFDNHKELDLNYKEIEGNRTNASMYRAFEIIIELTGHGEYDFTKLDADKIIELTSSVFKGLGYNTDILIFNSNLEGSDFEKQPAYQLWHLLYSYEGDNTNTGNDKLIQKLINNYGFEKEYASIISNISFQPDYSSLSTKAIRKILPHLKEGNEFSVACTLAGYKHSKNSLTKEEKEKKVLKSKLEILPKNSLRNPVVEKILNQMINLVNTSIDVYGKPDEIRIELARELKKSAKEREELTSVVAKSKLEHEKHRATLQNEFGLSHVSRNDIIRYKLYLELEHRGFKTLYSNTYIEPNKLFSKEFDIEHIIPQSRLSDDSFSNKTLESRSVNIEKSNETAIDFIKLKQDENGLKEYLDRIEDLYKAFKISKTKYNKLKMTGAQIPDNFIARDLRDTQYIAKKAKSILEDLVKDVISTSGMVTDRLRQDWQLIDVMQELNWDKYNKLGLTEVIETRDGHKINRIKDWTKRNDHRHHAMDALTIAFTKRSHIQYLNNLNARSDKTGSIYGIEAKELYRDEKNKLKFKPPFALNDFRSEAKKHLENILVSIKAKNKVTTININTTKKQGGLNKKMQLTPRGQLHLETIYGSIKQYVTKIEKVGANFTEELIKTVANKKYREALLKQLIEFDNDPKKAFTAKNSLEKTPLYIDALKTIKVPVKVKTVTLETIYTIRKEITHELKIEKVVDPKIREVLNARLKEYNNDSKKAFSNLDENPIWLNKLKGIAIKRVAITGINNAQALHSKKDKEGNLVLDENGITMPIDFVNTGNNHHVAIYSNENGELQEVVVSFFDATTRVNLGLPIIDKNYKEKEGWQFLFSMKQNEYFVFPNEVTGFNPKEVDLLNPENYHLISPNLFRVQKISTKNYVFNHHLQTNAVTGETLKYQKQLSNITYREIRSLQRIKQIIKIRVNHIGQIVTVGEY

SEQ ID NO: 21806 - protein, 1355 aa, unidentified
  REGION 1..1355: note = Cas Enzyme sequence
VVAIDIGIRYIAVWLRLGCVPIFYKTFECPLPVANALKKRREKRGQRRCRKNRKHRDYLLRQFCQHYGLPVLPLGNNSYDPFRLRLDAVTDGKGLASLEELVVCIQHLIRLRGFDYHLMGDEGSTYPWGDDLNYQKAKTWAESGACPESYAEQLQIDVETLADWKSKPNKDGVIINKKEVFFKLLNEAVNRCKTDYLREHVLTPNLEAPKAHARPKARDQKIPRELVKAHLADIWERFWKTRAFPGGDDKKGEALIRLIGKKNRAYDQIDEFSIIDYHRKTRKEREQHTAKKTKNCPYYTWLFPDKTKSEPCAKKWDTDVRRFSLLEFLIQREVIATSSQTVRLKANAKMVSYLLDFLNRDAACFDEQGKRRAITGKSGRREPIQRPVQKGGWFKWYENEKQFGVKLKGTTNYPAKYQRKKEELDGFGKKEDMDANGKARLEKIKKELSALADKVTRTTYSQQNECYFKQLEDLLQPELSKLNARASLSAASAKKLYDIATVGTDFSPEVVLERLKRKENFPSQLHDYFNFKRDPERATGIYPQVEFLLGRRKVDKTTGRLTAKVTVEGKLRQILKLPEVRQRIAAALRNANLPANLPEEIIPDYAVVEVVRHAPKTEKEIAEIITENRENRAEKQRLITNYRRFGLSDKSSDGDIKRARCHSQQELKDEQSVCPLCLSKLPADPLDAKLELDHIYPEEWGGISEIVNLVLVHGDCNRKKSCNTPFLAARAGLLPKSWSEISGHAAVFDGWSKAKVLLFTDETFNEHHKPDWKNFTRQSQLARQLVHEMRHWLGFTPEKIPDATKRNNEASAHIGTPGGSLTAVCRQAWESKLPEFMRGKKDRSNLRNHLYDAAVLSYILPGVGLNVCGGIFERKFDLNTRAWTGLNVRSEIAPVVADLARFEKEHQTECLVEVPRSAKSKKQRFDTSIYPPPFMSPEALAEKLLRRHRKWLERRNRKLEQRHHKPVLPPNKLVASARSKAFADFQRYFRDKDKVNVCYTEEQLPTSVLQAWFDGNHSKPLQLANGTALSYLLPVQYIREKVEDLAKGVLGQNNNYDLAAFVRYFRQAGIKPEELPDKQIEKWLDRFNAQAGKADAPEQSDSKAGESAEAIKPIRLKSGTPVLRIPAEALKTGKPHGQAIHRDGHSKTAREIGAKGVAGKGGGETNWRLELWEGTDAEGRKKTQRWVIPHPRMLALLHSRGIKWRDKYPGETITWRQKFCGNGQGLLPHSKLVMIQGKDGRKHPARFFKGQLVRIPVNYTKGKISARDEVNEQTRYYWYRVTEIETKQRVGFSLSEFSPLKEPSAKELQSGKRKPLSEEQKFLNAISTPSKMDEDTLRLILETTYGHDQPRHPAN

SEQ ID NO: 21807 - protein, 1389 aa, unidentified
  REGION 1..1389: note = Cas Enzyme sequence
LQLFVNVKPSPIIYPLRNTVVTDLPEHPFYRSALVVAIDIGIRYIAVWLRLGCVPIFYKTFECPLPVANALKKRREKRGQRRCRKNRKHRDYLLRQFCQHYGLPVLPLGNNSYDPFRLRLDAVTDGKGLASLEELVVCIQHLIRLRGFDYHLMGDEGSTYPWGDDLNYQKAKTWAESGACPESYAEQLQIDVETLADWKSKPNKDGVIINKKEVFFKLLNEAVNRCKTDYLREHVLTPNLEAPKAHARPKARDQKIPRELVKAHLADIWERFWKTRAFPGGDDKKGEALIRLIGKKNRAYDQIDEFSIIDYHRKTRKEREQHTAKKTKNCPYYTWLFPDKTKSEPCAKKWDTDVRRFSLLEFLIQREVIATSSQTVRLKANAKMVSYLLDFLNRDAACFDEQGKRRAITGKSGRREAIQRPVQKGGWFKWYENEKQFGVKLKGTTNYPAKYQRKKEELDGFGKKEDMDANGKARLEKIKKELSALADKVTRTTYSQQNECYFKQLEDLLQPELSKLNARASLSAASAKKLYDIATVGTDFSPEVVLERLKRKENFPSQLHDYFNFKRDPERATGIYPQVEFLLGRRKVDKTTGRLTAKVTVEGKLRQILKLPEVRQRIAAALRNANLPANLPEEIIPDYAVVEVVRHAPKTEKEIAEIITENRENRAEKQRLITNYRRFGLSDKSSDGDIKRARCHSQQELKDEQSVCPLCLSKLPADPLDAKLELDHIYPEEWGGISEIVNLVLVHGDCNRKKSCNTPFLAARAGLLPKSWSEISGHAAVFDGWSKAKVLLFTDETFNEHHKPDWKNFTRQSQLARQLVHEMRHWLGFTPEKIPDATKRNNEASAHIGTPGGSLTAVCRQAWESKLPEFMRGKKDRSNLRNHLYDAAVLSYILPGVGLNVCGGIFERKFDLNTRAWTGLNVRSEIAPVVADLARFEKEHQTECLVEVPRSAKSKKQRFDTSIYPPPFMSPEALAEKLLRRHRKWLERRNRKLEQRHHKPVLPPNKLVASARSKAFADFQRYFRDKDKVNVCYTEEQLPTSVLQAWFDGNHSKPLQLANGTALSYLLPVQYIREKVEDLAKGVLGQNNNYDLAAFVRYFRQAGIKPEELPDKQIEKWLDRFNAQAGKADAPEQSDSKAGESAEAIKPIRLKSGTPVLRIPAEALKTGKPHGQAIHRDGHSKTAREIGAKGVAGKGGGETNWRLELWEGTDAEGRKKTQRWVIPHPRMLALLHSRGIKWRDKYPGETITWRQKFCGNGQGLLPHSKLVMIQGKDGRKHPARFFKGQLVRIPVNYTKGKISARDEVNEQTRYYWYRVTEIETKQRVGFSLSEFSPLKEPSAKELQSGKRKPLSEEQKFLNAISTPSKMDEDTLRLILETTYGHDQPRHPAN

SEQ ID NO: 21808 - protein, 1094 aa, unidentified
  REGION 1..1094: note = Cas Enzyme sequence
MGLDLGIASVGWSVVELGYDEKSQDYYPKRLIDCGVRLFDKAEVPKTGDSLNLKRREARSARRIIRRRKARIVEVRRRMEEFGFLPHDADLSMNSLDKDIWEIRGKDVFERVLTDRELTRLIVHIAKKRGYKSNRKKLDDDMITDKEGKKVLSAIERNKELLKERNLRTYGELVYSLYGGTDRRDTLKHNTTDQYIFSFDREGTLEELRFVLNCQKELGNTKITDDFIKEIVGIVSFQRPFASGEVVKKMVGKCEFEPDELRAPKISISFLEFEFWQNALNNLKLIDTEEGKPAKPKMISLEQKEKLFAEVFSSSKDKITYSFVRKVLDIPNNEIFYNFRYDMLYRAGNKSIEDERIFLNLTEYQKFRRGISKIDELLWEKIRNDRSLYNSLAEALTWYKTDEDMEKYLREKGLGEYVELAKSLPTFSKFGHLSIKALEKILPYLKENDYTEACRKAGYGGKLEAQKLETLPLINYDEIRNPIVFRGVTQARKVVNAIVRKYGPPTFVNVELARELSKNFKARKEMERWMELRRKVNEEACEEIVKTFGISNPSGSDILKYKLWKEQGGRCLYSGEPIQAERLFEDSYCQIDHAIPYSQSMNDSYNNKVLVLTKENQEKRDETPYQYLNRIDPSGNRWKKYKEMVESNPRYKSGDDEKGDKKSKNKNDKGNKKFKKKDYLLIENTENFTINDFIERNLNDTKYICKFFKNYVEDNLKMKELKSGKRQVYTFQGGFTSNLRRMYGVEKDRELNDRHHALDAIMLAVGNQSMLMRIIDYNKKKERHKADWEVFKEKENLKFPEPWVNFRRDILNRVLGTTFEEISDISNFEELYGDIKSEIKPLFVSRMPRRKVEGAAHEETLYSPKHLDEGFVLVKKRLSDLKRKNVENIYGDEVVKNLIKERFENNPENPFGEPLYKPSPKNNNPNQIKSVKLKVKTGGGGILLNHGRAYAENDLMVRIDIFSKGGKYFIIPIYVSDTVNKELPNRAIVADSESEEEWTLIDDTFKFEFSLYKYDLVSWDDTDGKRELYYYIKTNRNSGSSTFYNHDRSGKEVYRGIKTARNFTKYEVDVLGNVHKVRAEKRHGFQKHSNHKTL

SEQ ID NO: 21809 - protein, 1391 aa, unidentified
  REGION 1..1391: note = Cas Enzyme sequence
MKEIKDYIIGLDIGTNSCGYVVTDKQNNILKLKGKTAIGARLFKEGEAAADRRAFRTTRRRLARRRWRLSLLEEIFDEEMNKVDPSFFRRLKESDYSPKDRRKQFNSIVFESSEADKAFYEKYPTIYHLRNALMHDNQKHDLREIFLAVHHIVKYRGNFLREDSVKAFKAAKFTLQGEDGIGPVDKLNDLLKEIYIEAAPELATDNLSKIEDIIKDKKLYKQDKLKQIANLLPKAVDSKDKAKLNKDIAKQVANAWMGYMFRLDTLFSFTDVDVKDYKLKFSDANIDESLDALTSLLTDAQIEFVLELQSIYNTIVLNEIVPDGMSLSESMVKKYDDHKKDLKLYKEYIDSLSDQKKAKQLEAAYALYVNYRKADLLAAKKLFEKKKIGDKKFVDVISNFEVFGKFVSDNLDDSELANKIKARLDLGEFLPKQRTNQNGVIPYQLHQVELTQILEKQGKYYPFLITPNPVESHRNNAPYEISELVSFRVPYYVGPLIDNQSIKDKQNKNKFAWMVRQKQGQITPWNFEEMVDTTESANQFIKRMTRKDTYLLAEDVLPKSSLIYQKFMILDELNRIKIDGKKLTSKLKHDIFEKLFKKQKSINLDNLKNYLLAEGNIPGLIEGLSDGINFNNSFSTYIDYRNIFGDEIDNPNKQADFEKMIEWSTVFEDRKIFKRKLKEITWLTPEQIKQVSSKRYSGWGRLSKKLLTQITDENGVNILQRLWNEPETLTEVLANPVIKRKISEANSLFVQINKVENILDDAYTSPQNKKAIRQVIRVVDDIIAAAHGKKPSQIAIEFARSSQNKAKVPDTRKKQLDKIYNKISSEILDSSIKNELKNLKSNKYLSKDKLFLYFKQMGRDAYTGDKLSLDQLQNYDIDHIFPRSFIKDDSLDNRVLTQKPINAKKSDYGIPALEFGNKYVPDLGITVKEMWKLWQENGLISKSKLINLCTNPKKIGSKRASGFINRQLVETSQVIKLVAIILQAEFPDTEIIEVKALQNTTLRESFHLYKNRSVNDYHHAIDAYLTTIVGNYLYQVYPKLRPYFVYGQFKKFNQEKNIDILKRLKNFNFLRQLIFNTDDNIYISGTKEIVFNKKDIIHKLETAYGYKYMNISRECYQETSSLFNQTLYAHNSSVKNSLIPKKKGLPTEIYGGYSGNKDSFFVLVKIVKKRTNLYRIVGIPTRELAKLNSSNNYNQALNKIVESKLCLKETESFKILIKRLLYGTLIVDNGQKFRIGSFKEKHNVQQLVLQLKSMKYIKFYIDGGQNYFTDVERKKLEKQDRDKCLLYVFDDIMNVVNKRFTLFDMSKYEKDGDSLREKFNCLDFNDKVSILSDLLKAFHANSDRTSITKLKITNLGRHQAGKNGITLTTNAQIIYQSPTGLFERRIKIKDL

SEQ ID NO: 21810 - protein, 1391 aa, unidentified
  REGION 1..1391: note = Cas Enzyme sequence
MKEIKDYIIGLDIGTNSCGYVVTDKQNNILKLKGKTAIGARLFKEGEAAADRRAFRTTRRRLARRRWRLSLLEEIFDEEMNKVDPSFFRRLKESDYSPKDRRKQFNSIVFESSEADKAFYEKYPTIYHLRNALMHDNQKHDLREIFLAVHHIVKYRGNFLREDSVKAFKAAKFTLQGEDGIGPVDKLNDLLKEIYIEAAPELATDNLSKIEDIIKDKKLYKQDKLKQIANLLPKAVDSKDKAKLNKDIAKQVANAWMGYMFRLDTLFSFTDVDVKDYKLKFSDANIDESLDALTSLLTDAQIEFVLELQSIYNTIVLNEIVPDGMSLSESMVKKYDDHKKDLKLYKEYIDSLSDQKKAKQLEAAYALYVNYRKADLLAAKKLFEKKKIGDKKFVDVISNFEVFGKFVSDNLDDSELANKIKARLDLGEFLPKQRTNQNGVIPYQLHQVELTQILEKQGKYYPFLITPNPVESHRNNAPYEISELVSFRVPYYVGPLIDNQSIKDKQNKNKFAWMVRQKQGQITPWNFEEMVDTTESANQFIKRMTRKDTYLLAEDVLPKSSLIYQKFMILDELNRIKIDGKKLTSKLKHDIFEKLFKKQKSINLDNLKNYLLAEGNIPGLIEGLSDGINFNNSFSTYIDYRNIFGDEIDNPNKQADFEKMIEWSTVFEDRKIFKRKLKEITWLTPEQIKQVSSKRYSGWGRLSKKLLTQITDENGVNILQRLWNEPETLTEVLANPVIKRKISEANSLFVQINKVENILDDAYTSPQNKKAIRQAIRVVDDIIAAAHGKKPSQIAIEFARSSQNKAKVPDTRKKQLDKIYNKISSEILDSSIKNELKNLKSNKYLSKDKLFLYFKQMGRDAYTGDKLSLDQLQNYDIDHIFPRSFIKDDSLDNRVLTQKPINAKKSDYGIPALEFGNKYVPDLGITVKEMWKLWQENGLISKSKLINLCTNPKKIGSKRASGFINRQLVETSQVIKLVAIILQAEFPDTEIIEVKALQNTTLRESFHLYKNRSVNDYHHAIDAYLTTIVGNYLYQVYPKLRPYFVYGQFKKFNQEKNIDILKRLKNFNFLRQLIFNTDDNIYISGTKEIVFNKKDIIHKLETAYGYKYMNISRECYQETSSLFNQTLYAHNSSVKNSLIPKKKGLPTEIYGGYSGNKDSFFVLVKIVKKRTNLYRIVGIPTRELAKLNSSNNYNQALNKIVESKLCLKETESFKILIKRLLYGTLIVDNGQKFRIGSFKEKHNVQQLVLQLKSMKYIKFYIDGGQNYFTDVERKKLEKQDRDKCLLYVFDDIMNVVNKRFTLFDMSKYEKDGDSLREKFNCLDFNDKVSILSDLLKAFHANSDRTSITKLKITNLGRHQAGKNGITLTTNAQIIYQSPTGLFERRIKIKDL

SEQ ID NO: 21811 - protein, 1395 aa, unidentified
  REGION 1..1395: note = Cas Enzyme sequence
MKEIKDYIIGLDIGTNSCGYVVTDKQNNILKLKGKTAIGARLFKEGQAAADRRSFRTTRRRLARRHWRLGLLEEIFDPEMEKIDPNFFRRLKESDYSPKDSRKQFNAIVFKSIKADKRFYKKYPTIYHLRNALMHDNQKHDLREIFMAVHHIVKYRGNFLREDSVNAFKAAKFSLRGEDGIGPVDKLNDLLKEIYSEYSPELATNNLSKIEDIIKDKNLYKQDKLKQVATLLIKEADSKDKAKLNKDIAKQVANSFMGYMFRLDTLFSLTDVDVKDYKLKFSDANIDESLDDLTSLLTDAQIEFVLELQSIYNTIVLNEIVPDGMSLSESMIKKYDDHKEDLKIFKEYIDSLSDQKKAKKLLSAYNLYVNYRKSDLVEAKNLFKNKKVGDKNFADVISNFEVFGKFVSDNLDDSELANKIKARLDLGEFLPKQRTNQNGVIPYQLHQVELTQILEKQGKYYPFLITPNPVESHRNNAPYEISELVSFRVPYYVGPLIDNQSIKDKQNKNKFAWMVRQKQGQITPWNLEEMVDTTESANQFIKRMTRKDTYLLAEDVLPKSSLVYQKFMILDELNRIKIDGKKLTSELKHDIFEKLFKKQKSINLDNLKNYLLVEGNIPGLIEGLSDGINFNNSFSTYIDYRNIFGDEIDNPNKQADFEKMIEWSTVFEDRKIFKRKLKEITWLTSEQIKQVSSKRYSGWGRLSKKLLTQITDENGVNILQRLWNEPETLTEVLANPVIKRKIVEANSSFTKAKDMKDILVEAYTSPQNKKAIRQVMRVVDDIIAAAHGKKPSQIAIEFAREDQDNPQMTKSRKAQLDQIYAKISDEFLDDAVKNELKNMKDNKPLAKDKVFLYFKQMGRDAYSGEKLSLDNLQDYDIDHIYPQSFIKDDSFDNRVLVQRAYNNGKSDNVPVLLFGNKIAAGLGITIRQMWKKWLELGLISKRKFNNLITDPEKISRNMASGFVNRQLVETSQVIKLVANILQAKLPDTEIIEVKASYNSILRKEFNLYKSREVNDYHHAIDAYLTTIVGNYLYQVYPKLRPYFVYGQFKKFGKAENQEDDPVKKIKKFNFIYQLIWGKDDAICISHTNQQVFSKKDIIDKLTTAYNFKYMNISHAVYTRNNNMFKQTLFPIIERTTAKTKSLIPKKLDRPTDIYGGYSNNNDAYLALVKVDKKRGSEYRVVGIPMRAAAMLKASKNYDEDLRKVIEPMVMFDKNGKAKRGIEGFRVLVGKMPFKQAVLDGNKKFMLTGTVDTPNLKQLVLSQQNMKYILDYIEDVDCRKHKFGDKVQNPDKCLLEVFDEIIEIVDKYFELFDSRDFREKLRNSRNKFIKLEASKKADTILAILKGLQAKSTRATIKELNISDFGRIITSSISPEAQLIYQSPTGLFERRVKVKDL

SEQ ID NO: 21812 - protein, 1361 aa, unidentified
  REGION 1..1361: note = Cas Enzyme sequence
MIKGDYYLGLDLGTNSVGWAVTDLEYNLLRAKGKDLWGVRLFDEAQTAANRRSKRIARRRIERDKARKALLKEFFADEIEKIDPAFYMKMNESFFKLKDRSVENQQPYSLFNDFDFTDKEFHDKYKTIFHLRSDLIHSDKIFDVRLVFLAIYNMFSHRGHFLNATLDAEKNDTGFENAYAEMIEVLEEHEFGIPSNIEVGAIEEILSDNKSSRTNHFEQLLALFNIIKKDKRNCAVLRLLAGLSINLKDIYDQELDKESDKKFGFRESNYEEVIEEVYNIVDEDYKNIIEKIKMVHDAGLLSKIMIGCEYLSDARVKIYDMHQKDLKQLKALLKKYNKGAYEKLFRTIESGTYSAYVGSVNSHGKIERRQGKERGKDVLYKSIEKAIKDIPDNDKDKIEIKAKIDAEIFLEKQLTNKNGVIPNQVHSRELRAILNNAEKYLSFLSKADSTGYSIKEKIIQLFEFQIPYYVGPLGREFNGKKGYNCWAVRKESGRVFPWNFDEKIDKNASAEEFIKRMVRKCTYFNDENTLPKNSLIYEKFMVLNEINAIRVNGCRLDTETKQAIYNDLFTSGKKVNKKKIKEYLVSINKMDNESEISGIDTDWSKNLTSIAKFKGVFDGKIETNKEIIEDIIFWSTIYSGDKKLIRSKIETVYPNILNENQLKKILGFRFTGWGNLSRHFLEGIMGKDKNGTAENSIIGFLWNEQVTLQELLSQNYTFREIIDEQFLGIEKPLSSWEIEDLDDFYLSPSVKRMTWQTMKIVEELQRVLGKSPKRIFVEMTRSDGKKERTVSRKNKLISLYKSLGKEGKEFLNEIDDKDENFFNRRKVYLYYLQMGKCMYSGEIIDLYKLINGNDYNIEHIYPQCYIKDDSLENNLVLVKTEENQKKDDNPITIDIQKKMYSYWNILKEKGFISNEKFTRLTRKNESFTDDELAGFINRQIVETSQASKAITQILQQSMGENCKIVFSKAKLVSEFRQKFDLPKSRIVNDLHHANDAYLNIVVGNAYYVKFTGNPYKFIKNAKMNPKLKENKYHISDFYRYDIYNKNEVAWRSEQDETIDIVKRTMERFTSLVTRKLEQGHGEYFKETIFNNITAKKESYIGVKTKQSALKNVNDYGGKRSISTQGYALVEYTEGNKTIRLLKEIPIILGDYRKLTEDNIIKYINDILISEVKTQEARNIRVCEKFIPMNSLIKIDGAYYYLGGKTEEYFYARNAMQLKLDRNWVKYVHKIEKANSKNNYDEVDNLKNKIITSEKNQELFDLILSKFDKLPYSNCKAGPLLEHLNKARKNFIEADTKNQCIVLEKMIRNISKSEKVDLSSIGGKANVGSVRINTKISNYKEFKLISQSSSGLFENEKDLLKI

SEQ ID NO: 21813 - protein, 1246 aa, unidentified
  REGION 1..1246: note = Cas Enzyme sequence
MIKGDYYLGLDLGTNSVGWAVTDLEYNLLRAKGKDLWGVRLFDEAQTAANRRSKRIARRRIERDKARKALLKEFFADEIEKIDPAFYMKMNESFFKLKDRSVENQQPYSLFNDFDFTDKEFHDKYKTIFHLRSDLIHSDKIFDVRLVFLAIYNMFSHRGHFLNATLDAEKNDTGFKNAYAEMIEVLEEHEFGIPSNIEVDAIEEILSDNKSSRTNHFEQLLALFNIIKKDKRNCAVLKLLAGLSINLKDIYNQELDKESDKKFGFRESNYEEVIEEVYNIVDEDYKNIIEKIKMVHDAGLLSKIMIGCEYLSDARIKIYDMHQKDLKQLKALLKKYNKEAYEKLFRTIESGTYSAYVGSVNSHGKIERRQGKERGKDVLYKSIEKAIKDIPDNDKDKIEIKAKIDAEIFLEKQLTNKNGVIPNQVHSRELRAILNNAEKYLPFLSEVDNTGYSIKEKIIQLFEFQIPYYVGPLGREFNGKKGYNCWAVRKESGRVFPWNFDEKIDKNASAEEFIKRMVRKCTYFNDENTLPKNSLIYEKFMVLNEINAIRINGCRLDTETKQAIYNDLFTSGKKVNKKKIKEYLVSINKMDNESEISGIDTDWSKNLTSIAKFKGVFDGKIETNKEIIEDIIFWSTIYSGDKKLIRSKIETVYPNILNENQLKKILGFRFTGWGNLSRHFLEGIMGKDKNGTAENSIIGFLWNEQVTLQELLSQNYTFGEIIDEQFLGIEKPLSSWEIEDLDDFYLSPSVKRMTWQTMKIVEELQRVLGKSPKRIFVEMTRSDGKKERTVSRKNKLISLYKSLGKEGKEFINEIDGKDENFFNRRKVYLYYLQMGKCMYSGEVIDLHKLLNDNLYDIDHIYPQHYIKDDSIENNLVLVKKKLNKDKDDKPLTSKIQADRYTFWCMLKDKGFISSEKFTRLTRRNDSFTEDELTGFINRQIVETSQASKAITQILQQSMGENCKIVFSKAKLVSEFRHKFDLPKSRIVNDLHHANDAYLNIVVGNAYYVKFTGNPYKFIKNAIKDKELNENKYHLSDFYNNDIYNKNEVAWTNKDNKTITTIKEILKRATPIVVKKVEQAHGKYFDETLVGHNKAKKSVYIGQKTKHSVLSNVCDYGGKTSISVQTCLLVEYKKKNEIIRRIMTLPVLAGDSRNIKKTEMLRYVEKALLEKEKNQKIDGIRVCERYIPMNSLLKINGAYYYLGGKTDNNFYIKNAMQFKLDEKWIKYILKRQIGLRIIVKLINLRII

SEQ ID NO: 21814 - protein, 1351 aa, unidentified
  REGION 1..1351: note = Cas Enzyme sequence
MSKKYYLGLDIGTNSVGWAVTDENYNLYKYAGKRMWGIRLFEGGETAEQRRISRSNRRRLSRKKQRIDLLQELFAEEIAKMDPTFFIRLNESRLHLEDKSTGEKFPLFTDKDYTDIQYYKEYPTIYHLRKELIENSKVHDVRLVYLACHHILKNRGHFLINGSFSDVKKLSSVCESMLNSFNGISKYQLEINDIERLEEILSDRKKQKSVKAKELIQIFECGPCEDKTDEKTCKAIVSNLCKWLTGLKGNINSIFDMQFEEIDTSSFSFTEPKYEDTISAALEEKYPDYADVIQKIKTVYDWSVLVEIMAGEDYLSFAKVNAYNKHKENLCILKEVIRKYCDSEMYHKFFNGFDEKNGYGNYIGSIYKNGHSYAMKKCSTEDFYKTLGKILDKIQPEKEDENVLEELKVEVKNQTLLPLARTTANGTIPNQVHIQELKAILDNAKKYLPFLNEKDEYGTVAEKIISIAKFRIPYYVGPLSTRHKKQGANSWIVRKQEGRIYPWNFEEMVDLEQSNKEFIQRMTNKCTHLIGEDVLPKNSLLYSRYMVLNELNNLRIRGNKISVNLKQELYKELFCTKAKVTGKGLFNYLKKEDEELALEDISGFDIDFKSSLTSYLDFKKQILGEEIEKDKYKDIVENIIKWKTIYDDDSKMMKKMIEREYPNVFSKDQIKKICRFKYSGWGNFSLSFLNGIRGADRETGENFTIIEALWKTNYNLMQLLSKQFTFREEIDLINADKVGKIDKVSYDNTVKDLIVSPANKRAIWQTVQITEEIKKVMKCEPERIFIEMARGGEKEKRRTVSRKARLLELYAACKDDVRDWTKEIENREEREFNSKKLYLYYTQMGRCMYSGEEIDIDELMQKNSKWDIDHIYPQSKIKDDSIDNMVLAKKVINNSKQNKLLSPDIRIKMKKYWNTLYKGNFISKKKYDRLTRTEDFTNEELSGFIERQIVETRQSSKAVAELLNRLYEHSEIVYVKAGLVSDFRHDNKLLKSRRINDYHHAKDAFLNIVVGNVYNAKFTSNPRKWIKENRGTNYSIRRVFDYNVKRGNTVVWQGVKDAGHSIEAIRKTMARNDILYTEYTYCDKGELFNATLVRKGNDKAINLKKDLDSVKYGGYNTPKTSAFAFIEFDGKKKERKNHIVEIPVYIVNIASRQPDTIKEYLEQKKGYKNVVVKKYPIKKNALIKVDGYLARLRGATEKDVLLKNAVQLVLRDEYSENIRKVEKYLENNIQYQADSKFEGFTQEDLNDLYDELYIKLKESIYNKRPANQLGTLEKGREKYRAIGDLREKAKIINSILALFQCDATTSTNLKEIGGTANAGNMAYNKNTLPTKKLILIHQSVTGLFETEEELV

SEQ ID NO: 21815 - protein, 1351 aa, unidentified
  REGION 1..1351: note = Cas Enzyme sequence
MSKKYYLGLDIGTNSVGWAVTDENYNLYKYAGKRMWGIRLFEGGETAEQRRISRSNRRRLSRKKQRIDLLQELFAEEIAKMDPTFFIRLNESRLHLEDKSTGEKFPLFTDKDYTDIQYYKEYPTIYHLRKELIENSKVHDVRLVYLACHHILKNRGHFLINGSFSDVKKLSSVCESMLNSFNGISKYQLEINDIERLEEILSDRKKQKSVKAKELIQIFECGPCEDKTDEKTCKAIVSNLCKWLTGLKGNINSIFDMQFEEIDTSSFSFTEPKYEDTISAALEEKYPDYADVIQKIKTVYDWSVLVEIMAGEDYLSFAKVNAYNKHKENLCILKEVIRKYCDSEMYHKFFNGFDEKNGYGNYIGSIYKNGHSYAMKKCSTEDFYKTLGKILDKIQPEKEDENVLEELKVEVKNQTLLPLARTTANGTIPNQVHIQELKAILDNAKKYLPFLNEKDEYGTVAEKIISIAKFRIPYYVGPLSTRHKKQGANSWIVRKQEGRIYPWNFEEMVDLEQSNKEFIQRMTNKCTHLIGEDVLPKNSLLYSRYMVLNELNNLRIRGNKISVNLKQELYKELFCTKAKVTGKGLFNYLKKEDEELALEDISGFDIDFKSSLTSYLDFKKQILGEEIEKDKYKDIVENIIKWKTIYDDDSKMMKKMIEREYPNVFSKDQIKKICRFKYSGWGNFSLSFLNGIRGADRETGENFTIIEALWKTNYNLMQLLSKQFTFREEIDLINADKVGKIDKVSYDNTVKDLIVSPANKRAIWQTVQITEEIKKVMKCEPERIFIEMARGGEKEKRRTVSRKARLLELYAACKDDVRDWTKEIENREEREFNSKKLYLYYTQMGRCMYSGEEIDIDELMQKNSKWDIDHIYPQSKIKDDSIDNMVLAKKVINNSKQNKLLSPDIRIKMKKYWNTLYKGNFISKKKYDRLTRTEDFTNEELSGFIERQIVETRQSSKAVAELLNRLYEHSEIVYVKAGLVSDFRHDNKLLKSRRINDYHHAKDAFLNIVVGNVYNAKFTSNPRKWIKENRGTNYSIRRVFDYNVKRGNTVVWQGVKDAGHSIEAIRKTMARNDILYTEYTYCDKGELFNATLVRKGNDKAINLKKDLDSVKYGGYNTPKTSAFAFIEFDGKKKERKNHIVEIPVYIVNIASRQPDTIKEYLEQKKGYKNVVVKKYPIKKNALIKVDGYLARLRGATEKDVLLKNAVQLVLRDEYSENIRKVEKYLENNIQYQADSKFEGFTQEDLNDLYDELYIKLKESIYNKRPANQLGTLEKGREKYRAIGDLREKAKIINNILALFQCDATTSTNLKEIGGTANAGNMAYNKNTLPTKKLILIHQSVTGLFETEEELV

SEQ ID NO: 21816 - protein, 1239 aa, unidentified
  REGION 1..1239: note = Cas Enzyme sequence
  REGION 1233..1238: note = misc_feature - Xaa can be any naturally occurring amino acid
NSVGWAVTDENYNLCKYAGKRMWGIRLFEGGETAEQRRISRSNRRRLSRKKQRIDLLQELFAEEIAKMDPTFFIRLNESRLHLEDKSTGEKFPLFTDKDYTDIQYYKEYPTMYHLRKELIENSKVHDVRLVYLACHHILKNRGHFLINGSFSDVKKLSSVCESMLNSFNGISKYQIEINDIERLEEILSDRKKQKSVKAKELIQIFECGPCEDKTDEKTCKAIVSNLSKWLTGLKGNINSIFDMQFEEIDTSSFSFTEPKYEDTISAALEEKYPDYADVIQKIKTVYDWSVLVEIMAGEDYLSFAKVNAYNKHKENLCILKEVIRKYCDSEMYHKFFNGFDEKNGYGNYIGSIYKNGHSYAMKKCSTEDFYKTLGKILDKIQPEKEDENVLEELKVEVKNQTLLPLARTTANGTIPNQVHIQELKAILDNAKKYLPFLNEKDEYGTVAEKIISIAKFRIPYYVGPLSTRHKKQGANSWIVRKQEGRIYPWNFEEMVDLEQSNKEFIQRMTNKCTHLIGEDVLPKNSLLYSRYMVLNELNNLRIRGNKISVNLKQELYKELFCTKAKVTGKGLFNYLKKEDEELALEDISGFDIDFKSSLTSYLDFKKQILGEEIEKDKYKDIVENIIKWKTIYDDDSKMMKKMIEREYPNVFSKDQIKKICRFKYSGWGNFSLSFLNGIRGADRETGENFTIIEALWKTNYNLMQLLSKQFTFREEIDLINADKVGKIDKVSYDNTVKDLIVSPANKRAIWQTVQITEEIKKVMKCEPERIFIEMARGGEKEKRRTVSRKARLLELYAACKDDVRDWTKEIENREEREFNSKKLYLYYTQMGRCMYSGEEIDIDELMQKNSKWDIDHIYPQSKIKDDSIDNMVLAKKVINNSKQNKLLSPDIRIKMKKYWNTLYKGNFISKKKYDRLTRTEDFTNEELSGFIERQIVETRQSSKAVAELLNRLYEHSEIVYVKAGLVSDFRHDNKLLKSRRINDYHHAKDAFLNIVVGNVYNAKFTSNPRKWIKENRGTNYSIRRVFDYNVKRGNTVVWQGVKDAGHSIEAIRKTMARNDILYTEYTYCDKGELFNATLVRKGNDKAINLKKDLDSVKYGGYNTPKTSAFAFIEFDGKKKERKNHIVEIPVYIVNIASRQPDTIKEYLEQKKGYKNVVVKKYPIKKNALIKVDGYLARLRGATEKDVLLKNAVQLVLRDEYSENIRKVEKYLENNIQYQADSKFEGFTQEDLXXXXXXE

SEQ ID NO: 21817 - protein, 1371 aa, unidentified
  REGION 1..1371: note = Cas Enzyme sequence
LRYIYYRGSKVFCQEGRKVQMSKKYYLGLDIGTNSVGWAVTDENYNLCKYAGKRMWGIRLFEGGETAEQRRISRSNRRRLSRKKQRIDLLQELFAEEIAKMDPTFFIRLNESRLHLEDKSTGEKFPLFTDKDYTDIQYYKEYPTMYHLRKELIENSKVHDVRLVYLACHHILKNRGHFLINGSFSDVKKLSSVCESMLNSFNGISKYQIEINDIERLEEILSDRKKQKSVKAKELIQIFECGPCEDKTDEKTCKAIVSNLSKWLTGLKGNINSIFDMQFEEIDTSSFSFTEPKYEDTISAALEEKYPDYADVIQKIKTVYDWSVLVEIMAGEDYLSFAKVNAYNKHKENLCILKEVIRKYCDSEMYHKFFNGFDEKNGYGNYIGSIYKNGHSYAMKKCSTEDFYKTLGKILDKIQPEKEDENVLEELKVEVKNQTLLPLARTTANGTIPNQVHIQELKAILDNAKKYLPFLNEKDEYGTVAEKIISIAKFRIPYYVGPLSTRHKKQGANSWIVRKQEGRIYPWNFEEMVDLEQSNKEFIQRMTNKCTHLIGEDVLPKNSLLYSRYMVLNELNNLRIRGNKISVNLKQELYKELFCTKAKVTGKGLFNYLKKEDEELALEDISGFDIDFKSSLTSYLDFKKQILGEEIEKDKYKDIVENIIKWKTIYDDDSKMMKKMIEREYPNVFSKDQIKKICRFKYSGWGNFSLSFLNGIRGADRETGENFTIIEALWKTNYNLMQLLSKQFTFREEIDLINADKVGKIDKVSYDNTVKDLIVSPANKRAIWQTVQITEEIKKVMKCEPERIFIEMARGGEKEKRRTVSRKARLLELYAACKDDVRDWTKEIENREEREFNSKKLYLYYTQMGRCMYSGEEIDIDELMQKNSKWDIDHIYPQSKIKDDSIDNMVLAKKVINNSKQNKLLSPDIRIKMKKYWNTLYKGNFISKKKYDRLTRTEDFTNEELSGFIERQIVETRQSSKAVAELLNRLYEHSEIVYVKAGLVSDFRHDNKLLKSRRINDYHHAKDAFLNIVVGNVYNAKFTSNPRKWIKENRGTNYSIRRVFDYNVKRGNTVVWQGVKDAGHSIEAIRKTMARNDILYTEYTYCDKGELFNATLVRKGNDKAINLKKDLDSVKYGGYNTPKTSAFAFIEFDGKKKERKNHIVEIPVYIVNIASRQPDTIKEYLEQKKGYKNVVVKKYPIKKNALIKVDGYLARLRGATEKDVLLKNAVQLVLRDEYSENIRKVEKYLENNIQYQADSKFEGFTQEDLNDLYDELYIKLKESIYNKRPANQLGTLEKGREKYRAIGDLREKAKIINNILALFQCDATTSTNLKEIGGTANAGNMAYNKNTLPTKKLILIHQSVTGLFETEEELV

SEQ ID NO: 21818 - protein, 1137 aa, unidentified
  REGION 1..1137: note = Cas Enzyme sequence
MKISLGLDIGVSSVGFSVLDADTGEILELGSRLFNGSIAAENLTRRDSRGSRRTSNRNKQRRKDVAKLFVKHNLIEQFAENDYFSAFSNNTNPYSIRAKGLTEKLTKLEIAQALYNIVKRRGISYDLQDAEVDDDASVSDYSASLNKNTALLKNYTPAEIQLQRLNEYGAVRGKIVVENSENHEVLLNVFPTKEFVKEAKKIIECQRQFYPDVVTDDFEEKYLTILQRKRDYFVGPGSEKSRSDYGIYKTSGKTLTNLFEELVGKDNFYPDEYRASGASYTAQLFNVLNDLNNLRILSHEDQKLTSEDKKKIIDELNSTTGNPSMIKLIKKVTGCSDSDIKGYRLDSKDKPDIHSMAIYRKIHRDFKKLGIDIHEWKTADKTYQDFLDDISFGMTLNTENGEIRRMLKEDWQPVYPFLDDELIQTIIDNKASFDIKTNNKWHRFSIKLMKELIPEMKIRPIEQMTLIHELGLVDKNKTDYSRNTYVPYKQIAKEIYNPVASKSVREALKIVNAVLKKYSRIDYVVIEMPREKNEEDEKKNIAKFQKENKQRKDAAMKAFVEAVGSQSAVDDALRTSSSWKVRLAIQLWYQQDRVDLYSGRRINATDLISNFSLFEIDHIIPQSISFDDSINNKTLCYKDMNQIKGQKTPFEFMNEGHGQQYDVMKAIVLKNSKFSKAKKSNYLFEENVSDIETRKRFISRNLVDTRYSSRVVLNSLQDFFKGKEFGTKVSVIRGKFTNNMRKHWRLNKTRDTFHHHAIDASIIASTPFLRMWKKGGSIFPRQVNEATIDIETGEILDDKSFNEEMYQLPYSGFVEQLDNAESRVKFSHQVDKKVNRKVSNSTIYSTRMAALAKDKNESEYVLAKIKNIYDADEYARMKKLLEKDKTKFLLYRIDPKTFAMLEEILEMYPDTTEIVGKDGKVKKIKVSPFELYRRDHGMVRKYSKKGNGPVIKQLKYLDSKLGSHIDITPGSASPEKHVVLQSLKPWRTDVYYNNSTNSYEIMGINYSDLKFNRGEGYGIKKDRYFQLMKDEGVSNESDFCFTLYRKDRIKVLNPVTGEVVEMLFWSRNKVSKGYAEIKPIDKAMNENGNYPIYGDAKKQVIKRLVPNECVIHKINVDILGNTYEIEKESDNPKNVLD

SEQ ID NO: 21819 - protein, 1130 aa, unidentified
  REGION 1..1130: note = Cas Enzyme sequence
MTNGKILGLDIGIASVGVGIIEAKTGKVVHANSRLFSAANAENNAERRGFRGSRRLNRRKKHRVKRVRDLFEKYGIVTDFRNLNLNPYELRVKGLTEQLTNEELFAALRTISKRRGISYLDDAEDDSTGSTDYAKSIDENRRLLKNKTPGQIQLERLEKYGQLRGNFTVYDENGEAHRLINVFSTSDYEKEARKILETQADYNKKITAEFIDDYVEILTQKRKYYHGPGNEKSRTDYGRFRTDGTTLENIFGILIGKCNFYSDEYRASKASYTAQEYNFLNDLNNLKVPTETGKLSTEQKESLVEFAKNTATLGPAKLLKEIAKILDCKVDEIKGYREDDKGKPDLHTFESYRKLKFNLESINIDDLSREVIDKLADILTLNTEREGIEDAIKRNLPNQFTEEQISEIIKVRKSQSTAFNKGWHSFSAKLMNELIPELYATSDEQMTILTRLEKFKVNKKSSKNTKTIDEKEVTDEIYNPVVAKSVRQTIKIINAAVKKYGDFDKIVIEMPRDKNADEEKKFIDKRNKENKKEKDDALKRAAYLYNSSDKLPDEVFHGNKQLETKIRLWYQQGERCLYSGKPISIQELVHNSNNFEIDHILPLSLSFDDSLANKVLVYAWTNQEKGQKTPYQVIDSMDAAWSFREMKDYVLKQKGLGKKKRDYLLTTENIDKIEVKKKFIERNLVDTRYASRVVLNSLQSALRELGKDTKVSVIRGQFTSQLRRKWKIDKSRETYHHHAVDALIIAASSQLKLWEKQDNPMFVDYGNNQVVDKQTGEILSVSDDEYKELVFQPPYQGFVNTISSKGFEDEILFSYQVDSKYNRKVSDATIYSTRKAKIGKDKKEETYVLGKIKDIYSQNGFDTFIKKYNKDKTQFLMYQKDPLTWENVIEVILRDYPTTKKSEDGKNDVKCNPFEEYRRENGLICKYSKKGKGTPIKSLKYYDKKLGNCIDITPEESRNKVILQSINPWRADVYFNPETLKYELMGLKYSDLSFEKGTGNYHISQEKYDAIKEKEGIGKKSEFKFTLYRNDLILIKDIASGEQEIYRFLSRTMPNVNHYVELKPYDKEKFDNVQELVEALGEADKVGRCIKGLNKPNISIYKVRTDVLGNKYFVKKEGDKPKLDFKNNKK

SEQ ID NO: 21820 - protein, 1130 aa, unidentified
  REGION 1..1130: note = Cas Enzyme sequence
MTNGKILGLDIGIASVGVGIIEAKTGKVVHANSRLFSAANAENNAERRGFRGSRRLNRRKKHRVKRVRDLFEKYGIVTDFRNLNLNPYELRVKGLTEQLTNEELFAALRTISKRRGISYLDDAEDDSTGSTDYAKSIDENRRLLKNKTPGQIQLERLEKYGQLRGNFTVYDENGEAHRLINVFSTSDYEKEARKILETQADYNKKITAEFIDDYVEILTQKRKYYHGPGNEKSRTDYGRFRTDGTTLENIFGILIGKCNFYPDEYRASKASYTAQEYNFLNDLNNLKVPTETGKLSTEQKESLVEFAKNTATLGPAKLLKEIAKILDCKVDEIKGYREDDKGKPDLHTFESYRKLKFNLESINIDDLSREVIDKLADILTLNTEREGIEDAIKRNLPNQFTEEQISEIIKVRKSQSTAFNKGWHSFSAKLMNELIPELYATSDEQMTILTRLEKFKVNKKSSKNTKTIDEKEVTDEIYNPVVAKSVRQTIKIINAAVKKYGDFDKIVIEMPRDKNADEEKKFIDKRNKENKKEKDDALKRAAYLYNSSDKLPDEVFHGNKQLETKIRLWYQQGERCLYSGKPISIQELVHNSNNFEIDHILPLSLSFDDSLANKVLVYAWTNQEKGQKTPYQVIDSMDAAWSFREMKDYVLKQKGLGKKKRDYLLTTENIDKIEVKKKFIERNLVDTRYASRVVLNSLQSALRELGKDTKVSVIRGQFTSQLRRKWKIDKSRETYHHHAVDALIIAASSQLKLWEKQDNPMFVDYGNNQVVDKQTGEILSVSDDEYKELVFQPPYQGFVNTISSKGFEDEILFSYQVDSKYNRKVSDATIYSTRKAKIGKDKKEETYVLGKIKDIYSQNGFDTFIKKYNKDKTQFLMYQKDPLTWENVIEVILRDYPTTKKSEDGKNDVKCNPFEEYRRENGLICKYSKKGKGTPIKSLKYYDKKLGNCIDITPEESRNKVILQSINPWRADVYFNPETLKYELMGLKYSDLSFEKGTGNYHISQEKYDAIKEKEGIGKKSEFKFTLYRNDLILIKDIASGEQEIYRFLSRTMPNVNHYVELKPYDKEKFDNVQELVEALGEADKVGRCIKGLNKPNISIYKVRTDVLGNKYFVKKEGDKPKLDFKNNKK

SEQ ID NO: 21821 - protein, 1129 aa, unidentified
  REGION 1..1129: note = Cas Enzyme sequence
MSNGKILGLDIGVASVGVGIIDAKTGNVIHANSRLFSAANAENNAERRGFRGARRLTRRKKHRVKRVRDLFEKYDISTDFRNLNLNPYELRVKGLTEQLTNEELFAALRTIAKRRGISYLDDAEDDSTGSSDYAKSIDENRRLLKTKTPGQIQLERLEKYGQLRGNFTVYDENGEAHRLINVFSTSDYKNEARKILETQSNYNKQITDEFIEDYIEILTQKRKYYHGPGNEKSRTDYGRFRTDGTTLENIFGILIGKCSFYPEEYRASKASYTAQEFNFLNDLNNLKVPTETGKLSTEQKEYLVDFAKKSKALGASKLLKEIAKIVDCSVDDIKGYRVDNKDKPDLHTFEPYRKLKFNLSSIDIDELSRETLDKLADILTLNTEREGIEDTIKRNLPSQFTEEQISEIVQIRKNQSSAFNKGWHSFSAKLMNELIPELYVTSEEQMTILTRLEKFKVNKKSSKNTKTIDEKEITDEIYNPVVAKSVRQTIKIINAAVKKYGDFDKIVIEMPRDKNAEDEKKFIDKKEKENKKEKDDSLKRAAFLYNGTDNLPDGVFHGNKELKTKIRLWYQQGERCLYSGKLISIHDLVHNSNKFEIDHILPLSLSFDDSLANKVLVYAWTNQEKGQKTPYQVIDSMDAAWSFREMKDYVLKQKRLGKKKREYLLTTENIDKIEVKKKFIERNLVDTRYASRVVLNSLQTALKELGKDTKVSVVRGQFTSQLRRKWNIDKSRETYHHHAVDALIIAASSQLKLWQKQENPMFESYGENQVVNKETGEILSISDDKYKELVFQPPYQGFVNTISSKGFEDEILFSYQVDSKFNRKVSDATIYSTRKAKLGKDKKDETYVLGKIKDIYSQDGFDTFIKRYKKDKTQFLMYQKDPLTWENVIEVILRDYPSEKLSEDGKKTVKCNPFEEYRRENGLICKYSKKGNGTPIKSLKYYDKKLGNCIDITPEKSKNRVVLRQISPWRADIYFNLETLKYELMGLKYSDLSFEKGTGKYHISQEKYDAIREKEGIGKKSEFKFTLYRNDLILIKDTLNNCERMLRFGSKNDTSKHYVELKPLEKGTFDSEEEILPVLGKVAKSGQFIKGLNKPNISIYKVRTDVLGNKFFIKKEGDKPKLDFKNNNK

SEQ ID NO: 21822 - protein, 1129 aa, unidentified
  REGION 1..1129: note = Cas Enzyme sequence
MSNGKILGLDIGVASVGVGIIDAKTGNVIHANSRLFSAANAENNAERRGFRGARRLTRRKKHRVKRVRDLFEKYDISTDFRNLNLNPYELRVKGLTEQLTNEELFAALRTIAKRRGISYLDDAEDDSTGSSDYAKSIDENRRLLKTKTPGQIQLERLEKYGQLRGNFTVYDENGEAHRLINVFSTSDYKNEARKILETQSNYNKQITDEFIEDYIEILTQKRKYYHGPGNEKSRTDYGRFRTDGTTLENIFGILIGKCSFYPEEYRASKASYTAQEFNFLNDLNNLKVPTETGKLSTEQKEYVVDFAKKSKALGASKLLKEIAKIVDCSVDDIKGYRVDNKDKPDLHTFEPYRKLKFNLSSIDIDELSRETLDKLADILTLNTEREGIEDTIKRNLPSQFTEEQISEIVQIRKNQSSAFNKGWHSFSAKLMNELIPELYVTSEEQMTILTRLEKFKVNKKSSKNTKTIDEKEITDEIYNPVVAKSIRQTIKIINAAVKKYGDFDKIVIEMPRDKNAEDEKKFIDKKEKENKKEKDDSLKRAAFLYNGTDNLPDGVFHGNKELKTKIRLWYQQGERCLYSGKLISIHDLVHNSNKFEIDHILPLSLSFDDSLANKVLVYAWTNQEKGQKTPYQVIDSMDAAWSFREMKDYVLKQKGLGKKKRGYLLTTENIDKIEVKKKFIERNLVDTRYASRVVLNSLQTALKELGKDTKVSVVRGQFTSQLRRKWNIDKSRETYHHHAVDALIIAASSQLKLWQKQENPMFESYGENQVVNKETGEILSISDDKYKELVFQPPYQGFVNTISSKGFEDEILFSYQVDSKFNRKVSDATIYSTRKAKLGKDKKDETYVLGKIKDIYSQDGFDTFIKRYKKDKTQFLMYQKDPLTWENVIEVILRDYPSEKLSEDGKKTVKCNPFEEYRRENGLICKYSKKGNGTPIKSLKYYDKKLGNCIDITPEKSKNRVVLRQISPWRADIYFNLETLKYELMGLKYSDLSFEKGTGKYHISQEKYDAIREKEGIGKKSEFKFTLYRNDLILIKDTLNNCERMLRFGSKNDTSKHYVELKPLEKGTFDSEEEILPVLGKVAKSGQFIKGLNKPNISIYKVRTDVLGNKFFIKKEGDKPKLDFKNNNK

SEQ ID NO: 21823 - protein, 1130 aa, unidentified
  REGION 1..1130: note = Cas Enzyme sequence
MKAYNKTNFWGDNMANYVLGLDIGIGSVGVGLIEKETGEIIHKSVNIFPSGDAASNVERRGFRGAKRIKRRKTHRIKRTEDLFDKYDIDVALHSVPINLNPYEIRVRGLNEKLSLTELFVALKNMVKHRGISYLDDAIDEDNVATSGSDYKKAIEINARELKNKTPGEIQLERLEKYGQVRGDFSVKLEDGTERRLINVFSTSEYRKEAERVLKTQQQFYPELTDEFIADYLEILTKKRKYYHGPGNEKSRTDYGRYRTNGETLDNIFSILIGKCTYYPDEFRAAKASYSAQEFNLLNDLNNLTVPTETKKLSLEQKEAIIQFVKDAKTCGAKNILSKIAKMIGCKADDITGVREDKDHKAEMHSFEAYRKMKQLETIDVTALTREQLDQLGRILTLNTEREGILESIHEYLPDTFTNEQIDELIQFRKKNTTLLNKGWHSFSLKLLNELIPELYHTSEEQMTILTRLGKQKPKNESAKTKYIDGELITEEIYNPVVAKAVRQTIKIVNTILQEHGEIDTIVVEMARDKNDEDQKKRIQEGQKKNKNEKDAAILAAAMDYSNSKELPSTVFHGHKDLALKIRLWYQQEKRCAYSGREIPIAKLINNQGQYEIDHILPLSLTFDDGLDNKVLVEHIANQEKGQRTPFQAMPLLTNSWSWGEFKHYVINNSRFSKKKREYLLFEEDINKFEVRSKFIARNLVDTRYASRVVLNALQDFFKQRGANTKVAVVRGQFTAQLRRKWGIEKTRDTYHHHAIDALVIAASSQLKLWEKTKNTLIRYSENELLDTETGELISDDQYKEAVFKSPYDNFTKVLKSKELEDSILFAYQQDSKVNRKISDATIYTTRKRGDEEIPVAKIKDIYSIEGYDEFLKVYQKDPSKFLMLQHDPITFEKVIKVIVETYPDKEINENGKEVKVSPFKKYYDEHGYVRKYSRKGNGPIIKQLKYLDKAVGKHIDITPKNSSRKVALKSLKPWRADVYFNPETKRYEIMGLKYSDLKFQKGGNYGITKEEYDVIKKIEKISENSVFKFTLYKNNLILVKDTETNEQQIFRFGSRNETNFNYVELKPYDKAKFDSKEKLVKFGTVASSGQFIKSINIDNLSLYKIETNILGKKYIIKKEGEDPQLTFKNF

SEQ ID NO: 21824 - protein, 1130 aa, unidentified
  REGION 1..1130: note = Cas Enzyme sequence
MKAYNKTDLRGDNMANYVLGLDIGIGSVGVGLIEKETGKIIHKSVSLFPSGAAASNVERRGFRGSKRVKRRKKHRVKRTEDLFEKYDIDVDLYLVPINLNPYEIRVRGLNGKLSLTELFVALKNMVKHRGISYLDDAIDEDNAATSGSDYKKAIEFNARELKNKTPGEIQLERLEKYGQVRGDFSVKLEDGTERRLINVFSTSEYRKEAVRILKTQQQFYSELTDEFIADYLEILTKKRKYYHGPGNEKSRTDYGRYRTNGETLDNIFSILIGKCTYYPDEFRAAKASYSAQEFNLLNDLNNLTVPTETKKLSLEQKEEIIQFVKDAKTCGAKNILSKIAKMIGCKADDITGVREDKDHKAEMHSFEVYRKMKQLETIDVTALTREQLDQLGRILTLNTEREGILESIHEYLPDTFTDEQIDELIQFRKKNTTLLNKGWHSFSLKLLNELIPELYHTSEEQMTILTRLGKQKPKNESAKTKYIDGELITEEIYNPVVAKAVRQTIKIVNKILQERGEIDTIVVEMARDKNDEDQKKRIQEGQKKNKNEKDAAILAAAMDYSNSKELPSTVFHGHKELALKIRLWYQQEKRCAYSGREISIAKLINNQGEYEIDHILPLSLTFDDGLDNKVLVEHIANQEKGQRTPFQAMPLLTNSWSWGESKHYVINNSRFSKKKREYLLFEEDINKFEVRSKFIARNLVDTRYASHVVLNALQDFFKQRGANTKIAVVRGQFTSQLRRKWGIEKTRDTYHHHAIDALVIAASSQLKLWRKTKNTLIRYSENELLDTETGELISDEQYKENVFQAPYDNFTKVLKSKELEDSILFAYQQDSKVNRKISDATIYTTRKRGDEEITVAKIKDIYSIEGYDEFLKVYQKDPSKFLMVQHDPVTFEKVIKVIVETYPDKEINENGKEVKVSPFKKYYDEHGYVRKYSQKGNGPVIKQLKYLDKAVGKHINITPKDSSRKVALKSLKPWRADVYFNPETKRYEIMGLKYSDLRFQKGGSYGITKEEYDVIKKREKISKNSVFKFTLYKNNLVLVKDTETNEQQIFRFGSRNETNFNYVELKPYDKAFFEPKEKLVKFGDVSASGRFLKSINVDNLSLYKIETNILGKKYIIKNEGEKPQLTFKNF

SEQ ID NO: 21825 - protein, 1134 aa, unidentified
  REGION 1..1134: note = Cas Enzyme sequence
MNGLVLGLDIGIASVGVGILEKNSGKIIHANSRLFPAATADNNVERRKNRQVRRLHRRKKHRGVRLKDLFEDYGFLTDFSKVSINLNPYRLRVDGLNQQLTNEELFIALKNIVKRRGISYLDDASEDGGTVSSDYGKAVEENRKLLAEQTPSQIQLERFEKYGQVRGDFTVVENGQKCRLINVFSTSAYRKEAERILRKQQEFNSKITDEFIEDCLKILTGKRKYYHGPGNEKSRTDYGRFRTDGTTLDNIFGILIGKCTFYPDEYRASKASYTAQEFNLLNDLNNLTVPTETKKLSEEQKKVIVEYAKEAKTLGASTLLKYIAKMIDASVDQIRGYRVDVNNKPEIHTFEAYRKMQSLETISVGELSRNVLDELAHILTLNTEREGIEEAINTKLKDSFSQDQVLELVQFRKNNSSLFSKGWHNFSLKLMMELIPELYETSEEQMTILTRLGKQKSKEISKRTKYIDEKELTEEIYNPVVAKSVRQAIKIINEATKKHGIFDNIVIEMARENNEEDAKKDYIKRQKANQDEKNAAMEKAAFQYNGKKELPDSIFHGQKELATKIRLWHQQGEKCLYTGKNIPISDLIHNQYKYEIDHILPLSLSFDDSLSNKVLVLATANQEKGQRTPFQALDSMDDAWSYREFKSYVKESKLLSNKKKEYLLTEEDISKIEVKQKFIERNLIDTRYSSRVVLNALQDFYKAHKFDTTISVVRGQFTSQLRRKWGLEKSRETYHHHAVDALIIAASSQLRLWKKQNNSLISYKEGQFVDSETGEIISLTDDEYKELVFKAPYDHFVDTLRSKKFEDSILFSYQVDSKFNRKISDATIYATRKAKLDKEKKEYTYTLGKIKDIYSLGTKAPSKTGFYKFLDLYNKDKSQFLMFQKDRKTWDEVIEKIMEQYRPFKEYDKTGKLVDFNPFEKYRQENGPIRKYSKKGNGPEIKSLKYYDILLGKHKNITPEGSRNTVALLSLNPWRTDVYYNMETKKYEFLGLKYADLPFEEGGAYGISTETYNELREKEGIGKNSEFKFTLYKNDLILIKDTETNCQQIFRFWSRTGKDNPKSFEKHKIELKPYEKARFEKGEELKVLGKVPPSSNQLQKNMQIENLSIYKVKTDVLGNKHFIKKEGDEPKLKF

SEQ ID NO: 21826 - protein, 1121 aa, unidentified
  REGION 1..1121: note = Cas Enzyme sequence
MNGLVLGLDIGIASVGVGILEKNSGKIIHANSRLFPAATADDNVERRKNRQARRLNRRKKHRGVRFQDLFEDYGLLTDFSKVSINLNPYRLRVDGLNQQLTNEELFIALKNIVKRRGISYLDDASEDGGTVSSDYGKAVEENRKLLAEQTPGQIQLDRFERYGQIRGDFTVLENGEKCRLINVFSTSAYKKEAERILRKQQEFNSKITDEFIEDYLKILTGKRKYYHGPGNEKSRTDYGRFRKDGTTLDNIFGILIGKCTFYPNEYRASKASYTAQEFNLLNDLNNLSVPTETKKLSEEQKKTIIEYAKSAKTLGASTLLKYIAKMIDASVDQIHGYRVDVNNKPEMHTFEVYRKMQSLETISVGELSRNVLDELAHILTLNTEREGIEEAINTKLMGVFSQDQVLELVQFRKNNSSLFSKGWHNFSLKLMMELIPELYETSEEQMTILTRLGKQKNKETSKRTKYIDEKEVTEEIYNPVVAKSVRQAIKIINEATKKYGIFDNIVIEMARENNEEDAKKDYIKRQKANQDEKNAAMEKAAFQYNGKKELPDNIFHGHKELATKIRLWHQQGEKCLYTGKNIPISDLIHNQYKYEIDHILPLSLSFDDSLSNKVLVLATANQEKGQRTPFQALDSMDDAWFYREFKSYVKDSKLLSNKKKDYLLTEEDISKIEVKQKFIERNLVDTRYSSRVVLNALQDFYKSHQFDTTISVVRGQFTSQLRRKWGLEKSRETYHHHAVDALIIAASSQLRLWKKQNNPLISYKEGQFVDSETGEIISLSDDEYKELVFKAPYDHFVDTLRSKTFEDSILFSYQVDSKYNRKISDATIYATRKAKLDKDKSEETYVLGKIKDIYSQAGYDAFIKIYNKDKSKFLMYHKDPQTFEKVIEEILRTYPSKELNDKNKEIPCNPFEKYRQENGPIRKYSKKGNGPEIKSLKYYDKNIPESFINITPSNSNNKVLLRQLYPWRTDVYFNPQTDKYELLGLKYADLQFEKATGKYSITIDKYNEIKEKEGVSKESEFKFTLYKNDLLLIKDTKNNEEQIFRFLSRTMPNQNHYVELKPYDKGNFEGKEKIKVLKMTSNGRCIKGLGKKYLSIYKVKTDILGNKHFIKKEGDEPKLFF

SEQ ID NO: 21827 - protein, 1122 aa, unidentified
  REGION 1..1122: note = Cas Enzyme sequence
MNGLVLGLDIGIASVGVGILKKDTGEIIHANSRLFPAATADNNVERRTSRQARRLNRRKKHRSVRFHDLFEDFGLLTDFSKVSINLNPYQLRVQGLDNQLTNEELFIALKNIVKRRGISYLDDASEDGGTVSSDYGKAVEENRKLLAEQTPGQIQLDRFEKYGQLRGDFTVVENGEKHRLINVFSTSAYRKEAERILRKQQEFNNKITDEFIEDYLTILTGKRKYYHGPGNEKSRTDYGRFRTDGTTLDNIFGILIGKCTFYPDEYRASKGSYTAQEFNLLNDLNNLTVPTETKKLSEEQKKIIVEYAKTAKTLGASTLLKYIAKLIGASVDQIHGYRIDPNKKPEIHTFEVYRKMQSLETIRVEELPRKVIDDLAHILTLNTEREGIEEAINAKLKDTFSQDQVLELVQFRKNNSSLFGKGWHNFSLKLMMELIPELYETSEEQMTILTRLGKQKSKETSKRTKYIDEKELTEEIYNPVVAKSVRQAIKIINEATKKYGIFDNIVIEMARENNEEDAKKEYIKRQKANIDEKNAAMEKAAFQYNGKKELPDNVFHGHKELATKIRLWHQQGEKCLYTGKNIPISDLIQNQYKYEIDHILPLSLSFDDSLSNKVLVLATANQEKGQRTPFQALDSMDDAWSYHEFKSYVKDSKLLGNKKKEYLLTEEDISKIEVKQKFIERNLVDTRYSSRVVLNALQDFYKEHQFDTTISVVRGQFTSQLRRKWGLEKSRETYHHHAVDALIIAASSQLRLWKKQNNPLSSYKEGQFVDQETGEIISLSDDEYKELVFKAPYDHFVDTLKSKKFEDSILFSYQVDSKYNRKISDATIYATRKAKLDKDKSEETYVLGKIKDIYSQAGYDAFIKIYNKDKSRFLMYHKDPQTFEKVIEEILRIYPSKEFNDKNKEVPCNPFEKYRQENGPIRKYSRKGNGPEIKSLKYYDNKLGNHIDITPDESMNQVVLQSINPWRTDVYYNNKTKKYEFLGLKYSDLYFEKGTGKYKISKNKYDVIKKLEGVDEKSEFKFTLCKNDLILIKDIETGQEQLFRFLSRNNKGKHQVQLKPIDKSDFEKGEKLIDIFDTVPNSTTQCVKGLNKPNISIYKVKTDLLGNKYFIKKEGEEPKLKF

SEQ ID NO: 21828 - protein, 1127 aa, unidentified
  REGION 1..1127: note = Cas Enzyme sequence
MNGLVLGLDIGIASVGVGILNKDTGEIIHTNSRIFPAATADNNVERRNSRQARRLNRRKKHRVVRFQDLFDDYGLLTDFSKVSINLNPYRLRVHGLNQQLTNEELFIALKNIVKRRGISYLDDASEDGGAVSSDYGKAVEENRKLLAEQTPGQIQLERFEKYGQVRGDFTVEEKGDKHRLINVFSTSAYRKEAERILRKQQEFNSKITDEFIEDCLKIFTEKRKYYHGPGNEKSRTDYGIYTTKKDSEGKYITLPNMYDIFIGKCTFYPDEYRASKASYTAQEFNLLNDLNNLTVPTETKKLSEEQKKVIVEYAKEAKTLGASTLLKYIAKMIDTSVDQIRGYRVDVNNKPEMHTFEVYRKMQSLETISVGELSRNVLDELAHILTLNTEREGIEEAINTKLMDVFSQDQVLELVQFRKNNSSLFSKGWHNFSRKLMMELIPELYETSEEQMTILTRLGKQKSKETSKRTKYIDEKEVTEEIYNPVVAKSVRQAIKIINEATKKYGIFDNIVIEMARENNEEDAKKDYIKRQKANHDEKNAAMEKAAFQYNGKKELPDSIFHGHKELATKIRLWHQQGEKCLYTGKNIPISDLIHNQYKYEIDHILPLSLSFDDNLSNKVLVLATANQEKGQRTPFQALDSMDDAWSYREFKSYVKDSKLLGNKKKDYLLTEEDISKIEVKQKFIERNLVDTRYSSRVVLNALQDFYKAHKFDTTISVVRGQFTSQLRRKWRLEKSRETYHHHAVDALIIAASSQLRLWKKQNNPLISYKEGQFVDSETGEIISLTDDEYKELVFKAPYDHFVDTLRSKKFEDSILFSYQVDSKYNRKISDATIYATRKVKLDKDKSEETYVLGKIKDIYSQAGYDAFIKIYNKDKSKFLMYHKDPQTFEKVIEEILRTYPSKEFNEKNKEVPCNPFEKYRQENGPICKYSKKGNGPEIKSLKYYDKNIPESFIDITPSNSKNKVILRQLNPWRTDVYFNHQTEKYELLGLKYADLQFEKKTETYSITIDKYNEIKEKEGVGEHSEFKFTLYKNDLLLIKDMEIKEEQIFRFLSRTMPNKKHYVELKPYYKGNFEGKERIKVFNTTSNGRCLKGLGKKGLSIYKIKTDVLGNKHFIKKEGDEPKLKF

SEQ ID NO: 21829 - protein, 1135 aa, unidentified
  REGION 1..1135: note = Cas Enzyme sequence
MNGLVLGLDIGIGSVGVGILKKDTGEIIHTNSRIFPAATADNNVERRNSRQGRRLNRRKKHRVVRFQDLFDDYGLLTDFSKVSINLNPYRLRVHGLNQQLTNEELFIALKNIVKRRGISYLDDASEDGGAVSSDDYGKAVEENRKLLTEQTPGQIQLERFEKYGQVRGDFTVEEKGDKHRLINVFSTSAYRKEAERILRKQQEFNNQITDKFIEDYLKILTEKRKYYHGPGNEKSRTDYGRFRTDGTTLDNIFGILIGKCTFYPNEYRASKASYTAQEFNLLNDLNNLTVPTETKKLSEEQKKTIVEYAKSAKTLGASTLLKYIAKMIDASVEQIRGYRVDVNNKPEMHTFEVYRKMQSLETIPVGEFSRGVLDELAHILTLNTEREGIEEAINTKLMDVFSQDQILELVQFRKNNSSLFSKGWHNFSLKLMLELIPELYETSEEQMTILTRLGKQRSKETSKRTKYIDEKELTEEIYNPVVAKSVRQAIKIINEATKKYGIFDNIVIEMARENNEEDAKKDYIKRQKANHDEKNAAMEKAAFQYNGKKELPDSIFHGHKELATKIRLWHQQGEKCLYTGKNIPISDLIHNQYKYEIDHILPLSLSFDDSLSNKVLVLATANQEKGQRTPFQALDSMDDAWSYREFKSYVKDSKLLGNKKKDYLLTEEDISKIEVKQKFIERNLVDTRYSSRVVLNALQDFYKAHKFDTTISVVRGQFTSQLRRKWRLEKSRETYHHHAVDALIIAASSQLRLWKKQNNPLISYKEGQFVDSETGEIISLTDDEYKELVFKAPYDHFVDTLRSKKFEDSILFSYQVDSKFNRKISDATIYATRKAKLDKEKKEYTYTLGKIKDIYSLGTKTPSKTGFYKFLNLYNKDKSQFLMFQKDRKTWDEVIEKIMEQYRPFKEYDKTGKLVDFNPFEKYRQENGSIRKYSKKDNGPEIKSLKYYDILLGKHKNITPEGSRNTVALLSLNPWRTDVYYNMETKKYEFLGLKYADLPFEEGGAYGISTETYNKLREKEGIGKNSEFKFTLYKNDLILIKDTETNCQQIFRFWSRTGKDNPKSFEKHKIELKPYEKARFEKGEELEVLGKVPPSSNQLQKNMQIENLSIYKVKTDILGNKHFIKKEGDEPKLKF

SEQ ID NO: 21830 - protein, 1121 aa, unidentified
  REGION 1..1121: note = Cas Enzyme sequence
MNGLVLGLDIGIASVGVGILEKNSGKIIHANSRLFPAATADNNVERRKNRQVRRLHRRKKHRGVRLKDLFEDYGFLTDFSKVSINLNPYRLRVDGLNQQLTNEELFIALKNIVKRRGISYLDDASEDGGTVSSDYGKAVEENRKLLAEQTPSQIQLERFEKYGQVRGDFTVVENGQKCRLINVFSTSAYRKEAERILRKQQEFNSKITDEFIEDCLKILTGKRKYYHGPGNEKSRTDYGRFRTDGTTLDNIFGILIGKCTFYPDEYRASKASYTAQEFNLLNDLNNLTVPTETKKLSEEQKKTIIEYAKLAKTLGASTLLKYIAKMIDASVDQIRGYRVDVNNKPEMHTFEVYRKMQSLETISVGELSRNVLDELAHILTLNTEREGIEEAINTKLKDSFSQDQVLELVQFRKNNSSLFSKGWHNFSLKLMMELIPELYETSEEQMTILTRLGKQKSKETSKRTKYIDEKELAEEIYNPVVAKSVRQAIKIINEATKKHGIFDNIVIEMARENNEEDAKKDYIKRQKANQDEKNAAMEKAAFQYNGKKELPDSIFHGHKELATKIRLWHQQGEKCLYTGKNIPISDLIHNQYKYEIDHILPLSLSFDDSLSNKVLVLATANQEKGQRTPFQALDSMDDGWSYREFKSYVKESKLLGNKKKEYLLTEEDISKIEVKQKFIERNLVDTRYSSRVVLNALQDFYKAHKFDTTISVVRGQFTSQLRRKWGLEKSRETYHHHAVDALIIAASSQLRLWKKQNNPLISYKEGQFVDSETGEIISLTDDEYKELVFKAPYDHFVDTLRSKTFEDSILFSYQVDSKFNRKISDATIYATRKAKLDKEKSEETYVLGKIKDIYSQAGYDAFIKIYNKDKSKFLMYHKDPQTFEKVIEEILRTYPSKELNDKNKEIPCNPFEKYRQENGPIRKYSKKSNGPEIKSLKYYDNKLGNHIDITPESSDNQVVLQSLKPWRTDVYFNHQTKKYELMGLKYSDLSFEKGSGKYSISNQKYNSIKRIEGIDEQSEFKFTLYKNDLILIKDSENNEQKLFRFNSRNDTAKHYIELKPYDKAKFDGEQELITILGNVAKGGRCLKGLNKSNISIFKVKTDVLGNKHFIKKEGDEPKLKF

SEQ ID NO: 21831 - protein, 1127 aa, unidentified
  REGION 1..1127: note = Cas Enzyme sequence
MSDLVLGLDIGIGSVGVGILNKVTGEIIHKNSRIFPAAQAENNVERRINRQGRRLTRRKKHRRVRLNHLFEESGLITDFTNVSINLNPYQLRVKGLTDELSNEELFIALKNMVKHRGISYLDDASDDGNSSVGDYAQIVKENSKQLETKTPGQIQLERYQKYGQLRGDFTVEEDGKKHRLINVFPTSAYRAEALRILQTQQEFNPQITDEFINSYLQILTGKRKYYHGPGNEKSRTDYGRYTTKKDSEDEYITLDNIFGILIGKCTFYPEEYRAAKASYTAQEFNLLNDLNNLTVPTETKKLSEEQKNQIITNVKNEKAMGPAKLFKYIAKLLSCDVADIKGYRIDKSDKAEIHTFEAYRKMKTLATIDIEQMERENLDKLAYVLTLNTEKEGIQEALEHEFADGTFSQEQIDELVQFRKANSSIFGKGWHSFSVKLMMELIPELYATSEEQMTILTRLGKQKTTSSSNKTKYIDEKQLTEEIYNPVAAKSVRQAIKIVNAAIKEYGDFDNIVIEMARETNEDDEKKAIQKIQKANKDEKDAAMLKAANQYNGKAELPHSVFHGHKQLATKIRLWHQQGERCLYTGKTISIHDLINNSNQFEIDHILPLSITFDDSLANKVLVYATANQEKGQRTPYQALDSMDDAWSFRELKAFVRESKALLNKKKEYLLTEEDISKFDVRKKFIERNLVDTRYASRVVLNALQEHFRSRKIDTKVSVVRGQFTSQLRRHWGIDKTRDTYHHHAVDALIIAASSQLNLWKKQKNTLVSYSEDQLLDIETGELISDDEYKESVFKAPYQHFVETLKSKEFEDSILFSYQVDSKFNRKISDATIYATRQAKVGKDKKDETYVLGKIKDIYTQAGYDAFIKIYKKDKSKFLMYRHDPQTFEKVIEPILENYPNKEMNEKGKEVPCNPFQKYKEEHGYIRKYSKKGNGPEIKSLKYYDSKLGNHIDITPKDSNNKVVLQSVSPWRADVYFNKTTGKYEILGLKYADLQFEKGTGTYKISEEKYNDIKKKEGVDADSEFKFTLYKNDLLLIKDTQTKEQQLFRFLSRSMPNKKHYVELKPYDKQKFEGNEPLINILGTVAKGGQCIKGLGKVNLSIYKIRTDVLGNQHIIKNEGDKPKLDF

SEQ ID NO: 21832 - protein, 1140 aa, unidentified
  REGION 1..1140: note = Cas Enzyme sequence
MNGLVLGLDIGIASVGVGILKKDSGEIIHTNSRLFSAATADSNIERRGHRGGKRLTRRKKHRSIRLHDLFEDFGLLTDFSKVSINLNPYQLRVQGLDNQLTNEELFIALKNIVKRRGISYLDDASEDGGTVSSDYGKAVEENRKLLAEQTPGQIQLDRFEKYGQVRGDFTVVENGEKRRLINVFTTSAYSKEAERILRKQQEFNKKITDEFIEDYLTILTGKRKYYHGPGNEKSRTDYGRYTTKKDPEGKYITLDNIFGILIGKCTFYPDEYRASKASYTAQEFNLLNDLNNLTVPTETKKLSEEQKKTIVEYAKTAKTLGASTLLKYIAKLISASVDQIHGYRIDPNKKPEMHTFETYRKMQSLETIRVEELPRKVLDELAHILTLNTEREGIEEAINATLKDTFSQDQVLELVQFRKNNSSLFSKGWHNFSLKLMMELIPELYETSEEQMTILTRLGKQKSKETSKRTKYIDEKELTEEIYNPVVAKSVRQAIKIINEATKKYGIFDNIVIEMARENNEEDAKKEYIKRQKANLDEKNAAMEKAAFQYNGKKELPDNVFHGHKELATKIRLWHQQGEKCLYTGKNIPISDLIQNQYKYEIDHILPLSLSFDDSLSNKVLVLATANQEKGQRTPFQALDSMDDAWSYREFKSYVKDSKLLGNKKKEYLLTEEDISKIEVKQKFIERNLVDTRYSSRVVLNALQDFYKEHQFDTTISVVRGQFTSQLRRKWGLEKSRETYHHHAVDALIIAASSQLRLWKKQNNPLVSYKAEQFVDQETGEIISLSDDEYKELVFKAPYDHFVDTLKSKEFEDSILFSYQVDSKYNRKISDATIYATRKAKLDKENKEYTYTLGKIKDIYALGTKSPSKTGFYKFLDLYNKDKSQFLMFQKDRKTWDEVIEKIIEQYRPFKEYDENGKEVDFNPFEKYRIENGPIRKYSKKGNGPEIKSLKYYDNLLGKFVNITPSESKNPVALLSLNPWRTDVYYNTETSKYEFLGLKYADLCFEKGGSYGISEVKYNKIREKEGIGKESEFKFTLYKNDLVLIKDTETNCQQIFRFWSRTGKDNPKSFEKHKIELKPYEKARFEKGEELEVLGKVPPSSNQLQKNMQIENLSIYKVKTDVLGNKHFIKKEGEEPKLKF

SEQ ID NO: 21833 - protein, 1140 aa, unidentified
  REGION 1..1140: note = Cas Enzyme sequence
MNGLVLGLDIGIASVGVGILKKDIGEIIHTNSRLFSAATADSNIERRGHRGGKRLTRRKKHRSIRLHDLFEDFGLLTDFSKVSINLNPYQLRVQGLDNQLTNEELFIALKNIVKRRGISYLDDASEDGGTVSSDYGKAVEENRKLLAEQTPGQIQLDRFEKYGQVRGDFTVVENGEKRRLINVFTTSAYSKEAERILRKQQEFNKKITDEFIEDYLTILTGKRKYYHGPGNEKSRTDYGRYTTKKDPEGKYITLDNIFGILIGKCTFYPDEYRASKASYTAQEFNLLNDLNNLTVPTETKKLSEEQKKTIIKYAKTAKTLGASTLLKYIAKLIGASVDQIHGYRIDPNKKPEMHTFETYRKMQSLETISVEELPRKVLDELAHILTLNTEREGIEEAINATLKDTFSQDQVLELVQFRKNNSSLFSKGWHSFSLKLMMELIPELYETSEEQMTILTRLGKQKSKETSKRTKYIDEKELTEEIYNPVVAKSVRQAIKIINEATKKYGIFDNIVIEMARENNEEDAKKEYIKRQKANLDEKNAAMEKAAFQYNGKKELPDNVFHGHKELATKIRLWHQQGEKCLYTGKNIPISDLIQNQYKYEIDHILPLSLSFDDSLSNKVLVLATANQEKGQRTPFQALDSMDDAWSYREFKSYVKDSKLLGNKKKEYLLTEEDISKIEVKQKFIERNLVDTRYSSRVVLNALQDFYKEHQFDTTISVVRGQFTSQLRRKWGLEKSRETYHHHAVDALIIAASSQLRLWKKQNNPLISYTEGQFVDKVTGEIISLSDDEYKELVFKAPYDHFVDTLKSKKFEDSILFSYQVDSKFNRKISDATIYATRKAKLDKENKEYTYTLGKIKDIYALGTKSPSKTGFYKFLDLYNKDKSQFLMFQKDRKTWDEVIEKIIEQYRPFKEYDENGKEVDFNPFEKYRIENGPIRKYSKKGNGPEIKSLKYYDNLLGKFVDITPSESKNPVALLSLNPWRTDVYYNTETSKYEFLGLKYADLCFEKGGAYGISEVKYNKIREKEGIGKESEFKFTLYKNDLILIKDTETNCQQIFRFWSRTGKDNPKSFEKHKIELKPYEKARFEKGEELEVLGKVPPSSNQLQKNMQIENLSIYKVKTDVLGNKHFIKKEGEEPKLKF

SEQ ID NO: 21834 - protein, 1134 aa, unidentified
  REGION 1..1134: note = Cas Enzyme sequence
MNGLVLGLDIGIASVGVGILEKNSGKIIHANSRLFPAATADNNVERRKNRQARRLHRRKKHRGVRLKDLFEDYGFLTDFSKVSINLNPYRLRVDGLNQQLTNEELFIALKNIVKRRGISYLDDASEDGGTVSSDYGKAVEENRKLLAEQTPGQIQLERFEKYGQVRGDFTVVENAQKRRLINVFSTSAYRKEAERILRKRQEFNSKITDEFIEDCLKILTGKRKYYHGPGNEKSRTDYGRFRTDGTTLDNIFGILIGKCTFYPDEYRASKASYTAQEFNLLNDLNNLTVPAETKKLSEEQKKTIVEYAKSAKTLGASTLLKYIAKIIDASVDQIRGYRVDVNNKPEMHTFEVYRKMQSLETISVGELSRNVLDELAHILTLNTEREGIEEAINTKLKDSFSQDQVLELVQFRKNNSSLFSKGWHNFSLKLMMELIPELYETSEEQMTILTRLGKQKSKETSKRTKYIDEKEVTEEIYNPVVAKSVRQAIKIINEATKKHGIFDNIVIEMARENNEEDAKKDYIKRQKANQDEKNAAMEKAAFQYNGKKELPDSIFHGHKELATKIRLWHQQGEKCLYTGKNIPISDLIHNQYKYEIDHILPLSLSFDDSLSNKVLVLATANQEKGQRTPFQALDSMDDAWSYREFKSYVKESKLLGNKKKEYLLTEEDISKIEVKQKFIERNLVDTRYSSRVVLNALQDFYKAHKFDTTISVVRGQFTSQLRRKWRLEKSRETYHHHAVDALIIAASSQLRLWKKQNNPLISYKEGQFVDSETGEIISLSDDEYKELVFKAPYDHFVDTLSSKKFEDSILFSYQVDSKFNRKISDATIYATRKAKLDKEKKEYTYTLGKIKDIYSLGTKAPSKTGFYKFLDLYNKDKSQFLMFQKDRKTWDEVIEKIMEQYRPFKEYDKTGKLVDFNPFEKYRQENGPIRKYSKKGNGPEIKSLKYYDILLGKHKNITPEGSRNTVALLSLNPWRTDVYYNMETKKYEFLGLKYADLPFEEGGAYGISTETYNELREKEGIGKNSEFKFTLYKNDLILIKDTETNCQQIFRFWSRTGKDNPKSFEKHKIELKPYEKARFEKGEELKVLGKVPPSSNQLQKNMQIENLSIYKVKTDVLGNKHFIKKEGDEPKLKF

SEQ ID NO: 21835 - protein, 1123 aa, unidentified
  REGION 1..1123: note = Cas Enzyme sequence
MNGLVLGLDIGIGSVGVGILNKDTGEIIHTNSRIFPATTADNNVERRNSRQARRLNRRKKHRGARLHDLFEDYDLLTDFSKVSINLNPYRLRVQGLDNPLTTEELFIALKNIVKRRGISYLDDASENGGAVSSDYGKAVEENRKLLAEQTPGQIQLERFEKYGQVRGDFTVEEKGDKHRLINVFSTSAYRKEAERILRKQQEFNNQITDKFIEDYLKILTEKRKYYHGPGNEKSRTDYGRFRTDGTTLDNIFGILIGKCTFYPNEYRASKASYTAQEFNLLNDLNNLTVPTETKKLSEEQKKTIVEYAKSAKTLGASTLLKYIAKMIDASVDQIRGYRVDVNNKPEMHTFEVYRKMQSLETIPVGEFSREVLDELAHILTLNTEREGIEEAINTKLMDVFSQDQILELVQFRKNNSSLFSKGWHNFSLKLMMELIPELYETSEEQMAILTRLGKQKFKETSKRTKYIDEKEVTEEIYNPVVAKSVRQAIKIINEATKKYGIFDNIVIEMARENNEEDAKKDYIKRQKANHDEKNAAMEKAAFQYNGKKELPDSIFHGHKELATKIRLWHQQGEKCLYTGKNIPISDLIHNQYKYEIDHILPLSLSFDDSLSNKVLVLATANQEKGQRTPFQALDSMDDAWSYREFKSYVKDSKLLGNKKKDYLLTEEDISKIEVKQKFIERNLVDTRYSSRVVLNTLQDFYKAHKFDTTISVVRGQFTSQLRRKWGLEKSRETYHHHAVDALIIAASSQLRLWKKQANPLISYKEDQFVDSETGEIISLTDDKYKELVFKAPYAHFVDTLSSKKFEDSILFSYQVDSKYNRKISDATIYATRKVKLDKDKSEETYVLGKIKDIYSQAGYDAFIKIYNKDKSKFLMYHKDPQTFEKVIEEILRTYPSKEFNEKNKEVPCNPFEKYRQENGPIRKYSKKGNGPEIKSLKYYDKNIPESFINITPSNSKNKVILRQLNPWRTDVYFNHQTEKYELLGLKYADLQFEKKTGTYSITIDKYNEIKEKEGVGEQSEFKFTLYKNDLLLIKDTKNNEKQIFRFLSRTMPNVKHYVELKPYDKAKFDGNQPLITIFGNVAKGGQCLKGLNKSNISIFKVKTDVLGNKHFITKEGEKPKLKF

SEQ ID NO: 21836 - protein, 1127 aa, unidentified
  REGION 1..1127: note = Cas Enzyme sequence
MNGLVLGLDIGIASVGVGILKKDTGEIIHANSRLFPAATADNNVERRGFRGGRRLTRRKKHRSVRLHDLFEEYGLLTDFSKVSINLNPYRLRVQGLDNQLTNEKLFIALKNIVKRRGISYLDDASEDGSTVSSDYGKAVEENRKLLSEQTPGQIQLDRFEKYGQLRGDFTVLENSEKRRLINVFSTYAYRKEAERILRKQQEFNNKITDEFIEDYLTILTGKRKYYHGPGNEKSRTDYGRYTTKKDSEGKYITLDNIFGVLIGKCTFYPDEYRASKASYTAQEFNLLNDLNNLTVPTETKKLSEEQKKTIIEYAKTAKTLGASTLLKYIAKLIGASVDQIHGYRIDPNKKPEMHTFEVYRKMQSLETIKVEELPRKVIDELAHILTLNTEREGIEEAINAKLKDTFSQDQVLELVQFRKNNSSLFSKGWHIFSLKLMMELIPELYETSEEQMTIITRLGKQKSKEISKRTKYIDEKELTEEIYNPVVAKSVRQAIKIINESTKKYGIFDNIVIEMARENNEEDAKKEYIKHQKANLDEKNAAMEKAAFQYNGKKELPDNVFHGHKELATKIRLWHQQGEKCLYTGKNIPISGLIQNQYKYEIDHILPLSISFDDSLSNKVLVLATANQEKGQRTPFQALDSMDDAWSYREFKSYVKDSKLISNKKKEYLLTEEDISKIEVKQKFIERNLVDTRYSSRVVLNALQDFYKNHNFDTTISVVRGQFTSQLRRKWGLEKSRETYHHHAVDALIIAASSQLRLWKKQNNPLISYKEEQFVDQKTGEIISLSDDEYKELVFKAPYNHFVDTLKSKKFEDNILFSYQVDSKYNRKISDATIYATRKAKLDKDKSEETYVLGKIKDIYSQAGYDAFIKIYNKDKSRFLMYHKDPQTFEKVIEEIIRTYPSKELNEKNKEVPCNPFEKYRQENGPIRKYSRKGNGPEIKSLKYYDNKLGNHIDITPNESMNQVVLQSLKPWRTDVFFNHQTEKYELMGLKYSDLNFEKGSGKYSISLEKYNSIKMNEGVSEESEFKFTLYKNDLILIKDALTKEAQIFRYGSRNDTSKHYVELKPYDMSKFEGDEKLIKVLGTVAKGGRCIKGLNKKDISIYKVKTDVLGNKHFIKKEGEEPKLKF

SEQ ID NO: 21837 - protein, 1123 aa, unidentified
  REGION 1..1123: note = Cas Enzyme sequence
MNGLVLGLDIGIASVGVGILEKNSGKIIHANSRLFPAATADNNVERRKNRQARRLHRRKKHRGVRLKDLFEDYGFLTDFSKVSINLNPYRLRVDGLNQQLTNEELFIALKNIVKRRGISYLDDATEDGGAVSSDYGKAVEENRKLLAEQTPGQIQLERFEKYGQVRGDFTVVENGEKRRLINVFSTSAYRKEAERILRKQQEFNNQITDEFIENYLKILTEKRKYYHGPGNEKSRTDYGRFRTDGTTLDNIFGILIGKCTFYPNEYRASKASYTAQEFNLLNDLNNLTVPTETKKLSEEQKKTIVEYVKSAKTLGASTLLKYIAKMLDASVDQIRGYRVDVNNKPEMHTFEVYRKMQSLETISVGELSREVLDELAHILTLNTEREGIEEAINTKLKDSFSQDQVLELVQFRKNNSSLFSKGWHNFSLKLMIELIPELYETSEEQMTILTRLGKQKSKETSKRSKYIDEKELTEEIYNPVVAKSVRQAIKIINEATKKYGIFDNIVIEMARENNEEDAKKDYIKRQKANQDEKNTAMEKAAFQYNGKKELPDSIFQGHKELATKIRLWHQQGEKCLYTGKNIPISDLIHNQYKYEIDHILPLSLSFDDSLSNKVLVLATANQEKGQRTPFQALDSMDDGWSYREFKSYVKESKLLGNKKKEYLLTEEDISKIEVKQKFIERNLVDTRYSSRVVLNALQDFYKAHKFDTTISVVRGQFTSQLRRKWGLEKTRDTYHHHAVDALIIAASSQLSLWKKQANPLISYKEDQIVDSETGEIISLTDDKYKELVFKAPYAHFVDTLSSKKFEDSILFSYQVDSKYNRKISDATIYATRKAKLDKDKSEETYVLGKIKDIYSQTGYDAFIKIYNKDKSKFLMYHKDPQTFEKVIEEILRTYPSKEFNEKNKEIPCNPFEKYKQENGPIRKYSKKGNGPEIKSLKYYDKNIPESFINITPSNSKNKVILRQLNPWRTDFYFNHQTEKYELLGLKYADLQFEKKTGTYSITIDKYNEIKEKEGVGEQSEFKFTLYKNDLLLIKDTKNNEEQIFRFLSRTMPNVKHYVELKPYDKAKFDGNQPLITIFGNVARGGQCLKGLNKSNISIFKVETDVLGNKHFIKKEGDEPKLKF

SEQ ID NO: 21838 - protein, 1122 aa, unidentified
  REGION 1..1122: note = Cas Enzyme sequence
MMNGLVLGLDIGIGSVGVGILNKDTGEIIHANSRIFPAATADNNVVRRSSRQGRRLNHRKKHRSVRLKDLFEYYDLLTDFSKVSINLNPYRLRVDGLNQQLTNEELFIALKNIVKRRGISYLDDASEDGGAVSSDYGKAVEENRKLLAEQTPGQIQLERFEKYGQVRGDFTVVENGEKRRLINVFSTSAYKKEAERILRKQQEYNNQIMDEFIADYLTILTGKRKYYHGPGNEKSRTDYGRFRTDGTTLDNIFGILIGKCTFYPEEYRASKASYTAQEFNLLNDLNNLTVPTETKKLSEEQKKTIVEYAKSAKTLGASTLLKYIAKMIDASVDQIRGYRVDVNNKPEMHTFEVYRKMQLLETIPVGEFSREVLDELAHILTLNTEREGIEEAINTKLMDVFSQDQILELVQFRKNNSSLFSKGWHNFSLKLMIELIPELYETSEEQMAILTRLGKQKFKETSKRTKYIDEQEVTEEIYNPVVAKSVRQAIKIINEATKKYGIFDNIVIEMARENNEEEAKKDYIKRQKANHDEKNAAMEKAAFQYNGEKELPDSIFHGHKELATKVRLWHQQGEKCLYTGKNIPISDLIHNQYKYEIDHILPLSLSFDDSLSNKVLVLATANQEKGQRTPFQALDSMDDAWSYREFKSYVKDSKSLGNKKKDYLLTEEDISKIEVKQKFIERNLVDTRYSSRVVLNTLQDFYKAHKFDTTISVVRGQFTSQLRRKWGLEKSRETYHHHAVDALIIAASSQLRLWKKQNNPLISYKEGQFVDSETGEIISLTDDEYKELVFKAPYDHFVDTLRSKKFEDSILFSYQVDSKFNRKISDATIYATRKAKLDKDKSEETYVLGKIKDIYSQSGYDAFIKIYNKDKSKFLMYHKDPQTFEKVIEEILRTYPSKEFNEKNKEVSCNPFEKYKQENGPIRKYSKKGNGPEIKSLKYYDKNIPESFINITPSNSKNKVILRQLNPWRTDVYFNHQTEKYELLGLKYADLQFEKKTGTYSITIDKYNEIKEKEGVSEHSEFKFTLYKNDLLLIKDTEIKEEQIFRFLSRTMPNQKHYVELKPYYKGNFEGKERIKVFNTTSNGRCLKGLRKKGLSIYKIKTDVLGNKHFIKKEGEKPKLKF

SEQ ID NO: 21839 - protein, 1127 aa, unidentified
  REGION 1..1127: note = Cas Enzyme sequence
MVRSFIMNGLVLGLDIGIASVGVGILKKETGEIVHSNSRLFPAATADNNVERRGFRGGRRLTRRKKHRSVRLHDLFEDFGLLTDFSKVSINLNPYQFRVQGLDNQLTNEELFIALKNIVKRRGISYLDDASEDGGTVSSDYGKAVEENRKLLAEQTPGQIQLNRFEKYGQVRGDFTVMENGEKRRLINVFSTSAYRIEAERILRKQQEFNKKITDGFIEDYLTILTGKRKYYHGPGNEKSRTDYGRFRADGTTLDNIFGVLIGKCTFYPDEYRASKASYTAQEFNLLNDLNNLTVPTETKKLSEEQKKIIVEYAKTAKTLGASTLLKYIAKLIGASVDQIHGYRIDSNKKPEMHTFETYRKMQSLETIRVEELHRKVLDELAHILTLNTEREGIEEAINANLKDTFSQDQVLELVQFRKNNSSLFSKGWHNFSLKLMMELIPELYETSEEQMTILTRLGKQKSKETSKRTKYIDEKELTEEIYNPVVAKSVRQAIKIINEATKKYGIFDNIVIEMARENNEEDAKKEYIKRQKANIDEKNAAMEKAAFQYNGKKELPDDVFHGHKELATKIRLWHQQGEKCLYTGKNIPIADLIQNQYKYEIDHILPLSLSFDDSLSNKVLVLATSNQEKGQRTPFQALDSMDDAWSYREFKTYVKDLKLLNNKKKDYLLTEEDISKIEVKQKFIERNLVDTRYSSRVVLNALQDFYKEHQFDTTISVVRGQFTSQLRRKWGLEKSRDTYHHHAVDALIIAASSQLRLWKKLNNSLISYKEEQFVDLETGEIIALSDDEYKELVFKAPYDHFVDTLKSKKFEDTILFSYQVDSKYNRKISDATIYATRKAKLDNDKSEETYVLGKIKDIYSQSGYDAFIKIYNKDKSRFLMYHKDPQTFEKVIEEILRTYPSKELNDKNKEVPCNPFEKYRQENGPIRKYSRKGNGPEIKSLKYYDKNIPESFINITPSNSKNKVILRQLNPWRTDVYFNHQTEKYELLGLKYADLQFEKKTGNYSITIDKYNEIKEKEGVSKQSEFKFTLYKNDLLLIRDTKNNEEQIFRFLSRTMPNQKNYVELKPYDKGNFEGKERIRVFDTTSNGRCIKGLNKKDISIYKVKTDVLGNKHFIKKEGEEPKLKF

SEQ ID NO: 21840 - protein, 1127 aa, unidentified
  REGION 1..1127: note = Cas Enzyme sequence
MNGLVLGLDIGIASVGVGILKKDTGEIIHANSRLFPAATADNNVERRGFRGGRRLTRRKKHRSVRLHDLFEEYGLLTDFSKVSINLNPYRLRVQGLDNQLTNEKLFIALKNIVKRRGISYLDDASEDGSTVSSDYGKAVEENRKLLSEQTPGQIQLDRFEKYGQLRGDFTVLENSEKRRLINVFSTYAYRKEAERILRKQQEFNNKITDEFIEDYLTILTGKRKYYHGPGNEKSRTDYGRYTTKKDSEGKYITLDNIFGVLIGKCTFYPDEYRASKASYTAQEFNLLNDLNNLTVPTETKKLSEEQKKTIIEYAKTAKTLGASTLLKYIAKLIGASVDQIHGYRIDPNKKPEMHTFEVYRKMQSLETIKVEELPRKVIDELAHILTLNTEREGIEEAINAKLKDTFSQDQVLELVQFRKNNSSLFSKGWHNFSLKLMMELIPELYETSEEQMTIITRLGKQKSKEISKRTKYIDEKELTEEIYNPVVAKSVRQAIKIINESTKKYGIFDNIVIEMARENNEEDAKKEYIKHQKANLDEKNAAMEKAAFQYNGKKELPDNVFHGHKELATKIRLWHQQGEKCLYTGKNIPISGLIQNQYKYEIDHILPLSISFDDSLSNKVLVLATANQEKGQRTPFQALDSMDDAWSYREFKSYVKDSKLISNKKKEYLLTEEDISKVEVKQKFIERNLVDTRYSSRVVLNALQDFYKNHNFDTTISVVRGQFTSQLRRKWGLEKSRETYHHHAVDALIIAASSQLRLWKKQNNPLISYKEEQFVDQKTGEIISLSDDEYKELVFKAPYNHFVDTLKSKKFEDNILFSYQVDSKYNRKISDATIYATRKAKLDKDKSEETYVLGKIKDIYSQAGYDAFIKIYNKDKSRFLMYHKDPQTFEKVIEEIIRTYPSKELNEKNKEVPCNPFEKYRQENGPIRKYSRKGNGPEIKSLKYYDNKLGNHIDITPNESMNQVVLQSLKPWRTDVFFNHQTEKYELMGLKYSDLNFEKGSGKYSISLEKYNSIKMNEGVSEESEFKFTLYKNDLILIKDALTKEAQIFRYGSRNDTSKHYVELKPYDMSKFEGDEKLIKVLGTVAKGGRCIKGLNKKDISIYKVKTDVLGNKHFIKKEGEEPKLKF

SEQ ID NO: 21841 - protein, 1134 aa, unidentified
  REGION 1..1134: note = Cas Enzyme sequence
MNGLVLGLDIGIASVGVGILEKNSGKIIHANSRLFPAATADNNVERRKNRQARRLNRRKKHRGVRFQDLFEDYGLLTDFSKVSINFNPYRLRVDGLNQQLTNEELFIALKNIVKRRGISYLDDASEDGGAVSSDYGKAVEENRKLLAEQTPGQIQLERFEKYGQVRGDFTVVENGEKLRLINVFSTSAYKKEAERILRKQQEFNNQITDEFIEDYLKILTGKRKYYHGPGNEKSRTDYGRFRTDGTTLDNIFGILIGKCTFYPEEYRASKASYTAQEFNLLNDLNNLTVPTETKKLSEEQKKVIVEYAKEAKTLGASTLLKYIAKMIDASVDQIRGYRVDVNNKPEMHTFEVYRKMQSLETISVGELSRNVLDELAHILTLNTEREGMEEAINTKLKDSFSQDQVLELVQFRKNNSSLFSKGWHNFSLKLMMELIPELYETSEEQMTILTRLGKQKSKETSKRTKYIDEKELTEEIYNPVVAKSVRQAIKIINEATKKHGIFDNIVIEMARENNEEDAKKDYIKRQKANQDEKNAAMEKAAFQYNGKKELPDNIFHGHKELATKIRLWHQQGEKCLYTGKTIPISDLIHNQYKYEIDHILPLSLSFDDSLSNKVLVLATANQEKGQRTPFQALDSMDDAWSYREFKSYVKESKLLGNKKKEYLLTEEDISKIEVKQKFIERNLIDTRYSSRVVLNALQDFYKAHKFDTTISVVRGQFTSQLRRKWGLEKSRETYHHHAVDALIIAASSQLRLWKKQNNSLISYKEGQFVDSETGEIISLTDDEYKELVFKAPYDHFVDTLRSKKFEDSILFSYQVDSKFNRKISDATIYATRKAKLDKEKKEYTYTLGKIKDIYSLGTKAPSKTGFYKFLDLYNKDKSQFLMFQKDRKTWDEVIEKIMEQYRPFKEYDKTGKLVDFNPFEKYRQENGPIRKYSKKGNGPEIKSLKYYDILLGKHKNITPEGSRNTVALLSLNPWRTDVYYNMETKKYEFLGLKYADLPFEEGGAYGISTETYNELREKEGIGKNSEFKFTLYKNDLILIKDTETNCQQIFRFWSRTGKDNPKSFEKHKIELKPYEKARFEKGEELKVLGKVPPSSNQLQKNMQIENLSIYKVKTDVLGNKHFIKKEGDEPKLKF

SEQ ID NO: 21842 - protein, 1134 aa, unidentified
  REGION 1..1134: note = Cas Enzyme sequence
MNGLVLGLDIGIASVGVGILNKDTGEIIHTNSRIFPAATADNNVERRNSRQARRLNRRKKHRVVRFQDLFDDYGLLTDFSKVSINLNPYRLRVHGLNQQLTNEELFIALKNIVKRRGISYLDDASEDGGAVSSDYGKAVEENRKLLAEQTPGQIQLERFEKYGQVRGDFTVEEKGDKHRLINVFSTSAYRKEAERILRKQQEFNNQITDKFIEDYLKILTEKRKYYHGPGNEKSRTDYGRFRTDGTTLDNIFGILIGKCTFYPNEYRASKASYTAQEFNLLNDLNNLTVPTETKKLSEEQKKTIVEYAKSAKTLGASTLLKYIAKMIDASVDQIRGYRVDVNNKPEMHTFEVYRKMQSLETIPVGEFSREVLDELAHILTLNTEREGIEEAINTKLMDVFSQDQILELVQFRKNNSSLFSKGWHNFSLKLMMELIPELYETSEEQMAILTRLGKQKFKGTSKRTKYIDEKEVTEEIYNPVVAKSVRQAIKIINEATKKYGIFDDIVIEMARENNEEDAKKDYIKRQKANHDEKKAAMEKAAFQYNGKKELPDSIFHGHKELATKIRLWHQQGEKCLYTGKNIPISDLIHNQYKYEIDHILPLSLSFDDSLSNKVLVLATANQEKGQRTPFQALDSMDDAWSYREFKSYVKDSKLLGNKKKDYLLTEEDISKIEVKQKFIERNLVDTRYSSRVVLNALQDFYKAHKFDTTISVVRGQFTSQLRRKWRLEKSRETYHHHAVDALIIAASSQLRLWKKQNNPLISYKEGQFVDSETGEIISLTDYEYKELVFKAPYDHFVDTLRSKKFEDSILFSYQVDSKFNRKISDATIYATRKAKLDKEKKEYTYTLGKIKDIYSLGTKTPSKTGFYKFLDLYNKDKSQFLMFQKDRKTWDEVIEKIMEQYRPFKEYDKTGKLVDFNPFEKYRQENGPIRKYSKKGNGPEIKSLKYYDILLGKHKNITPEGSRNTVALLSLNPWRTDVYYNMETKKYEFLGLKYADLSFEEGGAYGISTETYNKLREKEGIGKNSEFKFTLYKNDLILIKDTETNCQQIFRFWSRTGKDNPKSFEKHKIELKPYEKARFEKGEELEVLGKVPPSSNQLQKNMQIENLSIYKVKTDILGNKHFIKKEGDEPKLKF

SEQ ID NO: 21843 - protein, 1127 aa, unidentified
  REGION 1..1127: note = Cas Enzyme sequence
MNGLVLGLDIGIASVGVGILEKNSGKIIHANSRLFPAATADNNVERRKNRQARRLNRRKKHRGVRFQDLFEDYGLLTDFSKVSINFNPYRLRVDGLNQQLTNEELFIALKNIVKRRGISYLDDASEDGGTVSSDYGKAVEENRKLLAEKTPGQIQLERFEKYGQVRGDFTIVENGEKLRSINVFSTSAYKKEAERILRKQQDFNNQITDEFIEDYLKILTGKRKYYHGPGNEKSRTDYGRYTTHKDSKGEYVTLDNIFGVLIGKCTFYPEEYRASKASYTAQEFNLLNDLNNLTVPTETKKLSEEQKKVIVEYAKEAKTLGASTLLKYIAKMIDASVDQIRGYRVDVNNKPEMHTFEVYRKMQSLETISVEELSRNVLDELAHILTLNTEREGIEEAINTKLKDSFSQDQVLELVQFRKNNSSLFSKGWHNFSLKLMMELIPELYETSEEQMTILTRLGKQKSKETSKRTKYIDEKELTEEIYNPVVAKSVRQAIKIINEATKKHGIFDNIVIEMARENNEEDAKKDYIKRQKANQDEKNAAMEKAAFQYNGKKELPGNIFNGHKELATKIRLWHQQGEKCLYTGKTIPISDLIHNQYKYEIDHILPLSLSFDDSLSNKVLVHATANQEKGQRTPFQALDSMDDAWSYREFKSYVKDLKSLSNKKKDYLLTEEDISKIEVKQKFIERNLVDTRYSSRVVLNALQDFYKSHQFDTTISVVRGQFTSQLRRKWGLEKSRETYHHHAVDALIIAASSQLRLWKKQNNPLITYKEGQFVDSQTGEIISLTDDEYKELVFKAPYDHFVDTLRSKTFEDSILFSYQVDSKYNRKISDATIYATRKAKLDKDKSEETYVLGKIKDIYSQAGYDAFIKIYNKDKSKFLMYHKDPQTFEKVIEEILRTYPSKELNDKNKEIPCNPFEKYRQENGPIRKYSKKGNGPEIKCLKYYDNKLGNYIDITPDGSDNQVVLQSLKPWRTDVYFNHQTKKYELMGLKYSDLSFEKGSGKYSISNEKYNSIKIIEGIDEQSEFKFTLYKNDLILIKDSENNEQKLFRFNSRNDTAKHYIELKPYDKAKFDGEQELITILGNVAKGGRCLKGLNKSNISIFKVKTDVLGKKHIIKKEGDEPKLKF

SEQ ID NO: 21844 - protein, 1128 aa, unidentified
  REGION 1..1128: note = Cas Enzyme sequence
MNGLVLGLDIGIASVGVGILKKDTGEIIHANSRLFPAATADSNIERRGFRGGRRLTRRKKHRSIRLHDLFEDYGLLTDFSKVSINLNSYQIRVQGLDKRLTNEELFIALKNIIKRRGISYLDDASEDGGTVSSDYGKAVEENRKLLAEQTPGQIQLDRFEKYGQVRGDFTVVENGEKRRLINVFSTSAYRKEAERILRKQQEFNNKITEGFIEDYLTILTGKRKYYHGPGNEKSRTDYGRYTTKKDSQGEYITLDNIFGILIGKCTFYPDEYRASKASYTAQEFNLLNDLNNLTVPTETKKLSEEQKKTIIEYAKTTKTLGAATLLKYIAKMIGASVDQIHGYRIDPNKKPEMHTFEAYRKMQSLETIRVEELPRKVIDELAHILTLNTEREGIEEAINAKLKDIFSQDQVLELVQFRKNNSSLFSKGWHNFSLKLMLELIPELYETSEEQMTILTRLGKQKSKETSKRTKYIDEKELTEEIYNPVVAKSVRQAIKIINEATKRYGIFDNIVIEMARENNEDDAKKEYIKRQKANLDEKNAAMEKAAFQYNGEKELPDNVFHGHKELATKIRLWHQQGEKCLYTGKNIPISDLIQNQYKYEIDHILPLSLSFDDSLSNKVLVLATANQEKGQRTPFQALDSMDDAWSYHEFKSYVKDSKLLSNKKKEYLLTEEDISKIEVKQKFIERNLVDTRYSSRVVLNALQDFYKEHQFDTTISVVRGQFTSQLRRKWGLEKSRETYHHHAVDALIIAASSQLRLWKKQNNPLISYKEKQFVDQETGEIISLSDDEYKELVFKAPYDHFVDTLKSKKFEDNILFSYQVDSKYNRKISDATIYATRKAKLDKDKSKETYVLGKIKDIYSQAGYDAFIKIYNKDKSRFLMYHKDPQTFEKVIEEILRTYPSKELNEKNKEVPCNPFEKYRQENGPIRKYSRKGNGPEIKSLKYYDNKLGNHIDITPDKSNNKVVLQSINPWRTDVYYNNKSKKYEFLGLKYSDLYFEKGTGKYKISKNKYDVIKKLEGVDEKSEFKFTLCKNDLILIKDVDTGQEQLFRFLSRNNKGKHQVQLKPIDKSDFEKGEKLIDIFDTVPNSTTQCVKGLNKPNISIYKVKTDILGNKHFIKKEGEEPKLKF

SEQ ID NO: 21845 - protein, 1127 aa, unidentified
  REGION 1..1127: note = Cas Enzyme sequence
MSDLVLGLDIGIGSVGVGILNKVTGEIIHKNSRIFPAAQAENNVERRINRQGRRLTRRKKHRRVRLNHLFEESGLITDFTNVSINLNPYQLRVKGLTDELSNEELFIALKNMVKHRGISYLDDASDDGNSSVGDYAQIVKENSKQLETKTPGQIQLERYQKYGQLRGDFTVEEDGKKHRLINVFPTSAYRAEALRILQTQQEFNPQITDEFINSYLQILTGKRKYYHGPGNEKSRTDYGRYTTKKDSEDEYITLDNIFGILIGKCTFYPEEYRAAKASYTAQEFNLLNDLNNLTVPTETKKLSEEQKNQIITNVKNEKAMGPAKLFKYIAKLLSCDVADIKGYRIDKSDKAEIHTFEAYRKMKTLATIDIEQMERENLDKLAYVLTLNTEKEGIQEALEHEFADGTFSQEQIDELVQFRKANSSIFGKGWHSFSVKLMMELIPELYATSEEQMTILTRLGKQKTTSSSNKTKYIDEKQLTEEIYNPVAAKSVRQAIKIVNAAIKEYGDFDNIVIEMARETNEDDEKKAIQKIQKANKDEKDAAMLKAANQYNGKAELPHSVFHGHKQLATKIRLWHQQGERCLYTGKTISIHDLINNPNQFEIDHILPLSITFDDSLANKVLVYATANQEKGQRTPYQALDSMDDAWSFRELKAFVRESKALLNKKKEYLLTEEDISKFDVRKKFIERNLVDTRYASRVVLNALQEHFRSRKIDTKVSVVRGQFTSQLRRHWGIDKTRDTYHHHAVDALIIAASSQLNLWKKQKNTLVSYSEDQLLDIETGELISDDEYKESVFKAPYQHFVETLKSKEFEDSILFSYQVDSKFNRKISDATIYATRQAKVGKDKKDETYVLGKIKDIYTQAGYDAFIKIYKKDKSKFLMYRHDPQTFEKVIEPILENYPNKEMNEKGKEVPCNPFQKYKEEHGYIRKYSKKGNGPEIKSLKYYDSKLGNHIDITPKDSNNKVVLQSVSPWRADVYFNKTTGKYEILGLKYADLQFEKGTGTYKISEEKYNDIKKKEGVDADSEFKFTLYKNDLLLIKDTQTKEQQLFRFLSRSMPNKKHYVELKPYDKQKFEGNEPLINILGTVAKGGQCIKGLGKVNLSIYKIRTDVLGNQHIIKNEGDKPKLDF

SEQ ID NO: 21846 - protein, 1127 aa, unidentified
  REGION 1..1127: note = Cas Enzyme sequence
MNGLVLGLDIGIASVGVGILEKNSGKIIHANSRLFPAATADNNVERRKNRQARRLNRRKKHRGVRFQDLFEDYGLLTDFSKVSINLNPYRLRVDGLNQQLTNEELFIALKNIVKRRGISYLDDASEDGGTVSSDYGKAVEENRKLLAEKTPGQIQLERFEKYGQVRGDFTVVENGEKLRSINVFSTSAYKKEAERILRKQQDFNNQITDEFIEDYLKILTGKRKYYHGPGNEKSRTDYGRYTTHKDSKGEYVTLDNIFGVLIGKCTFYPEEYRASKASYTAQEFNLLNDLNNLTVPTETKKLSEEQKKVIVEYAKEAKTLGASTLLKYIAKMIDASVDQIRGYRVDVNNKPEMHTFEVYRKMQSLETISVGELSRNVLDELAHILTLNTEREGIEEAINTKLKDSFSQDQVLELVQFRKNNSSLFSKGWHNFSLKLMMELIPELYETSEEQMTILTRLGKQKSKETSKRTKYIDEKELTEEIYNPVVAKSVRQAIKIINEATKKHGIFDNIVIEMARENNEEDAKKDYIKRQKANQDEKYAAMEKAAFQYNGKKELPDSIFHGHKELATKIRLWHQQGEKCLYTGKNIPISDLIHNQYMYEIDHILPLSLSFDDSLSNKVLVLATANQEKGQRTPFQALDSMDDAWSYREFKSYVKESKLLGNKKKEYLLTEEDISKIEVKQKFIERNLVDTRYSSRVVLNALQDFYKAHKFDTTISVVRGQFTSQLRRKWRLEKSRETYHHHAVDALIIAASSQLRLWKKQNNPLIAYKEGQFVDSETGEIISLSDDEYKELVFKAPYDHFVDTLRSKTFEDSILFSYQVDSKFNRKISDATIYATRKAKLDKEKSEETYVLGKIKDIYSQAGYDAFIKIYNKDKSKFLMYHKDPQTFEKVIEEILRTYPSKELNDKNKEIPCNPFEKYRQENGPIRKYSKKSNGPEIKSLKYYDNKLGNHIDITPESSDNQVVLQSLKPWRTDVYFNHQTKKYELMGLKYSDLSFEKGSGKYSISNQKYNSIKRIEGIDEQSEFKFTLYKNDLILIKDSENNEQKLFRFNSRNDTAKHYIELKPYDKAKFDGEQELITILGNVAKGGRCLKGLNKSNISIFKVKTDVLGKKHIIKKEGDEPKLKF

SEQ ID NO: 21847 - protein, 1123 aa, unidentified
  REGION 1..1123: note = Cas Enzyme sequence
MNGLVLGLDIGIASVGVGILKKETGEIVHSNSRLFPAATADNNVERRGFRGGRRLTRRKKHRSVRLHDLFEDFGLLTDFSKVSINLNPYQFRVQGLDNQLTNEELFIALKNIVKRRGISYLDDASEDGGTVSSDYGKAVEENRKLLAEQTPGQIQLNRFEKYGQVRGDFTVMENGEKRRLINVFSTSAYRIEAERILRKQQEFNKKITDGFIEDYLTILTGKRKYYHGPGNEKSRTDYGRFRADGTTLDNIFGVLIGKCTFYPDEYRASKASYTAQEFNLLNDLNNLTVPTETKKLNEEQKKIIVEYAKTAKTLGASTLLKYIAKLIGASVDQIHGYRIDSNKKPEMHIFETYRKMQSLETIRVEELHRKVLDELAHILTLNTEREGIEEAINANLKDTFSQDQVLELVQFRKNNSSLFSKGWHNFSLKLMMELIPELYETSEEQMTILTRLGKQKSKETSKRTKYIDEKELTEEIYNPVVAKSVRQAIKIINEATKKYGIFDNIVIEMARENNEEDAKKEYIKRQKANIDEKNAAMEKAAFQYNGKKELPDDVFHGHKELATKIRLWHQQGEKCLYTGKNIPIADLIQNQYKYEIDHILPLSLSFDDSLSNKVLVLDTSNQEKGQRTPFQALDSMDDAWSYREFKTYVKDLKLLNNKKKDYLLTEEDISKIEVKQKFIERNLVDTRYSSRVVLNALQDFYKEHQFDTTISVVRGQFTSQLRRKWGLEKSRDTYHHHAVDALIIAASSQLRLWKKLNNSLISYKEEQFVDLETGEIIALSDDEYKELVFKAPYDHFVDTLKSKKFEDTILFSYQVDSKYNRKISDATIYATRKAKLDNDKSEETYVLGKIKDIYSQSGYDAFIKIYNKDKSRFLMYHKDPQTFEKVIEEILRTYPSKELNDKNKEVPCNPFEKYRQENGPIRKYSRKGNGPEIKSLKYYDKNIPESFINITPSNSKNKVILRQLNPWRTDVYFNHQTEKYELLGLKYADLQFEKKTGNYSITIDKYNEIKEKEGVSKQSEFKFTLYKNDLLLIKDTKNNEKQIFRFLSRTMPNQKNYVELKPYDKAKFDGNQELMTIFGNVAKGGQCMKGLNKSDISIFKVKTDVLGNKHFIKKEGEEPKLKF

SEQ ID NO: 21848 - protein, 1134 aa, unidentified
  REGION 1..1134: note = Cas Enzyme sequence
MNGLVLGLDIGIASVGVGILNKDTGEIIHSNSRLFPAATADNNVERRKNRQARRLHRRKKHRGVRLQDLFEYYDLLTDFSKVSINLNPYRLRVDGLNQQLTNEELFIALKNIVKRRGISYLDDASEDGGAVSSDYGKALEENRKLLAEQTPGQIQLERFEKYGQVRGDFTVVENGEKLRLINVFSISAYKKEAERILRKQQEFNNQITDEFIEDYLKILTGKRKYYHGPGNEKSRTDYGRFRTDGTTLDNIFGILIGKCTFYPEEYRASKASYTAQEFNLLNDLNNLTVPTETKKLSEEQKKIIIEYVKSAKTLGALTLLKYIAKMLDASVDQIRGYRVDVNNKPEMHTFEVYRKMQSLETISVGELSRNVLDELAHILTLNTEREGIEEAINTKLKDSFSQDQVLELVQFRKNNSSLFSKGWHNFSLKIMMELIPELYETSEEQMTVLTRLEKQKSKETSKRTKYIDEKELTGEIYNPVVAKSVRQAIKIINEATKKYGIFDNIVIEMARENNEEDAKKDYIKRQKANHDEKNAAMEKAAFQYNGKKELPDSIFHGHKELATKIRLWHQQGEKCLYTGKNIPISDLIHNQYKYEIDHILPLSLSFDDSLSNKVLVLATANQEKGQRTPFQALDSMDDSWSYREFKSYVKDLKSLSNKKKDYLLTEEDISKIEVKQKFIERNLVDTRYSSRVVLNALQDFYKSHQFDTTISVVRGQFTSQLRRKWGLEKSRETYHHHAVDALIIAASSQLRLWKKQNNPLIAYKEGQFVDSQTGEIISLTDDEYKELVFKAPYDNFVDTLSSKTFEDSILFSYQVDSKFNRKISDATIYATRKAKLDKEKKEYTYTLGKIKDIYSLGTKTPSKTGFYKFLDLYNKDKSQFLMFQKDRKTWDEVIEKIMEQYRPFKEYDKTGKLVDFNPFEKYRQENGPIRKYSKKGNGPEIKSLKYYDILLGKHKNITPEGSRNTVALLSLNPWRTDVYYNMETKKYEFLGLKYADLPFEEGGAYGISTEMYNELREKEGIGKNSEFKFTLYKNDLILIKDTETNCQQFFRFWSRTGKDNPKSFEKHKIELKPYEKAKFEKGEELEVLGKVPPSSNQFQKNMQIENISIYKVKTDVLGNKHFIKKEGDKPKLKF

SEQ ID NO: 21849 - protein, 1128 aa, unidentified
  REGION 1..1128: note = Cas Enzyme sequence
MSDLVLGLDIGIGSVGVGILNKVTGEIIHKNSRIFPAAQAENNVERRTNRQGRRLTRRKKHRRVRLNHLFEESGLITDFTKVSINLNPYQLRVKGLIDELSNEELFIALKNMVKHRGISYLDDASDDGNSSVGDYAQIVKENSKQLETKTPGQIQLERYQKYGQLRGDFTVEEDGKKHRLINVFPTSAYRAEALRILQTQQEFNPQITDEFINRYLEILTGKRKYYHGPGNEKSRTDYGRYTTKKDSEDEYITLDNIFGILIGKCTFYPEEYRAAKASCTAQEFNLLNDLNNLTVPTETKKLSEEQKNQIINYVKNEKAMGPAKLFKYIAKLLSCDVADIKGYRIDKSDKAEIHTFEAYRKMKTLETLDVKKMAREELDKLAYVLTLNTEKEGIQEAIEHEFADGTFSQEQVDELVQFRKANSSIFGKGWHNFSVKLMMELIPELYATPEEQMTILKRLGKQKTTSSSNKTKYIDERLLTEEIYNPVVAKSVRQAIKIVNAAIKEYGDFDNIVIEMARETNEDDEKKAIQKIQKANKDEKDAAMLKAANQYNGKAELPHSVFHGHKQLATKIRLWHQQGERCLYTGKTISIHDLINNPNQFEIDHILPLSITFDDSLANKVLVYATANQEKGQRTPYQALDSMDDAWSFRELKAFVRESKALSNKKKEYLLTEEDISKFDVRKKFIERNLVDTRYASRVVLNALQEHFRFHKTDTKVSVVRGQFTSQLRRHWGIEKTRDTYHHHAVDALIIAASSQLNLWKKQKNTLVSYSEDQLLDIETGELISDDEYKESVFKAPYQHFVDTLKSKEFEDSILFSYQVDSKFNRKISDATIYATRHAKVGKDKKDETYVLGRIKDIYSQTGYDAFIKIYQKDKSKFLMYRHDPQTFEKVIEPILENYPNKEMNEKGKEVPCNPFLKFKEEHGDYIRKYSKKGNGPEIKSLKYYDSKLGNHIDITPKNSNNKVVLQSVSPWRADVYFNKTTGKYEILGLKYADLQFEKGTGTYKISQEKYNAIKKKEGVDSDSEFKFTLYKNDLLLIKDTGTKEQQLFRFLSRSMPNKKHYVELKPYSKDKFEKNESLIEILGPADKSGRCIKGLAKSNISIYKVRTDVLGNQHIIKNEGDKPKLDF

SEQ ID NO: 21850 - protein, 1134 aa, unidentified
  REGION 1..1134: note = Cas Enzyme sequence
MNGLVLGLDIGIASVGVGILEKNSGKIIHANSRLFPAATADNNVERRKNRQVRRLHRRKKHRGVRLKDLFEDYGFLTDFSKVSINLNPYRLRVDGLNQQLTNEELFIALKNIVKRRGISYLDDASEDGGTVSSDYGKAVEENRKLLAEQTPSQIQLERFEKYGQVRGDFTVVENGQKCRLINVFSTSAYRKEAERILRKQQEFNSKITDEFIEDCLKILTGKRKYYHGPGNEKSRTDYGRFRTDGTTLDNIFGILIGKCTFYPDEYRASKASYTAQEFNLLNDLNNLTVPTETKKLSEEQKKVIVEYAKEAKTLGASTLLKYIAKMIDASVDQIRGYRVDVNNKPEIHTFEAYRKMQSLETISVGELSRNVLDELAHILTLNTEREGIEEAINTKLKDSFSQDQVLELVQFRKNNSSLFSKGWHNFSLKLMMELIPELYETSEEQMTILTRLGKQKSKEISKRTKYIDEKELTEEIYNPVVAKSVRQAIKIINEATKKHGIFDNIVIEMARENNEEDAKKDYIKRQKANQDEKNAAMEKAAFQYNGKKELPDSIFHGQKELATKIRLWHQQGEKCLYTGKNIPISDLIHNQYKYEIDHILPLSLSFDDSLSNKVLVLATANQEKGQRTPFQALDSMDDAWSYREFKSYVKESKLLGNKKKEYLLTEEDISKIEVKQKFIERNLIDTRYSSRVVLNALQDFYKAHKFDTTISVVRGQFTSQLRRKWGLEKSRETYHHHAVDALIIAASSQLRLWKKQNNSLISYKEGQFVDSETGEIISLTDDEYKELVFKAPYDHFVDTLRSKKFEDSILFSYQVDSKFNRKISDATIYATRKAKLDKEKKEYTYTLGKIKDIYSLGTKAPSKTGFYKFLDLYNKDKSQFLMFQKDRKTWDEVIEKIMEQYRPFKEYDKTGKLVDFNPFEKYRQENGPIRKYSKKGNGPEIKSLKYYDILLGKHKNITPEGSRNTVALLSLNPWRTDVYYNMETKKYEFLGLKYADLPFEEGGAYGISTETYNELREKEGIGKNSEFKFTLYKNDLILIKDTETNCQQIFRFWSRTGKDNPKSFEKHKIELKPYEKARFEKGEELKVLGKVPPSSNQLQKNMQIENLSIYKVKTDVLGNKHFIKKEGDEPKLKF

SEQ ID NO: 21851 - protein, 1127 aa, unidentified
  REGION 1..1127: note = Cas Enzyme sequence
MSDLVLGLDIGIGSVGVGILNKVTGEIIHKNSRIFPAAQAENNVERRTNRQGRRLTRRKKHRRVRLNHLFEESGLITDFTKVSINLNPYQLRVKGLIDELSNEELFIALKNMVKHRGISYLDDASDDGNSSVGDYAQIVKENSKQLETKTPGQIQLERYQKYGQLRGDFTVEEDGKKHRLINVFPTSAYRAEALRILQTQQEFNPQITDEFIYRYLEILTGKRKYYHGPGNEKSRTDYGRYTTKKDSEDEYITLDNIFGILIGKCTFYPEEFRAAKASYTAQEFNLLNDLNNLTVPTETKKLSEEQKNQIINYVKNEKAIGPAKLFKYIAKLLSCDVADIKGYRIDKSDKAEIHTFEAYRKMKTLETLDVKKMAREELDKLAYVLTLNTEKEGIQEAIEHEFADGTFSQEQVDELVQFRKANSSIFGKGWHNFSVKLMMELIPELYATSEEQMTILTRLGKQKTTSSSNKTKYIDEKQLTEEIYNPVVAKSVRQAIKIVNAAIKEYGDFDNIVIEMARETNEDDEKKAIQKIQKANKDEKDTAMLKAANQYNGKAELPHSVFHGHKQLATKIRLWHQQGERCLYTGKTISIHDLINNPNQFEIDHILPLSITFDDSLANKVLVYATANQEKGQRTPYQALDSMDDAWSFRELKAFVRESKALLNKKKEYLLTEEDISKFDVRKKFIERNLVDTRYASRVVLNALQEHFRSRKIDTKVSVVRGQFTSQLRRHWGIDKTRDTYHHHAVDALIIAASSQLNLWKKQKNTLVSYSEDQLLDIETGELISDDEYKESVFKAPYQHFVETLKSKEFEDSILFSYQVDSKFNRKISDATIYATRQAKVGKDKKDETYVLGKIKDIYTQAGYDAFIKIYKKDKSKFLMYRHDPQTFEKVIEPILENYPNKEMNEKGKEVPCNPFQKYKEEHGYIRKYSKKGNGPEIKSLKYYDSKLGNHIDITPKDSNNKVVLQSVSPWRADVYFNKTTGKYEILGLKYADLQFEKGTGTYKISEEKYNDIKKKEGVDADSEFKFTLYKNDLLLIKDTQTKEQQLFRFLSRSMPNKKHYVELKPYDKQKFEGNEPLINILGTVAKGGQCIKGLGKVNLSIYKIRTDVLGNQHIIKNEGDKPKLDF

SEQ ID NO: 21852 - protein, 1127 aa, unidentified
  REGION 1..1127: note = Cas Enzyme sequence
MNGLVLGLDIGIASVGVGILEKNSGKIIHANSRLFPAATADNNVERRKNRQARRLNRRKKHRGVRFQDLFEDYGLLTDFSKVSINLNPYRLRVDGLNQQLTNEELFIALKNIVKRRGISYLDDASEDGGAVSSDYGKAVEENRKLLAEQTPGQIQLERFEKYGQVRGDFTVVENGEKLRLINVFSTSAYKKEAERILRKQQEFNNQITDEFIEDYLKILTGKRKYYHGPGNEKSRTDYGRYTTHKDSKGEYVTLDNIFGVLIGKCTFYPNEYRASKASYTAQEFNLLNDLNNLTVPTETKKLSEEQKKVIVEYAKEAKTLGASTLLKYIAKMIDASVDQIRGYRVDVNNKPEMHTFEVYRKMQSLETISVEELSRNVLDELAHILTLNTEREGIEEAINTKLKDSFNQDQVLELVQFRKNNSSLFSKGWHNFSLKLMMELIPELYETSEEQMTILTRLGKQKSKETSKRTKYIDEKELTEEIYNPVVAKSVRQAIKIINEATKKHGIFDNIVIEMARENNEEDAKKDYIKRQKANQDEKYAAMEKAAFQYNGKKELPDNIFHGHKELATKIRLWHQQGEKCLYTGKSIPISDLIHNQYKYEIDHILPLSLSFDDSLSNKVLVLATANQEKGQRTPFQALDSMDDAWSYREFKSYVKESKLLGNKKKEYLLTEEDISKIEVKQKFIERNLVDTRYSSRVVLNALQDFYKAHKFDTTISVVRGQFTSQLRRKWRLEKSRETYHHHAVDALIIAASSQLRLWKKQNNPLIAYKEGQFVDSETGEVISLTDDEYKELVFKAPYDHFVATLTSEKFEKSILFSYQVDSKFNRKISDATIYATRKAKLDKDKSEETYVLGKIKDIYSQAGYDAFIKIYNKDKRKFLMYHKDPQTFEKVIEEILRTYPSKERNDKNKEVPCNPFEKYRQENGPIRKYSKKGNGPEIKCLKYYDNKLGNYIDITPDGSDNQVVLQSLKPWRTDVYFNHQTKKYELMGLKYSDLSFEKGSGKYSISNEKYNSIKRIEGVDEQSEFKFTLYKNDLILIKDSENNEQKLFRFNSRNDTAKHYVELKPYDKARFDGQQELITILGNVAKGGQCLKGLNKSNISIFKVKTDVLGKKHIIKKEGDEPKLKF

SEQ ID NO: 21853 - protein, 1134 aa, unidentified
  REGION 1..1134: note = Cas Enzyme sequence
MNGLVLGLDIGIGSVGVGILKKDTGEIIHTNSRIFPAATADNNVERRNSRQGRRLNRRKKHRVVRFQDLFDDYGLLTDFSKVSINLNPYRLRVHGLNQQLTNEELFIALKNIVKRRGISYLDDASEDGGAVSSDYGKAVEENRKLLTEQTPGQIQLERFEKYGQVRGDFTVEEKGDKHRLINVFSTSAYRKEAERILRKQQEFNNQITDKFIEDYLKILTEKRKYYHGPGNEKSRTDYGRFRTDGTTLDNIFGILIGKCTFYPNEYRASKASYTAQEFNLLNDLNNLTVPTETKKLSEEQKKTIVEYAKSAKTLGASTLLKYIAKMIDASVDQIRGYRVDVNNKPEMHTFEVYRKMQSLETIPVGEFSREVLDEVAHILTLNTEREGIEEAINTKLMDVFSQDQILELVQFRKNNSSLFSKGWHNFSLKLMMELIPELYETSEEQMAILTRLGKQKFKETSKRTKYIDEKEVTEEIYNPVVAKSVRQAIKIINEATKKYGIFDDIVIEMARENNEEDAKKDYIKRQKANHDEKNAAMEKAAFQYNGKKELPDSIFHGHKELATKIRLWHQQGEKCLYTGKNIPISDLIHNQYKYEIDHILPLSLSFDDSLSNKVLVLATANQEKGQRTPFQALDSMDDAWSYREFKSYVKDSKLLGNKKKDYLLTEEDISKIEVKQKFIERNLVDTRYSSRVVLNALQDFYKAHKFDTTISVVRGQFTSQLRRKWRLEKSRETYHHHAVDALIIAASSQLRLWKKQNNPLISYKEGQFVDSETGEIISLTDDEYKELVFKAPYDHFVDTLRSKKFEDSILFSYQVDSKFNRKISDATIYATRKAKLDKEKKEYTYTLGKIKDIYSLGTKTPSKTGFYKFLDLYNKDKSQFLMFQKDRKTWDEVIEKIMEQYRPFKEYDKTGKLVDFNPFEKYRQENGPIRKYSKKDNGPEIKSLKYYDILLGKHKNITPEGSRNTVALLSLNPWRTDVYYNMETKKYEFLGLKYADLPFEEGGAYGISTETYNKLREKEGIGKNSEFKFTLYKNDLILIKDTETNCQQIFRFWSRTGKDNPKSFEKHKIELKPYEKARFEKGEELEVLGKVPPSSNQLQKNMQIENLSIYKVKTDILGNKHFIKKEGDEPKLKF

SEQ ID NO: 21854 - protein, 1128 aa, unidentified
  REGION 1..1128: note = Cas Enzyme sequence
MNGLVLGLDIGIASVGVGILKKDTGEIIHANSRLFPAATADNNVERRGFRGGRRLTRRKKHRSVRLHYLFEDFGLLTDFSKVSINLNPYQIRVQGLDKRLTNEELFIALKNIIKRRGISYLDDASEDGGTVSSDYGKAVEENRKLLAEQTPGQIQLDRFEKYGQVRGDFTVVENSEKLRLINVFSTSAYSKEAERILRKQQEFNNKITEGFIEDYLTILTGKRKYYHGPGNEKSRTDYGRYTTKKDSQGEYITLDNIFGILIGKCTFYPDEYRASKASYTAQEFNLLNDLNNLTVPTETKKLSEEQKKTIIEYAKTAKTLGAATLLKYIAKMIGASVDQIHGYRIDSNKKPEMHTFEAYRKMQSLETIRVEELPRKVIDELAHILTLNTEREGIEEAINAKLKDIFSQDQVLELVQFRKNNSSLFSKGWHNFSLKLMMELIPELYETSEEQMTILTRLGKQKSKETSKRTKYIDEKELTEEIYNPVVAKSVRQAIKIINEATKRYGIFDNIVIEMARENNEDDAKKEYIKRQKANLDEKNAAMEKAAFQYNGKKELPDNVFHGHKELATKIRLWHQQGEKCLYTGKNIPISDLIQNRYKYEIDHILPLSLSFDDSLSNKVLVLATANQEKGQRTPFQALDSMDDAWSYREFKSYVKDSKLLSNKKKEYLLTEEDISKIEVKQKFIERNLVDTRYSSRVVLNALQDFYKEHQFDTTISVVRGQFTSQLRRKWGLEKSRETYHHHAVDALIIAASSQLRLWKKQNNPLISYKEEQFVDQETGEIISLSDDEYKELVFKAPYDHFVDTLKSKKFEDNILFSYQVDSKYNRKISDATIYATRKAKLDKDKSEETYVLGKIKDIYSQAGYDAFIKIYNKDKSRFLMYHKDPQTFEKVIEEILRTYPSKELNEKNKEVPCNPFEKYRQENGPIRKYSRKGNGPEIKSLKYYDNKLGNHIDITPDKSNNKVVLQSINPWRTDVYYNNKSKKYEFLGLKYSDLYFEKGTGKYKISKNKYDVIKKLEGVDEKSEFKFTLCKNDLILIKDVDTGQEQLFRFLSRNNKGKHQVQLKPIDKSDFEKGEKLIDIFDTVPNSTTQCVKGLNKPNISIYKVKTDILGNKHFIKKEGEEPKLKF

SEQ ID NO: 21855 - protein, 1121 aa, unidentified
  REGION 1..1121: note = Cas Enzyme sequence
MNGLVLGLDIGIASVGVGILEKNSGKIIHANSRLFPAATADNNVERRKNRQVRRLHRRKKHRGVRLKDLFEDYGFLTDFSKVSINLNPYRLRVDGLNQQLTNEELFIALKNIVKRRGISYLDDASEDGGTVSSDYGKAVEENRKLLAEQTPSQIQLERFEKYGQVRGDFTVVENGQKCRLINVFSTSAYRKEAERILRKQQEFNSKITDEFIEDCLKILTGKRKYYHGPGNEKSRTDYGRFRTDGTTLDNIFGILIGKCTFYPDEYRASKASYTAQEFNLLNDLNNLTVPTETKKLSEEQKKTIIEYAKLAKTLGASTLLKYIAKMIDASVDQIRGYRVDVNNKPEMHTFEVYRKMQSLETISVGELSRNVLDELAHILTLNTEREGIEEAINTKLKDSFSQDQVLELVQFRKNNSSLFSKGWHNFSLKLMMELIPELYETSEEQMTILTRLGKQKSKETSKRTKYIDEKELAEEIYNPVVAKSVRQAIKIINEATKKHGIFDNIVIEMARENNEEDAKKDYIKRQKANQDEKNAAMEKAAFQYNGEKELPDSIFHGHKELATKIRLWHQQGEKCLYTGKNIPISDLIHNQYKYEIDHILPLSLSFDDSLSNKVLVLATANQEKGQRTPFQALDSMDDGWSYREFKSYVKESKLLGNKKKEYLLTEEDISKIEVKQKFIERNLVDTRYSSRVVLNALQDFYKAHKFDTTISVVRGQFTSQLRRKWGLEKSRETYHHHAVDALIIAASSQLRLWKKQNNPLISYKEGQFVDSETGEIISLTDDEYKELVFKAPYDHFVDTLRSKTFEDSILFSYQVDSKFNRKISDATIYATRKAKLDKEKSEETYVLGKIKDIYSQAGYDAFIKIYNKDKSKFLMYHKDPQTFEKVIEEILRTYPSKELNDKNKEIPCNPFEKYRQENGPIRKYSKKSNGPEIKSLKYYDNKLGNHIDITPESSDNQVVLQSLKPWRTDVYFNHQTKKYELMGLKYSDLSFEKGSGKYSISNQKYNSIKRIEGIDEQSEFKFTLYKNDLILIKDSENNEQKLFRFNSRNDTAKHYIELKPYDKAKFDGEQELITILGNVAKGGRCLKGLNKSNISIFKVKTDVLGKKHIIKKEGDEPKLKF

SEQ ID NO: 21856 - protein, 1128 aa, unidentified
  REGION 1..1128: note = Cas Enzyme sequence
MSDLVLGLDIGIGSVGVGILNKVTGEIVHKNARIFPAAQAENNVERRTNRQGRRLTRRKKHRRVRLNHIFEESGLITDFTKVSINLNPYQLRVKGLTDELSNEELFIALKNMVKHRGISYLDDASDDGNSSVGDYAQIVKENSKQLETKTPGQIQLERYQKYGQLRGDFTIEEDGKKHRLINVFPTSAYRAEALRILQTQQEFNPQITDEFINGYLQILTGKRKYYHGPGNEKSRTDYGRYTTKKDSEDEYITLDNIFGILIGKCTFYPEEYRAAKASYTAQEFNLLNDLNNLTVPTETKKLSEEQKNQIITYVKNEKAMGPAKLFKYIAKLLACDVADIKGYRIDKSDKPEIHTFEAYRKMKTFETIDVEQMEREKLDKLAYVLTLNTEREGIQEAIEHEFSDGTFSQEQVDELVQFRKSNSSIFGKGWHNFSVKLMMELIPELYATSEEQMTILTRLGKQKRTSSSNKTKYIDEKRLTEEIYNPVVAKSVRQAIKIVNAAIKEYGDFDNIVIEMAREMNEDDEKKAIKKIQEANKSEKDAAMRKAANQYNGKAELPHSVFHGHKQLATKIRLWHQQGERCLYTGKTISIHDLINNPNQFEIDHILPLSITFDDSLANKVLVYATANQEKGQRTPYQALDSMDDAWSFRELKAFVRESKTLSNKKKEYLLTEEDISKFDVRKKFIERNLVDTRYASRVVLNALQEHFRARKIDTKVSVVRGQFTSQLRRHWGIDKTRDTYHHHAVDALIIAASSQLNLWKKQKNTLVSYSEDQLLDIETGELISDDEYKESVFKAPYQHFVDTLKSKEFEDSILFSYQVDSKFNRKISDATIYATRQAKVGKDKKDETYVLGKIKDIYSQAGYDAFIKIYQKDKSKFLMYRHDPQTFEKVIEPILENYPNKEMNEKGKEVPCNPFLKYKEEHGDYIRKYSKKGNGPEIKSLKYYDSKLGNHIDITPKNSNNKVVLQSVSPWRADVYFNKTTGKYEILGLKYADLQFEKGTGTYKISQEKYNDIKKKEGVDSDSEFKFTLYKNDLLLIKDTETKEQQLFRFLSRSMPNKKHYVELKPYSKDKFEKNETLIEILGPADKSGRCIKGLAKSNLSIFKVRTDILGNQHIIKNEGDKPKLDF

SEQ ID NO: 21857 - protein, 1134 aa, unidentified
  REGION 1..1134: note = Cas Enzyme sequence
MNGLVLGLDIGIGSVGVGILKKDTGEIIHTNSRIFPAATADNNVERRNSRQGRRLNRRKKHRVVRFQDLFDDYGLLTDFSKVSINLNPYRLRVHGLNQQLTNEELFIALKNIVKRRGISYLDDASEDGGAVSSDYGKAVEENRKLLTEQTPGQIQLERFEKYGQVRGDFTVEEKGDKHRLINVFSTSAYRKEAERILRKQQEFNNQITDKFIEDYLKILTEKRKYYHGPGNEKSRTDYGRFRTDGTTLDNIFGILIGKCTFYPNEYRASKASYTAQEFNLLNDLNNLTVPTETKKLSEEQKKTIVEYAKSAKTLGASTLLKYIAKMIDASVDQIRGYRVDVNNKPEMHTFEVYRKMQSLETIPVGEFSREVLDELAHILTLNTEREGIEEAINTKLMDVFSQDQILELVQFRKNNSSLFSKGWHNFSLKLMMELIPELYETSEEQMAILTRLGKQKFKETSKRTKYIDEKEVTEEIYNPVVAKSVRQAIKIINEATKKYGIFDDIVIEMARENNEEDAKKDYIKRQKANHDEKNAAMEKAAFQYNGKKELPDSIFHGHKELATKIRLWHQQGEKCLYTGKNIPISDLIHNQYKYEIDHILPLSLSFDDSLSNKVLVLATANQEKGQRTPFQALDSMDDAWSYREFKSYVKDSKLLGNKKKDYLLTEEDISKIEVKQKFIERNLVDTRYSSRVVLNALQDFYKAHKFDTTISVVRGQFTSQLRRKWGLEKSRETYHHHAVDALIIAASSQLRLWKKQNNPLISYKEGQFVDSETGEIISLTDDEYKELVFKAPYDHFVDTLRSKAFEDSILFSYQVDSKYNRKISDATIYATRKVKLDKEKKEYTYTLGKIKDIYSLGTKTPSKTGFYKFLDLYNKDKSQFLMFQKDRKTWDEVIEKIMEQYRPFKEYDKTGKLVDFNPFEKYRQENGPIRKYSKKDNGPEIKSLKYYDILLGKHKNITPEGSRNTVALLSLNPWRTDVYYNMETKKYEFLGLKYADLPFEEGGAYGISTETYNKLREKEGIGKNSEFKFTLYKNDLILIKDTETNCQQIFRFWSRTGKDNPKSFEKHKIELKPYEKARFEKGEELEVLGKVPPSSNQLQKNMQIENLSIYKVKTDILGNKHFIKKEGDEPKLKF

SEQ ID NO: 21858 - protein, 1121 aa, unidentified
  REGION 1..1121: note = Cas Enzyme sequence
MNGLVLGLDIGIASVGVGILNKDTGEIIHTNSRIFPAATADNNVERRNSRQDRRLNRRKKHRGVRLHDLFEDYDLLTDFSKVSINLNPYRLRVQGLDNSLTTEELFIALKNIVKRRGISYLDDASEDGGVVSSDYGKAVEENRKLLAEQTPGQIQLERFKKYGQVRGDFTVVENGEKRRLINVFSTSAYRKEAERILRKQQEFNNQITDKFIEDYLKILTEKRKYYHGPGNEKSRTDYGRFRTDGTTLDNIFGILIGKCTFYPNEYRASKASYTAQEFNLLNDLNNLTVPTETKKLSEEQKKTIVEYAKSAKTLGASTLLKYIAKMIDASVDQIRGYRVDVNNKPEMHTFEVYRKMQSLETISVGELSRNILDELAHILTLNTEREGIEEAINTKLMDVFSQDQVLELVQFRKNNSSLFSKGWHNFSRKLMMELIPELYETSEEQMTILTRLGKQKSKETSKRTKYIDEKEVTEEIYNPVVAKSVRQAIKIINEATKKYGIFDNIVIEMARENNEEDAKKDYIKRQKANQDEKNVAIEKAAFQYNGKKELPDSIFHGHKELATKIRLWHQQGEKCLYTGKNIPISDLIHNQYKYEIDHILPLSLSFDDSLSNKVLVLATANQEKGQRTPFQALDSMDDAWSYREFKSYVKDSKLLGNKKKDYLLTEEDISKIEVKQKFIERNLVDTRYSSRVVLNTLQDFYKAHKFDTTISVVRGQFTSQLRRKWGLEKSRETYHHHAVDALIIAASSQLRLWKKQANPLISYKEDQFVDSETGEIISLTDDKYKELVFKAPYAHFVDTLSSKKFEDSILFSYQVDSKYNRKISDATIYATRKVKLDKDKSEETYVLGKIKDIYSQAGYDAFIKIYNKDKSKFLMYHKDPQTFEKVIEEILRIYPSKEFNEKNKEVPCNPFEKYRQENGPICKYSKKGNGPEIKSLKYYDKNIPESFIDITPSNSKNKVILRQLNPWRTDVYFNHQTEKYELLGLKYADLQFEKKTETYSITIDKYNEIKEKEGVGEHSEFKFTLYKNDLLLIKDMEIKEEQIFRFLSRTMPNKKHYVELKPYYKGNFEGKERIKVFNTTSNGRCLKGLGKKGLSIYKIKTDVLGNKHFIKKEGEKPKLKF

SEQ ID NO: 21859 - protein, 1140 aa, unidentified
  REGION 1..1140: note = Cas Enzyme sequence
MNGLVLGLDIGIASVGVGILKKDIGEIIHTNSRLFSAATADSNIERRGHRGGKRLTRRKKHRSIRLHDLFEDFGLLTDFSKVSINLNPYQLRVQGLDNQLTNEELFIALKNIVKRRGISYLDDASEDGGTVSSDYGKAVEENRKLLAEQTPGQIQLDRFEKYGQVRGDFNVVENGEKRRLINVFTTSAYSKEAERILRKQQEFNKKITDEFIEDYLTILTGKRKYYHGPGNEKSRTDYGRYTTKKDPEGKYITLDNIFGILIGKCTFYPDEYRASKASYTAQEFNLLNDLNNLTVPTETKKLSEEQKKTIIKYAKTAKTLGASTLLKYIAKLIGASVDQIHGYRIDPNKKPEMHTFETYRKMQSLETISVEELPRKVLDELAHILTLNTEREGIEEAINATLKDTFSQDQVLELVQFRKNNSSLFSKGWHSFSLKLMMELIPELYETSEEQMTILTRLGKQKSKETSKRTKYIDEKELTEEIYNPVVAKSVRQAIKIINEATKKYGIFDNIVIEMARENNEEDAKKEYIKRQKANLDEKNAAMEKAAFQYNGKKELPDNVFHGHKELATKIRLWHQQGEKCLYTGKNIPISDLIQNQYKYEIDHILPLSLSFDDSLSNKVLVLATANQEKGQRTPFQALDSMDDAWSYREFKSYVKDSKLLGNKKKEYLLTEEDISKIEVKQKFIERNLVDTRYSSRVVLNALQDFYKEHQFDTTISVVRGQFTSQLRRKWGLEKSRETYHHHAVDALIIAASSQLRLWKKQNNPLISYTEGQFVDQVTGEIISLSDDEYKELVFKAPYDHFVDTLKSKKFEDSILFSYQVDSKYNRKISDATIYATRKAKLDKENKEYTYTLGKIKDIYALGTKSPSKTGFYKFLDLYNKDKSQFLMFQKDRKTWDEVIEKIIEQYRPFKEYDENGKEVDFNPFEKYRIENGPIRKYSKKGNGPEIKSLKYYDNLLGKFVDITPSESKNPVALLSLNPWRTDVYYNTETSKYEFLGLKYADLCFEKGGAYGISEVKYNKIREKEGIGKESEFKFTLYKNDLILIKDTETNCQQIFRFWSRTGKDNPKSFEKHKIELKPYEKARFEKGEELEVLGKVPPSSNQLQKNMQIENLSIYKVKTDVLGNKHFIKKEGEEPKLKF

SEQ ID NO: 21860 - protein, 1138 aa, unidentified
  REGION 1..1138: note = Cas Enzyme sequence
MNGLVLGLDIGIASVGVGILEKNSGKIVHASSRIFPAATADNNVERRKNRQARRLHRRKKHRGVRLKDLFEDYGLLTDFSKVSINLNPYRLRVDGLDQQLTNEELFIALKNIVKRRGISYLDDASEDGGTVSSDYGKAVEENRKLLAEKTPGQIQLERFEKYGQLRGDFTVVENGEKCRLINVFSTSAYKKEAERILRKQQDFNNQITDEFIEDYLKILTGKRKYYHGPGNEKSRTDYGRYTTHKDSKGEYVTLDNIFGVLIGKCTFYPNEYRASKASYTAQEFNLLNDLNNLTVPTETKKLSEEQKKTIIEYAKSAKTLGASTLLKYIAKMIDTSVDQIRGYRVDVNNKPEIHTFEVYRKMQSLETISVGELSRNVLDELAHILTLNTEREGIEEAINTKLKDSFSQDQVLELVQFRKNNSSLFSKGWHNFSLKLMMELIPELYETSEEQMTILTRLGKQKSKETSKRTKYIDEKELTEEIYNPVVAKSVRQAIKIINEATKKHGIFDNIVIEMARENNEEDAKKDYIKRQKANQDEKYAAMEKAAFQYNGKKELPDSIFHGHKELATKIRLWHQQGEKCLYTGKNIPISDLIHNQYMYEIDHILPLSLSFDDSLSNKVLVLATANQEKGQRTPFQALDSMDDAWSYREFKSYVKESKLLGNKKKEYLLTEEDISKIEVKQKFIERNLVDTRYSSRVVLNALQDFYKAHKFDTTISVVRGQFTSQLRRKWRLEKSRETYHHHAVDALIIAASSQLRLWKKQNNPLIAYKEGQFVDSETGEIISLSDDEYKELVFKAPYDHFVDTLSSKTFEDSILFSYQVDSKFNRKISDATIYATRKAKLDKEKKEYTYTLGKIKDIYSLGTKTPSKTGFYKFLDLYNKDKSQFLMFQKDRKTWDEVIEKIIEQYRPFKEYDKTGNLVDFNPFEKYRQENGPIRKYSKKGNGPEIKSLKYYDNKLGNHIDITPDGSDNQVVLQSLKPWRTDVYFNHQTKKYELMGLKYSDLSFEKGSGKYSISIEKYNSIKIIEGVDEQSEFKFTLYKNDLILIKDVEKGQEQLFRFLSRNNKGKQQVQLKPLNKSDFEKGEKLIDIFDTVPNSTTQCVKGLNKSNISIFKVKTDVLGNKHFIKKEGDEPKLKFKK

SEQ ID NO: 21861 - protein, 1061 aa, unidentified
  REGION 1..1061: note = Cas Enzyme sequence
GARLHDLFEDYDLLTDFSKVSINLNPYRLRVQGLDNPLTTEELFIALKNIVKRRGISYLDDASENGGAVSSDYGKAVEENRKLLAEQTPGQIQLERFEKYGQVRGDFTVEEKGDKHRLINVFSTSAYRKEAERILRKQQEFNNQITDKFIEDYLKILTEKRKYYHGPGNEKSRTDYGRFRTDGTTLDNIFGILIGKCTFYPNEYRASKASYTAQEFNLLNDLNNLTVPTETKKLSEEQKKTIVEYAKSAKTLGASTLLKYIAKMIDASVDQIRGYRVDVNNKPEMHTFEVYRKMQSLETIPVGEFSREVLDELAHILTLNTEREGIEEAINTKLMDVFSQDQILELVQFRKNNSSLFSKGWHNFSLKLMMELIPELYETSEEQMAILTRLGKQKFKETSKRTKYIDEKEVTEEIYNPVVAKSVRQAIKIINEATKKYGIFDNIVIEMARENNEEDAKKDYIKRQKANHDEKNAAMEKAAFQYNGKKELPDSIFHGHKELATKIRLWHQQGEKCLYTGKNIPISDLIHNQYKYEIDHILPLSLSFDDSLSNKVLVLATANQEKGQRTPFQALDSMDDAWSYREFKSYVKDSKLLGNKKKDYLLTEEDISKIEVKQKFIERNLVDTRYSSRVVLNTLQDFYKAHKFDTTISVVRGQFTSQLRRKWGLEKSRETYHHHAVDALIIAASSQLRLWKKQANPLISYKEDQFVDSETGEIISLTDDKYKELVFKAPYAHFVDTLSSKKFEDSILFSYQVDSKYNRKISDATIYATRKVKLDKDKSEETYVLGKIKDIYSQAGYDAFIKIYNKDKSKFLMYHKDPQTFEKVIEEILRTYPSKEFNEKNKEVPCNPFEKYRQENGPIRKYSKKGNGPEIKSLKYYDKNIPESFINITPSNSKNKVILRQLNPWRTDVYFNHQTEKYELLGLKYADLQFEKKTGTYSITIDKYNEIKEKEGVGEQSEFKFTLYKNDLLLIKDTKNNEKQIFRFLSRTMPNVKHYVELKPYDKAKFDGNQPLITIFGNVAKGGQCLKGLNKSNISIFKVKTDVLGNKHFITKEGEKPKLKF

SEQ ID NO: 21862 - protein, 1123 aa, unidentified
  REGION 1..1123: note = Cas Enzyme sequence
MNGLVLGLDIGIASVGVGILDNKTGKIIHANSRIFPAAAADNNVERRKNRQSRRLNRRNKHRRERLNELFDEYGLLTDFSKVSINLNPYELRVKGLIEKLTNEELFIALKNIVKRRGISYLDDANEDGESSSSEYGKAVEENRKLLADKTPGQIQLERFEKYGQVRGDFTIEENGEKHRLLNVFSTSAYKKEAERILTKQQDYNQDITNEFIQAYLTILTGKRKYYHGPGNEKSRTDYGRFRTDGTTLDNIFGILIGKCTFYPEEYRAAKASYTAQEFNLLNDLNNLIVPTETKKLSEEQKRQIIEYAKGAKTLGAATLLKYIAKLVDGSVGDIKGYRIDKSEKPEMHTFDIYRKMQTLETVDVKQLSREVLDELAHILTLNTEREGIEEAIKASFIKGEFEQDQIAELVSFRKSNSSLFGKGWHNFSIKLMMELIPELYETSEEQMTILTRLGKQKTKAKSKRTKYIDEKELTEEIYNPVVAKSVRQAIKIINFATKKYGIFDNIVIEMARETNEEDAKKDYVKRQKANEDEKNVAMEKAAHQYNGKKELPDNVFHGHKELATKIRLWHQQGEKCLYTGKNIPIADLIENQYKYEIDHILPLSLSFDDSLANKVLVLATANQEKGQRTPFQALDAMDDSWSYREFKSYVKDSKTLSNKKKDYLLNEEDINKIEVKQKFIERNLVDTRYSSRVVLNTLQDFYKLNEFDTKISVVRGQFTSQLRRKWRIDKSRETYHHHAVDALIIAVSSQLRLWKKQSNPLISYKDTKFVDSETGEIISLTDDEYKELVFRAPYDHFVDTVSSEKFEESILFSYQEDSKYNRKISDATIYATRKAKLGKDKSEETYVLGKIKDIYTQTGYDAFIKLYKKDKSKFLMYHKDPLTFEKVIEEILKTYPDKEQNEKGKEVACNPFEKYRQENGPIRKYSKKGKGPEIKSLKYYDNKLGNHIDITPDNSENQVILQSLSPWRTDVYFNPETGKYELLGLKYADLQFEKGTGNYSINSEKYYKIKEKEGVSEQSEFKFTLYKNDLILVRDTKTDEQQMFRFLSRTMPNQKHYVELKPYDKAKFEGNQPLMALLGNVAKGGQCLKGLNKANISIYKVQTDILGNKRFIKKEGDAPKLKF

SEQ ID NO: 21863 - protein, 1121 aa, unidentified
  REGION 1..1121: note = Cas Enzyme sequence
MNGLVLGLDIGIASVGVGILNKDTGEIIHANSRLFPAATADNNVERRTSRQARRLNRRKKHRSVRLYDLFEEFGLLTDFSKVSINLNPYQLRVQGLDNQLTNEELFIALKNIVKRRGISYLDDASEDGGTVSSDYGKAVEENRKLLVEQTPGQIQLDRFEKYGQLRGDFTVVENGEKHRLINVFSTSAYRKEAERILRKQQEFNNKITDEFIEDYLTILTGKRKYYHGPGNEKSRTDYGRFRTDGTTLDNIFGILIGKCTFYPDEYRASKASYTAQEFNLLNDLNNLTVPTETKKLSEEQKKTIVEYAKTAKTLGASTLLKYIAKLIGASVDQIHGYRIDPDKKTEMHTFEVYRKMQSLEIIKVEELPRNVIDELAHILTLNTEREGIEEAINAKLKDTFSQDQVLELVQFRKNNSSLFSKGWHNFSIKLMMELIPELYETSEEQMTILTRLGKQKSKETSKRTKYIDEKELTEEIYNPVVAKSVRQAIKIINEATKKYGIFDNIVIEMARENNEEDAKKEYIKRQKANLDEKNAAMEKAAFQYNGKKELPDNVFHGHKELATKIRLWHQQGEKCLYTGKNIPISDLIQNQYKYEIDHILPLSLSFDDSLSNKVLVLATANQEKGQRTPFQALDSMDDSWSYREFKSYVKDSKLLGNKKKEYLLTEEDISKIEVKQKFIERNLVDTRYSSRVVLNALQDFYKKHQFDTTISVVRGQFTSQLRRKWGLEKSRETYHHHAVDALIIAASSQLRLWKKQNNPLISYTEGQFVDSETGEIISLSDDEYKELVFKAPYDHFVDTLKSKKFEDSILFSYQVDSKFNRKISDATIYATRKAKLDKDKSEETYVLGKIKDIYSQAGYDAFIKIYNKDKSRFLMYHKDPQTFEKVIEEILRTYPSKEFNDKNKEVPCNPFEKYRQENGPIRKYSRKGNGPEIKSLKYYDNKLGNHIDITPDGSMNQVVLQSLKPWRTDVFFNHQTEKYELMGLKYSDLNFEKGSGKYSISIEKYNSIKRNEGVSEESEFKFTLYKNDLILIKDALTKESQIFRYGSRNDTSKHYVELKPYDMSKFEGDEKLIKVLGTVAKGGRCIKGLNKKDISIYKIKTDVLGNKHFIKKEGEEPKLKF

SEQ ID NO: 21864 - protein, 1121 aa, unidentified
  REGION 1..1121: note = Cas Enzyme sequence
MSDLVLGLDIGIGSVGVGILNKVTGEIIHKNSRIFPAAQAENNVVRRTNRQGRRLTRRKKHRRVRLNHLFEESGLITDFTKVSINLNPYQIRVKGLIDELSNEELFIALKNMVKHRGISYLDDASDDGNSSVGDYAQIVKENSKQLETKTPGQIQLERYQKYGQLRGDFTVEEDGKKHRLINVFPTSAYRAEALRILQTQQEFNPQITDEFINRYLEILTGKRKYYHGPGNEKSRTDYGRYRTSGETLDNIFGILIGKCTFYPEEFRAAKASYTAQEFNLLNDLNNLTVPTETKKLSEEQKNQIINYVKNEKAMGPAKLFKYIAKLLSCDVADIKGYRIDKSDKAEIHTFEAYRKMKTLETLDVKKMVREELDKLAYVLTLNTEKEGIQEAIEHEFADGTFNQEQVDELVQFRKANSSIFGKSWHNFSVKLMMELIPELYATSEEQMTILKRLGKQKTTSSSNKTKYIDEKQLTEEIYNPVVAKSVRQAIKIVNAAIKEYGDFDNIVIEMARETNEDDEKKAIQKIQKANKDEKGAAMLKAANQYNGKAELPHSVFHGHKQLATKIRLWHQQGERCLYTGKTISIHDLINNPNQFEIDHILPLSITFDDSLANKVLVYATANQEKGQRTPYQALDSMDDAWSFRELKAFVRDSKALSNKKKEYLLTEEDISKFDVRKKFIERNLVDTRYASRVVLNALQEHFRAHKTDTKVSVVRGQFTSQLRRHWGIEKTRDTYHHHAVDALIIAASSQLNLWKKQKNTLVSYSEDQLLDIETGELISDDEYKESVFKAPYQHFVDTLKSKEFEDSILFSYQVDSKFNRKISDATIYATRQAKVGKDKKDETYVLGKIKDIYSQTGYDAFIKIYKKDKSKFLMYRHDPQTFEKVIEPILENYPNKELNEKGKEVPCNPFLKYKEDHGYIRKYSKKGNGPEIKSLKYYDSKLGNHIDITPKNSNNKVVLQSVSPWRADVYFNKTTGKYEILGLKYADLKFEKGTGTYKISEEKYNDIKIKEGVDSDSEFKFTLYKNDLLLIKDTETKEQQLFRFLSRTMPNVKHYVELKPYDKQKFDDNEELIKILGIVAKGGQCKKGVSKPNISIYKIRTDVLGNQHIIKNEGDKPKLDF

SEQ ID NO: 21865 - protein, 1140 aa, unidentified
  REGION 1..1140: note = Cas Enzyme sequence
MNGLVLGLDIGIASVGVGILKKDSGEIIHTNSRLFSAATADSNIERRGHRGGKRLTRRKKHSSIRLHDLFEDFGLLTDFSKVSINLNPYQLRVQGLDNQLTNEELFIALKNIVKRRGISYLDDASEDGGTVSSDYGKAVEENRKLLAEQTPGQIQLDRFEKYGQVRGDFTVVENGEKRRLINVFTTSAYSKEAERILRKQQEFNKKITDEFIEDYLTILTGKRKYYHGPGNEKSRTDYGRYTTKKDPEGKYITLDNIFGILIGKCTFYPDEYRASKASYTAQEFNLLNDLNNLTVPTETKKLSEEQKKTIVEYAKTAKTLGASTLLKYIAKLIGASVDQIHGYRIDPNKKPEMHTFETYRKMQSLETIRVEELPRKVLDELAHILTLNTEREGIEEAINATLKDTFSQDQVLELVQFRKNNSSLFSKGWHNFSLKLMMELIPELYETSEEQMTILTRLGKQKSKETSKRTKYIDEKELTEEIYNPVVAKSVRQAIKIINEATKKYGIFDNIVIEMARENNEEDAKKEYIKRQKANLDEKNAAMEKAAFQYNGKKELPDNVFHGHKELATKIRLWHQQGEKCLYTGKNIPISDLIQNQYKYEIDHILPLSLSFDDSLSNKVLVLATANQEKRQRTPFQALDSMDDAWSYREFKSYVKDSKLLGNKKKEYLLTEEDISKIEVKQKFIERNLVDTRYSSRVVLNALQDFYKEHQFDTTISVVRGQFTSQLRRKWGLEKTRETYHHHAVDALIIAASSQLRLWKKQNNPLVSYKAEQFVDQETGEIISLSDDEYKELVFKAPYDHFVDTLKSKEFEDSILFSYQVDSKYNRKISDATIYATRKAKLDKENKEYTYTLGKIKDIYALGTKSPSKTGFYKFLDLYNKDKSQFLMFQKDRKTWDEVIEKIIEQYRPFKEYDENGKEVDFNPFEKYRIENGPIRKYSKKGNGPEIKSLKYYDNLLGKFVNITPSESKNPVALLSLNPWRTDVYYNTETSKYEFLGLKYADLCFEKGGSYGISEVKYNKIREKEGIGKESEFKFTLYKNDLVLIKDTETNCQQIFRFWSRTGKDNPKSFEKHKIELKPYEKARFEKGEELEVLGKVPPSSNQLQKNMQIENLSIYKVKTDVLGNKHFIKKEGEEPKLKF

SEQ ID NO: 21866 - protein, 1121 aa, unidentified
  REGION 1..1121: note = Cas Enzyme sequence
MNGLVLGLDIGIASVGVGILEKNSGKIIHANSRLFPAATADNNVERRKNRQVRRLHRRKKHRGVRLKDLFEDYGFLTDFSKVSINLNPYRLRVDGLNQQLTNEELFIALKNIVKRRGISYLDDASEDGGTVSSDYGKAVEENRKLLAEQTPSQIQLERFEKYGQVRGDFTVVENGQKCRLINVFSTSAYRKEAERILRKQQEFNSKITDEFIEDCLKILTGKRKYYHGPGNEKSRTDYGRFRTDGTTLDNIFGILIGKCTFYPDEYRASKASYTAQEFNLLNDLNNLTVPTETKKLSEEQKKTIIEYAKLAKTLGASTLLKYIAKMIDASVDQIRGYRVDVNNKPEMHTFEVYRKMQSLETISVGELSRNVLDELAHILTLNTEREGIEEAINTKLKDSFSQDQVLELVQFRKNNSSLFSKGWHNFSLKLMMELIPELYETSEEQMTILTRLGKQKSKETSKRTKYIDEKELAEEIYNPVVAKSVRQAIKIINEATKKHGIFDNIVIEMARENNEEDAKKDYIKRQKANQDEKNAAMEKAAFQYNGKKELPDSIFHGHKELATKIRLWHQQGEKCLYTGKNIPISDLIHNQYKYEIDHILPLSLSFDDSLSNKVLVLATANQEKGQRTPFQALDSMDDGWSYREFKSYVKESKLLGNKKKEYLLTEEDISKIEVKQKFIERNLVDTRYSSRVVLNALQDFYKAHKFDTTISVVRGQFTSQLRRKWGLEKSRETYHHHAVDALIIAASSQLRLWKKQNNPLISYKEGQFVDSETGEIISLTDDEYKELVFKAPYDHFVDTLRSKTFEDSILFSYQVDSKFNRKISDATIYATRKAKLDKEKSEETYVLGKIKDIYSQAGYDAFIKIYNKDKSKFLMYHKDPQTFEKVIEEILRTYPSKELNDKNKEIPCNPFEKYRQENGPIRKYSKKSNGPEIKSLKYYDNKLGNHIDITPESSDNQVVLQSLKPWRTDVYFNHQTKKYELMGLKYSDLSFEKGSGKYSISNQKYNSIKRIEGIDEQSEFKFTLYKNDLILIKDSENNEQKLFRFNSRNDTAKHYIELKPYDKAKFDGEQELITILGNVAKGGRCLKGLNKSNISIFKVKTDVLGKKHIIKKEGDEPKLKF

SEQ ID NO: 21867 - protein, 1140 aa, unidentified
  REGION 1..1140: note = Cas Enzyme sequence
MNGLVLGLDIGIASVGVGILKKDSGEIIHTNSRLFSAATADSNIERRGHRGGKRLTRRKKHRSIRLHDLFEDFGLLTDFSKVSINLNPYQLRVQGLDNQLTNEELFIALKNIVKRRGISYLDDASEDGGTVSSDYGKAVEENRKLLAEQTPGQIQLDRFEKYGQVRGDFTVVENGEKRRLINVFTTSAYSKEAERILRKQQEFNKKITDEFIEDYLTILTGKRKYYHGPGNEKSRTDYGRYTTKKDPEGKYITLDNIFGILIGKCTFYPDEYRASKASYTAQEFNLLNDLNNLTVPTETKKLSEEQKKTIVEYAKTAKTLGASTLLKYIAKLIGASVDQIHGYRIDPNKKPEMHTFETYRKMQSLETIRVEELPRKVLDELAHILTLNTEREGIEEAINATLKDTFSQDQVLELVQFRKNNSSLFSKGWHNFSLKLMMELIPELYETSEEQMTILTRLGKQKSKETSKRTKYIDEKELTEEIYNPVVAKSVRQAIKIINEATKKYGIFDNIVIEMARENNEEDAKKEYIKRQKANLDEKNAAMEKAAFQYNGKKELPDNVFHGHKELATKIRLWHQQGEKCLYTGKNIPISDLIQNQYKYEIDHILPLSLSFDDSLSNKVLVLATANQEKRQRTPFQALDSMDDAWSYREFKSYVKDSKLLGNKKKEYLLTEEDISKIEVKQKFIERNLVDTRYSSRVVLNALQDFYKEHQFDTTISVVRGQFTSQLRRKWGLEKTRETYHHHAVDALIIAASSQLRLWKKQNNPLVSYKAEQFVDQETGEIISLSDDEYKELVFKAPYDHFVDTLKSKEFEDSILFSYQVDSKYNRKISDATIYATRKAKLDKENKEYTYTLGKIKDIYALGTKSPSKTGFYKFLDLYNKDKSQFLMFQKDRKTWDEVIEKIIEQYRPFKEYDENGKEVDFNPFEKYRIENGPIRKYSKKGNGPEIKSLKYYDNLLGKFVNITPSESKNPVALLSLNPWRTDVYYNTETSKYEFLGLKYADLCFEKGGSYGISEVKYNKIREKEGIGKESEFKFTLYKNDLVLIKDTETNCQQIFRFWSRTGKDNPKSFEKHKIELKPYEKARFEKGEELEVLGKVPPSSNQLQKNMQIENLSIYKVKTDVLGNKHFIKKEGEEPKLKF

SEQ ID NO: 21868 - protein, 1128 aa, unidentified
  REGION 1..1128: note = Cas Enzyme sequence
MSDLVLGLDIGIGSVGVGILNKVTGEIVHKNARIFPAAQAENNVERRTNRQGRRLTRRKKHRRVRLNHIFEESGLITDFTKVSINLNPYQLRVKGLTDELSNEELFIALKNMVKHRGISYLDDASDDGNSSVGDYAQIVKENSKQLETKTPGQIQLERYQKYGQLRGDFTIEEDGKKHRLINVFPTSAYRAEALRILQTQQEFNPQITDEFINSYLQILTGKRKYYHGPGNEKSRTDYGRYTTKKDSEDEYITLDNIFGILIGKCTFYPEEYRAAKASYTAQEFNLLNDLNNLTVPTETKKLSEEQKNQIITYVKNEKAMGPAKLFKYIAKLLACDVADIKGYRINKSDKPEIHTFEAYRKMKTLETIDVEQMEREKLDKLAYVLTLNTEREGIQEAIEHEFADGTFSQEQIDELVQFRKANSSIFGKGWHSFSVKLMMELIPELYATSEEQMTILTRLGKQKTTSSSNKTKYIDEKQLTEEIYNPVVAKSVRQAIKIVNAAIKEYGDFDNIVIEMARETNEDDEKKAIQKIQKANKDEKDAAMFKAANQYNGKAELPHSVFHGHKQLATKIRLWHQQGERCLYTGKTISIHDLINNPNQFEIDHILPLSITFDDSLANKVLVYATANQEKGQRTPYQALDSMDDAWSFRELKAFVRESKTLSNKKKEYLLTEEDISKFDVRKKFIERNLVDTRYASRVVLNALQEHFRARKIDTKVSVVRGQFTSQLRRHWGIDKTRDTYHHHAVDALIIAASSQLNLWKKQKNTLVSYSEDQLLDIETGELISDDEYKESVFKAPYQHFVDTLKSKEFEDSILFSYQVDSKFNRKISDATIYATRQAKVGKDKKDETYVLGKIKDIYSQAGYDAFIKIYQKDKSKFLMYRHDPQTFEKVIEPILENYPNKEMNEKGKEVPCNPFLKYKEEHGDYIRKYSKKGNGPEIKSLKYYDSKLGNHIDITPKNSNNKVVLQSVSPWRADVYFNKTTGKYEILGLKYADLQFEKGTGTYKISQEKYNDIKKKEGVDSDSEFKFTLYKNDLLLIKDTETKEQQLFRFLSRSMPNKKHYVELKPYSKDKFEKNETLIEILGPADKSGRCIKGLAKSNLSIFKVRTDILGNQHIIKNEGDKPKLDF

SEQ ID NO: 21869 - protein, 915 aa, unidentified
  REGION 1..915: note = Cas Enzyme sequence
ITDEFINRYLEILTGKRKYYHGPGNEKSRTDYGRYRTSGETLDNIFGILIGKCTFYPDEFRAAKASYTAQEFNLLNDLNNLTVPTETKKLSKEQKNQIINYVKNEKAMGPAKLFKYIAKLLSCDVADIKGYRIDKSGKAEIHTFEAYRKMKTLETLDIEQMDRETLDKLAYVLTLNTEREGIQEALEHEFADGSFSQKQVDELVQFRKANSSIFGKGWHNFSVKLMMELIPELYETSEEQMTILTRLGKQKTTSSSNKTKYIDEKLLTEEIYNPVVAKSVRQAIKIVNAAIKEYGDFDNIVIEMARETNEDDEKKAIQKIQKANKDEKDAAMLKAANQYNGKAELPHSVFHGHKQLATKIRLWHQQGERCLYTGKTISIHDLINNSNQFEVDHILPLSITFDDSLANKVLVYATANQEKGQRTPYQALDSMDDAWSFRELKAFVRESKTLSNKKKEYLLTEEDISKFDVRKKFIERNLVDTRYASRVVLNALQEHFRAHKIDTKVSVVRGQFTSQLRRHWGIEKTRDTYHHHAVDALIIAASSQLNLWKKQKNTLVSYSEDQLLDIETGELISDDEYKESVFKAPYQHFVDTLKSKEFEDSILFSYQVDSKFNRKISDATIYATRQAKVGKDKADETYVLGKIKDIYTQDGYDAFMKIYKKDKSKFLMYRHDPQTFEKVIEPILENYPNKQMNEKGKEVPCNPFLKYKEEHGYIRKYSKKGNGPEIKSLKYYDSKLGNHIDITPKDSNNKVVLQSVSPWRADIYFNNTTGKYEILGLKYADLQFEKGTGTYKISQEKYNDIKKKEGVDSDSEFKFTLYKNDLLLVKETETKEQQLFRFLSRTMPKQKHYVELKPYDKQKFEGGEALIKVLGNVANGGQCIKGLGKSNISIYKVRTDVLGNQHIIKNEGDKPKLDF

SEQ ID NO: 21870 - protein, 1121 aa, unidentified
  REGION 1..1121: note = Cas Enzyme sequence
MSDLVLGLDIGIGSVGVGILNKVTGEIIHKNSRIFPAAQAENNLVRRTNRQGRRLTRRKKHRRVRLNRLFEESGLITDFTKISINLNPYQLRVKGLTDELSNEELFIALKNMVKHRGISYLDDASDDGNSSIGDYAQIVKENSKQLETKTPGQIQLERYQTYGQLRGDFTVEKDGKKHRLINVFPTSAYRSEALRILQTQQEFNPQITDEFINRYLEILTGKRKYYHGPGNEKSRTDYGRYRTSGETLDNIFGILIGKCTFYPDEFRAAKASYTAQEFNLLNDLNNLTVPTETKKLSKEQKNQIINYVKNEKAMGPAKLFKYIAKLLSCDVADIKGYRIDKSGKAEIHTFEAYRKMKTLETLDIEQMDRETLDKLAYVLTLNTEREGIQEALEHEFADGSFSQKQVDELVQFRKANSSIFGKGWHNFSVKLMMELIPELYETSEEQMTILTRLGKQKTTSSSNKTKYIDEKLLTEEIYNPVVAKSVRQAIKIVNAAIKEYGDFDNIVIEMARETNEDDEKKAIQKIQKANKDEKDAAMLKAANQYNGKAELPHSVFHGHKQLATKIRLWHQQGERCLYTGKTISIHDLINNSNQFEVDHILPLSITFDDSLANKVLVYATANQEKGQRTPYQALDSMDDAWSFRELKAFVRESKTLSNKKKEYLLTEEDISKFDVRKKFIERNLVDTRYASRVVLNALQEHFRAHKIDTKVSVVRGQFTSQLRRHWGIEKTRDTYHHHAVDALIIAASSQLNLWKKQKNTLVSYSEDQLLDIETGELISDDEYKESVFKAPYQHFVDTLKSKEFEDSILFSYQVDSKFNRKISDATIYATRQAKVGKDKADETYVLGKIKDIYTQDGYDAFMKIYKKDKSKFLMYRHDPQTFEKVIEPILENYPNKQINEKGKEVPCNPFLKYKEEHGYIRKYSKKGNGPEIKSLKYYDSKLGNHIDITPKDSNNKVVLQSVSPWRADVYFNKTTGKYEILGLKYADLQFEKGTGTYKISQEKYNDIKKKEGVDSDSEFKFTLYKNDLLLVKDTETKEQQLFRFLSRTMPKQKHYVELKPYDKQKFEGGEALIKVLGNVANSGQCKKGLGKSNISIYKVRTDVLGNQHIIKNEGDKPKLDF

SEQ ID NO: 21871 - protein, 1121 aa, unidentified
  REGION 1..1121: note = Cas Enzyme sequence
MSDLVLGLDIGIGSVGVGILNKVTGEIIHKNSRIFPAAQAENNLVRRTNRQGRRLTRRKKHRRVRLNRLFEESGLITDFTKISINLNPYQLRVKGLTDELSNEELFIALKNMVKHRGISYLDDASDDGNSSVGDYAQIVKENSKQLETKTPGQIQLERYQTYGQLRGDFTVEKDGKKHRLINVFPTSAYRSEALRILQTQQEFNPQITDEFINRYLEILTGKRKYYHGPGNEKSRTDYGRYRTSGETLDNIFGILIGKCTFYPEEFRAAKASYTAQEFNLLNDLNNLTVPTETKKLSKEQKNQIINYVKNEKAMGPAKLFKYIAKLLSCDVADIKGYRIDKSGKAEIHTFEAYRKMKTLETLDIEQMDRETLDKLAYVLTLNTEREGIQEALEHEFADGSFSQKQVDELVQFRKANSSIFGKGWHNFSVKLMMELIPELYETSEEQMTILTRLGKQKTTSSSNKTKYIDEKLLTEEIYNPVVAKSVRQAIKIVNAAIKEYGDFDNIVIEMARETNEDDEKKAIQKIQKANKDEKDAAMLKAANQYNGKAELPHSVFHGHKQLATKIRLWHQQGERCLYTGKTISIHDLINNPNQFEVDHILPLSITFDDSLANKVLVYATANQEKGQRTPYQALDSMDDAWSFRELKAFVRESKTLSNKKKEYLLTEEDISKFDVRKKFIERNLVDTRYASRVVLNALQEHFRAHKIDTKVSVVRGQFTSQLRRHWGIEKTRDTYHHHAVDALIIAASSQLNLWKKQKNTLVSYSEDQLLDIETGELISDDEYKESVFKAPYQHFVDTLKSKEFEDSILFSYQVDSKFNRKISDATIYATRQAKVGKDKADETYVLGKIKDIYTQDGYDAFMKIYKKDKSKFLMYRHDPQTFEKVIEPILENYPNKQINEKGKEVPCNPFLKYKEEHGYIRKYSKKGNGPEIKSLKYYDSKLGNHIDITPKDSNNKVVLQSVSPWRADVYFNKTTGKYEILGLKYADLQFEKGTGTYKISQEKYNDIKKKEGVDSDSEFKFTLYKNDLLLVKDTETKEQQLFRFLSRTMPKQKHYVELKPYDKQKFEGGEALIKVLGNVANSGQCKKGLGKSNISIYKVRTDVLGNQHIIKNEGDKPKLDF

SEQ ID NO: 21872 - protein, 1120 aa, unidentified
  REGION 1..1120: note = Cas Enzyme sequence
MSDLVLGLDIGIGSVGVGILNKVTGEIIHKNSRIFPAAQAENNLVRRTNRQGRRLTRRKKHRRVRLNRLFEESGLITDFTKISINLNPYQLRVKGLTDELSNEELFIALKNMVKHRGISYLDDASDDGNSSVGDYAQIVKENSKQLETKTPGQIQLERYQTYGQLRGDFTVEKDGKKHRLINVFPTSAYRSEALRILQTQQEFNPQITDEFVNRYLEILTGKRKYYHGPGNEKSRTDYGRYRTNGETLDNIFGILIGKCTFYPEEFRAAKASYTAQEFNLLNDLNNLTVPTETKKLSKEQKNQIINYVKNEKAMGPAKLFKYIAKLLSCDVADIKGYRIDKSGKAEIHTFEAYRKMKTLETLDIEQMDRETLDKLAYVLTLNTEREGIQEALEHEFADGSFSQKQVDELVQFRKANSSIFGKGWHNFSVKLMMELIPELYETSEEQMTILTRLGKQKTTSSSNKTKYIDEKLLTEEIYNPVVAKSIRQAIKIVNAAIKEYGDFDNIVIEMARETNEDDEKKAIQKIQKANKDEKDAAMLKAANQYNGKAELPHSVFHGHKQLATKIRLWHQQGERCLYTGKTISIHDLINNPNQFEVDHILPLSITFDDSLANKVLVYATANQEKGQRTPYQALDSMDDAWSFRELKAFVRESKTLSNKKKEYLLTEEDISKFDVRKKFIERNLVDTRYASRVVLNALQEHFRAHKIDTKVSVVRGQFTSQLRRHWGIEKTRDTYHHHAVDALIIAASSQLNLWKKQKNTLVSYSEDQLLDIETGELISDDEYKESVFKAPYQHFVDTLKSKEFEDSILFSYQVDSKFNRKISDATIYATRQAKVGKDKADETYVLGKIKDIYTQDGYDAFMKIYKKDKSKFLMYRHDPQTFEKVIEPILENYPNKQMNEKGKEVPCNPFLKYKEEHGYIRKYSKKGNGPEIKSLKYYDSKLGNHIDITPKDSNNKVVLQSLKPWRTDVYFNKNTGKYEILGLKYSDMQFEKGTGKYSISKEQYENIKVREGVDENSEFKFTLYKNDLLLLKDSENGEQILLRFTSRNDTSKHYVELKPYNRQKFEGSEYLIKSLGTVVKGGRCIKGLAKSNISIYKVRTDVLGNQHIIKNEGDKPKLDF

SEQ ID NO: 21873 - protein, 1128 aa, unidentified
  REGION 1..1128: note = Cas Enzyme sequence
MSDLVLGLDIGIGSVGVGILNKVTGEIIHKNSRIFPAAQAENNLVRRTNRQGRRLTRRKKHRRVRLNHLFEESGLITDFTKVSINLNPYQLRVKGLIDELSNEELFIALKNMVKHRGISYLDDASDDGNSSVGDYAQIVKENSKQLETKTPGQIQLERYQKYGQLRGDFTVEEDGKKHRLINVFPTSAYRAEALRILQTQQESNPQITDEFINRYLEILTGKRKYYHGPGNEKSRTDYGRYTTKKDSKDEYITLDNIFGILIGKCTFYPEEFRAAKASYTAQEFNLLNDLNNLTVPTETKKLSEEQKNLIINYVKNEKAMGPAKLFKYIAKLLSCDVADIKGYRIDKSDKAEIHTFEAYRKMKTLETLDVKKMTREELDKLAYVLTLNTEREGIQEALEHEFADGRFGQEQVDELVQFRKANSSIFGKGWHNFSVKLMMELIPELYATSEEQMTILKRLGKQKTTSSSNKTKYIDEKQLTEEIYNPVVAKSVRQAIKIVNAAIKEYGDFDNIVIEMARETNEDDEKKAIQKIQKANKDEKDAAMLKAANQYNGKAELPHSVFHGHKQLATKIRLWHQQGERCLYTGKTISIHDLINNPNQFEIDHILPLSITFDDSLANKVLVYATANQEKGQRTPYQALDSMDDAWSFRELKAFVRDSKALSNKKKEYLLTEEDISKFDVRKKFIERNLVDTRYASRVVLNALQEHFRAHKTDTKVSVVRGQFTSQLRRHWGIDKTRDTYHHHAVDALIIAASSQLNLWKKQKNTLVSYSEDQLLDTETGELISDDEYKESVFKAPYQHFVDTLKSKEFEDSILFSYQVDSKFNRKISDATIYATRQAKVGKDKKDETYVLGKIKDIYTQDGYDAFMKIYKKDKSKFLMYRHDPQTFEKVIEPILENYPNKEMNGKGKEVPCNPFLKYKEEHGDNIRKYSKKGNGPEIKSLKYYDSKLGNHIDITPKDSNNKVVLQSVSPWRADVYFNKNTGKYEILGLKYADLQFEKGTGTYKISQEKYDEIKQKEGVDSDSEFKFTLYKNDLLLIKDTETKEQQLFRFLSRTMPNKKHYVELKPYDKQKFEGGEALIKVLGNVANGGQCVKGLGKSNISIYKIRTDVLGNQHIIKNEGDKPKLDF

SEQ ID NO: 21874 - protein, 1023 aa, unidentified
  REGION 1..1023: note = Cas Enzyme sequence
ELSNEELFIALKNMVKHRGISYLDDASDDGNSSVGDYAQIVKENSKQLETKTPGQIQLERYQTYGQLRGDFTVEKDGKKHRLINVFPTSAYRSEALRILQTQQEFNPQITDEFVNRYLEILTGKRKYYHGPGNEKSRTDYGRYRTNGETLDNIFGILIGKCTFYPDEFRAAKASYTAQEFNLLNDLNNLTVPTETKKLSKEQKNQIINYVKNEKAMGPAKLFKYIAKLLSCDVVDIKGYRIDKSGKAEIHTFEAYRKMKTLETLDIEQMDRETLDKLAYVLTLNTEREGIQEALEHEFADGSFSQKQVDELVQFRKANSSIFGKGWHNFSVKLMMELIPELYETSEEQMTILKRLGKQKTTSSSNKTKYIDEKLLTEEIYNPVVAKSVRQAIKIVNAAIKEYGDFDNIVIEMARETNEDDEKKAIQKIQKANKDEKDAAMLKAANQYNGKAELPHSVFHGHKQLATKIRLWHQQGERCLYTGKTISIHDLINNPNQFEVDHILPLSITFDDSLANKVLVYATANQEKGQRTPYQALDSMDDAWSFRELKAFVRESKTLSNKKKEYLLTEEDISKFDVRKKFIERNLVDTRYASRVVLNALQEHFRAHKIDTKVSVVRGQFTSQLRRHWGIEKTRETYHHHAVDALIIAASSQLNLWKKQKNTLVSYSEEQLLDIETGELISDDEYKESVFKAPYQHFVDTLKSKEFEDSILFSYQVDSKFNRKISDATIYATRQAKVGKDKKDETYVLGKIKDIYTQDGYDAFMKIYKKDKSKFLMYRHDPQTFEKVIEPILENYPNKEMNEKGKEVPCNPFLKYKEEHGYIRKYSKKGNGPEIKSLKYYDSKLGNYIDITPKNSNNKVVLQSVSPWRADVYFNKTTGKYEILGLKYADLQFEKGTGTYKISQEKYNDIKKKEGVDSDSEFKFTLYKNDLLLVKDTETKEQQLFRFLSRTMPKKKHYVELKPYDKQKFEGGEALIKVLGNVANSGQCIKGLAKSNISIYKVRTDVLGNQHIIKNEGDKPKLDF

SEQ ID NO: 21875 - protein, 1133 aa, unidentified
  REGION 1..1133: note = Cas Enzyme sequence
MSDLVLGLDIGIGSVGVGILNKVTGEIIHKNACIFPAAQAENNVERRTNRQGRRLTRRKKHRRVRLNNLFEESGLITDFTNVSINLNPYQLRVNGLTDELSNEELFIALKNMVKHRGISYLDDASDDGNSSVGDYAQIVKENSKQLETKTPGQIQLERYQKYGQLRGDFTVEEDGKKHRLINVFPTSAYRAEALRILQTQQEFNPKITDEFINRYLEILTGKRKYYHGPGNEKSRTDYGRYRTSGETLDNIFGILIGKCTFYPEEFRAAKASYTAQEFNLLNDLNNLTVPTETKKLNEEQKNQIITYVKNEKAMGPAKLFKYIAKLLACDVADIKGYRIDKSDKPEIHTFEAYRKMKTLETIDVEQMEREKLDKLAYVLTLNTEREGIQEAIEHEFADGTFSQEQVDELVQFRKSNSSIFGKGWHNFSVKLMMELIPELYATSEEQMTILTRLGKQKRTSSSNKTKYIDEKRLTEEIYNPVVAKSVRQAIKIVNAAIKEYGDFDNIVIEMAREMNEDDEKKAIKKIQEANKSEKDAAMRKAANQYNGKAELPHSVFHGHKQLATKIRLWHQQGERCLYTGKTISIHDLINNPNQFEIDHILPLSITFDDSLANKVLVYATANQEKGQRTPYQALDSMDDAWSFRELKAFVRESKTLSNKKKEYLLTEEDISKFDVRKKFIERNLVDTRYASRVVLNALQEHFRAHKTDTKVSVVRGQFTSQLRRHWGIEKTRDTYHHHAVDALIIAASSQLNLWKKQKNTLVSYSEDQLLDIETGELISDDEYKESVFKAPYQHFVDTLKSKDFEDSILFSYQVDSKFNRKISDATIYATRKAKLDKEKKEYTYTLGKIKDIYALGTKTPSKTGFYKFLDLYKKDKSQFLMYQKDRKTWDEVIEKILEQYRPFKEKDKNGKEVDFNPFEKYRIENGPIRKYSRKGNGPEIKSLKYYDNLLGRFVDITPSESKNPVALLSLNPWRTDVYYNTETRKYEFLGLKYADLCFEKGSSYGISKVKYNKIREKEGIGKNSEFKFTLYKNDLILIKDTETNRQQIFRFWSRTGKDNPKSFEKHKIELKPYEKARFEKGEELEVLGKVPPSSNQLQKNMQIENLSIYKVRTDVLGNQHIIKNEGDKPKLDF

SEQ ID NO: 21876 - protein, 1128 aa, unidentified
  REGION 1..1128: note = Cas Enzyme sequence
MSDLVLGLDIGIGSVGVGILNKVTGEIIHKNSRIFPAAQAENNVERRTNRQGRRLTRRKKHRRVRLNHLFEESGLITDFTKVSINLNPYQLRVKGLIDELSNEELFIALKNMVKHRGISYLDDASDDGNSSVGDYAQIVKENSKQLETKTPGQIQLERYQKYGQLRGDFTVEEDGKKHRLINVFPTSAYRSEALRILQTQKEFNPQITDEFINRYLEILTGKRKYYHGPGNEKSRTDYGRYTTKKDSENEYITLDNIFGILIGKCTFYPEEYRAAKASYTAQEFNLLNDLNNLTVPTETKKLSEEQKNQIINYVKNEKAMGPAKLFKYIAKLLSCDVADIKGYRIDKSDKAEIHTFEAYRKMKTLETIDFEKMSRDQLDKLAYVLTLNTEREGIQEALEHEFADGNFIQEQIDELVQFRKANSSIFGKGWHNFSVKLMMELIPELYATSEEQMTILTRLGKQKTTSSSNKTKYIDEKLLTEEIYNPVVAKSVRQAIKIVNAAIKEYGDFDNIVIEMARETNEDDEKKAIQKIQKANKDEKDAAMLKAANQYNGRAELPHSVFHGHKQLATKIRLWHQQGERCLYTGKTISIHDLINNPNQFEIDHILPLSITFDDSLANKVLVYATANQEKGQRTPYQALDSMDDAWSFRELKAFVRESKSLSNKKKEYLLTEEDISRFDVRKKFIERNLVDTRYASRVVLNALQEHFRAHKTDTKVSVVRGQFTSQLRRHWGIEKTRDTYHHHAVDALIIAASSQLNLWKKQKNTLVNYSENQLLDIETGELISDDEYKESVFKAPYQHFVDTLKSKEFEDSILFSYQVDSKFNRKISDATIYATRQAKVGKDKKDETYVLGKIKDIYSQTGYDAFIKIYQKDKSKFLMYRHDPQTFEKVIEPILENYPNKEMNEKGKEVPCNPFLKYKEEHGDYIRKYSKKGNGPEIKSLKYYDSKLGNHIDITPKDSNNKVVLQSVSPWRADVYFNKTTGKYEILGLKYADLQFEKGTGTYKISQEKYNVIKKKEGVDSDSEFKFTLYKNDLLLIKDTETKEQQLFRFLSRTKPNVKHYVELKPYDKQKFEGNESLINVLGAVAKGGQCQKGINKPNISIYKVRTDVLGNQHIIKNEGDKPKLDF

SEQ ID NO: 21877 - protein, 1137 aa, unidentified; identical to SEQ ID NO: 21195
  REGION 1..1137: note = Cas Enzyme sequence

SEQ ID NO: 21878 - protein, 1143 aa, unidentified
  REGION 1..1143: note = Cas Enzyme sequence
MWGDFMYNIGLDIGIASVGWAVIENESGSIIDLGVRLFSSRNADNNAERREKRSSRRLIRRRVTRLSDAKKVLSRAGFTQEDMYNHASPYEIRVRGLESKLERGEIYRAVTHIVKRRGISYLDEDSLDAKSEGQSFKDEVNRNARLLQEFTPGQIQLKRLKEGGKARTGYNDQNEYQLNIFTVGAYAKELERILTKQQEFYPEITEDFIQSFVRQGTGEKAGLIYRKRPYYHGPGNAANNSQYGRWAQYHENGRPANNIFDQLIGKDLIGEIRASGISLSAQKFNLLNDLNNLTINREESKLSTVEKNMILQYLMNDEVKTFGPKNLAKLLELEMKDIRGWRVDKNDKPQIHNMGPYRTWKNVFAESGIELGDLPIDTVDAIAKIITLNTDLDAVEQTIALELPDADPNLKATILDKFHQLKVKGSNATWHSFSSKLIGILIPELINTSEEQNTIIERLKIKPELRNKFANLPHIPIEDITDEIFNPTASKSVRQALRVFNQLIDRYGKENIENVVIEMPRDKNEDDQKKVIADIQKNNEKRKNDGKNYFLAKSGWTEEQFEANIRKGKFAAKLNYYYEQDGRCAYSGAPIPPENLLNENTEIDHIIPLSISLDDSINNKVLVTSTANQVKAQRSPKQAFDESGAAMGQTWDEFKSWVLDRKYKKYKRQLLLFEGDIFNPETRNKFVARNLNDTRYASREVLNAVQSFFSGPENSTKIQVVNGSFTHTLRKKWGNVMEKSRDTHHHHAVDAVLCAATPGIRVDKFKFVEGQDGVPYMLDQDTGELIKYHEYKKMNLYDRSTYTPKWEGFIERLIPTVLFPCINFSHQVDRKANRKISDATLYSTRVQENVTIKKGKEIKTEESYIIGKIKDIYSVEGWKAFDKNKEKLLMKEIDPKTYEKLIEISTQYPAKVEVQDQSGKTKSIDISPFKRYCEDNDVPYVTKYSKKGKGPAIKSLKYFDKKLGTHINITKDEIGRDIDKTNHNKQVVLLSTNPWRTDVYFEPSDGSYRLLGIKYNHLKFSEEKYGIPRNLYESLKDEEGISRNAEFRFSLYRKDGIQITDGEDTVEGLFHSRTLPAKPNYFEMKPINKAKWENKEYLNLFGNVSPSGRFLKGLKKNFIIRKFYTDYLGKRYFVDQEKLTGII

SEQ ID NO: 21879 - protein, 1120 aa, unidentified
  REGION 1..1120: note = Cas Enzyme sequence
MEMNGKVLGLDIGISSIGVGIIDKETGEIVHSNSYLFSAANAENNKERRMFRGSRRSTRRKRHRVQRVEDLFEKYGMDIDISTIPLNVNPYEIRVRGLNNELTIEELFIALKNLVKRRGISYLDDVDDSKNISAYKKALEVNKNSLESKTPGQIQLERLENYGQLRGDFTVRDSNGQEIRIMNVFPTSAYQKEAECILRRQSEWNVCINDNFISEYIEILTGKRKYYVGPGNEKSRTDYGIFRKNGETWQNLFSILIGRCSYYPDEYRAAKASYSAQEYNLLNDLNNLIVPTETKKLSTNQKREIVEFVKSKEAVGAAEVLREVAKLVGCKKDEIKGYRVDSKGSAEVHTFEVYRVMKKYLASVEVDSLEKDTFDLLAHILTINTDKESITEAIRSDLQESFNEQQIEELVAFRKNHSNIFNKGWHNFSIKLLRELIPELYATSEEQMTILTRLGKRKREKKTRKTKFIDENLIVEEIYNPVVSKSVRQAIKIIKEATKRYGIFDEIVVEMARDKNEKDAKNRVKDIQKNNRDEKEAALLEAAREYHGKDKLPTSVYHDHKNLNLKIRLWYQQEKKCAYTGKTIKIKDLIHSKHLYEIDHILPLSLTFDDSISNKVLVLKTANQEKSQRTPYQSIDTMTSAWTYHEFKEYVKNNKKFSGKKKEYLLFEEDIIKYDVRSRFISRNLVDTRYASRVVLNALQDYYREKNAQTRVSVVRGQFTAQLRRAWGITKSRDTYHHHAVDAVIVAAASQLSLWKSKSNLLYKHSENLAVDLNTGEAWQVTEQEYKELVFSPPYKRLRETLNSNEFENSILFSYQVDTKTNRKVADATIYATRQVRLGKDREVTTYTLGKVKDIYSEEGWKGFLKQYKKDKTKFLLYHKDRKTWDCVIESIMETYYSREEEKKSHSNPFEKYKIENGPVRKYSKKGHGPIIKDLKYYSDRLGSHISITPEGSRNKVALLSIKPWRTDVYFNDQSKMYEIMGLKYSDLSFEKGTGEYKISRERYKEIKERDGVSRDAEFKFSLYRNNLILIKDSQSGEEQILRFHAKNESNMHYVELKPLNKARFEGEEPLISSLGKVAKSGQCLKGIQKPNLSLYKVITDVLGNKYIIKEEGDSPKRIG

SEQ ID NO: 21880 - protein, 1121 aa, unidentified
  REGION 1..1121: note = Cas Enzyme sequence
LDRTEVNIGFDIGISSVGWSVVATKSGRILESGVSLFSGASAAKNEERRNFRQSRRLLRRRKNRISDLKKYLKEQSFTYNGELLNENPYEIRVKGLTEKLSKEEIALALLHIVKRRGVSYDLGDIEEEGTTGSYKEGVKKNQKLLKEKTPAEIQFQRLKKFHKVRGQIAIDENDVLLNVFPNHAYVDEAQQILYTQQEFYPEINETFINQVTDFISRKRDYFIGPGSEKSRTDYGIYRTDGTTLQNLFSILIGKDKIFPDEFRAAGNSYTAQVYNLLNDLNNLAIDDTETGKLTKQQKEKIIMELKTTEKSVNMMKLIAKTAGVTVEQISRYRINRDGKPEIHNMAVYRKIRKVFLELGYEINEWPSQLLDELGDALSLNTENGEIRRILTDNLANKYKILDQQLINLIIENKNAFTLSTNQKWHRFSYKTMKILIPELLETNKEQMTILTEMGLMKKDQRNYVGKNKIDSEALLENLYNPVVRKSTRQTMKLFNTLLKKYPNIAYVVIEMPREDDEDKARRDYVKFQKDNEKEKDAALKNFIMESGKSEAEVIAKYRQSKKFRSKVRLWYQQMGRCLYSGKAMPAERVFRDDHFTDIDHVIPLSVSFDDGMNNKVLCLAEMNRQKDKQTPYAFFNAGHGQGFQAMNAMLKNNNRISSAKKRNLLFTENLNDLEVRKRFIERNLVDTRYASRVVLNELQQFVKAKQLDTKVTVIRGKFTSKLREKWNINKSRDTHHHHAVDAAVIAVSPMLNLWEKGASIIPNKVGENVIDIKTGEIITDHDYEADVYELPYAKFLEQIPKVKKDIKFRHQVDKKKNRKVSDATIYTTRKAKVGKDKEETDYVLGTIKDIYSLEGYVSFKKIYNKDKAKFLMARIDPKTFEKLEKIVAEYPESIEVVQDNGKVDVQKISPFELYRKDNGFVTKFAKKNNGPAVKSLKYYDSKLGSSIDVTPDNAKNKKVILQSLKPWRTDVYFNEENQEYEIMGLKYSDLKFGKNGKYGVPKVRYEEIKQEEEISEGSKFLFSLYRGDRIKVTNELGENLDLLFSSRTLPAQKGYVELKPIDKTKFDGKEKVSFYGTVTPNGQFVKKFAKKGYKILKLNTDELGNTYIENGEKEPSDILDM

SEQ ID NO: 21881 - protein, 1117 aa, unidentified
  REGION 1..1117: note = Cas Enzyme sequence
MANYVLGLDIGIGSVGVGLIEKETGEIIHKSVNLFPSGDAASNVERRGFRGAKRIKRRKTHRIKRTEDLFDKYDIDVDLHSVPINLNPYEIRVRGLNEKLSLTELFVALKNMVKHRGISYLDDAIDEDNAATSGSDYKKAIEINARELKNKTPGEIQLERLEKYGQVRGDFSVKLEDGTERRLINVFSTSEYRKEAERILKTQQQFYPELTDEFIADYLEILTKKRKYYHGPGNEKSRTDYGRYRTNGETLDNIFSILIGKCTYYPDEFRAAKASYSAQEFNLLNDLNNLTVPTETKKLSLEQKEEIIQFVKDAKTCGAKNILSKIAKMIGCKADDITGVREDKDHKAEMHSFEAYRKMKQLETIDVTALTREQLDQLGRILTLNTEREGILESIHEYLPDTFTNEQIDELIQFRKKNTTLLNKGWHSFSLKLLNELIPELYHTSEEQMTILTRLGKQKPKNESAKTKYIDGELITEEIYNPVVAKAVRQTIKIVNKILQEHGEIDTIVVEMARDKNDEDQKKRIQEGQKKNKNEKDAAILAAAMDYSNSKELPSTVFHGHKDLALKIRLWYQQEKRCAYSGREIPIAQLINNQGGYEIDHILPLSLTFDDGLDNKVLVEHIANQEKGQRTPFQAIPLLTNSWSWGEFKHYVINNSRFSKKKREYLLFEEDINKFEVRSKFIARNLVDTRYASRVVLNALQDFFKQRGANTKIAVVRGQFTAQLRRKWGIEKTRDTYHHHAIDALVIAASSQLNLWRKTKNTLIRYSENELLDTETGELISDNQYKENVFQAPYDNFTKVLKSKELEDSILFAYQQDSKVNRKISDATIYTTRKRGDEEITVAKIKDIYSIEGYDEFLKVYQKDPSKFLMAQHDPVTFEKVIKVILENYPDKEVNESGKEVKVSPFKKYYDEHGFVRKYSRKGNGPVIKQLKYLDKAVGKHIDITPENSSRTVALKSLKPWRSDVYFNPETKRYEIMGLKYSDLRFQKGGDYGITKEKYDVIKEREKISENSVFKFTLYKNNLVLVKDTETNEQQIFRFGSRNETNFNYVELKPYDKAFFEPKEKLVKFGNVSASGRFLKSINIDNLSLYKIETNILGKKYIIKNEGEDPQLTFKNF

SEQ ID NO: 21882 - protein, 1312 aa, unidentified
  REGION 1..1312: note = Cas Enzyme sequence
VQNGFLGITVSSEQVGWAVTNPKYELERASRKDLWGVRLFDKAETAEDRRMFRTNRRLNQRKKNRIHYLRDIFHEEVNQKDPNFFQQLDESNFCEDDRTVEFNFDTNLYKNQFPTVYHLRKYLMETKDKPDIRLVYLAFSKFMKNRGHFLYKGNLGEVMDFENSMKGFCESLEKFNIDFPTLSDEQVKEVRDILCDHKIAKTVKKKNIITITKVKSKTAKAWIGLFCGCSVPVKVLFQDIDEEIVTDPEKISFEDASYDDYIANIEKGVGIYYEAIVSAKMLFDWSILNEILGDHQLLSDAMIAEYNKHHDDLKRLQKIIKGTGSRELYQDIFINDVSGNYVCYVGHAKTMSSADQKQFYTFLKNRLKNVNGISSEDAEWIDTEIKNGTLLPKQTKRDNSVIPHQLQLREFELILDNMQEMYPFLKENREKLLKIFNFVIPYYVGPLKGVVRKGESTNWMVPKKDGVIHPWNFDEMVDKEASAECFISRMTGNCSYLFNEKVLPKNSLLYETFEVLNELNPLKINGEPISVELKQRIYEQLFLTGKKVTKKSLTKYLIKNGYDKDIELSGIDNEFHSNLKSHIDFEDYDNLSDEEVEQIILRITVFEDKQLLKDYLNREFVKLSEDERKQICSLSYKGWGNLSEMLLNGITVTDSNGVEVSVMDMLWNTNLNLMQILSKKYGYKAEIEHYNKEHEKTIYNREDLMDYLNIPPAQRRKVNQLITIVKSLKKTYGVPNKIFFKISREHQDDPKRTSSRKEQLKYLYKSLKSEDEKHLMKELDELNDHELSNDKVYLYFLQKGRCIYSGKKLNLSRLRKSNYQNDIDYIYPLSAVNDRSMNNKVLTGIQENRADKYTYFPVDSEIQKKMKGFWMELVLQGFMTKEKYFRLSRENDFSKSELVSFIEREISDNQQSGRMIASVLQYYFPESKIVFVKEKLISSFKRDFHLISSYGHNHLQAAKDAYITIVVGNVYHTKFTMDPAIYFKNHKRKDYDLNRLFLENISRDGQIAWESGPYGSIQTVRKEYAQNHIAVTKRVVEVKGGLFKQMPLKKGHGEYPLKTNDPRFGNIAQYGGYTNVTGSYFVLVESMEKGKKRISLEYVPVYLHERLEDDPGHKLLKEYLVDHRKLNHPKILLAKVRKNSLLKIDGFYYRLNGRSGNALILTNAVELIMDDWQTKTANKISGYMKRRAIDKKARVYQNEFHIQELEQLYDFYLDKLENGVYKNRKNNQAELIHNEKEQFMELKTEDQCVLLTEIKKLFVCSPMQADLTLIGGSKHTGMIAMSSNVTKADFSIIAEDPLGLRNKVIYSHMGEK

SEQ ID NO: 21883 - protein, 1312 aa, unidentified
  REGION 1..1312: note = Cas Enzyme sequence
VQNGFLGITVSSEQVGWAVTNPKYELERASRKDLWGVRLFDKAETAEDRRMFRTNRRLNQRKKNRIHYLRDIFHEEVNQKDPNFFQQLDESNFCEDDRTVEFNFDTNLYKNQFPTVYHLRKYLMETKDKPDIRLVYLAFSKFMKNRGHFLYKGNLGEVMDFENSMKGFCESLEKFNIDFPTLSDEQVKEVRDILCDHKIAKTVKKKNIITITKVKSKTAKAWIGLFCGCSVPVKVLFQDIDEEIVTDPEKISFEDASYDDYIANIEKGVGIYYEAIVSAKMLFDWSILNEILGDHQLLSDAMIAEYNKHHDDLKRLQKIIKGTGSRELYQDIFINDVSGNYVCYVGHAKTMSSADQKQFYTFLKNRLKNVNGISSEDAEWIDTEIKNGTLLPKQTKRDNSVIPHQLQLREFELILDNMQEMYPFLKENREKLLKIFNFVIPYYVGPLKGVVRKGESTNWMVPKKDGVIHPWNFDEMVDKEASAECFISRMTGNCSYLFNEKVLPKNSLLYETFEVLNELNPLKINGEPISVELKQRIYEQLFLTGKKVTKKSLTKYLIENGYDKDIELSGIDNEFHSNLKSHIDFEDYDNLSDEEVEQIILRITVFEDKQLLKDYLNREFVKLSEDERKQICSLSYKGWGNLSEMLLNGITVTDSNGVEVSVMDMLWNTNLNLMQILSKKYGYKAEIEHYNKEHEKTIYNREDLMDYLNIPPAQRRKVNQLITIVKSLKKTYGVPNKIFFKISREHQDDPKRTSSRKEQLKYLYKSLKSEDEKHLMKELDELNDHELSNDKVYLYFLQKGRCIYSGKKLNLSRLRKSNYQNDIDYIYPLSAVNDRSMNNKVLTGIQENRADKYTYFPVDSEIQKKMKGFWMELVLQGFMTKEKYFRLSRENDFSKSELVSFIEREISDNQQSGRMIASVLQYYFPESKIVFVKEKLISSFKRDFHLISSYGHNHLQAAKDAYITIVVGNVYHTKFTMDPAIYFKNHKRKDYDLNRLFLENISRDGQIAWESGPYGSIQTVRKEYAQNHIAVTKRVVEVKGGLFKQMPLKKGHGEYPLKTNDPRFGNIAQYGGYTNVTGSYFVLVESMEKGKKRISLEYVPVYLHERLEDDPGHKLLKEYLVDHRKLNHPKILLAKVRKNSLLKIDGFYYRLNGRSGNALILTNAVELIMDDWQTKTANKISGYMKRRAIDKKARVYQNEFHIQELEQLYDFYLDKLENGVYKNRKNNQAELIHNEKEQFMELKTEDQCVLLTEIKKLFVCSPMQADLTLIGGSKHTGMIAMSSNVTKADFSIIAEDPLGLRNKVIYSHMGEK

SEQ ID NO: 21884 - protein, 1312 aa, unidentified
  REGION 1..1312: note = Cas Enzyme sequence
VQNGFLGITVSSEQVGWAVTNPKYELERASRKDLWGVRLFDKAETAEDRRMFRTNRRLNQRKKNRIHYLRDIFHEEVNQKDPNFFQQLDESNFCEDDRTVEFNFDTNLYKNQFPTVYHLRKYLMETKDKPDIRLVYLAFSKFMKNRGHFLYKGNLGEVMDFENSMKGFCESLEKFNIDFPTLSDEQVKEVRDILCDHKIAKTVKKKNIITITKVKSKTAKAWIGLFCGCSVPVKVLFQDIDEEIVTDPEKISFEDASYDDYIANIEKGVGIYYEAIVSAKMLFDWSILNEILGDHQLLSDAMIAEYNKHHDDLKRLQKIIKGTGSRELYQDIFINDVSGNYVCYVGHAKTMSSADQKQFYTFLKNRLKNVNGISSEDAEWIDTEIKNGTLLPKQTKRDNSVIPHQLQLREFELILDNMQEMYPFLKENREKLLKIFNFVIPYYVGPLKGVVRKGESTNWMVPKKDGVIHPWNFDEMVDKEASAECFISRMTGNCSYLFNEKVLPKNSLLYETFEVLNELNPLKINGEPISVELKQRIYEQLFLTGKKVTKKSLTKYLIKNGYDKDIELSGIDNEFHSNLKSHIDFEDYDNLSDEEVEQIILRITVFEDKQLLKDYLNREFVKLSEDERKQICSLSYKGWGNLSEMLLNGITVTDSNGVEVSVMDMLWNTNLNLMQILSKKYGYKAEIEHYNKEHEKTIYNREDLMDYLNIPPAQRRKVNQLITIVKSLKKTYGVPNKIFFKISREHQDDPKRTSSRKEQLKYLYKSLKSEDEKHLMKELDELNDHELSNDKVYLYFLQKGRCIYSGKKLNLSRLRKSNYQNDIDYIYPLSAVNDRSMNNKVLTGIQENRADKYTYFPVDSEIQKKMKGFWMELVLQGFMTKEKYFRLSRENDFSKSELVSFIEREISDNQQSGRMIASVLQYYFPESKIVFVKEKLISSFKRDFHLISSYGHNHLQAAKDAYITIVVGNVYHTKFTMDPAIYFKNHKRKDYDLNRLFLENISRDGQIAWESGPYGSIQTVRKEYAQNHIAVTKRVVEVKGGLFKQMPLKKGHGEYPLKTNDPRFGNIAQYGGYTNVTGSYFVLVESMEKGKKRISLEYVPVYLHERLEDDPGHKLLKEYLVDHRKLNHPKILLAKVRKNSLLKIDGFYYRLNGRSGNALILTNAVELIMDDWQTKTANKISGYMKRRAIDKKARVYQNEFHIQQLEQLYDFYLDKLENGVYKNRKNNQAELIHNEKEQFMELKTEDQCVLLTEIKKLFVCSPMQADLTLIGGSKHTGMIAMSSNVTKADFSIIAEDPLGLRNKVIYSHMGEK

SEQ ID NO: 21885 - protein, 1312 aa, unidentified
  REGION 1..1312: note = Cas Enzyme sequence
VQNGFLGITVSSEQVGWVVTNPKYELERASRKDLWGVRLFDKAETAEDRRMFRTNRRLNQRKKNRIHYLRDIFHEEVNQKDPNFFQQLDESNFCEDDRTVEFNFDTNLYKNQFPTVYHLRKYLMETKDKPDIRLVYLAFSKFMKNRGHFLYKGNLGEVMDFENSMKGFCESLEKFNIDFPTLSDEQVKEVRDILCDHKIAKTVKKKNIITITKVKSKTAKAWIGLFCGCSVPVKVLFQDIDEEIVTDPEKISFEDASYDDYIANIEKGVGIYYEAIVSAKMLFDWSILNEILGDHQLLSDAMIAEYNKHHDDLKRLQKIIKGTGSRELYQDIFINDVSGNYVCYVGHAKTMSSADQKQFYTFLKNRLKNVNGISSEDAEWIDTEIKNGTLLPKQTKRDNSVIPHQLQLREFELILDNMQEMYPFLKENREKLLKIFNFVIPYYVGPLKGVVRKGESTNWMVPKKDGVIHPWNFDEMVDKEASAECFISRMTGNCSYLFNEKVLPKNSLLYETFEVLNELNPLKINGEPISVELKQRIYEQLFLTGKKVTKKSLTKYLIKNGYDEDIELSGIDNEFHSNLKSHIDFEDYDNLSDEEVERIILRITVFEDKQLLKDYLNREFVKLSEDERKQICSLSYKGWGNLSEMLLNGITVTDSNGVEVSVMDMLWNTNLNLMQILSKKYGYKAEIERYNKEHEKNIYNREDLMDYLNIPPAQRRKVNQLITIVKSLKKRCGVPNKIFFKVSREHQDDPKRTSSRKEQLKYLYKSLKSEDEKHLMKELDELNGHELSNDKVYLYFLQKGRCIYSGKKLNLSRLRKSNYQNDIDYIYPLSAVNDRSMNNKVLTGIQENRADKYTYFPVDPEIQKKMKGFWMELVLQGFMSKEKYFRLSRENDFSENELVSFIEREISDNQQSGRMIASVLQYYFPESKIVFVKEKLISSFKRDFHLISSYGHNHLQAAKDAYITIVVGNVYHTKFTMDPAIYFKNHKRKDYDLNRLFLENISRDGQIAWESGPYGSIQTVRKEYAQNHIAVTKRVVEVKGGLFKQMPLKKGHGEYPLKTNDPRFGNIAQYGGYTNVTGSYFVLVESMEKGKKRISLEYVPVYLHERLEDDPGHKLLKEYLVDHRKLNHPKILLAKVRKNSLLKIDGFYYRLNGRSGNALILTNAVELIMDDWQTKTANKISGYMKRRAIDKKARVYQNEFHIQELEQLYDFYLDKLENGVYKNRKNNQAELIHNEKEQFMELKTEDQCVLLTEIKKLFVCSPMQADLTLIGGSKHTGMIAMSSNVTKADFSIIAEDPLGLRNKVIYSHMGEK

SEQ ID NO: 21886 - protein, 1199 aa, unidentified
  REGION 1..1199: note = Cas Enzyme sequence
MENTNKKYVLGLDIGISSVGWGLIELNENNEPYKIKDTGVRIFSPGENVKTGESKNIARREKRGTRRILRRRKFRINKIRYLLAEYNFLKKSNKNVISDIYEDLKEQYNTLIDNYYKEKDINPFELKTEALNRKLSNEELAIILVHYAKHRGYKSNRDEDNDDSGKVKSSIKENEKIMHEKNYRTISEMFALDEKFNDRIHNTTGDYRMFVNREMVLNDIENVLNCQIKFGLIDEKFKEEYIKIWSSQRHYSKGPGGNSKYGGNLIEKMTGICKYTGEPRAPKQAPSTEIFNALTLMVNLRYKSNENYEKLTEEEINKILELALTKDSVTYKNLKEILDKETITIKGLELSKKEWIDCLNNFKVKILKLGKNDEVNLNELTKEEQEKFEKIKQEKLFSKKFVELKTTSAFRKEFSRAFGKNIWEKLLDNIEILDEIAVILTNYKTEEDIIEQVENSEIIDNNLIECILHLPNLKDHNNLSLSLIRNLNKLMKTGMLYNEAMSELGYNFSDLTINKEKFDILLPINSENEISNQRVIRSLAQTRKIINAIIKKYGMPYKINIETARELAKSLDERKKIKRNQEENKENNDKIKKELCELLPNKFQNENKVSSFDLLKYKLWKEQQNICPYSLEKITIEELYDNGIVQVDHILPYSRTFDDSYFNKTLVKAKENQIKGNRTPYEWFKSDRERWENYPMYKSYINSLNIPDKKKDNYLLTNLTQEIENEMRNQNLNDTKYITRYLTSFLKAYLNVPLVDSVNGTITSKLRTRWGLNNITHSLQSPSYYIKDVDIENDIKKNRENHLHHAMDACIIACSNKSIIQKITNYEKYKRYFENKVDVSIESLLKNNYIYKCEETDDYIDEETGEIIKTESLEEYYKDLIDNNYLVKNNKNRYTVLFPQPYENFTNELKAKIFERNESQQKFMLEGLHTYTEDELKEVAPLIPVFAKNKVKGSLHGETLYGYKKENDNEFITKRASVISKSFKQDDLENIINKDNGSKEVYETLKEWLSNYDNGEEAYKNSGYPKDKTEKIIKKVKLQLLYEGKGHNINNKIVDKENIQKILVFKDIETKALYFCGLDRFDILNLKKNKDYEITLWKSQGVSLKESYNKLNTKYTKLLELAKNDFVEIEKNNGNKCYCYINGFTDGKLDIKSYIGDNYDIVGNNKLFNKFYSGGQYQISTTSIKNIIKIKLNTLGKIE

SEQ ID NO: 21887 - protein, 1188 aa, unidentified
  REGION 1..1188: note = Cas Enzyme sequence
MLKENSYRLGLDLGTSSIGVAVYRTGEEGEILSLEHLDSYIFGEPVAPKEMVTLNTGRRSARLIRRQVERKAARLKKIEHIAKSLGVTKNDSMNDRHDVIELRALAVEKKITLPQLIRVFCHIVKNRGYKGTISDGKVDKKLKTTKEFLSGNKTLGQFLWEEKQKAGKRRPWRKIEEDGTFIYRSMVEKEFERIWQEQLKYYPQLGGNYGVWGDNMFPDYPNQKEIPLHDAFHSAMFYQRPIKWELDTVGNCPIFPDEKRASCAQIAYQHYRLAKEIANLRYVLPQKREIHSLTPAQQEDIFNYIDSNAQEYARANKTVSFEKIYKQLGLPSGARFTVHRGSKTGLKGNTTLSAFEQVGLLNEWAELTDKVQELVVEFLSNITTMSDLADNTPAYIRKKFLDDSNKKDPSLVANIPATEQERSQAADFVILMREHHQEKPFFEDFKLEGGRSSYSVKGLVLLKEAVCRGEFVQSNEEDFVEKIAGEHKIYTGKLRTVKQILDQESINDPVISRALTEFHRVMTYIIHKFGNPQEVVIELSREMKNSLAHRQELEKQNEARSKERLAAIEFLKEYNLLVSSRNIEKYLLWKEQNEYCPYSGEKISVGQAFDEKLTQIDHIIPQAIGGPNLFENKVLVLTGENKEKSNRLPYEWKFKEDIDAYLSYQSDKKTKRKKGETVEVNFGYQSPLINFVRRLESLAQNKPNHYWSMRDKKYRYTQKGKLMLRKINNLLMTPAELKEEFSNRQGQETAWIGKVVLEWCRDICPKERVIASQGLLTAHLRRELHFDKVLPLIRIDEKKPLYNKDNKEIPAEQWKELFTESHLHFSQAMALKEDFEKFCQSLEKVPVTDSDKQEAFEAFCSLQRKLLQFNKRCDHRHHAVDAAIIGLCNRSLVQRANTHHSKYGTLELIKGYDSTGTRVKEKDIPSFAVGDIPQYARLRKQVQKRLTNYVVWHKPDHYPSGKFFDETAYKVEKDKSGVERFVKRAELGSFLKSSEKDTLKNLEKLLFADTIKEAIISQFKERLAQGLSQEEALCGKKDDPQDGIYYRGNKVKKVKYMYLVGRGIREFDSNADKKIKNKEDKTTYKAYQNYGYACMDFDAKTGKRLELIPLWQYQQKKDIPEGVVRIFAGDLLMNKDTKEFYKVQKFSAQLGLVMRVTTEIQPNDVCVGNLKNYILVTTREDISKLKNE

SEQ ID NO: 21888 - protein, 1380 aa, unidentified
  REGION 1..1380: note = Cas Enzyme sequence
VKKILGIDLGTKSIGWALVNEAENNDEKSSIIRLGVRVISYDNFVSTDTRKESKEPEKDFAGGKGISPNAGRTLKRCMRRNLQRYKLRRENLIEILTEHAFISDESILSENGNHTTFETCRLRAKAATEEISLEQFARVLLMINKKRGYKSSRKAKNQDDGQIIDGMEVAQKLYNEELTPGQLCLQLLEKGQKTLPDFYRSDLQSEFDRIWTKQKDFYPEILTNELKGDLVGKNKKQTWAVFAKPFQLVGIKRETKYEDQKKENYAWRVNALSVKMGPEELAIILQEINAQISNSSGYLGKISDRSKELFFYKQTVGQYQMAVLDKNPNASLKNMVFYRQDYLDEFNKIWDVQSKFHKELDETLKQEIRDVVIFYQRKLKSQNGLIGFCEFESRKKEFEVDGKKKVKIIGSRVIPRSSPLFQEFKIWQILNNIELTNKNTGEINLLSPEQKVSLFQKLQNVERLSDKEALNVLFDKSAKNYKLNYEKIEGNKTRSAISNILGDSDLLSFDFEKEQDSQPLYKLWHLLYSYEDDNSASGNDRLIEILGQTFKLSTEIAKKLANISFQDDYGSLSAKAIRKILPFLKEGHQYDVACEYAGYKHSASSLTKEEIEHKTLKNKLEILPKNALRNPVVEKILNQMANVTNAIIETYGKPDEIRIELARELKKSAKEREQMTLAISENTKDREEIVKKLKNEFGLHNPSGKDIIRYKLYRELAANGYKTLYSDTYIAQEELFSKNFDIEHIIPQARLFDDSFANKTLEKRDVNIKKGSTTAYDFVRNEYGEDKAKEYLLKVEKLMKDKKISKTKYKHLIWSEKDIPDSFIDRDIRETQYIAKYAKSMLNDLVKYVVSTTGSITDRLREDWQLIDVMKELNWDKYQNLGLTEEYTNEEGHKIRKIKDWTKRNDHRHHAMDALTVAFSKRSIIQYLNNLSARITRKCGCGYEKYGLNTEEYTDWTCPECGKRYFTRKDTNIIYAIERNELYRNDKGKLIFKPPFALNEFRAEAKKQLENTLISIKARNKVVTQNINTSRKKSGTNKKIQQTPRGQLHNETIYGSQKIYVANEEAVNAKFDETKISTVSRPVYREALLKRLRENGNDPKKAFTGKNSLAKNPIYLDGTHTKQVPEKVKTVSLETIYTIRKEISPDMKLDKVIDEKIKLILKKRLEEFNGDAKKAFTNLDEKPIWQNEEKGIAIKCVTIKGISNAEPLHTKKDKDGNDIPDKNGNKQPIDFISTANNHHVAIYRDSDGNLKEKMVSFLEAVRRANAGLPIIDRGYKQSEGWTFLFTMKQNEYFVFPNEQTGFNPKEIDLMNPEIYHLISPNLFRVQKIATKDYCFRHHLETSVANDLKDITFKRLASLSFTENVVKVRINHIGQIIHVGE

SEQ ID NO: 21889 - protein, 1312 aa, unidentified
  REGION 1..1312: note = Cas Enzyme sequence
VQNGFLGITVSSEQVGWAVTNPKYELERASRKDLWGVRLFDKAETAEDRRMFRTNRRLNQRKKNRIHYLRDIFHEEVNQKDPNFFQQLDESNFCEDDRTVEFNFDTNLYKNQFPTVYHLRKYLMETKDKPDIRLVYLAFSKFMKNRGHFLYKGNLGEVMDFENSMKGFCESLEKFNIDFPTLSDEQVKEVRDILCDHKIAKTVKKKNIITITKVKSKTAKAWIGLFCGCSVPVKVLFQDIDEEIVTDPEKISFEDASYDDYIANIEKGVGIYYEAIVSAKMLFDWSILNEILGDHQLLSDAMIAEYNKHHDDLKRLQKIIKGTGSRELYQDIFINDVSGNYVCYVGHAKTMSSADQKQFYTFLKNRLKNVNGISSEDAEWIDTEIKNGTLLPKQTKRDNSVIPHQLQLREFELILDNMQEMYPFLKENREKLLKIFNFVIPYYVGPLKGVVRKGESTNWMVPKKDGVIHPWNFDEMVDKEASAECFISRMTGNCSYLFNEKVLPKNSLLYETFEVLNELNPLKINGEPISVELKQRIYEQLFLTGKKVTKKSLTKYLIENGYDKDIELSGIDNEFHSNLKSHIDFEDYDNLSDEEVEQIILRITVFEDKQLLKDYLNREFVKLSEDERKQICSLSYKGWGNLSEMLLNGITVTDSNGVEVSVMDMLWNTNLNLMQILSKKYGYKAEIEHYNKEHEKTIYNREDLMDYLNIPPAQRRKVNQLITIVKSLKKTYGVPNKIFFKISREHQDDPKRTSSRKEQLKYLYKSLKSEDEKHLMKELDELNDHELSNDKVYLYFLQKGRCIYSGKKLNLSRLRKSNYQNDIDYIYPLSAVNDRSMNNKVLTGIQENRADKYTYFPVDSEIQKKMKGFWMELVLQGFMTKEKYFRLSRENDFSKSELVSFIEREISDNQQSGRMIASVLQYYFPESKIVFVKEKLISSFKRDFHLISSYGHNHLQAAKDAYITIVVGNVYHTKFTMDPAIYFKNHKRKDYDLNRLFLENISRDGQIAWESGPYGSIQTVRKEYAQNHIAVTKRVVEVKGGLFKQMPLKKGHGEYPLKTNDPRFGNIAQYGGYTNVTGSYFVLVESMEKGKKRISLEYVPVYLHERLEDDPGHKLLKEYLVDHRKLNHPKILLAKVRKNSLLKIDGFYYRLNGRSGNALILTNAVELIMDDWQTKTANKISGYMKRRAIDKKARVYQNEFHIQELEQLYDFYLDKLENGVYKNRKNNQAELIHNEKEQFMELKTEDQCVLLTEIKKLFVCSQMQADLTLIGGSKHTGMIAMSSNVTKADFSIIAEDPLGLRNKVIYSHMGEK

SEQ ID NO: 21890 - protein, 1312 aa, unidentified
  REGION 1..1312: note = Cas Enzyme sequence
VQNGFLGITVSSEQVGWAVTNPKYELERASRKDLWGVRLFDKAETAEDRRMFRTNRRLNQRKKNRIHYLRDIFHEEVNQKDPNFFQQLDESNFCEDDRTVEFNFDTNLYKNQFPTVYHLRKYLMETKDKPDIRLVYLAFSKFMKNRGHFLYKGNLGEVMDFENSMKGFCESLEKFNIDFPTLSDEQVKEVRDILCDHKIAKTVKKKNIITITKVKSKTAKAWIGLFCGCSVPVKVLFQDIDEEIVTDPEKISFEDASYDDYIANIEKGVGIYYEAIVSAKMLFDWSILNEILGDHQLLSDAMIAEYNKHHDDLKRLQKIIKGTGSRELYQDIFINDVSGNYVCYVGHAKTMSSADQKQFYTFLKNRLKNVNGISSEDAEWIDTEIKNGTLLPKQTKRDNSVIPHQLQLREFELILDNMQEMYPFLKENREKLLKIFNFVIPYYVGPLKGVVRKGESTNWMVPKKDGVIHPWNFDEMVDKEASAECFISRMTGNCSYLFNEKVLPKNSLLYETFEVLNELNPLKINGEPISVELKQRIYEQLFLTGKKVTKKSLTKYLIKNGYDKDIELSGIDNEFHSNLKSHIDFEDYDNLSDEEVEQIILRITVFEDKQLLKDYLNREFVKLSEDERKQICSLSYKGWGNLSEMLLNGITVTDSNGVEVSVMDMLWNTNLNLMQILSKKYGYKAEIEHYNKEHEKTIYNREDLMDYLNIPPAQRRKVNQLITIVKSLKKRCGVPNKIFFKVSREHQDDPKRTSSRKEQLKYLYKSLKSEDEKHLMKELDELNGHELSNDKVYLYFLQKGRCIYSGKKLNLSRLRKSNYQNDIDYIYPLSAVNDRSMNNKVLTGIQENRADKYTYFPVDPEIQKKMKGFWMELVLQGFMSKEKYFRLSRENDFSENELVSFIEREISDNQQSGRMIASVLQYYFPESKIVFVKEKLISSFKRDFHLISSYGHNHLQAAKDAYITIVVGNVYHAKFTMDPAIYFKNHKRKDYDLNRLFLENISRDGQIAWESGPYGSIQTVRKEYAQNHIAVTKRVVEVKGGLFKQMPLKKGHGEYPLKTNDPRFGNIAQYGGYTNVTGSYFVLVESMEKGKKRISLEYVPVYLHERLEDDPGHKLLKEYLVDHRKLNHPKILLAKVRKNSLLKIDGFYYRLNGRSGNALILTNAVELIMDDWQTKTANKISGYMKRRAIDKKARVYQNEFHIQELEQLYDFYLDKLENGVYKNRKNNQAELIHNEKEQFMELKTEDQCVLLTEIKKLFVCSPMQADLTLIGGSKHTGMIAMSSNVTKADFSIIAEDPLGLRNKVIYSHMGEK

SEQ ID NO: 21891 - protein, 921 aa, unidentified
  REGION 1..921: note = Cas Enzyme sequence
  REGION 902..909: note = misc_feature - Xaa can be any naturally occurring amino acid
VQNGFLGITVSSEQVGWAVTNPKYELERASRKDLWGVRLFDKAETAEDRRMFRTNRRLNQRKKNRIHYLRDIFHEEVNQKDPNFFQQLDESNFCEDDRTVEFNFDTNLYKNQFPTVYHLRKYLMETKDKPDIRLVYLAFSKFMKNRGHFLYKGNLGEVMDFENSMKGFCESLEKFNIDFPTLSDEQVKEVRDILCDHKIAKTVKKKNIITITKVKSKTAKAWIGLFCGCSVPVKVLFQDIDEEIVTDPEKISFEDASYDDYIANIEKGVGIYYEAIVSAKMLFDWSILNEILGDHQLLSDAMIAEYNKHHDDLKRLQKIIKGTGSRELYQDIFINDVSGNYVCYVGHAKTMSSADQKQFYTFLKNRLKNVNGISSEDAEWIDTEIKNGTLLPKQTKRDNSVIPHQLQLREFELILDNMQEMYPFLKENREKLLKIFNFVIPYYVGPLKGVVRKGESTNWMVPKKDGVIHPWNFDEMVDKEASAECFISRMTGNCSYLFNEKVLPKNSLLYETFEVLNELNPLKINGEPISVELKQRIYEQLFLTGKKVTKKSLTKYLIKNGYDKDIELSGIDNEFHSNLKSHIDFEDYDNLSDEEVEQIILRITVFEDKQLLKDYLNREFVKLSEDERKQICSLSYKGWGNLSEMLLNGITVTDSNGVEVSVMDMLWNTNLNLMQILSKKYGYKAEIEHYNKEHEKTIYNREDLMDYLNIPPAQRRKVNQLITIVKSLKKTYGVPNKIFFKVSREHQDDPKRTSSRKEQLKYLYKSLKSEDEKHLMKELDELNGHELSNDKVYLYFLQKGRCIYSGKKLNLSRLRKSNYQNDIDYIYPLSAVNDRSMNNKVLTGIQENRADKYTYFPVDPEIQKKMKGFWMELVLQGFMSKEKYFRLSRENDFSENELVSFXXXXXXXXNVKFQIISKVEE

SEQ ID NO: 21892 - protein, 1130 aa, unidentified
  REGION 1..1130: note = Cas Enzyme sequence
MKNYRIGVDVGDRSVGLAAIEFNDDGLPIQKLALVTFRHDGGLDPTKNKTPMSRKETRGIARRTMRMNRERKRRLHKLDKVLEGLGYTVPEGPEPETYEAWTSRALLASIKLASADELNEHLVRAVRHMARHRGWANPWWSLDQLERASQEPSETFEIILARARELFGEKVPANPTLGMLGALAANNEVLLRPRDKKKRKTGYVRGTPLMVAQVRQGDQLAELRRICEVQGIEDQYEALRLGVFDHKHPYVPKERVGKDPLNPSTNRTIRASLEFQEFRILDSVANLRVRTGSRAKRELTEAEYDAAVEFLMDYTDKEQPSWADVAEKIGVPGNRLVAPVLEDVQQKTAPFDRSSAAFEKAMGKKTEARQWWESTDDDQLRSLLIAFLVDATKDTEEAAAEAGLSELYMSWPAEEREALSNIDFEKGRVAYSQETLSKLSEYMHEYRVGLHEARKAVFGVDDTWRPPLDKLEEPTGQPAVDRVLTILRRFVLDCERQWGRPRAITVEHARTGLMGPTQRQKILNEQKKNRADNERIRDELRESGVDNPSRAEVRRHLIVQEQECQCLYCGTMITTTTSELDHIVPRAGGGSSRRENLAAVCRDCNAKKKRELFYAWAGPVKSQETIERVRQLRAFKDSKKAKMFKNQIRRLKQTEADEPIDERSLASTSYAAVAVRERLEQHFNEGLALDDKSRVVLDVYAGAVTRESRRAGGIDERILLRGERDKNRFDVRHHAVDAAVMTLLNRSVALTLEQRSQLRRTFYEQGLDKLDRDQLHPGEDWRNFTGLYPASQKKFLEWKDAATALGNVLAEAIEDDSIAVVSPLRLRPQNGSVHDETIDPVKKLTLGSAWSADDVKRIVDPEIYLAMKDALGKLKALPEDSARSLELSDGRFVEADDEVLFFSKKAASILTPRGAAEIGASIHHARLYSWLTKKGELKVGMLRVYGAEFPWLMRESGSRDILHMPIHPGSQSFRDMQDTTRKAVESGEAVEFAWITQNDELEFDPDDYIANGGKDELKQFLEFMPECRWRVDGFKDAGRVRMRPALLSREQLPSEIQDRLDTKSLSKGETVLVKALDDGLYISIGGLLHLESMKVIRRNNLGFPRWRGNGTLPTSFEVRSSALRALGAEG

SEQ ID NO: 21893 - protein, 1128 aa, unidentified
  REGION 1..1128: note = Cas Enzyme sequence
MKNYRIGVDVGDRSVGLAAIEFDDAGFPIQKLALVTFRHDGGLDPINNPKSRKETRGEARRRMRMTRRRKQRLCDLDKVLENLGYTVPEGPEPETYEAWTSRALLASIKLASADELNEHLVRAVRHMARHRGWANPWWSLDQLERASQEPSETFEIILARARELFGEKVPANPTLGMLGALAANNEVLLRPRAEKKKKTGYVRGTPLLDAQVRQIDQVAELRRICEVQGIEEQYETLRNAIFAHKVAYVPTERVGKDPLAPSKNRTIRASLEFQEFRILDSVANLRVRTDSRAKRELTEGEYDAAVEFLMGYTAKEQPSWADVAEEIGVPGNRLIAPVLEDVQQKTAPFDRSSAAFEKAMSKKTEARQWWESNDDDQLRSLFIMFLADATNDTEEAAAVAGLPELYMSWPAEEREALSNIDFEKGRVAYSHETLSKLSEYMHEYRVGLHEARKAVFGVDDTWRPPLAKLEEPTGQPTVDRVLTILRRFVLDCERQWGRPRAITVEHARIGLMGPVQRQKILNEQKKNRGENERIRNELRESGVENPNRAEVRRHLIVQEQECQCLYCGTMITTTTSELDHIVPRAGGGSSRRENLAAVCRYCNGKKNRKLFYEWAGPVKMQETIDRVRQLRAFKDSKKAKMFKNQIRRLKQTEADEPIDERSLASTSYAAVAVRERLEQHFNEGLTLDDKSRVVLDVYAGSVTRESRRAGGIDERILLRGEHDKNRFDVRHHAVDAAVMTLLNRSVALTLEQRSQLRRTFYEQGLDKLDRDQLKPEEDWRNFTGLYEASQRKFSEWKETATALGNVLAEAIEDDSIAVVSPLRLRPQNGRAHKDTIVAVKKQTLGSVWSADAVKRIVDLEIYLAMKAALGKLKKLPEDSARSLELRDGRLVEADDEVLFFPKNAASILTPRGVAEIGESIHHARLYGWLTKKGELKVGMLRVYGAEFPWLMRESGSHDVLRMPIHPGSQSFRDMQDRTRKAVESGEAVEFAWITQNDELEFDPDDYIANGGKDELRQFLEFIPERRWRVDGFKDSGRLRIRPALLSREQLPSEIQTRLDTKSLSKGETVLVKALDDGLYISIGGLLPLESMKVIRRNNLGFPRWRGNGNLPTSFEVRSSALRALGVEG

SEQ ID NO: 21894 - protein, 1131 aa, unidentified
  REGION 1..1131: note = Cas Enzyme sequence
MKNYRIGVDVGDRSVGLAAIEFDDAGFPIQKLTLVTFRHDGGLDPTENKSPKSRKETRGVARRTMRMNRERKRRLRKLDKVLENLGYTVPEGPEPETYEAWTSRALLASIKLANPDELNEHLVRAVRHMARHRGWANPWWSLDQLEKASREPSETFEIILARARELFGEKVPDNPTLGMLGALADNNEVLLRPRRSYNAKEANNPKKAEKYLADYGTQPLMAAKVRQEDQLAELRRICEVQGIENQYEVLREAVFTHVRPYVPKDRVGKDPLNPSEIRASRASLEFQEFRILDAVANLRVRTDSRAKRELSESEYDTAVDFLMSYTGKEQPSWADVAEEIGVPGNRLIAPVLDDVQQKTAPFDRSSAAFEKAMKAKTEARKWWESNDDDQLRSLFIMFLADATDDTSQAAIEAGLYELFESWPEEEREALSNIAFEAGRAGYSATTLSKLSEYMHEHRVGLHEARKAVFGVDDTWRPPLAKLEEQTGQPTVDRVLTILRRFVLDCERQWGRPQAVTVEHARTGLMGPAQRQDILREQKKNREENERIRNELRESGVENPKRVDVRRHLVVQEQECQCLYCGTMITTTTSELDHIVPRAGGGSSRRENLAAVCRYCNAMKSNTPFYRWASPEKLKETIDRVRQLKAFKDPKKAKMLKNQIRRLKQTEADDPIDERSLASTSYAAVAVRERLEQHFNEGLAPDDKSRVALDVYAGAVTRESRRAGGIDERILLRGERDKNRFDVRHHAIDAAVMTLLNRSVALTLEQRHQMKRESAETKRENGWRDFTGLYPASQEKFLEWRKAATVLGDLLAEAIEDDSIAVVSPLRLRPQNGAVHKDTIAAVKSQALGSAWLADEVKRIVDPEIYLAMKDLLGKKKELPEDPERVLALSDGRYVDSNEDVLVFPKNAASILTPRGVAEIGDSIHHARLYGWLTKKGELKVGMLRVYGAEFPWLMRESGSRDILRMPIHPGSQSFRGMQDGVRKVVESGEAVELAWITQNDELEFDPADYIAHGGKDELRQFLEFMPECRWRVDGFTTNYQLRLRPVLLSREQLPAEIQSRVATKTLSEDEQVLLKALDRGLFIAVGGLFSLESMKVIRRNNLGFPRWCGNGNLPTSFEVRSSALRALGVEG

SEQ ID NO: 21895 - protein, 1131 aa, unidentified
  REGION 1..1131: note = Cas Enzyme sequence
MKNYRIGVDVGDRSVGLAAIEFDDDGLPIQKLALVTFRHDGGLDPTKNKTPMSRKETRGVARRTMRMNRERKRRLRKLDNVLAGLGYTVPEGPEPETYEAWTSRALLASIKLASADELNEHLVRAVRHMARHRGWANPWWSLDQLEKASQEPSETFDIILARARELFGEKVPANPTLGMLGALAANNEVLLRPRDKKKRKTGYVRGTPLMVAQVRQGDQLAELRRICEVQGIEDQYEALRLGVFDHKHPYVPKERVGKDPLNPSKNRTIRASLEFQEFRILDSVANLRVRTGSRAKRELTEAEYDAAVDFLMSYTDKDQPSWADVAEKIGVPGNRLVAPVLEDVQQKTAPFDRSSAAFEKAMGKKTEARQWWESTDDDQLRSLLIAFLVDATKDTEEAAAEAGLSELYMSWPAEEREALSNIDFEKGRVAYSQETLSKLSEYMHEYRVGLHEARKAVFGVDDMWRPPLDKLEEPTGQPAVDRVLTILRRFVLDCERQWGRPRAITVEHARTGLMGPTQRQKILNEQKKNRADNERIRDELRESGVDNPSRAEVRRHLIVQEQECQCLYCGTMITTTTSELDHIVPRAGGGSSRRENLAAVCRACNAKKKRELFYAWAGPVKSQETIERVRQLRAFKDSKKAKIFKNQIRRLKQTEADEPIDERSLASTSYAAVAVRERLEQHFNEGLALDDKSRVVMDVYAGAVTRESRRAGGIDERILLRGERDKNRFDVRHHAVDAAVMTLLNRSVALTLEQRSQLRRTFYEQGLDKLDRDQLHPGEDWRNFTGLYPASQKKFLEWKDAATALGNVLAEAIEDDSIAVVSPLRLRPQNGSVHDETIDPVKKLTLGSAWSADDVKRIVDPEIYLAMKDALGKLKALPEDSARSLELSDGRFVEADDEVLFFSKKAASILTPRGAAEIGASIHHARLYSWLTKKGELKVGMLRVYGAEFPWLMRESGSRNVLSMPIHPGSQSFRGMQDGVRKVVESGEAVEFAWITQNDELEFDPADYIAHGGDDDLRRFLECMPECRWRIDGFYDVRRLRIRPALLSREQFPVDIQRNLDEKKPLTVEQQVIVKSLETGLAISLGNLMGLETMRVIRRNNLGFPRWRGNGNLPTSFEVRSSALHALGVES

SEQ ID NO: 21896 - protein, 1131 aa, unidentified
  REGION 1..1131: note = Cas Enzyme sequence
MKNYRIGVDVGDRSVGLAAIEFDDAGFPIQKLALVTFRHDGGLDPTENKSPKSRKETRGVARRTMRMNRRRKQRLRDLDKVLENLGYTVPEGPEPETYEAWTSRALLASIKLASADELNEHLVRAVRHMARHRGWANPWWSLDQLEKASQEPSETFEIILARARELFGEKVPANPTLGMLGALAANNEVLMRPRRNYNAKEANNPKKAGKYLADYGTQPLMAAKVRQEDQLAELRRICEVQGIEDQYEALREAVFTHVRPYVPKDRVGKDPLNPSEIRASRASLEFQEFRILDAVANLRVRTDSRAKRELSESEYDTAVDFLMSYTGKEQPSWADVAEEIGVPGNRLIAPVLEDVQQKTAPFDRSSAAFEKAMKAKTEARKWWESNDDDQLRSLFIMFLADATDDTAEAAVEAGLYELFESWPEEEREALSNIAFESGRAGYSATTLSKLSEYMHEHRVGLHEARKAVFGVDDTWRPPLAKLEEQTGQPTVDRVLTILRRFVLDCERQWGRPQAITVEHARTGLMGPAQRQDILREQKKNREENERIRNELRESGVENPKRVDVRRHLVIQEQECQCLYCGTMITTTTSELDHIVPRAGGGSSRRENLAAVCRYCNAMKSNTPFYRWASPEKLKETIDRVRQLKAFKDPKKAKMLKNQIRRLKQTEADDPIDERSLASTSYAAVAVRERLEQHFNEGLAPDDKSRVVLDVYAGAVTRESRRAGGIDERILLRGEHDKNRFDVRHHAIDAAVMTLLNRSVALTLEQRHQLKREFNETKRENGWRDFTGLYPASQEKFLEWRKAATVLGDLLAEAIEDDSIAVVSPLRLRPQNGAVHKDTIAAVKKQTLGSAWSADTVKRIVDPEIYLAMKDALGKLKELPEDSARTLELSDGRYIEADDEVLFFPKNAASILTPRGVAEIGESIHHARLYGWLTKKGELKVGMLRVYGAEFPWLMRESGSRNVLSMPIHPGSQSFRGMQDGVRKVVESGEAVEFAWITQNDELEFDPADYIAHGGKDGLRQFLEFMPESRWRVDGLTTNYQLLLRPAMLSREQLPSDLQEKMVAKTLTEDETLLLKALERGLSIAVNSVLPLESLKVIRRNNLGFPRWRGNGNLPTSFEVRSSALRALGVEG

SEQ ID NO: 21897 - protein, 1125 aa, unidentified
  REGION 1..1125: note = Cas Enzyme sequence
MSADSLNYRIGVDVGDRSVGLAAIEFDDDGFPIKKLAMVTFRHDGGMDPATGKTPKSRKETAGVARRTMRMRRRKKKRLKDLDKKLRDLGYFVPRDEEPQTYEAWSSRARLAESRFEDPHERGEHLVRAVRHMARHRGWRNPWWSFSQLEEASQEPSETFGRILERAQHEWGERVSDNATLGMLGALAANNNILLRPRRYEHNPKTGKNAEKLNVRGQEPILLDKVRQEDVLAELRRICKVQGIEDQYPELAHAVFTQVRPYVPTERVGKDPLQPMKIRASRASLEFQEFRIRDAVANLRIRVGGSERRPLTEEEYDRAVDYLMEYSDTTPPTWGEVADELEIAENTLIAPVIDDVRLNVAPYDRSSAIVEAKLKRKTQARQWWDDDANLDLRSQLILLVSDATDDTARVAENSGLLEVFESWSDEEKQTLQDLKFDSGRAAYSIDTLNKLNAYMHEHRVGLHEARQNVFGVSDTWRPPRDRLDEPTGQPTVDRVLTIVRRFILDCERAWGRPQKIVVEHARTGLMGPSQRADVLKEIARNRNANERIRQELREGGIEAPNRADIRRNSIIQDQESQCLYCGKEIGVLTAELDHIVPRAGGGSSKRENLAAVCRACNARKGSRPFAVWAGPARLERTIQRLRELQAFKTKSKKRTLNAIIRRLKQREEDEPIDERSLASTSYAATSIRERLEQHFNDDLPDGFAPVAVDVYGGSLTRESRRAGGIDKSIMLRGQSDKNRFDVRHHAIDAAVMTLLNPSVAVTLEQRRMLKQENDYSSPQGQHDNGWRDFIGRGEAPQSKFLHWKKTAVVLADLISEAIEQDTIPVVNPLRLRPQNGSVHKDTVEAVLERAVGDSWTDKQVSRIVDPNTYIAFLSLLGKKKELDADHQRLVSVSAGVKLLADERVQIFPEEAASILTPRGVVKIGDSIHHARLYGWKNQRGDIQVGMLRVFGAEFPWFMRESGVKDILRVPIPQGSQSYRDLAATTRKFIENGQATEFGWITQNDEIEISAEEYLATDKGDILSDFLTVLPENRWKVVGIGDNRRFKIRPLLLSNEIIPDTLNGRSIKSEERDLIVSVLDKGVRVVASTLLTLPSTKIIRRNNLGIPRWRGNGHLPTSLDIQRAAT

SEQ ID NO: 21898 - protein, 1132 aa, unidentified
  REGION 1..1132: note = Cas Enzyme sequence
MSADSLNYRIGVDVGDRSVGLAAIELDDDGFPLKKLAMVTFRHDGGKDPATGKTPKSRKETAGVARRTMRMRRRKKKRLKDLDKKLRDLGYFVPRDEEPQTYEAWSSRARLAESRFEDPHERGEHLVRAVRHMARHRGWRNPWWSFSQLEEASQEPSETFGRILERAQHEWGERVSDNATLGMLGALAANNNILLRPRRYEHNPKTGKNAEKLNVRGQEPILLDKVRQEDVLAELRRICKVQGIEDQYPELAHAVFTQVRPYVPTERVGKDPLQPMKIRASRASLEFQEFRIRDAVANLRIRVGGSERRPLTEEEYDRAVDYLMEYSDTTPPTWGEVADELEIAENTLIAPVIDDVRLNVAPYDRSSAIVEAKLKRKTQARQWWDDDANLDLRSQLILLVSDATDDTARVAENSGLLEVFESWSDEEKQTLQDLKFDSGRAAYSIDTLNKLNAYMHEHRVGLHEARQNVFGVSDTWRPPRDRLDEPTGQPTVDRVLTIVRRFILDCERAWGRPQKIVVEHARTGLMGPSQRADVLKEIARNRNANERIRQELREGGIEAPNRADIRRNSIIQDQESQCLYCGKEIGVLTAELDHIVPRAGGGSSKRENLAAVCRACNASKGSRPFAVWAGPARLERTIQRLRELQAFKTKSKKRTLNAIIRRLKQREEDEPIDERSLASTSYAATSIRERLEQHFNDDLPDGFAPVAVDVYGGSLTRESRRAGGIDKSIMLRGQSDKNRFDVRHHAIDAAVMTLLNPSVAVTLEQRRMLKQENDYSSPRGQHDNGWRDFIGRGEASQSKFLHWKKTAVVLADLISEAIEQDTIPVVNPLRLRPQNGSVHKDTVEAVLERTVGDSWTDKQVSRIVDPNTYIAFLSLLGRKKELDADHQRLVSVSAGVKLLADERVQIFPEEAASILTPRGVVKIGDSIHHARLYGWKNQRGDIQVGMLRVFGAEFPWFMRESGVKDILRVPIPQGSQSYRDLAATTRKFIENGQATEFGWITQNDEIEISAEEYLATDKGDILSDFLGILPEIRWKVTGIEDNRRIRLRPLLLSSEAIPNMLNGRLLTQEEHDLIALVINKGVRVVVSTFLALPSTKIIRRNNLGIPRWRGNGHLPTSLDIQRAATQALEGRD

SEQ ID NO: 21899 - protein, 1132 aa, unidentified
  REGION 1..1132: note = Cas Enzyme sequence
MSADSLNYRIGVDVGDRSVGLAAIEFDDDGFPIKKLAMVTFRHDGGMDPATGKTPKSRKETAGVARRTMRMRRRKKKRLKDLDKKLRDLGYFVPRDEEPQTYEAWSSRARLAESRFEDPHERGEHLVRAVRHMARHRGWRNPWWSFSQLEEASQEPSETFGRILERAQHEWGERVSDNATLGMLGALAANNNILLRPRRYEHNPKTGKNAEKLNVRGQEPILLDKVRQEDVLAELRRICKVQGIEDQYPELAHAVFTQVRPYVPTERVGKDPLQPMKIRASRASLEFQEFRIRDAVANLRIRVGGSERRPLTEEEYDRAVDYLMEYSDTTPPTWGEVADELEIAENTLIAPVIDDVRLNVAPYDRSSAIVEAKLKRKTQARQWWDDDANLDLRSQLILLVSDATDDTARIAENSGLLEVFESWSDEEKQTLQDLKFDSGRAAYSIDTLNKLNAYMHEHRVGLHEARQNVFGVSDTWRPPRDRLDEPTGQPTVDRVLTIVRRFILDCERAWGRPQKIVVEHARTGLMGPSQRADVLKEIARNRNANERIRQELREGGIEAPNRADIRRNSIIQDQESQCLYCGKEIGVLTAELDHIVPRAGGGSSKRENLAAVCRACNASKGSRPFAVWAGPARLERTIQRLRELQAFKTKSKRRTLNAIIRRLKQREEDEPIDERSLASTSYAATSIRERLEQHFNDDLPDGFAPVAVDVYGGSLTRESRRAGGIDKSIMLRGQRDKNRFDVRHHAIDAAVMTLLNPSVAVTLEQRRMLKQENDYSSPRGQHDNGWRDFIGRGEASQSKFLHWKKTAVVLADLISEAVEQDTIPVVNPLRLRPQNGSVHKDTVEAVLERTVGDSWTDKQVSRIVDPNTYIAFLSLLGKKKELEADHQRLVSVSAGVKLLADERVQIFPEEAASILTPRGVVKIGDSIHHARLYGWKNQRGDIQVGMLRVFGAEFPWFMRESGVKDILRVPIPQGSQSYRDLAATTRKFIENGQATEFGWITQNDEIEISAEEYLATDKGDILSDFLTVLPENRWKVVGIGDNRRFKIRPLLLSNEIIPDTLNGRSIKSEERDLIVSVLDKGVRVVASTLLTLPSTKIIRRNNLGIPRWRGNSHLPTSLDIQRAATQALEGRD

SEQ ID NO: 21900 - protein, 1132 aa, unidentified
  REGION 1..1132: note = Cas Enzyme sequence
MSADSLNYRIGVDVGDRSVGLAAIEFDDDGFPIKKLAMVTFRHDGGMDPATGKTPKSRKETAGVARRTMRMRRRKKKRLKELDKKLRDLGYFVPRDEEPQTYEAWSSRARLAESRFEDPQECGEHLVRAVRHMARHRGWRNPWWSFSQLEEASQKSSETFGRILERAQHEWGERVSDNATLGMLGALAANNNILLRPRRYEHNPKTGKNAEKLNVRGQEPILLDKVRQEDVLAELRRICEVQGIEDQYPELAHAVFTQVRPYVPTERVGKDPLQPMKIRASRASLEFQEFRIRDAVANLRIRVGGSERRPLTEEEYDRAVDYLMEYSDTAPPTWGEVADELEIAENTLIAPVIDDVRLNVAPYDRSSAIVEAKLKRKTQARQWWDDDANLDLRSQLILLVSDATDDTARVAENSGLLEVFESWSDEEKQTLQDLKFDSGRAAYSIDTLNKLNAYMHEHRVGLHEARQNVFGVSDTWRPPRDRLDEPTGQPTVDRVLTIVRRFILDCERAWGRPQKIVVEHARTGLMGPSQRADVLKEITRNRNANERIRQELRAGGVENPNRADIRRNSIIQDQESQCLYCGKEVGVLTAELDHIVPRAGGGSSKRENLAAVCRACNASKGSRPFAVWAGPARLERTIQRLRELQAFKTKSKKRMLNAIIRRLKQREEDEPIDERSLASTSYAATSIRERLEQHFNDDLPDGFAPVSVDVYGGSLTRESRRAGGIDKSIMLRGQSDKNRFDVRHHAIDAAVMTLLNPSVAVTLEQRRMLKQENDYSSPRGQHDNGWRDFIGRGEASQSKFLHWKKTAVVLADLISEAIAQDTIPVVNPLRLRPQNGSVHKDTVEAVLERTVGDSWTDKQVSRIVDPNTYIAFLSLLGKKKELEADHQRLVSVSAGVKLLADERIQIFPEEAASILTPRGVVKIGDSIHHARLYGWKNQRGDIQVGMLRVFGAEFPWFMRESGVKDILRVLIPQGSQSYRDLAPTVRKNIENDKAVEFGWFTQNDELEIDPFDYIQHGGKDKLARFLSYMPESRWRIDGISMNNKLRIRPNLLSGEELPAKVYGKELSEEQYKLLEETLKTGLIIATEGLLSLKSARIVRRNNLGIPRWRGNGHLPTSLDIQRAAAQALEGRD

SEQ ID NO: 21901 - protein, 1148 aa, unidentified
  REGION 1..1148: note = Cas Enzyme sequence
MAVTLPKDDVRYKVGIDVGLNSIGFCAVEVDDDDYPIRLLNSLVFRHDAGIDPASRKAALTRKNVSGVARRNRRAKRETKKRLVALDRLLSEEFGWPLPNLEEYPDPYEPWHARARLLDGYIADDAKRKEMLSIAMRHIARHRGWRNPYMKPASLASLPYPSEFLTKLNEDTSRVIRQKFAAEATQGQLVDAFILGSLSLAATPELQVLEESEKDNSKNKPRDIVLGRVRGDKGVIEGKLHQSDNAEEIRRICATQEVPQDQVKRLIEAVFKAKNPREVGAAYKLVGHDELPGQKKYIRAERAHPAFQKFNIVATLTNLRINEAGSKRALSSKELQTLTNYLSNVGPKDEVTWFDVAEKLKIDRFDLQGTARALYDGQAALKYPPKDVTSASIKQSKVKALKDWWKQASEDQRGQLIDYLSNSGGSDTPQTDDELDDLTKLTQSFSEKDLEELEKISLPAGRAAYSLNSLTKLTQLMLEEGIDLHEARKRLFTVDDDWKPASEPINSPVGNPAVDRVLKQVARWINAATERWGIPASVNVEHVREGLVSEKVVRELIRDNEARHKKNMEVTEEIAKQLGLSGRVYRSHTIKYFALRRQNCQCLYCGTKISFGTAEMDHIVPRTNGGSNNKRSNLAAVCKTCNASKSNIPFAVWVSSGKAGPGVSLEGAKERVNSLLLEKADLQKEDDSLVEIYSKKEGEKFKKEIIARLESKKPEEEFDGRSLESVAWMAVELHERILGYYESLLKDSGQKVPRVGVYRGAITAEARKASGFENRVELLGGKGKTRLDRRHHAMDALVIALMNQSVSKLLSWRMQLRDSQRISGMPETWKEFHGFNRDEYRRWNAWANAMRIAVELFNDALEKDEVHFSENKRLGISLAKAHDDTIKSLCSYALGGDFSVELIDRAETPALWTALTKQPDFDVKNGLPEDSARHITVNGKQFGPTDEVDFFTTGAPAIKVRGGFAGIGDTIHHARIYRIDGKKTTYAMVRVFQTDLRRMKHKDLFTEPLKPSTISMRTASKTIRKALAAGTATQIGWLVEGDEIRVETDRYPSGQIGGLLKEYPEASSWRVCGFPDDARVRLRPNLISEEGFGADTSEDIAKIVSGIGWWVSLNVLLGKGPVTVIRCNALGEERWVSRAHLPVSVDLS

SEQ ID NO: 21902 - protein, 1087 aa, unidentified
  REGION 1..1087: note = Cas Enzyme sequence
VFWGGPRVTGGAKRETKKRLVALDRLLSEEFGWPLPNLEDYPDPYEPWHARAQLLDGFVANDVKRKEMLSIAMRHIARHRGWRNPYMKPASLASLPYPSEFLTNLNQDVSRVIGRKFASDATQGQLVDEFILGSLSLATTPELQVLEESEKDNSKNKPRDIVLGRVRGDKGVIEGKLHQSDNAEEIRRICATQEVPQDQVERLIEAVFKAKDPREVGAACKLVGHDELPGQKKYIRAERAHPAFQKFNIVATLTNLRINEAGSKRRLSSKELQMLTNYLSNVGPKDEVTWFDVAEKLEIDRSDLQGTARVSYDGQAALKYPPKDVTSASIKQSKVKALKDWWKQASEDQRGQLIDYLSNSGGSHTPKTDDELDDLTKLTQSFSEKDLEELEKISLPAGRAAYSLNSLTKLTQLMLEEGIDLHEARKRLFNVDDDWKPTPEPINSPVGNPAVDRVLKQVARWINAATERWGIPASVNVEHVREGLVSEKVVRELIRDNEARHKKNMEVAEEIAKRLGISGRALRSHTIKYFALRCQNCQCLYCGTKISFGTAEMDHIVPRTNGGSNNKRSNLAAVCKTCNASKSNIPFAVWVSSGKAGPGVSLEGAKERVNSLLLEKADLPEDYDDDSLIKFYSKNESKKFRKEIIARLESKKPDEEFDGRSLESVAWMAVELRGRIVGYYETLLKDTGQKVPQVGVYRGEITAEARKASGFENRVRLLGGKGKTRLDRRHHAMDALVIALMNQSVSKLLSWRMQLRVSQQISVMSETWKEFHGFTRDDYRHWEAWAKAMQIAVELFNDALEKDDVHFSENKRLGISLAKAHDDTIKSLCSYALGGAFPAELIDRAETPALWTALTKQPDFDVKNGLLEDPTRCITVNGKQFGPTDEVNFFASGAPAIKVRGGFAGIGDTIHHARIYRIDGKKTTYAMVRVFQTDLRRMKHKDLFTEPLKPSTISMRTASKTIRKALADGTATQIGWLVEGDEIHIETDRYPSGQIGSLLKEYPEASSWRVCGFPEDTRIRLRPNLISEEGFDADISEDVVKLVSGKGWYVTLNIVLGNGAVTVIRRNTLGEERWVSRAHLPVSVDLS

SEQ ID NO: 21903 - protein, 1088 aa, unidentified
  REGION 1..1088: note = Cas Enzyme sequence
MFLVWPPAPPAGGGGEEKTKHRELDRLLSEEFGWPLPNLEDYPDPYEPWHARARLVEGYIADDAKRKEMLSIAMRHIARHRGWRNPYMKPASLASLPYPSEFLTKLNEDTSRAIGRKFAAEATQGQLVDAFILGSLSLAATPELQVLEESEKDNSKNKPRDIVLGRVRGDKGVIEGKLHQSDNAEEIRRICATQEVPQDQVERLIEAVFKAKNPREVGAAYKLVGHDELPGQKKYIRAERAHPAFQKFNIVATLTNLRINEAGSKRRLSSEELQMLTNYLSNVGPKDEVTWFDVAEKLKIDRSDLQGTARASYDGQAALKYPPKDVTSVSIKKNKVKALKDWWKQASEDQRGQLIDYLSNSGGSDTPKTDDELDDLTKLTQSFSEKDLEELENISLPAGRAAYSLNSLTKLTQLMLEEGIDLHEARKRLFNVDDDWKPTPEPINSPVGNPAVDRVLKQVARWINAATERWGIPVSVNVEHVREGLVSEKVVRELIRDNEARHKKNMEVAEEIAKRLGLSGRALRSHTIKYFALRRQNCQCLYCGTKISFGTAEMDHIVPRTNGGSNNKRSNLAAVCRTCNASKSNIPFAVWVSSGKAGPGVSLEGAKERVNSLLLEKADLPEDYDDDSLIEFYSKNESKKFRKEIIARLESKKPDEEFDGRSLESVAWMAVELHGRIVGYYESLLKDTGQKVPQVGVYRGAITAEARKASGFENRVELLGGKGKTRLDRRHHAMDALVIALMNQSVSKLLSWRMQLRDSQRISGMPETWKEFHGFNRDEYRRWNAWANAMRIAVELFNDALEKDEVYFSENKRLGVSLAKAHDDTIRSLCSYALGRDFSVELIDRAETPALWTALTKQPDFDVKNGLPEDSTRCITVNGKQFGPTDEVNFFASGAPAIKVRGGFAGIGDTIHHARIYRIDGKKTTYAMVRVFQTDLRRMEHEDLFTEPLKPSTISMRTASKTIRKALADGTATQIGWLVEGDEIRIETDHYPSDDIGKLLDEYSEASSWRVCGFPDVLKIRLRPNLLSEEGFDDNTAAAVRKIVSGAGWRVSMNTVLSGGLVTVIRRNALGEERWVSRANLPLSVNLS

SEQ ID NO: 21904 - protein, 1089 aa, unidentified
  REGION 1..1089: note = Cas Enzyme sequence
MFLVWPPPPRGGGGGREKKQRLVALDRLLSEEFGWPLPNLEEYPDPYEPWHARARLLDGYIADDAKRKEMLSIAMRHIARHRGWRNPYMKPASLASLPYPSEFLTKLNEDTSRVIRQKFAAEATQGQLVDAFILGSLSLAATPELQVLEESEKDNSKNKPRDIVLGRVRGDKGVIEGKLHQSDNAEEIRRICATQEVPQDQVERLIEAVFKAKNPREVGAAYKLVGHDELPGQKKYIRAERAHPAFQKFNIVATLTNLRINEAGSKRRLSSKELQMLTNYLSNVGPKDEVTWFDVAEKLKINRSDLQGTARASYDGQAALKYPPKDVTSASIKQSKVKALKDWWKQASEDQHGQLIDYLSNSGGSDTPQTDDELDDLTKLTQSFSEKDLEELEKISLPAGRAAYSLNSLTKLTQLMLEEGIDLHEARKRLFNVDDDWKPTPEPINSPVGNPAVDRVLKQVARWINAATERWGIPASVNVEHVREGLVSEKVVRELIRDNEARHKKNMEVAEATAKRLGLSGRALRSHTIKYFALRRQNCQCLYCGTKISFGTAEMDHIVPRTNGGSNNKRSNLAAVCKTCNDSKSNIPFAVWVSSGKAGPGVSLEGAKERVNSLLLEKADLPEDYDDDSLIEFYSKNESKKFRKEIIARLESKKPEEEFDGRSLESVAWMAVELRGRIVGYYETILKDTGQKVPQVGVYRGAITAEARKASGFENRVELLGGKGKTRLDRRHHAMDALVIALMNQSVSKLLSWRMQLRDSQRISVMPETWKEFHGFTRDDYRHWEAWAKAMRIAVELFNDALEKDDVHFSENKRLGISLAKAHDDTIKSLCSYALGGAFSAELIDRAETPALWTALTKQPDFDVNNELPEDPTRCITVNGKQFGPTDEVNFFASGAPAIKVRGGFAGIGDTIHHARIYRIDGKKTTYAMVRVFQTDLRRMEHEDLFTEPLKPSTISMRTASKTIRKALADGTATQIGWLVEGDEIHIETDRYPSGQIGSLLKEYPEAFSWRVCGFPENAKIRLRPNLISEEGFDADISEDVVKLVSGKGWWVSPNTLLGNGPVTVIRRNALGEERWLSRAHLPVSVDLS

SEQ ID NO: 21905 - protein, 1150 aa, unidentified
  REGION 1..1150: note = Cas Enzyme sequence
MAVTLPKDDVRYKVGIDVGLNSIGFCAVEVDDDDYPIRLLNSLVFRHDAGIDPASRKAALTRKNVSGVARRNRRAKRETKKRLVALDRLLSEEFGWPLPNLEEYPDPYEPWHARARLLDGYIADDAKRKEMLSIAMRHIARHRGWRNPYMKPASLASLPYPSEFLTKLNEDTSRVIRQKFAAEATQGQLVDAFILGSLSLAATPELQVLEESEKDNSKNKPRDIVLGRVRGDKGVIEGKLHQSDNAEEIRRICATQEVPQDQVERLIEAVFKAKNPREVGAAYKLVGHDELPGQKKYIRAERAHPAFQKFNIVATLTNLRINEAGSKRRLSSKELQMLTNYLSNVGPKDEVTWFDVAEKLKINRSDLQGTARASYDGQAALKYPPKDVTSASIKQSKVKALKDWWKQASEDQHGQLIDYLSNSGGSDTPQTDDELDDLTKLTQSFSEKDLEELEKISLPAGRAAYSLNSLTKLTQLMLEEGIDLHEARKRLFNVDDDWKPTPEPINSPVGNPAVDRVLKQVARWINAATERWGIPASVNVEHVREGLVSEKVVRELIRDNEARHKKNMEVAEATAKRLGLSGRALRSHTIKYFALRRQNCQCLYCGTKISFGTAEMDHIVPRTNGGSNNKRSNLAAVCKTCNDSKSNIPFAVWVSSGKAGPGVSLEGAKERVNSLLLEKADLPEDYDDDSLIEFYSKNESKKFRKEIIARLESKKPEEEFDGRSLESVAWMAVELRGRIVGYYETILKDTGQKVPQVGVYRGAITAEARKASGFENRVELLGGKGKTRLDRRHHAMDALVIALMNQSVSKLLSWRMQLRDSQRISVMPETWKEFHGFTRDDYRHWEAWAKAMRIAVELFNDALEKDDVHFSENKRLGISLAKAHDDTIKSLCSYALGGAFSAELIDRAETPALWTALTKQPDFDVNNELPEDPTRCITVNGKQFGPTDEVNFFASGAPAIKVRGGFAGIGDTIHHARIYRIDGKKTTYAMVRVFQTDLRRMEHEDLFTEPLKPSTISMRTASKTIRKALADGTATQIGWLVEGDEIHIETDRYPSGQIGSLLKEYPEAFSWRVCGFPENAKIRLRPNLISEEGFDADISEDVVKLVSGKGWWVSPNTLLGNGPVTVIRRNALGEERWLSRAHLPVSVDLS

SEQ ID NO: 21906 - protein, 1094 aa, unidentified
  REGION 1..1094: note = Cas Enzyme sequence
NTSTGESVCGAPPAARGGAKRETKKRLVALDRLLSEEFGWPLPNLEEYPDPYEPWHARARLLDGYIADDAKRKEMLSIAMRHIARHRGWRNPYMKPASLASLPYPSEFLTKLNEDTSRVIRQKFAAEATQGQLVDAFILGSLSLAATPELQVLEESEKDNSKNKPRDIVLGRVRGDKGVIEGKLHQSDNAEEIRRICATQEVPQDQVERLIEAVFKAKNPREVGAAYKLVGHDELPGQKKYIRAERAHPAFQKFNIVATLTNLRINEAGSKRRLSSKELQMLTNYLSNVGPKDEVTWFDVAEKLKINRSDLQGTARASYDGQAALKYPPKDVTSASIKQSKVKALKDWWKQASEDQHGQLIDYLSNSGGSDTPQTDDELDDLTKLTQSFSEKDLEELEKISLPAGRAAYSLNSLTKLTQLMLEEGIDLHEARKRLFNVDDDWKPTPEPINSPVGNPAVDRVLKQVARWINAATERWGIPASVNVEHVREGLVSEKVVRELIRDNEARHKKNMEVAEATAKRLGLSGRALRSHTIKYFALRRQNCQCLYCGTKISFGTAEMDHIVPRTNGGSNNKRSNLAAVCKTCNDSKSNIPFAVWVSSGKAGPGVSLEGAKERVNSLLLEKADLPEDYDDDSLIEFYSKNESKKFRKEIIARLESKKPEEEFDGRSLESVAWMAVELRGRIVGYYETILKDTGQKVPQVGVYRGAITAEARKASGFENRVELLGGKGKTRLDRRHHAMDALVIALMNQSVSKLLSWRMQLRDSQRISVMPETWKEFHGFTRDDYRHWEAWAKAMRIAVELFNDALEKDDVHFSENKRLGISLAKAHDDTIKSLCSYALGGAFSAELIDRAETPALWTALTKQPDFDVNNELPEDPTRCITVNGKQFGPTDEVNFFASGAPAIKVRGGFAGIGDTIHHARIYRIDGKKTTYAMVRVFQTDLRRMEHEDLFTEPLKPSTISMRTASKTIRKALADGTATQIGWLVEGDEIHIETDRYPSGQIGSLLKEYPEAFSWRVCGFPENAKIRLRPNLISEEGFDADISEDVVKLVSGKGWWVSPNTLLGNGPVTVIRRNALGEERWLSRAHLPVSVDLS

SEQ ID NO: 21907 - protein, 1149 aa, unidentified
  REGION 1..1149: note = Cas Enzyme sequence
MAVTLPKDDVRYKVGIDVGLNSIGFCAVEVDDDDCPIRLLNSLVFRHDAGVDPASRKAALTRKNVSGVAPPNPRGGGGNKKKPKGALDRLLSEEFGWPLPNLEEYPDPYEPWHVRARLLDGYIADDAKRKEMLSIAMRHIARHRGWRNPYMKPASLASLPYPSEFLTNLNQDVSRVIGRKFASDATQGQLVDAFILGSLRLAATPALQVPEEPEKDSSKNKPRDIVLGRVRGDKGVIEGKLHQSDNAEEIRRICATQEVPQDQVERLIEAVFKAKNPREVGAANKLVGHDELPGQEKYIRAERAHPAFQKFNIVATLTNLRINEAGSKRRLSSKELQMLTNYLSNVGPKDEVTWFDVAEKLKIDRSDLQGTARASYDGQAALKYPPIDVTSVSIKKNKVKALKDWWKQASEDQRGQLIDYLSNSDRLDTPKTDDELDDLTKLTQSFSEKDLEELEKISLPTGRAAYSVNSLTRLTNLMLEEGIDLHEARKRLFNIGNDWKPAPEPINSPVGNPAVDRVLKQVARWIDAATERWGIPASVNVEHVREGLVSEKVVRELIRDNEARHKKNMEVAEATAKRLGLSGPVHRSHTIKYFALRRQNCQCLYCGTKISFETAEMDHIVPRTNGGSNNKRSNLAAVCRTCNASKSNIPFAVWVSSGKAGPGVSLEGAKERVNSLLLEKDDLQKEDDSLVEIYSKKESKNFRKEIIARLESKKPDEEFDGRSLESVAWMAVELHERILGYYENLLKDTGQKAPQVGVYRGAITAEARKASGFENRVELLGGKGKTRLDRRHHAMDALVIALMNQSVSKLLSWRMQLRDSQRISGMQETWKEFHGSNRDEYRRWNAWTNAMRIAVELFNDALEKDEVHFSENKRLGISLAKAHDDTIKSLCSYALGDALSAELIDRAETPALWTALTKQPDFDVKNGLPEDPTRCITVNGKQFGPTDEVNFFASGAPAIKVRGGFAGIGDTIHHARIYRIDGKKTTYAMVRVFQTDLRRMKHKDLFTEPLKPSTISMRTASKTIRKALAAGTATQIGWLVEGDEIRVETDRYPSGQIGGLLKEYPEASSWRVCGFPDDARVRLRPNLISEEGFDADISEDVVKLVSGKGWYVTLNIVLGNGAVTVIRRNTLGEERWVSRAHLPVSVDLS

SEQ ID NO: 21908 - protein, 1065 aa, unidentified
  REGION 1..1065: note = Cas Enzyme sequence
VALDRLLSEEFGWPLPNLEEYPDPYEPWHVRARLLDGYIADDAKRKEMLSIAMRHIARHRGWRNPYMKPASLASLPYPSEFLTNLNQDVSRVIGRKFASDATQGQLVDAFILGSLRLAATPALQVPEEPEKDSSKNKPRDIVLGRVRGDKGVIEGKLHQSDNAEEIRRICATQEVPQDQVERLIEAVFKAKNPREVGAANKLVGHDELPGQEKYIRAERAHPAFQKFNIVATLTNLRINEAGSKRRLSSKELQMLTNYLSNVGPKDEVTWFDVAEKLKIDRSDLQGTARASYDGQAALKYPPIDVTSVSIKKNKVKALKDWWKQASEDQRGQLIDYLSNSDRLDTPKTDDELDDLTKLTQSFSEKDLEELEKISLPTGRAAYSVNSLTRLTNLMLEEGIDLHEARKRLFNIGNDWKPAPEPINSPVGNPAVDRVLKQVARWIDAATERWGIPASVNVEHVREGLVSEKVVRELIRDNEARHKKNMEVAEATAKRLGLSGPVHRSHTIKYFALRRQNCQCLYCGTKISFETAEMDHIVPRTNGGSNNKRSNLAAVCRTCNASKSNIPFAVWVSSGKAGPGVSLEGAKERVNSLLLEKDDLQKEDDSLVEIYSKKESKNFRKEIIARLESKKPDEEFDGRSLESVAWMAVELHERILGYYENLLKDTGQKAPQVGVYRGAITAEARKASGFENRVELLGGKGKTRLDRRHHAMDALVIALMNQSVSKLLSWRMQLRDSQRISGMQETWKEFHGSNRDEYRRWNAWTNAMRIAVELFNDALEKDEVHFSENKRLGISLAKAHDDTIKSLCSYALGDALSAELIDRAETPALWTALTKQPDFDVKNGLPEDPTRCITVNGKQFGPTDEVNFFASGAPAIKVRGGFAGIGDTIHHARIYRIDGKKTTYAMVRVFQTDLRRMKHKDLFTEPLKPSTISMRTASKTIRKALAAGTATQIGWLVEGDEIRVETDRYPSGQIGGLLKEYPEASSWRVCGFPDDARVRLRPNLISEEGFDADISEDVVKLVSGKGWYVTLNIVLGNGAVTVIRRNTLGEERWVSRAHLPVSVDLS

SEQ ID NO: 21909 - protein, 1088 aa, unidentified
  REGION 1..1088: note = Cas Enzyme sequence
MFLVWPPPAPAGGGGEKKKTKKQRDRLLSEEFGWPLPNLEEYPDPYEPWHARARLLDGYIADDAKRKEMLSIAMRHIARHRGWRNPYMKPASLASLPYPSEFLTKLNEDTSRVIRQKFAAEATQGQLVDAFILGSLSLAATPELQVLEESEKDNSKNKPRDIVLGRVRGDKGVIEGKLHQSDNAEEIRRICATQEVPQDQVERLIEAVFKAKNPREVGAAYKLVGHDELPGQKKYIRAERAHPAFQKFNIVATLTNLRINEAGSKRRLSSKELQMLTNYLSNVGPKDEVTWFDVAEKLKINRSDLQGTARASYDGQAALKYPPKDVTSASIKQSKVKALKDWWKQASEDQHGQLIDYLSNSGGSDTPQTDDELDDLTKLTQSFSEKDLEELEKISLPAGRAAYSLNSLTKLTQLMLEEGIDLHEARKRLFNVDDDWKPTPEPINSPVGNPAVDRVLKQVARWINAATERWGIPASVNVEHVREGLVSEKVVRELIRDNEARHKKNMEVAEATAKRLGLSGRALRSHTIKYFALRRQNCQCLYCGTKISFGTAEMDHIVPRTNGGSNNKRSNLAAVCKTCNDSKSNIPFAVWVSSGKAGPGVSLEGAKERVNSLLLEKADLPEDYDDDSLIEFYSKNESKKFRKEIIARLESKKPEEEFDGRSLESVAWMAVELRGRIVGYYETILKDTGQKVPQVGVYRGAITAEARKASGFENRVELLGGKGKTRLDRRHHAMDALVIALMNQSVSKLLSWRMQLRDSQRISVMPETWKEFHGFTRDDYRHWEAWAKAMRIAVELFNDALEKDDVHFSENKRLGISLAKAHDDTIKSLCSYALGGAFSAELIDRAETPALWTALTKQPDFDVNNELPEDPTRCITVNGKQFGPTDEVNFFASGAPAIKVRGGFAGIGDTIHHARIYRIDGKKTTYAMVRVFQTDLRRMEHEDLFTEPLKPSTISMRTASKTIRKALADGTATQIGWLVEGDEIHIETDRYPSGQIGSLLKEYPEAFSWRVCGFPENAKIRLRPNLISEEGFDADISEDVVKLVSGKGWWVSPNTLLGNGPVTVIRRNALGEERWLSRAHLPVSVDLS

SEQ ID NO: 21910 - protein, 1090 aa, unidentified
  REGION 1..1090: note = Cas Enzyme sequence
MENICWVAPRRTGGAKRETKKRLVALDRLLSEEFGWPLPNLEDYPDPYEPWHARARLLDGYIADDAKRKEMLSIAMRHIARHRGWRNPYMKPASLASLPYPSEFLTNLNQDVSRVIRQKFAAEATQGQLVDAFILGSLSLATTPELQVLEESEKDNSKNKPRDIVLGRVRGDKGVIEGKLHQSDNAEEIRRICATQEVPQDQVERLIEAVFKAKNPREVGAANKLVGHDELPGQKKYIRAERAHPAFQKFNIVATLTNLRINEAGSKRTLSPKELQMLTNYLSNVGPKDEVTWFDVAEKLKIDRSDLQGTARASYDGQAALKYPPKDVTSASIKQSKVKALKDWWKQASEDQRGQLIDYLSNSGGSHTPKTDDELDDLTKLTQSFSEKDLEELENISLPAGRAAYSLNSLTKLTQLMLEEGIDLHEARKRLFNVDDDWKPTPKPINSPVGNPAVDRVLKQVSRWINAATERWGIPVSVNVEHVREGLVSEKVVRELIRDNEARHKKNMEVAEEIAKRLGLSGRALRSHTIKYFALRRQNCQCLYCGTKISFGTAEMDHIVPRTNGGSNNKRSNLAAVCRTCNASKSNIPFAVWVSSGKAGPGVSLEGAKERVNSLLLEKADLPEDYDDDSLIEFYSKNESKKFRKEIIARLESKKPDEEFDGRSLESVAWMAVELHERILGYYESLLKDASQKVPQVGVYRGEITAEARKASGFENRVELLGGKGKTRLDRRHHAMDALVIALMNQSVSKLLSWRMQLRDSQRISGMPETWKEFHGFNRDEYRRWNAWANAMRIAVELFNDALEKDEVHFSENKRLGVSLAKAHDDTIRSLCSYALGRDFSVELIDRAETPALWTALTKQPDFDVKNGLPEDSMRCITVNGKQFGPTDEVNFFASGAPAIKVRGGFAGIGDTIHHARIYRIDGKKTTYAMVRVFQTDLRRMEHEDLFTEPLKPSTISMRTASKTIRKAIADGSATQIGWLVEGDEIHIETDRYPSGQIGSLLKEYPEASSWRVCGFPENAKIRLRPNLISEEGFDADISEDVVKLVSGKGWWVSPNTLLGNGPVTVIRRNALGEERWVSRAHLPVSVDLS

SEQ ID NO: 21911 - protein, 1097 aa, unidentified
  REGION 1..1097: note = Cas Enzyme sequence
GRKSPPRTEKILWVGPRRNRRAKRETKKRLVALDRLLSEEFGWPLPNLEEYPDPYEPWHARARLLDGYIADDAKRKEMLSIAMRHIARHRGWRNPYMKPASLASLPYPSEFLTKLNEDTSRVIRQKFAAEATQGQLVDAFILGSLSLAATPELQVLEESEKDNSKNKPRDIVLGRVRGDKGVIEGKLHQSDNAEEIRRICATQEVPQDQVERLIEAVFKAKNPREVGAAYKLVGHDELPGQKKYIRAERAHPAFQKFNIVATLTNLRINEAGSKRRLSSKELQMLTNYLSNVGPKDEVTWFDVAEKLKINRSDLQGTARASYDGQAALKYPPKDVTSASIKQSKVKALKDWWKQASEDQHGQLIDYLSNSGGSDTPQTDDELDDLTKLTQSFSEKDLEELEKISLPAGRAAYSLNSLTKLTQLMLEEGIDLHEARKRLFNVDDDWKPTPEPINSPVGNPAVDRVLKQVARWINAATERWGIPASVNVEHVREGLVSEKVVRELIRDNEARHKKNMEVAEATAKRLGLSGRALRSHTIKYFALRRQNCQCLYCGTKISFGTAEMDHIVPRTNGGSNNKRSNLAAVCKTCNDSKSNIPFAVWVSSGKAGPGVSLEGAKERVNSLLLEKADLPEDYDDDSLIEFYSKNESKKFRKEIIARLESKKPEEEFDGRSLESVAWMAVELRGRIVGYYETILKDTGQKVPQVGVYRGAITAEARKASGFENRVELLGGKGKTRLDRRHHAMDALVIALMNQSVSKLLSWRMQLRDSQRISVMPETWKEFHGFTRDDYRHWEAWAKAMRIAVELFNDALEKDDVHFSENKRLGISLAKAHDDTIKSLCSYALGGAFSAELIDRAETPALWTALTKQPDFDVKNGLPEDPTRCITVNGKQFGPTDEVNFFASGAPAIKVRGGFAGIGDTIHHARIYRIDGKKTTYAMVRVFQTDLRRMEHEDLFTEPLKPSTISMRTASKTIRKALADGTATQIGWLVEGDEIHIETDRYPSGQIGSLLKEYPEAFSWRVCGFPENAKIRLRPNLISEEGFDADISEDVVKLVSGKGWWVSPNTLLGNGPVTVIRRNALGEERWLSRAHLPVSVDLS

SEQ ID NO: 21912 - protein, 1036 aa, unidentified
  REGION 1..1036: note = Cas Enzyme sequence
VRARLLDGYIADDAKRKEMLSIAMRHIARHRGWRNPYMKPASLASLPYPSEFLTNLNQDVSRVIGRKFAAEATQAQLVDAFILGSLSLATTPELQVLEESEKDNSKNKPRDIVLGRVRGDKGVIEGKLHQSDNAEEIRRICATQEVPQDQVERLIEAVFKAKNPREVGAAYKLVGHDELPGQKKYIRAERAHPAFQKFNIVATLTNLRINEAGSKRALSSEELQILTNYLSNVGPKDEVTWFDVAEKLEIDRSDLQGTARASYDGQAALKYPPKDVTSASIKQSKVKALKDWWKQASEDQRGQLIDYLSNSGGSDTPKTDDELDDLTKLTQSFSEKDLEELEKISLPAGRAAYSLNSLTKLTQLMLEEGIDLHEARKRLFNVDDDWKPTPEPINSPVGNPAVDRVLKQVARWINAATERWGIPASVNVEHVREGLVSEKVVRELIRDNEARHKKNMEVAEEIAKRLGLSGRALRSHTIKYFALRRQNCQCLYCGTKISFGTAEMDHIVPRTNGGSNNKRSNLAAVCRTCNASKSNIPFAVWVSSGKAGPGVSLDGAKERVNSLLLEKADLQKEDDSLVEIYSKKEGEKFKKEIIARLESKKPEEEFDGRSLESVAWMAVELHERILGYYESLLKDSGQKVPRVGVYRGAITAEARKASGFENRVELLGGKGKTRLDRRHHAMDALVIALMNQSVSKLLSWRMQLRDSQRISGMPETWKEFHGFNRDEYRRWNAWANAMRIAVELFNDALEKDEVHFSENKRLGISLAKAHDDTIKSLCSYALGGDFSVELIDRAETPALWTALTKQPDFDVKNGLPEDPTRCITVNGKQFGPTDEVDFFTTGAPAIKVRGGFAGIGDTIHHARIYRIDGKKTTYAMVRVFQTDLRRMKHKDLFTEPLKPSTISMRTASKTIRKALAAGTATQIGWLVEGDEIRVETDRYPSGQIGGLLKEYPEASSWRVCGFPDDARVRLRPNLISEEGFGADTSEDIAKIVSGIGWWVSLNVLLGNGPVTVIRCNALGEERWVSRAHLPVSVDLS

SEQ ID NO: 21913 - protein, 1086 aa, unidentified
  REGION 1..1086: note = Cas Enzyme sequence
RCGWGPARGGGGAKRETKKRLVALDRLLSEEFGWPLPNLEDYPDPYEPWHVRARLLDGYIADDAKRKEMLSIAMRHIARHRGWRNPYMKPASLASLPYPSEFLTNLNQDVSRVIGRKFAAEATQAQLVDAFILGSLSLATTPELQVLEESEKDNSKNKPRDIVLGRVRGDKGVIEGKLHQSDNAEEIRRICATQEVPQDQVERLIEAVFKAKNPREVGAAYKLVGHDELPGQKKYIRAERAHPAFQKFNIVATLTNLRINEAGSKRALSSEELQILTNYLSNVGPKDEVTWFDVAEKLEIDRSDLQGTARASYDGQAALKYPPKDVTSASIKQSKVKALKDWWKQASEDQRGQLIDYLSNSGGSDTPKTDDELDDLTKLTQSFSEKDLEELEKISLPAGRAAYSLNSLTKLTQLMLEEGIDLHEARKRLFNVDDDWKPTPEPINSPVGNPAVDRVLKQVARWINAATERWGIPASVNVEHVREGLVSEKVVRELIRDNEARHKKNMEVAEEIAKRLGLSGRALRSHTIKYFALRRQNCQCLYCGTKISFGTAEMDHIVPRTNGGSNNKRSNLAAVCRTCNASKSNIPFAVWVSSGKAGPGVSLDGAKERVNSLLLEKADLQKEDDSLVEIYSKKEGEKFKKEIIARLESKKPEEEFDGRSLESVAWMAVELHERILGYYESLLKDSGQKVPRVGVYRGAITAEARKASGFENRVELLGGKGKTRLDRRHHAMDALVIALMNQSVSKLLSWRMQLRDSQRISGMPETWKEFHGFNRDEYRRWNAWANAMRIAVELFNDALEKDEVHFSENKRLGISLAKAHDDTIKSLCSYALGGDFSVELIDRAETPALWTALTKQPDFDVKNGLPEDPTRCITVNGKQFGPTDEVDFFTTGAPAIKVRGGFAGIGDTIHHARIYRIDGKKTTYAMVRVFQTDLRRMKHKDLFTEPLKPSTISMRTASKTIRKALAAGTATQIGWLVEGDEIRVETDRYPSGQIGGLLKEYPEASSWRVCGFPDDARVRLRPNLISEEGFGADTSEDIAKIVSGIGWWVSLNVLLGNGPVTVIRCNALGEERWVSRAHLPVSVDLS

SEQ ID NO: 21914 - protein, 1061 aa, unidentified
  REGION 1..1061: note = Cas Enzyme sequence
LSEEFGWPLPNLEEYPDPYEPWHARARLLDGYIADDAKRKEMLSIAMRHIARHRGWRNPYMKPASLASLPYPSEFLTKLNEDTSRVIRQKFAAEATQGQLVDAFILGSLSLAATPELQVLEESEKDNSKNKPRDIVLGRVRGDKGVIEGKLHQSDNAEEIRRICATQEVPQDQVERLIEAVFKAKNPREVGAACKLVGHDELPGQKKYIRAERAHPAFQKFNIVATLTNLRINEAGSKRRLSSKELQMLTNYLSNVGPKDEVTWFDVAEKLKINRSDLQGTARASYDGQAALKYPPKDVTSASIKQSKVKALKDWWKQASEDQHGQLIDYLSNSGGSDTPQTDDELDDLTKLTQSFSEKDLEELEKISLPAGRAAYSLNSLTKLTQLMLEEGIDLHEARKRLFNVDDDWKPTPEPINSPVGNPAVDRVLKQVARWINAATERWGIPASVNVEHVREGLVSEKVVRELIRDNEARHKKNMEVAEATAKRLGLSGRALRSHTIKYFALRRQNCQCLYCGTKISFGTAEMDHIVPRTNGGSNNKRSNLAAVCKTCNDSKSNIPFAVWVSSGKAGPGVSLEGAKERVNSLLLEKADLPEDYDDDSLIEFYSKNESKKFRKEIIARLESKKPEEEFDGRSLESVAWMAVELRGRIVGYYETILKDTGQKVPQVGVYRGAITAEARKASGFENRVELLGGKGKTRLDRRHHAMDALVIALMNQSVSKLLSWRMQLRDSQRISVMPETWKEFHGFTRDDYRHWEAWAKAMRIAVELFNDALEKDDVHFSENKRLGISLAKAHDDTIKSLCSYALGGAFSAELIDRAETPALWTALTKQPDFDVNNELPEDPTRCITVNGKQFGPTDEVNFFASGAPAIKVRGGFAGIGDTIHHARIYRIDGKKTTYAMVRVFQTDLRRMEHEDLFTEPLKPSTISMRTASKTIRKALADGTATQIGWLVEGDEIHIETDRYPSGQIGSLLKEYPEAFSWRVCGFPENAKIRLRPNLISEEGFDADISEDVVKLVSGKGWWVSPNTLLGNGPVTVIRRNALGEERWLSRAHLPVSVDLS

SEQ ID NO: 21915 - protein, 1100 aa, unidentified
  REGION 1..1100: note = Cas Enzyme sequence
MVAWKAGASTAPTGFLGAGGPRRTRRAKRETKKRLVALDRLLSEEFGWPLPNLEDYPDPYEPWHVRARLLDGYIADDAKRKEMLSIAMRHIARHRGWRNPYMKPASLASLPYPSEFLTNLNQDVSRVIGRKFAAEATQAQLVDAFILGSLSLATTPELQVLEESEKDNSKNKPRDIVLGRVRGDKGVIEGKLHQSDNAEEIRRICATQEVPQDQVERLIEAVFKAKNPREVGAAYKLVGHDELPGQKKYIRAERAHPAFQKFNIVATLTNLRINEAGSKRALSSEELQILTNYLSNVGPKDEVTWFDVAEKLEIDRSDLQGTARASYDGQAALKYPPKDVTSASIKQSKVKALKDWWKQASEDQRGQLIDYLSNSGGSDTPKTDDELDDLTKLTQSFSEKDLEELEKISLPAGRAAYSLNSLTKLTQLMLEEGIDLHEARKRLFNVDDDWKPTPEPINSPVGNPAVDRVLKQVARWINAATERWGIPASVNVEHVREGLVSEKVVRELIRDNEARHKKNMEVAEEIAKRLGLSGRALRSHTIKYFALRRQNCQCLYCGTKISFGTAEMDHIVPRTNGGSNNKRSNLAAVCRTCNASKSNIPFAVWVSSGKAGPGVSLDGAKERVNSLLLEKADLQKEDDSLVEIYSKKEGEKFKKEIIARLESKKPEEEFDGRSLESVAWMAVELHERILGYYESLLKDSGQKVPRVGVYRGAITAEARKASGFENRVELLGGKGKTRLDRRHHAMDALVIALMNQSVSKLLSWRMQLRDSQRISGMPETWKEFHGFNRDEYRRWNAWANAMRIAVELFNDALEKDEVHFSENKRLGISLAKAHDDTIKSLCSYALGGDFSVELIDRAETPALWTALTKQPDFDVKNGLPEDPTRCITVNGKQFGPTDEVDFFTTGAPAIKVRGGFAGIGDTIHHARIYRIDGKKTTYAMVRVFQTDLRRMKHKDLFTEPLKPSTISMRTASKTIRKALAAGTATQIGWLVEGDEIRVETDRYPSGQIGGLLKEYPEASSWRVCGFPDDARVRLRPNLISEEGFGADTSEDIAKIVSGIGWWVSLNVLLGNGPVTVIRCNALGEERWVSRAHLPVSVDLS

SEQ ID NO: 21916 - protein, 1148 aa, unidentified
  REGION 1..1148: note = Cas Enzyme sequence
MAVTLPKDDVRYKVGIDVGLNSIGFCAVEVDDDDCPIRLLNSLVFRHDAGVDPASRKAALTRKNVSGVARRNRRAKRETKKRLVALDRLLSEEFGWPLPNLEEYPDPYEPWHVRARLLDGYIADDAKRKEMLSIAMRHIARHRGWRNPYMKPASLASLPYPSEFLTNLNQDVSRVIGRKFASDATQGQLVDAFILGSLRLAATPALQVPEEPEKDSSKNKPRDIVLGRVRGDKGVIEGKLHQSDNAEEIRRICATQEVPQDQVERLIEAVFKAKNPREVGAANKLVGHDELPGQEKYIRAERAHPAFQKFNIVATLTNLRINEAGSKRRLSSKELQMLTNYLSNVGPKDEVTWFDVAEKLKIDRSDLQGTARASYDGQAALKYPPIDVTSVSIKKNKVKALKDWWKQASEDQRGQLIDYLSNSDRLDTPKTDDELDDLTKLTQSFSEKDLEELEKISLPTGRAAYSVNSLTRLTNLMLEEGIDLHEARKRLFNIGNDWKPAPEPINSPVGNPAVDRVLKQVARWIDAATERWGIPASVNVEHVREGLVSEKVVRELIRDNEARHKKNMEVAEATAKRLGLSGPVHRSHTIKYFALRRQNCQCLYCGTKISFETAEMDHIVPRTNGGSNNKRSNLAAVCRTCNASKSNIPFAVWVSSGKAGPGVSLEGAKERVNSLLLEKDDLQKEDDSLVEIYSKKESKNFRKEIIARLESKKPDEEFDGRSLESVAWMAVELHERILGYYENLLKDTGQKAPQVGVYRGAITAEARKASGFENRVELLGGKGKTRLDRRHHAMDALVIALMNQSVSKLLSWRMQLRDSQRISGMQETWKEFHGSNRDEYRRWNAWTNAMRIAVELFNDALEKDEVHFSENKRLGISLAKAHDDTIKSLCSYALGDALSAELIDRAETPALWTALTKQPDFDVKNGLPEDPTRCITVNGKQFGPTDEVNFFASGAPAIKVRGGFAGIGDTIHHARIYRIDGKKTTYAMVRVFQTDLRRMKHKDLFTEPLKPSTISMRTASKTIRKALAAGTATQIGWLVEGDEIRVETDRYPSGQIGGLLKEYPEASSWRVCGFPDDARVRLRPNLISEEGFDADISEDVVKLVSGKGWYVTLNIVLGNGAVTVIRRNTLGEERWVSRAHLPVSVDLS

SEQ ID NO: 21917 - protein, 1160 aa, unidentified
  REGION 1..1160: note = Cas Enzyme sequence
  REGION 70..73: note = misc_feature - Xaa can be any naturally occurring amino acid
MAVTLPKDDVRYKVGIDVGLNSIGFCAVEVDDDDCPIRLLNSLVFRHDAGVDPASRKAALTRKNVSGVAXXXXVFCVWGAPPHRGGAKRETKKRLVALDRLLSEEFGWPLPNLEEYPDPYEPWHVRARLLDGYIADDAKRKEMLSIAMRHIARHRGWRNPYMKPASLASLPYPSEFLTNLNQDVSRVIGRKFASDATQGQLVDAFILGSLRLAATPALQVPEEPEKDSSKNKPRDIVLGRVRGDKGVIEGKLHQSDNAEEIRRICATQEVPQDQVERLIEAVFKAKNPREVGAANKLVGHDELPGQEKYIRAERAHPAFQKFNIVATLTNLRINEAGSKRRLSSKELQMLTNYLSNVGPKDEVTWFDVAEKLKIDRSDLQGTARASYDGQAALKYPPIDVTSVSIKKNKVKALKDWWKQASEDQRGQLIDYLSNSDRLDTPKTDDELDDLTKLTQSFSEKDLEELEKISLPTGRAAYSINSLTRLTNLMLEEGIDLHEARKRLFNIGNDWKPAPEPINSPVGNPAVDRVLKQVARWIDAATERWGIPASVNVEHVREGLVSEKVVRELIRDNEARHKKNMEVAEATAKRLGLSGPVHRSHTIKYFALRRQNCQCLYCGTKISFETAEMDHIVPRTNGGSNNKRSNLAAVCRTCNASKSNIPFAVWVSSGKAGPGVSLEGAKERVNSLLLEKDDLQKEDDSLVEIYSKKESKNFRKEIIARLESKKPDEEFDGRSLESVAWMAVELHERILGYYENLLKDTGQKAPQVGVYRGAITAEARKASGFENRVELLGGKGKTRLDRRHHAMDALVIALMNQSVSKLLSWRMQLRDSQRISGMQETWKEFHGSNRDEYRRWNAWTNAMRIAVELFNDALEKDEVHFSENKRLGISLAKAHDDTIKSLCSYALGDALSAELIDRAETPALWTALTKQPDFDVKNGLPEDPTRCITVNGKQFGPTDEVNFFASGAPAIKVRGGFAGIGDTIHHARIYRIDGKKTTYAMVRVFQTDLRRMKHKDLFTEPLKPSTISMRTASKTIRKALAAGTATQIGWLVEGDEIRVETDRYPSGQIGGLLKEYPEASSWRVCGFPDDARVRLRPNLISEEGFDADISEDVVKLVSGKGWYVTLNIVLGNGAVTVIRRNTLGEERWVSRAHLPVSVDLS

SEQ ID NO: 21918 - protein, 1092 aa, unidentified
  REGION 1..1092: note = Cas Enzyme sequence
LRQPHFCGGGPRRTRRAKRETKKRLVALDRLLSEEFGWPLPNLEDYPDPYEPWHARARLLDGYIADDAKRKEMLSIAMRHIARHRGWRNPYMKPASLASLPYPSEFLTKLNEDTSRVIGRKFASDATQGQLVDAFILGSLSLATTPELQVLEESEKDNSKNKSRDIVLGRVRGDKGVIEGKLHQSDNAEEIRRICATQEVPQDQVERLIEAVFKAKNPREVGAAYKLVGHDELPGQKKYIRAERAHPAFQKFNIVATLTNLRINEAGSKRRLSSEELQILTNYLSNVGPKDEVTWFDVAEKLEIDRSDLQGTARASYDGQAALKYPPKNVTSASIKQSKVKALKDWWKQASEDQRGQLIDYLSNSGGSDTPKTDDELDDLTKLTQSFSEKDLEELEKISLPAGRAAYSLNSLTKLTQLMLEEGIDLHEARKRLFNVDDDWKPTPEPINSPVGNPAVDRVLKQVARWINAATERWGIPASVNVEHVREGLVSEKVVRELIRDNEARHKKNMEVAEEIAKRLGLSGRALRSHTIKYFALRRQNCQCLYCGTKISFGTAEMDHIVPRTNGGSNNKRSNLAAVCRTCNASKSNIPFAVWVSSGKAGPGVSLEGAKERVNSLLLEKADLPEDYDDDSLIEFYSKNESKKFRKEVIARLESKKPDEEFDGRSLESVAWMAVELHERILGYYESLLKDASQKVPQVGVYRGEITAEARKASGFENRVELLGGKGKTRLDRRHHAMDALVIALMNQSVSKLLSWRMQLRDSQRISGKPETWKEFHGSDRDGNRHWKAWANAMQIAVELFNDALEKDEVHFSENKRLGISLAKAHDDTIKSLCSYALGDALSAELIDRAETPALWTALTKQPDFDVKNGLPEDPTRCITVNGKQFGPTDEVNFFASGAPAIKVRGGFAGIGDTIHHARIYRIDGKKTTYAMIRVFQTDLRRMEHEDLFTEPLKPSTISMRTASKTIRKALADGTATQIGWLVEGDEIRIETDHYPSDDIGKLLDEYSEASSWRVCGFPDVLKIRLRPNLLSEEGFDDNTAAAVRKIVSGDGWRVSMNTVLSGGLVTVIRRNALGEERWVSRANLPVSVDLS

SEQ ID NO: 21919 - protein, 1061 aa, unidentified
  REGION 1..1061: note = Cas Enzyme sequence
LSEEFGWPLPNLEEYPDPYEPWHARARLLDGYIADDAKRKEMLSIAMRHIARHRGWRNPYMKPASLASLPYPSEFLTKLNEDTSRVIRQKFAAEATQGQLVDAFILGSLSLAATPELQVLEESEKDNSKNKPRDIVLGRVRGDKGVIEGKLHQSDNAEEIRRICATQEVPQDQVERLIEAVFKAKNPREVGAACKLVGHDELPGQKKYIRAERAHPAFQKFNIVATLTNLRINEAGSKRRLSSKELQMLTNYLSNVGPKDEVTWFDVAEKLKINRSDLQGTARASYDGQAALKYPPKDVTSASIKQSKVKALKDWWKQASEDQRGQLIDYLSNSGGSDTPKTDDEHNDLTKLTQSFSEKDLEELEKISLPAGRAAYSLNSLTKLTQLMLEEGIDLHEARKKLFNVDNDWKPASEPINSPVGNPAVDRVLKQVARWINAATERWGIPASVNVEHVREGLVSEKVVRELIRDNEARHKKNMEVAEATAKRLGLSGRALRSHTIKYFALRRQNCQCLYCGTKISFVTAEMDHIVPRTNGGSNNKRSNLAAVCRTCNASKSNIPFAVWVSSGKAGPGVSLEGAKERVNSLLLEKADLPEDYDDDSLIEFYSKNESKKFRKEIIARLESKKPDEEFDGRSLESVAWMAVELRERIVGYYESLLKDTGQKAPQVGVYRGAITAEARKASGFENRVRLLGGKGKTRLDRRHHAMDALVIALMNQSVSKLLSWRMQLRDSQRISGMQETWKEFHGSNRDEYRRWNAWTNAMRIAVELFNDALEKDEVHFSENKRLGISLAKAHDDTIKSLCSYALGDALSAELIDRAETPALWTALTKQPDFDVKNGLPEDPTRCITVNGKQFGPTDEVNFFASGAPAIKVRGGFAGIGDTIHHARIYRIDGKKTTYAMVRVFQTDLRRMKHKDLFTEPLKPSTISMRTASKTIRKALADGTATQIGWLVEGDEIYIETDRYSSDKIGSLLKEYPEASSWRVCGFPSAIKIRLRPNLLSEEGFDSYTSEAVSSLVSGPGWYVSINTVLGNGAVTVIRRNTLGEERWVSRAHLPVSVDLS

SEQ ID NO: 21920 - protein, 1086 aa, unidentified
  REGION 1..1086: note = Cas Enzyme sequence
KDVGGAPRRTGGAKRETKKRLVALDRLLSEEFGWPLPNLEEYPDPYEPWHVRARLLDGYIADDAKRKEMLSIAMRHIARHRGWRNPYMKPASLASLPYPSEFLTNLNQDVSRVIGRKFASDATQGQLVDAFILGSLRLAATPALQVPEEPEKDSSKNKPRDIVLGRVRGDKGVIEGKLHQSDNAEEIRRICATQEVPQDQVERLIEAVFKAKNPREVGAANKLVGHDELPGQEKYIRAERAHPAFQKFNIVATLTNLRINEAGSKRRLSSKELQMLTNYLSNVGPKDEVTWFDVAEKLKIDRSDLQGTARASYDGQAALKYPPIDVTSVSIKKNKVKALKDWWKQASEDQRGQLIDYLSNSDRLDTPKTDDELDDLTKLTQSFSEKDLEELEKISLPTGRAAYSVNSLTRLTNLMLEEGIDLHEARKRLFNIGNDWKPAPEPINSPVGNPAVDRVLKQVARWIDAATERWGIPASVNVEHVREGLVSEKVVRELIRDNEARHKKNMEVAEATAKRLGLSGRVHRSHTIKYFALRRQNCQCLYCGTKISFETAEMDHIVPRTNGGSNNKRSNLAAVCRTCNASKSNIPFAVWVSSGKAGPGVSLEGAKERVNSLLLEKDDLQKEDDSLVEIYSKKESKNFRKEIIARLESKKPDEEFDGRSLESVAWMAVELHERILGYYENLLKDTGQKAPQVGVYRGAITAEARKASGFENRVELLGGKGKTRLDRRHHAMDALVIALMNQSVSKLLSWRMQLRDSQRISGMQETWKEFHGSNRDEYRRWNAWTNAMRIAVELFNDALEKDEVHFSENKRLGISLAKAHDDTIKSLCSYALGDALSAELIDRAETPALWTALTKQPDFDVKNGLPEDPTRCITVNGKQFGPTDEVNFFASGAPAIKVRGGFAGIGDTIHHARIYRIDGKKTTYAMVRVFQTDLRRMKHKDLFTEPLKPSTISMRTASKTIRKALAAGTATQIGWLVEGDEIRVETDRYPSGQIGGLLKEYPEASSWRVCGFPDDARVRLRPNLISEEGFDADISEDVVKLVSGKGWYVTLNIVLGNGAVTVIRRNTLGEERWVSRAHLPVSVDLS

SEQ ID NO: 21921 - protein, 1131 aa, unidentified
  REGION 1..1131: note = Cas Enzyme sequence
MSEHTKYRIGIDVGDRSVGLAAIEFDDDGFPLSNLAMVTYRHDGGLDPTTNKSPKSRKETRGVALRTMRMRRRKKSRLKDLDKTLRALGYVVPACEEPQTYEAWKSRALLATTKVEGAQELGEHLVRAVRHMARHRGWRNPWWTFNQLEIASTAPSDTFAKIRERAEKEWPGVVPEEATLGMIGALAASNNVLLRPRTYRKDQPRHSKKLNVLGQEPILVDKVRQEDLLAELRTICKKQDIEDQYEKLAQAVFEQTRPYVPLDRVGKDPLQPNKSRASRASLEFQRFRILDAVAHLRVRVGASDRRALTDEEHDKAVHFLMGYSKKDVPTWGDVADEIGVEPAHLIAPVIDDVRLNKAPYDRSSTEFEQKMKKKTRARQWWDEANLESRSQLILLVSDPTDETMRLAEVSGLYEVFESWPDEEKEALEGLKVESGRAAYSTDTLNKLSDHMRLKRIDLHEARKIAFGVDDMWHPPLDRIDEPTGQPTVDRVLTIVRRFIFDCERAWGRPENVVIEHARTGLMGPAQRADVLNELAKNRKKNDKIREDLRAGGINNPTRADIRRNAIVQDQESQCLYCGATIGISYSELDHIVPRAGGGSSRRENLAAVCRACNDSKKDTPFAVWAKNTSRPVTLEGTIQRLRELKAFKRPKDRRMVDLIIRRLKQTEKDDPIDERSLASTSYAATAIRERIEQYFNEKAEKLDLAKVHIDVYSGSLTRESRRAGGIDKMVLLRGQSDKNRFDVRHHAIDAAVLTLLNRSVAVTLEQRRLIKQQREYSLEKSRRERDNVWRDFMGLGPAAQEKFAKWKKTAYVLADIIKEAISNDAIPVVSPLRLRPQNGSVHLDTVDAVLERTISDAWTVDQVHRIVNPQIYLAFAGYLGNQKALDPDSSRVLALNDGRKLTAEDVIYVFPEKAASILTPRGVAKIGESVHHVRLYAWKNRKGKAEVGMLRVFGAEFPWLMRESGVKDVLRVPIHTGSQSYRDLSFTVRKNIEKGEAAEIGWLTQNEELEFNPESYLQEGGKDKLAKFLAFLPETRWRVDGFPMPDKLRIRPALLSREEIPEGVFRTEEQSLLEEALTKGLIIATKGLLSLPDVKVLRRNNLGIPRWRGGSYRPVSLDIQRAALAALDEQE

SEQ ID NO: 21922 - protein, 1135 aa, unidentified
  REGION 1..1135: note = Cas Enzyme sequence
MSEHTKYRIGIDVGDRSVGLAAIEFDDDGFPLSNLAMVTYRHDGGLDPTTNKSPKSRKETRGVALRTMRMRRRKKSRLKDLDKTLRALGYVVPACEEPQTYEAWKSRALLATTKVEGAQELGEHLVRAVRHMARHRGWRNPWWTLNQLEIASTAPSDTFAKIRERAEKEWPGMVPEEATLGMIGALAASNNVLLRPRTYRKDQPRHSKKLNVLGQEPILVDKVRQEDLLAELRTICKRQNIEDQYEKLAQAVFEQTRPYVPLDRVGKDPLQPNKSRASRASLEFQRFRILDAVAHLRVRVGVSDRRALTDEEHDKAVHFLMGYSKKDVPTWGDVADEIGVEPAHLIAPVIDDVRLNKAPYDRSSTEFEQKMKKKTRARQWWDEANLESRSQLILLVSDPTDETTRLAEVSGLYEVFESWPDEEKEALEGLKVESGRAAYSTDTLNKLSDHMRLKRIDLHEARKIAFGVDDMWHPPLDRIDEPTGQPTVDRVLTIVRRFIFDCERAWGRPENVVIEHARTGLMGPAQRADVLHEIAKNRKKNDKIREDLRAGGINNPTRADIRRNAIVQDQESQCLYCGATIGVSYSELDHIVPRAGGGSSRRENLAAVCRACNDSKKDTPFAVWAKNTSRPVTLEGTIQRLRELKAFKRPKDRRMVDLIIRRLKQTEKDDPIDERSLASTSYAATAIRERIEQYFNEKAEKLDLAKVHIDVYSGSLTRESRRAGGIDKMVLLRGQSDKNRFDVRHHAIDAAVLTLLNRSVAVTLEQRRLIKQQREYSLEKSRRERDNVWRDFMGLGPAAQEKFAKWKKTAYVLADIIKEAISNDAIPVVNPLRLRPQNGSVHLDTVDGVLERTIGDAWTVDQVHRIVNPQIYLAFAGYLGNQKALDPDSSRVLALNDGRKLTAEDVIYVFPEKAASILTPRGVVKIGESVHHVRLYAWKNRKGKAEVGMLRVFGAEFPWLMRESGVKDVLRVPIHTGSQSYRDLSDTVCKHIEQGVAQEIGWVTQNDELEFDPDDYLQNGGKDKLAKFLSFMPENRWRIDGFQTSTKLRIRPALLSWEELPTRLYGKELAENQYALLEESLKTGLIIATKGLLSLESSKIIRRNNLGIPRWRGGSYRPVSLDIQRAALAALDEQE

SEQ ID NO: 21923 - protein, 1131 aa, unidentified
  REGION 1..1131: note = Cas Enzyme sequence
MSEHTKYRIGIDVGDRSVGLAAIEFDDDGFPLSNLAMVTYRHDGGLDPTTNKSPKSRKETRGVALRTMRMRRRKKSRLKELDKTLRALGYVVPACEEPQTYEAWKSRALLATTKVEGAQELGEHLVRAVRHMARHRGWRNPWWTLNQLEIASTAPSDTFAKIRERAEKEWPGMVPEEATLGMIGALAASNNVLLRPRTYRKDQPRHSKKLNVLGQEPILVDKVRQEDLLAELRTICKRQNIEDQYEKLAQAVFEQTRPYVPLDRVGKDPLQPNKSRASRASLEFQRFRILDAVAHLRVRVGVSDRRALTDEEHDKAVHFLMGYSKKDVPTWGDVADEIGVEPAHLIAPVIDDVRLNKAPYDRSSTEFEQKMKKKTRARQWWDEANLESRSQLILLVSDPTDETMRLAEVSGLYEVFESWPDEEKEALEGLKVESGRAAYSTDTLNKLSDHMRLKRIDLHEARKIAFGVDDMWHPPLDRIDEPTRQPTVDRVLTIVRRFIFDCERAWGRPENVVIEHARTGLMGPAQRADVLNEIAKNRKKNDKIREDLRAGGINNPTRADIRRNAIVQDQESQCLYCGATIGVSYSELDHIVPRAGGGSSRRENLAAVCRACNDSKKDTPFAVWAKNTSRPVTLEGTIQRLRELKAFKRPKDRRMVDLIIRRLKQTEKDDPIDERSLASTSYAATAIRERIEQYFNEKAEKLDLAKVHIDVYSGSLTRESRRAGGIDKMVLLRGQSDKNRFDVRHHAIDAAVLTLLNRSVAVTLEQRRLIKQQREYSLEKSRRERDNVWRDFMGLGPAAQEKFAKWKKTAYVLADIIKEAISNDAIPVVSPLRLRPQNGSVHLDTVDAVLERTIGDAWTVDQVHRIVNPQIYLAFAGYLGNQKALDPDSSRVLALNDGRKLTAEDVIYVFPEKAASILTPRGVVKIGESVHHVRLYAWKNRKGKAEVGMLRVFGAEFPWLMRESGVKDVLRVPIHTGSQSYRDLSFTVRKNIEKGEAVEIGWLTQNEELEFNPESYLQEGGKDKLAKFLAFLPETRWRVDGFPMPDKLRIRPALLSREEIPEGVFGTEEQSLLEEALTKGLIIATKGLLSLPDVKVLRRNNLGIPRWRGGSYRPVSLDIQRAALAVLDEQE

SEQ ID NO: 21924 - protein, 1131 aa, unidentified
  REGION 1..1131: note = Cas Enzyme sequence
MSEHTKYRIGIDVGDRSVGLAAIEFDDDGFPLSNLAMVTYRHDGGLDPTTNKSPKSRKETRGVALRTMRMRRRKKSRLKDLDKTLRALGYVVPACEEPQTYEAWKSRALLATTKVEGAQELGEHLVRAVRHMARHRGWRNPWWTLNQLEIASTAPSDTFAKIRERAEKEWPGMVPEEATLGMIGALAASNNVLLRPRTYRKDQPRHSKKLNVLGQEPILVDKVRQEDLLAELRTICKRQNIEDQYEKLAQAVFEQTRPYVPLDRVGKDPLQPNKSRASRASLEFQRFRILDAVAHLRVRVGVSDRRALTDEEHDKAVHFLMGYSKKDVPTWGDVADEIGVEPAHLIAPVIDDVRLNKAPYDRSSTEFEQKMKKKTRARQWWDEANLESRSQLILLVSDPTDETTRLAEVSGLYEVFESWPDEEKEALEGLKVESGRAAYSTDTLNKLSDHMRLKRIDLHEARKIAFGVDDMWHPPLDRIDEPTGQPTVDRVLTIVRRFIFDCERAWGCPENVVIEHARTGLMGPAQRADVLHEIAKNRKKNDKIREDLRAGGINNPTRADIRRNAIVQDQESQCLYCGATIGVSYSELDHIVPRAGGGSSRRENLAAVCRACNDSKKDTPFAVWAKNTSRPVTLEGTTQRLRELKAFKRPKDRRMLDLIIRRLKQTEKDDPIDERSLASTSYAATAIRERIEQYFNEKAEKLDLAKVHIDVYSGSLTRESRRAGGIDKMVLLRGQSDKNRFDVRHHAIDAAVLTLLNRSVAVTLEQRRLIKQQREYSLEKSRRERDNVWRDFMGLGPAAQEKFAKWKKTAYVLADIIKEAISNDAIPVVSPLRLRPQNGSVHLDTVDAVLERTIGDAWTVDQVHRIVNPQIYLAFAGYLGNQKALDPDSSRVLALNDGRKLTAEDVIYVFPEKAASILTPRGVVKIGESVHHVRLYAWKNRKGKAEVGMLRVFGAEFPWLMRESGVKDVLRVPIHTGSQSYRDLSFTVRKNIEKGEAVEIGWLTQNEELEFNPESYLQEGGKDKLAKFLAFLPETRWRVDGFPMPDKLRIRPALLSREEIPEGVFRTEEQSLLEEALTKGLIIATKGLLSLPDVKVLRRNNLGIPRWRGGSYRPVSLDIQRAALAALDEQE

SEQ ID NO: 21925 - protein, 1135 aa, unidentified
  REGION 1..1135: note = Cas Enzyme sequence
MSEHTKYRIGIDVGDRSVGLAAIEFDDDGFPLSNLAMVTYRHDGGLDPTTNKSPKSRKETRGVALRTMRMRRRKKSRLKELDKTLRALGYVVPACEEPQTYEAWKSRALLATTKVEGAQELGEHLVRAVRHMARHRGWRNPWWTLNQLEIASTAPSDTFAKIRERAEKEWPGMVPEEATLGMIGALAASNNVLLRPRTYRKDQPRHSKKLNVLGQEPILVDKVRQEDLLAELRTICKRQNIEDQYEKLAQAVFEQTRPYVPLDRVGKDPLQPNKSRASRASLEFQRFRILDAVAHLRVRVGVSDRRALTDEEHDKAVHFLMGYSKKDVPTWGDVADEIGVEPAHLIAPVIDDVRLNKAPYDRSSTEFEQKMKKKTRARQWWDEANLESRSQLILLVSDPTDETTRLAEVSGLYEVFESWPDEEKEALEGLKVESGRAAYSTDTLNKLSDHMRLKRIDLHEARKIAFGVDDMWHPPLDRIDEPTGQPTVDRVLTIVRRFIFDCERAWGRPENVVIEHARTGLMGPAQRADVLHEIAKNRKKNDKIREDLRAGGINNPTRADIRRNAIVQDQESQCLYCGATIGVSYSELDHIVPRAGGGSSRRENLAAVCRACNDSKKDTPFAVWAKNTSRPVTLEGTIQRLRELKAFKRPKDRRMVDLIIRRLKQTEKDDPIDERSLASTSYAATAIRERIEQYFNEKAEKLDLAKVHIDVYSGSLTRESRRAGGIDKMVLLRGQSDKNRFDVRHHAIDAAVLTLLNRSVAVTLEQRRLIKQQREYSLEKSRRERDNVWRDFMGLGPAAQEKFAKWKKTAYVLADIIKEAISNDAIPVVNPLRLRPQNGSVHLDTVDGVLERTIGDAWTVDQVHRIVNPQIYLAFAGYLGNQKALDPDSSRVLALNDGRKLTAEDVIYVFPEKAASILTPRGVVKIGESVHHVRLYAWKNRKGKAEVGMLRVFGAEFPWLMRESGVKDVLRVPIHTGSQSYRDLSDTVCKHIEQGVAQEIGWVTQNDELEFDPDDYLQNGGKDKLAKFLSFMPENRWRIDGFQTSTKLRIRPALLSWEELPTRLYGKELAENQYALLEESLKTGLIIATKGLLSLESSKIIRRNNLGIPRWRGGSYRPVSLDIQRAALAALDEQE

SEQ ID NO: 21926 - protein, 1131 aa, unidentified
  REGION 1..1131: note = Cas Enzyme sequence
MSEHTKYRIGIDVGDRSVGLAAIEFDDDGFPLSNLAMVTYRHDGGLDPTTNKSPKSRKETRGVALRTMRMRRRKKSRLKELDKTLRALGYVVPACEEPQTYEAWKSRALLATTKVEGAQELGEHLVRAVRHMARHRGWRNPWWTLNQLEIASTAPSDTFAKIRERAEKEWPGVVPEEATLGMIGALAASNNVLLRPRTYRKDQPRHSKKLNVLGQEPILVDKVRQEDLLAELRTICKKQDIEDQYEKLAQAVFEQTRPYVPLDRVGKDPLQPNKSRASRASLEFQRFRILDAVAHLRVRVGVSDRRALTDEEHDKAVHFLMGYSKKDVPTWGDVADEIGVEPAHLIAPVIDDVRLNKAPYDRSSTEFEQKMKKKTRARQWWDEANLESRSQLILLVSDPTDETMRLAEVSGLYEVFESWPDEEKEALEGLKVESGRAAYSTDTLNKLSDHMRLKRIDLHEARKIAFGVDDMWHPPLDRIDEPTGQPTVDRVLTIVRRFIFDCERAWGCPENVVIEHARTGLMGPAQRADVLNEIAKNRKKNDKIREDLRAGGINNPTRADIRRNAIVQDQESQCLYCGATIGVSYSELDHIVPRAGGGSSRRENLAAVCRACNDSKKDTPFAVWAKNTSRPVTLEGTIQRLRELKAFKRPKDRRMVDLIIRRLKQTEKDDPIDERSLASTSYAATAIRERIEQYFNEKAEKLDLAKVHIDVYSGSLTRESRRAGGIDKMVLLRGQSDKNRFDVRHHAIDAAVLTLLNRSVAVTLEQRRLIKQQREYSLEKSRRERDNVWCDFMGLGPAAQEKFAKWKKTAYVLADIIKEAISNDAIPVVNPLRLRPQNGSVHLDTVDGVLERTIGDAWTVDQVHRIVNPQIYLAFAGYLGNQKALDPDSSRVLALNDGRKLTAEDVIYVFPEKAASILTPRGVVKIGESVHHVRLYAWKNRKGKAEVGMLRVFGAEFPWLMRESGVKDVLRVPIHTGSQSYRDLSFTVRKNIEKGEAAEIGWLTQNEELEFNPESYLQEGGKDKLAKFLAFLPETRWRVDGFPMPDKLRIRPALLSREEIPEGVFRTEEQSLLEEALTKGLIIATKGLLSLPDVKVLRRNNLGIPRWRGSSYRPVSLDIQRAALAALDEQE

SEQ ID NO: 21927 - protein, 1131 aa, unidentified
  REGION 1..1131: note = Cas Enzyme sequence
MSEHTKYRIGIDVGDRSVGLAAIEFDDDGFPLSNLAMVTYRHDGGLDPTTNKSPKSRKETRGVALRTMRMRRRKKSRLKELDKTLRALGYVVPACEEPQTYEAWKSRALLATTKVEGAQELGEHLVRAVRHMARHRGWRNPWWTFNQLEIASTAPSDTFAKIRERAEKEWPGVVPEEATLGMIGALAASNNVLLRPRTYRKDQPRHSKKLNVLGQEPILVDKVRQEDLLAELRTICKRQNIEDQYEKLAQAVFEQTRPYVPLDRVGKDPLQPNKSRASRASLEFQRFRILDAVAHLRVRVGVSGRRALTDEEHDKAVHFLMGYSKKDVPTWGDVADEIGVEPAHLIAPVIDDVRLNKAPYDRSSTEFEQKMKKKTRARQWWDEANLESRSQLILLVSDPTDETMRLAEVSGLYEVFESWPDEEKEALEGLKVESGRAAYSTDTLNKLSDHMRLKRIDLHEARKIAFGVDDMWHPPLDRIDEPTGQPTVDRVLTIVRRFIFDCERAWGCPENVVIEHARTGLMGPAQRADVLNEIAKNRKKNDKIREDLRAGGINNPTRADIRRNAIVQDQESQCLYCGATIGVSYSELDHIVPRAGGGSSRRENLAAVCRACNDSKKDTPFAVWAKNTSRPVTLEGTIQRLRELKAFKRPKDRRMVDLIIRRLKQTKKDDPIDERSLASTSYAATAIRERIEQYFNEKAEKLDLAKVHIDVYSGSLTRESRRAGGIDKMVLLRGQSDKNRFDVRHHAIDAAVLTLLNRSVAVTLEQRRLIKQQREYSLEKSRRERDNVWRDFMGLGPAAQEKFAKWKKTAYVLADIIKEAISNDAIPVVSPLRLRPQNGSVHLDTVDAVLERTIGDAWTVDQVHRIVNPQIYLAFAGYLGNQKALDPDSSRVLALNDGRKLTAEDVIYVFPEKAASILTPRGVVKIGESVHHVRLYAWKNRKGKAEVGMLRVFGAEFPWLMRESGVKDVLRVPIHTGSQSYRDLSFTVRKNIEKGEAAEIGWLTQNEELEFNPESYLQEGGKDKLAKFLAFLPETRWRVDGFPMPDKLRIRPALLSREEIPEGVFRTEEQSLLEEALTKGLIIATKGLLSLPDVKVLRRNNLGIPRWRGGSYRPVSLDIQRAALAALDEQE

SEQ ID NO: 21928 - protein, 1135 aa, unidentified
  REGION 1..1135: note = Cas Enzyme sequence
MSEHTKYRIGIDVGDRSVGLAAIEFDDDGFPLSNLAMVTYRHDGGLDPTTNKSPKSRKETRGVALRTMRMRRRKKSRLKDLDKTLRALGYVVPACEEPQTYEAWKSRALLATTKVEGAQELGEHLVRAVRHMARHRGWRNPWWTFNQLEIASTAPSDTFAKIRERAEKEWPGVVPEEATLGMIGALAASNNVLLRPRTYRKDQPRHSKKLNVLGQEPILVDKVRQEDLLAELRTICKRQNIEDQYEKLAQAVFEQTRPYVPLDRVGKDPLQPNKSRASRASLEFQRFRILDAVAHLRVRVGVSDRRALTDEEHDKAVHFLMGYSKKDVPTWGDVADEIGVEPAHLIAPVIDDVRLNKAPYDRSSTEFEQKMKKKTRARQWWDEANLESRSQLILLVSDPTDETMRLAEVSGLYEVFESWPDEEKEALEGLKVESGRAAYSTDTLNKLSDHMRLKRIDLHEARKIAFGVDDMWHPPLDRIDESTGQPTVDRVLTIVRRFIFDCERAWGRPENVVIEHARTGLMGPAQRADVLNEIAKNRKKNDKIREDLRAGGINNPTRADIRRNAIVQDQESQCLYCGATIGVSYSELDHIVPRAGGGSSRRENLAAVCRACNDSKKDTPFAVWAKNTSRPVTLEGTIQRLRELKAFKRPKDRRMVDLIIRRLKQTEKDDPIDERSLASTSYAATAIRERIEQYFNEKAEKLDLAKVHIDVYSGSLTRESRRAGGIDKMVLLRGQSDKNRFDVRHHAIDAAVLTLLNRSVAVTLEQRRLIKQQREYSLEKSRRERDNVWRDFMGLGPAAQEKFAKWKKTAYVLADIIKEAISNDAIPVVNPLRLRPQNGSVHLDTVDGVLERTISDAWTVDQVHRIVNPQIYLAFAGYLGNQKALDPDSSRVLALNDGRKLTAEDVIYVFPEKAASILTPRGVVKIGESVHHVRLYAWKNRKGKAEVGMLRVFGAEFPWLMRESGVKDVLRVPIHTGSQSYRDLSDTVCKHIEQGVAQEIGWVTQNDELEFDPDDYLQNGGKDKLAKFLSFMPENRWRIDGFQTSTKLRIRPALLSWEELPTRLYGKELAENQYALLEESLKTGLIIATKGLLSLESSKIIRRNNLGIPRWRGGSYRPVSLDIQRAALAALDEQE

SEQ ID NO: 21929 - protein, 1131 aa, unidentified
  REGION 1..1131: note = Cas Enzyme sequence
MSEHTKYRIGIDVGDRSVGLAAIEFDDDGFPLSNLAMVTYRHDGGLDPTTNKSPKSRKETRGVALRTMRMRRRKKSRLKELDKTLRALGYVVPACEEPQTYEAWKSRALLATTKVEGAQELGEHLVRAVRHMARHRGWRNPWWTLNQLEIASTAPSDTFAKIRERAEKEWPGMVPEEATLGMIGALAASNNVLLRPRTYRKDQPRHSKKLNVLGQEPILVDKVRQEDLLAELRTICKRQNIEDQYEKLAQAVFEQTRPYVPLDRVGKDPLQPNKSRASRASLEFQRFRILDAVAHLRVRVGVSDRRALTDEEHDKAVHFLMGYSKKDVPTWGDVADEIGVEPAHLIAPVIDDVRLNKAPYDRSSTEFEQKMKKKTRARQWWDEANLESRSQLILLVSDPTDETMRLAEVSGLYEVFESWPDEEKEALEGLKVESGRAAYSTDTLNKLSDHMRLKRIDLHEARKIAFGVDDMWPPPLDRIDEPTRQPTVDRVLTIVRRFIFDCERAWGRPENVVIEHARTGLMGPAQRADVLNEIAKNRKKNDKIREDLRAGGINNPTRADIRRNAIVQDQESQCLYCGATIGVSYSELDHIVPRAGGGSSRRENLAAVCRACNDSKKDTPFAVWAKNTSRPVTLEGTIQRLRELKAFKRPKDRRMVDLIIRRLKQTEKDDPIDERSLASTSYAATAIRERIEQYFNEKAEKLDLAKVHIDVYSGSLTRESRRAGGIDKMVLLRGQSDKNRFDVRHHAIDAAVLTLLNRSVAVTLEQRRLIKQQREYSLEKSRRERDNVWRDFMGLGPAAQEKFAKWKKTAYVLADIIKEAISNDAIPVVSPLRLRPQNGSVHLDTVDAVLERTIGDAWTVDQVHRIVNPQIYLAFAGYLGNQKALDPDSSRVLALNDGRKLTAEDVIYVFPEKAASILTPRGVVKIGESVHHVRLYAWKNRKGKAEVGMLRVFGAEFPWLMRESGVKDVLRVPIHTGSQSYRDLSFTVRKNIEKGEAVEIGWLTQNEELEFNPESYLQEGGKDKLAKFLAFLPETRWRVDGFPMPDKLRIRPALLSREEIPEGVFGTEEQSLLEEALTKGLIIATKGLLSLPDVKVLRRNNLGIPRWRGGSYRPVSLDIQRAALAVLDEQE

SEQ ID NO: 21930 - protein, 1131 aa, unidentified
  REGION 1..1131: note = Cas Enzyme sequence
MSEHTKYRIGIDVGDRSVGLAAIEFDDDGFPLSNLAMVTYRHDGGLDPTTNKSPKSRKETRGVALRTMRMRRRKKSRLKDLDKTLRALGYVVPACEEPQTYEAWKSRALLATTKVEGAQELGEHLVRAVRHMARHRGWRNPWWTFNQLEIASTAPSDTFAKIRERAEKEWPGVVPEEATLGMIGALAASNNVLLRPRTYRKDQPRHSKKLNVLGQEPILVDKVRQEDLLAELRTICKKQDIEDQYEKLAQAVFEQTRPYVPLDRVGKDPLQPNKSRASRASLEFQRFRILDAVAHLRVRVGVSGRRALTDEEHDKAVHFLMGYSKKDVPTWGDVADEIGVEPAHLIAPVIDDVRLNKAPYDRSSTEFEQKMKKKTRARQWWDEANLESRSQLILLVSDPTDETMRLAEVSGLYEVFESWPDEEKEALEGLKVESGRAAYSTDTLNKLSDHMRLKRIDLHEARKIAFGVDDMWHPPLDRIDEPTGQPTVDRVLTIVRRFIFDCERAWGCPENVVIEHARTGLMGPAQRADVLNEIAKNRKKNDKIREDLRAGGINNPTRADIRRNAIVQDQESQCLYCGATIGVSYSELDHIVPRAGGGSSRRENLAAVCRACNDSKKDTPFAVWAKNTSRPVTLEGTIQRLRELKAFKRPKDRRMVDLIIRRLKQTKKDDPIDERSLASTSYAATAIRERIEQYFNEKAEKLDLAKVHIDVYSGSLTRESRRAGGIDKMVLLRGQSDKNRFDVRHHAIDAAVLTLLNRSVAVTLEQRRLIKQQREYSLEKSRRERDNVWRDFMGLGPAAQEKFAKWKKTAYVLADIIKEAISNDAIPVVSPLRLRPQNGSVHLDTVDAVLERTIGDAWTVDQVHRIVNPQIYLAFAGYLGNQKALDPDSSRVLALNDGRKLTAEDVIYVFPEKAASILTPRGVVKIGESVHHVRLYAWKNRKGKAEVGMLRVFGAEFPWLMRESGVKDVLRVPIHTGSQSYRDLSFTVRKNIEKGEAAEIGWLTQNEELEFNPESYLQEGGKDKLAKFLAFLPETRWRVDGFPMPDKLRIRPALLSREEIPEGVFRTEEQSLLEEALTKGLIIATKGLLSLPDVKVLRRNNLGIPRWRGGSYRPVSLDIQRAALAALDEQE

SEQ ID NO: 21931 - protein, 1384 aa, unidentified
  REGION 1..1384: note = Cas Enzyme sequence
MAMRKNQDYYLGLDIGTDSVGYAATNPDYSLLKYRGEPMWGAMTFDEGSNAAERRGYRIARRRLDRRKQRLQLLQELFAVEIGKIDPNFFIRRKESILFPEDSSCGVQIFQGGGITDKDYHRRYPTIHHLILDLMSDSQPHDIRLVYLACSWLIAHRGHFLFDIDPKNTDQLLNFSEIYRSELCVFLDNHEFPHPWPDTVDPKRISEIMCMQAGVAGKKAAFKEQVYEGKAIPKGKSEESWYAIDQAIALLSGGKVKLAALFPDLESEESICLSGDDETFAQTISALDEDQAEFLSCLRKLADCARLTATMTASDGKQYSYISAAKIAVYDRHKADLEYLKGFLRTYHPEKFSEVFRQIREDNYVTYSKHISSVKKKDRPAKFKWSTKDKFSDSLKKIVKDTPVSDEDRPAYEDMLFRLDQRTFLPKQRDSDNRIIPQQLYRMELDQILRNAEGYLPLLRQCDADGLTVKEKILSIFSFHIPYYVGPLNRSSGNAWFQRKADGKILPWNLEKIVDLDASEDAFIRRMTNQCTYLPGEDVLPEKSLLYGRFTVLNELNNLKVNGCPIPVDVKQLLFTQVFCRYKRVTPKKLKECLISNGLVEKDAELSGIDETIHANLSAYHIFRNLLESKQLTEAQVEEIISRCAYSEDKGRLLRWLRENYALSDCRYISCQNLKGFGRLSRRFLTQLQGGLVSDGERKSILEWMWDTNENLMQLLSDRYTFSQTIQAESLAYYAKPEHQKTLAQRLKDERLPGSVRRAIHRTLDIVQDVANAAGAPQKIFVEMARGGTPDQKGKRTRSRKNQLLDIYSSIKTQESRQLQKQIEDMGEMADNHLQSDALFLYFLQMGKSAYTGRPIDLAKLGTDTYYNKDHIYPQSLTKDDSVLNNLVLVESTINDRKKAIYPVAREIRESQKDFWETLRKNGLMSEEKFRRLTRATQLTDAEKMGFINRQLVETRQSTKVIAQLLQEKFPHSEIVYVKAGLVSEFRQEYKIVKCRSVNDLHHAKDAYLNIVVGNVYHERFNKRWFRLTDDYNVELKKIMKYPLSHGEEVIWRGEADIAKVKKIAEKNAVHLTRYAFKRTSISNANKHAGLFNQQLEKANSGLVPRKKYLNRSEISSTRKELPPEKYGGYNSATISYFVLVRFQLQNRQDIMIVPVELYLAERFEHDFDFAIKYVTAAISEAKSKKEVKSIQFLLNGRKLKINTVFSFDGCRMYLAGKSGKDLLFAPVTPLIVGSDAESYIKKLQVFQEKQHINPGIQLDENFDGISKSKNLLLYNIFAKKLNSAPFKYYPLNPYSVIDAGRAAFQNLPVNEQIDSLLKILNLFRKEGSGGVDLTAIGGKGRSAAKVKSATVSNWGKINTDIRIIDSSPAGLIEAYSHNLLDLL

SEQ ID NO: 21932 - protein, 1178 aa, unidentified
  REGION 1..1178: note = Cas Enzyme sequence
MRKTLKSLNNFSVALKLLSNTLIMAKILGLDLGTNSIGWAIVDEKANKIIGMGSRIFPVGVDNLGDGEGELSKNASRTGARGIRRQFFRKRLRKKILLKELASLNMCPLSDVDFDNWKSTKKFPTQELASWFASNPYELRHKAVTEKISIEEIGRIFYHLIQRRGFLSNSRSAGKDDGAIFKGNAKEGKIGIDETRIQIENKTLGSYLYEIAPKDNLPFVDGLERIRNRYTTRQMYVDEFEQIWEHQKKYHSELSDETKEKLGGRKLDGYNEDGILFHQRPLRSQKHLVGNCSFELKKTKAQLSSIPFELFRINQWINTVEYNGHKLNATERNLAYNFLIEKEKPSFKDIRKAIGKIDASFKFNYKDEDKIVGTFTISNLCNKKFFGKKWFDFSEKQQEDIWHVLYFFDNKDKVENYAKENWEFDEIQAKAISIFNLKDGYSSISRKAINNILPFLEMGFQYDIAVVLGGIKNVYGQDWETLNSDDKVLILDNVYEIVRSNLKGGFIEPLKHFLRTELKLTDKQLAKLYHHSVSIEDFKLLDKLPLGAIADKEIQAIRNPVVINALFEIRKLVNELVTQYGKPDEIKVELARNLKASKSGRNEERKRNQKLERENDRVKDELTHLGKHFSHDNLLLYKLWEECKRTCPYTGRSISVTQLFSGEVQIEHIHPWSKSLNDSFMNKTLCFADENRAKGDKIPYEFYSLQGENKWNEVKERALKLFSDTAQYPNSYQKFKRFVQTKFDDDFASKNLNDTRYISKSAKDYMSKICNKVSVSPGQMTANLRQKWGLNAILNPEDKTKTREDHRHHAIDALVMACGTVSHLQKLSEWNRYDRKPENKNFPLPWIGFVKDAEVAVDKILVSHKKLNNTITVRTHKTEKNGVVYRNTGVAARGQLHLDTVYGQNKNCKNDEYVYRVAINSLSFSQLTSILDANLKDVIIKDILKLLTDSEKEIFNKMLSKEKNIEKEYQKNIKEKVDKILKENEFFMPNEGKRYKRLNIIEPENSKRSPVPIKKVRVKKVLGKAEQLGNEIKQFVDPNKNHHVLIYKDEKGNLKEEVVTFWTVVERKRQNQEVYQIPADGTEIVTTLQINDMFLLGLKEENVNWENPDYEVLKECLYRVQKLSSKFYEFRLSKEASIQNNFHPFYIRIQSFGDGKTGWETFNPIKVKISVSGKIQRV

SEQ ID NO: 21933 - protein, 1123 aa, unidentified
  REGION 1..1123: note = Cas Enzyme sequence
KILGLDLGTNSIGWAVVDDKENKILGIGSRIFPEGVDNLGDGEGELSKNASRTAARGARRQFFRRRIRKYLLLKLLSDLKMCPLVKADFEEWKKTRKFPQHQLLHWIALNPYEFRNKALTEKLTNEELGRVFYHLIQRRGFLSNSRSAGKDDGAIYKGNPKDGKIGIDQTKQEIADKTLGAYLYEISPKEGQPFVDELERIRNRYTTRQMYVDEFEKIWEIQAKFNQSLTLDLKEKIGGRKKDGYNSDGVLFHQRPLRSQKHLVGNCTFELNKTKCPISAIPFELFRIHQWINTIEYNGKLLNAEERKKAFDFLILKDKPSFKDIRKAIDKLDAAFKFNYKDEDKIVGTFTISNLSNKKFFGAKWFDFSEKEQEDIWHILYFFEDKSNLKEYAIKNWGFDDEKADVISKFNLKDGYASLSRKAINNILPFLELGEQYDVAVVLGGIKNAFGKSWDNLTDDKKSLILDNVPAIVRSNFKGGFIEHLKKFLVDEFSFSEKQLKKLYHHSINLNTAEILKKLPVNAEADNEIQAIRNPVVITALFEIRKLVNEIIDIYGKPDEIKVELARSLKASKSGRNEERRRQQKLEKENDRVKNEVNYLGKHLSHDNILLYKLWEECKKTCPYTGKSINVTQLFSGEVQIEHIHPWSRSLNDSFMNKTLCFADENRAKGDRTPFEFYGKQGEEKWSEVKNRALKLFSDTAQYPNAYQKFKRFVQQKFDDDFASKNLNDTRYISKEAKNYLTKVCEKVNVAPGQMTANLRMKWGLNSILNLEDNTKTRDDHRHHAVDALVMACSKVSYLQELSKWNRYNRTSELKDFPMPWENFRNDADKAIDAILVSHKKTNNILTVRTHKTEKNGKVYKNVGVAARGQLHKETVFGKRTAPFSEEAFHVRKPIESLTTEKQVVKVVDEAIRKLIFKRVNELGGYDKGKIPANTFFLVDENGVKHLQLFLPNKNGAPVPILKVRMKENFSGAEQLKSEVNQWVNPRNNHHVLIYKDENDNLKEDVVTFWTVVERKRKGFPVYQLPIGGKEIITTLHINDMFLLGLNEEAIDWENPNNEALKESLYRVQKLTSSDYFFRKHKSSTITDDDYKQIRGFGEGKTGWLNFNPIKVKVSVSGKIKKL

SEQ ID NO: 21934 - protein, 1077 aa, unidentified
  REGION 1..1077: note = Cas Enzyme sequence
MHTKETVWGFDIGKGSLGEAVRVGNEFKHVLSMEIDADFAEIKTAAATRRAWRTREAHKAREMWLEKCLSDADIEILGRRKVDVVDGTWKLVSRGDGRLEREFPADGENVCYNSIALRCKLLLGEKLESWQVFKALNSAIQNRGYDAQIPWGDEDGKSSETKRSGKSDSAKKSGEDESYAERLALFEREFDKLLAEVENREKYDFPCFFKAAKMGLWSPENPDKVGIRIDNTAEKAKGYVVPRNAVIAEFRALVNAAAKQYPKLKGKADFIMFGKAEEAYASYKPELRRKFGLRRGADSDWTALGQKTPRFDNRIIGKCKLIPRLNVCKIKPLKECKTEDDFLPHTITLALKLLNLRFFRGAGIDSLSFDEFLRAFEIARQNKFALNKTNLKKFFKTIGAEIMDENQSSVEQPREGGRAAYSRPAMRLLRDLIFSGKSPAEFYASRICKIENTDKNRGLVAEDLAFIKLMGDIPWNGIFVPDVDTFNFANIRESERADKINKLIGSQNDPIVRHRLAFFYERIKLLESKFGAPDKIVLEFVRDDFLGSKAKKEMSQGIKKRFEEKKKLAEELDSQRAEFGNKYASKKMLLKFELYKKQRGRCVYTDNALPLSELENLEVEHIFPRSRGGADAMYNYVLTDENTNKQKGDKTPFEWLSSDKTKWESYCDRVRSLTQSLGAKRCKLLVSPNAEELMQKYTALAETAWISKLAQKICCIHFGFQFGGLKGEKKVWTVSGNTTAMIRGRYGLNRILHNEEISEDLPLLDRIVKEKNFEEKNRDNKKHHALDAMCICFAPTSNAKKALSSKNILPEEIAKNPESDDARNFFAKYLAEVVPTKVAIKKPELEQTIYSKRVIAGRETIVKKCNVRDLAYKGQNPKYDFDTLTKRIKDIINPVSKRVIEDFAKTEPTEAEWEDWCKYEAAIPSKNGSPTRLLRVLCKTKDDAERFKDLSKDGCGAYRKSKSHKGQFIWKDNKGNYLVAPVYIYSSKQKVYAELKNNPKCMGICDFFKTGCLVKISNEVVDEKKNRLWLKAGFYNLNSIAKEKRVYLTDVNGQEHKKIPLQHLMNAGMKRVETNTI

SEQ ID NO: 21935 - protein, 1156 aa, unidentified
  REGION 1..1156: note = Cas Enzyme sequence
MKYRLGLDLGVGSIGSAVIELDNENNAKDIIDAGVRIFEISEGAEERRLKRTARKNLVRTKKRLELLAKKLFENGLWPNENPEGTDKLKSKSPYKIRTDALNEKLASPYYVGRAILHIAKHRGAGFVSASEETEEEILEEGEKSKAKKSSYDMMLHHLKETNSRTIGEFFYNKIISGKGNDKTVRQKKYAIEKNIVDYAIPRYLVKDEFNKIWDKQTEFYPQMKKENLKKEIYDILFYERPAAPYATGKCIYFREEDRLLKAHPLSEMRRIYEEVNNIRILNDMNKRKLTLEERDSIVNKLLLKGQNAGKQAIKKLLNLSAQHKISLVDDRVIKAYLYSRPEFANNEHLRNMNENELSSFIEFLAEPKMSKDKNARLYNEDALIEYLKPILKIDDEKEIGNLLTKLPKGRGMLGISATKIILEKLKEDVVTHREITDKLAETDKRFMAEEEIARQNQGKCFQLPYYGEILQTDTAPLPPLMINNNKSLNPDEVKWGKIANPAVHMILNQIRLVVNEIIKIYGKPYDINIELGRDVGMSTKKKKEFENRQKQNEKLNEEAKNYLKEHKIAINNKNILKYKLAKEQGWKDAYNPTQNISSVFTGMEIEHIIPQAKGGTDTYNNLCLVNCNDNLNKSDRYAYEYFEETKTQEEIREILKNARSRTPEKSWRFEADAREKYEESGDKEESTRYLTDTRYVAKMAQRYLRAIVDCSDCDEVMQTRILAVKGGQTAKLRQHWNLYGLEYDLMGLDIPRYVNCPPYWLELDTGEITEGINKPDIDGKWKFFDKAKNKEWQPKPRIDHRHHAMDAITVACANRGLIQKMAEENDINKIHYPLPLTSVKSVADFRRKVISCLKDVKVSHKPNHSKAGQFHKETGRTVLCQNPDDPNSLITVYSRKILQVVKSAKDLTKLLIPETIKNEWHEDIAEHKAKQAKLVQDFELYMNTAEQILIAENEQGVADGKKEIKITEGRILLKAFRIIQDKGLWKGDKFRCYSNSSSMINIPKHGVAYEAQNNHCVDFYQKNGKIGWEVIKRFDVNQTDFEPQWKKESGKIIWSVQQGDILELDTPDEWKQYTDKERCLAKVKKFSDGKIAIDLITDARMTSPKNKELKYMFVNTISDKGLTYLINHKTRKVELTPFGKIKKKHKVLWNGTKTAA

SEQ ID NO: 21936 - protein, 1383 aa, unidentified
  REGION 1..1383: note = Cas Enzyme sequence
MKKEKKMKEVSVALNIGTGSVGYAVINSPIAGAYDIVKYKGNDAWGSILYDEGELCADRRGYRSSRRNLNRKKWRVDLLQEIFADEISKIDKRFFIRLEESCRWRDEVSDKNICFDEENYTDKNYYQEYPTIHHLIYDLMRNKRPHDIRLVYLACSWLLTHRGHFNSPLDINRLEEITGINQAYNEFMAYFVENGYDKPWNEVDSSTFGQVFRKKLGVKDKFTELKNLLLDGKKPSQACTESFPYSQEGILKLLSGGKYEIKKLFGKEEYDEIKSVSLGMDDESNDKIAEMIGDDMDLITILNKLYDWYLLVDILEDTSGNTCSCISEAKVSIYEQHKDDLKTLKHIIKKYIPEKYNEIFREIHADNYIAYSHHIDKNMSQEKYKYTNIELFSDYISKTISKIQPDQSDMERFCDMNKRLALHTFMPKQKTTDNRVIPHQLYEYELQKILKNASCYLPFLNDIEDGLSNAEKIMELFLFKIPYFVGPLNNHSPFAWVKKRSNEKITPWNFKDVIDEDESEKAFIRRMTNHCAYIHGASVLPKHSLYYQKFTVLNEINSIRIHGKKISVSAKQGLFNDVFKKKKNIKKSDIETFLIKNGYMNRGEENAITGVDTQIHSMLSSYLHFRSLLESETLSVEDVEKIIERSAYAEDKSRLLKWLKKNYAELSEDDMKYICKCKIEDFGKLSGEFLYGIEGVDKKTGEITTILQTMWDKNLTMMEILYNSRYTFAEEINKMNAEYFNGKELTIEDVLDEYHASNTTRRAVYRVNAVLKDIEKNIGKPSKIFIGSTKGMSTTTVKTKSRYEQLVELYNNISKNYKAIDISIVKKELESLGDDANNRLQSDAIFLYFMQLGICAYTGEKITLNALSGRKKKGDIEEYNIDHIYPQSVVKDDSIANNKVLVLSKINGRKDNDYPIEQGIRKKMLPMWEQWKSIGIINDEKYNRLTRNEPFSIDERKEFTSRQLTLTSQLTKITSEVLKNRYRNMDIKIIPVSYRLLSDFRKEFNLPKSRTYNDLHNATDAYLEAVVGDVYYNKFFKKPFDFKSKYSIKLKAIFQNQQKEDDEIIWNGKSDLIKVQKIAQKTSAHIVKYSSFSTGKLFDVQLVSRKPGLVEFKKGMPTERYGGYNKPKIMFFIPVKYSIKKVENIIILPVELLYGKQFLEDKNFAIEYSHRRLEKILGKTIDNFSFPLGMRPLKMNTMLSLDGFRVCITGSSSRGKCLIVQPMMQFVSDPSWIQYLKYLENFVRKLQKDPKRKYCEKYDKITKEKNSMLYDLYIEKMQYSIYTKRQNIEKTLQTLLNGKSLFEQLDINEQCLVLLNIHSVFGRMTNGCDLTLIGGKKSAAATSSFSAIMSNWKKKYSDVRIIDQSPAGLIEKVSNNLLKLIDD

SEQ ID NO: 21937 - protein, 1457 aa, unidentified
  REGION 1..1457: note = Cas Enzyme sequence
MKRILGLDLGSNSIGWALVQQNFKNKQGQIMAAGSRIIPMDQSILGDFEKGNAVSQTAERTAYRSTRRLRERHLLRRERLHRVLHILGFLPPHYDLQIDFSKRYGKFIDDAEPKIAYNKGNFIFMDSFNEMIEDFRKHQPQLFYKKSNGEESKIPYDWTIYYLRKKALSQKITQQELAWLILHFNQKRGYYQLRGEEEIENSNKEIAFHSLKVVEVEVEAPNKKGEIWYTIRLENGWIYRRSSKIPLDDWRGKTRDFIVTTDLNDDGTIKVDKEGKEKRSFRAPDENDWNLLKKKTEHDIDFSGKTVGAYIYDHLLQNPNQKIKGKLVRTIERKYYKDELKAILAKQIALQPEFFTENLLADCIRELYRKNQTQQQTLLSKDFLHLFVEDIIFYQRLLRSQKSTIANCALEKRSYIDKETNERKDVPIKVCAKSNPYYQEFRVLQWLQNLRIYEIETDLEVTSEFIETAEDYEALFNFLMSQKEIDNEGVLKYFLLAKNPQIKDKAAKSELKKWLTIYRWNYVYDRADNSSKKYPMNETGYELQRYLQKVEGLPANFLTFDITYQLWHLLYSVKDKVEFEKALKKFANKNQLDETSFVESFKNFKPYPNEYGSFSEKAIKKLLPLMRFGNHWDFSCIDVSTQKRIDDLINGVANDEIRTIIREKAEKFQLNNEISFQGLPLWLAQYIVYNRHAEATNIEKWTSVSDLEAYLEDFKQHSLRNPIVEQVVTETLRVVRDIWQQYGGGQANFFDEIHIELGRELKNTSKERERLSKQNQENENTNLRIKKLLAELKEDASIQNVRSYSPVQHDLLKIYEEGVFSSTDEIDEDIQKIRKKAEPNKTELQRYKLWLEQKYRSPYTGEVISLTKLFTEEYEIEHIIPQSRYYDDSLSNKVICESAVNKLKTNQLGLEFIQNHHGEKVRIAGNKEVTIFTEEQYKEFVKKHYAGNSAKQQKLFLNEIPEKMVARQMNDTRYISKYISEILSRIVRSDEKDEGVNSKNVIPCTGKITTALKQDWGLNDIWNELILPRFERMNQLTQTQLFTSYNDRLQKNLPTVPIKYSQGFQKKRIDHRHHAMDALVIACATREHINYMNNQHALDKSKDKKEKQQSRIDLRTILCEKKNNNWQFKKPWNTFTQEAKEALEHIVVSFKQNLRVINKATNYYEKWEEKNGVLVKKKVKQEGTNWAIRKPLHKETVSGKIVLDRKIGKDKILTATRKAVDITFTEKIISSITDTGIQKILLNYLKYKGSPEVAFSAEGLEELNKNITQYNDGKKHQPIYKVRIFEEGSKFPLGETGAKATKYVEAAKGTNLFFGVYQGKEKHTYATIPLNEVIERQKQGLPSVPERNEKGEPLLFSLSPNDLVYVPMVGEATETIDFSNLSKEQKERIYKTVSFTGNECHFVKSTIASLIKSYDAKSKIGELGSLNKLEVTISGDSRIKEVCIKLKVDRLGNITKA

SEQ ID NO: 21938 - protein, 929 aa, unidentified
  REGION 1..929: note = Cas Enzyme sequence
NSSKKYPMNETGYELQRYLQKVEGLPANFLTFDITYQLWHLLYSVKDKVEFEKALKKFANKNQLDETSFVESFKNFKPYPNEYGSFSEKAIKKLLPLMRFGNHWDFSCIDVSTQKRIDDLINGVANDEIRTIIREKAEKFQLNNEISFQGLPLWLAQYVVYNHHAEATNIEKWTSVSDLEAYLEDFKQHSLRNPIVEQVVTETLRVVRDIWQQYGGGQANFFDEIHIELGRELKNTSKERERLSKQNQENENTNLRIKKLLAELKEDANIQNVHPYSLVQQELLKIYEEGVFSSTDKIEEDIQKIRKKAEPSKADIQRYKLWLEQKYKSPYTGEVISLTKLFTEEYEIEHIIPQSRYYDDSLSNKVICESAVNKLKTNQLGLEFIQKHHGEKVRITANKEVTIFTEEQYKEFVKKHYAGNSAKQQKLFLNEIPEKMVARQMNDTRYISKYISEILSRIVRSDEKDEGVNSKNVIPCTGKITTALKQDWGLNDVWNELILPRFERMNQLTQTQLFTSYNDRLQKNLPTVPIKYSQGFQKKRIDHRHHAMDALVIACATKEHINYMNNQHALDKSKDKKEKQQSRIDLRTILCEKKNNNWQFKKPWGTFTQEAKEALEHIVVSFKQNLRVINKATNYYEKWEEKNGVLVKKKVKQEGTNWAIRKSLHKETVSGKIVLDRKIGKDKILTATRKAVDITFTEKIISSITDTGIQKILLNYLKYKGSPEVAFSAEGLEELNKNIAQYNDGKKHQPIYKVRIFEEGSKFPLGETGAKATKYVEAAKGTNLFFGVYQGKGKRTYATIPLNEVIERQKQGLSSVPERNEKEEPLLFSLSPNDLVYVPMLGESTETIDFSNLSKEQKERIYKTVSFTGNECHFVKSTIASLIKSYDAKSKIGELGSLNKLEVTISGDSRIKEVCIKLKVDRLGNITKA

SEQ ID NO: 21939 - protein, 1153 aa, unidentified
  REGION 1..1153: note = Cas Enzyme sequence
MKNILGLDLGSSSIGWAVIRENSEEQELVAMGSRVVSLTAAELSSFTQGNGVSINSQRTQKRTQRKGYDRYQLRRTLLRNKLDTLGMLPDDSLSHLPKLQLWGLRAKAVTQRIELNELGRVLLHLNQKRGYKSIKSDFSGDKKITDYVKTVKTRYDELKEKRLTIGELFFRRLTENAFFRCKEQVYPRQAYVEEFDCIMNCQRKFYPDILTDETIRCIRDEIIYYQRPLKSCKYLVSRCEFEKRFYLNAAGKKTEAGPKVAPRTSPLFQVCRLWESINNIVVKDRRNEIVSISAEQRAALFDFLNTHEKLKGSDLLKLLGLFKTYGYRLGEQFKTGIQGNKTRVEIERALGNYPDKARLLQFNLQKESSSMVNTETGEIIPMISLSFEQEPLYRLWHVLYSIDDREQLQSVLRQKFGIDDDEVLEQLSAIDLVKAGFGNKSSKAIRRILPFLQLGMNYAEACEAAGYNHSNNYTKAENEARALLDRLPAIKKNELWQPVVEKILNQMVNVVNALMEKYGRFDEIRVELARELKQSKEERSNIYKRINKNQRENEQIAKRIVEYGVPTRSRIQKYKMWEESKHCCIYCGQPVDVGDFLRGFDVEVEHIIPKSLYFDDSFDNKVCSCRSCNKEKNNRTAYDYMKSKGEKALSDYVERVNTMYTNNQISKTKWQNLLTPVDKISTDFIDRQLRESQYIARKAKEILTSICYNVTATSGSVTSFLRHVWGWDTVLHDLNFDRYKKVDLTEVIEVNHRGSVIRREQIKDWSKRFDHRHHAIDALTIACTKQAYIQRLNNLRAEEGPDFNKMSLERYIQSQPHFSVAQVREAVDRILVSFRAGKRAVTPGKRYIRKNRKRISVQSVLIPRGALSEESVYGVIHVWEKDEQGHVIQKQRAVMKYPITSINREMLDKEKVVDKRIHRILSGRLAQYNDNPKEAFAKPVYIDKECRIPIRTVRCFAKPAINTLVPLKKDDKGNPVAWVNPGNNHHVAIYRDEDGKYKERTVTFWEAVDRCRVGIPAIVTQPDTIWDNILQRNDISENVLESLPDVKWQFVLSLQQNEMFILGMNEEDYRYAMDQQDYALLNKYLYRVQKLSKGDYSFRYHTETSVEDKYDGKPNLKLSMQMGKLKRVSIKSLLGLNPHKVHISVLGEIKEIS

SEQ ID NO: 21940 - protein, 1153 aa, unidentified; identical to SEQ ID NO: 21939
  REGION 1..1153: note = Cas Enzyme sequence

SEQ ID NO: 21941 - protein, 1462 aa, unidentified
  REGION 1..1462: note = Cas Enzyme sequence
MKRILGLDLGSNSIGWGLIEQDLQQKEGKIIASGSRIIPMDQGILGDFEKGNTVSQTAERTFYRSTRKLRQRHLLRRERLHRVLHILGFVPTHYDKQIDFSKRYGKFIGDIEPKIAYNEGKFLFMDSFQEMLSDFKSHQPTLFYTKKNGEESKIPYDWTIYYLRKKALSQKISKEELAWIILNFNQKRGYYQLRGEEEVENPNKEVTYYSLIVTEVTAEAPNKKGEIWYSIQLENGWVYRRTSKIPLDDWKGKVRDFIVTTELEEDGSIKRDKEGKEKRSFRAPSEDDWNLLKKKTEQDINTSKKTVGTYIYDHLLQNPNEKIKGKLVRTIERKYYKEELKAILEKQIALQPELFTDQLFADSIRELYSKNEAQQRNLVARDFIHLFVEDIIFYQRPLRSQKTTIANCSLESRSYIDKDSHTRKEAPLKVCPKSNPYYQEFRVLQWLQNLKIYEIESDQEVTHQFIKTLEDKQQLFEFLMAQKEIDCEELLKYFLNQTYPNAKEKALKRELKKWKDTYRWNYVYDIGEKSSKKYPMNETRYELKRYLEKVANLPDDFLSSEVEYLLWHLIYSVTDKVSYEKGLKKFAQKHHLDEDSFVESFKKFKPYPSEYGSFSEKAIRKLLPLMRFGSYWDFNHIDKNTQKRIDDLITGVENEEIRTILREKAEKYQLEKETDFQDLPLWLAQYIVYNRHAEASSLEKWTSVNDLETYLNEFKQHSLRNPIVEQVVTETLRVVRDIWQQYGQGQADFFNEIHIELGRELKKTAKEREDLSKQNQKNEDTNLRIRALLAELGEDSTIENVRPYSLMQQELLKLYEEGVFSSSIEIEDDIEKIHKKATPSKAELQRYKLWLEQKYKSPYTGQIISLKRLFTEDYEIEHIIPQSRYYDDSLSNKVICESVVNKAPYKDRQLGLEFIKNQGGRIVKELSKENKTIKIFTEEQYRTFIKEHYSNNPAKTKKLLLEDIPEKMVARQMNDTRYISKYISEILSKIVRSGERDEGVNSKNVILCTGNITSALKQDWGVKDVWNDLILPRFERMNGLTQSTLFTTYNERYQKYLPTVPMEYSKGFQKKRIDHRHHAMDAIIIACTTREHINYINNQHALEKGKDKKEKQEERDKVRERLCIKKYNNRSEGNYSWIFKKPWDTFTQEVRAALEGIVVSFKQNLRVINKATNYYERWVEENDRLIKKMVKQEGTNWAIRKPLHKETVSGKITLEREKVSGGKILTATRKTIDSTFTEKVIEGITDTGIQKILLNYLKFKKNPEIAFSPEGLEELNKDIALYNDGKPHKPIYKVRIFEQGSKFPLGEAGNKSQKYVEAAKGTNLYFGVYQGKDKRSFATIPLNEVIERQKQGLPSVPEYNEKGDPLLFSLSPNDLVYVPIEGEIIEDIDFQNLSNEQKERIYKTVSFTGNQCFFVKQTVSISIVNKMEYSPLNKMERSITGIMVKEVCIKLKVDRLGNICKA

SEQ ID NO: 21942 - protein, 1497 aa, unidentified
  REGION 1..1497: note = Cas Enzyme sequence
MKTILGLDLGTNSIGWAKVCIDDNGNYLRDIKLGSRIIPMSQDVLGNFDKGVTESQTSVRTAYRGIRRLRERSLLRRERLHRVLHVLGYLPPHYDCSIGWNRNEPSTYGKYLNHSEPKLAWERQEDGSMRFIFMDSFHEMMVDFAKRQPSLVSDGKRIPLDWTIYYLRKKALSQAIRKDELAWILLNFNQKRGYYQLRGEEDDTNSAKCEEYYELKVISVEADEEGKGGNTWYNVKLENGWIYRRQSKIPLSDWVGKTREFIVTTEYEKDGVTLKRNKDGEIKRSFRSPSEDDWGLRKKRTEERLESSKMTVGAFVYEHLLSEPSDKIRGKFIRTIERKYYKEELYAILREQSKYHEELHSEGALKKCAEELYKNNQPHRDSLLKKDLIYLLLDDLIFYQRPLKTKKSLISECPYEAYSYVDKETGEIKRQGIKCIAKSNPYYQEFRLWQFISNLRFFDKVDDKEVTSDYLSTRDDYVRLFAYLNDRKDINQETLLKDFLKLKKVIINSEKEFSVRWNYIEDKEKRYPCNETRHELLLALDRAGIDRSWLDEEGREYRLWHLLYSVESKEETEGALRKLKDDDEFIKSFLKIKPFKKEYGAYSEKAIKKLLAVMRIGSLWSEADICKTTKENITKMLKGDIDDKLKEKISSCLSSYNQVSDFQGLPVWLACYVVYGRHSEAAEIQHWRTPNDLLVYINGFKQHSLRNPIVEQCILETLRTVHDIWKEAGHIDEIHVELGRNMKSTADQRARMSGNILRNENTNLRIKSLLLELKNDPDIKDIRPYSPMQQEKLRIYEEGALQELTKDDKDFAEIIKISTMAQPSAKELLRYKLWLDQKYCSPYTGRSISLAKLFTSAYQIEHVIPQSRYFDDSFNNKVICESEVNGLKDNMLGYEFIKECGGEIVHCTMLGDVKILSESEYKDFVNDHYAHNRRKKENLLLEDIPQEFLNRQMNDSRYISKVVKALLSNIVRAEGEEEATSKFVVSCSGGITDRLKKDWGLNDVWNKIVYPRFERLNKLTGTDSFGQWENKEGKKVFQTSLPLELQRGFNKKRIDHRHHAMDALVIACTSRSIVNYLNNESADNPKKREDLRQKLCDKNRIIRKPWDTFTQDATAALEDVVVSFKNYVRVINKATNYYEKYDKNGKKGIAEQKGQEMWAIRKPMHKETVFGRVNLRRKVTVKLKDALEDIPSICDKTLRDYVNGLVKKNFKTKHLIAHFKSLNYRLNRQHIEKVEVWQFSDKKEQLVATRKPLDTSFDNKHIDSITDTGIQKILKNYLQAKGGDPNIAFTPEGIVELNQNISLYNDGKQHQPILKVRVFEPKGAKYCVGQNGNKSAKYVEAQKGTNLYFAIYEDEEGKRSYETIPLNEVVERLKQGLSPVPEKNKAQVPLKFYLSPNDLVYVPDTDGANEIKKEQIYKFVDSSGTTANFIPHRASDLIYNVDKKFATSFCNREVIQNEYGVGSPQSKNQKAITGEMVKAICWKLVVDRLGNIIKIIK

SEQ ID NO: 21943 - protein, 1106 aa, unidentified
  REGION 1..1106: note = Cas Enzyme sequence
MQYIVALDIGVASVGYAVIDKMSETVIEAGSNIFPEASAANNQVRRGMRQARRLKRRERTRLDDFKKLWEYHGLAIPQAKENDIVGLKVKALYESISLDEVYLILYSYLKHRGISYLEDAEDSSVSGSTAYANGLKLNAKELEKNFPCEIQKHRLENIGKYRGQIQIEDDQGEKLDLSNVFTIGAYAKEIQQILDTQKKYHAEIADEFCEKYLKIFTRKRKYYEGPGNEKSRTDYGKYTTRLAENGEYITEKNIFEKLIGKCSVYKDELRAASASYTAQEFNLLNDLNNLTVNGRKLEENEKHLIVDKVKTSNTINMRKIIADAMGEKIEEFYGARIDKSEKEIFHKFEVYNKMRKALAAIHVNIEEFSRDDLDEIGYILTINTDKEAMMEAFDNSRLELPGEIKNCLISLRKTNGTLYSKWHSFSLKIMNELIPEMYRQPKEQMTLLTEMGVMKGQTDEFEKNKYIPVDVASEDIFNPVVRRSVRISFKILNALMKKYGTLDEVVIEMPRDRNSDEQKKWEKETQKKNEKEQEYIENKLATVYDIRLSSADFSSQKQLNLKLKLWNEQDGKCLYSGKIIEPEDLIKHSELFEIDHIIPRSISFDDSRSNKVLVYRTENQNKGNQTPYYYLTHTNSKWSFEQYKALVMDLSKKKEYGLSKKKVRNLLYSEDITKADVLRGFINRNINDTSYAARVVLNTVQGYFRAKEMGTKVKVIRGSYTHQMRVNMKLDKDREKSYAHHAVDAMLIAFSQLGYEAYRKLQGEFIDFETGEILNSEKWKDQMSDEVYKQYLYRKKWSNIRNEITRAEKNVKYWYYVDHKSNRGFCNQKIRGTRVYDGKIYKINKLDIRKKEGAALFKKLAFSEKESDREKLLVYKNDKKTYEDLVRIMQDYSDSKNPFVQYEKETGDYVRKYAKKHNGPRIDKLKYIDGEVGSCIDISHKYGYEKGSRKVVLESLVPYRMDVYYKKEEQTYYLVGIKQSDVKCQKGEYVIDEDAYAINLVKEKMIQQGQKRSDLESLGFEFQLSFYKNDIIEYEKDGKIVRERFLSRTMPKVKNYIETKPIDRAKYEWHDRKLVGLGKTKRIRKYRMDILGNYYLCNKEEFSKYC

SEQ ID NO: 21944 - protein, 1106 aa, unidentified
  REGION 1..1106: note = Cas Enzyme sequence
MQYIVAIDIGVASVGYAVIDKTSETVIEAGSNIFPEASATDNQERRGMRQARRLKRRERTRLDDFTKLWEYHGLAIPQVKKNDIVGLKVKALYESISLDEVYLILYSYLKHRGISYLEDVEDSSVSGSTAYANGLKLNAKELEKNFPCEIQKYRLENIGKYRGQIQIEDDQGEKLDLSNVFTIGAYTKEIQQILDTQKKYHAEIEDEFCEKYLKIFTRKRKYYEGPGNEKSRTDYGKYTTRLKENGEYITEKNIFEKLIGKCSVYKDELRAASASYTAQEFNLLNDLNNLTVNGRKLEENEKHLIVDKVKTSNTINMRKIIADAMGEKIEEFYGARIDKSEKEIFHKFEVYNKMRKALAAIHVNIEEFSRDDLDEIGYILTINTDKEAMMEAFDNSRLELPGEIKNCLISLRKTNGTLYSKWHSFSLKIMNELIPEMYRQPKEQMTLLTEMGVMKGQTDEFEKNKYIPVDVASEDIFNPVVRRSVRISFKILNALMKKYGTLDEVVIEMPRDRNSDEQKKWEKETQKKNEKEQEYIENKLATVYDIRLSSADFSSQKQLNLKLKLWNEQDGKCLYSGKIIEPEDLIKHSELFEIDHIIPRSISFDDSRSNKVLVYRTENQNKGNQTPYYYLTHTNSKWSFEQYKALVMDLSKKKEYGLSKKKVRNLLYSEDITKADVLRGFINRNINDTSYAARVVLNTVQGYFRAKEMGTKVKVIRGSYTHQMRVNMKLDKDREKSYAHHAVDAMLIAFSQLGYEAYRKLQGEFIDFETGEILNSEKWKDQMSDEVYKQYLYRKKWSNIRNEITRAEKNVKYWYYVDHKSNRGFCNQKIRGTRVYDGKIYKINKLDIRKKEGAALFKKLAFSEKESDREKLLVYKNDKKTYEDLVRIMQDYSDSKNPFVQYEKETGDYVRKYAKKHNGPRIDKLKYIDGEVGSCIDISHKYGYEKGSRKVVLESLVPYRMDVYYKKEEQTYYLVGIKQSDVKCQKGEYVIDEDAYAINLVKEKMIQQGQKRSDLESLGFEFQLSFYKNDIIEYEKDGKIVRERFLSRTMPKVKNYIETKPIDRAKYEWHDRKLVGLGKTKRIRKYRMDILGNYYLCNKEEFSKYC

SEQ ID NO: 21945 - protein, 1106 aa, unidentified
  REGION 1..1106: note = Cas Enzyme sequence
MQYIVAIDIGVASVGYAVIDKTSETVIEAGSNIFPEASATDNQERRGMRQARRLKRRERTRLDDFTKLWEYHGLAIPQVKKNDIVGLKVKALYESISLDEVYLILYSYLKHRGISYLEDVEDSSVSGSTAYANGLKLNAKELEKNFPCEIQKYRLENIGKYRGQIQIEDDQGEKLDLSNVFTIGAYTKEIQQILDTQKKYHAEIEDEFCEKYLKIFTRKRKYYEGPGNEKSRTDYGKYTTRLKENGEYITEKNIFEKLIGKCSVYKDELRAASASYTAQEFNLLNDLNNLTVNGRKLEENEKHLIVDKVKTSNTINMRKIIADAMGEKIEEFYGARIDKSEKEIFHKFEVYNKMRKALAAIHVNIEEFSRDDLDEIGYILTINTDKEAMMEAFDNSRLELPGEIKNCLISLRKTNGTLYSKWHSFSLKIMNELIPEMYRQPKEQMTLLTEMGVMKGQTDEFEKNKYIPVDVASEDIFNPVVRRSVRISFKILNALMKKYGTLDEVVIEMPRDRNSDEQKKWEKETQKKNEKEQEYIENKLATVYDIRLSSADFSSQKQLNLKLKLWNEQDGKCLYSGKIIEPEDLIKHSELFEIDHIIPRSISFDDSRSNKVLVYRTENQNKGNQTPYYYLTHTNSKWSFEQYKALVMDLSKKKEYGLSKKKVRNLLYSEDITKADVLRGFINRNINDTSYAARVVLNTVQGYFRAKEMGTKVKVIRGSYTHQMRVNMKLDKDREKSYAHHAVDAMLIAFSQLGYEAYRKLQGEFIDFETGEILNSEKWKDQMSDEVYKQYLYRKKWSNIRNEITRAEKNVKYWYYVDHKSNRGLCNQKIRGTRVYDGKIYKINKLDIRKKEGAALFKKLAFSEKESDREKLLVYKNDKKTYEDLVRIMQDYSDSKNPFVQYEKETGDYVRKYAKKHNGPRIDKLKYIDGEVGSCIDISHKYGYEKGSRKVVLESLVPYRMDVYYKKEEQTYYLVGIKQSDVKCQKGEYVIDEDAYAINLVKEKMIQQGQKRSDLESLGFEFQLSFYKNDIIEYEKDGKIVRERFLSRTMPKVKNYIETKPIDREKYEGHDRKLVGLGKTKRIRKYRMDILGNYYLCNKEEFSKYC

SEQ ID NO: 21946 - protein, 1431 aa, unidentified
  REGION 1..1431: note = Cas Enzyme sequence
MKRILGLDLGSSSIGWALVNEAESKNERSSIVKLGVRVNPLTVDESINFEKGKSITTNADRTLKRSMRRNLHRYKLRREALIEVLKECKFITEDTILSENGNRTTFETYRLRVKALTEEISLEEFARVLIMINKKRGYKSSRKAGGAEEDTLIDGMDIARKLYDANLTPGELCLQLLSAGKKVLPDFYRSDLQNELDRIWEKQKEYYPGILTAALKEELRGKKRDAVWAICANAFVWKETYTEWNNEESKNEQIEKEHKLEGIYSKRKRDEAKKENLQWRVSGLKEKLSLEQLVIILQEINTQINNSSGYLGTISDRSKELYFNKQTVGQYLMDILDNNPNASLRNIVFYRQDYLDEFNVLWEKQAEFHKELTGELKKEIRDIIIFYQRRLKSQKGLISFCEFESRQIEVKIDGKRKIRTVGNRVIPRSSPLFQEFKIWQILNNIEVTAVGNKNKQRMQNGSNEPDDTEQLELNGRRYLYQEEKELLAKELFVRDKMTKLDVLRLLFDNPEELDLNFKTIDGNKTGYLFFQAYSKMIEMSGHEPVDFKKPIEKIVEQVKSVFVLLNWNTDILSFDSNKELDKQSYYKLWHLLYSFEGDNTPTGNGCLVQKIMDSYGLGKEFAKILANITFQEDYGSLSAKAIHKILPHLKEGNQYDVACEYAGYRHSKSSLTKEEIANKVLKDKLEVLPRNSLRNPVVEKILNQMVNVINAIIEAYGRPDEIRVELARELKKNAKEREKLTKSIAETTKTHEAHKKLLQEEFGLKNVGRSDILRYKLYKELESRGYKTLYSNTYIPREKLFSKEFDIEHIIPQARLFDDSFSNKTLEARNVNIEKGNRTAYDFVKEKFGESGTDNSLDCYLNNIEVLFVSGKISKTKYTKLKMTEQDIPGGFIERDLRNTQYIAKKALSMLNEISRCVVATSGSITDKLREDWQLVDVMKELNWEKYKALGLVEYFEDKDGKQIGRIKDWSKRNDHRHHAMDALTVAFTKEVFIQYFNNKNASLNPNTNEYAIKNKYFQNGRAIAPIPLNEFRAEAKKHLENTLISIKAKNKVITNNINKTKKRGGVNTKKQQTPRGQLHLETIYGCCRQYLTKEEKVNASFDVSKIATVSSSVYRDALLKRLQEHHNDPKKAFAGRNSLDKKPVWLDKEQIRKVPKKVKTVTFETIYTIRKEISPDLRVDKIIDSGVRKMLTGRLKEYGNDAKKAFSNLDEKPIWLNKEKGIPIKRVTISGISNAQSLHVKKDKDGKPVLDGNGRNIPVDFVNTGNNHHVAVYRRPVIDKNGQMVIDENGNLKYELEEVVVTFFDAVTRVNLGQPIIDKDYKASEGWQFLFSMKQNEYFVFPNKKTGFNPKEIDLLDADNYGLISPNLFRVQKFTHKNYVFRHHLETTIKDTSSILRGITWIDFRSSKGLDSIVKVRVNHIGQIVSVGEY

SEQ ID NO: 21947 - protein, 1436 aa, unidentified
  REGION 1..1436: note = Cas Enzyme sequence
MKRILGLDLGTNSIGWALVNEAENKDERSSIVKLGVRVNPLTVDELTNFEKGKSITTNADRTLKRGMRRNLQRYKLRRETLTEVLKEHKLITEDTILSENGNRTTFETYRLRAKAVTEEISLEEFARVLLMINKKRGYKSSRKAKGVEEGTLIDGMDIARELYNNNLTPGELCLQLLDAGKKFLPDFYRSDLQNELDRIWEKQKEYYPEILTDVLKEELRGKKRDAVWAICAKYFVWKETYTEWNKEKGKTEQQEREHKLEGIYSKRKRDEAKRENLQWRVNGLKEKLSLEQLVIVFQEMNTQINNSSGYLGAISDRSKELYFNKQTVGQYQMEMLDKNPNASLRNMVFYRQDYLDEFNMLWEKQAVYHKELTEELKKEIRDIIIFYQRRLKSQKGLIGFCEFESRQIEVDIDGKKKIKTVGNRVISRSSPLFQEFKIWQILNNIEVTVVGKKRKRRKLKENYSALFEELNDAEQLELNGSRRLCQEEKELLAQELFVRDKMTKSEVLKLLFDNPQELDLNFKTIDGNKTGYALFQAYSKMIEMSGHEPVDFKKPVEKVVEYIKAVFDLLNWNTDILGFNSNEELDNQSYYKLWHLLYSFEGDNTPTGNGRLIQKMTELYGFEKEYATILANVSFQDDYGSLSAKAIHKILPHLKEGNRYDVACVYAGYRHSESSLTREEIANKVLKDRLMLLPKNSLHNPVVEKILNQMVNVINVIIDIYGKPDEIRVELARELKKNAKEREELTKSIAQTTKANEEYKTLLQTEFGLTNVSRTDILRYKLYKELESCGYKTLYSNTYISREKLFSKEFDIEHIIPQARLFDDSFSNKTLEARSVNIEKGNKTAYDFVKEKFGESGADNSLEHYLNNIEDLFKSGKISKTKYNKLKMAEQDIPDGFIERDLRNTQYIAKKALSMLNEISHRVVATSGSVTDKLREDWQLIDVMKELNWEKYKALGLVEYFEDRDGRQIGRIKDWTKRNDHRHHAMDALTVAFTKDVFIQYFNNKNASLDPNANEHAIKNKYFQNGRAIAPMPLREFRAEAKKHLENTLISIKAKNKVITGNINKTRKKGGVNKNMQQTPRGQLHLETIYGSGKQYLTKEEKVNASFDMRKIETVSKSAYRDALLKRLYENDNDPKKAFAGKNSLDKQPIWLDKEQMRKVPEKVKIVTLEAIYTIRKEISPDLKVDKVIDVGVRKILIDRLNEYGNDAKKAFSNLDENPIWLNKEKGISIKRVTISGISNAQSLHVKKDKDGKPILDENGRNIPVDFVNTGNNHHVAVYYRPVIDKRGQLVVDEAGNPKYELEEVVVSFFEAVTRANLGQPIIDKDYKTTEGWQFLFSMKQNEYFVFPNEKIGFNPKEIDLLDVENYGLISPNLFRVQKFSLKNYVFRHHLETTIKDTSSILRGITWIDFRSSKGLDTIVKVRVNHIGQIVSVGEY

SEQ ID NO: 21948 - protein, 1431 aa, unidentified
  REGION 1..1431: note = Cas Enzyme sequence
MKRILGLDLGSSSIGWALVNEAESKNERSSIVKLGVRVNPLTVDESINFEKGKSITTNADRTLKRSMRRNLHRYKLRREALIEVLKECKFITEDTILSENGNRTTFETYRLRVKALTEEISLEEFARVLIMINKKRGYKSSRKAGGAEEDTLIDGMDIARKLYDANLTPGELCLQLLSAGKKVLPDFYRSDLQNELDRIWEKQKEYYPGILTAALKEELRGKKRDAVWAICANAFVWKETYTEWNNEESKNEQIEKEHKLEGIYSKRKRDEAKKENLQWRVSGLKEKLSLEQLVIILQEINTQINNSSGYLGTISDRSKELYFNKQTVGQYLMDILDNNPNASLRNIVFYRQDYLDEFNVLWEKQAEFHKELTGELKKEIRDIIIFYQRRLKSQKGLISFCEFESRQIEVKIDGKRKIRTVGNRVIPRSSPLFQEFKIWQILNNIEVTAVGNKNKQRMQNGSNELDDTEQLELNGRRYLYQEEKELLAKELFVRDKMTKLDVLRLLFDNPEELDLNFKTIDGNKTGYLFFQAYSKMIEMSGHEPVDFKKPIEKIVEQVKSVFVLLNWNTDILSFDSNKELDKQSYYKLWHLLYSFEGDNTPTGNGCLVQKIMDSYGLGKEFAKILANITFQEDYGSLSAKAIHKILPHLKEGNQYDVACEYAGYRHSKSSLTKEEIANKVLKDKLEVLPRNSLRNPVVEKILNQMVNVINAIIEAYGRPDEIRVELARELKKNAKEREKLTKSIAETTKTHEAHKKLLQEEFGLKNVGRSDILRYKLYKELESRGYKTLYSNTYIPREKLFSKEFDIEHIIPQARLFDDSFSNKTLEARNVNIEKGNRTAYDFVKEKFGESGTDNSLDCYLNNIEVLFVSGKISKTKYTKLKMTEQDIPGGFIERDLRNTQYIAKKALSMLNEISRCVVATSGSITDKLREDWQLVDVMKELNWEKYKALGLVEYFEDKDGKQIGRIKDWSKRNDHRHHAMDALTVAFTKEVFIQYFNNKNASLNPNTNEYAIKNKYFQNGRAIAPIPLNEFRAEAKKHLENTLISIKAKNKVITNNINKTKKRGGVNTKKQQTPRGQLHLETIYGCCRQYLTKEEKVNASFDVSKIATVSSSVYRDALLKRLQEHHNDPKKAFAGRNSLDKKPVWLDKEQIRKVPEKVKTVTFETIYTIRKEISPDLRVDKIIDSGVRKMLTGRLKEYGNDAKKAFSNLDEKPIWLNKEKGIPIKRVTISGISNAQSLHVKKDKDGKPVLDGNGRNIPVDFVNTGNNHHVAVYRRPVIDKNGQMVIDENGNLKYELEEVVVTFFDAVTRVNLGQPIIDKDYKASEGWQFLFSMKQNEYFVFPNKKTGFNPKEIDLLDADNYGLISPNLFRVQKFTHKNYVFRHHLETTIKDTSSILRGITWIDFRSSKGLDSIVKVRVNHIGQIVSVGEY

SEQ ID NO: 21949 - protein, 1139 aa, unidentified
  REGION 1..1139: note = Cas Enzyme sequence
VLYRIRKRYLIGIDVGLMSVGLAAIEVDESGFPIRILNLQSVIHDGGIDPQAGKKKSISRKAVSGIARRTRRMRNKKVARLRQLDLLLEELGFPIVEPDSLDARDAWRVRAKLVDSYILDDEIRKEDVSIALRHIARHRGWRNPYSSVESLLIDTVPSKQYEELRSKAEQKLGRKFLGNPTPAEIVCRVWEEQGETARLRTSRHKDKNGKVVAREGLLPVKLMQSDNAKEIRRIFETQRIDDATGRRLLKAVFKASSPKGSAAQRTGRDALAPELPRALKASMAFQEYRIANVLTNLVISVKGVERKLTVEEKRRVFALLSSDKRNDVTWIDVAEELGVERNQIQGVGRLTADGEERISSMPPRNVTVSRIRSVKLVRKKLAAWWKSASVAERETMVEILSSAVDIDRVREHMDYASASTFIDSLDDEELVALDSMNLPSGRAAYSIQTLKCLTERMLNTDDDLHEARKSVFGVGDDWKPPVDAIGVPVGNPSVDRVLKIVNRYLLACQRRWGNPQSVQIEHVREGFSSVAKAKKTEKAQAERAQYRNDLKEQIRREKLAKIRESDIRRWEAVQRQNGECLYCGRPIDFNTCEMDHIIPRKGAGSTNTRVNLAAVCAVCNKLKDNTAFSVWARTQEAIAQDTSGYKVSLRDAIERVKVFNFDQSVPSPRDQRVFRQAMISRLKQTESDPAIDNRSIESVAWMADELHRRIEAYFNRDADTSKNTIKTKVWVFRGRLTALARKACGIEGRIHFAGKQRKTRLDRRHHAVDAAVIAMLNHSVAQTLVERDSLCLSQWITRRPETWTEYPFVEGQKKTRFEEWLCRMDGLLDLLNNALDADCVHVIRNQRLALGNSQAHDAIIRKMEHVELLSSMDSDLIRRASTPALYCALTRLPDYSPENGLPENHNREIVLNGRRIRSTEMVDFFASGAAQIAVRNGSTEIGNAIHHMRIYRYRKNGKSTQEYTYGMIRVFQVDLIHASSKDLFTVQLPPQSVSMRYGDRNTVQAIQEKRAEYLGYVVPNDEIVIDFEGVQMKDSEKIGAYARDFSGTASELAQRRHWVVVGSDVSKLALRPAYLAEEGLENLESDRFSEQTRKVIGKGWVVAINVLAKYRPVVIRRNALGEPRFRSNSGMPISWRWNG

SEQ ID NO: 21950 - protein, 1219 aa, unidentified
  REGION 1..1219: note = Cas Enzyme sequence
MAKILGIDLGTNSIGWAITIQNEDKNSYELIDKGVSIFQEGVAREKNNEVPMVQERTNARSLRRHYFRRRLRKIEVLKVLMEQGFCPVLTTEMLNDWRYKKQYPLDEKFLQWLSTCEEGEKNPYHDRFIALTTTLDLQKQEERYTLGRALYHIAQRRGFLSNRKDTSKDDENGKVKSAIKNLDEAISNNGCEYLGEFYYRLYQNKKSIRNRDMGNGYGYADRNRHYLKEFEAICKKQNLPDDVQRALERAIFFQRPLKSQKGLVGTCTFEKKKARCPISHPRFEEFRMLQVLNNIKVKGPYDDNLRPLTAEEREEAITVFMRKRKPHFDFEDVAKKLSGGRKATYSYYKDGKESDYYFNYKLTTSMSGCPTTAELKSIFGEEWEQTICSTYLKGEGKNEEQILNDVWHALFSFDNDDKLHEWAKNNLQLNDEDAEKFVNIKMAQGYASLSLNAINKMLPYLRAGYRYDEAVFLGNLRNVVGDNMWGDTDLRDKITNDICIAIEDYSITKRTETKKEFIANVLLDNYNIDYNHSDRLYHPSQVESYKDAEKNKNGIIQLGSPRTSSVRNPMAMRALFRLRALINALLREGKIDKDTRVNIEMARELNDANRRAAIKQYQEEQEKKHREYAEEIKKLYREETGKEVQPTEDDILKYQLWEEQGKQCLYTQKTIGITDFIGGNTTYDIEHTIPRSRGGDNSQANKTLCDSRFNREVKRAKLPSELSSAYKTLAVIEGIGWKEKIESLEKQIAAQTRKSKNATTKESKDNAIKQRHYLKMQLDYWRDKMSRFTMTEVTDGFTKRQGVDIGIIGRYARMYLQTAFNKVHTVKGSTTADFRKMWGLQEEYSKKERVNHIHHCIDAITIACIGHGAYTAWKQYNEKVERYYFEQKEKPVIEKPWPTFTEDVKAISGEVIVSHNTPDNMPKPSRKKLRIRGKVQYNNAGQAKYIQGDTARRSLHLQTFYGAIMRDDEIKYVVRKPISSLESSDIDKIVDDKVKECVRDAYNRGGKAALQEPICFNEEKGVYIKKVRIYAPTVKQPIHLKKQQYKSKHEYKQNYYVANDGNYCMAIYEGCDNKGRTKRGFEIVSNLNASKFFNKKSDGQHIVPLSDNNDYPLKYIVKCGTMVLFYEKSPEELRNCNKNELAKRLYKVKGINGDGRIVFIFHQEARKDELVSRECGMGHSKYDLNEPKAKLRLSLSNFNALVEGYDFELTTTGEIKFKH

SEQ ID NO: 21951 - protein, 1165 aa, unidentified
  REGION 1..1165: note = Cas Enzyme sequence
MTNKNSQKYRLGLDLGTNSIGWATLALNQENQPYKILDAGVRIFSDGKNPKDGMPLAVARRDARGMRRRRDRFLARKSKLMNCLIRFELMPKDEIGRKKLESLNPYELRFKALDEALSPSELARAIFHLGQRRGFKSNRKEQIAEDKKLSETKQNQEGLAKKIIETSSRTLGEFFYKERILKELTTRAKPDESGLYPTRDMYENEFDEIKKSQFQIQKLSEENWQEIRKIIFDQRPLAAQEKGVCQFINKFNSLPNWANQAFENYLNSNKENSKAKGLPRAYLALPSYQKFRILSEINNLKIIKNNREEILLDAPQKKKLVEYLHENKSAKFSSLRKQIGFGAEEFKFNFEGGKRDKFDGNSTEIFLKDKKHFGEKWHDFSLKEQDEIVEFLLDLEDENIIYEKAVNAWQLSAEQALEIKKITPNDKNFKSGVGNLSKEFLQKLVVKIEEKNCRYDKACENLDFYHSQKDQPEIQNQLDYYGKAIPASVVSVKVDKSKKPENYTEEEKYGKIANPTVHVALNQLRKVVNAVIQENGNPSEIIIELARDLKISQEEKREIENVQKKNQKENEDLKNELEKLGQRNGFENRLKLKLFYELKEDNNDVACCPYSGKTINIANLFSFEVEIEHILPFAKTYDDSFANKTIAYRAENQKKGNRSPFEAFGDATFERIKNLPNNKKWRFYENAMEKFKDENTFQNNQLNDTRYLSKIAKQYLEQICNPNKIKVANGKLTSLLRHHWGLNSILNKNLNTQENQATNISNEVIAEEIIDAETGKVFIEKTKKSEKKNQKPKNRDDHRHHAVDAIVIAMTETRLLQQISRDNSRGHDLDRLVINVPSHWNRFREDAVEAIEKIIVSHKPDHGKNNQLHEETYYGIIEPSVALKRENKKDEGYNFVYSKPLASLSENEIERIRDEKIYRDLKKKLTGAEGKKEIEKILSEYALETKNGQQKVKNIRLIKKENRFAIISNKQLTLQKKEVGGVEEKIHTKAVVGSNHHIAIWELPKLNFLPLVHLKGKKLDVALDKLSEAEKVKFKRFRTHQEKLKNWISKDCEYAVSCTSSFEAAKGDENQFRPHPTARLLAKIHGKDLVKIKITNEVKIVKVTKLNPAGNRILATLHNDSGKDSKEISMSFSNFRELSLTKIFITPTGKVFDSGSIIKTKTQEK

SEQ ID NO: 21952 - protein, 1499 aa, unidentified
  REGION 1..1499: note = Cas Enzyme sequence
MKNILGLDLGTNSIGWALVDTDEKKILGMGSRIIPMTQDVLDTFSGGKPLETQTAARTSYRGIRRIRERHLLRRERLHRVLNVLGFLPEHYAKEIDFEKHFGQFVDESEPKLTYNNRDFIFINSFEEMLSDFKQSQPQLFYTKPNGKETKIPYDWTIYYLRKKALSQKIAKEELAWIILNFNQKRGYYQLRGEEEDRTDIIEYCALLKIVFIEKGNIDKKNDKKTWYKVIFENGWEYSATFTAEPNWLNTEKEFLITEEFDEDGNIKIVKDRRTDTLGKEKRKITPLPSFDEINLMSKKDQDKIYKKIKARTEITIKNSNTTVGTYIYENLLQNPSQKIRGKLVRTIERKFYKEELVAILKKQFELQPELFTNDLYNDCVRELYRNNEAQQLTLSKRDFVHLFVEDIIFYQRPLRSQKSSIGNCSLEYRIHKDKEGNEVKEYLKAIPKSHPLYQEFRVWQWLSNLKIYRKGDDADVTSEFLKNTEDVVNLFEFLMAQKEVGHKDILKHLVSPALKERFPNAKPAAFNKEVEKEIAKYRWNYVFDDSKEKEEDKSKKYPCNTTGYEISRRLDKVANIPTEFLTAETEQHLWHIIYSVTDKKEYETALKSFANKYKLDENSFVEEFKKFPPFPSEYGAYSEKAIKKLLPLMRLGKYWSWDAIDAKTQSRVDKIISGEYDESIKTRVREKSINLTGNNHFQGLPIWLAGYVIYDRHSEADIAGKWNSVADLEQYLEDFKQHSLRNPIVEQVITETLRVVRDIWKQYGQGAKDFFSEIHVELGREMKNTADDRKYLTEQVTNNEATNLRIKALLAELKENSDGKLPVENVRPFSPMQQDALRIYEDGVLNSTIELPEDIVKISKSSQPSKSELQRYKLWLEQKYRSPYTGSVIPLGRLFTEDYQIEHVIPKSRYFDDSFNNKVICEAAVNQLKDKQLGLEFIKNHHGTKVECGMGKVVEIFSEEAYQTFVKEHYAKSKTKRQNLLLEEIPEKMIARQMNDTRYISKFISSLLSNIVRADKEDDGVNSKNLIPGNGRITTVLKKDWGMDAVWSDLILPRFERMNQLTNSDAFTYWNEQYQKYLPIDNVNIDSKQVKIEKKRIDHRHHAMDALVIACMTRDHVNYLNNKNAHEKGTNDEKGFRYDLKNKLCFKTKPDDKGNYQWQFKKPWGKIEKEVLVIADNDFTIDAKGELETIVISFKQNLRVINKATNNYEKWTEKDGKKIKAKVKQEGTNWAIRKPMHKETVSGKVDLPWVKVPKGKILTATRKSVDTTFDLKTIAAITDTGIQKILKNYLAYKNNNPEIAFTPEGLEEMNANIKQYNDGSTHQPIRKVRIFELGSKFSLGENGNKKDKYVEAAKGTNLFFAVYEDKNGKRSYETIPLNVVIERQKQGLPPVELKGENDFYLTPNDLVYVPNEDERVNISVNKQIELTKEKRQNIYKVVSFSGNQIFFVRNEIATSIINKAEFSTLNKMERAIDGTMIKEVCAKLIVNRLGKIERHSIEM

SEQ ID NO: 21953 - protein, 1412 aa, unidentified
  REGION 1..1412: note = Cas Enzyme sequence
MNRKVIGIDLGTGSIGLSLRNPELGGNIQDQLEWFSVTTFNSGTGSDQTGEYTLAADRRAHVQSRNLKEHNRWKRWSTLSLLIDYDMCPMSRESLERWQTYDKKRGLKREFPIYDTPFMQWLRMDFDGDGVSDCTVFQLRRQLVEEQLDFTLPINRYKLGRAIYHIAQHRGFKSSKGETLSGKEEESEKEAMVVDADNLENAMKKSEEKKSKDLSDYMAVHNFKTVGQAFASLEEEGIRIRNSRYQAVRSQNVDEINEYFKFQEGLAGYEDLHRRLISTKKGEGTLFYKLPLRSQKGHIGRCTFEKNKRRCPIAHPEYEKYRAWAFINNIKYKENEKGNWLELPLALKQELYKEVFTSKVRKDFAFEIIRKFLEKRLGLSFRNADGVKTINYKDKALVAGCPVTARLQNIASLFDTTLEQLKLQGVKSRPSHSSKSDGDKHQVSYDALDLWHFCFEADEIEDVKRFASQSLKFDDKATESLCKLWASIEQGYTTLSLKALRNINRFLEYGLKTADAIFLAKVPDITGRDDIEELVHFFYNQVKASAEANMRIARVANTLIANYKSLALDDRFADHDFKYQLQEDDKEEVIRCIQNTESSFELMDADEQQALITEVTRLYQAFFADIKREYVKVPRFADVLVSKLKELYPDVNEERWEKLYHPSMVSDFPRDKNNANLLGSPKIGAIRNPTVLRALNVLRRIINKLLAEGLDPQETRIVVETTRVNNDINKRRAIERYNEERNAENREIEKILIEQYRAASENDISAARYVLEQSGEDLLTADDPDNHHYRHQIKRYKLWLEQGCQCLYTGHIINLTNLLADNMFEMEHTIPRSLSFDSSDKNLTICDAYYNGHIKKNCIPTELPNYDKDVIIDDHLYTAITPRLKMWQDKVERLSKNVLFWKNKAKKAQTEKSHNDSMREMLLWQMEYDYWHQKLDRFTMKSNDLTDGFRNSQLVDTGIITRYAVLYLKTLFAQVDIQNGQSTSAFRKIFGIPQKDRSSNYHHAVDATILTMIPSAAKRDRMLKLFYQIDEQRKGGHEVSGLKYQLDREITSCELGAGLAGIEDFIAQRVLVDFYKQDRTLQKDHRPVIRKGKPLKRRGDDGKIETVTFSSDSIRGELHNQTFYGAVRRKSDNKEFYVVREPLKYKSSDKDKGFKDWEELNKRIVDLSYPADSKEFKPIVKMMMRQFPEGTTFKEACEQGIYMLDREKRKVNKIRHIRCYGKNVSNPVKVKRHTYPSDKEYKQHILAALGDGSVYALCEYTDGQTTEYKRYTYMEISENRKSGLEDIPTIYLGKKNQPLKLIRKITKGDMILIYENTPEELLHLDKSELSKRLYKVQSFEGERTVKLFHHLLSTSNIKEQQEGGKKMRNRGESIKDPKKLPSIIRSSINGFSYLLKDVDFEIVKDGIILKHI

SEQ ID NO: 21954 - protein, 1071 aa, unidentified
  REGION 1..1071: note = Cas Enzyme sequence
MPRRLGLDIGTNSIGWCLIEDDQRVLDIGVRIFSDGRDPKSGASLAVDRRAARAMRRRRDRYIGRRSAFLETLVRFGLMPVDADEAKLVAARDPYTLRARALSDRLDPHDIGRALFHLNQRRGFLSNRKAERRSKDNEDGKIASGAKELDRAMAEAGADTLGAFLTGRFEKRVRLNSESQSFDFYPQRRHIEWEFQRIWEEQAPHHPGLLTEEAREALHRILFFQRPLKAPKVGVCLFAGRYGISPIEPRLPKAHPLFQERRLYEEVNQLEITAPGELPRKLNIDQRDSLIAALRDKREVSFATLARTLKLQPGESFNKARDTRTGLTGNEVRAALGDKKRFDKAWLHKSPEVQWTIIDRLIEEEDPDALHRFLTEDCGLEEDAARATARAPLPEGHGRLGNTATIRILEQLKAEVCTYAEAVERCGWHHSDDRTGEILKRLPYYGELLSRDIPPGSFDPADADQPELYWGKITNPTVHIGLRQVQKLINAILAVHGRPDEIVVELARELNLSEKDKDEHNRRIRKDTAEAQARSRKLQEEGIDDTGANRARLKLWEELAGNPVNRFCPYCGDAGKPIDFRALFSAEIDIDHIIPYSRSLDDSAANKVIAHRSCNRDKGNKTPFERWGHDPERWDKIAAQVAHLRRSKQWRFGPDTMARVEKDGGFIARQLTDTQYLSKLAGKYLRSLYPSKEDGSVYVIPGRMTSMLRRLWGLNSLLPDHNYVENEHSNAPKNRLDHRHHAIDAAVTAITTRRLLQQISRASGQAEDQKLDKLFSDFTHPSEWASFREDLGNALGRITVSHKADHGRKSPPSRHRDITAGRLHNDTAYGLTGQSTADGKTPIVVHRIAFASLKPADIVSPDRLPDAPLRDALYEWTRDLTGKPFETALQRFRKDHPVFKRIRRVRVREGLNVIPIRDASGRAYKAYKGDANARFDVWKLPNGKWITSWKDRDGRTQSSIISMFDAHQTAALPKPHPAAKKILSLRQNDLLAIEREPGTIELMRVVKFSTNGSIHLAPPNEGGALKARDEAPADIDPFKYLNTSAGSLKKLKARQVRIDPLGRVSDPGPRE

SEQ ID NO: 21955 - protein, 1067 aa, unidentified
  REGION 1..1067: note = Cas Enzyme sequence
ALGDDFEIIAWARAIYNWCALSRILKNNPGGRISDARVEDYERHRTDLQLLKKLLRENFPKETQERILKVSEKGLANYPAYIGMTKKNGKKAPIVERCSKEDFYKLLDKEILKNLGDSEEKAYIEQQIRLGGFLPKQKGNGNSVVPYQLHEKELKLILKNAEGYLPFLKEKDESGYTVSEKILQLLTFRIPYYVGPLYGGGGEHSYAWVKRLEDGKVYPWNFEQKIDVEKSAEEFIRRAVSTCSWLKNEKVLPAGSLLFEKFKVLNELNNVRIYGERLEVDIKQRIYQELFCRHLRITKKRLIQYLKKEGIYAKVEPEDISGLDENFQSSLKSLLAFKQIHFDSPVPEQAMEDMIKDITLFGEDPKLLKKRLLVKYPEYGKQIPAIIKTVKCDGWASLSEKLLTGLAVDIPGEGPVGTILYFLWNTRQNLMEILYNPEYAFQDLIKTENGDTGRKDGKISYELVDELYVSPSVKRQIWMALKVIEEVRHFMGCEPKRIFVEMAREKQESKRTSDRKAQIMQLYSAIRTDKDYKELLKELNGCSNDELRKDKLFLYFMQMGRCAYTGKRIPFSDLKYDSLYDIDHIYPRSQTADDSLDNRVLVDAEYNREEKQDLYPIKKETRDEREALWRFWREKKFISDEKYRRLTRAAKLTNEELIGFVNRQLVETRQSTKALAEVLNQTKTEQTEVVYVKAKNVTEFRHRYKLLKVRALNDFHHAQDAYLNIVVGNVYHLKFTKDVRRYFLDKGTYRTYNLTKMFDETVKCGEETAWNKGVSIGTVKEMMKNEKILVSRQTYEEKGKLYDVQRLKKGQGQVPVKESGRMSDISRYGGYGSAKNTYFMLVEAEDKKKKESLWILPVPLYMKQKIEGSEEYARSYFEQEYSLCHVRVLKKIRIQTLFVYEGFRMRLAGRSGSQLVFHNANELCLPARHHNTIRQISKHIQELQYDKDAAVSDNGLLTEQDLDALYAELCEKLKGSVYQTMLGGYIEKYESGYEKYQKLTLEKKAQALWQMLKIFQCTPEMPDLTLIGGSKSQGAIRMGMNVTGRKSLALIHQSVTGIYERVEKIRG

SEQ ID NO: 21956 - protein, 1390 aa, unidentified
  REGION 1..1390: note = Cas Enzyme sequence
ADNRECKLPWVKDESDGKYHFLFQDAFHEMCEDFRQSAPQWVADGKKVPYDWTLYYLRCKALSRKISKEELAWILLSFNQKRGYYQARDEEDEVTTNKLEEYYAGKVVRVDDTGERKGKNVYYDITLENGWVYRYAARIYPDWVGQVKEFIVTTTLNPDGTPKTDKAGEVKRSFRMPKDDDWTLIKKKTERDIDRSQETIGQYIYHALLKDPSQKIRGKLIGTVERKYYKDELRRILDRQIQFHPELRDRELYYACLQELYPSNVAFRNTLVNRDFTYLFLDDILFYQRPLKSKKSQISDCPYEEHFYTDKETGERISVPVKCIAVSHPLYQEYRLWQFIQNLRIYCREARIDGNLMIDWEVTNELLQTEEDKTALFDWLNDKESVKQPELVAFLLGGKANKKQIKAYRWNYMDDDTKGYPCNETRASLLKYLREAQTDSSFLTREREEALWHILYSISDKGELKSALGKFAVKHGLNERFVTVFSKFPPFKKDYGSYSAKALKKLLPLMRMGHHWQEASFIPSTRQRMEKFINGEYDDSIDKRTYEKLESLTEVSQYRGLPGWLACYVVYDRYSEGRDIERWTSPSDIDSYLAQFKQHSLHNPIVERVVLETLRTVRDIWKQVDHIDEIHIELGRNMKLPADKRRQMTEQAWKNEQTNLRIKALLLEFARPGYDIENVRPYSPYQQDQLRIYEEAVLGANECPDDISAILKKFNGLNPPTSAEVLRYKCWLEQKYRSPYTGRTIPLSKLFTPAYEIEHIIPKQRYFDDSFSNKVICESEVNKKKGAMLGYEFIKSYHGASITLNRGGTASIFSVEAYENFVKEHYAHNRGKMKKLLMDDVPDSFISRQLNDSRYISKFMKSILSNLVREEGEKEAISKNLIVCTGGITDRLKKDWGIHDVWNDIIFPRFKRLDEMDSSHTYITLNTHRHPIPSMPLEFQRGFSKKRIDHRHHAMDAIVIACATRNIVNYLNNESARHDAKTSRMDLQRLLCTANRKLIDKPWKTFTQDICKVLEDMIVSFQRTLRIINKTKNYYLRFEDGKKRRVLQTKGDNWAIRKPLHKETFYGEINLRRIETLSLNKALERIPDIVERDLRKKLSELLSLGYNAKRIKGYFEEHKEEWSDVNLSKIKAYYFTKQKNKRYFAARTELDTSFNKDKIENKIADTAIQKILLQHLEAYGNDAEQAFSPEGIDTMNRNIRQLNGGRSHQPIYKVRVYEEATKFAVGRRGNKSTKFVEAAKGTNLFFAIYEISQVDGNGNRQTSRTFSSIPLNVAVERLKQGLPPVPEDEEGNAPKYVLSPNDLVYLPTERELKRREIAMPIDKSRIYKMVSCTGKDCFFIPANTAVPIVDRYEYSSMNKIGRALTGEMIKEICLPLKIDRLGQIIEISTF

SEQ ID NO: 21957 - protein, 957 aa, unidentified
  REGION 1..957: note = Cas Enzyme sequence
TPEAIDAYVKQLDATLRERWEGAGASHADRQRLPYRLREAAVVRQVEGDELGRALYHLAQRRGFLSNRKAPDRDDEDRSAMKKSIGELAERVAAHDPPTLGAYLASLDPDDERLRGRWTSRQMYLDEFDRIWEAQRERLGLSDEQRDEIHDAIFHQRPLKDQSHLVGRCSLVDGAKRCPIGDRIAQRFRVLQQVNHLRVVFDDMTERALTREERDALLDALLAEGDLTFHKARKAAGLPRAATFSIERGGEKKLVGHRTDAKLRRIFGPERWAAMSEGEKDAAVHDVRSVREADVLRRIGRSRWGLDAEAADALADLTLEEGHSAHSREALRRLVPRMEQDGLSYSEARKDEFPESFQSEEAHDLLPPLEQWDADLRNPSVARALTELRKLVNAIVRRYGKPVRIHIELARDLKQSRSRREKRSQRMRNREKEREAAAAAIVRDIGVTDPPRWMIEKYLLAEECGWHCPYTGKGFGIHDLLGRNSQFDVEHIWPFSRSLDNAFANKTICRHEENRNRKRGRTPVEAYGEEELETIVERVRAFKGDPLLIRAKIRRFMEPIEEGFTLRHLQETRYIGRLACDYLGLLYGGQIEGLGSESSRRAIVTPTGGLVAWLRRGWRLDAVLSDRNEKERSDHRHHAIDAIVVACADQGAIQRLSESAGRMERQGRERPYESVDPPWDGFEDEVARAIGAVVVSHRQSRRVAVKEKEQAKNRKSARSVGIRGPLHKETLYSKEHNGRRRVRKRIETLSKADIENGRLVDKRALATVRAKLTELGEPNPTRAFKDPANLPTVRGHNGRLVTLRKVRVEVGDQPRAFGRGAGQRNALPASNHHTRILAKRNKTGEIIGWEDEPVVLADLADRIARGERDPLDGEVLFTLAANDFVEMDRKDGEGRAVYRILSVSKGDMEIRKHWDGRVRDDLRKAKQLERVSGGQLLRRNARKVHVNYLGEVHDAGG

SEQ ID NO: 21958 - protein, 1062 aa, unidentified
  REGION 1..1062: note = Cas Enzyme sequence
MNGKAETPPVVLGLDLGSASLGWALIALDNQHDPTGLIRAGVRIFQPGVEGSTLEIEQGKDKSRAVDRRAARLTRRQLRRRAARQRDLFKLLQQHGFLPPADENANANSSEQRHAILNKLDQELAQHWRANAGATGNVDQLLPYILRKSALDRKLERFELGRAFYHLIQRRGFKSNRREGKKGKDKQEELGKVKTGISELEKEMKASGGRTLGEYLAGLDPHTQRVRRRWTARKMFEDEFEAIWTVQQPHAPELLTAELKTEIARLLFYQRPIASQAHLIGFCELEPGQRRAPWATLEAQQFRALQKVNDLAIVLPGFLQAQPLSPEERQRVYWGLQNEGDKTFPALRKLLTTKSQFNLERGGEKSLRGNRTNAVMRSIFGNRWEEFSAEQRTKAVDEWRGTEDPEILTKRGVEQWGLEEVTARKWADTEPEDGYCNLSLKAIRRLLPRMEAGESFKTVERSIYGEPFSGQEPKDFLPTVHEALPTLRNPAVERAVTEMRKMVNAIVREYGKPYEIRIEMARELRKPRKEREAVTKSNRSREREREQAKARILKECGFQNPSRADIEKALLFEECGAVCPYTGRTIEFTSLFGDSQFDVEHIIPLSRYPDDSFLNKTLCYHEENRAIKRGRTPWEAYGSDEERWNAMLGRVEKFKNPAKLLRFKLRTQEELGEFTQRQMNDTRYTTKLAADLLGTLYGGRDETLADGSKRRAIFASTGQVTATLRRVWNLESILREAAPSANGESRGKPRTDHRHHAIDAITIALTSEKTIKLMSTVAAQAPEWQLDKRVFRRIESPWPDFVDSIRPHIEQMLVSHRPEHKMSGALHKETIYGPPHRFDEKSVVHLRRRLSGIPAGQIKDIVDDVVREAVMQKLAEHGGDTKKFNEDDLSTLPYLPAKDGQRVSVKRVRVREVKNREGLIQLRNGFVEPASIHHFELFVRRENRRDIWCHTAVTLYEAFQRQRRGEVIVSHMLADEPDAEFLFSLMKGDTIEIDYHGGREIFRVKKFYSAGPIWLTHENNAQKDEEQKRDKTTWSKSPNELKNLHPRKVVVDLLGRVHPAND

SEQ ID NO: 21959 - protein, 1031 aa, unidentified
  REGION 1..1031: note = Cas Enzyme sequence
MSNENGSVLGIDLGANSLGTALIDRNAQQIRFTGVRIFAAGVNNLDESKEAPRGVERRMARQQRKQIDRRRRRFHNTFGILQHAGLLPPGPRTPEYFAALDNNLREKFGNPEKLPYAIRAAALDQLLDPFELGRALVHLAQRRGFLSNSKAVEKDEKEAGKVKEGIAELEQNIAAANCRTLGEYFAKHVDPKQRRIRARYTQRKMYQNEFEAIWRAQLSFGSTLLTATLKSRLANAIFFQRPLKSQADKVGRCELEPGCKRAPVALLEVQRFRFLSVLNNLRIVDTDGRNDRLSDVQRAAVLARSETGEKLAFSKLKKPLGLEKNQSFSAESGGAEDLPGVPSAYRLRKALTRAWDDLTPERQRELVEFLVLGAGHPEDQIAHLIAGFEFDEATASAAVATALPQGYYSISLEAIRKMMPLLAAGQSYATARKEIYGEVRRSEPVALLPALNTETVRNLIGDVRNPIVMRSLSELRKTVNAIVRKYGKPEFIHIELARDVRRNADERARLSKRNNDQRKTREAATQHIASVQGIPVGNITRRDVEKYLLAQECGFRCPYSGRTISMEALFGQHALFHIEHVVPYSASMDNSFDNKTLCYHELNAVKRDRTPWEAFGASGDWENIVERVKRWPAPNPRKLRRFLMNETDRAKLLEEFSSRQLNDTRYASRLAALYLGLLYGGTVDADGSKRVFTCSGPVTSILRDVWDLNRILNPASPGKSREDHRHHAVDAAAIALCSQGMVQRLSEAATQAASIGRRRLAPVGEPWPGFREDLEKSVLATNVSLKPEYKLQGAMHDQTLYSRQRPAPDGKKVVHIRKPVTEVKPAEIVDPRVREAVEATIAEVGSAKKLGVDDKWPVLTTRTGKTIPIKRVRVKKSETPVALGHGVKGRWVVPNSVHHTEIVRNESGKKIRFDHHPVSTIEALRRLGAGEPVVRRDFGEKCRFVCSLRSGDLLEFRVSHTPNTLWLVRTVKSSGQIELNPVSDGRKKAEIMDSKLNPTRVFLTQVVNITFAEGARKVLVSHLGEVLAAHD

SEQ ID NO: 21960 - protein, 1045 aa, unidentified
  REGION 1..1045: note = Cas Enzyme sequence
MMTAEAELEPYVLGLDLGVESVGWAVIDLDQDGTPCGIRRAGVRCFDSGVEGQIESGRDHPRNTKRRKARLQRRQLWRRARRHGKLFGVLQRAGLLPPGPGRSSEDRHKLLFDLDRSLAGRYPADEDRAAAQLLPYRIRAKALDEPLEPFALGRALYHLGQRRGFLSNRKAPRDEEKESKVKAGIADLRRDIQQAAARTLGEYFAGLDAEEERVRGRWTSRQMYEEEFEAIWSAQAPHHAALTPELKREVHDAIFRQRKLKSQKGLIGFCELEPDCRRAPWACLDAQRFRFLQRVNDLEVIAPDGEIRPLTAQERDKLINALDTGGDLTFAAIRKLLGLNKPRGYSFNLEEGGEKKLVGNRTAAKFVAAIGKGRWAELSEADRDRLVEDLLSFEKTDPLVQRLIRAWGFSEAEAVQIAEIQLEPDYCRLSRRALRRVVPLLERGEHYATTRKKLYGDRLAEAETVDLLPPVADASAELRNPVVKRALTELRKVVNALLRRYGKPALVRVELARDMKRSRAARKDASRRNRQNERAREEAKKKLLVELGNEHPGRADVEKLLLAEECDWDCPYTGKRMSMATLLGPSPQFDVEHIIPFSRSLDNSFRNKTLCYHEENRTRKRNRTPVEAYAGSAQWEEILGRVRKFKGSMAAAKLRQFQLKEIPEDFASRQLNDTRYISRLAGEYLGLLYGGRTDADGKLRVQVSSGPVTAYLRNQWGLNAILGEGPRKERTDHRHHAVDAIAIALTSPSTVKLLSDAAQRADAWGGRLFVPIDPPWDGFLDQARHAVDAICVSWRVDRRVAGALHKETLYGKSHPAPDARGRPVECRHLRKPLVDMSIGEIDSIVDDQVRWMVQGKLQQLGGTPKQAFADPANLPYFRTKDGRIIPIRKARIRQNVTTVELAGRGAPRFVAPGDNHHMEIVAATDAKGHTKWEGHLVTLMEAARRARSGEPVVRRDHGRGKKFLFSLANNDYVVMEHHPGEVQLYRVVGISEGELEFRLHTDARPTTVVKKIPGARVRRSPGKLLEAKARKVAVDPLGNILPAND

SEQ ID NO: 21961 - protein, 1080 aa, unidentified
  REGION 1..1080: note = Cas Enzyme sequence
LGQYFYELKNNGEKIRARYTSRKDHYEKEFNRICEIQSISDELKKELYNAIFFQRKLKSQKFLVGKCTFETNKPRCPISHFEFEEFRMLSFINSIKVAKNSTENDMQEMKFLSSSEKEIIYPLFFRKSKKTFDFKDISKKLKGKNDNWKFNYRDDTTVCGCPVSSHFIEIFGDGWKDTKINQYDIFDIWHVLFDFDDEEKLKDFAINKLQLSTVQTEKLCEIHFQQGYANLSLKAIRKILPFLRKGFLYSNAVFLANIPSMIGSDVFEKNRELIENEVLNISKTLKEKNNIITLANLCMEKIFKDENHNFHTEEWDKTILDLQIKDFYGLKKWNDFSAEKKEEIKNTVIEKIDETLKLATTRNPNDYKYKLLRTDKLIEDFLLENGLSIKKGKKLYHPSETEYCFEKPKISEDGKRCLGSPRTPSVKNPVAMRALHQLRKLINYLIETNEIDGSTKINIELANEVNDKNWRKAIEEFQKKNEKLNDEYRKRIEDFYKEVGVIKEITESDIKKYRLYKEQEIKGTSICPYTGKSINLTDLFGATPLFDFEHTIPRSISYDDSLENLTLCDSNFNRNVKKQHIPSELQNFGEINERFQKFYEDKISDCLFIIEKNKTKGGYIDPVVKDNKIVKRHIAQLELNYYIGKLKRFTADSYKVTMGFKHSQLNDTRIITKFALSYLKSVFEYVQPVNGSMTDLFKRQWGLLDRKESKDRTNYKHHIIDALTIACVNRGKYNLLCEIIKNSSDGKHIRIPKPWEDFDSDVLKAVEYVIPKHFVVDNALRQSKKLLKDRFGKPIIKNGHVVYKKGNTVRGSLHKDTFYGCIMTPPEKNIPSEKIFVQTIDCGNLDKSKAEKIIDKGIKRAFFTNLESGIQSLVEIQNNGIKLPYKLNNRDVFAKKIRIATRLSNPIIIKKHKDISEKEYKQNYYVVNDENYLIALYRAKDKNGKSISEYSVLNLYDAVSKKKNKEALYTNKMKKNNYDLSIYKVLKIGKIVILQEEENEDVFTLPNEQLFSRLYRVSGIASKPDGRINFVHVIISSPFSINKEVFDNGIEKFKRISNSNLYCLVEGKDFIISPIGEIIK

SEQ ID NO: 21962 - protein, 1056 aa, unidentified
  REGION 1..1056: note = Cas Enzyme sequence
MTYRLGLDMGSNSLGWCLLQLDEDGEPCDVMDAGVRIISPNQEAGRDPQTGTSLAVDRRAARSARRRRDRYLRRKRDLMAALIRHGLMPQDEAARKQLEKLDPYELRARGLDERLSLFELGRALFHLHQRRGFRSNRKTDKADDSGPVKAGVKKLRDAIAAAGARTYGEFLYWRHRERRPVRARNVSAKPTKAEYEFYPDRALVEDEFDRLWAAQSAFHAELTEAAKKNIKDVFVRQRDLKPVNPGRCTLNPDEKRAPWAWPLTQRFRIHQDLGNLKVAHPGARQRPLTLVERDILLAKLLGAGKVTFESLRRALKLPPDAYFNLESERRKDLKGDETAKVLAHKARFGKSWRDLPVERQMDIVEKLLEEENEEALLSWLITDCGLDQERAEAVSNASLPPGYCRLGRTALARIVAAFETGSKEDVDPETGEIIRVPLTYDEAVQAAGFAHHSDIDRHDELLPRLPYYGDALTRHVVENHDARPGSQDYRGRITNPTVHIGLNQLRKLVNALIERYGPPAEIVVELARELKQSQEKKSDIARLQARNQKANEERAEKMAEIGIVEPSGLDFLKMRLWEELDLQDAANRRCPYTGEQISIRRLFSPEVEVEHILPFKRTLDNSAANKTVSLRSANRDKGNRSPYEAFSHSPNGYDWQQIEARASRLPANKRWRFGPDAMERFEAEERGFLDRQLHETQYLSRMAKAYLSLVCPANKVWVIPGRLTALLRGKWALDEMLPDHNYADTRNEKNRKDHRHHAIDAFVVACTRRSLLQKVASAADETRERLIDDMPDPFDGFDRDAFQHLINAIVVSHRPDHGTAGKLHEETAYGQVANPQDWDGYNLVYRKPLIGLNEKEVNRIRDPRLREQVQEHLYQAGLNGTPHKEALAEFAQSTGIRRVRLLKKEKDLIAIRDGSGRPYKAYSPGDNHRVEVYELPDGTWRGEGVSVFQANQPGHVPRWREEHPDARLVMRVHKGDLLKLTHDGREQVMVVRQLEPSANRFKLAPHNESGNLQQRHKDPDDPFRWLMASYSTLKRAGARKVRVDELGRIWNVIERP

SEQ ID NO: 21963 - protein, 1369 aa, unidentified
  REGION 1..1369: note = Cas Enzyme sequence
MNNNYYLGLDLGTNSVGWAVTDDHYNIIKFHGKHMWGMRLFEEAETAKDRRLHRQARRRRQRLVERINLLEELFDKEISKVDQGFFARKKESDLHFEDKTTKSEYALFNDKSYTDRDYYKQYPTIFHLIMDLIENDKKRDIRLVYLACHYLIKHRGHFIFDGKNFTVDNSFENLLDKLITYLKDNDDITLSFPKDQLINIFKNSNLNSTEKSDQLKPFFGRTNLEKGIIKLLSGGKQDLSNMFRDETLKNSNYKNLKFSDNTFDDERDGYAADLGDRINLLILLKQIYDASILESMMSQARVSIDGHKYISSAKVCAYEKHKSDLKRLKSLIKKYLPSEYNNIFRKITEKDNYVAYSKSNITNNKREKALKYVEYVDFTKYLTKKLKTIKTQDAEDDKEIFEIKGELEKQSFLPKQRTLDNSIIPYQLHLMELKKILDNQSKYYDFLLAKDDQEGITVKDKIISLLTFRLPYYIGPVNPAVHGKFAWVKRLANGKVTPWNYKEKIDIDASHEEFIKTKLSKCSFLIGCDVLPKNSLLYQKYMVLSELNTIKFNGVNISEKLKDDIYQNLFKNIQKVTKKRLQNYIKEHENIIGDVIVTGIDNAFKQGLVSYLKFKKIIGDKIDDDRYQKVLEKIIRDITLYDECAGKKIKKEYKDSDLFTEDELNKIVKLTFNDWGRLSAELLDQLEGEDTVSGETGKIIEFMQKHNYNLMQLMSKKFTFKYKIDEINKSYYQHDKFNYKSMIDSLYVSPATKRILWQSLKVVHEISKIMKHDPEKIFIEMARSKEDHPKRKLSRKADLKQVYKDSKKQIISIIGKDKYQDLSNELDNKDDRDLRWDNLYLYYTQLGRSMYSLKPIDISELMNKNLYDQDHIFPKSKKYDDSIENRVLVEKELNVKKSDIYPISDANIIPQKIKGQVENFWKMLYDHKLIGDKKYARLIRSKAFTDDELAGFIARQLVETRQATKETADLLKRLCPKSRIVYAKAQNASIFRQKFDIPKSRTINDLHHAQDAYLNIVVGNIFDTKFTQDPRNFIKNTKDSRNYNLEKIYDYNVERNNYVAWIAPDSKTNGTIANVKCNLSTKDFRVTRPSFYKKGALFNQNLSRKGSNLAPIKEHSPKSNPLKYGGYSGKNNSFFVVVAGKDNKGKDIVKLIPVNTLIYNKMLHCDYKAKQELLTSYVANNFAINNFRIVKDDIKMYSLVKIDGAYYYLVGGTDERIEVKNAMQLLLSKDSIKAVKILEKESKDQFANIKNYKDIDIKLGRTFNEVISKYTNSVFGKSMLISDKYRKDIFKSVDKSILEFNSLNTIAKADNLLKFVTSMRPAGSVDALKMVGLIERIRKSNVISNFNEFKLINQSVTGLFENEEDLLKL

SEQ ID NO: 21964 - protein, 1382 aa, unidentified
  REGION 1..1382: note = Cas Enzyme sequence
VVDEKIFWGLDIGTDSVGWAVTNSEYKLKKYKNNLMWGVHLFDEAKQSAERRSFRTARRRLDRRKQRIILLQEFFVRAVCEKDENFFRRLKESALLPEDAEHRTNNIFFDDPDYTDKDYFEEYPTIHHLICELMESKEPHDVRLVYLACVYLLAHRGHFLLPVSEDDISKVTEFEPLYESFYKALEEKLDDEPPFDRSADDFAEILKSHKTVSAKNKDFDKLLFGGKVKTYDNENISYSALIKLLSGGTEKLSKFFANEEYTDLEKDSVCVRNADFGDTLEMLEGQIDELDFALLKSVKSLYDWSLLVDILEGKSLISEAKKDKYDEHGYDLDALKYLFREYLTKDDYNEMFKEVSGKQNYASYVYNASSDKTRDSKYKKCSQKDFCKFTKKFLSKIKPNEKDKPCLDKLLEKCEQNSLCPKQVTTDNRVIPYQLYYVELKKILENACGYLPFLNERDEYGTVADKILSIMKFRVPYYVGPLVDSKKSPNAWLVRKLDGKITPWNFTDMVNEDESENAFIRRMTCKCTYVAGQDVLPKYSLLYSKFSVLNEINNIKLNGEPISVQTKQEIYTELFERNKSRVSKKKIRDCLISHGYAADSDEVTGIDDIAKSALRSYHDFKKMLSNGILTEQQVEEIIEHITVTTDNIRLKKWLKTQFPMLADEDVKYITKLKYKDYGRLSRCFLEDVLPVDTKTGEAESDKNIITMLWETNENIMQLLSSKYRYSENIEHMNRQYYALPENHKSMSERLKDMYVPTAVRRAVTRTFDIVKELKKIQGRDPDKIFIEMARGTGETPKGKRTNSRKDQILEHWHGLDNKDINDLKKSGIWEHLDTIDDAKLRSDKYFLYFMQLGRCMYTEKPIPFEEVENEHKWNIDHIWPQAKIKDDSLDNKVLVSSNENGKKSDSYPISDDIRHSMAGLWHSLYKKGLISEKKYQRLTRSTPFTDDELSGFIARQLVETRQSTKAVATLLKEQFPNTEIVYVKAGLVSDFRQEMGMLKCREVNDLHHAKDAYLNIVLGNVYNTRFTKDPLNFVKNNEKYSIKIFQKNSDGKKTGVITRKVERGGEVAWDPETSFAIVRKMMSKNSIRYVRYAYMRKSGQNGGFFDQNPLRKGKGMVSIKHNLSIEKYGGYDNATISFFSLVSIKDFGVILLAVELLSANKFLKNISEAKEYAADKLSKELNVKIVPNDVAFPLNNRYNVVKINAVLELDGYRVMIAAKQNSSIKFVSNESLILSSQHMAYVKKITKFIEKRKQDKVCMINAFSGISIEDNIELYDVLVSKCNIKPFNIMYENLGIKLSDNRDNFIKKSVENQVLVLSEMVRLFKTGRKAGVNLEEVGGRKNSGVKTLNTCLYKVKDYSNIFLVDQSPTGLIEHKSPNLLDL

SEQ ID NO: 21965 - protein, 1153 aa, unidentified
  REGION 1..1153: note = Cas Enzyme sequence
MKYRLGLDLGVGSIGSAIIELDENGNALDIKDAGVRIFEVSEGAENRRVKRTARKNLIRTRKRLQLLAKKLFENELWVNDTPEGTEKLRSKSPYKIRYDALNEKLSSPYYMGRAILHLAKHRGAGFVSAAEELKDEEVTEDENKKNKKLSSYEQMAMHLKETNSRTIGEYFYKRLQDSYEKGIDGEKIAPEKHIIRQKTYAIEKKFVDYAIPRYLVKDEFNKIWDEQAKYFSQMNKEGLKQEIYDILFYEKSVAPFATGKCIYFRDENRLLKAHPLSEMRRIYEEVNNIRLETLTERKRLTLEQRDLIINELLLKGENAGKQKIKKLLNLTGQVKISLWDDRVIKAYLYSKEEFQNIEYIKNLSNDELVKFIDFLAEPKEDINNPNSRLLNEDNLIKKLKVILNIDDEKVIGDILIKLPKDRSMIGKSASEILIKEMKKEVLSQREITDRLAKDDKRFIASEEYARQMQGSYDRLPYYGEILVTDTQPLPPLVIENNKSLNKDEVMWGKIANPAVHMILNQLRLVVNDIIRIYGRPYEICLEVGRDVGMSTKKKAQFEAEQKKNEKLNEEAKKYLLERNMYVTGKNILKYKLAKEQGFVDAYNPTRKIPQNFVGFEIEHLCPQADSGSDTYNNLCLTDRNENLPKSNMFPYEWLSIRYKDNPEVIREVLENARKRMPQKAWRFEPDAREIYFENGDEDETSRYLADTRYVSKMAMRYLKAIVDYKQGIDDKTIENRIFSVRGKQTSFLRQRWGLLGLEYDLMGLDVPRYFKLLEEKVNPETGEITDREKNPEWKKKPRIDHRHHAMDAITVACVEWWMIKNMSNEEKLEKAYIKHKPLENVSNFRERVLEILKGIKVSHKPNHTCAGQFHEESGRTVLCINPEDENSIITVRARKILQVVKSFKDLDKLLVKNTIKDEWHERIKEDRIKQAKLKEHFELYVNTAEQILIRENEEAVKDGKKERKITEGMILSKAFLIIQEKGLWKGNNFRDYDNSSSLVNIPKHGVAYLSGNNHCVDFYELDGKVGWEVIKRFDANQKDFIPQWKKNGGKAIWSVQQGDMLELDTPDEWKGYTDKERCIARVKKFSDNCITIDYFTDARMTSPKEKELKYMFVDSLVNRGLSYLTKHRTRKIELTPFGKIKKKHKVLWDGKKN

SEQ ID NO: 21966 - protein, 1353 aa, unidentified
  REGION 1..1353: note = Cas Enzyme sequence
MKREPYYIGLEVGPTYAAYAVTNESYNLERFRGKDMWGIYKFDEAESSQDRKNARSARKNIKKEKERIGLIRSYFHDEIEKADVNFFARLDNSTFHAEDKDKILSGDRNVLFNDENYKDADYNEQFPTIYHLRSFLAKHNELVDIRLVYLAVSNIMKHRGNFYSKNLEDTDSAIKDIYAGICEKASQADIQLYPEADTDKIMDYMLNTALTNKVKATLVSQEVKALTKSETALIKLMCGLKVKITDIFPGLLETLPEEDKKTSMSFSDNDYLDRTEEIENLTGEDNYELISAVKELYDAVIIQNIMQGHRFISDAKIASYEKHMADLKLLKSTMKRYLSKQEYSRFFNIEEPGTYAAYVKSGMSNGVKTRRNSEKGRTLDDLYGSIKKLLLKADEDDEDAEYILDEIGKRTFLPKQRTSDNRLIPNQLYAAELKAILDNAAEHYGFLNEKDDSGLTVSERIMKIFTFTMPYFIGPTSEYNTRGWVVRKEAGKVMPWNLEEKIDVKESAKSFIESMIGKCTYLSGERVLPKSSLLYERFMVLNEMNCIRVDGEKIPVEIKQEIVNGKLALGKKLTRKQILSFLVKKGLATSDSLITGMDEKLNNTMTSHKIFADIFGTLDSETEAAAEDIILWSAIYGDSKEYVKQQIENKYPGLLDEDRMKKALSIKSNDWGKLSKEFLTMTGTNKETGERISIIDAMWQMNLSLNELINDNRYDFMSLIKEKTIKAEKNIFTFEYDDLNELYATASQKRSIWAAVKIVREVEKIKGYAPESVFLNTIKNRPKDVKKDARKTRLIELYKNLKGVSKEWKDSMISHISECDSDGSLKSKKVYLYFLQLGKDMYTWKDIDFKEVIATGSDVYNIDHIYPKHYVKDDSMDNIVLTNAGFNKEEKKDIYPVPDSIYQTMHENWLYLRQNGFMSAEKLARLSDRNPMSDEKRAAFIGKLYTQVSSSTKMLADIFKNILSKDTKVIYTKSSEVSDFRRQYGFPKMTMLNEHYLAKDAYLNIVVGNVWYTKFTASPMWYIEKEYRTGKSEYNLNRMYDFNIIRDERIAWIAESKKKNIPGTIAVIKKVMSRNTPATVTRITEGHGALTNATISRAAKSKPGVYLPLKSDERYKDVTKYGGKTSIKTAYNFLVEHTGKHGSRIRTLYSLPLYLANNVKNKEDIEKYCRETLGLKEPDVRINKIMLNSELEIDGYRYLLGGKTGLQYGLKNNTPMVFNVEWQGYISKIEKYIDFKSVDKDITSERNIELYDEILGKHKNSIFSRKRNPLYNLIESCRDNFVGLSLEEQMQALYQVLFLTRMGTNVSNLSVIGAGANVGLMHLNATISKASSVKLIEISITGIYTKETDMLNC

SEQ ID NO: 21967 - protein, 1087 aa, unidentified
  REGION 1..1087: note = Cas Enzyme sequence
VRYKIGLDIGIASVGWSVINLDIPRIEDLGVRIFDKAENPQTGESLALPRRQARSARRRLRRRKHRLERIRRLLIREGILTKKEMDMLYTNKHEIDVWHLRVDALDRKLNNDDLARILLHLAKRRGFKSNRKSDRNNKENSTMLKNIEENRTILSGYKTVAEMIVKDPKFALHKRNKGENYTNTIARDDLEKEIRVIFAKQREYGNIKLTETFENEYITIWSSQRPFASKEDIVKKVGSCTFEPKEKRAPKATYTFQSFVAWEHINKLKLVSSKGNRILTNEERRLLFEKAFHKNKITYHDVRTLLHLPEDFHFKGLLYDKNESLSVNEKVRFLELDAYHKLRKAIESVYGKDGTNSFYPVDYDTFGYALTIFKDDNDIRSYLLNQYEQNGKVVKNLADKVYDEELIDELLNLSFSKFGHLSLKALRRIIPFMEEGDVYSLACEKAGYAFTGPKKKQKSVLLPNIPTISNPVVMRALTQARKVVNAIIKKYGSPVSIHIELARDLSQAFDERRKTKKQQDENRKKNETAINQLVEYGLTLNPTGHDIVKFKLWSEQNGRCAYSLQPINIERLLEPGYTEVDHVIPYSRSLDDSYINKVLVLTKENREKGNRTPAEYLGIGTDRWKQFETFVLTNKQYSKKKRDRLLRLHYDENEETEFKNRNLNDTRYISRFFANFIREHLKFADNDDKQKVFTVNGRITAHLRSRWDFNKNREESDYHHAVDAVIVACTTPSNIAKVTAFYQKREQHKELAKKAEPHFPQPWPHFADELRARLTENPKESIKALNLGNYDVQKLESLQQVFVSRMPRRSVTGAAHQDTLRRYVGLDERSGKIQTVVKTKLSEIKLDKTGHFPMYGRESDPRTYEAIRQRLIEHDNDPKKAFQEPLFKPKKNGEPGPIIRTVKLIDTKNQIIPLNNGKTVAYNSNIVRVDVFEKDGKYYCVPVYTMDIMKGILPNRAIEANKPYNEWKEMTRDYTFRFSLYPNDLIRIELPKEKTIKTVGGKERKIKDVFVYYKTIDSATGGLELINHDQSFTLRGVGSRTLKRFEKYQVDVLGNIYKVRGEKRVELASSGHPSTRKAVRPLQSTRD

SEQ ID NO: 21968 - protein, 1351 aa, unidentified
  REGION 1..1351: note = Cas Enzyme sequence
MSKKYYLGLDIGTNSVGWAVTDENYNLCKYAGKRMWGIRLFEGGETAEQRRISRSNRRRLSRKKQRIDLLQELFAEEIAKMDPTFFIRLNESRLHLEDKSTGEKFPLFTDKDYTDIQHYKEYPTIYHLRKELIENSKVHDVRLVYLACHHILKNRGHFLINGSFSDVKKLSSVCESMLNSFNGISKYQLEINDIERLEEILSDRKKQKSVKAKELIQIFECGPCEDKTDEKTCKAIVSNLCKWLTGLKGNINSIFDMQFEEIDTSSFSFTEPKYEDTISAALEEKYPDYADVIQKIKAVYDWSVLVEIMAGEDYLSFAKVNAYNKHKENLCILKEVIRKYCDSEMYHKFFNGFDEKNGYGNYIGSIYKNGHSYAMKKCSTEDFYKTLGKILDKIQPEKEDENILEELKVEVKNQTLLPLARTTANGTIPNQVHIQELKAILDNAKKYLPFLNEEDEYGTVAEKILSIAKFRIPYYVGPLSTRHKEQGANSWIVRKQEGRIYPWNFEEMVDLEQSNKEFIQRMTNKCTYLIGEDVLPKNSLLYSKYMVLNELNNLRIRGNKISVNLKQELYKELFCTKAKVTGKGLFNYLKKEDEELTLEDISGFDIDFKSSLTSYLDFKKQILGEEIEKDKYKDIVENIIKWKTIYDDDSKMMKKMIEREYPNVFSKDKIKKICRFKYSGWGNFSLSFLNGIRGADRETGERFTIIEALWKTNYNITQLLSKQFTFKEEIDSINADKVGKIDKVSYDNTVKDLIVSPANKRAIWQTVQITEEIKKVMKCEPERIFIEMARGGEKEKKRTVSRKARLLELYAACQDDVRDWTKEIEDREEREFNSKKLYLYYTQMGRCMYSGEEIDIDELMQKNSKWDIDHIYPQSKIKDDSLDNMVLAKKVINNSKQNKLLSSDIRIKMKKYWNALYKGNFISKKKYDRLTRTEDFTNEELSGFIERQIVETRQSSKAVAELLNRLYEHSEIVYVKAGLVSDFRHDNKMLKSRRINDYHHAKDAFLNIVVGNVYNAKFTSNPRKWIKENRGTNYSIRRVFDYNVKRGNTVVWQGVKDGGHSIDAIRKTMARNDILYTEYTYCDKGELFNATLVKKGNDKAINLKKALDSVKYGGYNSPKTSAFAFIEFDGKKKERKNHIVEIPVYIVNIASRQSDTIKEYLEQKKGYTNVIVKKYPIKKNALIKIDGYLARLRGANETDILLKNAVQLILNDKYYEIIRRVEKYLEYNVQYEAKSMFEGFDHTDLNSLYDELTSKLGTSIYKKRPANQLNALEKGKEKFKNIQTLREKAQIIKEMLIMYRCDAATVANLKAIGGSANAGSMKIKKNTLTSRSLVLVNQSITGLFETEEELV

SEQ ID NO: 21969 - protein, 1356 aa, unidentified
  REGION 1..1356: note = Cas Enzyme sequence
MEVGNYYLGIDAGTDSVGWAVTDNQYNVIRKKGKSLWGIRLFDGANTAQERRTFRALRRRNERKKQRINLLQELFCKEICKLDPNFFIRLRDSSLWSEDKEEKQIYSLFNDKNFNDRNYHNNYKTIYHLRADLIKNKEKHDARLVYLAIHHIMKNRGHFLFNGNIESVTSFENTFNEFKNCLLDELEINLECPSISEFENILKDRTFKGTQKCKKLKELCSIPSSDKKLDNIFKLISGLKADLSIIFEDESFKENEHNKISFADSNYEETREVLNSEIQEKTLIIDIFNSIYNWVILSDILSGGEYNGGLYLSIAKVNIYNKHSKDLKILKSVIKKYFPQKYTDIFASNKENNYCSYIGMYKSGGKKYSVKKCSDKPEEFYKTIKNIINKNTAEEISNDKDVQYILSEIENNSFLPLQINKNNGVIPYQANKIELEAILKNAENYLPFLKEIDTECNKTTSEKIIDLFEFRIPYYVGPLNTSKGENAWMIRKEDGTIRPWNFEQKVDIDKTAAEFITRMTNQCTYLNNETVLPKYSLLYSEYTVLNEINNIRINGEKISVELKQDIFNSLFKNNKQVTCKKLLSHLNSNGYNLKKDDLSGFDGNFKSSLSSYIDLKNYIFGDNIDKPQIYNLAEKIILWITLYGDDSKLLKRVLQKNCSEQLNPEQIKKITKLKFKGWGRLSKAFLSELRGADRETGETMTIIKGLRNTQNNLMQLLSQNYTFTEECEKINSGYFINPNETSYDSIVKNIVASPSIKRSVWQTIQIVEEIQKVMGSKPRKIFVEMARGEEEKVRTTSRKQKLLDLYKNISDECAKGMYEEIYSKDESDFKNIRLYLYYTQMGCCMYSGKHIDLSQLSNTNIWDRDHIYPQSKTKDDSLDNLVLVYKSINSEKSDDIISPTIQNNMRTFWKLLFDRKFISEKKYHRLTRTTPLTDEELAGFINRQLVETRQSTKVMASIFKRIYPNTEIIYVKAKNVSDFKHRKDCENGVKVRELNDYHHAKDAYLNIVVGNVYSSKFTNNPLMWLKNNRNVKYSLNRMYDFNLTVNNENIWVVGNEGTQKTVNKYLGKNDILYTRYAMTNKGELFDQNPLKATGDKSKQTTLVPLKKGKEVWKYGGYNSITPSYFMLVESKDKKGNYIRTIETMPLYREKEFSKNEEFLLNYCKEVHKLKEPKIILKCIKKNALLIVDGFPMHLKGSTGLQLKLQGAVQLILESDMVIYLKKLMKFVNENNINKNKLEVTPYMKLSAEENIKLYDIFIQKLTTGIYSKRPANPVEKLINARDIFIELTVKEQCIVLSEILHLFQCKPLTSANLVSINLKKTVGIIQIAKNITAKNVKLVHQSPTGIYEYTVDLNKI

SEQ ID NO: 21970 - protein, 1394 aa, unidentified
  REGION 1..1394: note = Cas Enzyme sequence
MKHILGLDLGTNSIGWALVKERENENEQSSITRLGVREIYLTADEQSNFEKGKSITTNADRTLKRSMRRNLQRYKLRRNSLISLLKDYGFITAETLLNENGNRTTFETYRLRAKAVTEEISLEELARVLLMINKKRGYKSSRNAKSNDESGQLIDGMEVAKKLYDDNLTPGQYVVSLLRKGKNNIPDFYRSDLVAEFDKIWNFQRQFYPDVLTDSLKEELKGKGDKETWAICSKPFAIEGIKRNIKGWEQKKEDYAWRAESLQHKIDLERLAIVLQKVNGQIKNSSGYLGAISDRSKELFFNKLTVGQYQMAELDKNPNFSLKNQVFYRQDYLDEFERIWETQAKFHKELTPELKHIIRDIVIFYQRPLKSQKGLISLCELESREIEIERDGKKTKKTIGPRVCPKSSPMYQEFRIWQAINNLQVSGMVVADNQVDLFGKTIGKKFGKRFLEQEEKEILFKELNFKSKLTKKEILKLLFENYKELDLNYNEVKGNTTMAALLEVCSKIIEMSGHGEYDFSKMSADEITGIVFPVFSGLGFSTDIFSFDSSVEGKAFDKQPSYMLWHLLYSYEGDKSKTGNESLISKISECYGFDKEYAAVIAGISFEPDYGSLSVRAMHKILPYMKDGLGYSDACQYAGYRYSKRSLTKEEIEARPLKDKIDLLPRNSLRNPVVEKILNQMINVVNAVVDTYGSPDEIRVEMARELKKTKTQREETVKAIRKTTAENEKYKKELEEEFGLKNVSRNDIVRYRLYLELKDNGFKTLYSNTYIPREKLFSKEFDIEHIIPQAKLFDDSFSNKTLEARSVNLDKADSTAYDYVKVKYGEDGLEKYKEKINQLCEKKIISKTKLKRLLTTEKDIPDGFINRDLSNTQYIARKACEILEEITRRVVPTTGSVTSRLREDWQLVDMMKELNWDKYDKLGLTEIIEDKDGRRIRHIKDWTKRNDQRHHAMDALTIAFTKPAFIQYLNNLNARSDKGGSIYAIERKELYRDNKDKLRFYPPMPLDEFRTEAKRHLENILVSIKAKNKVVTRNVNITKAKKAEKGKRKRIQLTPRGQLHNETIYGRIRQYATKEEKVNASFTEDKIMTVACKRYREALLVRLRQHDGDAKKAFTGKNSLAKTPLYTDSLHTETVPEKVKTVMLAPLYTKREAVSPDLKIEKVIDIGIKRLLQKRLEQYEGDMQKAFSNLDENPIWLDEEKGISIKRVTISSVSNAEALHDKRDNRGQLILDKDGKKQPTDFVQTSGNHHVAIFRDADGNLQEHMVSFYEATARAIQHLPIIDKEYNKDLGWQFLFTMKQNEYFVFPNEETGFNPKEIDLLNPKNYALISPNLFRVQKLSSKDYVFRHHLETKVEYNKELFGVTWKRINTLSKIKDIVKVRINQVGKIEDLGEY

SEQ ID NO: 21971 - protein, 1394 aa, unidentified
  REGION 1..1394: note = Cas Enzyme sequence
MKHILGLDLGTNSIGWALVKERENENEQSSITRLGVREIYLTADEQSNFEKGKSITTNADRTLKRSMRRNLQRYKLRRNSLISLLKDYGFITAETLLNENGNRTTFETYRLRAKAVTEEISLEELARVLLMINKKRGYKSSRKAKSNDESGQLIDGMEVAKKLYDDNLTPGQYVVSLLRKGKNNIPDFYRSDLVAEFDKIWNFQRQFYPDVLTDSLKEELKGKGDKETWAICSKPFAIEGIKRKTKGWEQKKEDYAWRAESLQHKIDLEGLAIVLQKVNGQIKNSSGYLGAISDRSKELFFNKLTVGQYQMAELDKNPNFSLKNQVFYRQDYLDEFERIWETQAKFHKELTPELKHIIRDIVIFYQRPLKSQKGLISLCELESREIEIERNGKKVKKTIGPRVCPKSSPMYQEFRIWQTINNIQVSGMVVADCQVDLFGETVGKKFGKRFLEQEEKEILFKELNFKSKLTKKEILKLLFENYKELDLNYNEVKGNTTMAALLEACSKIIEMSGHGEYDFSKMSADEITGIVFPVFSGLGFSTDIFSFDSSVEGKAFDKQPSYMLWHLLYSYEGDKSKTGNESLISKISECYGFDKEYAAVIAGISFEPDYGSLSVRAMHKILPYMKDGLGYSDACLYAGYRHSKRSLTKEEIEARPLKDKIDLLPRNSLRNPVVEKILNQMINVVNAVVDTYGRPDEIRVEMARELKKTKTQREETVKAIRKTTAENEKYKKELEEEFGLKNVSRNDIVRYRLYLELKDNGFKTLYSNTYIPREKLFSKEFDIEHIIPQAKLFDDSFSNKTLEARSVNLDKADSTAYDYVKVKYGEDGLEKYKEKINQLCEKKIISKTKLKRLLTTEKDIPDGFINRDLSNTQYIARKACEILEEITRRAVPTTGSVTSRLREDWQLVDMMKELNWDKYDKLGLTEIIEDKDGRRIRHIKDWTKRNDQRHHAMDALTIAFTKPAFIQYLNNLNARSDKGGSIYAIERKELYRDNKGKLRFYPPMPLDEFRTEAKRHLENILVSIKAKNKVVTRNVNITKAKKAEKGKRKRIQLTPRGQLHNETIYGRIRQYATKEEKVNASFTEDKIMTVACKRYREALLVRLRQHDGDAKKAFTGKNSLAKTPLYTDSLHTETVPEKVKTVMLAPLYTKREAVSPDLKIEKVIDIGIKRLLQKRLEQYGGDMQKAFSNLDENPIWLDEEKGISIKRVTISSVSNAEALHDKRDNRGQLILDKDGKKQPTDFVQTSGNHHVAIFRDADGNLQEHMVSFYEATARAIQHLPIIDKEYNKDLGWQFLFTMKQNEYFVFPNEETGFNPKEIDLLNPKNYALISPNLFRVQKLSSKDYVFRHHLETKVEYNKELFGVTWKRINTLSKIKDIVKVRINQVGKIEDLGEY

SEQ ID NO: 21972 - protein, 1434 aa, unidentified
  REGION 1..1434: note = Cas Enzyme sequence
MKRILGLDLGTNSIGWAVVNEAENANEKSSIVKLGVRAIHFDTFVNSDTGKELKGDASDFFKSGKGVSPNAGRTQKRGARRNLQRYKLRRANLIEILRENNIITDESVLSENGNFSTFETFRLRAKAATQEISLEHFARILLMINKKRGYKSNRKAKDGEEGSLIDGMEIAKRLYDEDLTPGQLGYEILSSGKNHLPDFYSSDLQCELDRIWNFQSKFYPDILTESLKKEIEGKNASQTWAILQKYFVWKESIRIWDNDRGCNVEEVVEKRISGIKRSVKGRELKLENYRWRVESLEEECSLEKLAIVFQEINKQNLSSSGYLGAISDRSKKLYFNRQTVGQYLLSLIEKDSNISLKNLVFYRQDYLDEFNTIWETQAKYHKELTPELKKEIRDCIIFYQRRLKSQKNLISFCEFESQEKILSLPDGKEKKIHVGSRVIPRSSPLFQEFKIWQTLNNVEVFGRNVSRKKKREEDELSLFNKESGCDPLFVEGRRKLYPEEMEILAKELSVKEKLGKQEVLSLLFDHPENLDMNYKVIDGNRTGYTLFKAYSDIIELTGHSPISFKQHADSIISQVHQIFDSLGWKTDFLEFDSLQKPDTQKYYKLWHLLYSFESDNTTTGNGRLIDKIVEWTGIEREYASILANATFLDDYGSLSAKAIAKILPYLKEGNGYDLACHYAGYNHSKSSMTKEQIENKQLKNKLEILPKNSLRNPIVEKILNQMVNVVNTIIDSYGRPDEIRVELARDLKKNADERSRLTKAIEETTKLHDSYRKTLKEEFGLSHITRNDIIRYKLYEELKDNGYKTLYSDTYIPKEKLFTGEYDIEHIIPKARLFDDSTSNKTLELRSINIEKGKQTAYDFVLGKYGELGLDAYINKCNELFKGDKYKSKLKKLLMKESDIPEDFIERDLRNTQYIARFSLKMLNDICKRVVATTGSITDKLREDWQLVDMMKELNWSKYEALGMIEYSNDRDGRKIGRIKEWSKRNDHRHHAMDALTVAFTKDVFIQYFNNVNASHKANTNEYAIKNKYFLNGRALPPIPLDEFRKEARKHMQDILISIKPKGKIVTKNITRNGKKGKDYIQQTPRGQLHLDTVYGKIKRYATKEVKVNGSLTLAEIEQVAKKLHRMALMKRLEEFGGDPKKAFSGKNAIDKNPIWLDELHTKRVPEKVKLVFFEEYYTIRKPVDKDLNIDKVIDARLKKLVKERGKEGLTNIDENPLWQNEEKEIPVKRVKITGISNAVALHDKKDKFGNLILNGNGERIPIDFVNTGNNHHVAIYRRPVLNKDGSFKVDSDGNKQYELEEVVVSFYEAVTRANNGLPVIDKNFRSYEGWEFLYSMKQNEYFVFPNEKTGFDPKEIDLMDPDNYSIISPNLYRVQKFAYKNYVFRHHLETSIDNTTALMKGVTWTDFRSSNGLDKIVKVRVNHIGQIVKVGEN

SEQ ID NO: 21973 - protein, 1129 aa, unidentified
  REGION 1..1129: note = Cas Enzyme sequence
MRYTLGIDAGIGSVGWAVLQNDLHGEPMKIERLGVRVFDPSENSKDKATLTSIRRKARGSRRVTRRRKHRKERMKRLITSAGMITREQMDELLSSGKYEKCVYELRVDALERLLTVEEYVRLLIHFARRRGYQSNSKSEEAKDAKKNGKVKQAISDNRQRMQDHGYRTVGEMFWKDDLFRRINPDGSIVLVVHNQPDDYKLTVGRDMLKKEIQLIFAKQREFGNGWASEEFESAYLEIWGSQRNFDEGPGGDSPYGGNQIEKMLGTCTFEDPEPRAPKASYTAEYFRLLQTVNNLKTVGQGHLAEFLNEDQRKTVIEYALTSAEITYGQLRKKLQLPDDVIFNNLHYGEKIIKKPKKKKDSEKNEGEVSKEKESSETVEREKSVEEVEKKKLGQMQFYHKVRIALDHVKKGAIREFSADQLDEIARILTFYKSDDNRTTHLREAQIPEEYIPELLALPASKAAHLSIKAMKKMIPYLEAGYTYDKACTAVYGRHDGKKPGVKRTKKLEISMAGEIYSPVVLRAVSQMIKVINAIVREYGPPEVVRVELAREIGKSRKVRDKLESQQDANAKKNAAIRSQVEEYKKGAPTGQDIVKLKLFQEQNGVCLYSDTPMVRDRLFEKGYAEVDHIIPYSISFDDSYSNKVLVLAGENQEKGSRIPFEYFGHDEFRWSCFETLVNSQIHSVKKRKNLLCRALSEEQIKGFKDRNLKDTQYMSRVIYNLINDHLEFVETGNYKPEMRTQAVKGAITAQVRKRLGIDKARANGDLHHARDAAVIACISPGMIQKITRYSQRCECAWTKAGYVDYETGEVMTKDAYDEKYAPRFPEPWLQFRAELEARLSNDPRGEIDLLKLATYDSDEELRPVFVSKMPNHKVSGPAHEDTIRSGKQAGGTVSKVALTSLKLDETGEIPGYYRPEDDPLLYEALKERLRAFGGEGKKAFAEPFYKPKHNGEPGPVVKKVKKFEKATNPVPVNSGLAKTGKRVRVDVFHVENEGYYFVPIDVADTVKDELPNRAVVADKPMDQWKKMDEANFVFSLYSGDLIRIVSRREIKLNLAKGAERNEFILTNDALLYFKGLDIATGALGLTTHDRRYLQHGLGGKTLDLIEKYRVDVLGNYEPVRLPEKRMRFK

SEQ ID NO: 21974 - protein, 1297 aa, unidentified
  REGION 1..1297: note = Cas Enzyme sequence
MLLSFYVTFLLFLHDKIKNCYPMKYILGLDPGVASIGWALVLEAENDNEESEIIASGVIKANFDNFTYLNSKGVPKEGNPVEMFRKGFTVSPNLVRRISRGAHRSLQHYKLRRAELIRLLKENGLLDNNTLLYEDGKDTTHETYRIRAKAAIEEISLNDLARVLLMINKKRGYKSAKNDDFDSEEEKGEYLSAIVGRSKMLTDTHQTVGQYLMSQLEQHPLKSIKNQTFYRKDYEDEFEQIWKTQIQFHPELTRKLKKELKNRVIFYQRPVESKKQELSFCELESHQIEIEKNGKKQLVTTGSRVCPISSPLFQEFRMWQRLNDVVITDQTTLEKRQLTLEECELLATELSIRKEMTKRDALILLKGKQAKNFDLNFEKLIGNDTQARLVNAYLKIMELTGHDKLEVKKMRAQDVTNAICRVFANLDYHTDAIFGEVALNQDVCIQPYYKLWHLLYSFPGDNTRTGNAKLIQKVKEFFGFDSDEYAKVIADVKFADGYGNLSAKAIQKILPKMKDGYQYSDACELAGYNHSKRSITKEENDKRVLQQHLELIPHNSLRNPLVERILNQMVLLVNNLIEEYGDTYGSFDEIRIELPRELSSNADKRQRDTKNIDDNQKTKDACREELIAKLKEFKINVTYVSENDVLKYRLYKELAINGYKTLYSNTKVDLIALIMGRGFDKEHIIPKALRFDNSFSNLTIEKTDINLDKSKTTAIDYVRETYGEEAVQQYIARVNDLYKKGAFSKTKRDNLLRTAEEIPEEPLNRDLGLTGYINKKAMELLLPVTRKIVSTTGKITSQLRDDWQLVNVLQELVWDKYKRIGKVNTYVDKNNKTVERIDKEAWTKRTDHRNHAMDAITVAFTKPAIIFYLNSLNSQGEARNQLIKMRHDYMHRDDQGNWVFNPPMQIGRLRAEVKRQLEQMLIFHQASSKVATPNVNITKSKKKKEGNKQVVLTPRGKLHDDTFLGCIKLPQPETLAIDKSFDEQKIATVTKEKYRKALLDRLHQFGNNPKEAFAGKNALDKNPIWLDEAHKQAMPLKVKCLQMKTFYTKRVAIGEDLNVENVVNEEIKKILKNRLAEYGGKAKEAFTNLEEHPIWFNEEKGICIKSVIVKATDVKEPIPLHKQRDRKGMIISDSNGETVSVDFVKPNKNHHADIYVDANGELHEKFVTFFKAVQRAKEQKPLVEVDYNANEGWRHLFSIQRYDYLIVPDIENGFDPLLIDVCDTANFPIISSHLFRVQKMSSKNYLLRLHLDTSNKTPDGLKGITSIEIRSLNNFIGCVKVSVDRMGRIFSPQPIVL

SEQ ID NO: 21975 - protein, 1161 aa, unidentified
  REGION 1..1161: note = Cas Enzyme sequence
MGEMSKTNMDRHRSYRIGLDIGIASVGWAVLENNSQDEPIRILDLGVRIFEAAEVPKTGAALAAERRDARTARRRIRRRRHRLERIKWLFEREGLIQIDSFMERYHSPNLPDVYELRYEGLERKLSKEEFAQVLLHIAKHRGFRSTRKAELKEGDNGKVLKATEENRKRMEEHGYRTVGEMIYKDAYFHTECAWADNGYLLTPRNKADDYSHTMLRALLEEEVHILFDSQRKFGNEKATEKLEQEYLEIMLSQRSFDMGPGQQADGTPSPYAMEGFGNKVGYCTLERESGERRAAKATYTAELFVALQKITHMKLVHMDGTSRFFTEEERNILLEMLSSKKEIKYVAVRKKLNLPLEEKFNTLNYNMKRKGKDNEEEGMDEAAIIAATEKATFISMSNCYEYRKRIGEYLETLPEEEQQDLLDEIGTILTCYKNDDSRMNRLTEAGLSKELADSLLELTPAKFQHLSIKAMKKIMPYMKEGMVYDKACEAAGYDFKNDNHGKKMKLLKGENITEIINEITNPVVKRSVSQTVKVINAIILKYGSPQAVSIELAREMSKNFEERKKAEKQIEENRKKNEMAKKEIQELGKLSPNGQDILKYRLWHDQQGICLYTGKKIPLEELFQPGYDIDHILPYSITFDDSYRNKVLVTSQANREKGNRTPYEYFGQDEVHWSAYEARVNHFIKDYKKRRNLLKQGFTKEDRREFKERNLNDTKYITRVIYNMIRQNLEMEPLNREDRKKQVFAVNGSITAYLRKRWGLMQKDRSTDTHHAMDAVVVACCTDGMIQKISRSTQYREVLYKGQSHPDYEIVDVETGEIISLEDLSREEWDERYGAQVPPPWEHFKEELEVRMGSDPKNDLDAHPDMYQLFRYPEDVYNNIRPIFVSRMPNHKVTGAAHADTIRSPRHYKDGGEIFADGGYVLSRTNIEDLKLDKDGEIKDYYNKDSDRLLYEALRARLAEYDGDGKKAFAEEFYKPKADGTQGPIVKKVKTYKKMSLGVEINKDEAGVGRGIAENANGGMIRVDIFRENGKYYFVPIYIADALKKRLPNKAAMQNKPYSEWKEMKDENFLFSLYSRDLIGFKNPKGKKVKCKDGKEIVLTKEIVYYVGANINTASISCKAHDNQYEFGSFGIQSLQELKKYQVDVLGNITEVRQEKRRGFH

SEQ ID NO: 21976 - protein, 1095 aa, unidentified
  REGION 1..1095: note = Cas Enzyme sequence
MRHYAIGLDIGITSVGWATVALDADENPCGIIDLGSRIFDAAEHPQTGESLAAPRREARSARRRLRRHRHRNERIRSLMLEEQLISQDELEVLFDGRLEDIYALRVKALDEIVSRTDFARILLHISQRRGFKSNRKNPTTKEDGILLAAVNENKQRMSEHGYRTVGEMFLLDETFKAHKRNKGGNYITTVARDMVADEVRAIFSAQRELGASFASEEFEERYLEILLSQRSFDEGPGGNSPYGGSQIERMVGRCTFFPDEPRAAKATYSFEYFTLLQKVNHIRIVENGVSSKLTDEQRRIIIELAHTTKDVSYAKIRKALKLSDKQLFNIRYTDNLPAEDSEKKEKLGLMKAYHQMRSAIDRISKGRFAMMPRAQRNAIGTALSLYKTSDKIRKYLSDAGLEEVDIDAADSIGSFSKFGHISVKACDMLIPFLEQGMNYNEACAAAGLNFKGHGAGEKSKLLHPKEEDYEDITSPVVRRAIAQTIKVINAIIRREGCSPTFINIELAREMAKDFRERNRIKKENDDNRAKNERLLERIRTEYGKNNPTGLDLVKLRLYEEQSGVCMYSLKQMSLEKLFEPNYAEVDHIVPYSISFDDSRKNKVLVLTEENRNKGNRLPLQYLKGRRREDFIVWVNNNVKDYRKRRLLLKEELTAEDESGFKERNLQDTKTMSRFLLNYIADNLEFAESTRGRKKKVTAVNGAVTAYMRKRWGITKIREDGDCHHAVDAVVIACTTDAMIRQVSRYAQFRECEYMQTESGSVAVDTGTGEVLRTFPYPWPDFRKELEARLANDPAKVISDLHLPFYMSAGRPLPEPVFVSRMPRRKVTGAAHKDTIKSARELDNGYLIVKRPLTDLKLKNGEIENYYNPQSDKCLYDALKNALIEHGGDAKKAFAGEFRKPKSDGTPGPIVKKVKLLEPTTMCVPVHGGKGAADNDSMVRVDVFLSGGKYYLVPIYVADTLKPELPNKAVTRGKKYSEWLEMADEDFIFSLYPNDLICATSKNGITLSVCRKDSTLPPTVESKSFMLYYRGTNISTGGISCITHDNAYEIGGLGVKTLEKLEKYTVDVLGEYHKVGKEVRQPFNIKRRKACPSEML

SEQ ID NO: 21977 - protein, 1074 aa, unidentified
  REGION 1..1074: note = Cas Enzyme sequence
MKHPYGIGLDIGIASVGWAVVALNENAEPYGLIRCGSRIFDKAEQPKTGDSLAAPRREARSARRRLRRRSLRKADLYELMEKNGLPGKAEIEQAVQAGHLPDVYALRVQALDGPVTALDFARILLHLMQRRGFRSNRKADDAQKDGKLLQAIDANTRRMEANRYRTVGEMLYRDPVFAEHKRNKAENYLSTVKRDQIIDEARLVFAAQRQYGATWASPEMEAEYLCILTRQRSFAEGPGKGSPYSGSNRVGTCTLEGKSEQRAAKAAFSFEYFTLLQKINHIRIAENGTSRALTPAERQVLLSVCSQTDKLDFARIRKALALPEEARFNMVRYRGEQTAEACEKKEKITALPCYHKMRKALNTLRKDHIRNISREQLDAAGAALTNPENEDKLREALKQAEFEPLEIEALLTLPSFAGYGHISVKACRKLIPYLEQGMNYNDACQAAGYDFQGRQNGEKAQFLPASTEEMEDITSPVVRRAVAQTIKVVNAIIREQGESPVSIHLELAREMNKNFQQRSELDKAMRDNSAENERLMKELNELFPGRTVTGQDLVKYRLWKEQDGRCAYSIQPLELDKVITVSGYAEVDHIVPYSISFDDRRTNKVLVLASENRQKGNRLPLQYLQGKRRDDFIVYTKANVKNFRKRQNLLKERLSEEDGKGYIQRNLQDTQYIAAFMLNYIRNHLAFADCSGAGKRRVAAVNGAVTAFLRKRWGLSKVRADGDLHHAVDAAVIACTTQGMIKRVSDFCKRAETTAVRNEHFPEPWPRFRDELTQRLSACPQENLMQINPVYYATVDISSIQPVFVSRMPRHKVTGAAHKETIKSRLDDIHVVQRRNITELKLDKDGEIAGYFNRSSDTLLYNALKARLLAFGGDGKKAFAEPFYKPRADGTPGARVQKVKICDKVTSTVPVHGGKGVADNDTMVRIDVYYVPGDGYYWIPVYVADTVKPELPSKAVVAYKSSAEWKEMKDEDFLFSLCQHDLVRIESKRLMKFKVQHRDSTLEKEMPVNKILAYFEGGDIATGAVTLTTHDDAYIATGLGFKTLQKVQKYQVDVLGNYTPVKKEKRQTFPAQRR

SEQ ID NO: 21978 - protein, 1077 aa, unidentified
  REGION 1..1077: note = Cas Enzyme sequence
MNTAYGIGLDIGIASVGWAVVALNEDAEPYGLIRCGSRVFDKAEQPKTGDSLAASRREARSTRRRLRRRSLRKADLYALMEKSGLPGRAAVEEAVLAGHLPDIYALRAQALDGPVTAMDFARILLHLMQRRGFRSNRKADDAQKDGKLLQAIDANTQRMKDNHYRTVGEMMYRDPAFATHKRNKTENYLSTVRRDQIASEAAQLFAAQRQYGAAWASPETEAEYLTILTRQRSFDEGPGGNSPYGGNMIEKMVGTCTLEGTAEPRAAKATWSFEYFTLLQKLNHIRIEEGGNSHPLTHAQRQELLTLCYQTDKLDFARIRKVLDLPPQARFNMVRYRADQPADACEKKEKITALPCYHKMRKALNTLRKDYILTVGHDRLDAAATALTLYKSEDLLREKLQQADFEPLEINALLTLPSFSKFGHISVKACRKLIPYLEQGENYNDACRDAGYDFQGSGHGEKSILLPAEAEEFSDITSPVVRRAVAQTIKVVNAIIREQGESPVSIHLELAREMSKSFQERADLENAMKENNADNERLMRDLHERFPGRNISGQDLVKYRLWKEQDGRCAYSLQPLELQSVITVSGYAEVDHIVPYSISFDDRRTNKVLVLASENRQKGNRLPLQYLQGTRRDNFIVYTKNNVKNYRKRQNLLKENLSAEDSSGFMQRNLQDTQYIASFMLNYIRGHLAFAAHPMAGKKRVVAVNGAVTSFLRKRWGIAKVRADGDLHHAVDAAVIACTTDGMIQRVSRFYQRTELSHARGERFPEPWPRFRDELMQRLSSCPQENLLTINPVYYTTADIAGIKPVFVSRMPRHKATGPAHKETIKGRLDDTYVTQRRSITDLKLNKDGEIDGYFNPSSDTLLYNALKERLIAFGGNGKKAFAEPFFKPRADGTPGAQVRKVKLYSKVTSTVPVHGGNGVADNDTMVRVDVYYIPGDGYYWVPIYVADTVKPVLPNCAVVAYKSCSEWKKMSEENFLFSLCKNDLVCIESKRPIKLKAANKDSTLEKELTVQRVLAYFEGGNISTGAVSVTTHDNAYIAGSLGFKTLQKVEKYQVDVLGNYTRVKKEKRQLFPAQRR

SEQ ID NO: 21979 - protein, 1070 aa, unidentified
  REGION 1..1070: note = Cas Enzyme sequence
MFYRLGIDIGETSIGWFILQLDKKLEICDIVDGGVYIFPDGREAKSREPLSVSRRTARGIRRNLDRKNNRKRRLIRLLEKTGIWPDGIAEQKKLEALDPFVLRQKAVNEKISLPELGRALFHLNQRRGFKSNRKSDGKESESGKIKLAVQALETQLAEQGCRTYGEYLCRRHEKRISTKVRPTADSKGYEFYPTREMAEHEFDLIMSRQQQYHPELTSEVTEALRDVIFFQRSLRPQAVGKCELEPQENRAPVWHPLFQRFRILQEVNNLDLVKSTPDEISLTAEQKKKILLMLQEGTGLNKQGLLLFTKIKSKLNIPTKRKFNLQSDKRTGLQGDWAAWKLSDDNCLGKGWFKMSPDRQVELLELLHNAEDDGKLKQDLIDLFGLNEEQAENVAKLNLPEGYASLSLKAIKNILPYLEQGKVYSEACTLAGYNHSDRRTGEIYDYLPYYGRILKSAVIGGRFEGEEPDVDEDIGLQEVYFGKINNPTVHVGLNQLRKVVNEIISRYGKPQQVVVELARELKLGVEGVRKLEKRQKENQKDNEKIAEELERAGQPNTYQNRMMYKIWERLAENPSQRCCPFSGRPISVSDLFSGAFEIEHLIPFSRSFDDSINNKVISSRDANRFKAERTPYEAFGSSPGNYKWEEIVARSENLPREMQWRFSADAMEKFAEEDGCLARMLTDTQYFARCALQYLEAICENQSKDRKMAWGIPGQLTAMLRDKWGLNSLINPADRKDRSDHRHHAVDAFVVACTSRSLLKKMADAARLYEKTDEGEYKQIREKREKLIENMPLPFENFDREKLQQWVNGLVIAFKPDHGVQGQLHRDTCYGYIEKGSNKGSSVFAVRKDLRAVVEGSAQDGNKKINEIADVAIRSKLLDLLQNIEDKKQRQQLTEEFMAETGIRRVRCHIEKSDSVMIPVKDNGGQIYKYYESGNNSRADIYCATKGKDAGKWKCEIISTYSANQKDFVPEWRRRDPHAKLIMKLHINDMVAYDELNKETGQTERVIARVKKMTSGLVYFRSHLIAKEEADKLSKKFSASQMQEKNLRKVYVDAMGKVKDPMLKNERKVS

SEQ ID NO: 21980 - protein, 1005 aa, unidentified
  REGION 1..1005: note = Cas Enzyme sequence
MKKKIFGFDLGIASIGWAVIDHSDENFDPETGEIIEGKVVGCGVRCFPVAENPKDGSSLAAPRREKRLLRRITRRKARRMLGIKRLFVAKGLVASTTELEALYAEQTGGDVWNLRAEALRRPLSKEELLRVLTHLAKHRGFKSYRKAAEEADKESGRILTAIAENRKETAGFQTLAQMIVERAKHSDDHKMRNYTPQKGPNKGVAVYVNSIPREEIEKETKLIFEYQKQFGLFTEDLYRDFCKIAFRYREVGSVGHMVGRCRFEPEQPRAPKEAPSAELFVALSKINNLKVTVDGERRFLNGEERKALLELLKNTKEVKYSTIKNKLFKSREVFFDDVNYAQKTKKGKSGEEKAVNPEDAKFYAMKGWHKLKAAFSPEQWKEVGSNLPLLDLGMTAVVCEKNDAGIERFLSEKGIPEDYREVFKKLTGSEFINLSLKALYKLNPYLAEGLKYNQACEKAGYDFREDGIKLAEEKGLLLPPIANDKLTTVPVVNRAVAQFRKVYNAMVRTYGAPDQINLEIGRDLKKSRDERNQIMRRQKENETERKEAEDGLEKEGLAANGKNMLKYRLYQQQNGKCIYSGKAIDLRRLDENGYCDVDHIIPYSRSLDDGQNNKVLCLAEENRKKGSQTPYEYLEPLGRWEEFETVVNTTPSINRYKRNNLLNKDYKEKENDLEFRERNANDNSYIARYVKRYLEDAVDFSASSCAIKNRIQVRTGSLTDYLRHQWGLIKDRNENDRHHAQDAVVVACATQGMVQKLSKLSAIFENKDDFRRKKAEKLGHEEAEVWYKYIKQQIREPWSGFRTEVLASLEKVFVSRPPRKNATGEIHQETIRTVNPKRKKYNEKEILSGIKIRGGLANNGLMLRTDVFVKKNKKGKDEFYLVPVYLSDMGKELPNKAMVPGKKENEWLELDETYQFKFSFYMDDLIKIKKKENEIFGYFRGTNRATASVSVATHDRSHTFEGIGVKTLDGIEKYQVDPLGRIAKVKKETRLPLTMIKKNRHKKGE

SEQ ID NO: 21981 - protein, 1079 aa, unidentified
  REGION 1..1079: note = Cas Enzyme sequence
LGLDIGTNSIGWWLYATDEEKITEVIDGGVRIFSDGRDPKSKASLAVDHRVARAQRRRRDRYLRRKAALMKRMAAVGLMPADPTEAKALELLDPYALRAAGLDQALPLTHFGRALFHLNQRRGFKSNRKTDKGDNESGKIKDATKRLDEEMAIKNARTYGEFLHMRRTSATDPKNVPTVRTRLSIARRDNAEKEEAGYDFYPDRRHLAEEFDKLWKAQAGYSPDVLTDELRDEISVIIFHQRPLKTPEVGLCLFSGSHGVPKKDKRIPSAHPLNQRRILFETINNLRVAARGEPARGLTRDERDAIVHALDNKAHTKSLSGMSMKLKALGKVIKLRPEQSFTLQTANRETIACDPVRASLSHPDRFGPRWSMLDADAQWDVVQRIRAVQSEAEHDALVKWLMATHGLDRDHAESTAKAPLPEGYGRLGLTATKRILAALEADVIPYSDAVKACGWHHSDGRTGEVLTELPYYGQILDRHVIPGTYNESDDDVTRYGRITNPTVHIGLNQLRRLVNKIITVYGKPDEIVVELARDLKLSEDQKRDVQRDIKKNTDAAIARGAKLSEMGVPDTGANRMVLRLWESLGDDVMTRNCPYSGKRISATMLFDGSCDVDHILPYSRTLDDGFANRTLCLKEFNRQKTDKTPWEAWGDTPAWATIEANLKNLPANKAWRFAPDAMERFEGENDFTSRALKDAQYLSRIARTYLDALYDGADGKSHVWVVPGRLTEMLRRHWGLNSLLPDKDGAVKAKNRTDHRHHAIDAAVVAATDRSLIQRISKMARKDEVNGAEEVARSVPPPWEGFRTDIETQLDRIIISHRADHGRIDPAARKDGHDSTSGQLHNDTAYGLGEGNSVVSRKPLLSLKSNDIEVTTKGANIRDVDLQRHLERITRGLDGKALEAALAEFAATAKLPDGTDNPYYGLRRVRLEETLQQGARVEVKDRNGKPFKAYKGDSNHCYEIWRMPDGKVVPQVITTYEAHQIDVEKKPHPAAKRLLRIFKRDMVAIEQDDKAIIGYVQSMHVANGLFIAPHTEANADARSRDKSDSFRLIQMSAGPLVKANARRVYVDEMGRLRDPGAPS

SEQ ID NO: 21982 - protein, 1225 aa, unidentified
  REGION 1..1225: note = Cas Enzyme sequence
MKKRILGIDTGTNSLGWAVVDRDSNGTCSLVSKGSLIFQEGVKVEKGIESSKAAERTSHRALRKQYFRRRLRKIRVLEALIEYDWCPYLSPEALHQWHVKKEYPLDEAFMAWQRTNDNFDENPYYYRHLCLHERLDLNERANRYALGRALYHLAQRRGFLSNRLEQGDEDETGKVKEGISSLSKGMAEAGCEYLGDYFYKLYKEKGNTEKIRTRYTDREEHYKKEFYAICKQQRLSAEQISKLEKALYFQRPLKSQRQGVGKCTFEPKKPRVADSHPSFELFRMLSFVNNIKVKGPYDVELRPLTAEEFEKAKHLFFMKSRKTKPQFDFEDIAKAIAGKGRYQHIKDAGDKAYKFNYRMTQSVTGCPTIASLVSVFGDDYEAAVAERYTLSDGKTVEQMVNDVWNVLYSFTDKDKVRQWGKERLQMSDEEAEKFSKIRLTRSFASISLAAVKKILPWLEQGLIYPHAVLMAKVPDIVGEDVWQSRGEYIAKELSSLISNFNPKDIAITGTLDFCIKDTLKDICSLAPGAADKLYHPSMIDVYPDARKNPQGVYQLGSPRTNAVRNPMAMRSLHQLRKVINALLRDGTIDSQTEVHIEYARELNDANKRWAISQWNKERETLRKKYAEDIRTLYKKDTGKDIVPTDDDIVKFQLWEEQKHICLYTGNSIGIAEFIGPNPSYDIEHTVPRSAGGDSTLENMTLCSSKFNRDVKKAKLPTQLPDYEDILQRLEGWREKIEKLRKDVDRVKTHSGMDKAVKDRLIRKRHLLRLDLDYWVGKYKRFQMTEVPDGFARRQGAGIGLVGKYAGLYLKSLFHKADDRNKSNVRVVKGATTAEYRKMWGIQDEYEKKSRDNHVHHCIDAITIACIEPGEYNATARYYQQLEEYERTKAAKPTFPKPWPTFTEDIKAIAQEMIVVHSTPDNMPKHARKYVQTANGRKLAKGDAARGSLHNDTYYGAIERDGEIRYVVRRPINSFEKASDVDSIVDPKVKEIIKQTIEEKGFKRAVSEDIFMNKEKGIKINKVRCFVSGSISGKILDVRDQRDVSAKEYKRRYLVENGDNYIMGIYEGLRNGKICREYELANMLDASMFYNKKEKDSILPCKSVRGVPDLPLKYKLFKGLHVILYEKSKPEVDLSNLKDIVPRLYVITGLSTSSTTTGGKTYRYGMVSLKHAQEAKPSSECKEKKGLYKDGEEYRAKIVMNHNQFDALVEGVDFKINVLGEIVMMK

SEQ ID NO: 21983 - protein, 1225 aa, unidentified; identical to SEQ ID NO: 21982
  REGION 1..1225: note = Cas Enzyme sequence

SEQ ID NO: 21984 - protein, 1225 aa, unidentified
  REGION 1..1225: note = Cas Enzyme sequence
MKKRILGIDTGTNSLGWAVVDRDSNGTCSLVSKGSLIFQEGVKVEKGIESSKAAERTSHRALRKQYFRRRLRKIRVLEALIEYDWCPYLSPEALHQWHVKKEYPLDEAFMAWQRTNDNFDENPYYYRHLCLHERLDLNERANRYALGRALYHLAQRRGFLSNRLEQGDEDETGKVKEGISSLSKGMAEAGCEYLGDYFYKLYKEKGNTERIRTRYTDREEHYKKEFYAICKQQRLSAEQISKLEKALYFQRPLKSQRQGVGKCTFEPKKPRVADSHPSFELFRMLSFVNNIKVKGPYDVELRPLTAEEFEKAKHLFFMKSRKTKPQFDFEDIAKAIAGKGRYQHIKDAGDKAYKFNYRMTQSVTGCPTIASLVSVFGDDYEAAVAERYTLSDGKTVEQMVNDVWNVLYSFTDKDKVRQWGKERLQMSDEEAEKFSKIRLTRSFASISLAAVKKILPWLEQGLIYPHAVLMAKVPDIVGEDVWQSRGEYIAKELSSLISNFNPKDIAITGTLDFCIKDTLKDICSLAPGAADKLYHPSMIDVYPDARKNPQGVYQLGSPRTNAVRNPMAMRSLHQLRKVVNALLRDGTIDSQTEVHIEYARELNDANKRWAISQWNKERETLRKKYAEDIRTLYKKDTGKDIVPTDDDIVKFQLWEEQKHICLYTGNSIGITEFIGPNPSYDIEHTVPRSAGGDSTLENMTLCSSKFNRDVKKTKLPTQLPDYEDILQRLEGWREKIEKLRKDVDRVKTHSGMDKAVKDRLIRKRHLLRLDLDYWVGKYKRFQMTEVPEGFARRQGAGIGLVGKYAGLYLKSLFHKADDRNKSNVRVVKGATTAEYRKMWGIQDEYEKKSRDNHVHHCIDAITIACIEPGEYNATARYYQQLEEYERTKAAKPTFPKPWPTFTEDIKAIAQEMIVVHSTPDNMPKHARKYVQTANGRKLAKGDAARGSLHNDTYYGAIERDGEIRYVVRRPINSFEKASDVDSIVDPKVKEIIKQTIEEKGFKRAVSEDIFMNKEKGIKINKVRCFVSGSISGKILDVRDQRDVSAKEYKRRYLVENGDNYIMGIYEGLRNGKICREYELANMLDASMFYNKKEKDSILPCKSVRGVPDLPLKYKLFKGLHVILYEKSKPEVDLSNLKDIVPRLYVITGLSTSSTTTGGKTYRYGMVSLKHAQEAKPSSECKEKKGLYKDGEEYRAKIVMNHNQFDALVEGVDFKINVLGEIVMMK

SEQ ID NO: 21985 - protein, 1101 aa, unidentified
  REGION 1..1101: note = Cas Enzyme sequence
MGINIGLDIGIASVGLAVVDSDTGNVLETVADLFNCAEVSENVKRREFRQARRLKRRQHTRLEDFKKLWGAEGFIIPKNINLYSLELKVRALQEKITMDELYVVLYNSLKHRGISYLDDFEESTEGGSEYQKGIQINQQELETKYPCQIQLERFKKYGAYRGQIIVEENGDKTVLSNVYTFSAYKKEIDTILEAQSKYYPELTNDFIEKYQRIFSRKRKYYEGPGTEKSRTDYGIYTTRIDKATGNYITEENIFEKLIGKCSVFPEEMRAAAASYSAQEFNLLNDLNNLTIGGRKLNEEEKRQIVETIKNSQRVNVEKIICTVSGENAETIEGARIKDDKHIYYSFEAYRKMKKALSEAGKNIEEYERAELDEIGRILTLNTEHESIEKELIDSGIGMSKEEIDSLINLRKEDGKPFSKWHSFSLKLLNILIPEMYEQPKGQMTLLSEMKLLKSSDELYKGLKYIPQEAMTNEIYNPVVVRSARIAVKALNAVIKKYGNPELVVIEMPRDKNDEEQKQRIKQEQSRNEKELKEIIDKIKSEYGIQVTSAHFRNHKQLALKLKLWNEQEGICLYSGKQIDINQLLTAYDMYEIDHIIPLSISFNDSRNNKVLVYATENQEKGQTTPYKYLTMLHRGWGWNEYVAKVNELHRKKNINYKKVENLLFMKDITKIDVLKGFINRNLNDTRYASRVVLNTLQSFFRANETGTKVSVICGAYTSQMRKNMRLDKNREESFAHHAVDALLIVYSQMGYNTFRKLQGEFIDFETGEILNPEMWKENMTDEVYEKCLYGQEGQKWLEIRNNIKETEKHVKYWHKVDKKCNRALCNQTIYGTRNLDGGVYKISKIKDIRSIDGYKKFAEMIKKGKQNSFLMARNDPKTFASLLEICERYKDAKNPFVQYEKETGDWVRRYAKKNNGPKIVSLKYVDGEVNSCIDVSHKYGYERNSRKVILASLNPYRMDVYYNKNDSKYYLIGIKQSDVKFEAGKSVIDEEAYTRILQQEKMLQEGQGRADLEKLGYEFRLSFYRNNIIQYEKGGEIFTERFQSRTMPAQRNYIETKPVDRAKFNRQNLVGLGKTTSIKKVHVDILGNQYITEKEIFSFEC

SEQ ID NO: 21986 - protein, 1050 aa, unidentified
  REGION 1..1050: note = Cas Enzyme sequence
LKDKDFVHLLLEDIIFYQRPLRSQKSSVSNCTLEFRKFKDENGVEHAQYLKVIPKSNPYFQEFRIWQWIFNLNIYSKDDDKNVTNEFLKTLKDFENLFEFLNARKEIDQKTLLKHFKLNEKTHRWNLVEDKKYPCNETRAMIYSRLEKVANVPGDFLTREIEQKIWHIIYSVNDKIEFEKALKSFALKNNLEEYSFLEAFRKFPPFKSEYGSFSEKAIKKLLPLMRLGKYWDYNLISEQTKNRIQKIITGEYDDNIKDRVREKALHLTVESDFQGLPLWLAQYVVYDRHSEAAMLGKWNSADDLEEFLKDFKQHSLRNPIVEQVVTETLRVVKDLWQKYGNGAKDFFSEIHIELGREMKLPASERDRMTRQMTENENTNLRIKSLLAELQNDSSVENVRPYSPIQQEILKIYEDGVLNSDIDIEDDILKISKTAQPSSSDLKKYKLWLEQKYKSPYTGHIIPLSKLFTSEYEIEHIIPQSKYFDDSFNNKIICESAVNKLKDNYLGYSFIKNFGGSIVECGFGRKVTVFKVDEYEDFVKKHYAKNRNKRSILLLEDIPEKMIERQLNDTRYISKYISGILSNIVRMQDGTDEGVNSKNLVPLNGKITTELKKDWGLNDIWNDLILPRFERMNQLTNSSHFTTWSENHQKFLPTVPIEYSKGFSKKRIDHRHHALDALVIASATKDHVNLLNNQSAKSETKRYDLKKKLMRFEKVAYYHPKTGEQVEREVPKLFLKPWETFTYDTKNQLESIVVSFKQNLRVINKATNYYEKYVEKDGVKIKERVEQKGTNWAIRKPMHKETVSGKVELPWIKVPKGKILTATRKNLDTSFDAKAINSITDTGIQKILLNYLNYKDGNPELAFSPEGIDDLNKNIERFNDGKLHQPITKVRVFELGSKFPLGHIGNKKDKYVEAAKGTNLFFVVHEDESGKRSYETIPLNEVIERQKQGLSVVNLKGKNEFFLSPNDLVYIPSDDELVNLNSINFNNISNRDNIYKVVSFTGNRLYAIPFYVSSTIVNKVEFNQLNKIEFTKEKEICVKLKTDRLGVISKA

SEQ ID NO: 21987 - protein, 1499 aa, unidentified
  REGION 1..1499: note = Cas Enzyme sequence
MKHILGLDLGTNSIGWAVISSSFDETTQKEQLKGIEAAGSRIIPMDAAQLGDFNKGNTVSQTANRTQFRGVRRLYERKKLRRERLHRILQLLGFLPKHYANQLDRYGKFIANSEPKLAWTTNTHGLPYFIFQSSFQEMLNDFLQNNSQIKKVPYDWTLFYLRKKALIQKIEKEELAWVLLNFNQKRGYYQLREEETEKASSKTRQYFDSQIVTDITDTGQVYKGLKIFTITLENGEKGKFFSKNMPDWKSQKKDIIAIIDLDKNGNDKYDENGELSRRFKIPTEQEWEEQWELIKTKTQKDLDTSHKTVGAYIYDTLLQTPSQKIRGKLIRTIERKYYKDELNQILKKQEEFHPELRDSNLLEACIEELYPNNEAHRNAIAKYSIAQLLIEDILFYQRPLKSKKSLISNCPYEEYTYINKETGEICTSPLKCIAKSHPLFQEFRLWQFISNLRIYQKEGTINGKFTTDIDVTSQFLKTEDAYANLFDWLNQKKEIRQDTFLKNPAFGLKKNTANYRWNYVEDKTYPCNETHYKILSYWEKAGIEQSALTSEIEEKLWHILYSISDKNELRKALQHFADKNYLSDKFADTFQQIPPFEKDYGSYSAKAIKKLLPLMRIGRYWKAENFDSTTLDRIEKILTGEFEENIKNRTREKTIHLDNLYSFQGLPTWLACYIVYNRHSEIKDVTKWQQPSDIDAFLNAFKQHSLHNPIVEQIIMETLRTVRDIWKQTGHIDEIHVELGREMKNPAEKRRKLTQQIQENENTNLRIKALLAEFANPELGIENVRPHSPSQQDLLRIYEEEALNETKDIPEDIAVILKKFNEVDTKKRPSTSDVLRYKCWLEQKYRSPYTGAMIPLGKLFTPAYEIEHVIPQSRYFDDSFTNKVICEAEVNKLKGNMLGYEFIKNNQERIVELGFGQNVKIQTVEAYELFVKEHYSYNRTKMQKLLMEDIPDQFIERQLNDSRYISKLIKSLLSNIVRDEGEEEATSKNVIVCTGSITDRLKKDWGINDVWNKLILPRFIRLNEITESNRFTTTNACNKTIPAMPLDLQKGFNKKRIDHRHHAMDAIVIACANRNIVNYLNNESASKNAKISRQDLRQILCKKTKTDNLGNYQWLIDKPWDTFTQDMYSILSNIIVSFKQNLRIINKTTNHYIHYENGKKVSCSQKQGDSWAIRKPMHKETVYGEINLRRTTTATLKAVLENPQRIIEKDLKKKIKELLTQGLNEKQIKKYFEDNKDIWQEINLKKIPVYYFTKETANRFFACRESINTTFNKKKIEEKVADTGIQQILLRHLEQNGNNPEQAFSPEGIEQMNKNIMSLNNNGKFHQPIYKVRTYEQADKFAVGQTGNKSTKFVEAAKGTNLFFAIYETAHKRSFASIPLNVVIERLKKGLSPAPENEKGNLPKFILSPNDLVYVPTKEEIENGHINQPIQKDRIYKMVSCTEGECHFIPYFVAKPIIQTIELGSNNKAQKTWQDEMIKEICIPIKTDRLGNIITSISL

SEQ ID NO: 21988 - protein, 1433 aa, unidentified
  REGION 1..1433: note = Cas Enzyme sequence
MKKILGLDLGCNSIGWALVNEAENTEEISSIIKLGVRVNPLTVDEMQNFEKGKSITTNADRTLKRSMRRNLQRYKLRRDTLIEVLKEHGFITDSTLLSEHGNKTTFETYRLRAKAAVEEISLEKFARVLLMINKKRGYKSSRKAKGSEDGVLIDGMDVARKLYEEGLTPGELCLQILEAGKKNLPDFYRSDLLNEFDRIWNFQKQFNPELFCDTVKEEVRGKNRSQTWAILAKFFVWSEKESVWNEKEARTEERVKEYKLVGLKRDTKGNELKLENYRWRVQALSEQLNPEIVAIVLQEINGQISASSGYLGAISDRSKQLYFNRQTVGQYLMSELEKDPNVSLRNRVFYRQDYLDEFDRIWERQAEFHEELTVELKKEIRDIIIFYQRRLKSQKGLISFCEFEKREVIVEKDGRKQNKTVGCRVIPRSHPLFQEFKIWQTLNDIEVFAWDKQSKRKKADKSSTLFDNSEEPLLVEGKRSLYQEEKELLAKELFVKESMKKAEVLKLLFENFQELDMNFKQIDGNHTGFALFSAYSKMIEKYGYEPVDFKKPADEIIEKLETIFTNLGWNTELLSIDLSKEDKELERQSYFRLWHLLYSFEGDNTPTGNGKLLEKIMQLCDVEKEYAVELANVSFQEDYGSLSAKAIKKILPYLKEGNQYDVACDYAGYRHSKSSLTKDEIENKILKDKLEILPKNSLRNPVVEKILNQMVNLINTIIDTYGKPDEIRVELARELKKNAKEREELTKSIARNTREHDEIRQLLRTEFGMMNVSRNDIIRYKLYEELKDNGYKTLYSNEYIPREKIFSKEIDIEHIIPQARLFDDSLSNKTLEYRAINIEKGNKTAYDFVKEKYGDDGLEKFLNRCEALFKDKKTKLRKLKMEEKDIPEGFIDRDLRNTQYISKKALAMLNEISHRVVATTGVITDKLREDWQLVDLMKELNLPKYEKLGMVEMLEDKDGRKIKKITDWTKRNDHRHHAMDALTVAFTKDVFIQYYNNKNAAWMPASKEHANIIGIKARYFENGKALAPMPLAQFRAEAKRHLENLLVSIKAKNKVITSNVNRTKKKNGENRKLQQTPRGQLHLETVYGSHRQYATKMEKVNATFDVAKIATVSKLAYRNALLKRLEAFGNDPKKAFTGKNTLEKNPLYLDEKQTEMVPEKVQTVEFETVYTIRKPIDPNLSIDKVIDVKIRSVLEKRLKEYGGDAKKAFVNLDENPIWLNAAKGISIKRVSIRGISNAQSLHEKKDKDGNLILDKEGRKKPVDFVNTGNNHHVAIYKKPVLDKMGQIVLDEEGNPKYELDEVVVSFFDAVTRANLGQPIIDKDYRRSEGWQFLFSMKQNEYFVFPNEKTGFNPKEVDLLNPENYAMISPNLFRVQKFAYKNYVFRHHLETTIKDTSSTLKGITWTDFRSSKGLDKIVKVRVDHIGQIVSLGEY

SEQ ID NO: 21989 - protein, 988 aa, unidentified
  REGION 1..988: note = Cas Enzyme sequence
VANYRWNYVEDKTYPCNETHSRILLYWEKAGIDQSILTTDIEEKLWHILYSISDKNELQKALKHFADKNKLEDKFADIFQQIPPFKKDYGSYSAKAIKKLLPLMRMGKYWHLESIDNATLTRIHQILNGEMDEATASRIKEKYIHLDNFSSFQGLPTWLACYIVYNRHSEIKDITKWKQPSDIDAYIQSFKQHSLHNPIVEQIIMETLRTVRDIWKQIGHIDEIHVELGREMKNPADKRKKLTRQIQENENTNLRIKALLTEFANPEFEIENVRPHSPSQQDLLRIYEEEVLNESAKNMPEDIVTILKKFNETDAKKRPSTSDVLRYKCWLEQKYRSPYTGAMIPLGKLFTPAYEIEHVIPKSRYFDDSFTNKVICETAVNKLKDNMLGYEFIKNHSGQIIELGFGQKIQIQTVEAYEQFVKEHYSYNPVKMKKLLMEDIPEQFIQRQLNDSRYISKFIKSLLSNIVREEGESEATSKNIIVCNGSITDRLKKDWGVNDVWNKIILPRFLRLNEITNSDHFTTTNTNNKIIPTMPLALQKGFNKKRIDHRHHTMDAIVIACANRNIVNYLNNESASKNAKISRMDLRQILCKKTEPDALGNYQWIINKPWETFTQDVYAVLANIIISFKQNLRIINKTTNHYFRYQNGKKVQCVQEKGDNWAIRKPMHRETFYGEINLRKVNTVSLKVALENPQRIVEKDLKKKIKELLQQGLSEKQIKKYFEENNDIWQDVNLKKIQFYSFTKERKERFFASRESIDTSFNQKKIEKQVSDTGIQQILLRHLRQNNNDPNLAFSPEGIEWMNKNIISLNNGKWHQPIYKVRIYKQATKFAIGQTGNKTTQFVEAAQNTNLFFAIYETEHNRSFASVPLNVVIERLKKGLPPTPEDSKGNPPKYVLSPNDLVYVPTKEEMENRHINQPIQKDRIYKMVSCTEGECHFIPYFVAKPIIQTIELGSNNKAQKSWQDEMIKETCIPIKTDRLGNIITLISL

SEQ ID NO: 21990 - protein, 1331 aa, unidentified
  REGION 1..1331: note = Cas Enzyme sequence
AWILLNFNQKRGYYQLRGEEEKKNDNVMIINSKVIDVVKAEKDKKYEKYWYNVLLENGLLYRAAFYNDISFWKGHTKEFVLKTIKLKSGGTKQELSFLPSFDEIEKMEKKQKDKMYFKIKLKTEADIDQTHKTVGTYIYDTLLGNPSQKIRGRLVRTIERKYYKEELKLILDKQKEFHPELQDRALYAACVEELYTINEAHRNNIGNRDFTYLFLEDILFYQRPLKSKKSLIDNCPYEENQGLDKETGEIKSFPVKCIAKSHPLFQEFRLWQFIVNLRIYRKGLAQDVDVTNELLKTEEDYVALFDWLNGKKEIDQKAFLKYPLFGLKKEVENYRWNYVQDKPYPCNETRSSMLARLEKCDISIEFLTKENEEALWHILYSVEDKNEIVKALQKFADKHDLNASFVDVFQKFPPFKKEYGSYSAKAIKKLLPLMRMGKYWSENSIDKGTRERIDKIITGEYDEKIENRVREKAIHLADVSDFKGLPLWLVCYIVYGRHSEAKEIIQWKSPADIDSYLRSFKQHSLRNPIVEQIIIETLRVVRDIWKQVGNIDEIHVELGREMKNPADKRKKMTQQMSENENTNLRIKYLLTEFLNPEYEVENVRPYSPSQQDILRIYEEGVLNSVSDLPEEISDILKKFTETDLKKRPSRSEVLRYKLWLEQKYRSPYTGEVIPLGKLFTSAYEIEHVIPQSCYFDDSFSNKVICEAEVNKLKSNLLGHEFIVKHHGEIVELPFGKKVRIFTVDEYEQFVKDNYSRTRSKMKKLLMDDIPEEFVTRQLNDSRYISKVVKSLLSNIVREKGEEEAISKNIIPCTGGVTDRLKKDWGINEVWNKIILPRFQRLNELTGTNKFTTKNVGIQEIPTMPLELQKGFNKKRIDHRHHAMDAIIIACANRNIINYLNNESATAKAELSRYDLQKLLCDKAKTDNNGNYKWVIRKPWASFTQDTYLALENIIVSFKQNLRVINKATNRFLHYNEEGKKIFVKQGKGDNWAIRKSMHKDTVFGEVNLRRIKTVALNEAMKNPQSIVVKDFKRKLLELWNLGFDAKRIKKYFEDNRETWSDINLSKIEVYYFSKDTKDRFFATRKPLDTSFDRKKIENNITDTGIQKILLRHLELKDNNPDIAFSPDGIDEMNRNIIQLNNGKYHQPIIKIRWYEQADKFAVGQTGNKSSKFVEAAKGTNLFFAVYESNILDKKTNTIIKKRNYATIPLNVAIERQKQGLPVAPEDENGNDPIFVLSPNDLVYLPTAADLANGIIAQPLDRGRIYKMVSCTGNEGHFIPARIANPILQTIELGSNNKAQKAWTDEMIKEICMPIKVDRLGNVLESSSSHKK

SEQ ID NO: 21991 - protein, 1123 aa, unidentified
  REGION 1..1123: note = Cas Enzyme sequence
DFTYLFLEDILFYQRPLKSKKSLIDNCPYEENHCLDKETGEIKSFPVKCIAKSHPLFQEFRLWQFIVNLRIYRKGLAQDVDVTNELLKTEEDYVALFDWLNGKKEIDQKAFLKYPLFGLKKEVENYRWNYVQDKPYPCNETRSSMLARLEKCDISIEFLTKENEEALWHILYSVEDKNEIVKALQKFADKHDLNASFVDVFQKFPPFKKEYGSYSAKAIKKLLPLMRMGKYWSENSIDKGTRERIDKIITGEYDEKIENRVREKAIHLVDVSDFRGLPLWLVCYIVYGRHSESKEITQWKSPADIDSYLKSFKQHSLRNPIVEQIIIETLRVVRDIWKQVGNIDEIHVELGREMKNPADKRKKMTQQISENENTNLRIKYLLTEFLNPEYEVENVRPYSPSQQDILRIYEEGVLNSVSDLPEEISDILKKFTETDLKKRPSRSEVLRYKLWLEQKYRSPYTGEVIPLGKLFTPAYEIEHVIPQSCYFDDSFSNKVICEAEVNKLKSNLLGHEFIVKHHGEIVELPFGKKVRIFTVDEYEQFVKDNYSRTRGKMKKLLMDDIPEEFVTRQLNDSRYISKVVKSLLSNIVREKGEEEAISKNVIPCTGGVTDRLKKDWGINEVWNKIILPRFQRLNELTGTNKFTTKNVGIQEIPTMPLELQKGFNKKRIDHRHHAMDAIIIACANRNIINYLNNESATAKAELSRYDLQKMLCDKAKTDNNGNYKWVIRKPWASFTQDTYLALENIIVSFKQNLRVINKATNHFLHYNEEGKKIFVKQGKGDNWAIRKSMHKDTVFGEVNLRRIKTVALNEAMKNPQSIVVKDFKRKLLELWNLGFDAKRIKKYFEDNRETWSDINLSKIEVYYFSKDTKDRFFATRKPLDTSFDRKKIENNITDTGIQKILLRHLELKDNNPDIAFSPDGIDEMNRNIIQLNNGKYHQPIIKIRWYEQADKFAVGQTGNKSSKFVEAAKGTNLFFAVYESNILDKKTNTIIKKRNYATIPLNVAIERQKQGLPVAPEDENGNDPIFVLSPNDLVYLPTDDELANGIIAQPLDRGRIYKMVSSSGEQCFFIKHIVANVLVDKFEFSPLNKMERALTGEMIKMICMPIKVDRLGNVLESSSSHKK

SEQ ID NO: 21992 - protein, 1331 aa, unidentified
  REGION 1..1331: note = Cas Enzyme sequence
AWILLNFNQKRGYYQLRGEEEKKNDNVMIINSKVIDVVKAEKDKKYEKYWYNVLLENGLLYRAAFYNDISFWKGHTKEFVLKTIKLKSGGTKQELSFLPSFDEIEKMEKKQKDKMYFKIKLKTEADIDQTHKTVGTYIYDTLLGNPSQKIRGRLVRTIERKYYKEELKLILDKQKEFHPELQDRALYAACVEELYTINEAHRNNIGNRDFTYLFLEDILFYQRPLKSKKSLIDNCPYEENHCLDKETGEIKSFPVKCIAKSHPLFQEFRLWQFIINLRIYRKGLAQDVDVTNELLKTEEDYVALFDWLNGKKEIDQKAFLKYPLFGLKKEVENYRWNYVQDKPYPCNETRSSMLARLEKCDISIEFLTKENEEALWHILYSVEDKNEIVKALQKFADKHDLNASFVDVFRKFPPFKKEYGSYSAKAIKKLLPLMRMGKYWSENSIDKGTRERIDKIITGEYDEKIENRVREKAIHLADVSDFRGLPLWLVCYIVYGRHSEAKEITQWKSPADIDSYLKSFKQHSLRNPIVEQIIIETLRVVRDIWKQVGNIDEIHVELGREMKNPADKRKKMTQQMSENENTNLRIKYLLTEFLNPEYEVENVRPYSPSQQDILRIYEEGVLNSVSDLPEEISDILKKFTETDLKKRPSRSEVLRYKLWLEQKYRSPYTGEVIPLGKLFTSAYEIEHVIPQSCYFDDSFSNKVICEAEVNKLKSNLLGHEFIVKHHGEIVELPFGKKVRIFTVDEYEQFVKDNYSRTRGKMKKLLMDDIPEEFVTRQLNDSRYISKVVKSLLSNIVREKGEEEAISKNIIPCTGGVTDRLKKDWGINEVWNKIILPRFQRLNELTGTNKFTTKNVGIQEIPTMPLELQKGFNKKRIDHRHHAMDAIIIACANRNIINYLNNESATAKAELSRYDLQKLLCDKAKTDNNGNYKWVIRKPWASFTQDTYLALENIIVSFKQNLRVINKATNHFLHYNEEGKKIFVKQGKGDNWAIRKSMHKDTVFGEVNLRRIKTVALNEAMKNPQSIVVKDFKRKLLELWNLGFDAKRIKKYFEDNRETWSDINLSKIEVYYFSKDTKDRFFATRKPLDTSFDRKKIENNITDTGIQKILLRHLELKDNNPDIAFSPDGIDEMNRNIIQLNNGKYHQPIIKVRWYEQADKFAVGQTGNKSSKFVEAAKGTNLFFAVYESNILDKKTNTIIKKRNYATIPLNVAIERQKQGLPVAPEDENGNDPIFVLSPNDLVYLPTAADLANGIIAQPLDRGRIYKMVSCTGNEGHFIPARIANPILQTIELGSNNKAQKAWTDEMIKEICMPIKVDRLGNVLESSSSHKK

SEQ ID NO: 21993 - protein, 1397 aa, unidentified
  REGION 1..1397: note = Cas Enzyme sequence
EPKLAWRKNEAGQFEFIFQDSFKEMLEDFKLNYPNLITDDKKVPYDWTIYYLRKKGLTSKISKEELAWILLNFNQKRGYYQLRGEEEKKNDNVMIINSKVIDVVKAEKDKKYEKYWYNVLLENGLLYRAAFYNDISFWKGHTKEFVLKTIKLKSGGTKQELSFLPSFDEIEKMEKKQKDKMYFKIKLKTEADIDQAHKTVGTYIYDTLLGNPSQKIRGRLVRTIERKYYKEELKLILDKQKEFHPELQDRALYAACVEELYTINEAHRNNIGNRDFTYLFLEDILFYQRPLKSKKSLIDNCPYEENQGLDKETGEIKSFPVKCIAKSHPLFQEFRLWQFIINLRIYRKDLAQDVDVTNELLKTEEDYVALFDWLNGKKEIDQKAFLKYPVFGLKKEIENYRWNYVQDKPYPCNETRSLMLARLEKCDISIEFLTKENEEALWHILYSVEDKNEIVKALQKFADKHDLNASFVDVFQKFPPFKNEYGSYSAKAIKKLLPLMRMGKYWSENSIDKGTRERIDKIITGEYDEKIENRVREKAIHLADVSDFKGLPLWLVCYIVYGRHSEAKEIIQWKSPADIDSYLRSFKQHSLRNPIVEQIIIETLRVVRDIWKQVGNIDEIHVELGREMKNPADKRKKMTQQMSENENTNLRIKYLLTEFLNPEYEVENVRPYSPSQQDILRIYEEGVLNSVSDLPEEISDILKKFTETDLKKRPSRSEVLRYKLWLEQKYRSPYTGEVIPLGKLFTPAYEIEHVIPQSCYFDDSFSNKVICEAEVNKLKSNLLGHEFIVKHHGEIVELPFGKKVRIFTVDEYEQFVKDNYSRTRSKMKKLLMDDIPEEFVTRQLNDSRYISKVVKSLLSNIVREKGEEEAISKNVIPCTGGVTDRLKKDWGINEVWNKIILPRFQRLNELTGTNKFTTKNVGIQEIPTMPLELQKGFNKKRIDHRHHAMDAIIIACANRNIINYLNNESATAKAELSRYDLQKMLCDKAKTDNNGNYKWVIRKPWASFTQDTYLALENIIVSFKQNLRVINKATNRFLHYNEEGKKIFVKQGKGDNWAIRKSMHKDTVFGEVNLRRIKTVALNEAMKNPQSIVVKDFKRKLLELWNLGFDAKRIKKYFEDNRETWSDINLSKIEVYYFSKDTKDRFFATRKPLDTSFDRKKIENNITDTGIQKILLRHLELKDNNPDIAFSPDGIDEMNRNIIQLNNGKYHQPIIKIRWYEQADKFAVGQTGNKSSKFVEAAKGTNLFFAVYESNILDKKTNTIIKKRNYATIPLNVAIERQKQGLPVAPEDENGNDPIFVLSPNDLVYLPTDDELANGIIAQPLDRGRIYKMVSCTGNEGHFIPARIANPILQTIELGSNNKAQKAWTDEMIKEICMPIKVDRLGNVLESSSSYKK

SEQ ID NO: 21994 - protein, 1436 aa, unidentified
  REGION 1..1436: note = Cas Enzyme sequence
  REGION 1432..1435: note = misc_feature - Xaa can be any naturally occurring amino acid
MKNIVGLDLGTNSIGWAVVNGSVNDDGSEQLVKIQASGSRIIPMDAAMIGDFNKGNSISQTAERTRLRGVRRLSERYLLRRERLHRILDILGFLPFHFAQDLDRHGKIVKGKEPKLAWRKNEAGQFEFIFQDSFKEMLEDFKLNYPNLITDDKKVPYDWTIYYLRKKGLTSKISKEELAWILLNFNQKRGYYQLRGEEEEENKDKLVEFYALKVVAVEDSGEKKGKDIWYNVHLENGWVYRRTSNMSLDWVGKTKEFIVTTDLEKDGTPKKDKEGNVKRSFRAPKEDDWSLVKKKTEADIDQTHKTVGAYIYDTLLGNPSQKIRGRLVRTIERKYYKEELKLILEKQKEFHLELQDRALYAACIEELYPINEAHRNNVGNRDFTYLFLEDILFYQRPLKSKKSLIDNCPYEENQGLDKETGEIKSFPVKCIAKSHPLFQEFRLWQFIINLRIYRKDLAQDVDVTNELLKTEEDYVALFDWLNGKKEIDQKAFLKYPVFGLKKEIENYRWNYVQDKPYPCNETRSLMLARLEKCDISIEFLTKENEEALWHILYSVEDKNEIVKALQKFADKHDLNASFVDVFQKFPPFKKEYGSYSAKAIKKLLPLMRMGKYWSENSIDKGTRERIDKIITGEYDEKIENRVREKAIHLADVSDFKGLPLWLVCYIVYGRHSEAKEIIQWKSPADIDSYLRSFKQHSLRNPIVEQIIIETLRVVRDIWKQVGNIDEIHVELGREMKNPADKRKKMTQQMSENENTNLRIKYLLTEFLNPEYEVENVRPYSPSQQDILRIYEEGVLNSVSDLPEEISDILKKFTETDLKKRPSRSEVLRYKLWLEQKYRSPYTGEVIPLGKLFTPAYEIEHVIPQSCYFDDSFSNKVICEAEVNKLKSNLLGHEFIVKHHGEIVELPFGKKVRIFTVDEYEQFVKDNYSRTRSKMKKLLMDDIPEEFVTRQLNDSRYISKVVKSLLSNIVREKGEEEAISKNVIPCTGGVTDRLKKDWGINEVWNKIILPRFQRLNELTGTNKFTTKNVGIQEIPTMPLELQKGFNKKRIDHRHHAMDAIIIACANRNIINYLNNESATAKAELSRYDLQKMLCDKAKTDNNGNYKWVIRKPWASFTQDTYLALENIIVSFKQNLRVINKATNRFLHYNEEGKKIFVKQGKGDNWAIRKSMHKDTVFGEVNLRRIKTVALNEAMKNPQSIVVKDFKRKLLELWNLGFDAKRIKKYFEDNRETWSDINLSKIEVYYFSKDTKDRFFATRKPLDTSFDRKKIENNITDTGIQKILLRHLELKDNNPDIAFSPDGIDEMNRNIIQLNNGKYHQPIIKIRWYEQADKFAVGQTGNKSSKFVEAAKGTNLFFAVYESNILDKKTNTIIKKRNYATIPLNVAIERQKQGLPVAPEDENGNDPIFVLSPNDLVYLPTDDELANGIIAQPXXXXW

SEQ ID NO: 21995 - protein, 1112 aa, unidentified
  REGION 1..1112: note = Cas Enzyme sequence
EKIKGKLVRTIERKYYKEELKAILEKQVALQPELFTDQLFADCIRELYNKNEAQQRNLAARDFVHLLVEDIIFYQRPLRSQKSTLANCSLESRSYIDKDSHTRKEVPLKVCPKSNPYYQEFRILQWLQNLKIYEIDTDQEVTHEFIKTLEDKQQLFDFLMDQKEIDYEELLKYFLNQTYPNAKEKALKSELKKWKDTYRWNYVYDIGEKSSKKYPMNETRYELKRHLEKVANLPDDFLSSEVEYLLWHLIYSVTDKVAYEKGLKKFAQKHHLDKDSFVESFKKFKPYPSEYGSFSEKAIRKLLPLMRFGAYWDFNHIDKNTQKRIEDLITGVENEEIRTILREKAEMYQLEKETDFQDLPLWLAQYIVYNRHAEASSLEKWTSVNDLETYLNEFKQHSLRNPIVEQVVTETLRVVRDIWQQYGQGQANFFDEIHIELGRELKKTAKEREELSKQNQKNEDTNLSIKEKLKELEKYNTRAYSITHQEKYKLWLEQKHISPYTGQIISPENLFTDNYEIEHIIPQSRFFDDSLSNKVVCESIVNKAPYKDRQLGLEFIKNQGGRIVKELSKENKTIKIFTEEQYRTFIKEHYSNNPEKTKKLLLEEIPEKMVARQMNDTCYISKFISEILSKIVRSDEQDEGVHSKNVILCTGKITSILRQDWGLNDVWDNLILPRFERMNNLLQKEKFTIYSIEKQKKIPVVPINDQFKSFQKKRIDHRHHALDAIIIACVTGEHINYINNQHALEKGKDKKEKQKEHDKLREKLCIKKHNKGSEENYSWIFKKPWAHFTQEVQAALEGIVVSFKQNLRVINKATNYYERWVEENGRYIKKIVKQEGTNWAIRKPLHEETISGKIYLDREKIAKNDILTATRKTVDSSFDDKRIRKITDTGIQKILLNYLKYKGSPEIAFSPEGLEELNKNITLYNDGKPHKPIRKVRIFEQGSKFPLGEVGNKATKYVEAAKGTNLYFGIYQGKDKRSFATIPLNEVIERQKQGRSSVPKYNEKGDPLLFSLSPNDLVYVPVEGEIIEDIDFQNLSNEQKERIYNVNDFSSTCYFTPNRIAKAIFPKEVDLQRKGDKLPGSYDTKTASLEGIQIKEVCIKLKVDRLGNISKA

SEQ ID NO: 21996 - protein, 1450 aa, unidentified
  REGION 1..1450: note = Cas Enzyme sequence
MKRILGLDLGSNSIGWALVQQDFENKQGKIMAAGSRIIPMDQGMLGDFEKGNTISQTAERTAYRSARRLRERYLLRRERLHRVLHILGFLPPHYDSQIDFNKRYGKFIGNTEPKIAYNDASFIFMNSFNEMIEDFRNYQPQLFYKKSNGEESKIPYDWTIYYLRKKALSQKITQQELAWLILHFNQKRGYYQLRGEEETENPNKEVAFHSLKVVDVEAEAPNKKGEIWYTIRLENGWIYRRTSKISLEDWKGKTRDFIVTTDLNDDGTVKVDKEGKEKRSFRAPDENDWNLLKKKTEYDIDFSAKTVGAYIYDHLLQNPNQKIKGKLVRTIERKYYKDELKAILAQQIALQPELFTENLLADCIRELYRKNETQQQTLLSKDFLHLFVEDIIFYQRPLRSQKSTIANCALEKRSYIDKETNERKDAPIKVCAKSNPYYQEFRVLQWLQNLRIYEIETDREVTSEFIETAEDYEALFNFLMSQKEIDNESLLKYFLLAKNPQIKDKVAKSELKKWLTTYRWNYVYDVADNSSKKYPMNETGYDLQRYLQKVEGLPANFLTFDITYQLWHLLYSVKDKVEFEKALKKFANKNQLDEISFVESFKNFKPYPNEYGSFSEKAIKKLLPLMRFGKYSNFKNIDVSTQKRIDDLINGVANEDIRTIIREKAEKYQLNSETCFQGLPLWLAQYIVYNRHVEATNIEKWTSVSDLEAYLEDFKQYSLRNPIVEKVVTETLRVVRDIWQQYGGGQANFFDEIHIELGRELKNTSKERERLSKQNQENENTNLRIKKLLAELKEDANIQNVRPYSLVQQELLKIYEEGVFSSTDEIEEDIQKIRKKAEPTTPEIQRYKLWLEQKYKSPYTGEVISLTKLFTEEYEIEHIIPQSRYYDDSLSNKVICESAVNKLKTNQLGLEFIQNHHGEKVRIAGNKEVTIFTEEQYKEFVKKYYANNLPKQQKLLLNDIPEKMVARQMNDTRYISKYVSEILSKIVRSDEKDEGVNSKNIIPCTGKITTALKQDWGLNDVWNELILPRFERMNQLTQTQLFTSYNDRLQKNLPTVPIEYSQGFQKKRIDHRHHAMDALVIACATREHINYMNNQHALDKSKDKKEKQQSRIDLRTILCEKKNNNWQFKKPWRTFTQEAKEALEHIVVSFKQNLRVINKATNYYEKWEEKNGVLVKKKVKQEGTNWAIRKPLHKETVSGKIVLDRKIGKDKILTATRKTVDITFTEKIISSITDTGIQKILLNYLKYKGSPEVAFSAEGLEELNKNIAQYNDGKKHQPIYKVRIFEEGSKFPLGETGAKVTKYVEAAKGTNLFFGVYQGKGKRTYATIPLNGVIERQKQGLPSVPEHNEKGEPLLFSLSPNDLVYVPMVGEATDTIDFSNLSKEQKERIYKTVSFTGNQCFFVQEAVAFPIVNKMEYSPLNKMERDILGIMIKEVCIKLKVDRLGNITKA

SEQ ID NO: 21997 - protein, 1458 aa, unidentified
  REGION 1..1458: note = Cas Enzyme sequence
MKRILGLDLGSNSIGWGLIEQDFQQKEGKIIASGSRIIPMDQGILGDFEKGNTVSQTAERTFYRSTRKLRQRHLLRRERLHRVLHILGFLPTHYDKQIDFSKRYGKFIGDIEPKIAYNEGKFLFMDSFQEMLSDFKSHQPTLFYSKKNGEESKIPYDWTIYYLRKKALSQKISKEELAWIILNFNQKRGYYQLRGEEEVENPNKEVTYYSLMVTEVIAEAPNKKGEIWYSIQLENGWVYRRTSKIPLDDWKGKVRDFIVTTELEEDGSIKRDKEGKEKRSFRAPSEDDWNLLKKKTEQDINTSKKTVGTYIYDHLLQNPNEKIKGKLVRTIERKYYKEELKAILEKQIALQPELFTDQLFADSIRELYSKNEAQQRNLAARDFVHLFVEDIIFYQRPLRSQKSTLANCSLESRSYIDKDSHTRKGAPLKVCPKSNPYYQEFRVLQWLQNLKIYEIDSDQEVTHQFIKTLEDKQQLFEFLMNQKEIDCEELLKYFLNQTYPNAKEKALKSELKKWKDTYRWNYIYDIGEKSSKKYPMNETRYDLKRYLEKVANLPDDFLSSEVEYLLWHLIYSVTDKVSYEKGLKKFAQKHHLDEDSFVESFKKFKPYPSEYGSFSEKAIRKLLPLMRFGAYWDFNHIDKNTQKRIDDLITGVENEEIRTILREKAEKYQLEKETDFQDLPLWLAQYIVYNRHAEASSLEKWTSVNDLETYLNEFKQHSLRNPIVEQVVTETLRVVRDIWQQYGQGQANFFNEIHIELGRELKKTAKEREDLSKQNQKNEDTNLRIRALLAELGEDSTIENVRPYSLMQQELLKLYEEGVFSSSMEIEDDIEKIHKKATPSKAELQRYKLWLEQKYKSPYTGQIISLKRLFTEDYEIEHIIPQSRYYDDSLSNKVICESVVNKAPYKDRQLGLEFIKNQGGRIVKELSKENKTIKIFTEEQYRTFIKEHYSNNPAKTKKLLLEDIPEKMVARQMNDTRYISKYISEILSKIVREDERDEGVNSKNVILCTGNITSALKQDWGVNDVWNDLILPRFERMNSLTQSTLFTTYNERYKKYLPTVPMEYSKGFQKKRIDHRHHAMDAIIIACTTREHINYINNQHALEKGKDKKEKQEERDKVRERLCIKKYNNRSEGNYSWIFKKPWDTFTQEVRAALEDIVVSFKQNLRVINKATNYYEHWVEENDKLIKKMVKQEGTNWAIRKPLHKETVSGKIILEREKVSGGKILTATRKTIDSTFTEKVIEGITDTGIQKILLNYLKFKKSPEIAFSPEGIEELNKNIALYNDGKPHKPIYKVRIFEQGSKFPLGEVGNKATKYVEAAKGTNLYFGVYQGKDKRSFTTIPLNEVIERQKQGLPSVPEYNEKGDPLLFSLSPYDLVYVPIEGEIIKDIDFQHLSKEQKERIYKIVSFTKGRIYGIPNKVAVSIVNKMEYTQLNKIEFIKEKEICIKLKVDRLGNICKA

SEQ ID NO: 21998 - protein, 1462 aa, unidentified
  REGION 1..1462: note = Cas Enzyme sequence
MKRILGLDLGSNSIGWGLIEQDLQQKEGKIIASGSRIIPMDQGILGDFEKGNTVSQTAERTFYRSTRKLRQRHLLRRERLHRVLHILGFLPTHYDKQIDFSKRYGKFIGDIEPKIAYNEGKFLFMDSFQEMLSDFKSHQPDLFYTKKNGEESKIPYDWTIYYLRKKALSQKISKEELAWIILNFNQKRGYYQLRGEEEIENPNKEVTYYSLMVTEVTAEAPNKKGEIWYSIQLENGWVYRRTSKIPLDDWKGKVRDFIVTTELEVDGSIKRDKEGKEKRSFRAPSEDDWNLLKKKTEQDINTSKKTVGTYIYDHLLQNPNEKIKGKLVRTIERKYYKEELKAILEKQIALQPELFTDQLFADCIRELYSKNEAQQRNLLARDFIHLFVEDIIFYQRPLRSQKTTIANCSLESRSYIDKDSHTRKEAPLKVCPKSNPYYQEFRVLQWLQNLKIYEIESDQEVTHQFIKTLEDKQQLFEFLMNQKEIDCEESLKYFLNQTYPNAKEKALKSELKKWKDTYRWNYVYDIGEKSSKKYPMNETRYELKRHLEKVANLPDDFLSSEVEYLLWHLIYSVKDKVAYEKGLKKFAQKHHLDEDSFVESFKKFKPYPSEYGSFSEKAIRKLLPLMRFGSYWDFNHIDKNTQKRIDDLITGVENEEIRTILREKAEKYQLEKKTDFQDLPLWLAQYVVYNRHAEASSLEKWTSVNDLETYLNEFKQHSLRNPIVEQVVTETLRVVRDIWQQYGQGQANFFNEIHIELGRELKKTAKEREDLSKQNQKNEDTNLRIRALLAELGEDSTIENVRPYSLMQQELLKLYEEGVFSSSMEIEDDIEKIHKKATPSKAELQRYKLWLEQKYKSPYTGQIISLKRLFTEDYEIEHIIPQSRYYDDSLSNKVICESVVNKAPYKDRQLGLEFIKNQGGRIVKELSKENKTIKIFTEEQYRTFIKEHYSNNPAKTKKLLLEDIPEKMVARQMNDTRYISKYISEILSKIVREDERDEGVNSKNVILCTGNITSALKQDWGVNDVWNDLILPRFERMNSLTQSTLFTTYNERYKKYLPTVPMEYSKGFQKKRIDHRHHAMDAIIIACTTREHINYINNQHALEKGKDKKEKQEERDKVRERLCIKKYNNRSEGNYSWIFKKPWDTFTQEVRAALEDIVVSFKQNLRVINKATNYYEHWVEENDKLIKKMVKQEGTNWAIRKPLHKETVSGKIILEREKVSGGKILTATRKTIDSTFTEKVIEGITDTGIQKILLNYLKFKKSPEIAFSPEGIEELNKNIALYNDGKPHKPIYKVRIFEQGSKFPLGEVGNKATKYVEAAKGTNLYFGVYQGKDKRSFTTIPLNEVIERQKQGLPSVPEYNEKGDPLLFSLSPNDLVYVPIEGEIIEDIDFRNLSKEQKEKIYKTVSFTGNQCFFIREIVATSIVNKMEYSPLNKMERSITGIMIKEICIKLKVDRLGNISKA

SEQ ID NO: 21999 - protein, 1458 aa, unidentified
  REGION 1..1458: note = Cas Enzyme sequence
MKRILGLDLGSNSIGWGLIEQDFQQKEGKIIASGSRIIPMDQGILGDFEKGNTVSQTAERTFYRSTRKLRQRHLLRRERLHRVLHILGFLPTHYDKQIDFSKRYGKFIGDIEPKIAYNEGKFLFMDSFQEMLSDFKSHQPTLFYSKKNGEESKIPYDWTIYYLRKKALSQKISKEELAWIILNFNQKRGYYQLRGEEEVENPNKEVTYYSLMVTEVTAEAPNKKGEIWYSIQLENGWVYRRTSKIPLDDWKGKVRDFIVTTELEEDGSIKRDKEGKEKRSFRAPSEDDWNLLKKKTEQDINTSKKTVGTYIYDHLLQNPNEKIKGKLVRTIERKYYKEELKAILEKQIALQPELFTDQLFVDSIRELYSKNEAQQRNLVARDLVHLFVEDIIFYQRPLRSQKSTITNCSLESRSYIDKDSHTRKEAPLKVCPKSNPYYQEFRVLQWLQNLKIYEIDSDQEVTHQFIKTLEDKQQLFEFLMNQKEIDCEELLKYFLNQTYPNAKEKALKSELKKWKDTYRWNYVYDIGEKSSKKYPMNETRYELKRYLEKVANLPDDFLSSEVEYLLWHLIYSVTDKVAYEKGLKKFAQKHHLDEDSFVESFKKFKPYPSEYGSFSEKAIRKLLPLMRFDSYWDFNHIDKNTQKRIDDLITGIENEEIRTILREKAEKYQLEKETDFQDLPLWLAQYIVYNRHAEASSLEKWTSVNDLETYLNEFKQHSLRNPIVEQVVTETLRVVRDIWQQYGQGQANFFDEIHIELGRELKKTAKEREDLSKQNQKNEDTNLRIRALLAELGEDSTIENVRPYSLMQQELLKLYEEGVFSSSMEIEDDIEKIHKKATPSKAELQRYKLWLEQKYKSPYTGQIISLKRLFTEDYEIEHIIPQSRYYDDSFSNKVICESVVNKAPYKDRQLGLEFIKNQGGRIVKELSKENKTIKIFTEEQYRTFIKEHYSNNPAKTKKLLLEDIPEKMVARQMNDTRYISKYISEILSKIVREDERDEGVNSKNVILCTGNITSALKQDWGVNDVWNDLILPRFERMNSLTQSTLFTTYNERYKKYLPTVPMEYSKGFQKKRIDHRHHAMDAIIIACTTREHINYINNQHALEKGKDKKEKQEERDKVRERLCIKKYNNRSEGNYSWIFKKPWDTFTQEVRAALEDIVVSFKQNLRVINKATNYYERWVEENDKLIKKMVKQEGTNWAIRKPLHKETVSGKIILEREKVSGGKILTATRKTIDSTFTEKVIEGITDTGIQKILLNYLKFKKSPEIAFSPEGIEELNKNIALYNDGKPHKPIYKVRIFEQGSKFPLGEVGNKATKYVEAAKGTNLYFGVYQGKDKRSFATIPLNEVIERQKQGLPSVPEYNEKGDPLLFSLSPYDLVYVPIEGEIIEDIDFQHLSKEQKERIYKIVSFTKGRIYGIPNKVAVSIVNKMEYTQLNKIEFIKEKEVCIKLKVDRLGNICKA

SEQ ID NO: 22000 - protein, 1444 aa, unidentified
  REGION 1..1444: note = Cas Enzyme sequence
MRHILGLDLGITSTGFCHIIEDENKKNSTIEEIGVRIIQLDNFVSTKTGEDSKDPSKDFSAGKGISSNAGRTQKRRARINLDRYQLRRKQLIELSLQAGLITSSTILAEDGKNTTHSTWQLRAKAAVERIEKDELVRVFLAINKKRGYKSSRKVKNKDDGQIIDGMDIAKRLYDENLTPGQLVLLLLKEKKKQLPDFYHSDLQREFDLIWNFQKEFYPDILTNDLYKALQGKNKTDSSSIFYNYYHFNTAENRGTKEQMRLQAYRWRVDALSKKLSKEEVAYVLVEINSNLNNSSNYLGNISDRSKELYFNKQTIGQFLYTKLKEDRHYSLKNKVFYRQDYLDEFERIWETQAIFYKELTGDLKKQIRDTIIFYQRRLKSQKGLISLCEFENKEITIEKEGKTVTKQIGVRVIPKSSPLFQEFKIWQILNNVVCKKKGTRKKKAVTPAPLLFELFGTPSETFFSLDMECKQLLFEELNLKGNLKADKVIRLLGYIPQEWEINYNQLEGNRTQKSLYEAYLKIIEIEGYDIKTFLRIKSDKEDWDLEESPLSAKEIRENIQHIFETLGISTAILYFDATLPIKDFEKQASYQLWHLLYSYESDNSPSGNETLYKLLQDKFGFKREHAVFLSNISFQDDYGSLSAKAIRKIYPYIKENQYSTACELAGYRHSKLSLTKEELNNRPLKDLISPLKKNSLRNPIVEKGLNQMINVVNALIEKNSEKDAEGNIIKYFHFNEIRIELARELKKNAQERAEMTLNIKNATIEQEKIKRILISDFGIKNPTKNDITRYRLYQELAHNGYKDLYTNTYIPKELLFSKNIDIEHIIPKARVFDDSFSNKTLAYRDFNLKKGENTAFDFIDSSLGEEELNQYIARVENAYKTKNISATKYKNLLKKATEINDSFINRDLRETQYIAKKAKELLFQITRSVVSTSGSITDRLREDWGLIDIMKELNMPKYRDLGLTEIMDRRDGRKVEVIKDWTKRNDHRHHAMDALTVAFTKPSYIQYLNHLNARKDENNKLYADILGIERKETTKIHDENGNEKRVFIEPMPDFRQIAKKYLEEILISHKTKNKVVTKSINKIAGTNKKQETLTPRGQLHKKTIYGKYHYYSNKEEKIGTKFDKETISKVSNPIYRYALQKRLEANENNPKKAFTGKNALSKNPIYLDDAKTKILPEKVNLIYLEEDFSIRKKIVSENPTSKEFVPNSISIEKIVDEGIKRILKERLETYNNDPKKAFADLDKNPIWLNKEKGISIKRVTISGVKNTQALHSKKDHLGKSILDKEGQEIPVDFVSTGNNHHVAIYRDQKGNLQEQIVSFFEAVVRAQQGLPIIDKTYKQEEGWQFLFTMKQNEMFVFPNEITGFNPSEIDLLDPKNKKLISPNLFRVQKISIKDYFFRHHLETNVETNNILKDITWKRGGLSLLKGIIKVRINHLGNIVSIGEY

SEQ ID NO: 22001 - protein, 1457 aa, unidentified
  REGION 1..1457: note = Cas Enzyme sequence
MCKSFLIYFYFSFLFVIFASPNYKTMKNILGLDLGTTSIGFAHIVEDENKEKSEIKELGVRIVSLTTDEQSDFEKGKSITTNANRTLKHGARLNLDRYQQRRKYLIDLLQKANLITSSSILAENGKNTTHSTWQLRAKAVTERVEKEEFARILLAINKKRGYKSSRKVKTEDEGQAIDGMAIAKRLYDENLTPGQLSLQLLQQNKKLLPDFYRSDLQKEFDLVWNFQKQFYPDILTNTFYKELQGKGKDATSKAFSKKYHFDIAENKGSKESVRLQAYQWRAEAISKQLSKEEVAYVLTEINNNLNNASGYLGAISDRSKELYFNRQTVGQYLYAQLQENRHNSLKNKVFYRQDYLDEFERIWETQASFHKELTEELKKQIRDVVIFYQRKLKSQKGLISFCEFESKEIEIEKDGKTITKSIGARVVPKSSPLFQEFKIWQILNNVICKRKGIRKKKISAKTTQLDLLNESSQTIFSLDMECKQLLFDELNLKGDLKSDKVLKLLGYSPQEWEINYNQLEGNCTQKALYEAYLKIVEMEAHDVKDILQIKSAKDDWSLDESPLSASEIKEKVKDIFQALGICTKILYFDPLLPVKEFEEQDSYQLWHLLYSYESDDSTSGNETLYRILEKKYAFKREHARILANVALQDDYGNLSTKAIRKIYPYIKENQYSTACEKAGYKHSKLSLTKEELEARELKNIIPLLKKNALRNPVVEKILNQMINVVNALIEKNSERDAEGKITKYFHFDEIRIELARELKKNAQERYEMTQNINKAKSEHQKISEILQKEFGIKNPTKSDIIRYRLYQELEHNGYKELYTNARIDRDMLFSKNIEIEHIVPKARVFDDSFSNKTLTFQRINSDKGEYTAFDYITSLNSEEELNQYLTRVKNAYKTKSISPTKYKNLLKKASEIGDGFINRDLRDTQYIAKKAKEILFQVTKNVMSTSGSITDRLREDWGLVDVMKELNMPKYQSLGLTEVEERKDGNKVTVIKNWTKRNDHRHQAMDALTVAFTKPSYIQYLNHLNARKDENNKNYSVILAIEEKETIKVPTNNGKNKRVFIEPIPNFRQVAKKHLEEIFISHKAKNKVVTKNVNKPAGTDKQQITLTPRGQLHKETIYGKYQYYVNKEEKVGVKFNKETIAKVSNPLYREALLKRLQANGNDPKKAFTGKNALSKKPIYLDESKTKTLPEKVNLTYLEEDFSVRKKIVPKNPTSKEFVPNLKSIEKVVDEGVRNILIERLRVYNNDPEKAFVDLEKNPIWLNKEKGIAIKRVTISGVSNAQPLHIGKDHLGKTTLNKEGNEIPVDYVSTGNNHHVAIYRDKEGNLQEQIVSFFDAVVRAQQGLPIIDKTYKQAEGWQFLFTMKQNEMFVFPNATTGFNPAEIDLLDPKNKKLISPNLFRVQKIATKDYFFRHHLETNVETDNVLKNTTWKREGLSGLKDIVKVCINHLGDIVSIGEY

SEQ ID NO: 22002 - protein, 1122 aa, unidentified
  REGION 1..1122: note = Cas Enzyme sequence
MNGKILGLDIGVASVGVGIIDKESGEIIHASSRIFPAATADSNVERRGFRQGRRLGRRKKHRKVRLADLFRDAELVTDFSKVSINLNPYELRVKGLIEKLTNEELFIALKNIVKRRGISYLDDANEDGESSSSEYGKAVEENRKLLADKTPGQIQLERFEKYGQVRGDFTIEENGEKHRLLNVFSTSAYEKEAERILTRQKDYNQDITDVFIQAYLTILTGKRKYYHGPGNEKSRTDYGRFRTDGTTLDNIFGILIGKCTFYPEEYRAAKASYTAQEFNLLNDLNNLTVPTETKKLSEDQKRQIIEYAKGAKTLGAATLLKYIAKLVDGSVEDIKGYRIDKSEKPEMHTFDIYRKMQTLEMVDVKQLSREVLDELAHILTLNTEREGIEEAIKASFIKGEFEQDQIAELVSFRKSNSSFFGKGWHNFSIKLMIELIPELYETSEEQMTILTRLGKQKTKAKSKRTKYIDEKELTEEIYNPVVAKSVRQAIKIINLATKKYGIFDNIVIEMARENNEEEAKKDYVKRQKANEDEKNAAMEKAAHQYNGKKELPDSIFHGHKELATKIRLWHQQGEKCLYTGKNIPIADLIENQYKYEIDHILPLSLSFDDSLANKVLVLATANQEKGQRTPFQALDGMDASWSYREFKSYVKASKVLSNKKKDYLLNEEDIDKIEVKQKFIERNLVDTRYSSRVVLNALQDFYKLNDFDTKISVVRGQFTSQLRRKWRIDKSRETYHHHAVDALIIAASSQLRLWKKQNNPLISYKDNQFVDSETGEVITLTDDEYKELVFRAPYDHFVDTLSSKKFEESILFSYQVDSKYNRKISDATIYATRKAKLGKDKSEETYVLGKIKDIYSQTGYDAFIKIYKKDKSKFLMYHKDLLTFEKVIEEILKTYPDKEQNEKGKEVACNPFEKYRQENGPIRKYSKKGRGPEIKSLKYYDNKLGNHIDITPANSENQVILQSLKPWRTDVYFNHKTKIYELMGLKYSDLSFEKGSGKYRISLDKYNIIKKKEGVNEDSEFKFTLYKNNLILIKDLEKEEQQLFRYNSRNDTSKHYVELKPYNKAKFEGNQPLMALFGNVAKGGQCLKGLNKADISIYKVQTDVLGNKRFIKKEGDAPKLEF

SEQ ID NO: 22003 - protein, 1328 aa, unidentified
  REGION 1..1328: note = Cas Enzyme sequence
KAEQFKITDQKVDDKPLYEIIFDNGWIYDNTTTKPEIWEGVDIEFIVTSTINKDGSIKRTFKKVDSEKDWEAIKRKTEQDLRKSQKGAYKTFVGKYIYETLLENPKQKIRGELIRTIDRDFYFDELEVILRTQLKFREEQWGDKNLYKRTVQELYAHNIAHQENLLKQKDTFIHLFLKDILFYHRPLKSQTGLVSRCSFEKRVYVDSLTGDKHEVKIKGMPKSHPLFQEFRIWQLAHNLRIQKREAEENGKLKINLDVTNQFIRNKSDLAKFFNFLYNKKDINQKQLVAYFIRDKKEQSLYRWNFTDDNKIKLDCNQTRPALLSKLSKEDKRKFDEQFELKLWHIIYSVTDKSEYDTAIGRFGENNSLSEETTEKLKRAPMLKKEYATYSEKAVKKLLGLMRCGCHWSEVSIHPSSIQIIDKLLTGEFDERIENQVREKAIKLDKIEHFQGLPLWLASYIVYGKHSEVDATQWKSSKDLAEYINTFKQHSLRNPIVEQVLLESLRVTLDIWEYYAEKFGLQFEEYIDEKTGKKVKSYDRLFSKIHIEIGRELKNPKKVREKMTNSINKNKDTNQRIRKLLFELKNVKEVENVIPNSRTHFDKLKIFEQTVLSNYSEKELKAEKLDSKLTVEKFIKKNQPTFSEILKYKLWLEQKYISPYTGKIIPLTQLFTSKYEIEHVIPQSKFLDNSFNNKIICETEVNTLKDNRTAYTFIQEFQEAEVPLSGGGSVSILKKETYEKLVKENYDGRKKENLLRETMPQKMSERQMNDMRYISKAALKIYSNIVREEGERESTVKNVLPVAGKVTAKLRREWGLNQVWSGLVEERFKRLNRLICGEENENNGLFGTWVDDGGYFRTEVPLEIREDFDIKRIDHRHHALDALIIASLTSNHVNYINNEHTKSDLKRYDLGLTLRDTKQIEKTHPLTEKKTKHTVLGNYKKPWKTFTQDAKSALQEIVISFKQNLRAINKAQNYNWRYKDNAGKVVYTKNGVPKKQWIEQVSSKTDKTSNNKTNWAIRKPLHEETVYGILENGEYKGDLVKREPLNISFDEKKIETVIDPVVRSILLRHIKQDKFKGQIDEKGNIFKPEEVAFSAKGIKDLNENILTLNNGVFHHPIKKARLRFPKGKKFSIKKWEDKEGNLLRETKFVKSATGTNLYFCIYEKEGKRKYYVPPFEEILEIQKLEQDLPLEQKKNVPEQHPDFHDFKLKFYLQPNDLVYIPVKNDEDMGFENLGRQQLENIYLFKDGSGTTANFIPMFSADVIYNISNKENREKFADAYNLDKGELIKNEYGLGSPQLKNQNSVDGIQVKSVCWKLQTDRLGNITKVLK

SEQ ID NO: 22004 - protein, 1119 aa, unidentified
  REGION 1..1119: note = Cas Enzyme sequence
MSSNYQINNLPTWRLGVDVGQNSIGFAAVAFDGEKPTEILSAVSWIHDGGADPDGQVPKSRKSTSGVARRTRKLRKRRRQRLKKLRQELANLGIPTPSLDDSQTYEPWLEREVLVRGRIDNEKIRNECLGRAFMHMARHRGWRNPWISVERLADLQTPSEPFTRMRDMASERFNVPVESIVSIGCLGALAAKRQGTRMRPRTTLEGSIPAKEKIIEDKIVFFERIRQEDIYEEIGLICQTQGLDKERERKIKTLILFQEHPYVKAESVGRDPFNPHEQRASKGTLEFQEFRVLDKVANLRIKSGGEKKFLPRELTEKIVSYLLNYQDDRNPTWFEVGEALDFDATTLVLDGFGDPTTQKAPVDDSTRKFLSAKKKLPNVYQWWSENDRIKRADFIAFLADPVDQEEKDVSDEIGNLFESLPDEEILELDKLSFSAGRSAYGRSTLQRLNEEMMQSSCDLTIARQKVFGVERYWTPPKDTFDIQTGQPTVDRNLALVRRFLSTATMKWGVPERVVVEHSRNGFMTPEKARLLQAEQAKREKMRNQYREELKAQGIENPSRRDILRQQLMQIQNSCCTYCGSELSWKGSEIDHIVPRASGGSSKQSNLMLVCLQCNREKSRQPFGRFAQNNPRVSLKDAIERVKKWERLTNLSAKEFGNYKKDVISRLSRLSDDEQLDERSMESTAYAAVALRERVESFLEKQPNYDPNDHSVRVHVYNGRVTSLARKVSGIEASMSLRGDNEKVRIDRRHHAVDALTLTTITPSVARVLIQRDEMRSADQMRWEPTKDYKSYYGALGDKINFERWLSNAYQLADLGRKLLDRDGIPVCRQLRLRPQHGAVHQDTVSKLEHKLLGEEFSENELKRIVDRRVYAKLYEEWVAEGVLQERRDRSVYCGKGKNLDSKDVVELFPKQAAMMKVQNGAVELNYIHHARVYAWREKQAIRFGLIRVFLGELATMGFHRLGVDILTAEIPYWSESYRLADKNVIQHIQDGSARQIGWLAVGDEVVFPKNKPLPGSSKQVEKFAQVFPDYTWTLAGFPSGDKLRLRPNYLAPEGVPQDLEPEVKEIVSGRGWWPSISVALGGGGYVIRRTVLGAPRWHADGHLPSSWNPMQVALTEFGL

SEQ ID NO: 22005 - protein, 1197 aa, unidentified
  REGION 1..1197: note = Cas Enzyme sequence
MKKVLGLDLGTNSVGFALVQFSDDENQGQIIQMGARIVPKDPNFHGLFEKGALGADSKNAKRRTKRGIRRGYQRWQGRRNKLLNFLKQHQMLPDDLNSVFPDLTKEDKALPLIAPAYRLYELRAKAATEKISLKELGRVMLMINNKRGFKSNRKAVSADEEETDYKKQLNDLEAATHDVTIGQYLFNLLKENPYARLKGKTFYRKKYIEEFDTIWMTQKQFYPDILTGEPGKKDYSSLYSILKNDILFYQRPLKSAKGLVGKCRYEPQLACTPVSSPLFQHFRIWKSLNDIRIIRESGEEERLSHQQKLKIYEALHTAKDLDKNRNLTAKSKVLKKILEFKGDKEKLNFDSIPGNKTYLSIEDALQKAGVNHPENLRFTWENEEHKPAAEKTGLNALWHLSYSIEEEETLVKALLKNNRFGMTEAQAKIYAQAIAFPQDFSSLSAKAIRTLIPHLENGYDEYEATVEVGYRHSDSETKQEIAEKKLLPSVALVKPNELRNPVVEQILNQAIQVVNAISEKHGKPDEVRIELARNLRATADQRSNMAKRIREQEALNKEFEKEIAAIKGTASITARDRERLKLWKETKMRCLYSGKTINQSDVFNGRTEIEHILPRSLFADNSLQNKILVFKEFNEQKKQRTAWDYIQQDKPRDPESYKKEVMELLKNPKTDKSGQGISKLKRDYLLMAQENIPTDFTNAQLKATEYITKEITKRLKSSIRQVTLTSGAVTAILRDDWGLNEILRDINLPRYAQAGKVVQEDRFNAHKNEKYTVTKIEDWSKRDDHRHHALDALVVALTTQGVIQRINTLNAVNGTVYSGNKKQRFPNPPVGNIHAQVKDHLNNMLLSFKKSSKAVTLKKSKAKRKDGTKFNIQTLVPRGSLHEDTIFGKIRRIARMPMPIAKAFHQVENIAEPVVQQLVRLRIEEQDGDILKAIKQLKQSPLEKKGKPIEFVKVFEEVYTKRVDITALSQPQVEKILDAGIKAKVKERIGSDINPQAIKAAFENYEQNPLYLDDKKTIVIRKISVEDNGDLTQVRSDKTGQAQGYAYLKNNHHALLHETPDGNWTFRTVSLWEATARAQEKLPVIDKSSTPDLKFVMSMQNNDLFFRTPEGEEIPETDWFFQPENLNKINQNLFRVQKMSMAGNACYVVFRHQFETSLKDDNSIKNIAWARISSNNNLKTWIKIHLDKTGHIIRVGE

SEQ ID NO: 22006 - protein, 1120 aa, unidentified
  REGION 1..1120: note = Cas Enzyme sequence
VGLKSIGFCAVEVDRNDQPVKLLNSMVFIHDAGVDPNENKAAKSRKLTAGVARRTRRLYRTHHQRLVNLDRVLSKEFGWPLPDLMAFKDPREPWHVRSRLLEGYIADDNERKAALSIALRHMARHRGWRNPYAKVETLLQPAEPSDFLKGLKKRISESLGRSFPADATPGQLVDAYLAHPDYAKKAGTPKLRGPEGILAGKLHQSDNAEEIRRICEVQQIDPADRDRLIRAVFQAKSPKGSAKERGLVGHDELPGQAKHVRAEKAHPAFQRFRIVSVLANLRIREGRAERSLTPEELQGLTDFLLLAGLKQEVTWQDLADNLGIERSDLRGTARASFDGSPVLRNPPTDVTTEKIMACKVKWLKEWWKDADDEQRGYFVDAFSNSGGSEDSSDVNDEVAELLEQATEDDQLEFEKISLPQGRAAYSLDSLRRLTDRMLRDGVDLHTARRLEFNVGDDWKPAVEPIGAPTGNPAVDRVLKQVSRWLHAATERWGEPTVINIEHARDGLGSERVARELMRENDRRRSANAAAVAEMAAQLKLSGRVRRSDQIRYFALQRQNNECLYCGTGITFTTAEMDHIVPRADGSSTNDRSNLAAVCRTCNHKKGAIPFAAWASSDRANAGVSLKGALERVKFWVRDNGMSPKQFKQLQREVSARLKSRKPDEEFDGRSMESVAWMAVELRTRIEGFYRTRDEESVPSVGVYRGQLTAEARKASGFESRVNLIGGRGKTRFDRRHHAMDALVIALMNPSVSRTLALRVNMRDAQRIAGLEETWKNFYGKPGEASNRFESWRESMLRGVELFNIALSDNAIPFVENIRLRVGSSVIHDATVHSFCPPKTPDGEQIITKGYGEQHRLGDALPVELIDRAETPALWTALTRCPDFDPKKGLPENPNRTISVNGTRVGPKELLNFFGSSAACLKVRGGYVELGSSIHHARIYRIDGKKAAYAMVRVFQVDLLRLKDQDLFTTPLKPSTISMRTAEPKIRQALADGTATQIGWLVEGDELQIDTSKYSGGFIGEVLERYPEATSWRVAGFMTPAKLRIKPLLLSKEGFIDEKQAARLGIEATSEAVQKTVDTPGWLPAVNVLFGAGGVRVIRRNCLGEERWHSSAMLPVSMMLE

SEQ ID NO: 22007 - protein, 1385 aa, unidentified
  REGION 1..1385: note = Cas Enzyme sequence
MSTILGLDLGTNSIGWALRNTDLGKGPDQITHHGVVIFEKGVGAEKGVEFSRAAERTKKRAARKRNARRRWRKIDLLATLIRNDMCPLSLEDLEQWKKQATRQRIYPSKELFRNWLRLDFNNDGIPDYENPFCLRSEALKRGVSLLEFGRLIYHLNQRRGYLSNRSDKQQTAEVDSDIEKPAKKTQSKEGKVASAIRDLESALNGKTIGQRLHEIIQAGGRARRRTDEATNIYRLTLQTEFLEISAFQRISPVLIETLRKIIFDQRPLRSQKGTVGKCIYEKNKPRCPISHPEYELFRMWQVLNNIRYSDDNRQTWQALDAADRATAQQKFFRRSSAAFEFADISKQFRKKYPNRIFNYKDTQILAGCPTLAGLLAIFGEEKLWQLRLQALERIEQEGGETPSSQPKTLDLYDLWHWLFAMDNDKDQQIIREKAQRLIGLSEKEADRFINIPIAQGYGTISLKAIRKINHWLGQGEKYDKAVFMANIPHILGKEAWKAYNEQLSSAIQQAIAGISKIKNCTDIANGLIKHYNNLQYTHRFAGHAEYTLDLDDHKDVSQAILNYFGDARWSMFTPEDRGEYEQLTIRLYHQSLATSTSSDLPYLKPPRLDDEIKLAITNVTGIDRDSRILNKLYHPSQIDSFLPALKEMNAANGRPTGRLLLNRPTTNSLRNPMAMRALYELRKLVNYLLKQDLIDEHTHVIVEMARELNDANRRKALERYQYERTMENRRYEQEIRKLFQEQGWPLPNDLSTYIDRYRLREEQPRRTCLYTGRAISDTDLFDEFTTDIEHTLPRSLTFDDSLQNKTIAFKFYNNLIKDQLLPSQLPNFSVDTPQFGAIEPRLGEWEKRVSDHELKIEISRRRSRIATTKEAKDKAIQDRHYHELHLRYWKSKLQRFTITRITEGFKNSQLVDTQLISKYGVHYLKTLFLNVRSTKGLITDKIKRIWGALDADGAKDRSNHIHHSVDAIIQTLLHKERGRPDVYNLLVEGYREAEEKKWKEPMLPNPWALPPDAFHTAIRELTENTLVFHVDRDNVLKQTRKKIRDKGRIQYQRDSSGEKIPILQRGRGIRASLHKDTFYGAIKQPVKENGKLKHDQTGRLVLEQDENGNDLIRYRLSFEFRGRTIDDIRKSMDKIVDDRLRELACQTSAASIHKQGYFEIPPSAERVKRDPAAQPTKVYKVKIFADNIQNPLQVKQHADVKKEHKRFYYAQTDGNYLMALYDNGREKDFELVNTFQLAGLAGERQGLYPLFKERTLKGKLVQIPLSRRNNKDVVLTQGIKVLLFEKSPEEITSDPSPRNLADRLFKVQGLSIQRIQKTYEYGVIQLIHHLEARSIGELKIQDGDYKFGDGKKYRKLNHNQLKALVEGVDFHMTPAGAVMFIDNNK

SEQ ID NO: 22008 - protein, 964 aa, unidentified
  REGION 1..964: note = Cas Enzyme sequence
CPTTASLKKAIGVEEYSKMTFLNTGYNDEKGKKQLSIEDVWHCLQMDVFGTKDKKTIRREFAEKHLKLDDKSIESFIKTKLVKGYGSLSKSAIRKILPFLIKGEIYTNAVFLANITEVLGRKVSENEEQQISEKVKEALELFRIEKQNKGIVNNYISKFKKSKEPFSLGNNTFSIDAHKKGLDYEIADWIGELQLNKLENEEILKITTNCWNLFYEVVYDKSPKEINYLTTKTIPEFILEVLKHAFPNDKIDVTKLYHPSAMEAYPKADKKLGNPEISSIKNPVFNRAMHQVKRLCNELIRNGLVNKDTEVNLEVAGEINSASYRRALSQWQKEQETIRTWAKNKIIGLNPIEKRSEIIPTATEITKYILYQEQNHKCLYTSGKEICITDFLGGKTTYDIEHTIPRSKFNDNSLKNKTLANYDFNRNYKKTTLPALLNLNFNGIDINKKIILQNRDKYLKSYTIKGDEITWDVSLSTLKFDYKKFKNAAKAITDAASHDEVMTKAHYTKFKLDYLREKYRNFEIEEINNQFTNANLVDTRIIAKYARAYLNSYFNKVNVVNGKITDTLRKIWGLQSEEEVKDRSNHIHHCIDAIVVACIEKGTANWISEVYHNYESDYFKGNSNPRIDVKKPMVDFVKRMKDLHKEVLIYHKQTDRIKPLLLQAQKENAKKLNLRGKLNSQNPYAHIKKNDELIFAKREKISNLTIKDVENIIDEGIKKRILNFASEVGLEAFIKESSKTGFMILPKYYDEEKQRDISEMIIKRLRLKSSVSNLKDYKKIRAIDQKRKFEYKHDFYFDKDSYTNYEARIYGDLIPNNPGKKIPFTNRTSSLINNYNIVKNNFPKETEKTILKLHQGDMFLFFDETPEEIEWGNSLDLQQRLFKVVKFTENKEKGEIKQIIFERHNYALGNVDYAVSTSENNLSDMNGVVLRKSVSALRVVPTKVNTLGKIDIEFSKEFINLNSK

SEQ ID NO: 22009 - protein, 1324 aa, unidentified
  REGION 1..1324: note = Cas Enzyme sequence
MKKIDEYDISLDIGTGSVGYAVTSGTDLLKFKGKNMWGVSIFRSGETAEKTRLHRSTRRRYDRRRNRINLLQELFNEDILAIDDGFFIRMKESFLHKEHKSLGSLNGLFADKDFDDKKYFKNYPTIYHLRHALVNSERKFDIRLVYLAIHNIVKYRGNFLYERQNFDISSGIVESFEVVANYLCLNEISYTDFERIILDWELYKKEKVKRLQNLLAGGTKDQRVNQLIKIIMGDKANVVKIFDIEHVDGKLNLSFSNEGDENYNEAVELIQNKSDEDGLLFEALKKIYSFYIIRKLMKNDSNTNSDECSISKAMINKFNIHAEDLKNLKVIYRKHFSDYHYNKMFRHYNGDKYKNVKNYNVYINNISKCSKDELYKAIKKDISDINDTLVDDVITKIDNEEFLQKLNTVDNAQIPYQLNLSELESIIDKQSKYYPNLLENRDKIISLFKFRIPYYVGPLNANRDNNKVFSWMERKAQDKIYPWNFEEVVDLEKSATNFILKMTNQCTYFPNCDVLPDNSLIYSEFKVLNELNKIRIDGKLINKQVKHLIYNDLFRKEKNITVKTLEKFLKNNEVIDRSSSPIIKGFHEEDKFSNSLKAHIFFERLGFDVDEEDRELVENLIRWITLFSDKKILKKEIRNNCSKDMISDDVLKKVLKCNFSGWGRLSNELINEVGSTSRKYRESTILDILKHTNLNFIQIISDDELGFKDIIEERNTNIKDKITSKDIQELQGSPAIKRAIWQSVKITEEIVGIMKKPPRNIFIEVARSEENKKRKDTRFKKIEEIYEAVSKSGSFIVTENVKEAMDYIKKEKNEKIDNERLYLFLLQNGKCMYSGVDLDYKSLSQYEVDHIVPRTIIKDDSIDNKVLVTSRENQNKSDSLVLKSTVRHKMSCIWEKLLACGLMSQKKHWNLNRNEFTKNQVEGFINRQLVETRQITRHIANLFRNYYVDTDIVMVKGNIVSNLRNKHDLFKSRSLNDFHHSHDAYLTGLLGNFIKMRFPAFKDRFYYDMLSKYNFKDYRQKYGFIISEFEKPIFNHNSDLVWDPDSIIIKMKKYINYNDCYISYKKEENTGEFYNQNALKRGNGNLMPLKKGLDPKLYGGYGNVNKSYLMVVKVVKKGKENLCLIGCPIFLRNKSVDDKIEYLKIMNDCDDIEIIKDKILINQLVISEGMPLILKSDKELSNAVNLLLNKEYKRIVHLIERENYSSLQAHELEALYDIILKKIVQFYPVYKNIHKKLLGKRKVFLELSISEKSYIILELLKMLKANSGQGNLKKIGLQERSGRLNKKVKVEDLIFIETSVTGMYEERWSVVKNAEGKYKIVYEK

SEQ ID NO: 22010 - protein, 1308 aa, unidentified
  REGION 1..1308: note = Cas Enzyme sequence
MKNYEEYDISLNIGVNSVGYAVTNDTELIRFKGKNMWGVNLFQKGETAEQTRLFRTARRRYVRRRNRILLLQELLSEEVLKNDDSFFIRMKESFLHKKDKSINVSNGLFIDQDFKDKDFFDKYPTIYHLREDLINSDNKIDIRLIYLAIHHIIKYRGNFLYEGQSFNVTSGIEDMFLDMVSYFKIEKVEYKDFENILTNEKLSKKDKEKELKNLFTEEKNQQINNLIRLMLGYKADIVKIFDIEDVNDKVSISFSEEGDDGYNEAVELLESKLEEDFYIFESLKKIYGYLIISDLLKNSNSSDEENTISRAMIEKYNEHSDDLVKLKKIYKEFIPHRYSSMFRHDNGNGYKNVKNYNVYINNISKCTREELYKAIKKDIADIKEPEVEEILNKIGNEKFLLKLNSTENAQVPYQLNLAELESIIDNQGQYYPILKMNKDKIISILKFRIPYYVGPLNRNNDNKRIFAWMERKSKDKIYPWNFEEVVDLEKSAENFILKMTNQCSYFPDCDVLPNNSLLYSEYKVLNELNKVRIDGKLLSTQVKLMMLCDLLRKEKNVTEKMIVKFLKNKGVIEKSDNPLIQGMQGEKRLANNLKSHIFFESLGFDVDGKDRETVENIIRWVTLFTDKKILKKKIRDTYNSELISNEVLKKILKRDFKGWGSLSEKLIDGVTTTNKKFENGTILDILKISNMNFMQIISDENLGFNKIIEEKNSRVIEKITIEDIESLHGSPSIKRGIWQSVRMVEEIISIMKNQPRNIFIKVNKEEGPKRRTIPRINRVDNLYEEIKKSRILNIDEQIQEVIDKTKKDKGNIDDNKLYLYLLQNGKCMFTGENLVLEDLSKYRISYIIPKSIIEDNSISNKVLVKYAGNHRGPNGIIIKEDIRNNMKPLWDKMLRVKLISFKKYKNLTAYKFSKEHIENLMNKELVETRQITKHVANLFRNCYIDTDVVTVKATLVERLRRKYELFKVQNLNDFHYAHDSYLTGLLGTFLMKRFPTFRERFYFDVYDNFNFRESGAEYGFIIEEFGKDIKNHNLELVWNSKKIIEKMSKSLDYYDCFISYKKEEKVGGFYNQNPSAKSSGNLMPLKKGLDTELYGGFSQISKSYLLAVEGKRKNKVISTLANCPVVLRNRTMEEKIEYISRDKGLENLKILNDKIMLNQLILKDGMYQLLKSDIEIINAVQIVLPKGQKRVLYNIERKMYKNISSDEVTILFDVLMEKIERFYPVYNKIRGKLLENRGVFIDLSIIEKCQIILEILKLLQANSTRANFKILGLSSDVGRQTKIGIKLSELIFVERSVTGLYEKKWKVV

SEQ ID NO: 22011 - protein, 1391 aa, unidentified
  REGION 1..1391: note = Cas Enzyme sequence
MTKVNKDYIVGLDIGTDSCGWVATDKKNNILKLQGKTAIGSRLFEEGHSAADRRTFRGTRRRLNRRKWRLKFLEEIFDPYMTKVDPYFFARLRESGLSPKDSTKNTQAIIFPTPKDDSDFYYKYHTIYHLRQALMSEDKKFDLREIYLAIHHIVKYRGNFLQNTPVKSFNASKINVKKTIKALNQLYAGSSNENQIELNIENTSKIEDIIRSKTTFKMDKAKQISKLLAMSSENKDINKQNRNIAKQITNAILGYKTQFETILSKKIDKNDKATWEFKLSDADVDDKLAILLPDLNQSEQGIIDEIKQLFSAVTLSDIVDEGKTLSESMIRKYNDHKKDLKLLKDVVRSQKDKDKAKRLSLAYDLYVNNQHGKLLEAKKAFKVMDKDKFYKIVKNNVDDSESAKTILKEIELDSFMPKQRTNQNGVIPYQLHQIELDKIIKNQSKYYPFLAEKNPVIDHQKQAPYKLDELVRFRVPYYVGPMITATDQEKTSGKNFAWMIRKEQGQITPWNFEQKVDRMASANKFIKRMTTKDTYLLGEDVLPANSLLYQKFTVLNELNNIRINNHRISVDVKQDVYKNLFKKYKTISSNKLSNYLKNNYNLKFVKITGLSDKSNNSKFNSSLATYYQLKHLNILGDKIDDPNYQKDLEHIIEWSTVFEDKSIYAAKLKTIDWLNVEQIKALSNLRYQGWGRLSHKLLTGLHDKNGQNIMKKLWDSQKNFMQIVKEPDFKAAIEKENQSVVKATDTEDILADAYTSPANKKAIRQVIRVADDIVKAASGKAPSQFAIEFARESEKNPKLSQIRGSKLRKSYEKVFENSANKLVDVSLKEELDNSIKSRKLVRDKYFLYFMQGGRDAYTGERINIDEVDTKYQIDHILPQSFIKDDSFNNRVLTLAKINNEKSDRLPFNYSNRPADKGRLGMTMHQMWHEWLESGLISKYKYRNLILDPNQVSKYQKSGFINRQLVETSQIIKLVATILQAKYPDSEIIVVKAGYNHALRERLNLYKSREVNDYHHAIDAYLTTICGNFLYQVYPDLRPFFVYGQFKKFSSNPDLEKQALKKHKKFDFIWPLLKRKDASEEIHQFKMGPVVFHKHEDIFNKLRRAYTFKYMLVSREVTTRDQEMFKMTLYPRADHDIKKSRKLIPKSKNMPTNIYGGYTSNSDAYMALVKIKKERSFIYKIIGVPMRALSKLKLAKKQGKYDQVLKDVLTPIIMLDKNGKTKRGIEEFRILKGKIPYRQIVLDDEKKFMLGSSTYVYNAKQLTLSNETMRIVTNNFTTKDDRSNLLNQAYDEILEKVDKYLPLYDINSFRNKLHKGKDKFSKLNIKEKEATLVEILNGLHDNSVMGKLKNIGFSTAFGQMQIPSGITLSPNAKLIYQSPTGLFEKRVKISEL

SEQ ID NO: 22012 - protein, 1268 aa, unidentified
  REGION 1..1268: note = Cas Enzyme sequence
  REGION 1264..1267: note = misc_feature - Xaa can be any naturally occurring amino acid
MTKVNKDYIVGLDIGTDSCGWVATDKKNNILKLQGKTAIGSRLFEEGHSAADRRTFRGTRRRLNRRKWRLKFLEEIFDPYMTKVDPYFFARLRESGLSPKDSTKNTQAIIFPTPKDDSDFYYKYHTIYHLRQALMSEDKKFDLREIYLAIHHIVKYRGNFLQNTPVKSFNASKINVKKTIKALNQLYAGSSNENQIELNIENTSKIEDIIRSKTTFKMDKAKQISKLLAMSSENKDINKQNRNIAKQITNAILGYKTQFETILSKKIDKNDKATWEFKLSDADVDDKLAILLPDLNQSEQGIIDEIKQLFSAVTLSDIVDEGKTLSESMIRKYNDHKKDLKLLKDVVRSQKDKDKAKRLSLAYDLYVNNQHGKLLEAKKAFKVMDKDKFYKIVKNNVDDSESAKTILKEIELDSFMPKQRTNQNGVIPYQLHQIELDKIIKNQSKYYPFLAEKNPVIDHQKQAPYKLDELVRFRVPYYVGPMITATDQEKTSGKNFAWMIRKEQGQITPWNFEQKVDRMASANKFIKRMTTKDTYLLGEDVLPANSLLYQKFTVLNELNNIRINNHRISVDVKQDVYKNLFKKYKTISSNKLSNYLKNNYNLKFVKITGLSDKSNNSKFNSSLATYYQLKHLNILGDKIDDPNYQKDLEHIIEWSTVFEDKSIYAAKLKTIDWLNVEQIKALSNLRYQGWGRLSHKLLTGLHDKNGQNITEKLWDSQKNFMQIVKEPDFKAAIEKENQSVVKATDTEDILADAYTSPANKKAIRQVIRVADDIVKAASGKAPSQFAIEFARESEKNPKLSQIRGSKLRKSYEKVFENSANKLVDVSLKEELDNSIKSRKLVRDKYFLYFMQGGRDAYTGERINIDEVDTKYQIDHILPQSFIKDDSFNNRVLTLAKINNEKSDRLPFNYSNRPADKGRLGMTMHQMWHEWLESGLISKYKYRNLILDPNQVSKYQKSGFINRQLVETSQIIKLVATILQAKYPDSEIIVVKAGYNHALRDRLNLYKNREVNDYHHAIDAYLTTICGNFLYQVYPDLRPFFVYGQFKKFSSNPDLEKQALKKHKKFDFIWPLLKKKDAPEEIHQFKMGPVVFHKHEDIFNKLRRAYTFKYMLVSREVTTRDQEMFKMTLYPRADHDIKKSRKLIPKSKNMPTNIYGGYTSNSDAYMALVKIKKERSFIYKIIGVPMRALSKLKLAKKQGKYDQVLKDVLTPVIMLNKNGKTQRGIEGFRILKGKIPYKQVVLDGEKKFMLGSSTYVYNAKQLTLXXXXL

SEQ ID NO: 22013 - protein, 936 aa, unidentified
  REGION 1..936: note = Cas Enzyme sequence
LYRELSIKESLSETEIIKLLFGSKKGLSLNFRKVEGNRTMALFVRACQTVLAINGYNDYDFSKMSYDKAMPIITQVFEALGFNTSFLTFDPTLDGKDFERQAAYQLWHLLYSYSGDNSATGNEKLIERLCAILNMDRDSAAVFASITFEPDYGSLSAKAMRRILPHMMDGLEYSVACEYAGYRHSRRSLTKEEIAAKPLVETIPLLPRNSLRNPVVEKILNQMINVVNAVSDRYGKPDEIRIEMARELKRSAKEREKMTRDIARATAENEKYRKILQEKFNKQNVSRNDIIRYRLYLELEANGFKTLYTQTYIPREKLFDKEFDIEHIIPQARLFDDSFSNKTLEARSANIEKGSTTAYDYVLTKYGEQGDNGSVKYKERIDSLYKEGVISKTKHDKLLMTTAEIPNGFINRDLRDTQYIARKAREILESAVRVVVPTTGAVTDRLREDWQLVDVMKELNWDKYDQLGLTEIYKDPDGRQIRRIKDWTKRNDHRHHAMDALTIAFTRHSFIQYLNNLNARSDKAGSIYAIEKKELYRDSNNKLRFVPPMPLGEFRAEARRHLEDVFVSIKAKNKVVTRNVNITRGADGKKHRTVQLTSRGQLHNETVYGSRQQYVVKLEKVGSAFNEEKISTVSSPLIREALLRRLAEFGGDAKKAFTGKNSLEKNPIYLDDSHTKQVPQKVKTVTLEEVFTIRKPIDKDLNVEKVVDLRVRKLLQERLAEYGGDAKKAFANLDENPIWLNRERGIAIKRVTIYGVSNATALHDKRDMHGKKMLNSNGISIPVDYVSTSNNHHVAIFRDKDGNLQEHVVSFFEATERAQQQLPIVDYEYNKHLGWQFLFTMKRNEYFVFPNEKTGFDPNEVDLLDPKNAAEISKNLFRVQKLTTKDYFFRHHLETNVDTPKELSGITYARLSLKGIVGIVKVRVNHLGEIVAVGEY

SEQ ID NO: 22014 - protein, 1423 aa, unidentified
  REGION 1..1423: note = Cas Enzyme sequence
MALQKKSQHTAYEQERKYAMKKLKQMSGPYSIGFELSSTAHGFVATDPNGNVLYHGKQPVMGTRVFKEGQHAAEARMPRTSRRGIQRRRGREHEMERVFAPVISPIDPDFFIRRRMSYKLGKIRFESDPIGFSYSCLFHSFPTLAHLDVALMESDSAMDPRLIFEAVANHVVRRGHFLLENQNVSSTNSDIDTQVANYAEVLVSYFEDTLDERIEPSLEALDINGNVTARELQKRFASAMCVSGDDIQKKTEKAQIKAIADLVAGYKADLTVLVPDAEKLPKVSISDGDALEEFLADSCPDSLVPVLMAAQALYTSWKLQGMLSYAPGKSLSHNQVAQHDVYGKQLRMLKDLALKYVAKQDANGNVDEDGFKDYVRFFGGPKREDGYRYDKVQVKKQDSPKNNMGYTAYNLNVLGYEEFAKRVELLFKDTDAVNDPQYKTMMEAFANHAFLRRIHTVDNAAIPYQLHVEVVNRIIDNQGRFYPWLIDAREHILKVLTSRIPYYVGPLDSTDHGKAGENGTRFAWVKRLAGHEDAFVSPWNYEDHIDIDTTAELFIRRMTGECSYLDGEDVLAKNSLLYEKYCFFNELASLSFTEDGDSWMPFDAGMRRAIYDAASDGKTMTVKRIESVLQRDFFIAHPHVRGTSNPKAMSSKRSNYAYFCRLFDVKALSASDMSMAEDLVLWNTVFEDRDILRRKILKTYGDLLTEKAVDDFCHKRLSGWGKLSERLLTGIWADTASGDMCVMDVLEQGRPYGRYRGSSMNLMQILNDDVLGFKMEIKRLNDSHMQTAEGFDLNALPGSPALRRGVSQAMKVLDDIVSVAGKAPDRIYLKVTRTASNSRKGKRTAKRCDKIKQALKALDADAAADLGAAKLLRELGMFDEKEINERIYLYFHQAGKCLYTGKPIDITRIASNDYYVDHVVPLAYRKDESLDNKVLVYAEASRYKSETLLVSPAVQRKMLPFWRMLRNAGLMSERKLNALIRTEISEGMLKSIIGRQFTENSLEAKLFTAAIAAKYPGTVVIPVKAGVIGAVRSRIGIPKSLKANQFYHAHDALLAAEVGRYMELAKPALVHNRVKYEQYMRKIKLVDEENKKAPKSQLDFFAGGFFFDRVDKDTGEVYWNKDEEVERIYRACGWKNLRVTYAAFEDGGAFWKQTIYSPREKSKLIATKSDRPAEIYGGYSSQTFANFFVYEVMKKKVKQLRFGAVPAAIASKSDPDTYNAMLEMYARGLAKTAKEKFVRIVRARVLKNTMIELYGERFRIAGEKQVYPVRQMPLAIDEVYLLKGVETIAAAGNAGASAKIDFEKAAESLVGFWDLLLEKLPVNYPKLTVQLKLGSLKHPKDILAATSESEFPAIVYKIAEAEIQVMEQASGLRNMSDTKILGGNTFGGSLVFTFNKVLNDPKSKACFIDTTPAGLHEVKTKVW

SEQ ID NO: 22015 - protein, 1092 aa, unidentified
  REGION 1..1092: note = Cas Enzyme sequence
MKYIIGLDIGIGSVGWAVVRNDDDCKRLEDFGVRIFESGEIIESNKNIRKSQRRRKYRGMRRRLRRRNHRKERLKNYLENIEFVSRAELSEFFAKNNHDIIDIRVRALDEKVTPVELTAALLHIAKRRGYKAFYELSDENNNAKDKKAKEEEKDIYKALTNTADVIKNGGYRSIAEAIMKDSEHFSDKISGRYKYRNIKEKDEKGKKKSDGKISENDILFPTEMFEDEVRKILGKQKEFYPQLTDESIDKIFDIIFSRRDFEDGPGNADDENRPYKGFVDSIGNCPYYKNEKRGHRYTVIGDLFALANKLSQYKYVEKNTGEVVKLPRDLMRNIVNQSLQSGNITKTKINELAKELNIVILNTKTAKNENIADCIKYLKAVKPIFESYGFDWDKLISEEYTDQNSLLNRVGDTISFNITPKRRIDALNKIDELKGKDELIKKLSKQNFSGTAKVSDKYMIDAISAFFDGTLVGEFQANVQQDEFSVSIKTEKLLKLKPFDNNSEYAQNPVVFRAINETRKVVNAIVQKYGAPNAMNIEIASELNKSFDTRQKISTQQNKNEKERKNAIKQISLITGLDEGEIRPQYIERYLLGELQGWRCMYSNEEITNKEEAILNKGKQYEIDHIVPFSRILDDTLNNKALVLARENQKKGARTPLMYLSAEKEKEFKQRVNKLFKDNKITEKKYRYFMLESLVGEDAEKILGDWKTRNLNDTRYIAKFLVKYFNDNLYFAREKGDDKRPAVYAVKGAITSSLRRQWLNKETWGRYDKGELKKITYFDHAVDAIVIANCLPAYVIIAAENHKLRDIYYSAGKIKTEEYRKSLDNCVDTLMKYYGMSPTVSRKLLEKVKETPSLLKNIRFEVEYRVRDYELMKYFFNYDTKVGEDTLDQIFRNDLYKIYNHQFADSIEMPIVSIKPERKYSGQMVKDNFLKKRVANSENKYVKTIDKNNDALLDNSYYYCVEVYRTRSGNTDLQGIKYTDLVNKNKKLYLKPCYKYPENYYKHIMYLFKGDYLRIKGPKSTRLGFYKAVNNINQNSIKITRYNSKYTRAFREESTAISADAEIEKIYVDILGKKGKVLTKHGEPLSLLPEKN

SEQ ID NO: 22016 - protein, 1218 aa, unidentified
  REGION 1..1218: note = Cas Enzyme sequence
MEIDTKQRILGLDTGTNSLGWAVVDRLPEGYKLVDKGVHIFQEGVTIENGNQEKSRAAERTEHRSLRKQYWRRKVRKIHLLAVLSNAGLCPPLTSEELHTWRVDGVYPLANEAFMRWQRTDENKGVNPYAARCQCIERELDMENKNDRYLLGRALYHIAQRRGFLSNRKDQTNNKETGVVKEGIKELTQKINDAGCEYLCQYFYQLYQRGERIRSCYTDRKEHYEKEFAAICEKQHLNGALVEKLYKIIFVPRPPKKQNNAIAKCPFEPSKHCAPISHPLYEEFRMWSFIRNIKVQTPDDIDLRALSADEISKIQRLWYRYKKGQTNYNFHFEEIAKALAGKGKYCYYKSAEDKPFRFNYYLDSNVAGSPVSAQLKDIFGENILQDREALDKIWNALDFFTDDVKLSEWGIKHYNLTDEQADKLAQMRLPEGYASLSLKAIENIVPLMRDHALMYSSATLIAKLRDLLKDYDFDEEVDAYLINDIEDYLTIPTDKNGKPLMSREERKQILDRKWQTHYNLSDKDLKKLYHPSMIEAYPKVENKTDGVYQLKSPRISALKNPMVMRSLFRIKAVVNQLLKEGTIDENTIVHIEFARSLNDANRRAALLRYQTILRDERESAREEIKKYVPNPTDDDILKYLLWKDQGGVSVYTGTPIPPDLLFKGDQYNFEHTVPRSMGGEWTRENLTICEQHFNTDIKGSQLPSQLSEQYKQIFEAQIQAWKDKYEDLDKQIRKLQKQSSGATTKEAKDGIIKKIRLLQLQSKFWHDKYEAFTIEEDKVKGFTRRQGTDISVINRYGRSFLQTLFERVDVVKGTMTAAFREAWDIQEPYEKKDRTNHVHHCIDAITIACMGKREYDKLSEYCHEEEANRHRLHGVRLPKPWPTFTEDIKDIEKEILVSHYTPNPMGKQTKKKLRDSRGHIIRDKDRQPLYAAGDTARVVLHNDKIYGKILNSHNIDPKHPSGKECTVKRIPLAEVKVDEVVDPIVKQVIANAIAKYGSIKAAIEAEQDNNDGSIWLNKEKNVRLKKVRCFQDFASGAEPIRALRDTSTKEHKRFHYSRPDGNYVAAIYEGTDKKGNRKRTSVIVTNLDAAKAFNKHQPIVPETKDGYPLLCTIKKGDLVLLYENSPEELHNATQAELSKRLYKIAKMSDSNGLQITIRYHQEAREATKLKELFGNPKTGLYDCSQEIYPQRRLSYNQFNALVQGQHFELTETGKITFI

SEQ ID NO: 22017 - protein, 1458 aa, unidentified
  REGION 1..1458: note = Cas Enzyme sequence
MTSKTILGLDLGTNSIGWALVQQNFELQQGKIVGMGSRIIPMSQDVLGEFDKGNSVSQTADRTKFRSTRRLRERYLLRRQRLHRVLNILGFLPKHFSDQIDFEKQLGQFKGESEPKLAYDNKQFIFQSSFLEMLKEFKIHQPSLVENGKKIPYDWTIYYLRKKALTQKITKEELAWLLLNFNQKRGYYQLRGEEEEENPNKRIELYSLKIVDVTADEQQKGKDDIWYSLVLENGWIYRRSSKIPLFDWKDKIRDFIVTTDLTDEGRVKTDKEGTEKRSFRAPSPDDWTLLKKKTEQDVDRSNKTVGAYIYDTLLQNPNQKIKGKLVRTIERKYYKEELQEILAKQIQENLELQNESLLADCIRELYRNNENHQNTLKGKSFLQLFINDIIFYQRPLRSQKSSIGNCSLENRSYKDANGVQQTVPLKAIPKSNPVYQEFRIWKWMSDLSIYRRDNDVNVTHQFFKSHKDYEKLFEELSGKKEIKQEVLLKYLAEQTGFKGKAANAEAATYRWNFVEDKTYPLNETRATIASRLAKVKDLQENFLTQEREHHLWHIIYSVTDKIEYEKALKSFARKNKIDEVSFVESFRKIPPFKPEYASYSEKAVNKLLPLMRLGRYWIWESIDADSRTRIEKIINGEFDENISTRVREKAKTLTEHDHFQALPDWLAKYMVYGRHSEAADLSKWNSVDDLGRYLNNFQQHSLRNPIVEQVVTETLRVVKDIWKRYGNGAKDFFDEIHVELGREMKNTAEDRARITNQVTQNENTNLRLKALLAEMLQQGDVENVRPYSPTQLEILKIYEDGVLNSDIEVPDDILKISKTTQPTSKELLKYKLWLEQKYRSPYTGEMIPLNKLFTPAYEIEHIIPQSRYFDDSFGNKVICEAAVNKLKDNQLGFEFIKNHHGEKVETGFGNTVTILQEDAYLDFVKTQYSRNRSKKAKLLIEEIPEKMIHRQLNDTRYISKFISSVLSNIVRAEKDDDGLNSKNIIPGNGKITSQLKQDWGLNDVWNDLILPRFERMNEITKTSVFTAYSKVHQKYLPTVPLEFSKGFQKKRIDHRHHAMDALIIACATRDHVNLLNNQHSNSNEKRYDLQRKLRRFEKAKYFSKSENRSIERDVPKEFLKPWATFTSNAKAQLETMIVSFKQNLRVINKATNRYESYKDENGNLRMGKDGKPKKDIIPQTKGDNWAIRKSLHKDTISGKVDLPRVKVAKGKILSATRKSIDPSFNNSIIESITDTGIQKILKNFLASKGGNPELAFSPEGLEDMNKNIEKYNEGKPHKPIYKARIFEPGSKFPLGQKGNKKDKYAEADRGTNLFFAVYWDDEKKKRNYETIPLNEVIEHQKWQATLTKLEREQTPIIPVKAENGSFLFSLSPNDLVYVPDIVEDLESEKAKPNCIYKVVSFSGNQCFFVKQDIATSIVNKAEYSTLNKMERSIDGKMIKESCIKIEVDRLGNIRRRIL

SEQ ID NO: 22018 - protein, 949 aa, unidentified
  REGION 1..949: note = Cas Enzyme sequence
MRDSITAPRYSSALAARIKEFNSAFKLGIDLGTKTGGVALVKDNKVLLAKTFLDYHKQTLEERRIHRRNRRSRLARRKRIARLRSWILRQKIYGKQLPDPYKIKKMQLPNGVRKGENWIDLVVSGRDLSPEAFVRAITLIFQKRGQRYEEVAKEIEEMSYKEFSTHIKALTSVTEEEFTALAAEIERRQDVVDTDKEAERYTQLSELLSKVSESKSESKDRAQRKEDLGKVVNAFCSAHRIEDKDKWCKELMKLLDRPVRHARFLNKVLIRCNICDRATPKKSRPDVRELLYFDTVRNFLKAGRVEQNPDVISYYKKIYMDAEVIRVKILNKEKLTDEDKKQKRKLASELNRYKNKEYVTDAQKKMQEQLKTLLFMKLTGRSRYCMAHLKERAAGKDVEEGLHGVVQKRHDRNIAQRNHDLRVINLIESLLFDQNKSLSDAIRKNGLMYVTIEAPEPKTKHAKKGAAVVRDPRKLKEKLFDDQNGVCIYTGLQLDKLEISKYEKDHIFPDSRDGPSIRDNLVLTTKEINSDKGDRTPWEWMHDNPEKWKAFERRVAEFYKKGRINERKRELLLNKGTEYPGDNPTELARGGARVNNFITEFNDRLKTHGVQELQTIFERNKPIVQVVRGEETQRLRRQWNALNQNFIPLKDRAMSFNHAEDAAIAASMPPKFWREQIYRTAWHFGPSGNERPDFALAELAPQWNDFFMTKGGPIIAVLGKTKYSWKHSIIDDTIYKPFSKSAYYVGIYKKPNAITSNAIKVLRPKLLNGEHTMSKNAKYYHQKIGNERFLMKSQKGGSIITVKPHDGPEKVLQISPTYECAVLTKHDGKIIVKFKPIKPLRDMYARGVIKAMDKELETSLSSMSKHAKYKELHTHDIIYLPATKKHVDGYFIITKLSAKHGIKALPESMVKVKYTQIGSENNSEVKLTKPKPEITLDSEDITNIYNFTR

SEQ ID NO: 22019 - protein, 1027 aa, unidentified
  REGION 1..1027: note = Cas Enzyme sequence
MSKSDRGLVFGVDLGKASCGLAIIDYEAKEVKLLSSRIIKAPENRSGKSLAAVRREKRSTRRQIDRRAARKKNVLKVLKQFGVTPQDSDCTWFGTKKNGNDGIDLPVIVLRSQGLDRQLSNREWARILYWFCSQRGYINRGEETLINGETSVEGTSESEEAGKVLSAISENKKALKESGYRTFGEYLYKESYVTTHSYRNKAGDYKHCVSHPMVVDEIKELFEQQKKFGNTHTSEEFKDAYLEQLNWLKDTKAFDKLTYQKVGYCVYFDQYSDEPQKRAANADLISEVVKAYEKLGNIRLKFDDKPEQSLTREVRDAVINEMFSVHQGAKVKSVTFKTLRKLIDDDNLVGFKGVKSDLEKNPVFVPKAWNTFCRVLSASESGIQLLNRMKNDFKLANAIAESLTYASSLDSLERRISMYQEKESLEISEDELALIESLPYNTKIFKGYGSRSIQALEMLHNQFLDGEAFTLDEAEKQSGLQGFRLREKGIRQSLLLPYSDYDVQCTNPVVLRVLAQARRMINSAIKQYGMPNIIRIELGNDIAKSAKEKSKIAKGQNENRKENERIKDKIAELLHIDQSEVTGKQITKMKLYEEQGGKDIYTGEGLGDIAFAGGRRFLIDDNYCEIDHVLPYSRSADDLKSNKVLVLAKSNQEKGNRTPYEWMNSNDGSHPNWEQFCLRVSSNVRLSDGKKSKLLEENFAEKETSFIKRNMVDTQYMARAISAWLSDSLNFSSEFDQKQHVYAVNGRMTAKLRRKWGLNFGEDDTKDRSDNRHHAIDAAVIAACSASMVKEFAISYSRLREVRDSVIAEPWEGFADQVREARKWVIPTMYRPNKKNGLIYEETKYKYLGKEVGDKKIVHILKGKKQGVGTVDLFRDPTGGQFARILGDRAYIRLWLDEEGKSGRGEWLIEPVYFADLDKIKRGSYVPRYIPRQKVTTQEWESIPPRITENSIPIVLRNDDIVRIDGIYGRLSGLDINSKRLKFDRILSKDVKTIGSWTKDTSVEVIHEDCLGLMWFNLLKDQNSKES

SEQ ID NO: 22020 - protein, 1352 aa, unidentified
  REGION 1..1352: note = Cas Enzyme sequence
MSKDPYYIGLTVGPEYAAYAVTNESYNLERFKGQDMWGIYKFKEAETSANRTAIRSARKNIKKEKKRINLLKAYFYDEIMKVDKNFFIRLDNSSFFPEDKEKALNGSRNVLFDDDNYKDADYYNQFPTIFHLRSFLANSKEKADIRLVYLAVSNIMKHRGNFYTKNLEDTSNSVKDIYLNICQLASQSDIHLDEKADTDKLMEILLNPAINNKTKAVLAAQTVKALTKQETALIKLMCGLKIKLVDMFPELADSLEESDKKASISFFDNNYIDNVDSIEKLAGEDNFALVSAVKELYDAVIIQNIIQGHKFISDAKMASYEKHMNDLKLLKSVLRNNVTSKEFNRFFRLEEPGTYAAYVKSNNSYGKRTRRGSDKGRTQDDLYSSIKKLLSKADENDSDAEYILDEISKGTFMPKQRITDNRLIPNQLYASELKAILDNSAKHYDFLNEKDESRMTVSERILSVFTFTMPYFVGPTSEYNSRGWAVRKEAGVVMPWNLETKVDIKESAKNFIENMVGKCTYLSGERVLPKASLLYEKYAVLNEVNNIRVDGNKLPVEVKQEIVNRKLMAGKKLTKKQIHSFLVKKGLADMDSLITGIDDKLNNTMSSYKFFSEVFGTLDKDTEVMAENIILWSTIYGTSKTYVKEQIENKYPGKLTAEQMKKVLNFKSDDWGRLSAEFLNMRGSNKETDERISVIDLMWNENISLMELINDERYDFMSVIKEKSKKEVKSIFTFEYDDLNELYATAAQKRAIWAAVKIVREIIKIKGYAPESIFLDTKKMRPKDKKDNRKSRLIDLYKGLKDVSKEWKETMINRIDECDKDGSLKSKKVYLYFLQMGKDMYTWEDINFNVVKTTGDNIYNIDHIYPKHFVKDESLDNIVLTNSEFNGEEKKDIYPVPDKIYEAMHGNWLILRKNGFMSAEKLARLSDRHPMSDEKRASFIGKSYIQATSSTKMLAEVFNSIFNKDTKIIYAKTQEVADFRKQYGFAKATIYNDHYLAKDAYLNIVVGNVWYTKFTSSPIWFIEKEYRTGKAEYNLNRMYDFDVIRNDRVAWIAERKKKDIAGSIAVVNKVMAKNTPITTTKKLDGHGQITEATLYKGSKTKPEYFPIKTSDDRFKDMAKYGGKTGIANTYAFLVEFTDKKKGRMRCLYTIPLYMADNIKDKKDIEKYCTEKLGLTNPDVRINKIAPGSELEIDGYSYLLGGRSVNQFHVTNNIPMIFSQEWQSYISKIEKYINFKVVDKAVSAEKNLELYDEILSKHSTGVFSKKKLPMYERLLAARKKFIKLSVEEQLQVICQMLTLTRMGTNMANLSLIGEGSSVGIMNMSCNLSKNNSVILVERSITGLYKKKIDMLTV

SEQ ID NO: 22021 - protein, 1183 aa, unidentified
  REGION 1..1183: note = Cas Enzyme sequence
MGSRVVPLTNLGDDKAFSKGKAFTANQERTARRTMRRGFARYQLRRYRLRRELEKVGMLPDAALIQLPLLELWELRERAATAGRRLTLPELGRVLCHINQKRGYRHVKSDAAAIVGDEGEKKKDSNSAYLAGIRANDEKLQDEHKTVGQYFAEQLRQNQSESPTGGISYRIKDQIFSRQRYIDEYDQIMAAQRVYYPDILTDEFIRMLRDEVIFMQRPLKSCKHLVSLCEFEKQEKVMRVQQDDGKGGRQLVERRVKFGPKVAPKSSPLFQLCRIYEAVNNIRLTRPDGSPRDITPEERDKLVAYLQTYEAPKPPKRKPAKAKPVKLAHPKLDLDKLKELLCIEEELLADKLLEEGLKGDATRIALSIILQPYPQYHHLLDMELETRMMTVQLTDEETGEVTEREVAVVTDSYVRKPLYRLWHILYSIEERDAMRRALITQLGMKEEDLDGGLLDQLYRLDFVKPGYGNKSAKFICKLLPQLQQGLGYSEACTAVGYRHSNSPTSEEIAERTLLEKIPLLQRNELRQPLVEKILNQMINLVNALKAEYGIDEVRVELARELKMSREERERMARNNKDREERNKEVAAKIRERGLYPTKSRIRKYMLWEEAGRQCLYCGQSIEEEQCLREGGMEVEHIIPKSVLYDDSYGNKTCACRRCNKEKGNRTALEYIRAKGWEAEYMERINGLLDKKAISYKKAISYSKYQRLRWLKEDIPSDFLERQLRLTQYISRQAMAILQQGIRRVSASEGGVTARLRSLWGYDDILHTLNLDRYDSMGETERVSREGETTEKLRIKDWSKRKDHRHHAIDALVVASTRQGYIQRLNRVNSESEREAMSGEIEVQKATKTDKLSLLERWLTQRPHLSVCAVSDKVAEILISYRPGKRVVTRGRNIYRKKTADGREVTCVQRGVLVPRGELMEASLYGKIISQGRERIVKRYPLHDLKGEVVDPRLRELIAEYNQEITSKVKAKGASLYLDAAEKQEVRSVRCYVDKPSVSSAIPIRFDERGTAIAFVQSGNNHHLAVYRTPQGVLEESIVSFWDAVERVRYGIPLVITHPREVMEQVLQRGDIPESVLKSLPPSDWMFVESLQQDEMVIIGLSDEELQSSVEAQDYRKLSEHLYRVQSLSSKYYVFRYHLETSVKDRKNTSGRIPKFHRVRNLPDYEKRNVRKVRVDLLGRISLL

SEQ ID NO: 22022 - protein, 1214 aa, unidentified
  REGION 1..1214: note = Cas Enzyme sequence
MSKHVLGLDLGVGSIGWCLIALDEQGDPAEILGMGSRVVPLTNLGDDKAFSKGEAFTANQKRTARRTMRRGFARYQLRRYRLRRELEKVGMLPDAALIQLPLLELWELRERAATAGEHLTLPELGRVLCHINQKRGYRHVKSDAAAIVGDEGEKKKDSNSAYLAGIRANDEKLQDEHKTVGQYFAEQLRQNQSESPTGGISYRIKDQIFSRQRYIDEYDQIMAAQRVHYPDILTDAFIRMLRDEVIFMQRPLKSCKHLVSLCEFEKQEKVMRVQQDDGKGGRQLVERKVKFGPKVAPKSSPLFQLCRIYEAVNNIRLTRPDGSPRDITPEERDKLVAYLQTYEAPKPPKRKPAKAKPVKLAHPKLDLDKLKELLCIEEELFADKLLEEGLKGDATRIALSIILQPYPQYHHLLDMELETRMMTVQLTDEETGEVTEREVAVVTDSYVRQPLYRLWHILYSIEERDAMRRALITQLGMKEEDLDGGLLDQLYRLDFVKPGYGNKSAKFICKLLPQLQQGLGYSEACVAVGYRHSNSPTSEEITERTLLEKIPLLQRNELRQPLVEKILNQMINLVNALKAEYGIDEVRVELARELKMSRKERERMARNNKDREERNKEVAAKIRECGLYPTKPRIQKYMLWEEAGKVCLYCGRSIEEEQCLNGDDMEVEHIIPKSVLYDDSYGNKTCACHECNQTKGNRTALEYIRAKGWEAEYMKRINDLLKEKKISYSKHQRLRWLKEDIPSDFLERQLRLTQYISRQAMAILQQGIRRVSASEGGVTARLRSLWGYGKILHTLNLDRYDSMGETERVSREGETTEELHITNWSKRMDHRHHAIDALVVACTRQSYIQRLNRLSSEFGREDKKKEDQEAQEQQATETGRLSNLERWLTQRPHFSVRTVSDKVAEILISYRPGMRVVTRGRNIYRKKTVDGREVTCVQRGVLVPRGELMEASLYGKILFQGRERIVKRYPLHDLKGEVVDPCLRELIVKSKGAPLYLDAAEKQEVRSVRCYVTQPSVAKAIPIRFDERGRAITFVQSGSNHHLAIYRTPKGKLVESIVSFWDAVNRARYGLPLIIKYPRKAMEQVIQREDIPESVLSLLPPADYEFVEVFQQNEMAVVGLPEEEFRRAVDTQDYRTLSEHLYRLKRISSKDYEFHYHLDTDDPDETDSSKKKKKRVRNTSGRIPRIYRIRGIGPLQKKNVRKVRVDLLGRISLL

SEQ ID NO: 22023 - protein, 1079 aa, unidentified
  REGION 1..1079: note = Cas Enzyme sequence
ELGRVLCHINQKRGYRHVKSDAAAIVGDEGEKKKDSNSAYLAGIRANDEKLQDEHKTVGQYFAEQLRQNQSESPTGGISYRIKDQIFSRQRYIDEYDQIMAAQRVHYPDILTDAFIRMLRDEVIFMQRPLKSCKHLVSLCEFEKQEKVMRVQQDDGKGGRQLVERKVKFGPKVAPKSSPLFQLCRIYEAVNNIRLTRPDGSPRDITREERAKIVAHLQSSASLSFAALKKLLKEKALIADQLTTKSGLKGNSTRVALAAALQPYSQYHHLLDMELETRMMTVQLTDEETGEVTEREVAVVTDSYVSQPLYRLWHILYSIEERDAMRRALITQLGMKEEDLDGGLLDQLYRLDFVKPGYGNKSAKFICKLLPQLQQGLGYSEACAAVGYRHSNSPTSEEITERTLLEKIPLLQRNELRQPLVEKILNQMINLVNALKAEYGVDEVRVELARELKMSREERERMTRQNGERKKANDKVAEKIQKCGLFPTKSRIRKYRLWEEAGRQCLYCGRSIDEKQCLNGDDMEVEHIIPKSVLYDDSYGNKTCACRRCNKEKGNRTALEYIRAKGWEDEYMERINERLKAKKISYSKYQRLRWLKEDIPSDFLERQLRLTQYISRQAMAILQQGIRRVSVSEGGVTARLRSLWGYDDILHTLNLDRYDSMGETECVSREGETTEKLRIKDWSKRKDHRHHAIDALVVASTRQGYIQRLNRVSSESEREAMSGEIEMQKVTKTDKLSLLERWLTQRPHFSVRTVSDKVAEILISYRPGQRVVTRGRNIYRKKMADGREVTCVQRGVLVPRGELMEASLYGKILSQGRERIVKRYPLHDIKGEVVDPRLRELIAEYNQEITSKVKAKETPLYLDAAEKQEVRSVRCYVDKPSVAKAIPIRFDECGRAITFVKSGSNHHLAIYRTPKGELVESIVSFWDAVNRARYGLPLIIKYPRKAMEQVIQRDDIPESVLRLLPPADYEFVEVFQQNEMVVVGLPEEELRRAVDMQDYRTLSEHLYRLKGISSKDYEFHYHLDTDDPDETDSSKKKKKRVRNTSGRIPRIYRIRGIGPLQKKNVRKVRVDLLGRISLL

SEQ ID NO: 22024 - protein, 1146 aa, unidentified
  REGION 1..1146: note = Cas Enzyme sequence
MRRGFARYQLRRYRLRRELEKVGMLPDAALIQLPLLELWELRERAATAGRRLTLPELGRVLCHINQKRGYRHVKSDAAAIVGDEGEKKKKKDSNSAYLAGIRANDEKLQAEHKTVGQYFAEQLRQNQSESPTGGISYRIKDQIFSRQRYIDEYDQIMAAQRVYYPDILTDAFIRMLRDELIFMQRPLKSCKHLVSLCEFEKQERVMRVQQDDGKGGRQLVERKVKFGPKVAPKSSPLFQLCRIYEAVNNIRLTRPDGSPRDITPEERAKIVAHLQSSASLSFAALKKLLKEKALIADQLTTKSGLKGNSTRVALAAALQPYPQYHHLLDMELETRMMTVQLTDEETGEVTEREGAVVTDSYVRQPLYRLWHILYSIEERDAMRRALITQLGMKEEDLDGGLLDQLYRLDFVKPGYGNKSAKFICKLLPQLQQGLGYSEACAAVGYRHSNSPTSEEITERTLLEKIPLLQRNELRQPLVEKILNQMINLVNALKAEYGVDEVRVELARELKMSREERERMTRQNGQRKEANDKVAERIRQCGLYPTKPRIQKYMLWEEAGKVCLYCGRSIEEEQCLNGDDMEVEHIIPKSVLYDDSYGNKTCACHECNQTKGNRTALEYIRAKGWEAEYMERINDLLKEKKISYSKHQRLRWLKEDIPSDFLERQLRLTQYISRQAMAILQQGIRRVSASEGGVTARLRSLWGYGKILHTLNLDRYDSMGETERVSREGEATEELHITNWSKRMDHRHHAIDALVVACTRQSYIQRLNRLSSEFGRGNKKMEDLEAQEQQAKETGRFSNLERWLTQRPHFSVRTVSDKVAEILISYRPGQRVVTRGRNIYRKKTADGREVTCVQRGVLVPRGELMEASLYGKILSQGRERIVKRYPLHDLKGEVVDPRLRELIAVYNQEITSKVKAKGTPLYLDAAEKQEVRSVRCYVDKPSVAKAIPIRFDECGRAITFVKSGSNHHLAIYRTPKGELVESIVSFWDAVNRARYGLPLIIKYPRKAMEQVIQREDIPEPVLSLLPPADYEFVEVFQQNEMVAVGLPEEELRRAVDMQDYRTLSEHLYRLKRISSKDYEFHYHLDTDDPDETDSSKKKKKRVRNTSGRIPRIYRIRGIGSLQKKNVHKVCVDLLGRISLCSDAPQLP

SEQ ID NO: 22025 - protein, 1172 aa, unidentified
  REGION 1..1172: note = Cas Enzyme sequence
MGSRVVPLNNATKAIEAFNAGEAFTANQKRTARRTMRRGFARYQLRRYRLRRELEKVGMLPDAALIQLPLLELWELRKRAATAGRRLTLPELGRVLCHINQKRGYRHVKSDAAAIVGDEGEKKKDSNSAYLAGIRANDEKLQDEHKTVGQYFAEQLRQNQSESPTGGISYRIKDQIFSRQRYIDEYDQIMAAQRVHYPDILTDAFIQMLRDEVIFMQRPLKSCKHLVSLCEFEKQERVMRVQQDDGKGGRQLVERRVKFGPKVAPKSSPLFQLCRIYEAVNNIRLTRPDGSPRDITPEERDKIVAHLQSSASLSFAALKKLLKEKALIADQLTTKSGLKGNSTRVALASALQPYPQYHHLLDMELETRMMTVQLTDEETGEVTEREVAVVTDSYVRQPLYRLWHILYSIEERDAMRRALITQLGMKEEDLDGGLLDQLYRLDFVKPGYGNKSAKFICKLLPQLQQGLGYSEACAAVGYRHSNSPTSEEITERTLLEKIPLLQRNELRQPLVEKILNQMINLVNALKAEYGVDEVRVELARELKMSREERERMTIQNDKRKEANDKVAERIRQCGLYPTKPRIQKYMLWEEAGKVCMYCGRSIEEEQCLNGDDMEVEHIIPKSVLYDDSYGNKTCACHECNQTKGNRTALEYIRAEGREAEYMKRINDLLKEKKISYSKHQRLRWLKEDIPSDFLERQLRLTQYISRQAMAILQQGIRRVSASEGGVTARLRSLWGYGKILHTLNLDRYDSMGETERVSREGEATEELRIKDWSKRMDHRHHAIDALVVACTRQSYIQRLNRLSSEFGREDKKKEDQEAQEQQATETGRLSNLERWLTQRPHFSVRTVSDKVAEILISYRPGQRVVTRGRNIYRKKMADGREVSCVQRGVLVPRGELMEASLYGKIISQGRERIVKRYPLHDLKGEVVDPRLRELIAEYNQEITSKVKAKGAPLYLDAAEKQEVRSVRCYVTQPSVAKAIPIRFDERGRAITFVQSGSNHHLAIYRTPKGKLVESIVSFWDAVNRARYGLPLIIKYPRKAMEQVIQREDIPESVLSLLPPADYEFVEVFQQNEMAVVGLPEEELRRAVDTQDYRTLSEHLYHLKRISSKDYEFHYHLDTDDPDETDSSKKKKKRVRNTSGRIPRIYRIRGIGSLQRKNVHKVCVDLLGRISQL

SEQ ID NO: 22026 - protein, 1066 aa, unidentified
  REGION 1..1066: note = Cas Enzyme sequence
HVKSDAAAIVGDEGEKKKDSNSAYLAGIRANDEKLQDEHKTVGQYFAEQLRQSQSESPTGGISYRIKDQIFSRQRYIDEYDQIMAAQRVHYPDILTDEFIRMLRDEVIFMQRPLKSCKHLVSLCEFEKQEKVMRVQQDDGKGGRQLVERKIKFGPKVAPKSSPLFQLCRIYEAVNNIRLTRPDGSPRDITPEERAKIVAHLQSSASLSFAALKKLLKEKALIADQLTSKSGLKGNSTRVALATALQPYPQYHHLLDMELETRMMTVQLTDEETGEVTEREVAVVTDSYVRQPLYRLWHILYSIEERDAMRRALITQLGMKEEDLDGGLLDQLYRLDFVKPGYGNKSAKFICKLLPQLQQGLGYSEACAAVGYRHSNSPTSEEITERTLLEKIPLLQRNELRQPLVEKILNQMINLVNALKAEYGVDEVRVELARELKMSREERERMARNNKDREERNKEVAARIRQCGLYPTKPRIQKYMLWEEAGRQCLYCGRSIEEEQCLNGDDMEVEHIIPKSVLYDDSYGNKTCACHECNQTKGNRTALEYIRAKGWEAEYMERINDLLKEKKISYSKHQRLRWLKEDIPSDFLERQLRLTQYISRQAMAILQQGIRRVSASEGGVTARLRSLWGYGKILHTLNLDRYDSMGETERVSREGEATEELHITNWSKRMDHRHHAIDALVVACTRQSYIQRLNRLSSEFGRGNKKMEDLEAQEQQAKETGRFSNLERWLTQRPHFSVRTVSDKVAEILISYRPGQRVVTRGRNIYRKKTADGREVTCVQRGVLVPRGELMEASLYGKILSQGRERIVKRYPLHDLKGEVVDPHLRELIAEYNQEITSKVKAKGAPLYLDAAEKQEVRSVRCYVTQPSVAKAIPIRFNERGRAITFVQSGSNHHLAIYRTPKGKLVESIVSFWDAVNRARYGLPLIIKYPRKAMEQVIQREDIPESVLSLLPPADYEFVEVFQQNEMAVVGLPEEEFRRAVDTQDYRTLSEHLYRLKRISSKDYEFHYHLDTDDPDETDSSKKKKKRARNTSGRIPRIYRIRGIGPLQKKNVRKVCIDLFGRLSLL

SEQ ID NO: 22027 - protein, 942 aa, unidentified
  REGION 1..942: note = Cas Enzyme sequence
MQRPLKSCKHLVSLCEFEKQEKVMRVQQDDGKGGRQLVERKIKFGPKVAPKSSPLSQLCRIYEAVNNIRLTRPDGSPRDITPEERAKIVAHLQSSASLSFAALKKLLKEKALIADQLTSKSGLKGNSTRVALASALQPYPQYHHLLDMELETRMMTVQLTDEETGEVTEREVAVVTDSYVRQPLYRLWHILYSIEERDAMRRALIIQLGMKEEDLDGGLLDQLYRLDFVKPGYGNKSAKFICKLLPQLQQGLGYSEACAAVGYRHSNSPTSEEITERTLLEKIPLLQRNELRQPLVEKILNQMINLVNALKAEYGVDEVRVELARELKMSREERERMAEGNRRREKENKAIAEKIRESGLFPTKSRIRKYMLWEEAGEKCLYCGQILTLSQCLNGDDMEVEHIIPKSVLYDDSYGNKTCACRRCNKEKGNRTALEYIRAKGWEDEYMDRINGLLDKKAISYSKHQRLRWLKEDIPSDFLERQLRLTQYISRQAMAILQQGIRRVSASEGGVTARLRSLWGYDDILHTLNLDRYDSMGETERVSREGETTEKLRIKDWSKRKDHRHHAIDALVVASTRQGYIQRLNRVSSESEREAMSEEIEVQKAAKTDKLSLLERWLTQRPHLSVRAVSDKVAEILISYRPGKRVVTRGRNIYLRHGKKCVQSGLVPRGPLSKETVYGQITINGEPQIVCKYDLQSLKAKDVDYVVDLALRKRLKELLAQHGGKEKEAFAGDVYMDEAGTQGPIRSVRCFTGLDRAKMKAVKYDEQGEAVGFVATQNNHHLAIYRTPKGKLVESIVSFWDAVDRARYGIPLVITHPREVMEQVLQHGDIPESVLSLLPPSDWVFVDSLQQDEMVIIGLSDEELQRALEAQDYRKLSEHLYRVQAISSRDYYFRYHLETSVSDMRNSSGYIPKFYRIRSLKDYEKRNLRKVRVDLLGRISLL

SEQ ID NO: 22028 - protein, 1161 aa, unidentified
  REGION 1..1161: note = Cas Enzyme sequence
MGSRVVPLTNLGDDKAFSKGEAFTANQKRTARRTMRRGFARYQLRRYRLRRELEKVGMLPDAALIQLPLLELWELRERAATAGRRLTLPELGRVLCHINQKRGYRHVKSDAAAIVGDEGEKKKDSNSAYLAGIRANDEKLQAEHKTVGQYFAEQLRQNQSESPTGGISYRIKDQIFSRQCYIDEYDQIMAVQRVHYPDILTDEFIRMLRDEVIFMQRPLKSCKHLVSLCEFEKQERVMRVQQDDGKGGWQLVERRVKFGPKVAPKSSPLFQLCRIYEAVNNIRLTRPNGSPCDITPEERAKIVAHLQSSASLSFAALKKLLKEKALIADQLTSKSGLKGNSTRVALASALQPYPQYHHLLDMELETRMMTVQLTDEETGEVTEREVAVVTDSYVRKPLYRLWHILYSIEEREAMRRALITQLGMKEEDLDGGLLDQLYRLDFVKPGYGNKSAKFICKLLPQLQQGLGYSEACAAVGYRHSNSPTSEEITERTLLEKIPLLQRNELRQPLVEKILNQMINLVNALKAEYGIDEVRVELARELKMSREERERMARNNKDREERNKEVAAKIRECGLYPTKPRIQKYMLWKEAGRQCLYCGRSIEEEQCLREGGMEVEHIIPKSVLYDDSYGNKTCACRRCNKEKGNRTALEYIRAKGREAEYMKRINDLLKEKKISYSKHQRLRWLKEDIPSDFLERQLRLTQYISRQAMAILQQGIRRVSASEGGVTARLRSLWGYGKILHTLNLDRYDSMGETERVSREGEATEELHITNWSKRMDHRHHAIDALVVACTRQSYIQRLNRLSSEFGREDKKKEDQEAQEQQATETGRLSNLERWLTQRPHFSVRTVSDKVAEILISYRPGQRVVTRGRNIYRKKMADGREVSCVQRGVLVPRGELMEASFYGKILSQGRVRIVKRYPLHDLKGEVVDPHLRELITTYNQELKSREKGAPIPPLCLDKDKKQEVRSVRCYAKTLSLDKAIPMCFDEKGEPTAFVKSASNHHLALYRTPKGKLVESIVTFWDAVDRARYGIPLVITHPREVMEQVLQRGDIPEQVLSLLPPSDWVFVDSLQQDEMVVIGLSDEELQRALEAQNYRKISEHLYRVQKMSSSYYVFRYHLETSVADDKNTSGRIPKFHRVQSLKAYEERNIRKVRVDLLGRISLL

SEQ ID NO: 22029 - protein, 1380 aa, unidentified
  REGION 1..1380: note = Cas Enzyme sequence
MKKILGLDLGTTSIGWALVNECENEDEKSSIIRLGVRVNPLTTDEKGNFERGKAITTNSDRQQTHGARINLQRYKLRRKYLCDCLNKHGWIGSEPMYEDGKSSTFETYMLRAKAAVEEVSLHEFARVLFMMNKKRGYKSNRKANDKEEGKLFDGMSVAKKLYEAHLTPAEYSLQLLNKGKRFTPEYYRSDLVEEFEKIWNEQKKYYPEILTDEFKRQLEAKTKTSTSKIFLGKYGIYSADLKGLDRKLQPIKWRVEALRQQVDKDVLAFVISDLKGQIANTSGLLGAISDRSKELYFNKQTIGQYLWASLKENPHVSVKNQPFYRQDYIDEFEKIWETQASFHKELTPELKQEIRDIIIFYQRPLKSKKGLISVCELEQRKVKVTIDGKEKEITIGPKVAPKSSPMFQEFRIWHNLNNVQLIDNERNSKRPLYEEERNLLYEELSIRDRLNKAEALRVLGKKNRQWDLNYKELEGNRTQATLFSYYNKIIMMTGHEECNIKQLKAPEIRHYIKTIFKNLGFNTGILEFDSSLKGHELEQQPMYQLWHLLYSYESDKSRTGNEALLKKLETIFGFPIEYASVLAEVAFEDSYGNLSVKAIREILPHLQAGLDYSQACEEAGYKHSRRSLTKEELDQKEYKEKLELLPKNSLHNPVVEKILNQMINVINAVIDEYGKLDEIRIELARELKIGAAERENMTRSISQGNAENKCIREILEKEFALSYISRNDIIKYKLYEELKPNGYKTLYSDTYIPKDKLFSKDFDIEHIIPKARLFDDSLSNKTIEARDVNIAKSNKTAFDFISGKYGQQGIEAYKKKLYILLQGGSINKAKYNRLLMKEADIPSDFINRDLQNTRYITRKAYEILSDLVRVVTPTSGAVTSRLREDWQLVDIMKELNFEKYQKLGLTEVIEDRDGRKIKRIKDWTKRNDHRHHAMDALTIAFTKPSFIQYLNNLNARSDKGDSIYAIENKELHREDGKLCFNAPLPINEFRAEAKKHLKAVLVSIKAKNKVMTQNVNKIKTKHGIIKKVQLTPRGELHNATFYGTTKRPIIKMVKVGAALDEVTIKKVSSSFIREALLDKLYEYNGDAKKAFTGRNSIDKNPIYIDEERKRTVPALVKTIEWEMYHPTRKLISPDLKIGKVIDKGIRDILKTRLAKFNGDVQKAFSNLDENPIYKDDAKKITLKRVSLEGVSSVVPLHTLKDRSGMPITGKDSEPVLGDYVQTSNNHHVAFYIDENGNLQDNIVSFFEAAERKSQGVPIIDKNYNRDKGWHFLFTMKQNEYFVFPNEVTGFNPSEVDLMDETNYDIISPNLYRVQKMSRVVYGKSIIRDYVFRHHLETTVEANANLKGLAYKQLKSLSYLEGIVKVRINCIGKIVAVGEYD

SEQ ID NO: 22030 - protein, 1368 aa, unidentified
  REGION 1..1368: note = Cas Enzyme sequence
MKRILGLDLGTTSIGWAVIDQSEQENEKSGIVKMGVRVNPLTTDEKDNFEKGKSVTTTADRTLKRGMRRNLQRYKQRREHLIAILTRNRIITDDAVLCEDGNRTTFETYRLRAKAAKEEISLNELARVLLMINKKRGYKSNRKANNQEEGELIDGMAIARRLYNEHLTPGELTYDLLQNTSSRLIPSFYRSDLMAEFGAIWAKQQQYYPEILTDEARERMQGQSRSRTVELFKALCHVVPAEVKDRKVRMLTYYRWRTQSLHQKMELEAVATALVEVNGAISAASGYLGNISDLSKELEIAHMTVGEFLMSKLDADPHYRLKNRVFYRQDYLNEFETIWETQKRFHPELTNALKEEVRDTIIFYQRKLKSQKGLISFCEFESREIVVKTAKGNDKKVLSGSRVCPKSSPLYQEFKLWQTINNVIIYDDNANEESGFALNDNQRLVLHDALTYSKELKKSAILKILGLPAKRYRLNYDAIQGNTTQVALVEAYKKILEWSGHDIDEFDKMTVEQKQHQLSAVFGVLGAKTDFLSFDDSQAENSAAYKLWHLLYSYEGDSSKTGTEGLLRKIEQLTGLNSEYAKALVAVTFQADYGSVSAKAIKKILPFLKQGHLYSEACELAGYRHSKNSLTRAEIDQKQLLTALEIMPCGSLRNPVVEKILNQMIHVVNGAIAQYGPFDEIHVEMARELKQTREQREKATERIAKRTKETDQIVSILKGQPFGISNPTRNDIIRYRLYEELEPLGYKTLYTSTYIAKEKLFSRDFDIEHIIPQAKLFDDSQNNKTIETRSANLEKADQTAFDYVMAKFGPQAIDDYKARVAMILDRKKRELLLTDEEHIPSGFLNRDLSDSQYIARKATELLGLVTRRVVTTTGSITARLREDWQLIDVMKELNWEKYKAVGMTEEVKNKEGHVKRIIHDWTKRNDHRHHALDALTIAFTRPSHIQLINNVNASDGKKLDQAAFAIQRKEITHSGRFIPPMPYDQLRAAVLEHMSQIVVSIKAKNKVVTPSVNRIKTKGGIRRQVTLTPRAQMHNETVFGSQYQYETKIETVGAKFDAEKISTVARQDYRIALLKRLDEFGGDPKKAFTGRNSLEKNPLYADILHAVQVPAKVKTVQLIPRFTIRRPITKDLKVDKVVDKAIREILQRRLDEFGGDAAKAFTNLDDNPIWLNKEKGIAIKSVTITGVNVATPLHDKRDKFGQLIIDEKGSTLPVDYVSTSNNHHVAIFEDVNGNWQEHIVSFFEANERAQQGLPIVDKNYNHELGWKFLFTMKRNEYFVFPDETEGFNPLELDLQDPQNLNVISRHLYRVQKLATKNYVFRHHLETNVQEDKRLKDKTWIRITSFAGLKGIVKVRVDHLGQIVNVGEY

SEQ ID NO: 22031 - protein, 1236 aa, unidentified
  REGION 1..1236: note = Cas Enzyme sequence
MKILGLDLGVTSIGWALIEKNNENEEINLIKSGVRIIPIETKDAMQFSSGNTASPNIDRREKRMQRRMYFRKKKRNQSLIRTLVDNGLWDANLINIEKNELWKLRNNAVNEQIYLSELGRILYHLAQRRGYKQMRIEQDEADSKSDYKKNIYTRYQTIQNENITVGQYFYRELQNNEHYRVKEQIFPRKAYEEEFEKIINKQKEYYPQVLSDDFINKLKHIIFYQRPLKSQKHLLGVCTLEGKTIKIKNDGGNIIEKFVGPPVVAKTNPLFQIHRIWQTINNITIKNKKTHKNYELSIDEKNKIFNELQNKDSLSIEQLYKILNLSKDEWYFDKLSKNGIKGNELLALIRKALKNEFFSPDIFKLDIKIINYQKQIIDKNTGEIKEATLEIIDPNVVNEPLYKLWHILYSVVDKEECMKALKKNFNFSTSAADKLSDINMTSLKYGSLSLKAVRKTLPYLMKGMIYSDACQIVGYNFSNAISKDENYHRPLKNKIPLLPKNSLRQPIVEKILNQMIHVVNEIIDDNNGLVSKEERENGNFAIHIELARELKTSKEEKQGITKAIYKNTKENKEIENILKNQYNLTPTRKLIEKYKLFKELTPEGTNILQPQCIYCGEFISITEALTGDAIDVDHIIPQSKLFDDSRNNKVLVHANCNRTKGNMTAYDFMQNKSQDQFKNYLALVENLKEKKSISYKKYKYLLMSEKDIPQDFIDRDLRLSQYITRKAREICMDISKDVLVTSGTITARLRELWGYKDIISEINTELINDIELSDENKYQLVEIFGDKRSDHRHHAIDAITIASTTRSIIQRINTLSSAESKEKINEYLKQLNQDTLDTVYNPNEKNLRLLHKYLANQPHPNRDQVKQNIQDILISFKPGKKVATYSKRIVYIGNKPKILQTHILTPRGALHEESYYGRIALSEFKDLKYAIENVNLIVNNHIRSQIMDLLEKYNNDTKKLWNDIKKEKVLIYSDINNTNPIKDVKCYKYEYIIKKSINGEKVDQKAIDKKIKDLLSNNKTKKDVIYFNEVKKIPIHSVRVITGLDNNSMRAVRCNHNGEPITFVKLGNNHHIALYKDKNEKYQEHLCNFWHAVERKKYNIPVIIEHPDKIWDQVLVNPDKYQQEFLNKLPDPSWHFVLSFQANEMFILGLSNEEFDQYINDKNYAILSNHLYRVQKISSSYYCFRKHSDTSVNEFEYYAKINMFKRVQSINALIKENPIKVRINYLGEIVDHKKIF

SEQ ID NO: 22032 - protein, 1436 aa, unidentified
  REGION 1..1436: note = Cas Enzyme sequence
MTKILGLDLGTNSIGWAIVEKDGAHFSLVDKGVRIFAEGVKSEKGIESSRAAERTAYRSARKIKFRRKLRKYETLKVLSNNNMCPLSIEEVEAWRKSGFKKYPMNPEFLKWLRTDEDKSINPYLFRDLASKQKVALYDLGRSFYHIAQRRGFLSSRLDQSAEGIIDQHKPALLDIIDNTMNITELQIEINEYFEDRDLLERKNDLDEGEKKLKTLFNSFTKIIKESSVNFEKCKSQLVERLSKKEDLGVVKQKIGEISQSMKEGNFETLGQYFFSLYNKAKIRNQYTAREEHYLAEFEIICKTQNIEGINKHEKLPEKRYAGLAKDLYKAIFFQRPLKSQKGLIGKCSFEKSKTRCAISHPDFEEYRMWTYINTIKIQTPEDKILRFLTQAEKLKIIPKFLRKKDNFNFEDLAKELIPTGSKHQFYKSSGSSTVNYLFNYKSTDSVSGCVVSASLKNVLGEDWKMKGYSYKTKNGNGETVTRNVDYTDLWHLISVSTSDLYLQEFAKQNLKLDDKKSISFSKIRLKKDFASLSLTAINKILPYLREGLLYSHAVFMANIENIVDDHIWSNPEDRLFILNKIAAIIQNNTVENGKLEVINGLIRDCKIENCYYSIEAETSYKIDLEKKLGAFFKYNTIVDPREQEIITAELFPVFIEQLKKYEFHIVKRLDEKVLEFLDGQNDDGLVYCNSKNRLKKLYHPSDIEVFKKIIIKDGNGNEKVVLGSPLTSSIKNPMAMRALHQLRKVLNTLIFEGHIDKKTRIHIEMARELNDSNKRKGIQDYQRDLEKNNKEYIDEIKKDYKAAKGIDIEPTEDDVLRYKLWIEQDKKELYEDSYTNIGIAQIIGSDPDYDIEHTIPRSRSQDNSQMNKTLCSKHFNRVIKRNKMPVELINYDDILSRIQPWKKKFQGLEDEIKNLSRAIKNATTKEQKDRKIRLRHKLNLQKEYFKGKYERFTYQEPKVGFKNSQIPDTGIITKYSQAYLKSYFNRVESVKGGMVAEFRKAWGIQESYIENGKKYYKVKDRSKHTHHCIDAITIACMTKDKYDVMAHAWALEDDTDKSQYKLMRTVLENSKPWATFTEDLKNLENQILISHHTPDNVKKQSKKIIRIRGKKQYVAEIERDLNGKAILKKDIKGQIIYKLGIDGNKLPRFQQGDTVRGSLHQDSIYGAIKDPLNDTEIRFVIRKDLESIKASDVECIVDEVVKEKVKQAIVNKVLLLSSNAQQKNKLIDKVWMNEDKRIEIKKVRLFANSVKNPLEIKEHNSLSRSRHAHKQKVYGQNDENFALAIFEGVDKKNKLKRTFECINNMDAGAYFKLSNKDFNQNYNIVPDPDDKLGLPLKYILRKGLMVIFYKDSPKEIYDLKHDDIFKRLYKLSKFDAQGRLTFRTHFEARQATELNEVYSIDFEKPFEQIRLQVSKLNMLVQGYEFELSPSGKINLK

SEQ ID NO: 22033 - protein, 1116 aa, unidentified
  REGION 1..1116: note = Cas Enzyme sequence
MKTNYLIGSNAPLTKLPRTFPTKIDEDLYCGIDIGVGSCGVALVSNATSKHTIRGFEELPGKLTFLGIRAFDLPEEKTTSGISLKNPDRRQKRLMRRVLDRRAQRIRAIKNLLVEHKILPQDYDHRSTEWKGRHESATPWRWRVQALSRKLSSWEFAVILIHYAKRRGFKSAKKSDLESKGSEGGTLQSSRANHAALEQYETVADLLMNDPRFVISKSDGGTLETKQRNRDGEYIAMVTRADVVEEIRKVFSQQRALGNEHATDKFEEIYLEQLNKQRAMQDPIKLLGDCPFIPSEKRSSVMCPSFELARALQKLNGLQILSEDKQKLFFSEWILQHGGYGSFVADFGRKAKITWGDLRKMWQLPSSFQFADILSLPARREKNGLLEAELSLTEKERLDFSNRSSSSGCAQGSFTLRKALGEQLWNHCLQSDFAELDYVAFCLTFYEVVEEEGCQTTMLGAIAAHVKNQQLFEAVARDLRSEKPTLHKFKGSASTSAALMRHIIPFLMQGQVYSTAMESAGFQHVKTDFTLDKITNPIVKSVLREAMKQIAHVFHEVGCLPGRINIEVARDVGKSIEERNEIDRGIKKRTTQKNVNRLKVADCKGSSEVDVTEEELLRYELYLEQGGMCPYSGRSLPNVENIYSADLQVDHIQPRSRSHDNSFDNKVLVYASANQNKGNQTPFEWLAKSDDAWEGFQTRISSMRGIRRGKRNRLLSETFATQEPEFLERNLNDTRYISRLLLAYVNDFYRIVGEEPEGKGAVRRVFSIPGSLTSLVRKAWGLENLKKDVNGNRVGDKHHAVDALVCACLSHGRAQWITKLSQAYASSAHILNIRNLTTPWTNFRNDVVNALDQITVSRRERCGAGGALHQETNYGLVIDSQGNQTVYKRQNIIGKNQANKPVATFQSIADLENIRGINEERSAWLKEALTSWVQAGSPLDEDKLPRDTQGCLIRKVFVAQSRVKNVRKQKQGHVTSGTLVRCDVFSKAGKYFLVPIYNYQLSSATPPMRAVVAAKEEDEWAVMDDGYHFEFSLWKNSRFQFLEKKTKATFSGCYSSINRNTGVIEFKLPDDYGNKDKETVSPKSTISDFRKLNVDRLGRVFVVKKEKRVWRGVVCI

SEQ ID NO: 22034 - protein, 1041 aa, unidentified
  REGION 1..1041: note = Cas Enzyme sequence
MERTHYRLGLDIGANSIGWCCLSLDEDRRPCAVLAAGVRVFPDSRDPQTLASLAAERRAARAARRRRDRYLRRRRALANALVRHGLMPESGSVSGSDPWPLRQAALVRPLSPHELGRVIFHLNQRRGFASNRRTDGSNEEERGKIRDAADRLRGELSRAGAPTLGAWLAERHAARKPVRARLRGEGAQAHYDFYPTRELVLAEFDAIWAAQAAWNERLTDAMRDEIRRILFHQRPLKPPVVGKCWLEPEEDRAPRALPTVQRFRIAQELAHLRITIPGFPDRPLSDTERALLLARLNAGCDISFEQVRRALGLPGEARFNLESLNREKLEGAATARRLAIGTKKRPAPLAEMWDSLDDATRDQIATVLVEVETEDEAFARLLALGLPEEAARRTAGIVLEDGRASLSLTAIRRLLPFLEQGLRYDEAVRAAGYAHHSDDRTGELLPELPYYGEVLKERLGTGTNDPKDPEEKRLGRAPNPTVHVALNELRRVVNALIARFGRPEEIVVEVLRELGHSAVQRREIEKAQKENRERNERAKRAIESLGLKVTGGAIRRYRLWEDQAQDPKDRCCPITGTLIGIEALFSAEIEEDHILPFAITLDDSNANRVLVTREANRRKARRAPFEAFGHTPEWPEILRRVALLPPAKRWRFQEGALERWQGEEKDFLARHLTDSAYLARLARLYLRVICDPDRVWAVPGRLTALVRGALGLNGLLGGPGARKDRTDHRHHAIDALAVALTDRSLLQRVSAAARRAQEVDRRLLADLEEPWPGFHAEAKAAIERVVVSHKPDHGTGGKLHNDTAYGEVRGADETGPNVVVRKPLSAFLRATPEEARAAIRDPVLAEKVAAALAANADAKSRAAALAALEHGAGTVRRVRTWERLETRPIPSAPWKRVKLDANHRIEFWRLPGKGGKPGKVVTQLVPLLDAAAEAEAKRLGRKVAERKPHPAATLLMRLHKNDMVAFGEGKARRILRVVKMSKGQVVLAPHHEGGNLKARDADTADSFKYINGSVAAFRRERARLVRVDPDGRVHDPGPRAW

SEQ ID NO: 22035 - protein, 1062 aa, unidentified; identical to SEQ ID NO: 15764
  REGION 1..1062: note = Cas Enzyme sequence

SEQ ID NO: 22036 - protein, 1080 aa, unidentified
  REGION 1..1080: note = Cas Enzyme sequence
MKQGQIAFSFDIGHSSIGWAAFQVSDAPGTFHSLLGTGVVLFPKDACLASARRGFRRSRRNIAARRSRIDRLKNYLAGLGVLSRDQLDANSNSYPWLLAARILASDGKKTLTWEELWSVLRWYAHNRGYDGNALWAGDDADAGDKEDTDKVKNSIALMEKHKTATMAETVCKALGLDPMGEVKASRIYFKGNNAAFPRGVVTEEVRRILAAHAGKLPKVDDALSDILLRNAATSGLELPGPVKGGLLFGQYVPRFDNRIIPACRITGKNTPLKRCPEYLLYRWGRLLNNLTVFGADGQIRTLLPAERQALHSRMEADGFFTKRTLNAALKDVTGCTPANTESFFLTEEMEEALVLDPVKKLLATNQIMKDLWPQLSAESREKAQSSLSAGKKIRLGDILAEMETAGQDTTAASDALASHQKKAKKKNADLATRRLSADYPKGRAAYCREILAKTFDESISGKDSTKEGGCLYETEEIRNRLLREPLVQQTNNHLVRHRLLVFERLLAHMVEEFAGGDEKRIAATVVEVVRELQEFSGLNSKEITHKLNEKLGNFRSVVKNLEEAIANSEERVAITGSLIRKARILEDQGFVCPYTGTHLSYNHLLADRLEIEHIIPRSLRPSDALSSCVMTFRSVNDMKGQRTAMQFICEEQGREVPGHENIQITTKKAYVDYVAKHKKQYPQKSDDRRRCERRAELMLMERYDQRNADFTERDLTQTSHLNKMAIRLVKQRIGIDAKHLPGNVTAFIRQKLHIDECLFNAVPRLQTAAKGQPKSSKRKKKAEEAPVEPIQDDMPPRKLTKADIRELTYLHHAMDAVTQGLALLLFAPEDWPLLVKRNLPDSEQRHLKARYPFLDFSADKHISIQDLPEDTLHTISERLAECRVVRHIPAKMHGIIVDQTTWGTVAAGAITTLRQKTTEKNARCDENGKRFIKTTEKKRSLLLGGPDAPDGKLAKIKGAILVTENWGCALDPSPTVIPHFKVYPQLRALREKNGGRPIRILRKGSLIQVKAGTYQGIWSVASIKDNADGICLDINAADKVKLENRSDDSKINVRLDSLRKSGLKILKPKLTGACPTTSSP

SEQ ID NO: 22037 - protein, 1219 aa, unidentified
  REGION 1..1219: note = Cas Enzyme sequence
VKEEVRGKNRSQTWAILAKFFVWSEKESVWNEKEARTEERVKEYKLVGLKRDTKGNELKLENYRWRVQALSEQLNPEIVAIVLQEINGQISASSGYLGAISDRSKQLYFNRQTVGQYLMSELEKDPNVSLRNRVFYRQDYLDEFDRIWEKQAEFHEELTMELKKEIRDIIIFYQRRLKSQKGLISFCEFEKREVVVEEDGRKKNKTVGCRVIPRSHPLFQEFKIWQTLNDIEVFAWDKQSKCKKADKSSILFDNSEDALLVEGKRFLYQEEKELLAKELFVKESMKKAEVLKLLFENYQELDLNFKQIDGNHTGFALFSAYSKMIEKYGYEPVDFKKSADEIIEKLETIFTNLGWNTELLSIDLSKEDKELERQSYFRLWHLLYSFEGDNTPTGNGKLLEKIMQLCDVEKEYAVELANVSFQEDYGSLSAKAIKKILPYLKEGNQYDVACDYAGYRHSKSSLTKDEIENKILKDKLEILPKNSLRNPVVEKILNQMVNLINTLIDTYGKPDEIRVELARELKKNAKEREELTKSIARNTREHDEIRQLLRTEFGMMNVSRNDIIRYKLYEELKDNGYKTLYSNEYIPREKIFSKEIDIEHVIPQARLFDDSLSNKTLEYRAINIEKGNKTAYDFVKEKYGDDGLQKFINRCEALFKDKKTKLRKLKMEEKDIPEGFIDRDLRNTQYISKKAFAMLNEISRRVVATTGSITDKLREDWQLVDLMKELNLPKYEKLGMVEMFEDKDGRKIKKITDWTKRNDHRHHAVDALTVAFTKDVFIQFYNNKNAAWMPASKEHANITGIKARYFENGKALAPMPLAQFRAEAKRHLENLLVSIKAKNKVITSNVNRTKNKNGENRKLQQTPRGQLHLETVYGSHRQYATKIEKVNAAFDVTKIATVSKFAYRNALLKRLEAFGNDPKKAFTGKNTLEKNPLYLDENQTEMVPEKVQTVEFETVYTIRKPIDPNLSIDKVVDVKIRSVLEKRLKEYGGDAKKAFVNLDENPIWLNEAKGISIKRVSIRGISNAQSLHEKKDKDGNLILGKEGRKIPVDFVNTGNNHHVAIYKKSVLDKVGQIVLDEEGNPKYELDEVVVSFFDAVTRANLGQPIIDKDYRRSEGWQFLFSMKQNEYFVFPNEKTGFNPKEVDLLNPENYALISPNLFRVQKFAYKNYVFRHHLETTIKDTSSTLKGITWTDFRSSKGLDKIVKVRVDHIGQIVSIGEY

SEQ ID NO: 22038 - protein, 1433 aa, unidentified
  REGION 1..1433: note = Cas Enzyme sequence
MKKILGLDLGCNSIGWALVNEAENTEEISSIIKLGVRVNPLTVDEMQNFEKGKSITTNADRTLKRSMRRNLQRYKLRRDTLIEVLKEHGFITDSTLLSEHGNKTTFETYRLRAKAAVEEISLEKFARVLLMINKKRGYKSSRKAKGSEDGVLIDGMDVARKLYEEGLTPGELCLQILEAGKKNLPDFYRSDLQNEFDRIWNFQKQFNPELFCDTVKEEVRGKNRSQTWAILAKFFVWSEKESVWNEKEARTEERVKEYKLVGLKRDTKGNELKLENYRWRVQALSEQLNPEIVAIVLQEINGQISASSGYLGAISDRSKQLYFNRQTVGQYLMSELEKDPNVSLRNRVFYRQDYLDEFDRIWEKQAEFHEELTVELKKEIRDIIIFYQRRLKSQKGLISFCEFEKREVVVEEDGRKKNKAVGCRVIPRSHPLFQEFKIWQTLNDIEVFAWDKQSKCKKADKSSILFDNSEDALLVEGKRFLYQEEKELLAKELFVKESMKKAEVLKLLFENYQELDLNFKQIDGNHTGFALFSAYSKMIEKYGYEPVDFKKSADEIIEKLETIFTNLGWNTELLSIDLSKEDKELERQSYFRLWHLLYSFEGDNTPTGNGKLLEKIMQLCDVEKEYAVELANVSFQEDYGSLSAKAIKKILPYLKEGNQYDVACDYAGYRHSRSSLTKDEIENKILKDKLEILPKNSLRNPVVEKILNQMVNLINTLIDTYGKPDEIRVELARELKKNAKEREELTKSIARNTREHDEIRQLLRTEFGMMNVSRNDIIRYKLYEELKDNGYKTLYSNEYIPREKIFSKEIDIEHVIPQARLFDDSLSNKTLEYRAINIEKGNKTAYDFVKEKYGNDGLEKFLNRCETLFKDKRTKLRKLKMEEKDIPEGFIDRDLRNTQYISKKAFAMLNEISRRVVATTGSITDKLREDWQLVDLMKELNLPKYEKLGMVEMFEDKDGRKIKKITDWTKRNDHRHHAVDALTVAFTKDVFIQFYNNKNAAWMPASKEHANITGIKARYFENGKALAPMPLAQFRAEAKRHLENLLVSIKAKNKVITSNVNRTKNKNGENRKLQQTPRGQLHLETVYGSHRQYATKIEKVNAAFDVTKIATVSKLAYRNALLKRLEAFGNDPKKAFTGKNTLEKNPLYLDENQTEMVPEKVQTVEFETVYTIRKPIDPNLSIDKVVDVKIRSVLEKRLKEYGGDAKKAFVNLDENPIWLNEAKGISIKRVSIRGISNAQSLHEKKDKDGNLILGKEGRKIPVDFVNTGNNHHVAIYKKPVLDKVGQIVLDEEGNPKYELDEVVVSFFDAVTRANLGQPIIDKDYRRSEGWQFLFSMKQNEYFVFPNEKTGFNPKEVDLLNPENYALISPNLFRVQKFAYKNYVFRHHLETTIKDTSSTLKGITWTDFRSSKGLDKIVKVRVDHIGQIVSIGEY

SEQ ID NO: 22039 - protein, 1387 aa, unidentified
  REGION 1..1387: note = Cas Enzyme sequence
MEKNYYIGLDIGTNSVGWAVTDEKYSVVKKKGKRLWGVRLFDTAATAKKRRLKRTARRRYLRRRQRIDLLQELFAPLILERDENFFRRLDESFFFEEDKKVDGKYSLFSDKNYTDKDFYKEYKTAYHLRNRLIKGDIPDDPRIVYLACHHIIKKRGHFLFNGEINGNNISCDNEIRGLQKFVTDGNDHDVPMFGGDNFKDFSLDEFVKIITLTDTRRESIEKTTELFGVSDGKYLKNAVRVMFGYKQKVKTLFASEYYGDCDIEIDFTSEQYEETSEALKIELGDDYSYVDTLKNLYDFVVLKRLLQEHSSISEAMVSKYERHAVELRMLKNIVRKYGKTSDYNEIFKETVSDASYAKYIGMNKKGGVKQVTERESAYSYETFYKALLGKLDSIVTDKSDADYLCIKNRIENKDFLIRYASSVNASIPNQLHRDELNRILDNASVKFPYLLEKDGDGLSVKDKIMSIMTYKIPYYVGPIPNDENSEAIGKYSWLVRKESGKVLPWNFEKKVDMNASMEKFIKSLINRCSYLNTENVLPKQSLIYQEYEVLNELNGIKFNGKRIDNETKLKIFEGLFKNSGKKKITEKILKAFLVNENVVSKSDINALKIDGYQKDKEFSTCLSSYVNIVKALGNDFDRGYVDNNIDTFERIIELSTVYADNKSLFVEKLKQEFPALDERVIAKVKGLTFTKWGRLSKRLLEGVVASNTATGEVSNILSLMRNTNANFMEIIFDKEWNFNALIEEENKSVSRQIDKIKYSDIAELYCSPSVKRAIWQSIKIVREIVEIMGYPPTKFFVEVTRSDEDKKRTSSRKSVLQKLYKGVDDSGDIKAIKEALEKENENSLKDERLYLYYSQQGKCMYTGKPINIDDLLNTKLYDIDHIYPQSMTTDESVHRNKVLVCRSANKDKSDVYPLNIEVQNKMAGFWKSLRDKEFITPEKYIRLTRKEPLTDKELGDFIARQLVFTSQSVKEVINLLKIEYPNSETCYVKAEVVKDFRSRNNYLKIRTLNDLHHAKDAYLNVVAGNILSTANKNNFRMQRINKGNEIDTDIIKNYSISNIFSRGYVVSTAKNLAWNCDLFDNVEKQYYRNDILVTKMQTVGKGAFYDETVRKSLANAKYAKAARKASIPLKKVEGNRYSIERYGGVTTVSPRWFALIGCSDKKNNQIYRIEPINIYDYAKMDKSRIKDEMASLLERQGHKNVDIIAILKKNTLLSIDGNRYYLTGTSGESLTLDNAKQLTVGREYELAVNRILKYTENPKRNKDVTEVAIRSKSKEDYNIDEKAVFVMLVDKLKTEFPQFRVVASKFDDESIEAFDTASKSRQCEIITNIIKMTGCNSTRGKLDGEPFNANFKASEGALTANKKVSYELTVIDQSVTGVYEYSKSIKK

SEQ ID NO: 22040 - protein, 1349 aa, unidentified
  REGION 1..1349: note = Cas Enzyme sequence
MQKYYLGLDIGTNSVGWAVTDENYNLCKFGGKRMWGIRLFDGAQTAEERRMNRSNRRRLSRQKQRIDLLQELFAKEIAKVDPTFFIRLNESRLYMEDKSTGTKFPLFADPGYTDKEYYKEYPTIYHLRQELIKNPESHDIRLVYLACHHILKNRGHFLINGSFSNLKNLSFVCREMLDAFNELSKYQLMISDIDALEKILSDRKQQKSAKVKELVQIFECGPREDKSDAKICKGILSNLCKFLVGAKGNITRLFDTDFDEMETSSFSFGDSKYEDSLLPSLEENYPDYANVIQKIKAMYDWSVLVEIMAGENYLSFAKVNAYKKHKENLSILKSLMKKYCTPDVYQRFFYKTDEKSNYGNYIGAIHNNGHSYTMKKCDEETFYKSLSKILDKLVVQKTDQNTLEILKKEAENQTLLPLARTKANGVIPNQIHIQELRAILDNAKTYLPFLNEADEYGTIAEKIIRIAKFKIPYYAGPLSTRHKEQGANTWIVRKQEGRIYPWNFEEMVDLEQSNNEFIRRMTNKCTYLIGEDVLPKNSLLYSKFMVLNELNNLKIRGHKISVELKQELYKELFCKKAKVTGKALLVYLKKKDAELTLEDISGFDADFKSSLSIYIDFKNHILREQIDDGKYQSIVENIIKWKTIFDADSKMIEKMIAREYPNMFSSEQIKKICRLKCRGWGNFSSRFLNGIQGENTETKECFTIIEALWKTNYNLMQLLSKQFTFKDAIDCINADKVGKIDKVTYENTVKDLVVSPANKRAIWQTVQITEEIKKVMKCEPEKIFVEMARGGEKEKKRTISRKERLLKLYMDYKDENRDWIKEIESRDEQDFTNRKLYLYYTQIGRCMYSGEEISLEELMQKNSKWDKDHIYPQSKIKDDSLDNLVLARKDINNNKSNKLLSTGIQDKMKKYWKMLLQHGFISKKKYDRLIRTEDFSDEELSGFIARQIVETRQSSKAVAELLDRLNEHTEIVYVKAGLVSDFRHDNNLLKSRRINDYHNAKDAFLNIVVGNVYNAKFTANPRNWIKKNRNTNYSIRRVFDYTVKRGSTIVWQGVKDGGHSIDAIKKTMARNDILYTERTYCEQGELFNATLIKKGNPNAIGLKKGLDPMKYGGYSSPKTSAFAFIEFDGKKGRQNHLVEIPVYIANIAARQPEYIKNHLEEKKGYQNVIVKKYPIQKNALIKLDGYPARLRGANEKSITLKNAVQLVLKPEYHETIRNVEKYLEYIDKDESVSKAARFSHTELDKLYDELCFKAENSIYKKRPASQAATLKNGQKTFLAITNLKEKAQVINNIITMFRCDATTTTNLKTIGGSANAGGMQVNKNTLTSQKVVLVHQSITGLFGTEEELL

SEQ ID NO: 22041 - protein, 1349 aa, unidentified
  REGION 1..1349: note = Cas Enzyme sequence
MQKYYLGLDIGTNSVGWAVTDENYNLCKFGGKRMWGIRLFDDAQTAEERRLNRSNRRRLSRQKQRIDLLQELFAKEIAKVDPTFFIRLNESRLYMEDKSTGTKFPLFADPGYTDKEYYKEYPTIYHLRQELIKNPESHDIRLVYLACHHILKNRGHFLINGSFSDLKNLSFVCREMLDAFNELSKYQLMISDIDALEKILSDRKQQKSAKVKELVQIFECGPREDKSDAKICKGILSNLCKFLVGAKGNITRLFDTDFDEMETSSFSFGDSKYEDSLLPSLEENYPDYANVIQKIKAMYDWSVLVEIMAGENYLSFAKVNAYKKHKENLSILKSLMKKYCTPDVYQRFFYKTDEKSNYGNYIGAIHNNGHSYTMKKCDEETFYKSLSKILDKLVVQQADQITLEILKKEAENQTLLPLARTKANGVIPNQIHIQELRAILDNAKTYLPFLNEADEYGTIAEKIIRIAKFKIPYYVGPLSTRHKEQGANTWIVRKQEGRIYPWNFEEMVNLERSNNEFIRRMTNKCTYLIGEDVLPKNSLLYSKFMVLNELNNLKIRGHKISVELKQELYKELFCKKAKVTGKALLVYLKKKDAELTLEDISGFDADFKSSLSIYIDFKNHILREQIDDGKYQSIVENIIKWKTIFDADSKMLEGMIAREYPNMFSSEQIKKICRLKCRGWGNFSSRFLNGIQGENTETKECFTIIEALWKTNYNLMQLLSKQFTFKDAIDCINADKVGKIDKVTYENTVKDLVVSPANKRAIWQTVQITEEIKKVMKCEPEKIFVEMARGGEKEKKRTISRKERLLKLYMDYKDENRDWIKEIESRDEQDFTNRKLYLYYTQIGRCMYSGEEISLEELMQKNSKWDKDHIYPQSKIKDDSLDNLVLARKDINNNKSNKLLSTGIQDKMKKYWKMLLKYGFISKKKYDRLMRTEDFSDEELSGFIERQIVETRQSSKAVAELLEHLNEHTEIVYVKAELVSDFRHDNNMLKSRRINDYHHAKDAFLNIVVGNVYNAKFTANPRNWIKKNRNTNYSIQRVFDYTVKRGSTIVWQGVKDGGHSIDGIKKTMARNDILYTERTYCEQGELFNATLIKKGNPNAIGLKKGLDPMKYGGYSSPKTSAFAFIEFDGKKGRQNHLVEIPVYIANIAARQPEYIKNHLEEKKGYQNVIVKKYPIQKNALIKLDGYPARLRGANEKSITLKNAVQLVLKPEYHETIRNVEKYLEYIDKDESVSKAARFSHTKLDKLYDELCFKAENSIYKKRPASQAATLKNGQKTFLAITNLKEKAQVINNIITMFRCDATTTTNLKTIGGSANAGGMQVNKNTLTSQKVVLVHQSVTGLFVTEEELL

SEQ ID NO: 22042 - protein, 1123 aa, unidentified
  REGION 1..1123: note = Cas Enzyme sequence
LINLYIKFLSSNLIIILKNIFVNRKERIMKYIIGLDIGIGSVGWAVVRNDDDCKRLEDFGVRIFESGEIIESNKNIRNSQRRRKYRGMRRRIRRRNHRKERLKNYLENIEFVSRAELSEFFAKNNHDIIDIRVRALDEMVTPVELTAALLHIAKRRGYKAFYELSDENNNAKDKKAKEEEEKDIYKALTNTADVIKNGGYRSIAEAIMKDSEHFSDKISGRYKYRNIKEKDEKGKKKSDGKISENDILFPTEMFEDEVRKILGKQKEFYPQLTDESIDKIFDIIFSRRDFEDGPGNTDDENRPYKGFVDSIGNCPYYKNEKRGHRYTVIGDLFALANKLSQYKYVEKNTGEVVKLPRDLMRNIVNQSLQSGSITKTKINELAKELNIVILNTKTAKNENIADCIKYLKAVKPIFESYGFDWDKLISEEYTDQNSLLNRVGDTISFNITPKRRIDALNKIDELKGKDELIKKLSKQNFSGTAKVSDKYMIDAINAFFDGTLVGEFQANVQQDEFSVSIKTEKLLKLKPFDNNSEYAQNPVVFRAINETRKVVNAIVQKYGAPNAMNIEIASELNKSFDTRQKISTQQNKNEKERKNAIKQISLITGLDEREIRPQYIERYLLGELQGWRCMYSNEEITNKKEAILNKGKQYEIDHIVPFSRILDDTLNNKALVLARENQKKGARTPLMYLSAEKEKEFKQRVNKLFKGNKITEKKYRYFMLESLVGEDAEKILGDWKTRNLNDTRYIAKFLVKYFNDNLYFAREKGDDKRPVVYAVKGAITSSLRRQWLNKETWGRYDKGELKKITYFDHAVDAIVIANCLPAYVIIAAENHKLRDIYYSAGKIKTEEYRKSLDNCVDTLMKYYGMSPAVSRKLLEKVKETPSLLKNIRFEVEYRVRDYELMKYFFNYDTKVGEDTLDQIFRNDLYKIYDHQFADSIEMPIVSIKPERKYSGQMVKDGFIKKKDAISGKNSVKTIGENNSTVLNDSRFYCVDVYRTCNDETNLNFIKYTDLLKRNNHLYLRSDYRYPDDYAMHEMYLFYGDYIEITKKNKICCGYYFSLKNSSRNELYMSKGNTRRKLNNVKENEVCSITKKDTVKKFEIDILGKKLGEVKKYGEPLSLLPEKN

SEQ ID NO: 22043 - protein, 1153 aa, unidentified
  REGION 1..1153: note = Cas Enzyme sequence
MKNILGLDLGSSSIGWSVIRENSEEQELVAMGSRVVSLTAAELSSFTQGNGVSINSQRTQKRTQRKGYDRYQLRRTLLRNKLDTLGMLPDDSLSYLPKLQLWGLRAKAVTQRIELNELGRVLLHLNQKRGYKSIKSDFSGDKKITDYVKSVKTRYDELKEMRLTIGELFFRRLTENAFFRCKEQVYPRQAYVEEFDCIMNCQRKFYPDILTDETIRCIRDEIIYYQRPLKSCKYLVSRCEFEKRFYLNAAGKKTEAGPKVSPRTSPLFQVCRLWESINNIVVKDRRNEIVFISAEQKVALFDFLNTHEKLKGSDLLKLLGLSKTYGYRLGEQFKTGIQGNKTRVEIERALGNYPDKKRLLQFNLQEESSSMVNTETGEIIPMISLSFEQEPLYRLWHVLYSIDDREQLQSVLRQKFGIDDDEVLERLSAIDLVKAGFGNKSSKAIRRILPFLQLGMNYAEACEAAGYNHSNNYTKAENEARALLDRLPAIKKNELRQPVVEKILNQMVNVVNALMEKYGRFDEIRVELARELKQSKEERSNTYKSINKNQRENEQIAKRIVEYGVPTRSRIQKYKMWEESKHCCIYCGQPVDVGDFLRGFDVEVEHIIPKSLYFDDSFANKVCSCRSCNKEKNNRTAYDYMKSKGEKALSDYVERVNTMYTNNQISKTKWQNLLTPVDKISTDFIDRQLRESQYIARKAKEILTSVCYNVTATSGSVTSFLRHVWGWDTVLHDLNFDRYKKVGLTEVIEVNHRGSVIRREQIKDWSKRFDHRHHAIDALTIACTKQAYIQRLNNLRAEEGPDFNKMSLERYIQSQPHFSVAQVREAVDRILVSFRAGKRAVTPGKRYIRKNRKRISVQSVLIPRGALSEDSVYGVIHVWEKDEQGHVIQKQRAVMKYPITSINREMLDKGKVVDKRIHRILSDRLAQYNDNPKEAFAKPVYIDKECRIPIRTVRCFAKPAINTLVPLKKDDKGNPVAWVNPGNNHHVAIYRDEDGKYKERTVTFWEAVDRCRVGIPAIVTQPDTIWDNILQRNDISENVLESLPDVKWQFVLSLQQNEMFILGMNEEDYRYAMDQQGYALLNKYLYRVQKLSKGDYNFRYHTETSVEDKYDGKLNLELSRQMGKLKRVSIKSLLELNPHKVHISVLGEIKEIS

SEQ ID NO: 22044 - protein, 1153 aa, unidentified; identical to SEQ ID NO: 22043
  REGION 1..1153: note = Cas Enzyme sequence

SEQ ID NO: 22045 - protein, 1157 aa, unidentified
  REGION 1..1157: note = Cas Enzyme sequence
YIVGMKNILGLDLGSSSIGWSVIRENSEEQELVAMGSRVVSLTAAELSSFTQGNGVSINSQRTQKRTQRKGYDRYQLRRTLLRNKLDTLGMLPDDSLSYLPKLQLWGLRAKAVTQRIELNELGRVLLHLNQKRGYKSIKSDFSGDKKITDYVKSVKTRYDELKEMRLTIGELFFRRLTENAFFRCKEQVYPRQAYVEEFDCIMNCQRKFYPDILTDETIRCIRDEIIYYQRPLKSCKYLVSRCEFEKRFYLNAAGKKTEAGPKVSPRTSPLFQVCRLWESINNIVVKDRRNEIVFISAEQKVALFDFLNTHEKLKGSDLLKLLGLSKTYGYRLGEQFKTGIQGNKTRVEIERALGNYPDKKRLLQFNLQEESSSMVNTETGEIIPMISLSFEQEPLYRLWHVLYSIDDREQLQSVLRQKFGIDDDEVLERLSAIDLVKAGFGNKSSKAIRRILPFLQLGMNYAEACEAAGYNHSNNYTKAENEARALLDRLPAIKKNELRQPVVEKILNQMVNVVNALMEKYGRFDEIRVELARELKQSKEERSNTYKSINKNQRENEQIAKRIVEYGVPTRSRIQKYKMWEESKHCCIYCGQPVDVGDFLRGFDVEVEHIIPKSLYFDDSFANKVCSCRSCNKEKNNRTAYDYMKSKGEKALSDYVERVNTMYTNNQISKTKWQNLLTPVDKISTDFIDRQLRESQYIARKAKEILTSVCYNVTATSGSVTSFLRHVWGWDTVLHDLNFDRYKKVGLTEVIEVNHRGSVIRREQIKDWSKRFDHRHHAIDALTIACTKQAYIQRLNNLRAEEGPDFNKMSLERYIQSQPHFSVAQVREAVDRILVSFRAGKRAVTPGKRYIRKNRKRISVQSVLIPRGALSEDSVYGVIHVWEKDEQGHVIQKQRAVMKYPITSINREMLDKGKVVDKRIHRILSDRLAQYNDNPKEAFAKPVYIDKECRIPIRTVRCFAKPAINTLVPLKKDDKGNPVAWVNPGNNHHVAIYRDEDGKYKERTVTFWEAVDRCRVGIPAIVTLPDTIWDNILQRNDISENVLESLPDVKWQFVLSLQQNEMFILGMNEEDYRYAMDQQGYALLNKYLYRVQKLSKGDYNFRYHTETSVEDKYDGKLNLELSRQMGKLKRVSIKSLLELNPHKVHISVLGEIKEIS

SEQ ID NO: 22046 - protein, 1153 aa, unidentified
  REGION 1..1153: note = Cas Enzyme sequence
MKNILGLDLGSSSIGWAVIRENSEEQELVVMGSRVVSLTAAELSSFTQGNGVSINSQRTQKRTQRKGYDRYQLRRTLLRNKLDTLGMLPDDSLSHLPKLQLWGLRAKAVTQRIELNELGRVLLHLNQKRGYKSIKSDFSGDKKITDYVKTVKTRYDELKEMRLTIGELFFRRLTENAFFRCKEQVYPRQAYVEEFDCIMNCQRKFYPDILTDETIRCIRDEIIYYQRPLKSCKYLVSRCEFEKRFYLNAAGKKTEAGPKVAPRTSPLFQVCRLWESINNIVVKDRRNEIVFISAEQRAALFDFLNTHEKLKGSDLLKLLGLSKTYGYRLGEQFKTGIQGNKTRVEIERALGNYPDKARLLQFNLQKESSSMVNTETGEIIPMISLSFEQEPLYRLWHVLYSIDDREQLQSVLRQKFGIDDDEVLEQLSAIDLVKAGFGNKSSKAIRRILPFLQLGMNYAEACEAAGYNHSNNYTKAENEARALLDRLPAIKKNELRQPVVEKILNQMVNVVNALMEKYGRFDEIRVELARELKQSKEERSNTYKSINKNQRENEQIAKRIVEYGVPTRSRIQKYKMWEESKHCCIYCGQPVDVGDFLRGFDVEVEHIIPKSLYFDDSFANKVCSCRSCNKEKNNRTAYDYMKSKGEKALSDYVERVNTMYTNNQISKTKWQNLLTPVDKISTDFIDRQLRESQYIARKAKEILTSICYNVTTTSGSVTSFLRHVWGWDTVLHDLNFDRYKKVGLTEVIEVNHRGSVIRREQIKDWSKRFDHRHHAIDALTIACTKQAYIQRLNNLRAEEGPDFNKMSLERYIQSQPHFSVAQVREAVDRILVSFRAGKRAVTPGKRYIRKNRKRISVQSVLIPRGALSEESVYGVIYVWEKDEQGHVIQKQRAVMKYPITSINREMLDKEKVVDKRIHRILSGRLAQYNDNPKEAFAKPVYIDKECRIPIRTVRCFVKPAINTLVPLKKDDKGNPVAWVNPGNNHHVAIYRDEDGKYKERTVTFWEAVDRCRVGIPAIVTQPDTIWDNILQRNDISENVLESLPDVKWQFVLSLQQNEMFILGMNGEDYRYAMDQQDYALLNKYLYRVQKLSKGDYNFRYHTETSVEDKYDGKLNLELSRQMGKLKRVSIKSLLGLNPHKVHISVLGEIKEIS

SEQ ID NO: 22047 - protein, 1431 aa, unidentified
  REGION 1..1431: note = Cas Enzyme sequence
MKTILGLDLGTNSIGWALIKQDFEKKEGEILGIGGRIIPMDQKILGEFGSGNSVSQTAERTKFRSVRRLRERFLLRRERLHRVLNILNFLPNHYASQIDFQKRFGKFKVETEPKLAWQNINGQFTFLFQDSFQEMLSDFKQNQPNLLKNEKGEDKLIPYDWTIYFLRKKALFKKIEKEELAWLLLNFNQKRGYYQLRGEEEEENPNKLVEFHSLKIVDVIADEPQKGKSDIWYSLILENGWVYRRASKIPLFDWKDKIRDFIVTTDLNDDGSVKTDRDGKEKRSFRAPSETDWTLVKKKTEQGIKQSKKTVGAFIYDSILENPKQKINGKLVRTIERKFYKDELKQILEKQVELQPELFTEDLYIDCVRELYRNNEAHQLTLKDKDFVHLLLEDIIFYQRPLRSQKSSVSNCTLEFRKFKDENGVEHAQYLKVIPKSNPYFQEFRIWQWIFNLNIYSKEDDKNVTNEFLKTLKDFENLFEFLNARKEIDQKTLLKHFKLNEKTHRWNFVEDKKYPCNETRAMIYSRFEKVANVPGDFLTREIEQKIWHIIYSVNDKIEFEKALKSFALKNNLEEYSFLEAFRKFPPFKSEYGSFSEKAIKKLLPLMRLGKYWDYNLISEQTKNRIQKIITGEYDDNIKDRVREKALHLTVESDFQGLPLWLAQYVVYDRHSEAAMLGKWNSADDLEEFLKDFKQHSLRNPIVEQVVTETLRVVKDIWQKYGNGAKDFFSEIHIELGREMKLPASERDRMTRQMTENENTNLRIKSLLAELQNDSSVENVRPYSPIQQEILKIYEDGVLNSDIDIEDDILKISKTAQPSSSDLKKYKLWLEQKYKSPYTGQIIPLSKLFTSEYEIEHIIPQSKYFDDSFNNKIICESAVNKLKDNYLGYSFIKNFGGSIVECGFGRKVTVFKVDEYEDFVKKHYAKNRNKRSILLLEDIPEKMIERQLNDTRYISKYISGILSNIVRKQDGTDEGVNSKNLVPLNGKITTELKKDWGLNDIWNDLILPRFERMNQLTNSSHFTTWSEKHQKFLPTVPIEYSKGFSKKRIDHRHHALDALVIASATKDHVNLLNNQSAKSESKRYDLKKKLMRFEKVAYYHPKTGEQVEREVPKLFLKPWETFTKDTKNRLESIVVSFKQNLRVINKATNYYEKFVEKDGVKIKERVEQKGTNWAIRKPMHKETVSGKVELPWIKVPKGKILTATRKNLDTSFDAKAINSITDTGVQKILLNYLNYKDGNPELAFSPEGIDDLNKNIERFNDGKLHQPITKVRVFELGSKFPLGHIGNKKDKYVEAAKGTNLFFVVHEDESGKRRYETIPLNEVIERQKQGLSVVDLKGKNDFFLSPNDLVYIPSDDELVNLNSINFNNISNRDNIYKVVSFTGNRLYAIPFYVSSTIVNKVEFTQLNKIEFTKEKEICVKLKTDRLGVISKA

SEQ ID NO: 22048 - protein, 1426 aa, unidentified
  REGION 1..1426: note = Cas Enzyme sequence
MKNILGLDLGTTSISFAHIVEDENKEKSEIKELGVRIVSLTTDEQSDFEKGKSITTNANRTLKHGARLNLDRYQQRRKYLIDLLQKANLITSSSILAENGKNTTHSTWQLRAKAVTERVEKEEFARVLLAINKKRGYKSSRKAKTEDEGQAIDGMAIAKRLYDENLTPGQLSLQLLQQNKKLLPDFYRSDLQKEFDLVWNFQKQFYPDILTDTFYKELQGKGKDATSKAFSKRYHFDTAENKGSKESVRLQAYQWRAEAISKQLSKEEVAYVLTEINNNLNNASGYLGAISDRSKELYFNRQTVGQYLYAQLQENRHNSLKNKVFYRQDYLDEFERIWETQASFHKELTDELKKQIRDVVIFYQRKLKSQKGLISFCEFESKEIEIEKDGKTITKTIGARVVPKSSPLFQEFKIWQILNNVTCKRKGIRKKKSSAKSTELDLFNEPSQTIFSLDMECKQLLFDELNLKGDLKSDKVLKLLGYSPQEWEINYNQLEGNRTQKALYEAYLKIVEMEAHDVKDILQIKSAKDDWSLDESPLSASEIKEKVKDIFQALGICTKILYFDPLLPVKEFEKQDSYQLWHLLYSYESDDSTSGNETLYRILEKKYAFKREHARILANVALQDDYGSLSTKAIRKIYPNIKENQYSKACELAGYKHSKLSLTTEELEARELKNIIPLLKKNALRNPVVEKILNQMINVVNALIEKNSERDAEGKITKYFHFDEIRIELARELKKNAQERYEMTQNINKAKLEHQKISEILQKQFGIKNPTKSDIIRYRLYQELEHNDYKELYTNAPIARDMLFSKNIEIEHIVPKARVFDDSFSNKTLTFHIINSNKGEYTAFDYITSLNREEELNQYLTRVENAYKTKSISLTKYKNLLKKASEIGNGFINRDLRDTQYIAKKAKEILFQVTKNVLSTSGSITDRLREDWGLVDVMKELNMPKYQSLGLTEVEERKEGNKVTVIKNWTKRNDHRHHAMDALTVAFTKPSYIQYLNHLNARKDENNKNYSVILAIEEKETIKVPTNNGKNKRVFIEPIPNFRQVAKKHLEEIFISHKAKNKVVTKNVNKPAGTDKQQITLTPRGQLHKETIYGKYQYYVNKEEKIGVKFDKETIAKVSNPVYREALLKRLQANDNDPKKAFTGKNTLSKKPIYLDEAKTKTLPEKVNLTYLEEDFSIRKDISPDNFKDLKSIEKVIDQGVKRILIKRLQAYGNDPKKAFVDLEKNPIWLNKEKGIAIKRVTISGVNNAQPLHIGKDHLGKTTLNKEGNEIPVDYVSTGNNHHVAIYRDKEGNLQEQIVSFFDAVVRAQQGLPIIDKTYKQAEGWQFLFTMKQNEMFVFPNATTGFNPAEIDLLDPKNKKQISPNLFRVQKIATKDYFFRHHLETNVETDNVLKNTTWKREGLSGLKDIVKVRINHLGDIVSIGEY

SEQ ID NO: 22049 - protein, 1353 aa, unidentified
  REGION 1..1353: note = Cas Enzyme sequence
MKKTGKIKNSVLQETHYNVGLDIGTSSVGYAVVDADTGKVLVFKKKNMLGGRLFNKGETAKATRVNRSTRRRYDRRRERIKLLRCLMWEMVDEKDPDFFARLDEGFLMREDKTIQSKSILFNDKNYTDKDYYKEYATIYHLRKELFENDEQKDIRLVYLALHHLIKYRGHFLYEGQNFQEINNDINELFVHLYEQLAENCQYNCEIHNNQIEKIVEILKDTKQTKSEKKEVLKPVITKTMRETEKKAAQEIVNAILGKKINFNILFGVDTIIDNEDKALKLSFAEEKYDEQEDYIYEQLQEKAEILDTLKEIYSWFALQDILKGEKTVASAMVKKYEKHKKDLKILRNAVRKYCTPEEYRNFFIEKTTNTKKLNYVNYIGADGRGNTENLYNEIKKLLEDKDNVDKDIQYILKEIDAENFLPLLRTKENISIPYQLTVLEAARIIDNQGKYYPQLSANKDKILSIIEFRIPYYVGPMNTKNRNERFSWACRKEGKQEEKIYPWNWKDIIDEDKTAARFIERMRNTCTYLPGEDVLPRYSLLYSEFVMLNELNKIKVNGKFIEHGMKQKMIEGLFKKQKNITEKSLINYLKKMNYMNTDQYKIEGYQKEKAFASSLASYIDFTRIFGEIHSGNRQMIEEIIEWLTLFEEKSIVKRQIQNKYGTQVTAQQLEAVCKLRYKGWGNCSAKLLKGLKTTIDGDKASIIDILNTTNYNFIQIITNKKYEFAKQIDEYNEDNTMTDITIEDISRLHGSPAIKKGIWQTVKVMNELVQIMGHEPDNIFIEFARGEDDKVRTKNRSTQIDRSYKKWKKEFKGEKFSTEVEKELKNKKYKDRLNEEKMYLYFLQNGKCMYSGETLDIDKLSLYHIDHILPQTYTTDDSIENKVLVLGIANENKADNLLISQKIRNDRKAFWHYLYECGLMGEKKYKNLTRNAIGEGEIKGFINRQLVETRQIIKNVTQLFTQRYANSNVLAVRAGLSSNYREKYGLYKSREINDFHHAHDAFLAVRIGMFLTKRFPGMEKDLIYDAFLRYRSKQNKSSLLKSKYGYLMTFFDEVQCDENGVVIWNPDEDKAYIKSVLYSGNCQISRKKEELTGKFYNETIYPAGSGDLIPLKKNLSVEKYGGYLGKQSAYYVAVQDENGKKQKKIIGIPIYVKELEKTQPGAIDAYIKKELKITSYRMLKDKICKYQEIIVNGNELYLTSAKEVINAKQFFFGEYYYNLYEALLKCLADKVPGDEKDKYDEKLVEVYNYIISKAEIQYKEYKSAFEKIKQAVDFSILSYEDKIGCLKEVLKITGADAECADITKYCPKDSEIKGISRIGRKNNYTFKMDNNGKDNMIFVDKSVTGLYERRYTL

SEQ ID NO: 22050 - protein, 982 aa, unidentified
  REGION 1..982: note = Cas Enzyme sequence
MFKDLGLLSLNDVIKVQEGLDDETFLPLINSKDNATIPYQFNEYQLRLILENQSKYYKFLNEKVDESSLTTLEKIMSIISFKIPYYIGPLVAEDNHPFAWVKRKSFEKVTPWNFSDVIDEATSASRFIERMTNKCTYIPTEDVLPREAILYQEYLALDVLNNLKINGEAIDNYAKQTLLTALYSNKTPLTKKRIATILAKNKNDVVAVSGIDDDVKLAFTSLHKFKAILGENQDLTIEDMEKIIFYRTIFTEQKMFNKKVDELLGHRLSEELCKKIKQLKFKEWSRFSNAFLTGFSKTLNKPVLFDEKTGEVISIIDIMRNNVLSLQQVIHHEKYGVLEALNKYNESMKTNENAFEDVYNLYLSPSVKRPVIKAIHLVDEIIKANDNKLPKKIFLEVTRHDDFARKGTKTISRKKQLDDLYKIAVKESKDLKDLMDELNKKTDADLRSRKLYLYFLQHGKCLYTGNPIALENLVMGDYDIEHIIPQSLITDDSLNNICLVESNINKAKGDVYPLPRTIVNVEKMKPFWERLMKRGFMSESKYQRLIRMSELTEEERFSFINRQLVETSQANKAVAKILEDRYGKGSVVYSKAQRVSDFRHKFKLLKQRDLNKAHHAHDAYLNIVVGNYNDAQTRLAYINKQTGKNFKFNPATAFEEKSFLDVWDKKSNLATIKAVLSRKNILFTQGTYISKGEFYDQQLSPAGEGKLTPVKESGPLSDTTKYGGYSSLNISHFALVEIPKKRGSERRLIQVTRLHFAKIASGKMTLEEYLITYVGLENPKVIIDVIPLNSLIKRGKTIRSISGFDSGNTLIAHNHQEPFFSKDIEDSYYYLNRYLREIELREKEDTELLTSNEPYTIIIGNRNEKEKVQKIVISKESNEKTYLELAMHFAKDIYEHIFRGVNDTLLSNLDNFKTKSIYEQANIIKQLVMLLQTGALPASINLTSVGLNKSINRNRNINLIEKGDKLLIQSITGLYDKEICLA

SEQ ID NO: 22051 - protein, 997 aa, unidentified
  REGION 1..997: note = Cas Enzyme sequence
MKRYVMVERILGIDLGISSLGWAVVEYDKDNDENNKIIDCGVRLFTAAETPKEKESPNKARREARGLRRVIKRRRVRMNTIKHLLVTHKLIDKSILNEETGMFHSQSNRADVWQLRHDALYQLLSGDELARVLIHIAKHRGYKFLGDDENDEESGKVKTAGTELKKKFLEAGCQSVGEWLWKERGLHGKKRNKSGDYEISIPRDFLVEEIYRIFETQQTLGSTLATSELQKAYTYIAFYVKPMQSIEHTVGKCTYFPNEPRAPKASPTAEQFVALGKFYAAVVIDKENKEQKISELKTIQELMNFATSKEKLAYKELRKFLALDEEHIFKELAYKGKPKKVKKGEEGKPQEWEFDKTEAEKKIWISLKGHAKFKEILGEERFSELLKTPDLADEIAKVLTYHKDERDKKEALSKLVLETSIIEKLSTISFTDFNQLCLKAMKALLPEMIQGKRYDEAIGILGKPSHEKSIFLPPLKETNIAILNPTVIRSFAQFRKVANALVLKYGSFDKVHFELAREVNTKEDRKRWEQDRDKNEKMHRQITEKLIEEGIKPNYKNILKSKLRSEQKDTCPYCQKNLHYPMIFQDGYAEIDHILPLSRSQDDSYVNKVLVHSVCNQNKKNRTPFEWLQDEKRDWETFKNYILMESTLGKRKRSYLVKENFSDPQSQNEFIARNLNDTRYMSKAIKTYCENHWKLSSDDDKLRIQVRSGKLTSTLRHQWGLDNKNRETHTHHAMDAIMIAFSTPSMVKKLSDYFARKERKDEKDKPILKTPIKQFKEAVDKAIEIEHQERIQTKTGETIILNRLLISRPPRASVTGAAHKETIKSPKEYKGRGVKVNEGKGMCDNGDMPRVDVFSKEGKYYLVPIYVADFAKEELPIITAYGEELLENATFLFSLYKDEIIGITTKATANKPSKEVKGYFAQLIGPSILLNSFDNGEAEFFRYDNVKKKFVCQLNVLSAIAVKKYTIDPLGYYHEVKSEKRLGTIPQEAKKHPKYRK

SEQ ID NO: 22052 - protein, 1336 aa, unidentified
  REGION 1..1336: note = Cas Enzyme sequence
  REGION 1286..1289: note = misc_feature - Xaa can be any naturally occurring amino acid
MNSFNEMIEDFRKHQPQLFYKKSNGEESKIPYDWTIYYLRKKALSQKITQQELAWLILHFNQKRGYYQLRGEEETEGNDMEIISSKVLSVIKKDKDKKYDKYWYDITLENGLVYKAAFYNDLVYSWIDQKREFVVKRALLKNGDEKIELSYLPTFDEIAKMDKKQQDKFYQKIKVKTESSIGNKTVGAYIYDHLLQNPNQKIKGKLVRTIERKYYKNELKAILAKQIALQSELFTENLLADCIRELYRKNQTQQQNLLSKDFLHLFVEDIIFYQRPLRSKKSTIANCPLEKRSYIDKETNERKDVPIKVCAKSNPYYQEFRVLQWLQNLRIYEIETDREVTAEFIGTAQDYEALFNFLMSQKEIDNEGLLKYFLLTKNPQIKDKVAKSELKKWLTTYRWNYVYDAADNSSKKYPMNETGYELQRYLQKVEGLPANFLTFDTAYQLWHLLYSVKDKVEFEKALKKFAQKYQLDEASFVESFKNFKPYPNEYGSFSEKAIKKLLPLMRFGKHWNFKNIDVHTQKRIDDIINGVANEDIRTIIREKAEKYQLNNETCFQGLPLWLAQYIVYNRHAEATDIEKWTSVSDLEAYLEDFKQHSLRNPIVEQVVTETLHVVRDIWQQYGEGQANFFDEIHIELGRELKNTSKERERLSKQNQENENTNLRIKKLLTELKEDANIQNVRPYSLVQQELLKIYEEGVFSSTDEIEEDIQKIRKKAEPTTPEIQRYKLWLEQKYKSPYTGEVISLTKLFTEEYEIEHIIPQSRYYDDSLFNKVICESAVNKLKTNQLGLEFIQNHHGEKVRIAGNKEVTIFTEEQYKEFVKKYYANNLAKQQKLLLNDIPEKMVARQLNDTRYISKYISEILSKIVRSDEKDEGVNSKNIIPCTGKITTALKQDWGLNDVWNELILPRFERMNQLIQTQLFTSYNDRLQKNLPTVPIEYSQGFQKKRIDHRHHAMDALVIACATREHINYMNNQHALDKSKDKKEKQQSRIDLRTILCEKKNNNWQFKKPWRTFTQEAKEALEHIVVSFKQNLRVINKATNYYEKWEEKNGVLVKKKVKQEGTNWAIRKPLHEETFSGKISLNREKVGKGNILTATRKAVDSSFDVKKISKITDTGIQKILLNYLKYKGSPEVAFSAEGLEELNKNIAQYNDGKKHQPIYKVRIFEEGSKFPLGETGVKATKYVEAAKGTNLFFGIYQGKGKRTYATIPLNEVIERQKQGLPSVPERNEKGEPLLFSLSPNDLVYVPMVGEATETIDFSNLSKEQKERIYKTVSFTGNECHFVKSXXXXIKSYDAKSKIGELGSLNKLEVTISGDSRIKEVCIKLKVDRLGNITKA

SEQ ID NO: 22053 - protein, 1281 aa, unidentified
  REGION 1..1281: note = Cas Enzyme sequence
MRSLLPAVGSEWPELMATDVWQLRKEGLDRVLSPYEFGRIILHLCQRRGALGIKLTNTSKEKEEGESAPKAKGVSEEDPDGAVKEAIDATRKAMLQQGARTFGEYLANLGKERIGQILDRTGNPKIRSDGSPATFSNRIRNADGNFEFHADREMLRDEFERLWAAQGCFESPLSKLLTDELKVLLDNPSGNDTWRNCGLLFGQRRTYWDSGTLGRCKLEPTDECVPVADRHASYFRVIETVNNIRIRCPENEEFRPLTVEERNNVIRKLQTVKTASVTTIRDALGIGKKDLKKKDVSHDSYALNLERDEDREINTDWFYREVVVKGVGQEIWESWDQSKQEGLNRLLLRLDPNLDEDEKKIRSVLTKMELDSEATERLMIGWRARPKLDKRLKLSRRAIMNLLPYMNRPTENGHWPTQIEARILLSLDKDGLDQVAREPISELQRQRYSLGGNRLNKSDRYYLKKHPELLLPPAPMLTNPVVRKAIHEVRRHVIAHIRSAGKRPDRIVIEFARETVKSAKQSDEILFRNRMREKTRRDIREEFIRPAFGATYESLSTNQLRIAEDRVILCRQQKLHCAYSDRAITEREAALGNGLEIDHIIPYSRCGDNSLNNRVLCYRDSNRNKLNQTPREWWGEEHFEQCVRFMKFMDGHRPDRSKDYFSIRDYASKWRNLSSTNVPNDWKGSQLSDTSFAAREVVAYLQQSLWPNEPSYLQGDSNRRIFVTKGAFTAQLRRDWQLFQTIVTDSDNRDKHQSASRKDRGDHREHAVDAVVIALTDPSRIQVLASLIKQQEQVRLRAKINGSKPEKLQRVPIDPPWGNVKSFRRQVLSQIYESFDDHKDSVEESKKVQSVIVVSHRPVGRKIQGKLHEQTLFGPVPNDPTLFTGFISVVNLGPNHLRMPVPEKPAEAIERLANRYISTGIFTDIKEAKKHAKQVVNSKGFVPKLIDPSPGKSGIIRDIGLRKEIRQAIEKRLDAASIPRSADSFTDKDLKRILNPINPITGKPEFRPLTLSSGVPVKRMVLLRTMNDPVIVPRRSWDPNENRWKIDSTARAARAYVGGNNHHIEIRTDPDGKWFGEIVSMYTAAKRARIQKVDPVDRSDDSQKGGRFTMSLAEGETVLMLHKHTRQPGYFVVTKLEKPYTVVFRAHWDARRAGGEKDESGALIENSRRDQFDVSPAQFAKLAIPGEDTPVKVVVDPLGVTRRIEPLVEKSDSLDAIHPRVLEIVREAIALRRSGKTESESARRKHGSWSWMRWRLNKDKLGHLHTQLSPAMRLLLNHDHG

SEQ ID NO: 22054 - protein, 1084 aa, unidentified
  REGION 1..1084: note = Cas Enzyme sequence
MKNTLYGIGLDIGVASVGWAVVGLNGTGEPVGLHRLGVRIFDKAEQPKTGESLAAPRRMARGMRRRLRRKALRRADVYALLERSGLSTREELAQMFEAGGLEDIYALRTRALDEPVGKAEFSRILLHLAQRRGFKSNRRTASDGEDGRLLAAVNENRRRMAQGGWRTVGEMLYRHEAFALHKRNKADDYLSTVGRDMVAEEASLLFQRQRELGCAWATPELQAEYLSILLRQRSFDEGPGGDSPYGGNQVEKMVGRCTFEPDEPRAAKAAYSFEYFSLLQKINHIRLAENGETRPLTQPQRQQLLSLAHKTPDISLARIRKELALPETVQFNGVRCRANETLEESEKKEKFACLPAYHKMRKALDGVVKGRISSLSISQRDAAATALSLYKNEDTLRAKLTEAGFQAPEIDALAGLTGFSKFGHLSLKACRKLIPHLEQGLTYDQACSAAGYDFKGHGAGERAFTLPAAAPEMEQITSPVVRRAVAQTIKVVNGIIREMDASPAWVRIELARELSKTFGERQEMDRSMRENAAKNERLMQELRDTFHLLSPTGQDLVKYRLWKEQDGVCAYSLRRLDVERLFEPGYVDVDHIVPYSLSFDDRRSNKVLVLSSENRQKGNRLPLQYLQGKRREDFIVWTNSSVRDYRKRQNLLREKFSGDEAEGFRQRNLQDTQHMARFLYNYISDHLAFAQSEALGKKRVFAVSGAVTSHLRKRWGLSKVRADGDLHHALDAAVIACTTDGMIRRISGYYGHIEGEYLQDADGAGSQHARTKERFPAPWPRFRDELIVRLSEQPAEPLLDINPEFYCEYGTEHIRPVFVSRMPRRKVTGPGHKETIKGAAAADEGLLTVRKALTELKLDKDGEIKDYYMPSSDTLLYEALKAQLRRFGGDGKKAFAEPFYKPKADGTPGPLVRKVKTTEKATLTVPVHGGAASNDTMVRIDVFFMPGDGYYWVPVYVADTLKPELPNRAVVAFKPYSEWKEMREEDFIFSLYPNDLVYAEHKSGLKFTVQNADSTLEKTWVPKASFAYFVGGDISTAAISLRTHDNAYGLRGLGIKTLKVLKKYQVDVLGNISPVHRETRQRFR

SEQ ID NO: 22055 - protein, 1204 aa, unidentified
  REGION 1..1204: note = Cas Enzyme sequence
MERILGIDTGTNSLGWAIVDKDDNEYHLVAKGTNIFSEGVKIEKGIESSKASERTGYRSVRKHYWRRKIRKIRLLTILSENNLCPPLKKEQLRLWRLKKVYPVDDDFMGWQRTEDKANVNPYKFRYICLTEKLDLTNVTQRYILGRALYHLNQRRGFLSNRKDSTKESEGAVKEGISSLSDDMKASGCEYLGEYFYQLYQKGEKIRNHYTARKEHYLKEFHAICEKQELDAFFVEKLEKAIFDQRPLKSQKGQVGTCTFEKGKPRCPSSHPLYEDFRMYSFLNNIKVQVNTLYEKGERYLTAEEKRQIIPLFKRKSKRTFPFEDIAKKLAGKNNYCYYKDEEEKPYRFNYQMDTQVSGSPVNAQLEELFGEDWLSGVCEVYTLAKDKTRFQIMNDVWHALFFYDDEDKLREFAQNRLQLDEAQAVKFSKISVPNDYAALSLKAIRKILPYMRHYGLIYSEAVFLANLVDVLPGYVWGVKEMREAAIENVIDVMHSYDKKNIDGITLEACVKGFLKERYQVDDDTLKKLYHPSMLDLYPRQRANQDGIYQLGSPRISSVKNPMAMHSLFRLRKVVNLMLKKGYITPETKIHIEFSRDLNDANMRWAIQTWQRENEKDRERCRKEIEKYVATPTEKDILKYQLWEEQNHKCLYTGEEISLTDFLGKDPRYDIEHTIPRSAGGDSTKMNLTLCSNSYNRDIKKTKLPSQLAAHEEILERIKAWKEKYEELDHIFRKLKGSSASTKEEKDRIIRKKNLLKLQRDYWRGKYERFTMTEVPEGFSRRQGTDISVISRYARMYLKSVFKQVYIVKGIATSDFRKLWGIQEDYARKERVNHVHHCIDAITIACIGKAEYDKLAQYYHETDEYKLGKGKKPDFEKPWPSFVLDIRHIQDELLIAHYSKDNLPKQAKRYVRDSKGGKILTQGDTARASLHNETYYGAIEVDGDVKYVVRKSLDSLDEKDIKNIVDAEVRSKVEKAVQSSGSLKKAVEKTIWMNEEKQIPINKVRVFAGSVTRPIHIRQQRDQSKHEYKRQYHVQNDRNYMMAIYVGQDKKGKEKREFELVNNITAVNFYRRSNDKVPTDNQLVPQFSKSGYELRYKLKIGTMVLLYENSPEEIWDLDRANLQKRLYKVTGLSSMVIQGKYEFGTIEMIHHQNAKPSTEIKKVNGEFKHDEEFRPGIKMLHSQIKALVQGVDFEINDLGEIRRLI

SEQ ID NO: 22056 - protein, 1426 aa, unidentified
  REGION 1..1426: note = Cas Enzyme sequence
MKNILGLDLGTTSISFAHIVEDENKEKSEIKELGVRIVSLTTDEQSDFEKGKSITTNANRTLKHGARLNLDRYQQRRKYLIDLLQKANLITSSSILAENGKNTTHSTWQLRAKAVTERVEKEEFARVLLAINKKRGYKSSRKAKTEDEGQAIDGMAIAKRLYDENLTPGQLSLQLLQQNKKLLPDFYRSDLQKEFDLVWNFQKQFYPDILTDTFYKELQGKGKDATSKAFSKRYHFDTAENKGSKESVRLQAYQWRAEAISKQLSKEEVAYVLTEINNNLNNASGYLGAISDRSKELYFNRQTVGQYLYAQLQENRHNSLKNKVFYRQDYLDEFERIWETQASFHKELTEELKKQIRDVVIFYQRKLKSQKGLISFCEFESKEIEIEKDGKTITKSIGARVVPKSSPLFQEFKIWQILNNVICKRKGIREKKISAKTTQLDLLNESSQTIFSLDMECKQLLFDELNLKGDLKSDKVLKLLGYSPQEWEINYNQLEGNRTQKALYEAYLKIVEMEAHDVKDILQIKSAKDDWSLDESPLSASEIRESVKAIFQALGICTKILYFDPLLPVKEFEKQDSYQLWHLLYSYESDDSTSGNETLYRILEKKYAFKREHARILANVALQDDYGSLSTKAIRKIYPYIKENQYSTACEMAGYKHSKLSLTTEELEARELKNIIPLLKKNALRNPVVEKILNQMINVVNALIEKNSERDAEGKIIKYFHFDEIRIELARELKKNAQERYEMTQNINKAKSEHQKISEILQKQFGIKNPTKSDIIRYRLYQELEHNDYKELYTNAPIARDMLFSKNIEIEHIVPKARVFDDSFSNKTLTFHRINSNKGEYTAFDYITSLNSEEELNQYLTRVENAYKTKSISLTKYKNLLKKASEIGDGFINRDLRDTQYIAKKAKEILFQVTKNVLSTSGSITDRLREDWGLVDVMKELNMPKYQSLGLTEVEERKDGNKVTVIKNWTKRNDHRHHAMDALTVAFTKPSYIQYLNHLNARKDKNNKNYSVILAIEEKETIKVPTNNGKNKRVFIEPIPNFRQVAKKHLEEIFISHKAKNKVVTKNVNKPAGTDKQQITLTPRGQLHKETVYGKYQYYVNKEEKIGVKFDERTITKVSNPLYREALLKRLQANDNDPKKAFTGKNALSKKPIYLDEAKTKTLPEKVNLTYLEEDFSIRKDISPDNFKDLKSIEKVIDQGVKRILIKRLQAYDNDPKKAFVDLEKNPIWLNKEKGIAIKRVTISGVNNAQPLHIGKDHLGKTTLNKEGKEIPVDYVSTGNNHHVAIYRDKEGNLQEQIVSFFDAVVRAQQGLPIIDKTYKQAEGWQFLFTMKQNEMFVFPNATTGFNPAEIDLLDPKNKKLISPNLFRVQKIATKDYFFRHHLETNVETDNVLKNTTWKREGLSGLKDIVKVRINHLGDIVSIGEY

SEQ ID NO: 22057 - protein, 983 aa, unidentified
  REGION 1..983: note = Cas Enzyme sequence
AREGKTLENGRRILAGVRIFPEGVDRYQQKREKPRGQQRREARSARRVHQRRGQRKQKLVAILRNAGILPGDPGELSAVLATNPYPLRARGLDEPLTLQEFGRVMFHLNQRRGFKSNRKQGKTKEDGAVAKGTAALKEEMEKAGCRTLGEYLASLDREFRHTDAQSTRLRNRYTVRSMYEDEFEKLWTAQAPHHPEVLTDPLKAKVHDAIFYQRPLRFDPDVIGDCELEAGQKRCPRAHWKGQQFRMLQEINLLQLFDPTIPRERPLTNDERTALAEALATKRRMSFDEIRRLLGLLDSQTFNLEERSKRSYLTGNLVETALRKKPLAAWYESASPQQREEVYSALAEVEDEEDLAAMAADRWGMSEKQIEKLLAIQLPTGYFRVSLAAITKLMPFLEAGHIYSEAKEKAGYALTPTRDVKAHLPPVDEGIPNLTNPLVRRALSEARKVVNAIIREYGKPAEIVVELARDMKLGAAKRRQVFFENNERRKENEAIRDRLIREFNLPNPSRDDVIKFRLWVECNGLCPYTGRVIPAGKLFGPEVQVEHIIPYSRSLDDSYMNKTLCYEDENRHKHNRTPWEAYGDTPERLDEILQRVRPLPYAKRRRFPLKEVDLDKFIERQLNDTRYLSRAAVGYFRLLFEDDQRVRCVKGGTTAELRHQWGLNGILDAEGGNRKTRDDHRHHAVDAAVIAMTTRSALQRLSTVKYAAAPKELAPPWESFRDDLADAVRSVKVSHRPARRIAGPLHEETGLGWTGEAGTYVRRVAVGALTPAMVEKIRDPAIRDIVKQRCQERGIELRGSKAMGKAMTDPPLTMPSGVPIRRVRILTNESKAVPLRAIGGTIVRAALTGGNHHVAIYEEEGEGRSRWTGEVVTRFEASRRLREGIPVVRRDCGDSKRFRMSLCINDMVTITDPAAGTEDLYRVQKTSSDAGGNRPDIVFRLHCAAQLDDRSSEVRIRSWDKLREYKVRKVVVGPLGRIKPAND

SEQ ID NO: 22058 - protein, 1164 aa, unidentified
  REGION 1..1164: note = Cas Enzyme sequence
MHLNRKAEVPKPTDLNYRIGLDIGIASVGWAVLENNTHDEPFRIIDLGVRIFDTAEQPKTGASLALPRREARSARRRLRRRGHRLERIKKLFEAEGLINIEEFEARYKRTGLPDVYKLRYEGLDRRLTNDELAQVLLHIAKHRGFKSTSKAADGADSDTGEVKKSISANKALMQEKGYRTVGEMIYLDEKFHTDCPWNENGYILTPRNKSGDYKHTVLRDMLADEVMEIFKAQRALENDAATEELERAYLDIMLSQRSFDLGPGTPSKYAMEGFEDRVGLCTFEGKNGEKRAPKAAYTSEFFVALEKINHTKIVYADGNTRFFTDDERYAIIALMHRQQTVKYTAVRRAIGLAEEDKFYNLNYSPKSGNKKSPEDTDFVKMENYHKIRKALGEEVVSEHLSPDKIKLYDDIARILTLYKNDDSRIRRLAEHDIASECYDALLEMSPSKFHNLSLKAMGKIIPFLLEGNTYDKACELAGYDFRAENNGEKSILLKGKNITNIVNDITNPVVRRSVSQTIKVINAIILEYGSPQAVNIELAREMSKDFDERRKIKSDMEAREKENDKVLGRVREYKPNPTGQDIVKFRLWEEQGGVCLYSGEKIDINDLFSSNGGYDVDHILPYSITFDDSYRNKVLVKAAENRQKGNRTPYEYIMAEKGETAWNQYETLVKNTVKDYKKQLKLLKKHISDEEKAEFKERNLTDTKYITRIIYNMIRQNLVLKPYLNLERKRKKQVMAVNGAITHYLSKRWGLAGKDRRTDTHHAQDAVVIACTTDGMINRISRYSKGRELAYSRGFEFVDEETGEILNRDNFSREDWDEKFGVRLPMPWEHFVDELDIRMSRYSTMGEGVSSGTSPREFILSHRDVFNWINYPEWMLVEGRPGRRGVLDGIFVSRMPNHKVSGQAHEETIRSAKYYEDGGSVFETGGYVVTKKSIQDIKLKDGEIKEFFNPDSDRLLYEALVDRLNQYGNDPKKAFAEPFHKPKSDGTPGPVVKKIKVFEKQTSGVLVREGNGIAANGSMVRIDVFCEENKGKKKYYFVPIYTADVVKKRLPNRAATQAKMPSEWRLMNDENFIFSLYSRDLIYIESDKGVQTKDIDNVTGKVEKMYAYYTGADTSTASIAGKLHDSSAMFRGLGIQSLRKLQKCQIDVLGNISFVSKEKRMTFN

SEQ ID NO: 22059 - protein, 1165 aa, unidentified
  REGION 1..1165: note = Cas Enzyme sequence
VIDIIANTDNGRKKKHEELQELFGVVKKEKSSNELLKCLCGLSVNAKLIFDTNSEEKVTLCFNDFSYTDKIPELMEQLTEEEYALIEQLKSIYDYAVLAGTLKGYDYLSCARVKLYGKHKKDLKLLKALYRKYKTEEEYNKMFRSNIDGTYSAYVNSLNSEDAIFKSDEVVEGGKYRRNMKERKSEHIYSTIKKAFKDITDDKDVSFVLEQIEKEQFLPKQLTGANGVIPNQVHKKEMERILKNAENYLPFLKEKDESGLTVSERIIQLFTFQIPYYVGPLGENSKTGWIVRKEKGAILPWNINEKVDMSATSEAFIGNLIRSCTYIQGEKVMPKASLAYERYCVLNEINNLCIDGERIDTKLKQQIYKDCFMKGKRVTKKQLCSYLAAQNAIHSEEQLTGIDKNINNSLSSYGKMDAIFGERLKEDAILAAAEDIIYWGTIFGDSKKMLKQRLKKYVKEGIIDENQLKRILGYKFKDWGRFSKALLTLNGCDKSTGEIISLGQAMWEYSLNFMELINSEEFTFKEELKKHTTDAMKSLSEFTYEDLEDGYFSVPVKRMIWQTLLVVREIEKVMGYAPKRIFVEMTRTEEEKGDKGRKESRGNQLLELYKSIKNTESHNWREEIATADKDGKLRSKKLFLYYMQMGRDMYTGEEIDLGRLYDDNLYDIDHIYPRHYVKDDSIMNNLVLVNKRSNQDIKKDFYPIPEQIKTNPKVRELWDTLHKQKLITDEKYARLTSNTAFSEKQLGDFIARQLVETGQGTKGVADLLEQLFKDTDIVYAKATNVSDFRRDNGLLKSRLVNDFHHAQDAYLNIVVGNVYYTKFTRNPWNFIRKDYEKDKEKNRYNLARMFDWNVVRGSETAWIAERKDEKGTIATVRKMMQKNTPLMTRMNFEQHGGIANATLYSAKKAKVENYIPLKASDERMKDVTKYGGFTSATIAYYFIVHHKEGKKENVSIEGLPLHCKTKVEQDANGLEKYCEEVLGYSEVNILRRKLKIQSLLEFNGYQVHLSGKTGDRLILRNAMNLCLPAKWVTYIKKLEKAVNVQIFEEVITSGENIKLYDILTDKHANTVYAKRPNAYGQKLLADRKTFVALQLKQQCEALLQMLQLTKIGSTETNLLLIGESEHSGKILISKNLKTSDRPAIISQSATGLYEKKEWIFDDKVK

SEQ ID NO: 22060 - protein, 1143 aa, unidentified
  REGION 1..1143: note = Cas Enzyme sequence
MYRLGLDVGIKSVGWCVLECDENGEPIQINALNSRIFDAAEQPKTGASLAEPRRNARGLRRRIRRKSFRLERIRKLFSENGIELFETQDDLICLKDEYKNLDVVKLRSDALDKKLTEAEFARVLYSLARHRGFKSNKREGAKDSDEGKLLGSIRKSEEEMRESGMRTRGEQLYKKYLMEGKPVHNKGGDYSMCVSRDILVKEIELLFEKQKEFGNNFATDENKEKYLDIFLSQRNFDEGPGKGSQYTGSHDVKKCEIYRDEDVAAKGTYTSEWATIYQKINNLSIICGGDRRRLSNEERQIAVELAKKVDKVTYKAFRKAIKLDDDYRFSALNYSEKKKSDKKKNEGESKSDVVEINDVVDSLACEDKGDFITAKNSNKIVKALNDNLKSDIELIDEIAEICTKYKSENLFRSAIAESKIIDGRLDEETIEKLSKIDMKGYGHLSLHVLREILPYLEEGMVYSDAMQKAGHNHSEHNFEKQKYLGTKEVYDAIGGVTSPVVKRALSQTVKVIDAVIRQYGSPYAINIELARDMSMSKDERDKLKKENDARAAKNEAIRENIAKLNAMPNSTNVLKYKLYEEQDHKCAYSMETLDINHLFEDGYYEIDHIIPYSRSFDDSFNNKVLVLKRENQNKRNSTPVEYFERIGRDYDEVLAFWKAVYQKRNRKKLEFLQKKEINESEWKNRALNDTRYASRMLANLIKDYLLFDEKSKEKYGRVETVKGAITSYLRRFWGVQKIREDGDKHHAVDAAIIACVTPKTKNKIERYNQIKESRKMRNGQYVLEDGEICDSDYYDKNSHLVLPYPYKEFINELDARVMDEPVLMQNKLRLLGFNENYLMNAKPFVVSRMTSRKAKGCINEATVFSSKYADNKYPTVCDGNNVIVKRTALANLKLDKNGEINGYFQPKGDVALYNALKQRLVEFDGDAKKAFATPIRKPCNSGQGNIVRTVKTYETYTGGGMILEKNKGIVKNDGMIRVDLYSKDGKYFGVPVYVADLYRGELPKRAATNGKQQNEWRVIDDTYTFEMSIYQDDLLRIESKKGIELKKNKDVENSAKATTKTITDDFAYFIGFDRSTASIKIEDTTGCYFAKSIGIQNIGKITKCEIDVLGNVQEIKKRPKQPQPLKMLNDKEKAEKRKNNQNK

SEQ ID NO: 22061 - protein, 1313 aa, unidentified
  REGION 1..1313: note = Cas Enzyme sequence
VKSLETYNIGLDIGVGSVGWCVTDDNSNILKKGKNHTWGAHIFEEANTAKDRRMYRGAKRRLTRRKERINILQSLLLEDLEKEYPNFLPLLRESSLTFDDKTKSESILGVKYNLFSDKNMTDETYYDQFPTIYHLRKYLMDTKEKVVIRLVYLAIHHIIKYRGNFLYEGDFAENTSEVKENLQNLLEWLKNEYDITITNNIEEILQILQNKKDTKASKKEKIISLFDYDKEEKQVITNVVNSFLGYAFDVNKIFNIDFEKAKISFSSEIENEDELIGLLDSQAEIYQNMKTIYSWFTLQDILGGRAFISEAFIDKYNKYANDLKLLKQIYKTYLPNEYNAMFKKIGKDNYVAYNGKNQGKTCKKCSPDEFFANLKKVIEKLPDECEEKANILNEIADNNFLVKLNVTDNGAIPHQLHQKELKIILENQGKYYKTIENNKQKILDLFSFRIPYYVGPLAKKEGQSKWAWVVRKSDEKILPWNFENVVDEDATAEKFIRRMTNKCTYLINEDVIPKQSLLYSEFCVLNELNNIRINNHHIAKDFKQKIIDEIFKKQKKVTAKNIKDWYRKEGIEVKSLTGLSDGNTFNSNMSSYIDLTRILGKVDEDNYEECENIIYWITIFEDKKILKRKIKKEYSKLTDEQVNQLVKLRYTGWSRLSKELLLGIKSNDNENIMQKLKDTPLNFMQIINNDEYGFNKKIEERMPQSSGKITYKDVDEIPTSPANKRAIWKVMCIVREIVKVMGKEPQNIYIEFARNEEKNKTLKDNRAKDLLKKYDEIEKQIKYLKEYDNNVYKELKKHQSDKTLEEKLYLYFIQNGKCLYSGKKLNIDELNLYEVDHIIPQSYRKDDSIDNKALVIRSENQRKKDSLLLSDEIIEGRKEWWQSLLDSGLISQTKYFRLTRRKMFETDDDMDNFVHRQLVETRQITKYVTNLLVNEYKNTQVYALRANLTHNFREKYNIYKNRNVNNYHHAHDAFILCVIGNILDKYWHGKEEFKYSEYVKNYLRDNKKQNEKFGMIMNFINKYVDIAKVKEQLRYKDCFITRMLIEETGEFYNQTLYSPKDKPVISLKNGLPAEKYGGYSNEFKEYYTIFSYKNDKGKIEYQLVGIPVKIAYDIKNGKENLENYIKENYISGDYTDFKIIRRKILKNQQYLDENNEPMILCSDKEIRADKELILNESMDELIYIMNLDERQLDDNQKEKLENGYEYMFDYLTAKLGKEYKVFSNVYNKLLNKREDFMGLDENNKKMTINGLIDLMEKGQGNLKALGLGDRAGRMSGQNFKTDRLLKMTFIDKSVTGMYERRFKVNGMENNCSK

SEQ ID NO: 22062 - protein, 1536 aa, unidentified
  REGION 1..1536: note = Cas Enzyme sequence
LIIYFIFEKIVNTILVMKKIVGLDLGTNSIGWALINAYIDEYNKEHLYGIEACGSRIIPMDAAILGNFDKGNSISQTADRTSYRGIRRLRERHLLRRERLHRILDLLGFLPKHYSDSLNRYGKFLNDIECKLPWVKDETGSYKFIFQESFKEMLANFTEHHPILIANNKKVPYDWTIYYLRKKALTQKISKEELAWILLNFNQKRGYYQLRGEEEETPNKLVEYYSLKVEKVEDSGERKGKDTWYNVHLENGMIYRRTSNIPLDWEGKTKEFIVTTDLEADGSPKKDKEGNIKRSFRAPKDDDWTLIKKKTEADIDKIKMTVGAYIYDTLLQKPDQKIRGKLVRTIERKYYKNELYQILKTQSEFHEELRDKQLYIACLNELYPNNEPRRNSISTRDFCHLFIEDIIFYQRPLKSKKSLIDNCPYEENRYIDKESGEIKHASIKCIAKSHPLYQEFRLWQFIVNLRIYRKETDVDVTQELLPTEADYVTLFEWLNEKKEIDQKAFFKYPPFGFKKTTSNYRWNYVEDKPYPCNETHAQIIARLGKAHIPKAFLSKEKEETLWHILYSIEDKQEIEKALHSFANKNNLSEEFIEQFKNFPPFKKEYGSYSAKAIKKLLPLMRMGKYWSIENIDNGTRIRINKIIDGEYDENIRERVRQKAINLTDITHFRALPLWLACYLVYDRHSEVKDIVKWKIPKDIDLYLKSFKQHSLRNPIVEQVITETLRTVRDIWQQVGHIDEIHIELGREMKNPADKRARMSQQMIKNENTNLRIKALLTEFLNPEFGIENVRPYSPSQQDLLRIYEEGVLNSILELPEDIGIILGKFNQTDTLKRPTRSEILRYKLWLEQKYRSPYTGEMIPLSKLFTPAYEIEHIIPQSRYFDDSLSNKVICESEINKLKDRSLGYEFIKNHHGEKVELAFDKPVEVLSVEAYEKLVHESYSHNRSKMKKLLMEDIPDQFIERQLNDSRYISKVVKSLLSNIVREENEQEAISKNVIPCTGGITDRLKKDWGINDVWNKIVLPRFIRLNELTESTRFTSINTNNTMIPSMPLELQKGFNKKRIDHRHHAMDAIIIACANRNIVNYLNNVSASKNTKITRRDLQTLLCHKDKTDNNGNYKWVIDKPWETFTQDTLTALQKITVSFKQNLRVINKTTNHYQHYENGKKIVSNQSKGDSWAIRKSMHKETVHGEVNLRMIKTVSFNEALKKPHAIVEMDLKKKILAMLELGYDTKRIKNYFEENKDTWQDINPSKIKVYYFTKETKDRYFAVRKPIDTSFDKKKIKESITDTGIQQIMLRHLETKDNDPTLAFSPDGIDEMNRNILILNKGKKHQPIYKVRVYEKAEKFTVGQKGNKRTKFVEAAKGTNLFFAIYETEEIDKDTKKVIRKRSYSTIPLNVVIERQKQGLSSAPEDENGNLPKYILSPNDLVYVPTQEEINKGEVVMPIDRDRIYKMVDSSGITANFIPASTANLIFALPKATAEIYCNGENCIQNEYGIGSPQSKNQKAITGEMVKEICFPIKVDRLGNIIQVGSCILTN

SEQ ID NO: 22063 - protein, 1520 aa, unidentified
  REGION 1..1520: note = Cas Enzyme sequence
MKKIVGLDLGTNSIGWALINAYIDEYNKEHLYGIEACGSRIIPMDAAILGNFDKGNSISQTADRTSYRGIRRLRERHLLRRERLHRILDLLGFLPKHYSDSLNRYGKFLNDIECKLPWVKDETGSYKFIFQESFKEMLANFTEHHPILIANNKKVPYDWTIYYLRKKALTQKISKEELAWILLNFNQKRGYYQLRGEEEETPNKLVEYYSLKVEKVEDSGERKGKDIWYNVHLENGMIYRRTSNIPLDWEGKTKEFIVTTDLEADGSPKKDKEGNIKRSFRAPKDDDWTLIKKKTEADIDKIKMTVGAYIYDTLLQKPDQKIRGKLIRTIERKYYKNELYQILKTQSEFHEELRDKQLYIACLNELYPNNEPRRNSISTRDFCHLFIEDIIFYQRPLKSKKSLIDNCPYEENRYIDKESGEIKHASIKCIAKSHPLYQEFRLWQFIVNLRIYRKETDVDVTQELLPTEADYVTLFEWLNEKKEIDQKAFFKYPPFGFKKTTSNYRWNYVEDKPYPCNETHAQIITRLGKAHIPKAFLSKEKEETLWHILYSIEDKQEIEKALHSFTNKNNLSEEFIEQFKNFPPFKKEYGSYSAKAIKKLLPLMRMGKYWSIENIDNGTRIRINKIIDGEYDENIRERVRQKAINLTDITHFRALPLWLACYLVYDRHSEVKDIVKWKTPMDIDLYLKSFKQHSLRNPIVEQVITETLRTVRDIWQQVGHIDEIHIELGREMKNPADKRARMSQQMIKNENTNLRIKALLTEFLNPEFGIENVRPYSPSQQDLLRIYEEGVLNSILELPEDIGIILGKFNQTDTLKRPTRSEILRYKLWLEQKYRSPYTGEMIPLSKLFTPAYEIEHIIPQSRYFDDSLSNKVICESEINKLKDRSLGYEFIKNHHGEKVELAFDKPVEVLSVEAYEKLVHESYSHNRSKMKKLLMEDIPDQFIERQLNDSRYISKVVKSLLSNIVREENEQEAISKNVIPCTGGITDRLKKDWGINDVWNKIVLPRFIRLNELTESTRFTSINTNNTMIPSMPLELQKGFNKKRIDHRHHAMDAIIIACANRNIVNYLNNVSASKNTKITRRDLQTLLCNKDKIDNNGNYKWVIDKPWETFTQDTLTALQKITVSFKQNLRVINKTTNHYQHYENGKKIVSNQSKGDSWAIRKSMHKETVHGEVNLRMIKTVSLNEALKKPQAIVEMDLKKKILAMLELGYDTKRIKNYFEENKDTWQDINPSKIKVYYFTKETKDRYFAVRKPIDTSFDKKKIKESITDTGIQQIMLRHLETKDNDPTLAFSPDGIDEMNRNILILNKGKKHQPIYKVRVYEKAEKFTVGQKGNKRTKFVEAAKGTNLFFAIYETEEIDKDTKKVIRKRSYSTIPLNVVIERQKQGLSSAPEDENGNLPKYILSPNDLVYVPTQEEINKGEVVMPIDRDRIYKMVDSSGITANFIPASTANLIFALPKATAEIYCNGENCIQNEYGIGSPQSKNQKAITGEMVKEICFPIKVDRLGNIIQVGLCILTN

SEQ ID NO: 22064 - protein, 1536 aa, unidentified; identical to SEQ ID NO: 22062
  REGION 1..1536: note = Cas Enzyme sequence

SEQ ID NO: 22065 - protein, 1317 aa, unidentified
  REGION 1..1317: note = Cas Enzyme sequence
MFDNAQTAEERRMVRTSRRRIARSHERLMLLQQLFAEEMGKVDCLFFIRLNNSQLFLDDKDKSLKSANILFDDKNFTDKDYFRDYKTIYHLRSYLIDNPITDIRYLYLAVHHIIKNRGHFLYDGQTFDVNDRQNVLSKFENVNSFLADNDMPTLELANINGVLDCLKDKNLGKKAKLGKLKELFGVKSDKQQLAILNALSACKFSIKDLYSADEEFDIDKLSFDDGGYDEKYLAVENEVGADDCVLIRDLKAIYDWAILSNIIGDHKFISQAKVQIYNDHQADLAELKAYIRNNCDADTYSKVFRYSKGVANYAAYIGMDKHKSYSKCSKDDFYTFLKKTIEIKDEHILKKIDDGTFLPKQVSNANGVIPYQLHYAELSAILNNAENYFPFLKDEQDGLSVSQKILSIMSFKIPYYVGPLNDRDKKFAWVKKFDGMQNVKVTPWNFDKVVDLDASEGAFITKMTNKCTYIPTEDVLPANSLLYSTFTFLNELNNLKINGVKDMRARDLIFEYAKSHKKVTLKACLNSLEKNAIIPNNSKVEIFSGTDGDFKNSLAPFVDLKFLGEKLYTNTEMCEQIILWLTLISDKDRLEKRIRESYGKVLTDEEIKRLKGINYSKWGRLSKKLLVDIKSPYCTDENGECLSIIQAMFATGENFMQLMSGKYGFADSIDEYNKSQKISSGVTYKTVKELYCSPSVKRAIWRSFEIVKEIEKIMGKPPKKIFIETTRDADDKSKKGKRTISRKEQIKNLYRDIKDSERDWKEEIEDTPDGKFNSDKLVLYYRQMGKCMYTGNDISLQDVFNTNICDIDHIYPQSKIMDDSLDNRVLVLKTVNKDKDDIYPIKEEIRQKMSGYWKVLLDKKLISEKKYARLVRNTSLTMEECTDFINRQLVETSQSTKCLAQILRQYFGDRCEVVYSKAVNVDRFKQGKKDDNKDDERECKVIKIRELNDLHHAKDAYLNIVVGNVYNTKFNHDARVYFKSHDINSYNINNLFNRDIKGAWVVGDRKRVIDIANKNTCRVVRMTESGKGKFFDINLVSPKGQKADKLQNWIPRKLKSANSDSGAIANVSRYGGYTGINTAYYMIVKSVDKKGRVKISFVAYPLYLKKNYNDDIDIENKIKYCVEKFGLNEPQILVDNIKKNTLIYINKVGYYLTGGATPSDNRIEVCNTYQLHLETANLKILKEVVKSIKSKEKFKKIILSPDITKNDFIQLYDVFLKKLSSEPYSNLPTIDNIFANLKEKRSYFEELSLSEQCEVLYQILHLMQCNKTSADFTLLGLSANSGKMRMANNFTVDGNIKIIYQSPTGYYKKVIDVKDLL

SEQ ID NO: 22066 - protein, 1355 aa, unidentified
  REGION 1..1355: note = Cas Enzyme sequence
MKSIRKESQEPYYIGLNVGPTYAAYAVTNTSYNLSRFKGKDMWGVYKYDEAETAEDRRRFRQGRNSNLKEKERIRLLRSYFFDEIQKVDENFFVRLDNSFYYSEDKDIRLNGDRNVLFADKDYSDRQYMSEYPTIYHLRSELAHGSKKPDIRCLYLAVSHMMKNRGNFYTKNLEDTDKSLGEVYENICTKAAEYDIVLKMEVPAEKIMDIMINPGISGKVKATLVTQLVDATSKPALSIIKLMCGLKAKIADIFPELAESLEEDEKKLSFSFKDEDYFERADSIEKLIGENEYSLIESVKEMYDAAIIKNIIQDYRYVSDAKIASYEKHANDLEILKAELKTILSKNEYKRFFSKEEPGTYSAYVHFSNHNNQITRRKSDKGRTQEDLYHTIKKYLADADDEQAEYILDEIDKGTFLPKQRIKDNSLIPNQLYSVELKAILENASKYYDFLNSRDESGLTVSERILSLFTFTMPYFIGPVSPYNSRGWAVRKEPGKVYPWNLKDKVDMGQSAKQFIEKIIGKCNYLSGEKVLPNASLLYEKYRVLNEINSISVDGEKISVEMKQAIVNELLAGGKTVSKKKILSFLVKNGSATSDSIITGIDDKLNNSMASHRFFADIFGSLNKDNEAVAEDIILWSTIYGSSKDFVTEQILNKYPDMFDEEQLRKIHNLNCKDWGRLSRGFLNMKGLDKDNNELISVIDAMWSNNLNLMELMYDTRFDFSARVKDKTENAVKNLFSFDYDDLNDLYATTAQRRTIWASVKIVREIVKIKGFAPESIFLDTVKSRPNDIPKESRKGKLIALYKGMKGVSADWKKKMISLIDQCDADGSLKAKNVYLYFLQMGKDMYTGEDISLEELKSPDKRKKHNIDHIYPKHFVKDESIDNLVLTNTDLNRDLLDRYPVPKDIYDNMHEFWQQLRRSGLISAEKLARLSDRNPLSDEKRASFIGKLYNQAGSSTRMMADIFKNILPKDTKVIYAKTSETNEFRHKFDFPRTTIINDDYLAKDAYLNIVVGNVWYTKFTASPIWYIKEEYRKKKSEYNLNRMYDFNVIRDDRIAWITDKTNPEAATIHTVNKVMNRNTVITITRTTQGHGGLTNATITRADKAKEGVYLPLKTSNERMSVTKYGGKTSITSAYMFLAEHTLKKSRVRTIYSLPLHLVSQIKGKKDLEKYCTDVLHLIEPVIKIAKIMLYSELIIDGYSYLLGGKAGVQYYLRNNVPMRVNAEWQKYVSKIEKYINYKSLDKDMSADKNIELYDELVDKHTNSIYSKRRNTAGDMLKKGRDTFIKLSVKEQLEVLNQIFTLTRMGTNIANLSGIGAGQHVGSITMGCNISTFDSVKLVNRSVTGLFSNEVDLLHI

SEQ ID NO: 22067 - protein, 1355 aa, unidentified
  REGION 1..1355: note = Cas Enzyme sequence
MKSIRKESQEPYYIGLNVGLTYAAYAVTNTSYNLSRFKGKDMWGVYKYDEAETAEDRRRFRQGRNSNLKEKERIRLLRSYFFDEIQKVDENFFVRLDNSFYYSEDKDIRLNGDRNVLFADKDYSDRQYMSEYPTIYHLRSELAHGSKKPDIRCLYLAVSHMMKNRGNFYTKNLEDTDKSLGEVYENICTKAAEYDIVLKMEVPAEKIMDIMINPGISGKVKATLVTQLVDATSKPALSIIKLMCGLKAKIADIFPELAESLEEDEKKLSFSFKDEDYFERADSIEKLIGENEYSLIESVKEMYDAAIIKNIIQDYRYVSDAKIASYEKHANDLEILKAELKTILSKNEYKRFFSKEEPGTYSAYVHFSNHNNQITRRKSDKGRTQEDLYHTIKKYLADADDEQAEYILDEIDKGTFLPKQRIKDNSLIPNQLYSVELKAILENASKYYDFLNSRDESGLTVSERILSLFTFTMPYFIGPVSPYNSRGWAVRKEPGKVYPWNLKDKVDMGQSAKQFIEKIIGKCNYLSGEKVLPNASLLYEKYRVLNEINSISVDGEKISVEMKQAIVNELLAGGKTVSKKKILSFLVKKGSATSDSIITGIDDKLNNSMASHRFFADIFGSLNKDNEAVAEDIILWSTIYGSSKDFVTEQILNKYPDMFDEEQLRKIHNLNCKDWGRLSREFLNMKGLDKDNNELISVIDAMWSNNLNLMELMYDTRFDFSARVKDKTENAVKNLFSFDYDDLNDLYATTAQRRTIWASVKIVREIVKIKGYAPESIFLDTVKSRPNDMPKESRKGKLTALYKGMKGVSADWKKKMISLIDQCDADGSLKAKNVYLYFLQMGKDMYTGEDISLEELKSPDKRKKHNIDHIYPKHFVKDESIDNLVLTSTDLNRDLSDRYPVPQDIYDNMHEFWQQLRRSGLISAEKLARLSDRNPLSDEKRASFIGKLYNQAGSSTRMMADIFKNILPKDTKVIYAKTSETNEFRHKFDFPRTTIINDDYLAKDAYLNIVVGNVWYTKFTASPIWYIKEEYRKKKSEYNLNRMYDFNVIRDDRIAWITDKTNPEAATIHTVNKVMNRNTVITITRTIQGHGGLTNATITRADKAKEGVYLPLKTSNERMSVTKYGGKTSITSAYMFLAEHTLKKSRVRTIYSLPLHLVSQIKGKKDLEKYCTDVLHLIEPVIKIAKIMLYSELIIDGYSYLLGGKAGVQYYLRNNVPMKVNAEWQKYVSKIEKYINFKSLDKDISADKNIELYDELVDKHTNSIYAKRRNTAGDMLKKGKDTFIKLAVKEQLEVLNQIFTLTRMGTNITNLSGIGAGQHVGSITMGCNISTFDSVKLVNRSVTGLFSNEVDLLHI

SEQ ID NO: 22068 - protein, 1358 aa, unidentified
  REGION 1..1358: note = Cas Enzyme sequence
MKQGKRGYYLGLDIGTDSIGYAVTDEQYHLLRFHGNDAWGSHVFDSASLCDERRGFRSARRRLDRRQQRVKLLQEIFAKEIANIDPRFFIRLSESYRWRDDTDDRYIYFNEEEYTDIQYMRDYPTIHHLICELMENEEEHDIHLVYLACAWLVAHRGHFLSQLSVDNIDSLIDIESVYQKFLHFFIDNGCENPWIQDAELVGGILKEHIGVTEKHNRLGEIMLGNRKPSKDVRETFLYSEYCIIRLLAGGTCKLRDLYGKEEYEDFGSVSLEMDDDKLAEIMINIGEDYELIAVLRSLHDWSVLADILDGQNGLTNISTAKVAIYEQHKKDLATLKYFIRKYCPEKYNAIFKDAREDNYVAYSYHYNNKLDGQIKKKADTETFSKSLIKIINSIKCDKEDEIIYQDMNNRLGLRQFLPKQRNTDNRVIPHQLYEYELKKILENAAKYLPFLNQKEDGISNTEKIISIFKFKIPYYVGPLNKHSEFAWIDRKSGKILPWNYENMIDDDASEEAFIKKMTNQCTYLPGESVLPKDSLCYQKFMVLNEINNIKVDGRKISVGAKQGIYSDLFLKYKKVKRSQIEEYLISNGQLEKNRRETLSGIDIQIKSSLSSHIAFRRLLEQKILNEADVERIIERASYAEDKGRVAKWLRAKYPHLTEADIKYICKVKIKDFGRLSRTFLTGIEGACKETGEVATIISMMWESNDNLMELLSERYTFADTILEFKSDYYTERKQTLSERLDEMYVSNAVRRPIYRTLDIVKDLEKAFGKPEKIFIEMTRGAMPELKGKRTKSRQQQLLEYYDKCKEEDVRDLKQQLEALGEYVDNKLQSDRLFLYFMQFGKCAYSGMPISLERLMAGSKEYDIDHIYPQAYVKDDSIINNKVLVLSVANGEKKDVYPIKSEIRNKMQKTWSFWHHVGTISDEKYKRLIRSTPFTEDEKYGFINRQLTETSQSTKVVAELLKERYPEAEIVYSKAGLISDFRHEFDLYKSRSYNDLHHAVDAYLNIVVGNVYHMRFSRQWFNINSSYSIKTKTLFTHTVNCNGKEVWNKDMLPGVLKTAKKNTAHFTKHATFKTGGLFDQNPVKKAPGLTPLKAGLPTEKYGGYNKAGVMFFIPVRYKSGKKTVLMVLSVELLYGNRFLEDEIFAKEYAKDRLQRIIGKSVDEIDFPIGMRPWKVNTILSLDGFRICITGNASGGKCLIAQPIMQFSSDEYWKYYLKKLEKFVEKVKNNSSYVYDVDYDVVHHEDNLKLYDLYLDKLQNSIYRKRINAPIQTLIEGREKFIDCSVIEQCQVLLNIHQVFGRMTSGCDLTLIGGKSHSAATVSFSSTISNWKKNYTDVRIIDQSASGLWEVVSENILEYL

SEQ ID NO: 22069 - protein, 1116 aa, unidentified
  REGION 1..1116: note = Cas Enzyme sequence
MKKILSLDLGITSIGYSVLKELENDRYSLINYGVSMFDKATDKDGNSKKLLHSATTSTSNLYTLRKKRKKNLAKIFEKYGLGNSSDLLTQEKQNVYINKWELRAKKAFEEKLEVSELFSIFYLIAKHRGYKSLDSDDLLEELSIKLELNIEKKQVKKEDDEKGQIKKALQTIEAMRMEQPDKAVAQIIYEIEIQKQTPTFRNHDNYNYMIRREYINDEIKKIVKSQEKLGLFGRDIAVDDFIEELILTIDDQKDSSNDLSLFGKCEYFKEEKVAHQYSLISDIFKMYQSVSNITFNKNIRITKEQIKLIADDFFSKIVLGKNIPDLKYKEIRKILKLDDSFKIFNKEDTQISKGKKQDNTITKFHFLSNLSKIGNSFIIDAFKHENKYEILKEIFDVLEFEKAPHAIYKALKTKVDDETIINLIKNKNGNSLSISTLAMIKFIPYFEDGFTMDEIKKKLNLDRNEDYSVHKKGIKHLNISNFEAYDDLIINNHPVKYVVSATLRIIKHLHTLHGAFDEIRVESTRELSQNEETKKEINKANRALEKQIGEIVANKEYQKIADSYGKNLRKYARKILMYEEQNRRDMYTGEGIEFKDIFTNAVDLDHIVPQSLGGLSVKHNFVLVHRDTNLQKSNQLPMNFIADKQNFINRVEDLFSEHKINWKKKINLLAENLDETYRDTFESKSLRATSYIEALTAQILKRYYPFPDAKKQSDGSAVRHIQGRATSNIRKLLHVKTKVRDTNIHHAIDAILIGLTNQSWLQKLSNTFRKNMGVIDDEARANIKKEIPLIEGIEPKELVAMIEDKYNEFGKDSVFYKDVWDKTKVVNFWVSKKPMVSKIHKDTIYAKKPNGIFTVRENIINQFIALKITASTSSDKFMESFEKEILKKMYLYKTNPKDVICKIVQNRANEITSLLQSFMGIDAKDKSLMSEAKVQLDALIHKELVDNNGNIIRKVKFSQTNLTGFNIRGGLTTKEKTFIGFKSWMKDEKLNYERIDVANFNQIKKEKNNNFKVYKNDIVFFVYPDSSFRGGKIMSLLEESRVASFSNSKYPALVKSQPLSFINISKGKAVNHKQHAISKATGIIKLNLDILGNIKSYQIIGNAKSELLDFIKDTLQ

SEQ ID NO: 22070 - protein, 932 aa, unidentified
  REGION 1..932: note = Cas Enzyme sequence
SLPFLREKNDNGLTVSEQILQLFSFTIPYYVGPLGKEYSGVAGYNVWAIHKDTVGPIYPWDLENKIDIKGTAEQFIKRMVRHCTYMSDYHTLPKCSLMYEKFMALNELNNLKVHGEDITVEIKQDIYEKLFMKGKKVTVKKLEEYFVFNGMADKDDKDFISGIDVTGGFKASLSSVGKFEGIFGTDFSKDSSCSHMIEDIVFWMTVYGEDKKFVKERIVKEYPKITVAQLKKILGFKISGWGNLSREFLMLEGVSKEDGVQRTLIAALWETNDNLMQLLSDKYTYAEELEKITENDAKSLSEFTIEDLDDMYLSAPVKRMVWRSLRIINEVQQIIGETPDKVFVEMTRHDGVKGERKASRKRQLENIYKGLGKEYKNWVNDISGRNEADFRIKKLYLYYMQMGRCMYTGEQIDLDQLMNDNQLYDIDHIYPRHFVKDDSMQNNLVLVKKENNAHKSDNYPIEKNIQEKMLSYWKTLVHAKLITETKYNRLIRKTEFTDEEKAGFINRQLVETGQGTRAITQILKGALPDTEIVFSKAGVVSDFRKTFDIEKVRCINPLHHAQDAYLNIVAGNTYNVKFTKNPLRFIKAAEKSNSAEDKYHMDKIFFKSVSRNGEQAWIHETGNMDNSINTVRKVMRKNTPLITKRAYIAHGGITEKDTVYSKATAGKGSGYLPMITSDIRLSDVSKYGGRTSIGNMCYTLVEYSLSGKMQRSLEALPRYMGDIDSLPDETIVKYVTESLVKENPKKFVEKVSIRKRCIKYNSLLRIDGAYYYLAGKSLEQIILQNAMLLYLDYEWSRYIKKIEKALGNQYFGERDCGEVIITKKKNGDIFDIMIDKLSRGVLCKRKNNIVDTLKNSIDKFKNITIEEQCYVIMQIVSWMQIEQTKADLKHIGGAANAGKCLTAKKINSSYEFKLISKSVTGLYENQIDLLTI

SEQ ID NO: 22071 - protein, 1123 aa, unidentified
  REGION 1..1123: note = Cas Enzyme sequence
IQKILHLEEDLITRRKNMQYIVAIDIGVASVGYAVIDKTSETVIEAGSNIFPEASATDNQERRGMRQARRLKRRERTRLDDFTKLWEYHGLAIPQVKKNDIVGLKVKALYESISLDEVYLILYSYLKHRGISYLEDVEDSSVSGSTAYANGLKLNAKELEKNFPCEIQKYRLENIGKYRGQIQIEDDQGEKLDLSNVFTIGAYTKEIQQILDTQKKYHAEIEDEFCEKYLKIFTRKRKYYEGPGNEKSRTDYGKYTTRLKENGEYITEKNIFEKLIGKCSVYKDELRAASASYTAQEFNLLNDLNNLTVNGRKLEENEKHLIVDKVKTSNTINMRKIIADAMGEKIEEFYGARIDKSEKEIFHKFEVYNKMRKALAAIHVNIEEFSRDDLDEIGYILTINTDKEAMMEAFDNSRLELPGEIKNCLISLRKTNGTLYSKWHSFSLKIMNELIPEMYRQPKEQMTLLTEMGVMKGQTDEFEKNKYIPVDVASEDIFNPVVRRSVRISFKILNALMKKYGTLDEVVIEMPRDRNSDEQKKWEKETQKKNEKEQEYIENKLATVYDIRLSSADFSSQKQLNLKLKLWNEQDGKCLYSGKIIEPEDLIKHSELFEIDHIIPRSISFDDSRSNKVLVYRTENQNKGNQTPYYYLTHTNSKWSFEQYKALVMDLSKKKEYGLSKKKVRNLLYSEDITKADVLRGFINRNINDTSYAARVVLNTVQGYFRAKEMGTKVKVIRGSYTHQMRVNMKLDKDREKSYAHHAVDAMLIAFSQLGYEAYRKLQGEFIDFETGEILNSEKWKDQMSDEVYKQYLYRKKWSNIRNEITRAEKNVKYWYYVDHKSNRGLCNQKIRGTRVYDGKIYKINKLDIRKKEGAALFKKLAFSEKESDREKLLVYKNDKKTYEDLVRIMQDYSDSKNPFVQYEKETGDYVRKYAKKHNGPRIDKLKYIDGEVGSCIDISHKYGYEKGSRKVVLESLVPYRMDVYYKKEEQTYYLVGIKQSDVKCQKGEYVIDEDAYAINLVKEKMIQQGQKRSDLESLGFEFQLSFYKNDIIEYEKDGKIVRERFLSRTMPKVKNYIETKPIDRAKYEWHDRKLVGLGKTKRIRKYRMDILGNYYLCNKEEFSKYC

SEQ ID NO: 22072 - protein, 1166 aa, unidentified
  REGION 1..1166: note = Cas Enzyme sequence
LEELSKEMSIAKKDKVKYALLKLICGMKIKVGDIYTDEDIQDEDKKKDLGFRESDYEKSSLEVKEIVGDEYFELIERAKAVHDMGLLANIIGNSKYLCEARVDAYDNHHKDLQKIKELLKKYDKKAYNDMFRKMTDKNYSAYVGSVNSNIAKEHRNVDNRTIEDLYEYIKKIALKNIPDDNQDKIEILEKIQTGEFLKKQLTASNGVIPNQLQSRELRAILKKAENYLPFLREKGEKNLTVSEMIIQLFEFQIPYYVGPLDKNPNKDKNSNSWAIIPSSGRILPWNFEEKVNVKDSAEKFIEKMVRKCTYLSQERTLPKQSLLYEKFMVLNEINNIRVNGEKISVETKQKIYNDLFIKGKKVSQKAIKQELISLNIMDKDSVISGIDTMCNASLSSIGKFRGIFDEEINNQSIINIIEDIIFWRTIYNDEKKFVKEKIEEKYEGKIDKDKMKRILGLKFSNWGNLSKSFLELEGADTDTGEVRSIIQSLWETNFNLMELLSSRFTYTQELEKRVKKLEKPLSQWTIEDLDDMYLSSPVKRMIWQSMKIVSEIQTVLGYEPKRIFVEMTRKEGEKVRTKSRKDKLKELYKKIKDDSRQWIKELDAKEESYFRSKKMYLYYLQMGRCMYSGESIDLDKLMDDNLYDIDHIYPRSFVKDDSIDNLVLVKKDINNRKQNDPITPQIQAQCQGFWKVLFDHGFMGNEKYSRLTRKIQEFSDEEKLSFINRQIVETGQATKCMTQILQKSMGEEVDVVFSKANLVSEFRHKFNLFKSRLVNDFHHANDAYLNIVVGNSYFVKFTRNPANFIKDARKNPDNPAYKYHMDRFFERDVKSKSEVAWIGQSEENAGTIAIVKKTMAKNSPLITKKVEEGHGKITNETIVGVKEIIFGRKKVENIDKSSKKPNLKAYRPIKTSDVRLCNIKRYGGRGSIKASGYCLVEYTKKKKTIRSLEAIPVYLGRKCSLSEEKLLEYLKDVLSDGGKVAISDIRICLPFIPSNSLVKIDGYLYYLGGKSNDQIQLFNAYQLKMKKEEIEYIRKIEKAVLLSKFDEIDREKNPILSKEKNIELYEIIQDKIENTVYSKRLSSFEKFLKEAKFKFININIDIQCKVLYNIIFNLANLQEVDLSDIGGTKSKGKCLCSKNITNYTEFKLIQQSITGLYSCEKDLMTI

SEQ ID NO: 22073 - protein, 1378 aa, unidentified
  REGION 1..1378: note = Cas Enzyme sequence
VVDEKIFWGLDIGTDSVGWAVTNSEYKLKKYKNNLMWGVHLFDEAKQSAERRSFRTARRRLDRRKQRIILLQEFFVRAVCEKDENFFRRLKESALLPEDAEHRTNNIFFDDPDYTDKDYFEEYPTIHHLICELMESKEPHDVRLVYLACVYLLAHRGHFLLPVSEDDISKVTEFEPLYESFYKALEEKLDEEPPFDRSADDFAEILKSHKTVSAKNKDFDKLLFGGKVKTYDNENISYSALIKLLSGGTEKLSKFFANEEYTDLEKDSVCVRNADFGDTLEMLEGQIDELDFALLKSVKSLYDWSLLVDILEGKSLISEAKKDKYDEHGYDLDALKYLFREYLTKDDYNEMFKEVSGKQNYASYVYNAPSDKIRDSKYKKCSQEDFCKFTKKFLSKIKPNEKDKPCLDKLLEKCEQNSLCPKQVTTDNRVIPYQLYYVELKKILENACGYLPFLNERDEYGTVADKILSIMKFRVPYYVGPLVDSKKSPNAWLVRKLDGKITPWNFTDMVNEDDSEKAFIRRMTCKCTYVAGQDVLPKYSLLYSKFSVLNEINNIKLNGEPISVQAKQEIYTELFERNKSRVSKKKIRDCLISHGYAADSDEVTGIDDIAKSALRSYHDFKKMLSNGILTEQQVEEIIEHITVTTDNIRLKKWLKTQFPMLADEDVKYITKLKYKDYGRLSRCFLEDVLPVDTKTGEAESDKNIITMLWETNENIMQLLSSKYRYSENIEHMNRQYYALPENHKSMSERLKDMYVPTAVRRAVTRTFDIVKELKKIQGRNPDKIFIEMARGTGETPKGKRTNSRKDQILEHWHGLDNKDINDLKKSGIWEHLDTIDDAKLRSDKYFLYFMQLGRCMYTEKPIPFEEVENEHKWNIDHIWPQAKIKDDSLDNKVLVSSNENGKKSDSYPISDDIRHSMAGLWHSLYKKGLISEKKYQRLTRSTPFTDDELSGFIARQLVETRQSTKAVATLLKEQFPNTEIVYVKAGLVSDFRQEMGMLKCREVNDLHHAKDAYLNIVLGNVYNTRFTKDPLNFVKNNEKYSIKIFQKNSDGKKTGVMTRKVERGGEVAWDPETSFAIVRKMMSKNSIRYVRYAYMRKGGLFNQMPERKKAGLVERKSGLDTGKYGGYNNTTASHFAVVKCREKSVVVVPVETMFCNRFATDIEFAKAYVAQQLAEILSQEFSSENITFPFGQRIIKVNTMFEVDGFRCNLAQKSNKGKQLVLISACSLVLDKDTYAYMKKISSFIAKKKVNKSLVINSYTGITVEDNISAFDVLVEKMQSSPFKVFFHKIGTKVANGRDKFISLSVDEQTTALFYILMLLKTGRSTGCDLTLINESGQAGVLTLNSDFSKIKDKKTIYIIDQSPTGLIESKSPNLLDL

SEQ ID NO: 22074 - protein, 1325 aa, unidentified
  REGION 1..1325: note = Cas Enzyme sequence
MKNFNDDYYTGFDIGTDSVGYAVADTDYNLCKFKGNAMWGVDLFEESNSAAERRTLRSARRRGLRKRNRIEWLQMLFDEEISKVDNAFFQRLKESCLYLDDKSSNVPYAVFADGNYTDKEFHTDYPTIYHLRKELIESSQPHDIRLVYLALHHIIKHRGHFLFDNMGSDFESESSFEALFDDLKLYLKEEYEIEFECNDSLRFSEILKDKTLKKTAKSSEAYKLFGYSKRNNPYETALIDLMCGRNVEFSDMFGDKSFDSEEVNGISFESGYDDNENTYRDLLQEKFEPIEKAKAVYDWAILADILNGEKYISFAKVKTYEEHSSDLKMLKDFVKEKCKSLYGEIFRITKDKLDNYTAYCGKYKENGRNGVIQYRTNQMDFCKYLKKRFEKLDKTGYEEMFDKIENGTFMPKIVVKDNGVIPMQVNRSELKAILKNASTYLEFLNKKDENGISVSDKIVKIFEFRIPYYVGPLNNHSLKFWLVRSDEKIYPWNFDSVVDIEQSAENFINNLTSKCTYLPTKDVIPKNSILYSAFTVLNELNNLRLDGKKPDVSLKQAIFNDLFMTHKKVRRKDLLNYLKSEKGITHDITGIDGDFKSSMRSAIEMSQFNLTDSEKEDAIKAITVFGDDKKLLRKRLKRQLGSTLSDEDIMRISKLKYKDWGRLSKEFLTEVYNVDKNTGELQLNIIHALWQTNDNLMELLGSKYGFEQSRQNYLDGIQTGQSLEKMVENLYISPAVKRPVYQSLKIMHEINKIQGHAPKKIFVEMTRKDGVKGDKGRKESRKTKLVDLYKKCGEDSGELWESLEKTPDDEFKRDRLYFYYTQFGKCMYTGEPINLSELYNQNIYDVDHIFPRSKVKDDSLDNRVLVKKQVNAHKDNTYPLDSSIREKMKGFWHLLMDKGLISKKKYERLTRATELTDSELSDFIARQIVETSQSTKAVASLFKELYPDTEIVYVKASTVSEFRHEYDFLKCREVNDFHHAKDAYLNIVVGNVYNERCTHNKSIFIEGLKTKVYSLNKMFSFNTPNAWSIDDNKSIKIVRKTMNKNNIRFTRYAFTKNGELFKRKPLKKGRGQAPLKQNSPLSDISKYGGYDKPTSSYFSFVKYEGKKGKEMRRLVAIDSYIKARYEANPEKYLSETLGLKNPVVLIPVVKYNACIEIDGFRMHISAKTDKRIQYKPAMQLTVSYDTEKYIRNVVKLNSKPENYNITELDKVSADENLKLFDILTSKMTDTILKVKFGDMGVKIASHRDAFEKLDVRKQCFVLAEILKIIHCNILEGDLTFIGGAKQSGSIKMSSVISGIKGVKSIYLVHQSVTGLFEKKIDLLHM

SEQ ID NO: 22075 - protein, 1428 aa, unidentified
  REGION 1..1428: note = Cas Enzyme sequence
MYNYNIGLDIGTGSVGWCLTDENGHLLKVNRKGNNGKTYRNSAWGVRLFESADTAADCRIKRSTRRRYNRRRTRIIELRKIMSDMIMPIDPNFYARLDEAFLWNEDKSDKAKAPFLLFNDNGYDDVKYYTDYPTIYHLRKHLLETEGRADARLIYLALHHMMKYRGHFLFEGQSFEAIDNIEDTFIELEHLVNVYVKEKEDTDNNSKNNALYQTIKNYLADNKVKNKDKKEDITDTFIKAGYDNKYSKELAAAVLGYEFNVGIIVNDNNLTDENGKALKAKFADAKYEEQEEKLSDTLGEKYYIVETLKKIYSWKVLHSILGDSKYLSYAMVDKYKKHGEQLTALKDLFHKYTSQNEYNDFFHHEKDEDGKYIVNYVNYIKGIKRLSNETNKKYNTKQQLYESIKEKLGERAADDEVYKKILVEMEQETFLEKINNVDNSAIPYQLNLMEMDKILTQQGVYYKELRGNKELLLKMLSSKIPYYVGPLNNNSNGNRNFAWMTKKAGKENEKVYPWNVKDVVDIDVTAEDFITRMTNYCTYLPDEKVLPKESLLYQKYMLLEELSQIRIDGKKLSKEDRKVIINDLFIGKGRIKVSDKDFKEYLNKINYVKINDKGYDVTGYQSDDGFACALSSYNKFRRILGYVDERNEKMIEDIIYWLTVFDDKDIVKRKINKQYADRLNDEQLKKILKLKFKGWGRYSAKLLNGIKGDMGTTIIEMLEDADERFEYCDYCPNFMQIINKDEKIKQIIDDNRPRYDGTKDLLDVIQDMHTSPANKRGIWQTMKVIEEIIEYMGEKPQQIYIEFAREDDPKAKNKRTDSRKRAIDKALKKLKEDVVDEYNENVYKELKQYEKRLDEEKVYLYFMQNGKDLYFPDKELNLDELEKLEIDHIIPYSLSDDDSLDNKALVLKGNNQNKGNKIVKEAFPQLFSNSGTVNYWKNLKKAGLISEKKFNNLQKNNVDDILTKGFINRQLVETRQIVKSVANLILDYYNEQIDVIEVKSSLSTSVRKMLTYEKKDNNGFWEENKDNCMFYKNRDMNDYHHAHDAYLANIIGMYIQKNYPHLQKELNYSQYRRVWRKYYENTKNNNGVNWFATLGKFSSNNEEADWYGQDIIAYMRKIFCYRDVLISKKVEENTGAFYSETKYPREDKAGSKLVPLKQGDNMRGANNLKELDTRKYGGYKGGEKAYFVLVRYCTEKALKKKVKKEYHMEFVEIPVYIARGIKNKNINLYDYVCDTLNEANKNSVADVEILRNKVPKYQMIIGENGEEYYLVSATEVINSKQFVLGGSNQQYNRLLNYIKYGKNDKWQYIQTELLDEQLIGLYNLLIAKIKDEYKGFSKEAVRIQENNSFDKLDVKDKKEFIAEMIKLVQPDSDYPYLGKYATGLSNRMGRKTGEKVGKKITLVDKSVTGLYERRTTFELEDDSSTKSR

SEQ ID NO: 22076 - protein, 982 aa, unidentified
  REGION 1..982: note = Cas Enzyme sequence
RSLMLARLEKCDISIEFLTKENEEALWHILYSVEDKNEIVKALQKFADKHDLNASFVDVFRKFPPFKKEYGSYSAKAIKKLLPLMRMGKYWSENSIDKGTRERIDKIITGEYDEKIENRVREKAIHLADVSDFRGLPLWLVCYIVYGRHSEAKEITQWKSPADIDSYLKSFKQHSLRNPIVEQIIIETLRVVRDIWKQVGNIDEIHVELGREMKNPADKRKKMTQQMSENENTNLRIKYLLTEFLNPEYEVENVRPYSPSQQDILRIYEEGVLNSVSDLPEEISDILKKFTETDLKKRPSRSEVLRYKLWLEQKYRSPYTGEVIPLGKLFTSAYEIEHVIPQSCYFDDSFSNKVICEAEVNKLKSNLLGHEFIVKHHGEIVELPFGKKVRIFTVDEYEQFVKDNYSRTRGKMKKLLMDDIPEEFVTRQLNDSRYISKVVKSLLSNIVREKGEEEAISKNIIPCTGGVTDRLKKDWGINEVWNKIILPRFQRLNELTGTNKFTTKNVGIQEIPTMPLELQKGFNKKRIDHRHHAMDAIIIACANRNIINYLNNESATAKAELSRYDLQKLLCDKAKTDNNGNYKWVIRKPWASFTQDTYLALENIIVSFKQNLRVINKATNHFLHYNEEGKKIFVKQGKGDNWAIRKSMHKDTVFGEVNLRRIKTVALNEAMKNPQSIVVKDFKRKLLELWNLGFDAKRIKKYFEDNRETWSDINLSKIEVYYFSKDTKDRFFATRKPLDTSFDRKKIENNITDTGIQKILLRHLELKDNNPDIAFSPDGIDEMNRNIIQLNNGKYHQPIIKVRWYEQADKFAVGQTGNKSSKFVEAAKGTNLFFAVYESNILDKKTNTIIKKRNYATIPLNVAIERQKQGLSVAPEDENGNDPIFVLSPNDLVYLPTDDELANGIIAQPLDRGRIYKMVSCTGNEGHFIPARIANPILQTIELGSNNKAQKAWTDEMIKEICMPIKVDRLGNVLESSSSYKK

SEQ ID NO: 22077 - protein, 1509 aa, unidentified
  REGION 1..1509: note = Cas Enzyme sequence
MKNILGLDLGTNSIGWAVVNGSINDNGSEQLVKIQASGSRIIPMDAAMIGDFNKGNSISQTAERTRLRGIRRLSERYLLRRERLHRILDILGFLPSHFAQDLDRHGKIVKGKEPKLAWRKNEAGQFEFIFQDSFKEMLEDFKLNHPNLITDDKKVPYDWTIYYLRKKGLTSKISKEELAWILLNFNQKRGYYQLRGEEEKKNDNVMIINSKVIDVVKAEKDKKYEKYWYNVLLENGLLYRAAFYNDISFWKGHTKEFVLKTIKLKSGGTKQELSFLPSFDEIEKMEKKQKDKMYFKIKLKTGADIDQTHKTVGTYIYDTLLGNPSQKIRGRLVRTIERKYYKEELKQILDKQKEFHPELQDRALYAACVEELYTINEAHRNNIGNRDFTYLFLEDILFYQRPLKSKKSLIDNCPYEENHCLDKETGEIKSFPVKCIAKSHPLFQEFRLWQFIVNLRIYRKGLAQDVDVTNELLKTEEDYVALFDWLNGKKEIDQKAFLKYPLFGLKKEVENYRWNYVQDKPYPCNETRSSMLARLEKCDISIEFLTKENEEALWHILYSVEDKNEIVKALQKFADKHDLNASFVDVFRKFPPFKKEYGSYSAKAIKKLLPLMRMGKYWSENSIDKGTRERIDKIITGEYDEKIENRVREKAIHLADVSDFRGLPLWLVCYIVYGRHSEAKEITQWKSPADIDSYLKSFKQHSLRNPIVEQIIIETLRVVRDIWKQVGNIDEIHVELGREMKNPADKRKKMTQQMSENENTNLRIKYLLTEFLNPEYEVENVRPYSPSQQDILRIYEEGVLNSVSDLPEEISDILKKFTETDLKKRPSRSEVLRYKLWLEQKYRSPYTGEVIPLGKLFTSAYEIEHVIPQSCYFDDSFSNKVICEAEVNKLKSNLLGHEFIVKHHGEIVELPFGKKVRIFTVDEYEQFVKDNYSRTRGKMKKLLMDDIPEEFVTRQLNDSRYISKVVKSLLSNIVREKGEEEAISKNIIPCTGGVTDRLKKDWGINEVWNKIILPRFQRLNELTGTNKFTTKNVGIQEIPTMPLELQKGFNKKRIDHRHHAMDAIIIACANRNIINYLNNESATAKAELSRYDLQKLLCDKAKTDNNGNYKWVIRKPWASFTQDTYLALENIIVSFKQNLRVINKATNHFLHYNEEGKKIFVKQGKGDNWAIRKSMHKDTVFGEVNLRRIKTVALNEAMKNPQSIVVKDFKRKLLELWNLGFDAKRIKKYFEDNRETWSDINLSKIEVYYFSKDTKDRFFATRKPLDTSFDRKKIENNITDTGIQKILLRHLELKDNNPDIAFSPDGIDEMNRNIIQLNNGKYHQPIIKVRWYEQADKFAVGQTGNKSSKFVEAAKGTNLFFAVYESNILDKKTNTIIKKRNYATIPLNVAIERQKQGLSVAPEDENGNDPIFVLSPNDLVYLPTDDELANGIIAQPLDRGRIYKMVSCTGNEGHFIPARIANPILQTIELGSNNKAQKAWTDEMIKEICMPIKVDRLGNVLESSSSYKK

SEQ ID NO: 22078 - protein, 1351 aa, unidentified
  REGION 1..1351: note = Cas Enzyme sequence
MSKKYYLGLDIGTNSVGWAVTDENYNLCKYAGKRMWGIRLFEGGETAEQRRISRSNRRRLSRKKQRIDLLQELFAEEIAKIDPTFFIRLNESRLHLEDKSTGEKFPLFTDKDYTDIQYYKEYPTMYHLRKELIENPKAHDIRLVYLACHHILKNRGHFLINGSFSDVKKLSSVCESMLNSFNGISKYQIEINDIERLEEILSDRKKQKSVKAKELIQIFECGPCEDKTDEKTCKAIVSNLCKWLTGLKGNINSIFDMQFEEIDTSSFSFTEPKYEDTISAALEEKYPDYADVIQKIKTVYDWSVLVEIMAGEDYLSFAKVNAYNKHKENLCILKEVIRKYCDSEMYHKFFNGFDEKNGYGNYIGSIYKNGHSYAMKKCSTEDFYKTLGKILDKIQPEKEDENVLEELKVEVKNQTLLPLARTTANGTIPNQVHIQELKAILDNAKKYLPFLNEKDEYGTVAEKIISIAKFRIPYYVGPLSTRHKEQGANSWIVRKQEGRIYPWNFEEMVDLEQSNKEFIQRMTNKCTHLIGEDVLPKNSLLYSRYMVLNELNNLRIRGNKISVNLKQELYKELFCTKAKVTGKGLFNYLKKEDEELALEDISGFDIDFKSSLTSYLDFKKQILGEEIEKDKYKDIVENIIKWKTIYDDDSKMMKKMIEREYPNVFSKDQIKKICRFKYSGWGNFSLSFLNGIRGADRETGENFTIIEALWKTNYNLMQLLSKQFTFREEIDLINADKVGKIDKVSYDNTVKDLIVSPANKRAIWQTVQITEEIKKVMKCKPERIFIEMARGGEKEKRRTVSRKARLLELYAACKDDVRDWTKEIENREEREFNSKKLYLYYTQMGRCMYSGEEIDIDELMQKNSKWDIDHIYPQSKIKDDSIDNMVLAKKVINNSKQNKLLSPDIRIKMKKYWNTLYKGNFISKKKYDRLTRTEDFTNEELSGFIERQIVETRQSSKAVAELLNRLYEHSEIVYVKAGLVSDFRHDNKLLKSRRINDYHHAKDAFLNIVVGNVYNAKFTSNPRKWIKENRGTNYSIRRVFDYNVKRGNTVVWQGVKDAGHSIEAIRKTMARNDILYTEYTYCDKGELFNATLVRKGNDKAINLKKDLDSVKYGGYNTPKTSAFAFIEFDGKKKERKNHIVEIPVYIVNIASRQPDTIKEYLEQKKGYKNVVVKKYPIKKNALIKVDGYLARLRGATEKDVLLKNAVQLVLRDEYSENIRKVEKYLENNIQYQADSKFEGFTQEDLNDLYDELYIKLKESIYNKRPANQLGTLEKGREKYRAIGDLREKAKIINNILALFQCDATTSTNLKEIGGTANAGNMAYNKNTLPTKKLILIHQSVTGLFETEEELV

SEQ ID NO: 22079 - protein, 1438 aa, unidentified
  REGION 1..1438: note = Cas Enzyme sequence
MSFNRKCSANYCLGLDVGTASVGYCVIDENGKLFKINRKGDTGNNKRNSLWGVRTFKSGETAKGCRINRSARRRYSRTHTRILELRKIMSDMVCKVDENFFARLDESFLWKEDKSDKAKSDYILFADKDYTDKEYYKKYQTIYHLRKHLLETTEKADARFIYLALHHMLKYRGNFLYEGQKFTELDDFKIIYEQFVTSLKEYLEIECNYDEISCEEIEKKLKEKKSKKEKNDEVSEILKKLGLNKKYAEAVANAIIGYKFNVAAIMNDKNLCDENGKEMSVSFASADYEEEEQKLSDELGEKFSVIENLKRLYSWYVIKQIMQGSDKNRVNYLSEAMVAKYEKHHAELKELKELFRDYKTQKEYSEFFHKELKAEQKDGKMSPAFLKSFGKIKKGEYVPNYANYIKGMKRCGDTQSKARENLYKCIKALLGDVAKDDERYIRICAEMENDSYLEKINDVSNSVIPYQLNEMEMEKILDIQGRFYPELNDNKELILKMLTSKIPYFVGPLNSGSRFAWMSKKAGMENISVYPWNVEEVVDVDKTAEKFITRMTNYCTYLPCEKVLPKHSIIYQWYEVLTELSQISIDKIKLGKEMRDDIIQNLFLKKVSVSEKNLIEHLKKSGTYSDIDNRVIRGYQGGDNFASSMSSYITFKKIFGEINMSNIDMIEQIIYWLTIFDDKKIIKRKIEQNYRERINDSQLKRIVKIKYTGWGQLSKKFLTGIKGDTGHTIIEMLEEGDPRWKELPNLIQIINKDEKIKTVIEENRLRYNGEDDLPDIIDKLHTSPANKRGIKQCMKVIEEIIEYMGRKPEQIFIEFAREEGEKVETKKVKDKIDKAIGKLKQEFKNYYNNDIKQELKDNEKRLDEEKVRLYFSQNGKSLYSAPSASNQLSLDNLNQYDVDHIIPYSISQDDSMDNKVLVKKIENQNKGNMIVSEAFGNKADYKEMQNYWEMLYKAGLISEKKYNNLNKSLDEVFSKGFINRQLVETRQIVKNVANLISDYYDDKIEVIEVKAQLSSYIRNKFTQEKKDDDGFWIENTENAMFFKNRGLNDYHHAHDAYLACIIGLYIQKVYPGWKNELNFKKYRREFEKYYEEQKKYNTKSKKEIYISMLSRFTKNYEKAGWNGEEIIEYMRKIFCYRDVMISKKTEENTGSFYNQTRYPKEKLDGNKKETKLIPLKSGNNLRGKEGLKELSVEKYGGYQGGECAYFVLVKYYTVKNKKKTEEKQWKMEFVGIPTYISYEINKGNINLKQYICDKLKNDTVEILRNKICKYQELMDEEGNRYFLVGPTEVANAKQFVLGSRYQKFNRLYSYINSENWHYIRTDELEKEIDEFFKLLQNKIHNEFKGYIKDIDKVIGANTSKLDIDKKIDYFNEIYKIVQANSSRPAVSKFNIAGISDGLGRKRSLPFKDKIIIVDKSVTGIYERRTCFELENGGNTKSC

SEQ ID NO: 22080 - protein, 1130 aa, unidentified
  REGION 1..1130: note = Cas Enzyme sequence
MKNYRIGVDVGDRSVGLAAIEFDDDGLPIQKLALVTFRHDGGLDPTKNKTPMSRKETRGIARRTMRMNRERKRRLRNLDNVLENLGYSVPEGPEPETYEAWTSRALLASIKLASADELNEHLVRAVRHMARHRGWANPWWSLDQLEKASQEPSETFEIILARARELFGEKVPANPTLGMLGALAANNEVLLRPRDEKKRKTGYVRGTPLMFAQVRQGDQLAELRRICEVQGIEDQYEALRLGVFDHKHPYVPKERVGKDPLNPSTNRTIRASLEFQEFRILDSVANLRVRIGSRAKRELTEAEYDAAVEFLMDYADKEQPSWADVAEKIGVPGNRLVAPVLEDVQQKTAPYDRSSAAFEKAMGKKTEARQWWESTDDDQLRSLLIAFLVDATNDTEEAAAEAGLSELYKSWPAEEREALSNIDFEKGRVAYSQETLSKLSEYMHEYRVGLHEARKAVFGVDDTWRPPLDKLEEPTGQPAVDRVLTILRRFVLDCERQWGRPRAITVEHTRTGLMGPTQRQKILNEQKKNRADNERIRDELRESGVDNPSRAEVRRHLIVQEQECQCLYCGTMITTTTSELDHIVPRAGGGSSRRENLAAVCRACNAKKKRELFYAWAGPVKSQETIERVRQLKAFKDSKKAKMFKNQIRRLNQTEADEPIDERSLASTSYAAVAVRERLEQHFNEGLALDDKSRVVLDVYAGAVTRESRRAGGIDERILLRGERDKNRFDVRHHAVDAAVMTLLNRSVALTLEQRSQLRRTFYEQGLDKLDRDQLHPGEDWRNFTGLYPASQKKFLEWKDAATALGNVLAEAIEDDSIAVVSPLRLRPQNGSVHDETIDPVKKQTLGSDWPADAVKRIVDPEIYLAMKDALGKLKELPEDSARSLELPDGRFVEADDEVLFFPENAASILTPRGVAEIGGSIHHARLYGWLTKKGELKVGMLRVYGAEFPWLMRESGSRNVLSMPIHRGSQSFRDMQDTTRKAVESGEAVEFAWITQNDELEFDPDDYIAHGGKDELRQFLGFMPECRWRVDGFKKNYQIRIRPAMLSREQLPSDIQRRLESKTLTKNESLLLKALDTGLVVAIGGLLPLETLKVIRRNNLGFPRWRGNGNLPTSFEVRSSALRALGVEG

SEQ ID NO: 22081 - protein, 1091 aa, unidentified
  REGION 1..1091: note = Cas Enzyme sequence
MGRLVLGLDIGITSVGFGIIDLDESEIVDYGVRLFKEGTAAENETRRTKRGGRRLKRRRVTRREDMLHLLKQAGIISTSFHPLNNPYDVRVKGLNERLNGEELATALLHLCKHRGSSVETIEDDEAKAKEAGETKKVLSMNDQLLKSGKYVCEIQKERLRTNGHIRGHENNFKTRAYVDEAFQILSHQDLSNELKSAIITIISRKRMYYDGPGGPLSPTPYGRYTYFGQKEPIDLIEKMRGKCSLFPNEPRAPKLAYSAELFNLLNDLNNLSIEGEKLTSEQKAMILKIVHEKGKITPKQLAKEVGVSLEQIRGFRIDTKGSPLLSELAGYKMIREVLEKSNDEHLEDHVFYDEIAEILTKTKDIEGRKKQISELSSDLNEESVHQLAGLTKFTAYHSLSFKALRLINEEMLKTELNQMQIITLFGLKQNNELSVKGMKNIQADDTAILSPVAKRAQRETFKVVNRLREIYGEFDSIVVEMAREKNSEEQRKAIRERQKFFEMRNKQVADIIGDDRKINVKLREKLVLYQEQDGKTAYSLEPIDLKLLIDDPNAYEVDHIIPISISLDDSITNKVLVTHLENQEKGNLTPISAFVKGRFTKGSLAQYKAYCLKLKEKNIKTNKGYRKKVEQYLLNENDIYKYDIQKEFINRNLVDTSYASRVVLNTLTTYFKQNEIPTKVFTVKGSLTNAFRRKINLKKDRDEDYGHHAIDALIIASMPKMRLLSTIFSRYKIEDIYDESTGEVFSSGDDSMYYDDRYFAFIASLKAIKVRKFSHKIDTKPNRSVADETIYSTRVIDGKEKVVKKYKDIYDPKFTALAEDILNNAYQEKYLMALHDPQTFDQIVKVVNYYFEEMSKSEKYFTKDKKGRIKISGTNPLSLYRDEHGMLKKYSKKGDGPAITQMKYFDGVLGNHIDISAHYQVRDKKVVLQQISPYRTDFYYSKENGYKFVTIRYKDVRWSEKKKKYVIDQQDYAMKKAEKKIDDTYEFQFSMHRDELIGITKAEGESLIYPDEAWYNFNFFCHDGETPEILKFTATNNDKRNAIEVKPIYCYCKKRLMPTISKKIVCIDKYATDVVGNLYKVKKNTLKFEFD

SEQ ID NO: 22082 - protein, 1425 aa, unidentified
  REGION 1..1425: note = Cas Enzyme sequence
MYNIGLDIGTGSVGWCLTDENGYLLKVNRKGNNGNTYRNSAWGVRLFESADTAADCRIKRSTRRRYKRRRTRIIELRKIMSDMIMPIDPNFYARLDEAFLWNEDKSDKAKAPFLLFNDNGYDDVKYYTDYPTIYHLRKHLLETKEKADPRFIYLALHHMMKYRGHFLFEGQSFEAIDNIEDTFIELEHLVNVYVKEKEDTDNNAENNALYQEMKNYLADNKVKNKDKKEYITDTFIKADYDNKYSKELAAAVLGYEFNVGIIVNDNSLTDEDGKALKAKFADAKYEEKEEKLSDTLGERYYIIETLKKIYSWKVLHSILGDNKYLSYAMVDKYEKHSEQLKALKYLFHKYTSQDEYSEFFHQEKNKEGKYIVNYANYIKGIKRLSNETNKKYNTKQQLYQSIMKILGERAADDEVYKKILVEMEQETFLEKINNVDNSAIPYQLNLMEMDKILTQQGVYYKELRDNKELLLKMLTSKIPYYVGPLNNNSNGNRNFAWMTKKDGKENEKVYPWNVKDVVDIDVTAEDFITRMTNYCTYLPNEKVLPKESLLYQRYMLLEELSQIRIDGRKLSKEDRKAIINDLFIGKGRVKVSDKDFKEYLNKVNYVKVNGKGYDVTGYQSDDGFACALSSYNKFRRILGHIDEQNEKMIEDIIYWITVFEDKDIVKRKINKQYADRLSAEQLKKILKLKFKGWGRYSSKLLNGIKGDMGTTIIEMLEDADERFAYCDYCPNFMQIINKDEKIKQIIDDNRPRYDGTKDLLDVIQDMHTSPANRRGIWQTMKAIEEIIEYMGEKPQQIYIEFAREDDPKAKNKRADSRKRAIDKALKKLKEDVVDEYNEKVYKELKQYEKRLDEEKVYLYFMQNGKSLYTGKELNLNEPENLEIDHIIPYSLSDDDSLDNKALVLKKENQNKGNKIVKEAFTQSFSDSEMMDYWKNLKKSGLISEKKYNNLQKNNVDDILTKGFINRQLVETRQIVKSVANLILDYYNEQIDVIEVKASLSTSVRKMLTYEKKDNNGFWIENKDNCMFYKNRDMNDYHHAHDAYLANIIGLYIQKNYPRLQKELNYSQYRRIWRKYYENTKNNNGVNWFATLGKFSSNNEEADWYGQDIIAYMRKIFCYRDVLISKKVEENTGAFYSETKYPREDKAGSKLVPLKQGDNMRGANNLKELDTRKYGGYKGGEKAYFVLVKYCIEKALKKSVKKEYHMEFVEIPVYIARGIKNNDINLYDYVCDILNEANKNSVADVEILRNKVPKYQMIIGENGEEYYLVSATEVINSKQFVLGGANQQYNRLLNYIKYGKNDKWQYIQTELLDEQLIGLYNLLIAKIKDEYKGFSKEAVRIQENNSFDKLDVKDKKEFIAEMIKLVQPDSDYPYLGKYATGLSNRMGRKTGEKVGKKITLVDKSVTGLYERRTTFELEDDSSTKSR

SEQ ID NO: 22083 - protein, 1438 aa, unidentified
  REGION 1..1438: note = Cas Enzyme sequence
MSFNRKCSANYCLGLDVGTASVGYCVIDENGKLFKINRKCDTGNNKRNSLWGVRTFKSGETAKGCRINRSARRRYSRTHTRILELRKIMSDMVCKVDENFFARLDESFLWKEDKSDKAKSDYILFADKDYTDKEYYKKYQTIYHLRKHLLETTEKADARFIYLALHHMLKYRGNFLYEGQKFTELDDFKIIYEQFVTSLKEYLEIECNYDEISCEEIEKKLKEKKSKKEKNDEVSEILKKLGLNKKYAGAVANAIIGYKFNVAAIMNDKNLCDENGKEMSVSFASADYEEEEQKLSDELGEKFSVIENLKRLYSWYVIKQIMQGSDKNRVNYLSEAMVAKYEKHHAELKELKELFRDYKTQKEYSEFFHKELKAEQKDGKMSPAFLKSFGKIKKGEYVPNYANYIKGMKRCGDTQSKARENLYKCIKALLGDVAKDDERYIRICAEMENDSYLEKINDVSNSVIPYQLNEMEMEKILDIQGRFYPELNDNKELILKMLTSKIPYFVGPLNPGSRFAWMSKKAGMENISVYPWNVEEVVDVDKTAEKFITRMTNYCTYLPCEKVLPKHSIIYQWYEVLTELSQINIDKIKLGKEMRDDIIQNLFLKKVSVSEKNLIEHLKKSGTYNDIDNRVIRGYQGGDNFASSMSSYITFKKIFGEINMSNIDMIEQIIYWLTIFDDKKIIKRKIEQNYKDKINDSQLKRILKIKYTGWGQLSKKFLTGIKGDTGHTIIEMLEEGDPRWKEIPNLIQIINRDEKIKTVIEENRLRYNGEDDLPDIIDKLHTSPANKRGIKQCMKVIEEIIEYMGRKPEQIFIEFAREEGEKVETKKVKDKLDKAIGKLKQEFKDYYNDDIKQELKDNEKRLDEEKVRLYFSQNGKSLYSAPSASNQLSLDNLNQYDVDHIIPYSISQDDSMDNKVLVKKIENQNKGNRIVSDAFGNKADYKEMQNYWEMLYKAGLISEKKYNNLNKSLDEVFSKGFINRQLVETRQIVKNVANLISDYYDDKIEVIEVKAQLSSYIRNKFTQEKKDDDGFWIENTENAMFFKNRGLNDYHHAHDAYLACIIGLYIQKVYPGWKNELNFKKYRREFEKYYEEQKKYNTKSKKEIYISMLSRFTKNYEKAGWNGEEIIDYMRKIFCYRDVMVSKKTEENTGSFYNQTRYPKEKLDGNKKETKLIPLKSGNNLRGKEELKELSVEKYGGYQGGECAYFVLVKYYTVKKKKKTEEKQWKMEFVGIPTYISYEINKGNINLKQYVCDKLKNDTVEILRGKICKYQELMDEEGNRYFLVGPTEVANAKQFVLGSRYQKFNRLYSYINSENWHYIRTDELEKEIDEFFKLLQNKIHNEFKGYIKDIDKVIGANTSKLDIDKKIDYFNEIYKIVQANSSRPAVSKFNIAGISDGLGRKRSLPFKDKIIIVDKSVTGIYERRTCFELENGGNTKSC

SEQ ID NO: 22084 - protein, 1356 aa, unidentified
  REGION 1..1356: note = Cas Enzyme sequence
MKKTGKIKNSVLQETHYNVGLDIGTSSVGYAVVDADTGKVLVFKKKNMLGGRLFNEGETAKATRVKRSTRRRYDRRRERIKLLRCLMWEMVDEKDPDFFARLDEGFLMREDKTIQSKSILFNDKNYTDKDYYKKYATIYHLRKELFENDEQKDIRLVYLALHHLIKYRGHFLYEGQNFQEINNDINELFVRLYEQLAENCQYKCEIHNNQIEEIVEILKDTKQTKSEKKEVLKPVITKTMRETEKKAAQEIVNAILGKKINFNILFGVDTIIDNEDKALKLSFAEEKYDEQEDYIYEQLQEKAEILDTLKEIYSWFALQDILKGEKTVASAMVKKYEKHKKDLKILRNAVRKYCTPEEYKNFFIEKITDTKKLKKSVNYVNYIGADGRGNTENLYNEIKKLLEDKDNADKDIQYILKEIDAENFLPLLRTKENISIPYQLTVLEAARIIDNQGKYYPQLSANKDKILSIIEFRIPYYVGPMNTKNRNERFSWACRKEGKQEEKIYPWNWKDIIDEDKTAARFIERMRNTCTYLPGEDVLPRYSLLYSEFVMLNELNKIKVNGKFIEHDMKQKMIEGLFKKQKNVTEKSLINYLKKMNYMNTDQYEIEGYQKEKAFASSLASYIDFTRIFGEIHSGNRQMIEEIIEWLTLFEEKSIVKRQIQNKYGTQVTAQQLEAVSKLRYKGWGNCSAKLLKGLKTTIDGDKASIIDILNTTNYNFMQIITSKKYEFAKQIEEYNEDNTMTDITIEDISRLHGSPAIKKGIWQTVKIMNELVQIMGHEPDNIFIEFARGEDDKVRTKNRSAQIDKGYKKWKKEFKGEKFSTEVEKELKNKKYKDRLNEEKMYLYFLQNGKCMYSGETLDIDKLPLYHIDHILPQTYTTDDSIENKVLVLGIENENKADNLLISQKIRNDRKVFWNYLYECGLMGEKKYKNLTRSAIGEGEIKGFINRQLVETRQIIKNVTQLFTQRYANSNVLAVRSGLSSNYREKYGLYKSREINDFHHAHDAFLAVRIGMFLTKRFPGMEKDLIYDAFLRYRSKQNKSSLLKSKHGYLMTFFDEVQCDENGVVIWNPDEDKAYIKSVLYSGNCQISRKKEELTGKFYNETIYPAGLGDLIPLKKNLSVEKYGGYSGKQSAYFAAVQDENGKKQKKIIGIPIYIKELEKTQPGTINAYLKKELNTTAYRMLKDKIYKYQEIIVNGNDLYITGESEVINAKQFFFGEHYYYLYEVLLKCLADKVPEDEKTKYEEKLVEVYNYILSKAERQYKEYASAFAKIKQAVDFSKLSYEDKIGCLKEILNITGANAGCADMRKYCPKDSKIKGIDRIGRKNGYTFKMNSTNNSIVFVDKSVTGLYERRYTL

SEQ ID NO: 22085 - protein, 1271 aa, unidentified
  REGION 1..1271: note = Cas Enzyme sequence
MKKTGKIKNSVLQETHYNVGLDIGTSSVGYAVVDADTGKVLVFKKKNMLGGRLFNEGETAKATRVNRSTRRRYDRRRERIKLLRCLMWEMVDEKDPDFFARLDEGFLMREDKTIQSKSILFNDKNYTDKDYYKEYATIYHLRKELFENDEQKDIRLVYLALHHLIKYRGHFLYEGQNFQEINNDINELFVRLYEQLAENCQYKCEIHNNQIEEIVEILKDTKQTKSEKKEVLKPVITKTMRETEKKAAQEIVNAILGKKINFNILFGVDTIIDNEDKALKLSFAEEKYDEQEDYIYEQLQEKAEILDTLKEIYSWFALQDILKGEKTVASAMVKKYEKHKKDLKILRNVVRKYCTPEEYKNFFIEKITDTKKLKKSVNYVNYIGADGRGNTENLYNEIKKLLEDKDNADKDIQYILKEIDAENFLPLLRTKENISIPYQLTVLEAARIIDNQGKYYPQLSANKDKILSIIEFRIPYYVGPMNTKNRNERFSWACRKEGKQEEKIYPWNWKDIIDEDKTAARFIERMRNTCTYLPGEDVLPRYSLLYSEFVMLNELNKIKVNGKFIEHDMKQKMIEGLFKKQKNVTEKSLINYLKKMNYMNTDQYEIEGYQKEKAFASSLASYIDFTRIFGEIHSSNRQMIEEIIEWLTLFEEKSIVKRQIQNKYGTQVTAQQLEAVSKLRYKGWGNCSAKLLKGLKTTIDGDKASIIDILNTTNYNFIQIITNERYEFAKQIDEYNEDNTMTDITIEDISRLHGSPAIKKGIWQTVKVMNELVQIMGHEPDNIFIEFARGEDDKVRTKNRSAQIDRSYKKWKKEFKGEKFSTEVEKELKNKKYKDRLNEEKMYLYFLQNGKCMYSGETLDIDKLSLYHIDHILPQTYTTDDSIENKVLVLGIANENKADNLLISQKIRNDRKAFWHYLYECGLMGEKKYKNLTRNAIGEGEIKGFINRQLVETRQIIKNVTQLFTQRYANSNVLAVRAGLSSNYREKYGLYKSREINDFHHAHDAFLAVRIGMFLTKRFPGMEKDLIYDAFLRYRSKQNKSSLLKSKHGYLMTFFDEVQCDENGVVIWNPDEDKAYIKSVLYSGNCQISRKKEELTGKFYNETIYPAGSGDLIPLKKNLSVEKYGGYLGKQSAYYVAVQDENGKKQKKIIGIPIYVKELEKTQPGAIDAYIKKELKITSYRMLKDKICKYQEIIVNGNELYLTSAKEVINAKQFFFGEYYYNLYEALLKCLADKVPGDEKDKYDEKLARYIITSFQRQKYSIKNTKVLLKK

SEQ ID NO: 22086 - protein, 1358 aa, unidentified
  REGION 1..1358: note = Cas Enzyme sequence
MKKTGKIKNSVLQETHYNVGLDIGTSSVGYAVVDADTGKVLVFKKKNMLGGRLFNEGETAKATRVKRSTRRRYDRRRERIKLLRCLMWEMVDEKDPDFFARLDEGFLMREDKTIQSKSILFNDKSYTDKDYYKEYATIYHLRKELFENDEQKDIRLVYLALHHLIKYRGHFLYEGQNFQEINNDINELFVHLYEQLAENCQYNCEIHNNQIEEIVEILKDTKQTKSEKKEVLKPVITKTMRETEKKAAQEIVNAILGKKINFNILFGVDTIIDNEDKALKLSFAEEKYDEQEDYIYEQLQEKAEILDTLKEIYSWFALQDILKGEKTVASAMVKKYEKHKKDLKILRNAVRKYCTPEEYKNFFIEKTTNTKKLNYVNYIGADGRGNTENLYKEIRKLLEDKDNEDKDIQYILKEIDAENFLPLLRTKENISIPYQLTVLEAARIIDNQGKYYPQLSANKDKILSIIEFRIPYYVGPMNTKNRNERFSWACRKEGKQEEKIYPWNWKDIIDEDKTAARFIERMRNTCTYLPGEDVLPRYSLLYSEFVMLNELNKIKVNGKFIEHGMKQKIIEGLFKKQKNITEKSLINYLKKMNYMNTDQYKIEGYQKEKAFASSLASHIDFTRIFGEIHSGNRQMIEEIIEWLTLFEEKSIVKRQIQNKYGTQVTAQQLEAVCKLRYKGWGNCSAKLLKGLKTTIDGDKASIIDILNTTNYNFMQIITSKKYEFAKQIEEYNEDNTMTDITIEDISRLHGSPAIKKGIWQTVKVMNELVQIMGHEPDNIVIEFARGEDDKVRTKNRSAQIDRSYKKWKKEFKGEKFSTEVEKELKNKKYKDRLNEEKMYLYFLQNGKCMYSGETLDIDKLSLYHIDHILPQTYTTDDSIENKVLVLGIANENKADNLLISQKIRNDRKAFWHYLYECGLMGEKKYKNLTRNAIGEGEIKGFINRQLVETRQIIKNVTQLFTQRYANSNVLAVRAGLSSNYREKYGLYKSREINDFHHAHDAFLAVRIGMFLTKRFPGMEKDLIYDAFLRYRSKQNKSSLLKSKHGYLMTFFDEVQCDENGVVIWNPDEDKAYIKSVLYSGNCQISRKKEELTGKFYNETIYPAGSGDLIPLKKNLSVEKYGGYLGKQSAYYVAVQDENGKKQKKIIGIPIYVKELEKTQPGAIDAYIKKELKITSYRMLKDKICKYQEIIVNGNAMYLTGAKEKKNEMSNAKQFFFGDHYYNLYETLLKCFADKVPEDEKEGYDKKMIEVYNYIIAKGERQYKECAFAFEKIKQALDFPMLSYNDKIDCLREILKITQANSTCANIKKYCKQSANVTGTERVGRIERAINIDDSKRNKSVAVFVDKSVTGLYERRYTL

SEQ ID NO: 22087 - protein, 1358 aa, unidentified
  REGION 1..1358: note = Cas Enzyme sequence
MKKTGKIKNSVLQETHYNVGLDIGTSSVGYAVVDADTGKVLVFKKKNMLGGRLFNEGETAKATRVKRSTRRRYDRRRERIKLLRCLMWEMVDEKDPDFFARLDEGFLMREDKTIQSKSILFNDKSYTDKDYYKEYATIYHLRKELFENDEQKDIRLVYLALHHLIKYRGHFLYEGQNFQEINNDINELFVHLYEQLAENCQYNCEIHNNQIEEIVEILKDTKQTKSEKKEVLKPVITKTMRETEKKAAQEIVNAILGKKINFNILFGVDTIIDNEDKALKLSFAEEKYDEQEDYIYEQLQEKAEILDTLKEIYSWFALQDILKGEKTVASAMVKKYEKHKKDLKILRNAVRKYCTPEEYKNFFIEKTTNTKKLNYVNYIGADGRGNTENLYKEIRKLLEDKDNEDKDIQYILKEIDAENFLPLLRTKENISIPYQLTVLEAARIIDNQGKYYPQLSANKDKILSIIEFRIPYYVGPMNTKNRNERFSWACRKEGKQEEKIYPWNWKDIIDEDKTAARFIERMRNTCTYLPGEDVLPRYSLLYSEFVMLNELNKIKVNGKFIEHGMKQKIIEGLFKKQKNITEKSLINYLKKMNYMNTDQYKIEGYQKEKAFASSLASHIDFTRIFGEIHSGNRQMIEEIIEWLTLFEEKSIVKRQIQNKYGTQVTAQQLEAVCKLRYKGWGNCSAKLLKGLKTTIDGDKASIIDILNTTNYNFMQIITSKKYEFAKQIEEYNEDNTMTDITIEDISRLHGSPAIKKVIWQTVKVMNELVQIMGHEPDNIVIEFARGEDDKVRTKNRSAQIDRSYKKWKKEFKGEKFSTEVEKELKNKKYKDRLNEEKMYLYFLQNGKCMYSGETLDIDKLSLYHIDHILPQTYTTDDSIENKVLVLGIANENKADNLLISQKIRNDRKAFWHYLYECGLMGEKKYKNLTRNAIGEGEIKGFINRQLVETRQIIKNVTQLFTQRYANSNVLAVRAGLSSNYREKYGLYKSREINDFHHAHDAFLAVRIGMFLTKRFPGMEKDLIYDAFLRYRSKQNKSSLLKSKHGYLMTFFDEVQCDENGVVIWNPDEDKAYIKSVLYSGNCQISRKKEELTGKFYNETIYPAGSGDLIPLKKNLSVEKYGGYLGKQSAYYVAVQDENGKKQKKIIGIPIYVKELEKTQPGAIDAYIKKELKITSYRMLKDKICKYQEIIVNGNAMYLTGAKEKKNEMSNAKQFFFGDHYYNLYETLLKCFADKVPEDEKEGYDKKMIEVYNYIIAKGERQYKECAFAFEKIKQALDFPMLSYNDKIDCLREILKITQANSTCANIKKYCKQSANVTGTERVGRIERAINIDDSKRNKSVAVFVDKSVTGLYERRYTL

SEQ ID NO: 22088 - protein, 1350 aa, unidentified
  REGION 1..1350: note = Cas Enzyme sequence
MKKTGKIKNSVLQETHYNVGLDIGTSSVGYAVVDADTGKVLVFKKKNMLGGRLFNEGETAKATRVKRSTRRRYDRRRERIKLLRCLMWEMVDEKDPDFFARLDEGFLMREDKTIQSKSILFNDKSYTDKDYYKEYATIYHLRKELFENDEQKDIRLVYLALHHLIKYRGHFLYEGQNFQEINNDINELFVRLYEQLAENCQYNCEIHNNQIEEIVEILKDTKQTKSEKKEVLKPVITKTMRETEKKAAQEIVNAILGKKINFNILFGVDTIIDNEDKALKLSFAEEKYDEQEDYIYEQLQEKAEILDTLKEIYSWFTLQDILKGEKTVASAMVKKYEKHKKDLKILRNAVRKYCTPEEYRNFFIEKTTNTKKLNYVNYIGADGRGNTENLYNEIKKLLEDKDNVDKDIQYILKEIDAENFLPLLRTKENISIPYQLTVLEAARIIDNQGKYYPQLSANKDKILSIIEFRIPYYVGPMNTKNRNERFSWACRKEGKQEEKIYPWNWKEIIDEDKTAARFIERMRNTCTYLPGEDVLPRYSLLYSEFVMLNELNKIKVNGKFIEHGMKQKMIEGLFKKQKNITEKSLINYLKKMNYMNTDQYKIEGYQKEKAFASSLASYIDFTRIFGEIHSGNRQMIEEIIEWLTLFEEKSIVKRQIQNKYGTQVTAQQLEAVCKLRYKGWGNCSAKLLKGLKTTIDGDKASIIDILNTTNYNFIQIITNKKYEFAKQIDEYNEDNTMTDITIEDISRLHGSPAIKKGIWQTVKVMNELVQIMGHEPDNIFIEFARGEDDKVRTKNRSTQIDRSYKKWKKEFKGEKFSTEVEKELKNKKYKDRLNEEKMYLYFLQNGKCMYSGETLDIDKLSLYHIDHILPQTYTTDDSIENKVLVLGIANENKADNLLISQKIRNDRKAFWHYLYECGLMGEKKYKNLTRNAIGEGEIKGFINRQLVETRQIIKNVTQLFTQRYANSNVLAVRAGLSSNYREKYGLYKSREINDFHHAHDAFLAVRIGMFLTKRFPGMEKDLIYDAFLRYRSKQNKSSLLKSKHGYLMTFFDEVQCDENGVVIWNPDEDKAYIKSVLYSGNCQISRKKEELTGKFYNETIYPANYKKEKIPLKKNLSVEKYGGYSVKQSAYFIAVQDENGKKIVGIPIHIKELEKTQSGAIDAYIKKELKTTSYRVLKDKICKYQEIIVNGNAMYLTAADEVINAKQFFFGDHYYDLYEALLKCLADKVPEDEKDQYDEKLVEVYNYIISKAERQYREYESAFEKIKQAVDFSMLSYDDKIGYLKEIFKITKASASCADITKYCSKDSEIKGITEIGRKKKYTFNSRKGKRNIIFVDKSVTGLYERRYTL

SEQ ID NO: 22089 - protein, 1361 aa, unidentified
  REGION 1..1361: note = Cas Enzyme sequence
MKNEENIYLGLDIGTDSVGYAVTDDKYKIMKYHGNAAWGSTIFDAGALGADRRVFRSARRRLDRRQERIQLLQEIFANEIAKVDERFFIRLLESGLWRADAEDRYVFFNDKEYTDVQYMRDYPTIHHLICELIYNPNKHDVRLVYLACAWLVTHRGHFLSNINTENIADLVDIHNVYNGFMRFFEENEIICDWREVNVEELGRVLAANIGINEKYRNLSTVLFATRKPDKKAKEGFPYSEDAIVRLLAGGTCKLKDVYIKEEYDEFGSITLGMDDEKMTEVMADIGDDFDLIKALRSLYDWGILANILVNENNSPLISQSKVKVYEQHREDLANLKYLVHKYIPHKYNEIFREIRGDNYVAYSYHYELKNDEKMGKKADVEKFSKFLLKILEGISVDEQDKVVYDDMIERLTLRLFLPKQKNTDNRVIPHQLYEYELKSILKNTKNYLPFLKEKDSDGISNEDKIISIFKFKIPYFVGPLNCNSQFAWIQRKADGKIFPWNFEDKVDFDASEQAFIQRMTNQCTYLPEESVLPKQSLYYQKFMVLNEINNIKIDGRKISVAMKQELYNEIFEKKKRVRKKDVIDFFVSNGYLEGGKESLISGLDEQIHTNLSSFHAFRRLLQNHILSVEDVESIIERASYSDDKGRVLLFLKNKYSFLTDEDIKYICKIKIKDFGRLSKKFLVDFEGTCKETGEISTVLRLMWETNNNLMELLSDKYTFANGIKENRKKYYTEQQKTLDDRLDEMYISNSVKRTIYRTLSVVKDVTKAFGVPKKIFVEMARTNKPDLKGKRTRTRQQQVIELYAKCDEEDVRELKHQMESLGEYVDNKLQSDKLFLYFIQFGKSAYSGKMIDLEKLMSGSKVYDIEHIYPQAYVKDDSIINNKVLVFSEENGAKQDIYPIKTEIRKQMSGIWTTWHHVGAISDEKYKRLTRSTPFNEDEKYGFINRQLTETSQSTKAIAQILNEKYPETEIVYVKAGLVSDFRHEFGLCKCRSYNDLHHATDAYLNVVVGNVYNMKFNRKWFSVDSKYSIKSKTIFSHSLVCNGKIIWDKEKMLPMVLKNAKKNNAHFTKYQFMKTGGFFDQMPCKKASGLVPRKKGLDTERYGGYNKSGIMFLLPMKYKIGKKSDIIILSVELLYGKLFLKDEVFAKKYAEERLQKIIGKKADEVSLPMGMKPWKINTVLSLDGFNVCITGIGGGGKCLSAQPIMQLSLPYELVKYLKKIEKFVEKNKNNANYIYDEQYDSVSVDGNIKLYDVYLDKLENSIYNKRINSPEAILKNGREKFCKLNVLEQAVTLINIQSIFGRMTGGCDLENIGGKKHSAATVNFSSNVSNWKKYYKDVRVVYQSPSGIWERRSQNIFELL

SEQ ID NO: 22090 - protein, 959 aa, unidentified
  REGION 1..959: note = Cas Enzyme sequence
ALKSELKKWKDTYRWNYVYDIGEKSSKKYPMNETRYELKRYLEKVANLPDDFLSSEVEYLLWHLIYSVTDKVAYEKGLKKFAQKHHLDEDSFVESFKKFKPYPSEYGSFSEKAIRKLLPLMRFGSYWNFNHIDKNTQKRIDDLITGVENEEIRTILREKAEKYQLEKETDFQDLPLWLAQYIVYNRHAEASSLEKWTSVNDLETYLNEFKQHSLRNPIVEQVVTETLRVVRDIWQQYGQGQADFFDEIHIELGRELKKTAKEREELSKQNQKNEDTNLRIKALLAELGEDSAIENVRPYSLMQQELLKLYEEGVFSSSMEIEDDIKKIHKKATPSKAELQRYKLWLEQKYKSPYTGQIISLKRLFTEDYEIEHIIPQSRYYDDSLSNKVICESAVNKLKDNQLGLEFIKNHYGEKVHAAGKEVSIFTEEQYKEFVKNHYANNSGKMKKLLLEDIPEKMVARQMNDTRYISKYISEILSKIVRADERDEGVNSKNVILCTGKITTALKQDWGVNDVWNDLILPRFERMNDLTQTSLFTSYNEKYQKYLPTVPMEYSNGFQKKRIDHRHHAMDAIIIACATREHINYINNQHALEKGKDKKEKQEKRDTLRERLCIKKYNNKSEGNYNWVFKKPWDTFTQEVRAALEGIVVSFKQNLRVINKATNYYERWVEENGKYIKKMVKQEGTNWAIRKPLHEETVSGKITLEREKVSKGKILTATRKAIDSTFTEKVIEGITDTGIQKILLNYLKFKKSPEIAFSPEGLEELNKNISLYNDGKPHKPIRKVRIFEQGSKFPLGEVGNKSQKYVEAAKSTNLYFGVYQGKDKRSFATIPLNEVIERQKQGLSSVPEYNEKGDPLLFSLSPNDLVYVSIEGEIIEDIDFRNLSNEQKERIYKAASFTRNECFFIKSSIASLIKNYDAKTKIGELGSQNKLEVTICKGIRIKEVCIKLKVDRLGNISKA

SEQ ID NO: 22091 - protein, 1325 aa, unidentified
  REGION 1..1325: note = Cas Enzyme sequence
TYDKRKGLFREYPIDDKDFNAWILLDFNGDGRPDYSSPYQLRRELVTRQFDFEQPIERYKLGRALYHIAQHRGFKSSKGETIAAQEENDKIQITAESLDIASEMKASEEKISGGLQTYIEENGLRTVGEAFAKLEDEGIRIRNNSDYCAVRSQFKEEIKQIFKFQKGLSLESELYERLVSEKKGIGTIFYKRSLRSQRCNVGKCTLERNKPRCPVGHPEFEKFRAWSFINNIKIRSSVEDIFVYLPITLRKELYYERFLSYVKTDFKFEEIRKYLEKRLGLHFSYEDKTINYSDDTSVAGCPITVRLKKVLGDDWENFYKKGKKKKQGQGRINHEEHQVSYTWSDIWHICYNADELDSIEAFARNVLQFDENKIKDLKRLWAAIPQGYAMLSLKAIRNINRLLLLGLKYSDAVLLAKLPEIVPMSDDEILFISTEFLKLEKQLNEEKRIKAIINSLIAKYKSELEENRFADHNYEYQLDDEDEKIIVKQIEESIGKKCWALMGVEEQMEILQGVRAGYQKFFRSHERKFVELPKLGERLVNFLVNRYPNVGFEKWKQLYHPSQIAIYRPVQAKGDHSLLRLGNPNIGAIKNPVVMKVLNILRKRVNQLLDDGLISPDETRVVVETARELNDANTKWAIDNYDRNRSDERKRIEKILQEFYPNRKTISEQDIDNALYVLEQREGDCYTKDKGFYYKKDITRYKLWLEQGGLCMYTGKTINLSNLFNPNAFDIEHTIPESISFDSSDQNLTLCDAHYNRFIKQNRIPTDMPNYNKDMIIEGKEYSAIKPRLQMWEERIKRLRRKVEYWKAQACRAQDKDRKDKCIQQKHLWEMELSYWSAKLKRFTVTEVTDGFKNSQLVDTRIITRHATLYLKSIFSHVEVQRGSTTAKFRKILGIQASNEKKDRSLHSHHAIDATMLTVIPVSAKRDRMLELFYKIEEVEKAFKYYGNEGRNGLKQYLEGLHLKLTKEIKGCYIGRNVCNLEDFINDNIIVNHHYKNQAMTPAHRKLRKRGKIVGSMAHPQWQTGDSLRGKIHEDSYYGAITQFAKDIEGNVLVKDGQVQIDPTVIYVIRRTLKYKQSAQDSGFASWEDLENVIIDKNLFALMKAQFPEGTSFKEACEEGIYMIKKGKPGSEDVKMHRIKHVRCKAPKAGLKLKEQTYKSSKEYKQYFYAAVGDLYAMCSYTNGTIHIFKVYSLYDISCNRKAGIEDVPQFIIDNKGNRLSLEYKLQKGDMVLLYKDSPEELRDLDQINLKQRLYKVNRFESKGNLILLTNHLSATKERGSSLGKITSYQNLPAAIRCGISTIKFLIMGDHHDFVIRKGNIEFNR

SEQ ID NO: 22092 - protein, 1413 aa, unidentified
  REGION 1..1413: note = Cas Enzyme sequence
MKEKVVGIDLGTGSLGISVRNLSLGESLEKQLEWFSVTTFESGTSSDQTGEHTLAADRRSHVQSRRLKEHSRWKRWATLSLLIEYNMCPMSRQSLERWCTYDKSRGLKREFPVDDDAFMRWLRMDFDGDGKSDLTAFQLRRKLVEEQFDFTKPINRYKLGRAIYHIAQHRGFKSSKGETLSGQEEDVKDVQVNADNLEETMKKSEERKSKDLSEYMAEHGFKTVGQAFASLEDAGIRVRNSRYQAVRSQNVAEIDEYFHFQEGLREYEDLHKRLVSTKKGEGTLFYKLPLRSQKGHIGKCTFEKNKRRCPISHPEYENYRAWGFINNIKYRKSANGCWQELPLELKKLLYQKVFTAYVRKDFPFEKIREFLEKQLGMTFKNVEGIKTINYKDKTLVAGCPVTARLQNIAAIFDTNIEKLYLQGTKTRSSHSIKNTEKHSVTYNAEDLWHFCFEADEIEDVKQFARNSLGWGDKATDALCKLWASIEQGYAPLSLKALRNINRMLEYGLKTSDAIFLAKVPDITGIEESSIPQLIELYEKEVKAPSDRNLRIGRIVNTLISKYKSLAPRDRFADHDFGYQLQQDDKDDIVQCIMDNDSLFTLMDATEQQQMINEVTRLYQSFFADIHRDYVKNPKFADTLAEKLKEKFTAVDESKWKLLYHPSMVSDFPRNKEDEGLLGSPRIGAIRNPTVLRALNVLRKTLNTMIVDGLIDPQETRLVVETTRVNNDINKRWAIEKYNNERRDANKAIWNILKEYYPNKDIKDEDVDAARYVLEQSGEDIYTDDKPDDLHYRNQIKKYKLWLEQGCCCLYTGRVISLSNMLSENCCDLEHTIPRSLSFDSSDKNLTICDAYYNRHIKQNRIPTQLPNYEHDVTIDGQVYTAIKPRLKNWEEKVERLSQNVLFWKNRARRARTEDSKNACIQQKLLWQMEFDYWRQKLDRFKMKPENLTDGFRNSQLVDTGIITRYAVLYLKTLFSSVDVQNGQSTSAFRKIFGIPQKDRSSNYHHAVDATILTMIPQSAKRDRMLKLFYQIDELKRDCHDVSGLQFQLNKELEDCDLGRGLAGIDDFIARHVMVDYYKQDRTLQKNVRPVIRKGKPLMNKTATGKLEPVTFCSDSIRGELHKQTFFGAIRRREDQKTLFVVREPLKYKTSNKDSGFKDWKELNDRLVDLNFKEKSSDLKPMVKMMMDQFPKGTSFKDACEQGIYMLDKDGRKVNRIRHIRCYGKNVTNPMRVKRHTYPSDKEYKQYVWAALADGSVYALCEYVNGSSKVYKRYTYMDISRNRKVGLEDIPVCLTDKNGKQFNLRRKICKGDMLLIYRDAPEELLHLDRAELSKRLYKVQSFERKNDIILRHHLLSTAETNSDDGKEKKRDRGESIKDFAKLPNIIRSSITSFKFLQKDVDYMFNKEGLRLMTI

SEQ ID NO: 22093 - protein, 1098 aa, unidentified
  REGION 1..1098: note = Cas Enzyme sequence
LSLRYTLGLDIGIASVGWAVLENNIDGEPIKIERLGVRIFDKAEQPKTGASLAEPRREARGQRRTIRRRRHRKDRIKQLIQQNDIMTRVEMAEMFEHLQFETSVYELRVQALERALTKQEFVRVLIHLAQRRGYKSNSKSEEAKDKENGKVKSAISENKKCMEENGYRTIGEMLLNDDRFWEYNPDGTKIFVPHNHPDDYRTTVERSMVEDEIRLIFSRQRALGVPYATSEFEEAYLEIWGSQRNFDEGPGGKSPYGGNMIEKMLGHCTFEKDEPRAAKGSYSAEYFRLLQDVNHLRLIKNNGESCALTREQKQIYIDLVMKSAAASYAQLRKKLELSNDISFNMLRYGSDEIGKVERKKLGHMKFYHEMRKALNTVQKDAISTVSWEQRDKIARILLCYKSDDKRKAQLEKLDIPREFIPALLTLSTSKTAHLSAKALRKLIPHLEKGMTYAEACKEVYGEQKSSITKKNKLSLFDIEPINNPVVRRAVSQTIRVINAVVREYGAPEVVRVELAREMGKPYDVRTQMTKKQEANAKRNEELRQQIKKIKGAEPTGQDIVKFKLFQDQNGVCLYSGQNLDITRLFEAGYVDVDHIIPYSISFDDSYTNKVLVRSPENRQKGNRIPADYFKSDPARWQRFETLVNTQVHNWKKKRNLLTQALSEEQKNGFKQRNLVDTQYIARVMYNLINDHLQFAETGKYDKKRRTQAVNGAITAHVRKRLGIQKIREDGDLHHAVDAAVVACVSPGMIQKVTQYTKHRECIRKTKEGYLDTETGELMTREAYDAKYSPRFPAPWERFRQELEARLSDNPAEEIARLHLATYDSEEEIKPVFVSRKQTHKISGAAHEATIRSAKKPGGSISKKPLTSLSLNKKTGEIEGYYAPESDRLLYEALKKRLEEFDGNAEKAFAEPFYKPKRDGTRGPLVKKVKIYEKKTITVPVGGGNADNGSMIRVDVFYIEDDGYYYVPIYTADVVKDELPNKAVVQKKLPKDWKEMDDRDFLFSMYPNDLLYIESRRGIKLKTKKGSSRQEEIVRKTGLYYFKGLNIATNALFIITHDNGYEQPSLGGKTLSCLKKYTVDALGNYSEASLPEKRKPLRG

SEQ ID NO: 22094 - protein, 1098 aa, unidentified; identical to SEQ ID NO: 22093
  REGION 1..1098: note = Cas Enzyme sequence

SEQ ID NO: 22095 - protein, 1353 aa, unidentified
  REGION 1..1353: note = Cas Enzyme sequence
MQTKKVDEYYVGFDIGTNSVGYAVTDKNYNLIKHGGEPMWGSHVFEAASTAQERRTFRTARRRNDRKKQRIALVSEIFAPEIAKVDPRFFIRRRESALFRDDVDIKDRYVVFNDDDFTDKDYYDIYPTIHHLIYDLMSNKEKHDIRLVYMACAYLVAHRGHFLSEVSKDNIEDVLDFDVVYCNFLNVMDNYAEIPWKCDISKFKEILKKKQTVTNKEREFLQLLNEGKKFKTSEEDDVSREGLVKLLSGGTYELGKLFPKLTFEEKVSVSFNMAEEDFAMVLQQLGDEGDIISSLRNVYDWAILSDVLNGKNSVSEGKITVYEQHKKDLSFLKYFVKKYIPNRYYEVFRDGNIVGNYVSYSYNLKNVQNVSKFKGAKKDVFCDYIKKVVKDIKVDDEDKVEYEDMMFRLDTYSFIPKQVENDNRVIPYQLYYYELKRILDNASSYLEFLDEKDIDGYTSREKLLSIMEFRIPYYVGPLRTDNGQHGWMKRKAEGRIYPWNFEDKVDLDASEQEFINRMTNSCTYLPGETVVPKYSLLYCKFNVLNEINNIKINDCSIPIEHKQGIYKLFERYRKVTPKKIKDFLISNNLLHPEDVISGIDVTIKSSLKSYHDFKKLLESCVLKENQVEAIIERLTYSEDKGRILRWLHMKFPDLSDDDVKYISKLKYSDFGRLSRKLLVGIRGCNKDTGEVDSIMGMLWSTNDNMMKLLSNSYTFIEEIEAIKNEYYVEHPANLDSMLDEMYVSNAVRRPIHRTLDILSDIRKVCGKNPSKIFVEMARGGGEKGVRTKSRRDQISELYRNMDKAEVRELSEQLEGKTDNELQSEVLFLYFMQLGKCAYTQKTIDIDKLKTNIYNVDHIYPQSYVKDDSITNKVLVISEENGNKGDKYPISKDIREKMQPFWYRLLSNKLISEEKYRRLTRCTSFTEEELTGFINRQLVETHQTTKAVTTVFRTLFPDVEIVYSKAGLVSDFRKEFDMLKTRSVNDLHHAKDAYLNIVVGNVYHCKFTKNFYVTQKYSLKTKTLFTHNVKSGDVMIWNGQESIGNVRKVLAKNNIHYTKYPFMRKGGLFDQMPVKAAAGLIPRKTGLDTEKYGGYNKSTATAFLLVKYKEKGKQEAMIMPVDYMYSEKVFSDEEYALKYSKENIKKIWGRTEDQVIDVSLPLGLRPIKINTMLSFDGFRACITGKANAGQKIGFTSMMPLVIGNEWENYIKKIDNYIEKKGKNKNITLNEKNDGICGEKNEKLYCILTDKIINNIYSIPFNSQQKILENGYDKFKKLDIERQVYFLQNLVLVLKSGRAGSCDMSAIGGSKNAATFAFGSKLSLWAKKFQKVYLIDNSSSGIYQNMSDNLLDIIK

SEQ ID NO: 22096 - protein, 1068 aa, unidentified
  REGION 1..1068: note = Cas Enzyme sequence
MKKKIFGFDLGIASIGWAVIDHSDENFDPETGEIIEGKVVGCGVRCFPVAENPKDGSSLAAPRREKRLLRRITRRKARRMLGIKRLFVAKGLVASTTELEALYAEQTGGDVWNLRAEALRRPLSKEELLRVLTHLAKHRGFKSYRKAAEEADKESGRILTAIAENRKETVGFQTLAQMIVERAKHSDDHKMRNYTPQKGPNKGVAVYVNSIPREEIEKETKLIFEYQKQFGLFTEDLYRDFCKIAFRYREVGSVGHMVGRCRFESEQPRAPKEAPSAELFVALSKINNLKVTVDGERRFLNGEERKALLELLKNTKEVKYSTIKNKLFKGREVFFDDVNYAQKTKKGKSGEEKAVNPEDAKFYAMKGWHKLKAAFSPEQWKEVGSNLPLLDLGMTAVVCEKNDAGIERFLSEKGIPEDYREVFKKLTGSEFINLSLKALYKLNPYLAEGLKYNQACEKAGYDFREDGIKLAEEKGLLLPPIANDKLTTVPVVNRAVAQFRKVYNAMVRTYGAPDQINLEIGRDLKKSRDERNQIMRRQKENETERKEAEDGLEKEGLAANGKNMLKYRLYQQQNGKCIYSGNAIDLRRLDENGYCDVDHIIPYSRSLDDGQNNKVLCLAEENRKKGSQTPYEYLEPLGRWEEFETVVNTTPSINRYKRNNLLNKDYKEKENDLEFRERNANDNSYIARYVKRYLEDAIDFSASSCAIRNRVQVRTGSLTDYLRHQWGLIKDRDASDRHHAQDAVVVACATQGMVQKLSKLSAIFENKDDFRRKKAEELGHEKAEAWYKYVKQQIREPWSGFRTEVLAGLEKVFVSRPPRKNATGSAHKDTIFSKSEKKGSLPIRYGMAEKENMFRLDVFRKENHFYIVPIYVVDLVNCKEFIDAPQPYEYVNGSFIKIDESFNFMFSLYKDDYVEITSKDECIKGYVNQYNAQSGQLYIGSVDNSPIFRIKTSTFLRDDNILLKIGDQEYIGKIGKFDNEKKQVVINGLKNNFMINALVKLNKKGDETKNIQTEKSYTKMSNEKKICLNVVDSIEKYQVDPLGRIAKVKKETRLPLTMMKKNRHKKGE

SEQ ID NO: 22097 - protein, 1068 aa, unidentified; identical to SEQ ID NO: 16308
  REGION 1..1068: note = Cas Enzyme sequence

SEQ ID NO: 22098 - protein, 1031 aa, unidentified
  REGION 1..1031: note = Cas Enzyme sequence
EKLKAVYDWTLLADILHGYSYISFAKCDVYENHKNDLRELKGFVKKYVPEKYKLIFDENKKGVCNYLAYSGHCSKGGVDKKCQKEDFIDFLKKQLPKECPAKKYAGMYEKIQSGSFMPKIVSKDNAVIPMQVNRAELSAILKNASGYIPLLNQKDGSGKTVSEKIMDIFSFRIPYYVGPLNMHSKNAWLERTGEKVYPWNFDSVVDIDKSAERFIENLTSKCTYIFGADVLPKNSLLYSKFSVLNELNNLKLDGKEISVELKQKIYHELFERNNKVTFSRLCKFLKSYYCFDGEVTGIDGDFKSSLKPYRDLYGFALTDAEKEEVIKSITIFGDDKGLLKKRLNALFGEKLSKDDIAKISKLKYSGWGRLSHEFLSGVKAPCIETDKLNNIIGFMWDTNCNLMQLLSNNYGFIKAIDEINGNNNFTTLRKEVESLYVSPKVKRPIYQAMQIVEELVKINGCQPEKIFVEVARGEQEKKRTVSRKNRLLDLYKSCKKDNGELYKSLADSNENDFRRDALYLYYTQLGRCMYTGKIIPIEDIFNRNLYDVDHIFPRSKIKDDSLDNRVLVTKQANEDKGNVYPVAQSIREDRLSFWKTLVDKELISQKKFERLTRNTELTDDELSSFISRQLVETRQSTKAIAQLLKKRYKSEVVYVKANLISEFRQQYDFVKCREINDFHHAKDAYLNVVVGNVYNTRFNHNKAVFISDLQTGKVSLNRMFDYPTKNAWSVDENNSSIVTVKNIMSKNNIRFTRYSFKQKGGLFDQNILKKGNGQVPIKRSKIGDIDKYGGYNNAKSTCFALVSYADEKGNDIKHFVPIDLYEENKYIKNPKAYIDGKLGCDCAVILPCVKYNALVSVDGFRMHISSKSGGGSAIIYKPAMQLVLDISSEKYVRKIANYLNKCIELKKEKPITEHDGITYSDNIKLYDELLNKIINTVFYVKFANVAKKMSDKKTVFEKLSIKDQCEVIMQILNILHSNVRSGDLSLLGESKQSGIVTTSSKIAPVKSIKSFKLINQSITGLFEQETELLDK

SEQ ID NO: 22099 - protein, 1104 aa, unidentified
  REGION 1..1104: note = Cas Enzyme sequence
MSRYVLGLDIGITSVGYGVIDIDNNLFVDYGVRLFKEGTAAENETRRTKRGSRRLKRRKSNRLNDMKNLLKENDLYFEDYRNYNPYEIRAKGLKEKLLPEELCTAIMHITKSRGTTLEALADESQDDEGTKATLSKNAKELSNGKYVCEVQLDRLNNNHRIRGAENNFKTEDYVKELKEILKHQDLNEELCDQIIEMVSRRRRYDQGPGSEKSPTPYGSYRMVDGVLKHVNLIDEMRGRCSVYPNEFRAPKQSYTAELFNLLNDLNNLTIKGEKITVEEKKKVIAVVNEKGSITVKQLLKLLDAQEDEVTGFRIDKNEKPLITEFKGYSKVLKVFKKYNQQEVLEDKSIVDQIIDICTKAKGIDERKKDIKELYPQFDDDLIEGLASIKGVSAYHSLSFKAMHMINKEMLTTEMNQMQVLHEIDQYDKNRKSLKGKKNIEPDEEAILSPVAKRAHRETFKVINALRKKYGEFDSIVIEMTRDKNSKEQVKRINDSQKRFKSENDRVDGIIKNSGIDPERVNGKTKTKIRLYLQQDCKTAYTQQDIDLHTLIFDDKAYEIDHIIPISVSLDDSLTNKVLASRLENQQKGNLTPMMAYLKGKFTGGNLEKYKLFVSSNKNFNGKKRNNLLTEQDITKEDVARKFINRNLVDTSYACRTVLNTLQHYFKDNEIDTKVHTIRGQSTNIFRKRINLQKDREQDYFHHAIDALIVASLKKMNIVNSYLMHYNYSDLYDEETGEVFDVLPDKQFIDQRYISFISDLKNIYQESNQYNLGYITQEQMHYPLIKVSHKIDTKPNRQIADETIYSTRNIEGQDMLVEKIKNIYDSKEKKAIELANNIINDDTDKYIMKHKDPQTFEKIKEVVLNHFNDYKDSKEYYVIDKKGKYSLKEESPLTSYYNENGAITKYSKKNNGPAITSMKFYSEKLGNHLAITSNYNTNNKKVILKQISPYRTDFYVSPEGKYKFVTVRYKDVFYKETIHKFVIDKNWYHEEKIKKGILEDWKFVCSMHRDELIGLIKPEGKKCVYDASINGGQTQYHDGKHYEILKFTATNDEKKGTFEVKPINTICKKQLMPSVGPFIKIQKFATDVLGNIYEVKDNRLKLEFD

SEQ ID NO: 22100 - protein, 1510 aa, unidentified
  REGION 1..1510: note = Cas Enzyme sequence
MKKILGLDLGTNSVGWALINQDESKSEVVGLGSRIIPMSQDILGEFDRGNSVSQTAERTGYRGTRRLRERYLLRRERLHRVLNILNFLPEHYGKSIDFEQHFGKFIDESEPKIAYRRNEVTGKMEFAFMNSFNEMVANFKLTQPHLVGEGRQVPHDWTIYYLRKKALAAKIEKEELAWILLNFNQKRGYYQLRGEEPEEEQKKRVEFYSLKVVNVEEGEESRTKGEKWYSATLKNGWVYRRTSKTPLDWIGKTKDFIVTTDIDENGEVKRDKDGVEKRSFRAPLEDDWTLIKKKTEADVEHSNKTVGTYIYDALLLNPTQKIKGKLVRTIERKFYKTELEAILTKQREFHKELNSRELYQACLEELYGNNEAHRNSLGARDFTHLFLNDIIFYQRPLKSKKSLISNCPFEFRIYIDKSTGTEVKESIKSIAKSHPLYQEFRLWQFLQNLKIYAKERIVDGGVVADVNITQELLITEEDWVALFRWLNDRKDVDQKALLKYPAFGLKKEIDKYRWNYVEDKTYPCNETRALINSRLSKVANVPTDFLTRGIEEALWHILYSVEDRHEIEKALKHFAILHQLADDFVDNFKKFPPFNKDYGSYSAKAIKKLLPLMRQGECWHKDAIDSNTLLRIDKLLTAEFDPTIRDRVRDKSINLKCLDDFKNLPLWLASYVVYDRHAEANDIKRWEKPSDVEYFLHNEFKQHSLRNPIVEQVITETLRVVKDIWTHYGNGAENYFSEIHIELGREMKNPAEKRKSMTQKISENENTNLRIKALLAEFLNDSSIANVRPNSPSQQEILKIYEEGVINAENEIPDDIQKISKLSLPTISELIRYKLWLDQKYHSPYTGEMIPLAKLFTSAYEIEHVIPQSRYFDDSLSNKVICEAEVNKDKDNATAYEYIKNNSGKKIELSFGKEVTLFTLTEYEENVKRSFSRNRGKLKKLLMEDIPDEFIARQLNDSRYISKVVKGLLSNIVRVDDEQEVTSKNVISTSGAVTSILKKDWGLNDAWNEIISPRFERLNQLTNSTNFGHMRNNLFVPYVPLELQKGFNRKRIDHRHHAMDALVIACATRNHINYLNNSYAMAGKRDLRFDLRANLCYKSPNDDGSEGYRWVFKKPWNTFTQDAREALSNTVVSFKQNLRVINKSVNRYQKWEVDEHGQKQKVEVKQVKGDSWAIRKPMHKDTVSGRVTLRFQKAVNLSVAIDTPEFIVDKSLKAKVKELLAIPYDKKQIAKYFKENDNQWNGKPVSKVEVYYFDGENAASRIKVDETFNSEKIKKITDTGIQRILLNHLQQYSENQNGKVVEHPEIAFTSDGLEAMNRNIQNLNNGIYHQPIYKVRTYEPMGSKFAVGTIGNKGTKFVEAAKGTNLFFAIYLSPSGKRSYETVPLNVVIEREKQGLSPVPEHDEKGNALLFYLSPNDLVYIPTQEEQDSPQSVDLERLTKEQVLNVYKVVSFTGNRMYAIPANVAQSIVDKVEYTQLNKVESDVILKRSIKEICWKLKVDRLGNVVDVIR

SEQ ID NO: 22101 - protein, 1074 aa, unidentified
  REGION 1..1074: note = Cas Enzyme sequence
MKHPYGIGLDIGIASVGWAVVALNENAEPYGLIRCGSRIFDKAEQPKTGDSLAAPRREARSARRRLRRRSLRKADLYELMEKNGLPGKAEIEQAVQAGHLPDVYALRVQALDGPVTALDFARILLHLMQRRGFRSNRKADDAQKDGKLLQAIDANTRRMEANRYRTVGEMMYRDPVFAEHKRNKAENYLSTVKRDQIIDEARLVFAAQRQYGATWASPEMEAEYLCILTRQRSFAEGPGKGSPYSGSNRVGTCTLEGKSEQRAAKAAFSFEYFTLLQKINHIRIAKNGTSRTLTPAERQVLLSVCCQTDKLDFARIRKALALPEEARFNMVRYRGEQTAEACEKKEKITALPCYHKMRKALNTLRKDHIRNISREQLDAAGAALTNPENEDKLREALKQAEFEPLEIEALLTLPSFAGYGHISVKACRKLIPYLEQGMNYNDACQAAGYDFQGRQNGEKTKFLPASTEEMEDITSPVVRRAVAQTIKVVNAIIREQGESPVSIHLELAREMNKNFQQRSELDKAMRDNSAENERLMKELNELFPGRTVTGQDLVKYRLWKEQDGRCAYSIQPLELDKVITVSGYAEVDHIVPYSISFDDRRTNKVLVLASENRQKGNRLPLQYLQGKRRDDFIVYTKANVKNFRKRQNLLKERLSEEDGKGYIQRNLQDTQYIAAFMLNYIRNHLAFADCSGAGKRRVVAVNGAVTAFLRKRWGLSKVRADGDLHHAADAAVIACTTQGMIKRVSDFCKRAETTAVRNEHFPEPWPHFRDELRQRLSACPQEDLMKINPVYYATVDISSIQPVFVSRMPRHKVTGAAHEETIRSQVNEKYTAVRKSITELSLDKDGKIKDYFKPSSDTLLYEALKKRLTEFGGNAKKAFAEPFYKPRADGTPGAQVRKVKVVAKMNNTIPVRSGGGVAKGGDMIRIDVYYVPGDSYYWVPIYVADTVKETLPNKAVVRDKTMEEWKEMKEDDFLFSLYSNDLILVERDKPICFSLMHEDSTLPKKYETKKELVYYKGGDISNGGIRIETHEGAYFLKSLTFGIVQKVQKYQVDVLGNYTPVKKEKRQTFPAQRR

SEQ ID NO: 22102 - protein, 1017 aa, unidentified
  REGION 1..1017: note = Cas Enzyme sequence
ETLGEYLWHRHRQGQDLRLKGHGLYADREMIFNEFDRIWTRQEREHKQLCGEHKGRSLRKTFEEAIFYQRPIRILSAGNCELETSLPRSPLVQPACQEFRIEKQIADLRWAKKGRRHPKPLEEPAKQVIRKLLSENERVKFEEIYKALEKTGIPPAPDEYLNLSEGGREDLHGNVTNACMKKLGLESEWQSLTDGHQIAALNLLANTGSPDIFYARNWHENIPKGKKRADGTPEYRCIPGKVVNFINSLAQMEKLDWLSNMGFDSGRSAYSIKALRRLATAMREKGLDETDAISLLYPQVANAAMREELLGELPPHQHTGNVVVDVSLRQVRREVNATIRKLGGPPDSVIIELSRDMPLGVKRRGEIVDGINKNQRARKKAAREIEKETGKAASNVAIRNYLLWREQDEQCLYCGKDISLPDALDELKTNRDHIIPRSITRIGKSRNYLVLVCHSCNDEKGARTPREKWSDDPERWKVIEKQAKRLGKKKLLGKMRQILSKESGESLLDSEEIGDFSARQLQDTSWIAKNCAQWMGMICSNVAVSRGILTESLRRKWGLDTVIPEVRLEKKLPVFDEEEQLITPEDFERHRAYWEERGEGGDSGKTHRRIDKRIDHRHHLIDALVIGLTSRGLYQKMAQAYKREAERTASPADRRRIPLRAKPPIPGIRNLALELVRNCNLTHKRDRWLGGPLFDLNPVSVYEVQVSGNWKLTKLAKNLSGKVSEDIEQRAKDREAGLNQISKIADKAIREIVRQVYEERIDSGASPKRALSKLILDREGNQIQQVRVSYKEKRFSQRWELTKLAEKLSDKVSDNPEKRAKDLAAGLKQINKIANPSTREIVERAYEERIATGKSPKQALSMPILDMRFNKRFGTQIRRVLVKYDEKAKGQITVKHGRNGELKKYLKTEGYAWLEWDAQKGEARLVTLYEAMKSGRSEAPKGVRFFKGDTVLNTSDQKRYVVCQIWAENGGSLVLILHTETRGAKLTGSDSGKKRVSGRNLSKLTLISDDWPPHSSD

SEQ ID NO: 22103 - protein, 1017 aa, unidentified; identical to SEQ ID NO: 22102
  REGION 1..1017: note = Cas Enzyme sequence

SEQ ID NO: 22104 - protein, 1106 aa, unidentified
  REGION 1..1106: note = Cas Enzyme sequence
MDGLTCLDRVLQNLKMEASMYRLSLDLGTNSIGWSVLELDNAKSPKVKKILDMGVRIFSDGREAKTGTPLNEVRRNARQMRRQRDRKIRRRKAMLNFLINNNLMPQDRDEQQVAARLDPYTMRTAAMERKLKPFELGRIMMQFSIRRGFKSGRKENQAENTAEREGMLGGVHSLESALEGLTLGQWLCKQREKRNSVRFKPTMEKTKIIYSFYPSREMYENEFAVIRKKQEKYYKELNWERLYWLIFFQRPLKRPERGRCQFYTEEERGYKAFVSAHRFRILQDVNNLKYYNEKNIEEEIPSELKIKLFDSLDSQKSLSFDRIRKLLGENYTGSFNLEDSKRDKLRGNETSVDFRKPELFGPTWDKLPVKEQDTIIEKLIIEDDENVIHNSLITYGLNDDQIKKISGYNFPTGTTMLSSRFMIDCSEIMLKEWCPYYEAVKLMGLHHSKKEKQKIQRSLPYYGKILIGQVSDAKGEGFNGNDEVRYGRIANPTVHIALNQLRKLVNALIRRFGNPDQIIMEVTRNLKQSKAMKDEIFEEQAKNYKDNERIKKELTDLGLLQISSEDIKKYKLWEELAPEGIARRCPYCGRTISAKQLMSGAVEIEHILPYSRTLLNSRDNLTVAHRECNQKKNNQSPFEAFGSNPKGFDWNRIMELTTKLPFKKRQKFFPDAMVRFNEKEEGFIDKQLTDTAYLSKASKDYLSVICDSNAIWVSPGRLTSLLRGFWGLNTLLNREHDTWYKNRSDHRHHALDALVIGLCDRRIISEAARINSGRGYREIDAPSCPIKKKDIEDRLKSIIISYKQDHGIEGKLYADTALAKRSYLEQITPMDLEEKEINHIVPKTIQTDIANLVQKEGFRKAKSMIQNKYKYLRVFRDKWVTRTPLVSLSERDIPNIADADIREQILKFLKSHPVQSGQKLQDVLTLFSKKNKIYSIRYFYKDQVPVSIEDNTNKAYMPGDYYRVDIWRIPQQKGKYKYEGVFISRPQAIKQQTYGDNTGSLRKPHSAAKLIMSICKNDIIILSNKTEQEFCRIAGFSTTQNKIDIRPLYASDTIASWKKDTNSNLCSAFWPLNIEGHFFKSINVLFNEYEIKLVKITVDGRQIYRY

SEQ ID NO: 22105 - protein, 1003 aa, unidentified
  REGION 1..1003: note = Cas Enzyme sequence
MEITINREIGKLGLPRHLVLGMDPGIASCGFALIDTANHEILDLGVRLFDSPTHPKTGQSLAVIRRGFRSTRRNIDRTQARLKHCLQILKAYGLIPQDATKEYFHTTKGDKQPLKLRVDGLDRLLNDREWALVLYSLCKRRGYIPHGEGNQDKSSEGGKVLSALAANKEAIAETSCRTVGEWLAQQPQSRNRGGNYDKCVTHAQLIEETHILFDAQRSFGSKYASPEFEAAYIEVCDWERSRKDFDRRTYDLVGHCSYFPTEKRAARCTLTSELVSAYGALGNITIIHENGTSRALSATERDECIAILFSCEPIRGNKDCAVKFGALRKALDLSSGDYFKGVPAADEKTREVYKPKGWRVLRNTLNAANPILLQRLRDDRDLADAVMEAVAYSSALPVLQEQLQGLPLSEAEIEALCRLPYSSKALNGYGNRSKKALDVLLDCLEEPEVLNLTQAENDCGLLGLRIAGAQLERSDRLMPYETWIERTGRTNNNPVVIRAMSQMRKVVNAICRKWGVPNEIHVELDRELRLPQRAKDEIAKANKKNEKNRERIAGQIAELRGCTADEVTGKQIEKYRLWEEQECFDLYTGAKIEVDRLISDDTYTQIDHILPFSRTGENSRNNKVLVLAKSNQDKREQTPYEWMSHDGAPSWDAFERRVQENQKLSRRKKNFLLEKDLDTKEGEFLARSFTDTAYMSREVCAYLADCLLFPDDGAKAHVVPTTGRATAWLRRRWGLSFGSNGEKDRSDDRHHATDACVIAACSRSLVIKTARINQETHWSITRGMNETQRRDAIMKALESVMPWETFANEVRAAHDFVVPTRFVPRKGKGELFEQTVYRYAGVNAQGKDLARKASSDKNIVMGNAVVSADEKSVIKVSEMLCLRLWHDPEAKKGQGAWYADPVYKADIPALKDGTYVPRIAKAHTGRKAWKPVPESAMKKPPLEIYLGDLVQIGDFVGRFSGYNIDNANWSFVDRLTRIKISCPTVGKLSNDMSPFVVRESPIK

SEQ ID NO: 22106 - protein, 1155 aa, unidentified
  REGION 1..1155: note = Cas Enzyme sequence
MKYRLGLDLGVGSIGSAVIELDNENNAKDIIDAGVRIFEVSEGAEERRFKRTARKNLVRTKKRLELLAKKLFENGLWPNENPEGTDKLKSKSPYKIRTDALNEKLASPYYVGRAVLHIAKHRGAGFVSASEETEEEILEEGEKSKAKKSSYDMMLHHLKETNSKTIGEFFYNKIISGKGNDKTVRQKKYAIEKNIVDYAIPRYLVKDEFNKIWDKQAEFYPQMKKENLKKEIYDILFYERPAAPYATGKCIYFREEDRLLKAHPLSEMRRIYEEVNNIRILNDMNKRKLTLEERDSIVNELLLKGQNAGKQAIKKLLNLSAQHKISLVDDRVIKAYLYSRPEFANNEHLQNMNENELSSFIEFLAEPKMSKDKNARLYNEDALIEYLKPILKIDDEKEIGNLLTKLPKGRGMLGISATKIILEKLKEDVLTHREITDKLAETDKRFMAEEEIARQNQGKCFQLPYYGEILQTDTAPLPPLMINNNKSLNPDEIRWGKIANPAVHMILNQIRLVVNEIIKIYGKPYDINIELGRDVGMSTKKKKEFENQQKQNEKLNEEAKNYLKEHKIAINNKNILKYKLAKEQGWKDAYNPTQNISSIFTGMEIEHIIPQAKGGTDTYNNLCLVNSNDNSNKGDRYAYEYFEETKTQEEIREILKNARSRTPQKSWRFEADAREKYEESGDKEENTRYLTDTRYVAKMAQRYLRAIVDCSDCDEVMQTRILAVKGGQTAKLRQHWNLYGLEYDLMGLDIPRYVNCPPYWLELDTGEIIEGINKPDIDGKWKFFDKAKNKEWQPKPRIDHRHHAMDAITVACANRGLIQKMAEENDINKIHYPLPLTSVESLADFRRKVISCLKDIKVSHKPNHSKAGQFHKETGRTVLCQNPDDPNSLITVYSRKILQVVKSAKDLTKLLIPETIKNEWHEDIAEHKAKQAKLVQDFELYMNTAEQILIAENEQGVAEGKKETKITEGRILLKAFRIIQDKGLWKGDKFRCYSNSSSMINIPKHGVAYEAQNNHCIDFYQKNGKIGWEVIKRFDANQADFEPQWKKEGGKIIWSVQQGDILELDTPDEWKQYTDKERCLAKVKKFSEGKFCIDYITDARMTSPKDKTLEYMFVNSLEKGLSYYTSHKARKVELTPFGKIKKKHKVLWNGTKTAA

SEQ ID NO: 22107 - protein, 1047 aa, unidentified
  REGION 1..1047: note = Cas Enzyme sequence
MKNYRLGIDLGSTSLGWSIIELSKGKEPTKLMNLGVRIFPDGRDAKSREPLNKQRRDHRSMRRNRDRNLQRKQYLFDCLIKSKLMPENIIEQKKLENLDPYELRVQALDKEISLHEFGRVLFHLNQRRGFKSNRKLDADDKETSTMKNAIKELENELKKAGVRTLGEYLFNLNKDIVEHHQRKPLRVKTTAEGYNLYPDRKMYEDEFEILWKKQSEYHQELNSELKERIKNIIFFQRPLKPQPKGKCRFEPDETRCPVAFPIYQQFRIYQEVNNLRLLDFDRVSHDLTDEQRTIILKAVLFQKKTAFKALRKKLGKEYAQDYVFNLESEKRKDMKGDETSFTLRKDEYFGTTWDELTDKEQDEIITRIINEDNDTKIEETLISWLCDSFKLQKENAEKISNLRLSQGIGSVSKKAINKILPFLKEGFIYSEACEKAGYHHSDFRTGEIFDEENLPYYGEVMPQHVAFGTDDSDDIDDVRFGKIPNPTVHLALNQLRKFINALTKKYGAPQQVVVELARELKNGQKRLREIEYEQNKNRKYNEKIADELEKIGVENTYQNRLKYKLWEELDRDPTKRCCPYTGKHISLNAVNGLFSNKFEIEHILPKSKTFNDRPANKTVSYFKANRDKGERSPFDAFGHNPKGYEWDKILSRAEKLPKSKRWKFYPDAMKNFENENDVISRMLTDTQYMSKVAREYMSYVCGPNNVWVIPGQLTAKIRSKWGLNELLSDDSKKNREDHRHHSVDAFVVACTSRSMLQKIARASELSRDRFIDEMPPPFTAFKHEKMKDLLDNTTISFKPDHGNAKAAILRKQTVGQLHDETAYGFVSEDIAKGKITLCVRKPLRDLNTIKKITEIVDANIRHFLLSSIEMNEDKKIDTILEEFRQMTGIKRVKIQVEKDKKTVIPIYNKKGEIYKYYLSGSNYCADIYCPNKGEKAGKWHVEIIPMFHAHQPDFEPQWHKQNPTAKKIMRLFINDFVSYNENDERKIRRVKKLSVDGRLFFIDPKIAKSDKEPNATSVKQLQERNARKIGVDILGKVYDPKQKNENH

SEQ ID NO: 22108 - protein, 1042 aa, unidentified
  REGION 1..1042: note = Cas Enzyme sequence
MRHFLGLDIGVQGIGLAVVPQNAADFEKLALGVHLFEGGTDGDVEKGKDESRNLVRRSARALRRAYRRRSQRMIRLSNELKRLGLLPSCRMHVPEERNAMLETLDQSLSGIFLVGDRRQAHLLPYILRTRGLDQKLQEHAVGRALYHLAIRRGFLSNRKAVEDEKEEGVVKEGISKLEKEIEESGSRTLGEYFSTLDPEETRIRTHWTSRKMHETEFELFWESQAQYHPAMTPEAKKRVHRAIFFQRPLRSQRFLLGKCQLEPNRHRAPMACLEIQRFRYWQKIMDLTYTVGKDFTEISLTREQQDILANALENRGKLTFTEIRKLFRMKKTVTFNLENGGEKQIRGNTTSFRLANALPDRWPKMTEREKGLLVNEILQYQSVSGLEKRLQSFCRFTPEEAKAVASTQLEPGYASLSRRAAGKLLKKMQEERLHFKEAEKALYGSPLKEEPVCDFLPPLCAERGAVLTNPVVTRVLTELRKVVNAVIRKYGKPERIVIELARDMKRSKKERAQISEKMRAQEKEREKAKKRIFEELGIQEPSRNDILKWLLAEECGWLCPFTGNEITPANLLGPNPQFDIEHILPFSRSLDDSFMNKTLCDVYANRHVKKNQTPFEAYGHDEENFRKILIRVQNSNMPKAKKERFTMESIPEDFKSRMLNDTRYASKLAVSYLGKLYGGKIEIVDETGKTKQRIFSCTGQATAWLRQEWGLNSILNDGGDEKNRTDHRHHAVDALAIAFCNSEIVRQFAHAAEVAEQYGVSRRFARGEVDQPRANFLEIVRKAVERINVSHRPNRKISGALHEETNYSKPHRVPNSKSETTRHKRIQLPNLKEKDIPNIVDGAIRRIVAAKLSEIGDAKKFADEKNLPYREVTTKTGETYRIPIRAVRIRASVTTQTIGRGPSLRHVKTGSNHHMEVYAELDANGNEIKWKAKVVTMFEAYQRRKLGLPIVVRDHGEGTRFKFSLFKNDFLLKTEEDGSQTLYRVFKMAQSGQIGWGKHTDARPAKEVTDRTPGNAPSINALRGKVIKVRVDHLGEIYPAND

SEQ ID NO: 22109 - protein, 1436 aa, unidentified
  REGION 1..1436: note = Cas Enzyme sequence
MKYIKYILGLDIGSNSIGWALIQLDLLQKTKRIIAAGSRIIPMDQKVLSDFGKGITISPTAQRTSYRNARHCRERHLLRRERLHRVLHILGFLPTHYDKQIDFSKRYGKFVDNTEPKIAYNEGKFLFMDSFQEMLSDFKSHQPDLFYTKKNGEESKIPYDWTIYYLRKKALSRKISKEELAWIILNFNQKRGYYQLREEEGNKENDFEIISSKIISVIKKDKDKKYNKYWYDIILENGLVYQAAFYNDFVYNWINQDREFIIERTSLKNGAEKVKLSYLPTFDEIDKMDKKEQDKYYKKIKIKTENSIGNKTVGCYIYDHILQNPNEKIKGKLVRTIERKYYKEELKAILEKQIALQPELFTDQLLADCIRELYSKNEAQQRNLTARDFVHLFVEDIIFYQRPLRRQKSTIANCSLESRSYIDKDSHTRKGAPLKVCSKSNPYYQEFRVLQWLQNLRIYEIDTDQEVTHEFIKTLEDKQQLFDFLMDQKEIDCEELLKYFLNQTYPNAKEKALKSELKKWKDTYRWNYVYDIGEKSSKKYPMNETRYELKRHLEKVANLPDDFLSSEVEYLLWHLIYSVKDKVAYEKGLKKFAQKHHLDKDSFVESFKKFNPYPSEYGSFSEKAIRKLLPLMRFGAHWDFNHIDKNTQKRIEDLITGVENEEIRTILREKAEKYQLEKETDFQDLPLWLAQYIVYNRHAEASSLEKWTSVNDLETYLNEFKQHSLRNPIVEQVVMETLRVVRDIWQQYGQGQASFFNEIHIELGRELKKTAKEREKLSKQNQKNEDINLSIKEKLKELEKYNTKAYSITHQEKYKLWLEQKHISPYTGQIISPENLFTDNYEIEHIIPQSRFFDDSLSNKVVCESIVNKAPYKDRQLGLEFIKNQGGRIVKELSKENKTIKIFTEEQYRTFIKEHYSNNPEKTKKLLLEEIPEKMVARQMNDTCYISKFISEILSKIVRSDEQDEGVHSKNVILCTGKITSILRQDWGLNDIWDNLILPRFERMNNLLQKEKFTIYSIEKQKKIPVVPINDQFKSFQKKRIDHRHHAMDAIIIACTTREHINYINNQHALEKEKDKKEKQEERDKLREKLCIKKYNNRSEGNYSWIFKKPWDTFTQEVRVALEDIVVSFKQNLRVINKATNYYERWVEENGKYIKKMVKQEGTNWAIRKPLHEETISGKIYLDREKITKNDILTATRKTVDSSFDDKRIKKITDTGIQKILLNYLKYKGSPEIAFSPEGLEELNKNLSIYNDGKPHKPIYKVRIYEKGSGRFALGEKGRKYKKYVQGASNLYFGIYQGAKRSFATIPLNEVIERQKQGLPSVPEYNEKGDLLLFSLSPNDLVYVPIEGEIIENIDFRNLSKEQKERIYNVNDFSSTCYFTPNRIAKAIFPKEVDLQRKGDKLSGSYDTKTASLEGIQIKEVCIKLKVDRLGNISKA

SEQ ID NO: 22110 - protein, 1198 aa, unidentified
  REGION 1..1198: note = Cas Enzyme sequence
VYQAAFYNDFVYNWINQDREFIIERTSLKNGTEKVKLSYLPTFDEIDKIDKKEQDKYYKKIKIKTENSIGNKTVGCYIYDHIQQNPNEKIKGKLVRTIERKYYKEELKAILEKQIALQPELFTDQLFADCIRELYSKNEAQQRNLAARDFVHLFVEDIIFYQRPLRSQKSTIANCSLESRSYIDKDSHTRKEAPLKVCPKSNPYYQEFRVLQWLQNLKIYEIDTDQEVTHEFIKTLEDKQQLFDFLMNQKEIDCEELLKYFLNQTYPNAKEKALKSELKKWKDTYRWNYVYNIGEKSSKKYPMNETRYELKRHLEKVANLPDDFLSSEIEYLLWHLIYSVTDKIAYEKGLKKFAQKHHLDEDSFVESFKKFKPYPSEYGSFSEKAIRKLLPLMRFGAYWDFNHIDKNTQKRIEDLITGVENEEIRTILREKAEKYQLEKETDFQDLPLWLAQYIVYNRHAEASSLEKWTSVNDLETYLNEFKQHSLRNPIVEQVVMETLRVVRDIWQQYGQGQASFFDEIHIELGRELKKTAKEREKLSKQNQKNEDINLSIKEKLKELEKYNTKAYSITHQEKYKLWLEQKHISPYTGQIISPENLFTDNYEIEHIIPQSRFFDDSLSNKVVCESIVNKAPYKDRQLGLEFIKNQGGRIVKELSTENKTIKIFTEEQYRTFIKEHYSNNPEKTKKLLLEEIPEKMVARQMNDTCYISKFISEILSKIVRSDEQDEGVHSKNVILCTGKITSILRQDWGLNDIWDNLILPRFERMNNLLQKEKFTIYSIEKQKKIPVVPINDQFKSFQKKRIDHRHHALDAIIIACVTGEHINYINNQHALEKGKDKKEKQKEHDKLREKLCIKKYNKGSEENYSWIFKKPWAHFTQEVRTALEGIVVSFKQNLRVINKATNYYERWVEENGKYIKKMVKQEGTNWAIRKPLHEETISGKIYLDREEITKNDILTATRKTVDSSFDEKRIKKITDTGIQKILLNYLKYKGSPEIAFSPEGLEELNKNLSIYNDGKPHKPIYKVRIYEKGSGRFALGEKGRKYKKYVQGAPNLYFGIYQGANKRSFATIPLNEVIERQKQGRPYVPEYNEKGDPLLFSLSPNDLVYVPVEGENIEDIDFQNLSKEQKERIYNVNDFSSTCYFTPNRIAKAIFPKEVDLQRKGDKLSGSYDTKTASLEGIQIKEVCIKLKVDRLGNISKA

SEQ ID NO: 22111 - protein, 967 aa, unidentified
  REGION 1..967: note = Cas Enzyme sequence
TYRNAKEKALKSELKKWKDAYRWNYVYDIGEKSSKKYPMNETRYELKRYLERVANLPDDFLSSEVEYLLWHLIYSVTDKVAYEKGLKKFAQKHHLDEDSFVESFKKFKPYPSEYGSFSEKAIRKLLPLMRFGSYWDFNHIDKNTQKRIEDLITGVENEEIRTILREKAEKYQLEKETDFQNLPLWLAQYIAYNRHAEASSLEKWTSVNDLETYLNEFKQHSLRNPIVEQVVTETLRVVRDIWQQYGQGKADFFDEIHIELGRELKKTAKEREELSKQNQKNEDTNLRIKALLAELGEDSTIENVRPYSLMQQELLKLYEEGVFSSSMEIEDDIEKIHKKATPNKAELQRYKLWLEQKYKSPYTGQIISLKRLFTEDYEIEHIIPQSRYYDDSLSNKVICESAVNKLKDNQLGLEFIKNHYGEKVYAAGKEVSIFTEEQYKEFVKNHYANNSGKMKKLLLEDIPEKMVARQMNDTRYISKYISEILSKIVRADERDEGVNSKNVILCTGKITTALKQDWGINDVWNDLILPRFERMNDLTQTSLFTSYNEKYQKYLPTVPMEYSNGFQKKRIDHRHHAMDAIIIACATREHINYINNQHALEKGKNKEEKQKSRIDLRTILCEKKYNDNAEENYNWVFKKPWDTFTQEVRVALEGIVVSFKQNLRVINKATNYYEHWVEENGKLIKKMVKQEGTNWAIRKPLHKETVSGKITLEREKVSKGKILTATRKAIDSTFTEKVIEGITDTGIQKILLNYLKFKKSPEIAFSPEGLEELNKNISLYNDGRPHKAIRKVRIFEQGSKFPLGEVGNKSQKYVEAAKGTNLYFGVYQGKDKRSFATIPLNEVIERQKQGLSSVPEYNEKGAPLLFSLSPNDLVYVPIVGEIIEDIDFRNLSNEQKGRIYKAASFTRNECFFIKSSIASLIKNYDAKTKIGELGSQNKLEVTICKGIRIKEVCIKLKVDRLGNISKA

SEQ ID NO: 22112 - protein, 1437 aa, unidentified
  REGION 1..1437: note = Cas Enzyme sequence
YMKYIKYILGLDIGSNSIGWALIQLDLLQKTKRIIAAGSRIIPMDQKVLSDFGKGITISPTAQRTSYRNARHCRERHLLRRERLHRVLHILGFLPTHYDKQIDFSKRYGKFVDNTEPKIAYNEGKFLFMDSFQEMLSDFKSHQPDLFYTKKNVEESKIPYDWTIYYLRKKALSQKISKEELAWIILNFNQKRGYYQLREEEGNKENDFEIISSKIISVIKKDKDKKYNKYWYDIILENGLVYQAAFYNDFVYNWINQDREFIIERTSLKNGAEKVKLSYLPTFDEIDKMDKKEQDKYYKKIKIKTENSIGNKTVGCYIYDHILQNPNEKIKGKLVRTIERKYYKEELKAILEKQIALQPELFTDQLLADCIRELYSKNEAQQRNLAARDFVHLLVEDIIFYQRPLRRQKSTLANCSLESRSYIDKDSHTRKEAPLKVCPKSNPYYQEFRVLQWLQNLKIYEIDSDQEVTHQFIKTLEDKQQLFEFLMAQKEIDCEELLKYFLNQTYPNAKEKALKSELKKWKDTYRWNYVYDIGEKSSKKYPMNETRYELKRHLEKVANLPDDFLSSEVEYLLWHLIYSVKDKVAYEKGLKKFAQKHHLDKDSFVESFKKFNPYPSEYGSFSEKAIRKLLPLMRFGAHWDFNHIDKNTQKRIEDLITGVENEEIRTILREKAEKYQLEKETDFQDLPLWLAQYIVYNRHAEASSLEKWTSVNDLETYLNEFKQHSLRNPIVEQVVMETLRVVRDIWQQYGQGQASFFNEIHIELGRELKKTAKEREKLSKQNQKNEDINLSIKEKLKELEKYNTRAYSITHQEKYKLWLEQKHISPYTGQIISPENLFTDNYEIEHIIPQSRFFDDSLSNKVVCESIVNKAPYKDRQLGLEFIKNQGGRIVKELSKENKTIKIFTEEQYRTFIKEHYSNNPEKTKKLLLEEIPEKMVARQMNDTCYISKFISEILSKIVRSDEQDEGVHSKNVILCTGKITSILRQDWGLNDIWDNLILPRFERMNNLLQKEKFTIYSIEKQKKIPVVPINDQFKSFQKKRIDHRHHAMDAIIIACTTREHINYINNQHALEKEKDKKEKQEERDKLREKLCIKKYNNRSEGNYSWIFKKPWDTFTQEVRVALEDIVVSFKQNLRVINKATNYYERWVEENGKYIKKMVKQEGTNWAIRKPLHEETISGKIYLDREKITKNDILTATRKTVDSSFDDKRIKKITDTGIQKILLNYLKYKGSPEIAFSPEGLEELNKNLSIYNDGKPHKPIYKVRIYEKGSGRFALGEKGRKYKKYVQGASNLYFGIYQGAKRSFATIPLNEVIERQKQGLPSVPEYNEKGDLLLFSLSPNDLVYVPIEGEIIENIDFRNLSKEQKERIYNVNDFSSTCYFTPNRIAKAIFPKEVDLQRKGDKLSGSYDTKTASLEGIQIKEVCIKLKVDRLGNISKA

SEQ ID NO: 22113 - protein, 1464 aa, unidentified
  REGION 1..1464: note = Cas Enzyme sequence
MKRILGLDLGSNSIGWGLIEQDFGQREGKIIAAGSRIIPMDQGLLGDFEKGNTVSQTAERTFYRSVRKLRQRHLLRRERLHRVLHILGFLPTHYDKQIDFSKRYGKFIGNVEPKLAYKEGKFLFMDSFQEMLSDFKSHQPDLFYTKKNGEESKIPYDWTIYYLRKKALSQKISKEELAWIILNFNQKRGYYQLRGEEEAENPNKEVTYYSLMVTEVTAEAPNKKGEIWYSIQLENGWVYRRTSKIPLDNWRGKSRDFIVTTELKEDGSVKRDKEGKEKRSFRAPDENDWNLLKKKTEQDINTSQKTVGTYIYDHLLQNPNEKIKGKLVRTIERKYYKEELKAILEKQIALQPELFTDQLFADCIRELYSKNEAQQRNLAARDFVHLLAEDIIFYQRPLRSQKSTIANCSLESRSYIDKNSHTRKEASLKVCPKSNPYYQEFRVLQWLQNLKIYEIESDREVTHEFIKTLEDKQQLFDFLMAQKEIDCEELLKYFLSLTYPNAKEKALKSELKKWKDTYRWNYVYDIGEKSSKKYPMNETRYDLKRHLEKVANLPDDFLSSEVEYMLWHLIYSVTDKVAYEKGLKKFAQKHHLDEDSFVESFKKFKPYPSEYGSFSEKAIRKLLPLMRFGSYWDFNHIDKNTQKRIEDLITGVENEEIRTILREKAEKYQLEKETDFQNLPLWLAQYIAYNRHAEASSLEKWTSMNDLETYLNEFKQHSLRNPIVEQVVTETLRVVRDIWQQYGQGKADFFDEIHIELGRELKKTAKEREELSKQNQKNEDTNLRIKALLAELGEDSTIENVRPYSLMQQELLKLYEEGVFSSSMEIEDDIEKIHKKATPSKAELQRYKLWLEQKYKSPYTGQIISLKRLFTEDYEIEHIIPQSRYYDDSLSNKVICESAVNKLKGNQLGLEFIKNHYGEKVHAAGKEVSIFTEEQYKEFVKNHYTNNSGKMKKLLLEDIPEKMVARQMNDTRYISKYISEILSKIVRANERDEGVNSKNVILCTGKITTALKQDWGINDVWNDLILPRFERMNDLTQTSLFTSYNEKYQKYLPTVPMEYSNGFQKKRIDHRHHAMDAIIIACATREHINYINNQHALEKGKNKEEKQKSRIDLRTILCEKKYNDNAEENYNWIFKKPWDTFTQEVRAALEGIVVSFKQNLRVINKATNYYERWVEENGKLIKKMVKQEGTNWAIRKPLHKETVSGKITLEREKVSKGKILTATRKAIDSTFTEKVIQGITDTGIQKILLNYLKFKKSPEIAFSPEGLEELNKNISLYNDGKPHKPIRKVRIFEQGSKFPLGEVGNKATKYVEAAKGTNLYFGVYQGKDKRSFATIPLNEVIERQKQGLSSVPEYNEKGDPLLFSLSPNDLVYIPIEGEIIEDIDFQNLSNEQKERIYKAASFTRNECFFIKSSIAFLIKNYDAKTKIGELGSQNKLEVTICKGIRIKEVCIKLKVDRLGNISKA

SEQ ID NO: 22114 - protein, 1464 aa, unidentified
  REGION 1..1464: note = Cas Enzyme sequence
MKRILGLDLGSNSIGWGLIEQDFGQREGKIIAAGSRIIPMDQGLLGDFEKGNTVSQTAERTFYRSVRKLRQRHLLRRERLHRVLHILGFLPTHYDKQIDFSKRYGKFIGNVEPKLAYKEGKFLFMDSFQEMLSDFKSHQPDLFYTKKNGEESKIPYDWTIYYLRKKALSQKISKEELAWIILNFNQKRGYYQLRGEEEAENPNKEVTYYSLMVTEVTAEAPNKKGEIWYSIQLENGWVYRRTSKIPLDNWRGKSRDFIVTTELKEDGSVKRDKEGKEKRSFRAPDENDWNLLKKKTEQDINTSQKTVGTYIYDHLLQNPNEKIKGKLVRTIERKYYKEELKAILEKQIALQPELFTDQLFADCIRELYSKNEAQQRNLAARDFVHLLAEDIIFYQRPLRSQKSTIANCSLESRSYIDKNSHTRKEASLKVCPKSNPYYQEFRVLQWLQNLKIYEIESDREVTHEFIKTLEDKQQLFDFLMAQKEIDCEELLKYFLSLTYPNAKEKALKSELKKWKDTYRWNYVYDIGEKSSKKYPMNETRYDLKRHLEKVANLPDDFLSSEVEYMLWHLIYSVTDKVAYEKGLKKFAQKHHLDEDSFVESFKKFKPYPSEYGSFSEKAIRKLLPLMRFGSYWDFNHIDKNTQKRIEDLITGVENEEIRTILREKAEKYQLEKETDFQNLPLWLAQYIAYNRHAEASSLEKWTSMNDLETYLNEFKQHSLRNPIVEQVVTETLRVVRDIWQQYGQGKADFFDEIHIELGRELKKTAKEREELSKQNQKNEDTNLRIKALLAELGEDSTIENVRPYSLMQQELLKLYEEGVFSSSMEIEDDIEKIHKKATPSKAELQRYKLWLEQKYKSPYTGQIISLKRLFTEDYEIEHIIPQSRYYDDSLSNKVICESAINKLKGNQLGLEFIKNHYGEKVHAAGKEVSIFTEEQYKEFVKNHYTNNSGKMKKLLLEDIPEKMVARQMNDTRYISKYISEILSKIVRANERDEGVNSKNVILCTGKITTALKQDWGINDVWNDLILPRFERMNDLTQTSLFTSYNEKYQKYLPTVPMEYSNGFQKKRIDHRHHAMDAIIIACATREHINYINNQHALEKGKNKEEKQKSRIDLRTILCEKKYNDNAEENYNWIFKKPWDTFTQEVRAALEGIVVSFKQNLRVINKATNYYERWVEENGKLIKKMVKQEGTNWAIRKPLHKETVSGKITLEREKVSKGKILTATRKAIDSTFTEKVIQGITDTGIQKILLNYLKFKKSPEIAFSPEGLEELNKNISLYNDGKPHKPIRKVRIFEQGSKFPLGEVGNKATKYVEAAKGTNLYFGVYQGKDKRSFATIPLNEVIERQKQGLSSVPEYNEKGDPLLFSLSPNDLVYIPIEGEIIEDIDFQNLSNEQKERIYKAASFTRNECFFIKSSIAFLIKNYDAKTKIGELGSQNKLEVTICKGIRIKEVCIKLKVDRLGNISKA

SEQ ID NO: 22115 - protein, 1464 aa, unidentified
  REGION 1..1464: note = Cas Enzyme sequence
MKRILGLDLGSNSIGWGLIEQDFGQREGKIIAAGSRIIPMDQGLLGDFEKGNTVSQTAERTFYRSVRKLRQRHLLRRERLHRVLHILGFLPTHYDKQIDFSKRYGKFIGNVEPKLAYKEGKFLFMDSFQEMLSDFKSHQPDLFYTKKNGEESKIPYDWTIYYLRKKALSQKISKEELAWIILNFNQKRGYYQLRGEEEAENPNKEVTYYSLMVTEVTAEAPNKKGEIWYSIQLENGWVYRRTSKIPLDNWRGKSRDFIVTTELKEDGSVKRDKEGKEKRSFRAPDENDWNLLKKKTEQDINTSQKTVGTYIYDHLLQNPNEKIKGKLVRTIERKYYKEELKAILEKQIALQPELFTDQLFADCIRELYSKNEAQQRNLAARDFVHLLAEDIIFYQRPLRSQKSTIANCSLESRSYIDKNSHTRKEASLKVCPKSNPYYQEFRVLQWLQNLKIYEIESDREVTHEFIKTLEDKQQLFDFLMAQKEIDCEELLKYFLSLTYPNAKEKALKSELKKWKDTYRWNYVYDIGEKSSKKYPMNETRYDLKRHLEKVANLPDDFLSSEVEYMLWHLIYSVTDKVAYEKGLKKFAQKHHLDEDSFVESFKKFKPYPSEYGSFSEKAIRKLLPLMRFGSYWDFNHIDKNTQKRIEDLITGVENEEIRTILREKAEKYQLEKETDFQNLPLWLAQYIAYNRHAEASSLEKWTSMNDLETYLNEFKQHSLRNPIVEQVVTETLRVVRDIWQQYGQGKADFFDEIHIELGRELKKTTKEREELSKQNQKNEDTNLRIKALLAELGEDSTIENVRPYSLMQQELLKLYEEGVFSSSMEIEDDIEKIHKKATPSKAELQRYKLWLEQKYKSPYTGQIISLKRLFTEDYEIEHIIPQSRYYDDSLSNKVICESAVNKLKGNQLGLEFIKNHYGEKVHAAGKEVSIFTEEQYKEFVKNHYTNNSGKMKKLLLEDIPEKMVARQMNDTRYISKYISEILSKIVRANERDEGVNSKNVILCTGKITTALKQDWGINDVWNDLILPRFERMNDLTQTSLFTSYNEKYQKYLPTVPMEYSNGFQKKRIDHRHHAMDAIIIACATREHINYINNQHALEKGKNKEEKQKSRIDLRTILCEKKYNDNAEENYNWIFKKPWDTFTQEVRAALEGIVVSFKQNLRVINKATNYYERWVEENGKLIKKMVKQEGTNWAIRKPLHKETVSGKITLEREKVSKGKILTATRKAIDSTFTEKVIQGITDTGIQKILLNYLKFKKSPEIAFSPEGLEELNKNISLYNDGKPHKPIRKVRIFEQGSKFPLGEVGNKATKYVEAAKGTNLYFGVYQGKDKRSFATIPLNEVIERQKQGLSSVPEYNEKGDPLLFSLSPNDLVYIPIEGEIIEDIDFQNLSNEQKERIYKAASFTRNECFFIKSSIAFLIKNYDAKTKIGELGSQNKLEVTICKGIRIKEVCIKLKVDRLGNISKA

SEQ ID NO: 22116 - protein, 953 aa, unidentified
  REGION 1..953: note = Cas Enzyme sequence
KKWKDTYRWNYVYDIGEKSSKKYPMNETRYDLKRYLEKVANLPDDFLSSEVEYLLWHLIYSVTDKVAYEKGLKKFAQKHHLDEDSFVESFKKFKPYPSEYGSFSEKAIRKLLPLMRFGSYWDFNHIDKNTQKRIDDLITGVENEEIRTILREKAEKYQLEKETDFQDLPLWLAQYIVYNRHAEASSLEKWTSANDLETYLNEFKQHSLRNPIVEQVVTETLRVVRDIWQQYGQGQADFFDEIHIELGRELKKTAKEREELSKQNQKNEDTNLRIKALLAELGEDSTIENVRPYSPLQQELLKIYEEGVFSSSMEIEDDIEKIHKKATPSKTELQRYKLWLEQKYKSPYTGQIISLKRLFTEDYEIEHIIPQSRYYDDSLSNKVICESAVNKLKGNQLGLEFIKNHYGEKVHAAGKEVSILTEEQYKEFVKNHYANNSGKMKKLLLEDIPEKMVARQMNDTRYISKYISEILSKIVRSGERDEGVNSKNVILCTGKITSALKQDWGVNDVWNDLILPRFERMNALTQSTLFTTYNEKYQKYLPTVPMEYSNGFLKKRIDHRHHAMDAIIIACATREHINYINNQHTLEKGKNKEEKQKSRIDLRTILCEKKYSDNAEENYSWIFKKPWDTFTQEVRSALEGIVVSFKQNLRVINKATNYYEHWVEENGKFIKKMVKQEGTNWAIRKPLHKETVSGKITLEREKVSKGKILTATRKAIDSTFTEKVIEGITDTGIQKILLNYLKFKKSPEIAFSPEGIEELNKNIALYNDGKPHKPIRKVRIFEQGSKFPLGEVGNKATKYVEAAKGTNLYFGVYQGKDKRSFATIPLNEVIERQKQGHSSVPEYNEKGDPLLFSISPNDLVYVPIEGEIIEDINFQNLSKEQKERIYKAASFTRNECFFIKSSIASLIKNYDAKTKIGELGSQNKLEVTICKGIRIKEVCIKLKVDRLGNISKA

SEQ ID NO: 22117 - protein, 1136 aa, unidentified
  REGION 1..1136: note = Cas Enzyme sequence
RTIERKYYKEELKAILEKQIALQPELFTDQLFADCIRELYSKNEAQQRNLAARDFVHLLAEDIIFYQRPLRSQKSTIANCSLESRSYIDKNSHTRKEASLKVCPKSNPYYQEFRVLQWLQNLKIYEIESDREVTHEFIKTLEDKQQLFDFLMAQKEIDCEELLKYFLSLTYPNAKEKALKSELKKWKDTYRWNYVYDIGEKSSKKYPMNETRYDLKRHLEKVANLPDDFLSSEVEYMLWHLIYSVTDKVAYEKGLKKFAQKHHLDEDSFVESFKKFKPYPSEYGSFSEKAIRKLLPLMRFGSYWDFNHIDKNTQKRIEDLITGVENEEIRTILREKAEKYQLEKETDFQNLPLWLAQYIAYNRHAEASSLEKWTSMNDLETYLNEFKQHSLRNPIVEQVVTETLRVVRDIWQQYGQGKADFFDEIHIELGRELKKTTKEREELSKQNQKNEDTNLRIKALLAELGEDSTIENVRPYSLMQQELLKLYEEGVFSSSMEIEDDIEKIHKKATPSKAELQRYKLWLEQKYKSPYTGQIISLKRLFTEDYEIEHIIPQSRYYDDSLSNKVICESAVNKLKGNQLGLEFIKNHYGEKVHAAGKEVSIFTEEQYKEFVKNHYTNNSGKMKKLLLEDIPEKMVARQMNDTRYISKYISEILSKIVRANERDEGVNSKNVILCTGKITTALKQDWGINDVWNDLILPRFERMNDLTQTSLFTSYNEKYQKYLPTVPMEYSNGFQKKRIDHRHHAMDAIIIACATREHINYINNQHALEKGKNKEEKQKSRIDLRTILCEKKYNDNAEENYNWIFKKPWDTFTQEVRAALEGIVVSFKQNLRVINKATNYYERWVEENGKLIKKMVKQEGTNWAIRKPLHKETVSGKITLEREKVSKGKILTATRKAIDSTFTEKVIQGITDTGIQKILLNYLKFKKSPEIAFSPEGLEELNKNISLYNDGKPHKPIRKVRIFEQGSKFPLGEVGNKATKYVEAAKGTNLYFGVYQGKDKRSFATIPLNEVIERQKQGLSSVPEYNEKGDPLLFSLSPNDLVYIPIEGEIIEDIDFQNLSNEQKERIYKAASFTRNECFFIKSSIAFLIKNYDAKTKIGELGSQNKLEVTICKGIRIKEVCIKLKVDRLGNISKV

SEQ ID NO: 22118 - protein, 1464 aa, unidentified
  REGION 1..1464: note = Cas Enzyme sequence
MKRILGLDLGSNSIGWGLIEQDFGQREGKIIAAGSRIIPMDQGLLGDFEKGNTVSQTAERTFYRSVRKLRQRHLLRRERLHRVLHILGFLPTHYDKQIDFSKRYGKFIGNVEPKLAYKEGKFLFMDSFQEMLSDFKSHQPDLFYTKKNGEESKIPYDWTIYYLRKKALSQKISKEELAWIILNFNQKRGYYQLRGEEEAENPNKEVTYYSLMVTEVTAEAPNKKGEIWYSIQLENGWVYRRTSKIPLDNWRGKSRDFIVTTELKEDGSVKRDKEGKEKRSFRAPDENDWNLLKKKTEQDINTSQKTVGTYIYDHLLQNPNEKIKGKLVRTIERKYYKEELKAILEKQIALQPELFTDQLFADCIRELYSKNEAQQRNLAARDFVHLLAEDIIFYQRPLRSQKSTIANCSLESRSYIDKNSHTRKEASLKVCPKSNPYYQEFRVLQWLQNLKIYEIESDREVTHEFIKTLEDKQQLFDFLMAQKEIDCEELLKYFLSLTYPNAKEKALKSELKKWKDTYRWNYVYDIGEKSSKKYPMNETRYDLKRHLEKVANLPDDFLSSEVEYMLWHLIYSVTDKVAYEKGLKKFAQKHHLDEDSFVESFKKFKPYPSEYGSFSEKAIRKLLPLMRFGSYWDFNHIDKNTQKRIEDLITGVENEEIRTILREKAEKYQLEKETDFQNLPLWLAQYIAYNRHAEASSLEKWTSMNDLETYLNEFKQHSLRNPIVEQVVTETLRVVRDIWQQYGQGKADFFDEIHIELGRELKKTTKEREELSKQNQKNEDTNLRIKALLAELGEDSTIENVRPYSLMQQELLKLYEEGVFSSSMEIEDDIEKIHKKATPSKAELQRYKLWLEQKYKSPYTGQIISLKRLFTEDYEIEHIIPQSRYYDDSLSNKVICESAVNKLKGNQLGLEFIKNHYGEKVHAAGKEVSIFTEEQYKEFVKNHYTNNSGKMKKLLLEDIPEKMVARQMNDTRYISKYISEILSKIVRANERDEGVNSKNVILCTGKITTALKQDWGINDVWNDLILPRFERMNDLTQTSLFTSYNEKYQKYLPTVPMEYSNGFQKKRIDHRHHAMDAIIIACATREHINYINNQHALEKGKNKEEKQKSRIDLRTILCEKKYNDNAEENYNWIFKKPWDTFTQEVRAALEGIVVSFKQNLRVINKATNYYERWVEENGKLIKKMVKQEGTNWAIRKPLHKETVSGKITLEREKVSKGKILTATRKAIDSTFTEKVIQGITDTGIQKILLNYLKFKKSPEIAFSPEGLEELNKNISLYNDGKPHKPIRKVRIFEQGSKFPLGEVGNKATKYVEAAKGTNLYFGVYQGKDKRSFATIPLNEVIERQKQGLSSVPEYNEKGDPLLFSLSPNDLVYIPIEGEIIEDIDFQNLSNEQKERIYKAASFTRNECFFIKSSIAFLIKNYDAKTKIGELGSQNKLEVTICKGIRIKEVCIKLKVDRLGNISKV

SEQ ID NO: 22119 - protein, 1464 aa, unidentified
  REGION 1..1464: note = Cas Enzyme sequence
MKRILGLDLGSNSIGWGLIEQDFGQREGKIIAAGSRIIPMDQGLLGDFEKGNTVSQTAERTFYRSVRKLRQRHLLRRERLHRVLHILGFLPTHYDKQIDFSKRYGKFIGNVEPKLAYKEGKFLFMDSFQEMLSDFKSHQPDLFYTKKNGEESKIPYDWTIYYLRKKALSQKISKEELAWIILNFNQKRGYYQLRGEEEAENPNKEVTYYSLMVTEVTAEAPNKKGEIWYSIQLENGWVYRRTSKIPLDNWRGKSRDFIVTTELKEDGSVKRDKEGKEKRSFRAPDENDWNLLKKKTEQDINTSQKTVGTYIYDHLLQNPNEKIKGKLVRTIERKYYKEELKAILEKQIALQPELFTDQLFADCIRELYSKNEAQQRNLVARDFIHLFVEDIIFYQRPLRSQKSTIANCSLESRSYIDKDSHTRKEAPLKVCPKSNPYYQEFRVLQWLQNLKIYEIESDQEVTHQFIKTLEDKQQLFEFLMAQKEIDCEELLKYFLNQTYPNAKEKALKRELKKWKDTYRWNYVYDIGEKSSKKYPMNETRYDLKRHLEKVANLPDDFLSSEVEYMLWHLIYSVTDKVAYEKGLKKFAQKHHLDEDSFVESFKKFKPYPSEYGSFSEKAIRKLLPLMRFGSYWDFNHIDKNTQKRIEDLITGVENEEIRTILREKAEKYQLEKETDFQNLPLWLAQYIAYNRHAEASSLEKWTSMNDLETYLNEFKQHSLRNPIVEQVVTETLRVVRDIWQQYGQGKADFFDEIHIELGRELKKTAKEREELSKQNQKNEDTNLRIKALLAELGEDSTIENVRPYSLMQQELLKLYEEGVFSSSMEIEDDIEKIHKKATPSKAELQRYKLWLEQKYKSPYTGQIISLKRLFTEDYEIEHIIPQSRYYDDSLSNKVICESAVNKLKGNQLGLEFIKNHYGEKVHAAGKEVSIFTEEQYKEFVKNHYTNNSGKMKKLLLEDIPEKMVARQMNDTRYISKYISEILSKIVRANERDEGVNSKNVILCTGNITSALKQDWGVKDVWNDLILPRFERMNGLTQSTLFTTYNERYQKYLPTVPMEYSKGFQKKRIDHRHHAMDAIIIACTTREHINYINNQHALEKGKNKEEKQKSRIDLRTILCEKKYNDNAEENYNWIFKKPWDTFTQEVRAALEGIVVSFKQNLRVINKATNYYERWVEENGKLIKKMVKQEGTNWAIRKPLHKETVSGKITLEREKVSKGKILTATRKAIDSTFTEKVIQGITDTGIQKILLNYLKFKKSPEIAFSPEGLEELNKNISLYNDGKPHKPIRKVRIFEQGSKFPLGEVGNKATKYVEAAKGTNLYFGVYQGKDKRSFATIPLNEVIERQKQGLSSVPEYNEKGDPLLFSLSPNDLVYIPIEGEIIEDIDFQNLSNEQKERIYKAASFTRNECFFIKSSIAFLIKNYDAKTKIGELGSQNKLEVTICKGIRIKEVCIKLKVDRLGNISKA

SEQ ID NO: 22120 - protein, 1392 aa, unidentified
  REGION 1..1392: note = Cas Enzyme sequence
MNNNNYSIGLDIGTNSVGWAVITDDYKVPSKKMKVLGNTDKHFIKKNLIGALLFDEGATAEDRRFKRTARRRYTRRKNRLRYLQEIFSEEMSKVDSSFFHRLDDSFLVPEDKRGSKYPIFATLAEEKEYHKKFPTIYHLRKHLADSKEKTDLRLIYLALAHMIKYRGHFLYEESFDIKNNDIQKIFSEFISIYDNTFEGSSLSGQNAQVEAIFTDKISKSAKRERILKLFAYEKSTDLFSEFLKLIVGNQADFKKHFDLEEKAPLQFSKDTYDEDLENLLGQIGDDFADLFLVAKKLYDAILLSGILTVTDSSTKAPLSASMIERYENHQKDLAALKQFIQNNLQEKYDEVFSDQSKDGYARYINGKTTQEAFYKYIKNLLSKFEGSDYFLDKIEREDFLRKQRTFDNGSIPHQIHLQEMNAIIRRQGEHYPFLKEYKEKIGTILTFRIPYYVGPLARGNRNFAWLTRNSDQAIRPWNFEEIVDQASSAEEFINKMTNYDLYLPEEKVLPKHSLLYETFAVYNELTKVKFISEGLRDYQFLDSGQKKQIVNQLFKEKRKVTEKDIIQYLHNVDGYDGIELKGIEKQFNASLSTYHDLLKIIKDKEFMDDPKNEEILENIVHTLTIFEDREMIKQRLAQYASIFDKKVIKALTRRHYTGWGKLSAKLINGICDKKTGKTILDYLIDDGYSNRNFMQLINDDGLSFKDIIQKAQVVGKTNDVKQVVQELPGSPAIKKGILQSIKLVDELVKVMGHAPESIVIEIARENQTTARGKKNSQQRYKRIEDALKNLAPGLDSNILKEHPTDNIQLQNDRLFLYYLQNGKDMYTGEALDINQLSSYDIDHIVPQAFIKDDSLDNRVLTSSKDNRGKSDNVPSLEVVQKRKAFWQQLLDSKLISEHKFNNLTKAERGGLDERDKVGFIRRQLVETRQITKHVAQILDARFNTEVNEKDKKNRTVKIITLKSNLVSNFRKEFKLYKVREINDYHHAHDAYLNAVVAKAILKKYPKLEPEFVYGDYQKYDIKRYISRSKDPKEVEKATEKYFFYSNLLNFFKEEVHYADGTIVKRENIEYSKDTGEIAWNKEKDFATIKKVLSLPQVNIVKKTEIQTHGLDRGKPRGLFNSNPSPKPSEDRKENLVPIKQGLDPRKYGGYAGISNSYAVLVKAIIEKGAKKQQKTVLEFQGISILDKINFEKNKENYLLEKGYIKILSTITLPKYSLFEFPDGTRRRLASILSTNNKRGEIHKGNELVIPEKYTTLLYHAKNINKTLEPEHLEYVEKHRNDFAKLLEYVLNFNDKYVGALKNGERIRQAFIDWETVDIEKLCFSFIGPRNSKNAGLFELTSQGSASDFEFLGVKIPRYRDYTPSSLLNATLIHQSITGLYETRIDLSKLGED

SEQ ID NO: 22121 - protein, 1351 aa, unidentified
  REGION 1..1351: note = Cas Enzyme sequence
MNRKTTKFNIGLDIGTGSVGWAVTDDNYNLLHAKKKNLWGVRLFNTAETAADRRLNRSARRRYRRRRNRLNWLDEIFADELFQADPGFLNRMKHSWVSKKDTARTRDEYNLFIDKEFNDKTYFDKYPTIFHLRKHLIEDTQKADIRLVYLAIHNILKYRGNFTYEHQNFDVSKMNEGLENTLSNLNNSLDLFGLKLPDDADFKKISEILLEKDWSPSSKVSSIITLLKPEKDMKQLYKQIFTLLVGNKADLTKLFNIDSAEKITISFSSNTIEADLSDAQEKLTDEQYAIVEMANPIYSTIVLNEILNGETYLSFAQVTKYENHHEDLMKLKDLWRNDSDRKAVKKARLAYDKYLDDGKYNLDDFYKDLKKYLSTKEDPYSQSALEKMENHQYLLKQRTSDNGVIPFQLNENELVKIIDNQSQYYPFLKENKDKILSLINFRIPYYVGPLQSEDKSDFAWMERKANGPIRPWNFDEKVDREKSSNNFIRRMTATDTYLIGEPVLPKYSLIYQRYEVLSELNNVRIKSTGEESDKGSRLNVDVKQRIYNELFKKHTTISTKRLTDWLRKESYYSAPEIHGLADKTKFLSSLSSYRKLAKIFGNDFVDDSKNLKQLEEVIEWQTVFEDRQILKLKLKNSKLYTDDQIKQLAAIRYQGWGRFSNKLLTQLLVETKVNGEHMPSNHSILDLMWQTKSNFMEIIREDKYNFEKQIKDYNVGDAADKKPLDLVNELPGSPALKRGIWQAIVIVQELSKFMKHAPEHIFIEFTREDQDSGITKSRYNQLDKKYKNIGDMVRNLAPKLKNTLYLKAQLKDKKDALSNERLMLYFLQMGKSLYSEAEIDINRLFTTDYQVDHILPQSYIKDDSLENKALVKASENQRKLDDLLLPNDVIANNIQRWQQLKKAGMMGPKKFANLTRTQVTEQQQKGFINRQLVQTSQMVKNVANILDSIYPDTRIIETRAGLGMGFRDAFSHLDKTTYHYEHPEFVKNRNVNDFHHAQDAYISTIVGTYQLKKYPRDNMRLAFDAYSKFFEDLKKEARKKDGKVPVYSRNGFIIGSMFNGKTQVNKQNGEIIWDQKIKDNISKTFKFKQYNITKQTHIYDGALYNELIRKHDPKAKLIPLKKGIDPTIYGGYTSDKPSYSTLVNLDGKKKLVNIPVRIAHEIDAGRINKLNWIYDNTKHKKDIEILIDKVPIGQIVESSARGYVSLPSATELINAKQLILSYEETALLSILKKSSTDNYKFIIDNYSPNYLSTIYKNIISKMKLYYPLYSNEAKRFTENENYLLNIDSSEQFNVLIEILNLLHADSSNARLEFGNIKNKEYGRKHREFEFSNSDFIYQSPTGLYESRIHID

SEQ ID NO: 22122 - protein, 1064 aa, unidentified
  REGION 1..1064: note = Cas Enzyme sequence
MNKRVLGLDPGVTSVGWVLIEENKKGEAVKLIDGGSRIFKPIYEPQFLKLKNKSRTEKRQTRRQRDRRKRRMSKVENFLFKHGLLSKKNDQYHEENKSIQTELGNPYKLRRDALYQLLENDQLSYIILHLFRRRGFYSALKAKSASEKKKDAAAQAIMEKVRSSDCATLGEYFWRELRTNPKARVRGGESDFSILGSEKMLRDNLYDELELILNKQIEFGNTSLLIRDDKTNNEIREELLRLFRFQRPLKPQKRRSFCSLETKKAKFKDKKTNKEIVKNIGLKTAHKLTVYSQEFIIRQSINNLIVEEMDHDTGEVFFVDIDLEMKEKFFQKAWTQKELSFSAIRKELKVSPESKINLEFGNKKGIAGNQLYTIFKDNELKKWFNSLTYDEKSDLMTDIHMIKGAEYLGLRKVLIKKWNLSDEMIDILVGELDKALKPEYTSVSKKAIEKLLPELRKGKKYSEAVDSIYQKTNSINQKGEVLDLLPPFAPITNPIVNKSVTEVRKLVNDIIKKHGKITEIRIELARDLGLSAKGLSDLRSLQRKQERKNTEAKNYLAERNLKINKENIEKYKLWKELGEKTILPEKINGHWVYSNISFDDVFGSTAKYEIEHILPKSETGDDSYMNKTLCLSGVNGAKGQRTPYEYYQKVMTKEELEIWIKHVYSIFNDKHDSKNKRSKILLTRKEMLSKISNNASLNDTRYIARVLKDYLEQIVVDKVETTKGGYSAMLRKELDLNKLLGDSNKKSRIDYRHHMVDGLVIALSTKSTIDALNKIRKLPSYEVYGNKKSKRYNDLHSKINSRFKIRQDFESHFENTLTSHEVENKASGGFDEETIYSLMREKMVKSECGEFEYPILSKIDLSKFEDIAELDSKEYDDCVFVTSKKASSELVGKKISEIINGKYALPKELFEVLIKMPKDKELEQIPILKSGNVLKKVKEIYSKFKSTNCHFIKNKENEVIGFKKLGSNFCVVDYDTDTPRVVSLFEYLNNKEINKKDVLFKGTIMRDDSGNHWKIYKFSGSDICLHPINKVNIESRYEKKYKTSKNSLKKSFNSLKKADFVRII

SEQ ID NO: 22123 - protein, 1115 aa, unidentified
  REGION 1..1115: note = Cas Enzyme sequence
MSATYTIGLDIGIASVGWCVLGEAHILNLGVRAFDKAETAKEGGSLNLVRRNARLMRRRLFRRAWRLKKLARLLKSEGLIADTKAFQPDHAFTHPLWQLRVDGLDRRLNDEEWARVIYHLCKHRGFHWISRAEAKQAEGDSKSEGGKVKQGLAGTAKLMTEKGYRSAAEMVLGEFPDAQRNKQGEYTKALARELLAKELALLFEKQQEFGNPHASSALQTAILGNGDKKSGLFWQQKPALAGADLLKMLGTCTFEKSEYRAPKASFTAERHVWLTRLNNLRIVTDGVTRQLTEQERQLCLPLPYQQAGDLTYKQLGTALTKAGLLEAGSFKFTGLAYPTEARKAEGKAKAPESATLIKIPAWQELRQTLSKAGLDDEWKKLSGDALSGQPEIFDQIAWVLSVYKDDDEVRTELAKLPLPNRDALIDALLNIRFDKFHALSLKALRAIVPPMEKGLRYDEACVEAGYHHSQLHKVGEGKHKYLPPLYAGRDKDGRMRFAEDADIPRNPVVLRSLNQARKVLNAIIRRYGSPAAVHIEMARDLSRPLDERNKIKKEQDEYQARNQRDREQFIELFGHLPKGLEFEKWRLYREQNGQCVYSQKPLAPSGNVAEIFLEGSTEIDHALPYSRSFDDSKNNKVLVLTRENRDKGNRTPYEYLGGAENSERWQRYVAFVEANKAYRLAKRTRLLRKDFGTKEAEEFRERNLNDTRYICRFFKNYVEQHLKLAEGSEAKRCVVVSGQLTNFLRARWGLLKVRSDSDRHHALDAAVVAACSHSMVQRLSNYSRTRELEQVRDGFIDIETGEIVNPAMNRQLHEHFPDPWPCFRYELEARLKIDSPELLREEMARLGSYSEEELAALKPLFVSRAPQRRNGGAAHKDTIYGHPEKFKEKGSVSQKVPLSSLTLKDLDLLADPHRNTKLYGAIRERLEAHGGKGDKAFPASNPLRKPDKNGNPTGPIVRTVTKVIDKLSGIPVRGGIAKNDTMLRVDVFTKAGKFHLVPVYVHHRVTGLPNRAIVAFKDEEEWTLIDESFEWCFSLYQNDLVQIHLKKESFLGYYTGTDRSTGAVSLRAHDRNQAVGKDGLMRGIGVKTAVNVEKFHVDTLGNIYPAPPEKRRGLA

SEQ ID NO: 22124 - protein, 1067 aa, unidentified
  REGION 1..1067: note = Cas Enzyme sequence
MKYRIGIDVGTNSLGWAVLELDDNNSPKSVDDLGARIFSDGRHPKTGASNAEERRGPRGMRRNRDRGLQRKRGLLRELTEFGLMPTDEAERKDLEKLDPWVLRARAMQEVLPVHHVGRALFHLNQRRGFKSNRKTDKVEDTGKVYDAITKIKDALHEAGVSTLGELFGKPRLDVIAFNKTAPKGAGKPLPQARVRMRGEGAKMAYDYYPTRALILDEFDKIWEHQASHHPELTDAAKGVLRYRIEYQRPLKPQPVGKCTLIETEERAPKALPSAQHFRIYSEVNNLTVGQTGQKSRVLTQEERDIVSKKLLRPTNKTAKKTFDQIRKLLGLPNSMRFNLESVKRKDLVGDETAATLKDSWGASWYDLTVAEQDTVIEHLLTVEDPKSMLDWLIRTYDFDSNTAQVISNARLKDAHGHLSKLAISQILPHLKTGLTYDKAVSAAGLGRHSQRGDGVVYDEKLPYYGEVLSGHVAFAKPAPDNGPDTRNIEAKFGKIANPSVHVALNEIGKLINDLMSRYGQPPEQVVMEMARDLPLSARGKRELESRQAANQKDNEARREILNKHGASDTYENRLRLRLFEELPALEKQCIYSGEALSLASLFSDAFEIDHILPYSRTLDDGFGNKILCTRKANREKGNKSPFEAYGDSSDWGALSIRADALPPNKKWRFGPEAMERYENEERDFLARQLTDTQYIARLAKRYVEAIYGGQGLKDQENRVWVTPGRLTSDLRHYAGLNTVLPGHNSSFKERTDHRHHAVDAVVIAFTDRSMVKRAADQAKREDMYGHSDMMKIMAEPLQKHRGDIEERLKSVVISHKPDHGYQAAMHNDTAYGVTGERDDKKQMKLVTRKPIDSFEKAKQLEDIRDYQTRIKLLEAVQGLTGKEFKDALKVCADNMTPPVRRVRVLVPMKDSSFVTIGHGGNPIAKAYKGDGNYCYDIWSEIKKDKPVWTGQVVTTFQAYQRAQVDKNWWRKPLGQDGQKMVMRLRAGDMLELDHNDTRMIVKVCKISPGVIAMAEHFESNVDARTRSGYKGDKPLKYIFKAPSSLQKSKAVLISVSPSGKVRRKKMR

SEQ ID NO: 22125 - protein, 1216 aa, unidentified
  REGION 1..1216: note = Cas Enzyme sequence
MESNEKKRILGLDTGTNSIGWAVIDRLGDQCSLVDSGVHIFTEGVKEEQGKEVSKAAERTSYRAMRRGFYRRKLRKIRLLRILSELGWCPALSPELLSQWRLKKVYPATPEFMQWLGTDDDNAITPYRYRVICLHEKLDLTQEAQRYILGRALYHIAQRRGFRSNRKDQSNDDEKGKVKEAISGLSQRIKDEGCEYLAEYFEKLYKEGKRIRNQYTSRDNHYVEEFHAICRRQELDEDTVNRLEHVLFDQRPLKSQKHTVGHCLFEPAKSRCQASHPDFEEMRMLQTLNQIRMKTPDDDMLRPLWDEERKSIIPLFQRKSKSNFDFEDIAKELAKPYIKRYGKKCYGYYKTDGNKDILFNYPMDMGISGSPFTAGMVAALGPDWKAVIDAQYAKGEGKKLDDKVNDVWHALSFFDNDEKLEVWLETNLGIEADTAKKVAGIKMVSAYASLSHKVIRKILPYMRRGMIYSYAVMLANIDAVLPAYVRDNDDMRKAAVDMAVECLNEYDKKTCECTMYQWLKNFLAEKYHIDHKTLNRLYHPSDLETYPHVRPDEQDRMRLGSPRISSIRNPMAMRSLHRIRHVVNALLDKGMIDRDTEVHIELGRELNDANMRAAIRRQNKLNESERAKAKAELEKYDINNMSETDIDKYLLWDEQKKKCLYTGNQIGIEDIFGPNPKYDIEHTIPRSRGGDSTMENLTLCDSRFNRDVKKTKLPSELANADEVMQRVAFMKEKADDLQKQIRRCRTNASMDKSQKDRIIQKRHSLELQQAYWRNKYRRFEMTEVPEDFSRRQGATAGIVARYARLFLKSLFDDVSIVKGAATADFRKAWKLQSTDEKKSRDNHTHHQVDAVVIACIGRGDYQRLAASYHLNGYADRERPSVPEPWEGFVDDMRRIQAGTLISYDFTDNAPKQVRRRIKFTGSHHIKGPKPSHISESDTARLRLHMDTNYGAIERDGEVKYVVRNSIGSLKQKDIKDIVDSVVRQKVQEAYDAKGDAAFSEPIWMNEAKGIQIKKVRCYAPNVTRPINIRKHRDISRHEYKRTGHFINDGNYCIAIYEQVLSEGSTVKAKRSFRIVNNLAAASHFKIGNRTNRTELYPPVDENGYRLKAVLHQGDSVLLYEKSPEEIYNASAAELCRRLYVVAGITSMVISNNKYGRLQLRHSQNAGKYESGKNGAYTAGENLRSTITMLHTQLNALIQNQDFTIDVLGKIKFLKHD

SEQ ID NO: 22126 - protein, 1219 aa, unidentified
  REGION 1..1219: note = Cas Enzyme sequence
MAKILGLDLGTSSIGWAIVEQHDSGYSLLEKGVDIFQEGVARVKNNEKPAVQDRTDARALRRHYFRRRLRKIELLRVLVRHDLCPPLTDAQLDALRSRKIYPLTEEFLRWQRTDDNTDRNPYRDRYRALTETLDLTARSDRHALGRALYHLAQRRGFLSNRKQAGEEEEGTVKEGIRDLTADMADAGCTYLGEYFYRLYRQKEKIRKHYTSRNAHYLAEFRAICEKQHLPEEWQQALHRAIFFQRPLKSQKGSVGKCTFEKGKSRCPVSHPHFEEFRMLCFVNDIRVQTPADAEPRPLTQSEAEAIRPLFLRKSKPHFDFEEIARKIAGKGKYACKDDRNEAPCRFNFSAATNVSGCPVTAALLFVFGGDLRTIRSRYTLAGDKSDEQVVNDIWHVLFAFDDEELLLDWGREKLGLSPEDAQSFAAIRLPQGYASLSLNVIDKMLPHLRAGYRYDEAVFLANLKAVLPPAVWNDRGRREHIEQGIAEVVRNYERNPYDKSDTKERRIAEWLQDQGIDTARCDRFYHPSMIEAYTQARPDKKGLMQLGSPRTAAVRNPMAMRALFRLRDLLNQLLREGKIDRTTKINIEFARGLNDANRRRAIGQYQREREAENRAYAEEIRKEFAAATGGRIEPTDDDILKYRLWKEQKNICLYTSKQIGLSDFIGSDTRYDIEHTAPRSRGGDDSQMNKTLCEKQFNRDIKRAKLPTELTNHQEIMARIEALGWPEKIAGLQRQIEGQRRRSKNATTKAERDSAIQRRHYLQMHLDYWRGKYERFTMIEVPEDFSNRQGVDIGIIGRYARLYLKTVFERIYTVKGATTSAFRKMWGLQEEYTAKERVNHVHHCIDAITIACIGRSEYERWAQFAGDEERYLRGEAARPRFEKPWPTFTRDVMAVADELLVAHHTPDNLPRQSRKKLRVRGKIQYGNDGKALYMQGDTARGPLHQQTFYGAIKRDDQIRYVVRKPLDQLQPSDIEKIVDEAVKARMREAIAAYGFKEATDPMKHTVWMNEAKGIPIRKVRIYTPSVTSPIHLKKHRDLSVRKYKQDYHVANDSNYCMAIYEGTDAKGKTKRSFRLVNNLEAARYFKASTDRTACPDLVPSSDKNGYPLKCILKTGTMVLFYENSPEELDECTPNELAKRLYKVTGMSMLALQQKYYFGSLIFKHHQEARPAGELKIKSGVWKIGEDYRPVISILHTQFNACVEHDDFDLTVTGEIKFKR

SEQ ID NO: 22127 - protein, 1189 aa, unidentified
  REGION 1..1189: note = Cas Enzyme sequence
MLMSKHVLGLDLGVGSIGWCLIALDAQGDPAEILGMGSRVVPLTNLGDDKAFSKGKAFTANQKRTARRTMRRGFARYQLRRYRLRRELEKVGMLPDAALIQLPLLELWELRERAATAGRRLTLPELGRVLCHINQKRGYRHVKSDAAAIVGDEGEKKDSNSAYLAGIRANDEKLQDEHKTVGQYFAEQLRRSQSESPTGGISYRIKDQIFSRQRYIDEYDQIMAAQRVHYPDILTDEFIRMLRDEVIFMQRPLKSCKHLVSLCEFEKQEKVMRVQQDDGKGGRQLVERRVKFGPKVAPKSSPLFQLCRIYEAVNNIRLTRPDGSPRDIIPEERAKIVAHLQSSASLSFAALKKLLKEKALIADQLTTKSGLKGNSTRVALASALQPYPQYHHLLDMELETRMMTVQLTDEETGEVTEREVAVVTDSYVRQPLCRLWHILYSIEERDAMRRALITQLGMKEEDLDGGLLDQLYRLDFVKPGYGNKSAKFICKLLPQLQQGLGYSEACAAVGYRHSNSPTSEEITERTLLEKIPLLQRNELRQPLVEKILNQMINLVNALKAEYGVDEVRVELARELKMSREERERMTIQNDKRKEANDEVAEKIQKCGLYPTKSRIRKYRLWEEAGRQCLYCGQSIEEEQCLNGDDMEVEHIIPKSVLYDDSYGNKTCACRRCNKEKGNRTALEYIRAKGWEAEYMDRINERLKEKKISYSKHQRLRWLKEDIPSDFLERQLRLTQYISRQAMAILQQGIRRVSASEGGVTARLRSLWGYDDILHTLNLDRYDSMGETERVSREGETTEKLRIKDWSKRKDHRHHAIDALVVASTRQGYIQRLNRVSSESEREAMSGEIEMQKVTKTDKLSLLERWLTQRPHLSVRAVSDKVAEILISYRPGKRVVTRGRNIYRKKTADGREVTCVQRGVLVPRGELMEASLYGKILSQGRERIVKRYPLHTLKGEVVDPRLRELIAEYNQEITSKVKAKGAPLYLDAAEKQEVRSVRCYVDKPSVAKAIPIRFDECGRAITFVQSGNNHHLALYRTPKGKLVGSIVTFWDAVDRARYGIPLVITHPREVMEQVLQRGDIPEQVLSLLPPSDWVFVDSLQQDEMVIIGLSDEELQRALEAQDYRKLSEHLYRVQKLSAGKYFIRYHLDTDVDEDNRSGRIPKFYQLSLDAYKKNNVRKVRVDLLGRISLL

SEQ ID NO: 22128 - protein, 1210 aa, unidentified
  REGION 1..1210: note = Cas Enzyme sequence
MLMSKHVLGLDLGVGSIGWCLIALDEQGDPAEILGMGSRVVPLTNLGDDKAFSKGEAFTANQKRTARRTMRRGFARYQLRRYRLRRELEKVGMLPDAALIQLPLLELWELRERAATAGEHLTLPELGRVLCHINQKRGYRHVKSDAAAIVGDEGEKKKDSNSAYLAGIRANDEKLQDEHKTVGQYFAEQLRQNQSESPTGGISYRIKDQIFSRQRYIDEYDQIMAAQRVHYPDILTDAFIRMLRDEVIFMQRPLKSCKHLVSLCEFEKQEKVMRVQQDDGKGGRQLVERKVKFGPKVAPKSSPLFQLCRIYEAVNNIRLTRPDGSPRDITPEERDKLVAYLQTYEAPKPPKRKPAKAKPVKLAHPKLDLDKLKELLCIEEELFADKLLEEGLKGDATRIALSIILQPYPQYHHLLDMELETRMMTVQLTDEETGEVTEREVAVVTDSYVRQPLYRLWHILYSIEERDAMRRALITQLGMKEEDLDGGLLDQLYRLDFVKPGYGNKSAKFICKLLPQLQQGLGYSEACAAVGYRHSNSPTSEEITERTFLEKIPLLQRNELRQPLVEKILNQMINLVNALKAEYGVDEVRVELARELKMSREERERMTIQNDKRKEANDEVAEKIQKCGLYPTKSRIRKYRLWEEAGRQCLYCGQSIEEEQCLNGDDMEVEHIIPKSVLYDDSYGNKTCACRRCNKEKGNRTALEYIRAKGWEAEYMDRINERLKEKKISYSKHQRLRWLKEDIPSDFLERQLRLTQYISRQAMAILQQGIRRVSASEGGVTARLRSLWGYDDILHTLNLDRYDSMGETERVSREGETTEKLRIKDWSKRKDHRHHAIDALVVASTRQGYIQRLNRVSSESEREAMSGEIEMQKVTKTDKLSLLERWLTQRPHLSVRAVSDKVAEILISYRPGKRVVTRGRNIYRKKTADGREVTCVQRGVLVPRGELMEASLYGKILSQGRERIVKRYPLHTLKGEVVDPRLRELIAEYNQEITSKVKAKGAPLYLDAAEKQEVRSVRCYVDKPSVAKAIPIRFDECGRAITFVQSGNNHHLALYRTPKGKLVGSIVTFWDAVDRARYGIPLVITHPREVMEQVLQRGDIPEQVLSLLPPSDWVFVDSLQQDEMVIIGLSDEELQRALEAQDYRKLSEHLYRVQKLSAGKYFIRYHLDTDVDEDNRSGRIPKFYQLSLDAYKKNNVRKVRVDLLGRISLL

SEQ ID NO: 22129 - protein, 1226 aa, unidentified
  REGION 1..1226: note = Cas Enzyme sequence
MQKELGIDLGTNSLGWGIVESNTVKDCGVLVFEQGIPQEKGREAALSPAAERTAFRAARRLKFRRRLRKYHTLKILIEQGMCPLALEELNRWIRQGVFPRGNENFIHWLNSTKERNPYYFRAHAATEKIPLPDLGRAFFHIALRRGFKSSKKDQEKEDSPEMQSSEMKGKIRELKLKLESSGITLGQYLYERFQCEKKIRKEIRCGRKEHYEPEFERICDVQEIDPEVRKALHTAIFMQRPLRSQKHRVGKCPLEKRHSRCLFSHPLFERYRMLSFINSIKVKNVGDKEFRFLTDAERRLAETVFMVSAPSFKVERILHKLFPEIGKKNYEGPRSEINYRPDHTVASASVTHQLSKILKCNDLFAWRHSYVTRHGKEAVMDVQALFDGLYYFSHIYDEDDDDKAALKFASERVGLSEDAAAALIKIKIPDGYARYSLCAIRKIMPFLEMGYVERHAVFLAKLPDIMGECFENRKEELLHDFQQCVNDYVWEKENLSRREHVQGRLLSLTERLRNMLEEKWKIMPPEFEKLYSYQENSNYQDCSKEGILPRIELGMIYNPVVHRSLTVLRHLVNHLRRCGKIDADTEIHVELTREVNDKNHRLAYLDWQKKNEGERAQAVKAFEEYGISNPTETQILRWCLWEEQGHRCLYTGRKIEAGEIFSPTADSVDIEHTIPRSRGGDNSRENLTLCDSQFNRHEKVGKLPSECDNYHQPNGILENLKSCIQPKLEEAEVAYSKASAAARKATGIQRANARKKMLYLRFALDYWRTKVKTFNLAADEINEDFTLRQLSATGVMTRHALQFLKSVYSRVFANSGKITKFARESWGVQNQDEAKDRSDHIHHAVDAIVVAALNRKTLARISAAYHECEELMQGRGALKIAYPWESFPEDVRNAVNQILVRHIVQRNEMKQTKRNGVFLTSPVKLPDGRVIRRVPAAGDTVRGALHNQTWYGCIRQNGAEKFVVRKPFDSNEFKQLKDLEKIVDPGVKNALLEQIRNSGMDFKTAMQQEFRMKTKTGKFDGPVIRRVRIFCSMQEPLKIKEQTYCSEKTYKNYYYAETAKGSNFMVALYRKPEIPGTEKTYEYRLISLWNWAKEHRQSGFVPYERREKNLDFIGFIAPGTMALFYEKSPEELHALPKSELQKRLYKITEFEKDGERLRLHLRWHREAREKGKATEAMEIMQMKSSVVSYDIPAFLLRISQKSYQNHLLFDGIDFEFTADGEIIFRE

SEQ ID NO: 22130 - protein, 1226 aa, unidentified
  REGION 1..1226: note = Cas Enzyme sequence
MQKELGIDLGTNSLGWGIVESNTVKDCGVLVFEQGIPQEKGREAALSPAAERTAFRAARRLKFRRRLRKYHTLKILIEQGMCPLALEELNRWIRQGVFPRGNENFIHWLNSTKERNPYYFRAHAATEKIPLPDLGRAFFHIALRRGFKSSKKDQEKEDSPEMQSSEMKGKIRELKLKLESSGITLGQYLYERFQCEKKIRKEIRCGRKEHYEPEFERICDVQEIDPEVRKALHTAIFMQRPLRSQKHRVGKCPLEKRHSRCLISHPLFERYRMLSFINSIKVKNVGDKEFRFLTDAERRLAETVFMVSAPSFKVERILHKLFPEIGKKNYEGPRSEINYRPDHTVASASVTHQLSKILKCNDLFAWRHSYVTRHGKEAVMDVQALFDGLYYFSHIYDEDDDDKAALKFASERVGLSEDAAAALIKIKIPDGYARYSLCAIRKIMPFLEMGYVERHAVFLAKLPDIMGECFENRKEELLHDFQQCVNDYVWEKENLSRREHVQGRLLSLTERLRNMLEEKWKIMPPEFEKLYSYQENSNYQDCSKEGILPRIELGMIYNPVVHRSLTVLRHLVNHLRRCGKIDADTEIHVELTREVNDKNHRLAYLDWQKKNEGERAQAVKAFEEYGISNPTETQILRWCLWEEQGHRCLYTGRKIEAGEIFSPTADSVDIEHTIPRSRGGDNSRENLTLCDSQFNRHEKVGKLPSECDNYHQPNGILENLKSCIQPKLEEAEVAYSKASAAARKATGIQRANARKKMLYLRFALDYWRTKVKTFNLAADEINEDFTLRQLSATGVMTRHALQFLKSVYSRVFANSGKITKFARESWGVQNQDEAKDRSDHIHHAVDAIVVAALNRKTLARISAAYHECEELMQGRGALKIAYPWESFPEDVRNAVNQILVRHIVQRNEMKQTKRNGVFLTSPVKLPDGRVIRRVPAAGDTVRGALHNQTWYGCIRQNGAEKFVVRKPFDSNEFKQLKDLEKIVDPGVKNALLEQIRNSGMDFKTAMQQEFRMKTKTGKFDGPVIRRVRIFCSMQEPLKIKEQTYCSEKTYKNYYYAETAKGSNFMVALYRKPEIPGTEKTYEYRLISLWNWAKEHRQSGFVPYERREKNLDFIGFIAPGTMALFYEKSPEELHALPKSELQKRLYKITEFEKDGERLRLHLRWHREAREKGKATEAMEIMQMKSSVVSYDIPAFLLRISQKSYQNHLLFDGIDFEFTADGEIIFRE

SEQ ID NO: 22131 - protein, 1065 aa, unidentified
  REGION 1..1065: note = Cas Enzyme sequence
MSKKILGLDLGSNSLGWALMREKNEEVGSIIDLGSRIFNKAVEERDPIPKNQKRRDMRLGRRVLQRRARRKQKMINYLISLDLLPSELANNFGQEKLLNELGDPYELRTKGLDEQLTPHQFGRVLLHFVARRGFLSSKKQIAGDLMDDPDTTEYLQALEVEEQQKRQDKDAKLLAQGKIPKPTKDDQSEGAFKADIGGVYQAIKDNNARTLGEYLFNLSTGVVKRNRSHDGGHLRTERKMYQDELDLIWQQQQQYFDLPDEFITEIDKIIFYQRPLKLRKDRVGKCSLEPKHYRANTARLEVQRFRYLQDINNLQYFEREVEQWISLNDEQKQKLKIYFEFHPKITITSLKQELGLDRFHKINLETKNLKGNITACEIRSVIGDIWDGYSDEQQSQLFEDLFTIKKKSSLKARLITHWDFDKQTAVKLCLLEFEPSHSNLSLKAIKKLLPFLEQGLIYSRKDGETGELGALQAAGYQDEKEEVEYLDKLPQPPETSNPIVNKGMHEIRRVVNAIIKQYGKPDIVRIEMARDLEMNTQRYKDATQQQNKNKQANEEAEVEFLKYNPTKRWATKDEKLKYKLWQEQEQCCVYSGKLIGITELWTDAVEIDHIVPRSLCLDDSYINKVVCLTSKNRLKAQQTPIEAWGSDEDKWNQITQRVERFYPDRPWKKYRKNSTHPKKKQFYMRQEEIAEKYGMSSAQLNDTRYISKLAQKYLAQLGVDVSVTKGAIVAEVRKQWGLNSVIGQTNKKERTDHRHHAIDAVVIAHMDRGFHNRMTQAIKVSEETGEKFSLEPPYVNFRVEVKEKTKHILVSHVPQHKLSGALHKKTGAAYVAKHGGLVYRKILGPGFTIKNAMSIVDEQVKIKVLEHIENHGSSKEAFNEKNLETLKLGKNTIKRVRVLQSAIKTTKNKTAEDILNKTKFGVRDKSGKIFKYMSYGNTHHVEIIQNIKTGKVKGEFVTMMEASHRAKGINMPKQSIIKTNHSDEWEFLMALHINDCVSIEKENGERVFYRVQKIGGGYGYDVTLRLNTASTINNIDEELGLMAKGITENNLIKHKVNAIGGLIDD

SEQ ID NO: 22132 - protein, 1509 aa, unidentified
  REGION 1..1509: note = Cas Enzyme sequence
MKNILGLDLGTNSIGWAVVNGSINDNGSEQLVKIQASGSRIIPMDAAMIGDFNKGNSISQTAERTRLRGIRRLSERYLLRRERLHRILDILGFLPSHFAQDLDRHGKIVKGKEPKLAWRKNEAGQFEFIFQDSFKEMLEDFKLNHPNLITDDKKVPYDWTIYYLRKKGLTSKISKEELAWILLNFNQKRGYYQLRGEEEKKNDNVMIINSKVIDVVKAEKDKKYEKYWYNVLLENGLLYRAAFYNDISFWKGHTKEFVLKTIKLKSGGTKQELSFLPSFDEIEKMEKKQKDKMYFKIKLKTGADIDQTHKTVGTYIYDTLLGNPSQKIRGRLVRTIERKYYKEELKQILDKQKEFHPELQDRALYAACVEELYTINEAHRNNIGNRDFTYLFLEDILFYQRPLKSKKSLIDNCPYEENHCLDKETGEIKSFPVKCIAKSHPLFQEFRLWQFIVNLRIYRKGLAQDVDVTNELLKTEEDYVALFDWLNGKKEIDQKAFLKYPLFGLKKEVENYRWNYVQDKPYPCNETRSSMLARLEKCDISIEFLTKENEEALWHILYSVEDKNEIVKALQKFADKHDLNASFVDVFRKFPPFKKEYGSYSAKAIKKLLPLMRMGKYWSENSIDKGTRERIDKIITGEYDEKIENRVREKAIHLADVSDFRGLPLWLVCYIVYGRHSEAKEITQWKSPADIDSYLKSFKQHSLRNPIVEQIIIETLRVVRDIWKQVGNIDEIHVELGREMKNPADKRKKMTQQMSENENTNLRIKYLLTEFLNPEYEVENVRPYSPSQQDILRIYEEGVLNSVSDLPEEISDILKKFTETDLKKRPSRSEVLRYKLWLEQKYRSPYTGEVIPLGKLFTPAYEIEHVIPQSCYFDDSFSNKVICEAEVNKLKSNLLGHEFIVKHHGEIVELPFGKKVRIFTVDEYEQFVKDNYSRTRGKMKKLLMDDIPEEFVTRQLNDSRYISKVVKSLLSNIVREKGEEEAISKNVIPCTGGVTDRLKKDWGINEVWNKIILPRFQRLNELTGTNKFTTKNVGIQEIPTMPLELQKGFNKKRIDHRHHAMDAIIIACANRNIINYLNNESATAKAELSRYDLQKLLCDKAKTDNNGNYKWVIRKPWASFTQDTYLALENIIVSFKQNLRVINKATNHFLHYNEEGKKIFVKQGKGDNWAIRKSMHKDTVFGEVNLRRIKTVALNEAMKNPQSIVVKDFKRKLLELWNLGFDAKRIKKYFEDNRETWSDINLSKIEVYYFSKDTKDRFFATRKPLDTSFDRKKIENNITDTGIQKILLRHLELKDNNPDIAFSPDGIDEMNRNIIQLNNGKYHQPIIKVRWYEQADKFAVGQTGNKSSKFVEAAKGTNLFFAVYESNILDKKTNTIIKKRNYATIPLNVAIERQKQGLPVAPEDENGNDPIFVLSPNDLVYLPTAADLANGIIAQPLDRGRIYKMVSCTGNEGHFIPARIANPILQTIELGSNNKAQKAWTDEMIKEICMPIKVDRLGNVLESSSSYKK

SEQ ID NO: 22133 - protein, 1504 aa, unidentified
  REGION 1..1504: note = Cas Enzyme sequence
MKNIVGLDLGTNSIGWAVVNGSVNDDGSEQLVKIQASGSRIIPMDAAMIGDFNKGNSISQTAERTRLRGVRRLSERYLLRRERLHRILDILGFLPFHFAQDLDRHGKIVKGKEPKLAWRKNEAGQFEFIFQDSFKEMLEDFKLNYPNLITDDKKVPYDWTIYYLRKKGLTSKISKEELAWILLNFNQKRGYYQLRGEEEEENKDKLVEFYALKVVAVEDSGEKKGKDIWYNVHLENGWVYRRTSNMSLDWVGKTKEFIVTTDLEKDGTPKKDKEGNVKRSFRAPKEDDWSLVKKKTEADIDQTHKTVGAYIYDTLLGNPSQKIRGRLVRTIERKYYKEELKLILEKQKEFHLELQDRALYAACIEELYPINEAHRNNVGNRDFTYLFLEDILFYQRPLKSKKSLIDNCPYEENQGLDKETGEIKSFPVKCIAKSHPLFQEFRLWQFIINLRIYRKDLAQDVDVTNELLKTEEDYVALFDWLNGKKEIDQKAFLKYPVFGLKKEIENYRWNYVQDKPYPCNETRSLMLARLEKCDISIEFLTKENEEALWHILYSVEDKNEIVKALQKFADKHDLNASFVDVFQKFPPFKKEYGSYSAKAIKKLLPLMRMGKYWSENSIDKGTRERIDKIITGEYDEKIENRVREKAIHLADVSDFKGLPLWLVCYIVYGRHSEAKEIIQWKSPADIDSYLRSFKQHSLRNPIVEQIIIETLRVVRDIWKQVGNIDDIHVELGREMKNPADKRKKMTQQMSENENTNLRIKYLLTEFLNPEYEVENVRPYSPSQQDILRIYEEGVLNSVSDLPEEISDILKKFTETDLKKRPSRSEVLRYKLWLEQKYRSPYTGEVIPLGKLFTPAYEIEHVIPQSCYFDDSFSNKVICEAEVNKLKSNLLGHEFIVKHHGEIVELPFGKKVRIFTVDEYEQFVKDNYSRTRSKMKKLLMDDIPEEFVTRQLNDSRYISKVVKSLLSNIVREKGEEEAISKNVIPCTGGVTDRLKKDWGINEVWNKIILPRFQRLNELTGTNKFTTKNVGIQEIPTMPLELQKGFNKKRIDHRHHAMDAIIIACANRNIINYLNNESATAKAELSRYDLQKMLCDKAKTDNNGNYKWVIRKPWASFTQDTYLALENIIVSFKQNLRVINKATNRFLHYNEEGKKIFVKQGKGDNWAIRKSMHKDTVFGEVNLRRIKTVALNEAMKNPQSIVVKDFKRKLLELWNLGFDAKRIKKYFEDNRETWSDINLSKIEVYYFSKDTKDRFFATRKPLDTSFDRKKIENNITDTGIQKILLRHLELKDNNPDIAFSPDGIDEMNRNIIQLNNGKYHQPIIKIRWYEQADKFAVGQTGNKSSKFVEAAKGTNLFFAVYESNILDKKTNTIIKKRNYATIPLNVAIERQKQGLPVAPEDENGNDPIFVLSPNDLVYLPTDDELANGIIAQPLDRGRIYKMVSSSGEQCFFIKHIVANVLVDKFEFSPLNKMERALTGEMIKMICIPIKVDRLGNVLESSSSYKK

SEQ ID NO: 22134 - protein, 1199 aa, unidentified
  REGION 1..1199: note = Cas Enzyme sequence
MKVLGLDIGSNSVGSAWVDTERRFIRMGVSVFPAGVESTQDKRGAPKNQSRRSQRQQRRSIERRAKLKRRLRQYLIRKHWMPTDKEEVQKWESVNPWILRRDALHRELSEYEFGRILLHLAQRRGSWWFDEEPEEGEEKKKKKEKDPIETPGTIEYTKTMIIGKGAETFGELIAIEYENRRTATKNKNEKEEVKKRSERVRNRANAFGEKVSEFVADRHMILAEFLRILERQKSFGGKLAEQLTDQMKKEIYNPQKTDTWRCQGVLFSQRKAYWNPGTLGRCDLEPTDEKCPKADMYAQEFLVLTSVNNIRITPRMEASRRLTAEEREKVITAVRKQKTASESTIRKALGIDKGANKTHYMLNIDGDKFTVNGDWFYSQIVYKVFGEDTWGRFDEKMKESVNRAVLKFDPKDESDEERIRAGCKNWWNLKSEQIKKFVAAWKGRPKKDSRVNLSRKAIKNLLPYLRDGLSVTEARDMYAHKMDELTRNRYSTREVVVNKRIRHFQGRHPDLLPPVSDGISNPVVRKSIHEVRRHLMEYIKQYGRPDRVVIELAREARQSEKVISRRIQKNKAIDALRKEIIETHKLDVSEITSTQRERAIKRVRLCRQQRGMCAYSGVTITDAGAAAGEGLEIDHIVPRSKGGDNGMSNLVLCYATANQGKGKRTPIDWLSKEDFEKLEQIFRHLQGAKKLKRSKESHPATTKDNVDMVNKRKWENLHRRTPEKGFTEEQLRSSAYAATQTSDWISKVLYGGEDSGKRYVFASNGNYTGILRRDWGLFFDESGERSERGRKLRGDHRHHSVDAAIIAMSAQCLQSIKDSFVDFERQKENKNVKARWKTVDEPWDGFSKQIVDEYKKLKVSHRAYNRQIAGHLHKDTLYGPAIIYERHKKDDKKKGIGKGDLKRDKDGKPIVKKGMYIKCIPVIGIKQNHLRMPDDWDRLKKEYGNATIGSEKKAIRKEMLGLEDVPPGKSGVIRDIELRDKIGEWLKEHEFADMGKAKAYLKENGLNINGTPVRKVRLLWKLKGMTPPIRRKGFDYENSTLEARRKSLRFYQTQNNHHIEIREKVTKKGEIRWSGDVVTNFDAAKRVRTNNEPIIDNGENEKAKFVMSLSRGEVVHMRHPETREVDYFVVFKIDGTGAIHFTRHTDANPASSKEKGVKLREDIALVPDKLRENIMFDERDVPEKVRISPLGEVKVLVKD

SEQ ID NO: 22135 - protein, 1452 aa, unidentified
  REGION 1..1452: note = Cas Enzyme sequence
SQETVEKATELLGVKGKRNKHRNIIIPEDWIIYCLRKKALTEKVTISELARIIYMMNQRRGFKSSRKDLKETTVLDFDEFKKKKENIEAGKLLEYANGEGEELETKFVSITKIKSVEQEGDEKDKKGNYSFIITAEDERLEPWKEKRKKEPELVGKEFNLVVTQKIDKKGKFSQNKPQIPTEDDWELNMVAQDNKIGDQTPGAFFWDKLVENKNCKIRQIAVRREKYKNELNTIWNKQLELRKAENLEYEILNNNKLEDIATTLYKNNSAKQKELNEKGLLYIISDDIIYYQRELKSQSNSIGECRYEKHKGIDKETYGVKCSPKSSPEFQELRIWQDIHNIRIFENEQKINGIIKIDVDVTKQFINQIAKEKLFELFDVSKEISEQNIFDELNKSSADKKLSTDTYRINLFFDKNKKLQGNGTKELFRKIFKKFNYETEGYKLLQSKDSFRKLWHINYSISSSNLKKSEKGIRTALSKFSLPENIIDAFTKLPEPKKQYAAFSTKAINKLLPLMRIGKFWSWDNIHNETKERINKIINDGWDFAYDKRTGELIREREFTNKEQFSGLPVWMACYVVYGRHSERESDKKYEHPEDLDVMKLIPNNSLRNPIVEQVIRETMFLVKDVWEKYGRPDEIHIELGRELKKNSVEKERITKNNANNLEEKMRIKKLLYELLNGGFEHYSEEGKKINNPFEVNPNPENPIDIEKFKIYKSCGAFTYDEEKENWDTLFKEGKKERIPTSAEIKKYTLWLSQKCCSPYTGNIISLSKLFTEEYEVEHIIPRKKLKYDAFENLVICERGVNKLKGSELAMLFISTNNGAELSYEGKKYKLQSTDDYIAHCKNTFKRRKLKNLLATEVPEDFVERQINDTRYITRKVSELLYPIAKDKAGLVFTIGSITSDLKREWGLNSVWKDILKPRFERLEKITGRQLILPDNEDANKFHFNILDQPEFNEKRIDHRHHALDALIIASTTREHIRYLNSLNAVDNNLELLQVKRALVKGKIRDFKLPWENFTKEAKEMLNATIVTFKSNNKIVSKPTNKYIKWFQKQDGSWEKKECYQKPNKKWMAVRKSMFKEPQGIIWIKEKREVSVVDAFKIQIERMKVEHDKERRKITSYVYDQLARPIIKDIIERIGIDLDDTNNLLNEINKHLINNSKKVETGKLKKDGKHENKTVYLLQDYEYEKIEIAEFVEYAAKRVKLDNSFTHDKINKTPYAKESNSPLAGLLHEHLKAYNDNSNEAFAGEGLEILTKKAGKRLEKITIYEKKSPDDKFGKKYVEVDKGAIAYFIIYEDEQTKKRPEMYSMATHKAIERLVHGMSIADKKEGFKTMILSPDDLVYVPTKDELKRINAYEQNPINWNDKKRIAERIYRMNSSTGSKCEFVPHRFVNQNPIIDKIEFGANNINQRAWDGIVKLVSNKKEGFKREDSGTMIKDVCIKIEVDRLGNIKPVNN

SEQ ID NO: 22136 - protein, 1353 aa, unidentified
  REGION 1..1353: note = Cas Enzyme sequence
MAAFKYYLGLDMGTNSVGWAVTDPNYNLFKAKGKDLWGIREFNEASTAVERRTHRISRRRRQREQVRIGLLKDYFHDAIGEVDPDFFQRLANSKYHLEDKDTEVRYKNNVFNDDDYTDKDYFDQYPTIYHLRKELIESTDKHDVRLVFLALLNMFKHRGHFLNSGLGENGGENNINNAYLELTNLLSEFTQYNLNETIDGKKIEDLLSRRDMSRTRKAEGLAEILGVDYKNKPYKELIRGLCGLKFNACAIFPEIQSDEVPKLDICLSEASFDEKSDEIANILGEDYFEIIMAMKDIYDIGSLAGIRKGYNYLSQARVASYERHKEDLKLLKEVIKKYCSKDDYDSFFNSDADGSYASYVGSYNSKTKQRRVGNKRSSEELYKAIKKLFKNVPVEDADVQSILTSIENETFLPKQLTVSNGVIPNQVHAEEMKKILSNAENYLPFLKEKDETGLSVSEKILKLFSFQIPYYVGPTTEKSNKDGGNGWVVRKEEGQVLPWNIDEKIDMKATSEAFISRMVRRCTYISGEPVLPKASLEYQSFCVLNEINNIKIDGERISVELKQDIYKEVFQKGKRVTKKQLCKYLHTRGIIEAEEQVTGIDVTINNALTTYGKFKAILGDDISKDSVQKMVEDIVFWCTVYGDSKKFLKDRIEEKYGEKLTKEQIKRIVGFKFKDWGNLSKNFLELNGADVSTGESVSIIRALWNNNLNLMELINSRLYNYKERLAEYQNTMMKTLSDIEAEDLDEYYFSAPVKRMIWQTILIIKELVKVLGCEPDRIFVEMTRRPDERKMRTESRRKKFEELYKKVKDEDVDWMKVIAHADETGSIRSKKMYLYLTQKGRCMYTGKHIELSDLFNNNLYDIDHVYPRHFVKDDNIDNNLVLVCKEKNAHKSDIYPLEDEILASQKNMWSELRRSGFITEEKYNRLIGRNSFTDEQKAGFIARQLVETSQGTKGVANILQQLLPESKMVYAKASNVSEFRNTRDIPKSRLINEFHHAHDAYLNIVVGNVYYVKFTQNPLNFIKNDYDRDKTKNNYNLSKMFDWDVERNGEVAWIAQKKDGEAGTIATVKKVLGRNTPLMTRYSFEGKGGLTNETLYSAKKAKEEGYIPFKSSDEKMKDVTKYGGFTSVTGAYFFLVEHTEKKKRSRTIESVPLYLAQKIEQNPHELEKYCEQVLGLIDFDIRVRKIKIGSLVKRNGYFFYITGKNGKQLIVRNAVNMYLKREWVKYISKLEKAVDKNIVEEVIAKDKNELLYSELINKFKTGIFANRPNPVGDKLDKAKEKFLSLDIEQQCTVLCQILQLSSILGSASDMTLLGESAHCGKMQISKKIGDEDIYLINQSVTGLYEKKINLRIV

SEQ ID NO: 22137 - protein, 1407 aa, unidentified
  REGION 1..1407: note = Cas Enzyme sequence
MSIINFPRRGLMEMQTSKQLISSHLKEYPIKDYFVGLDIGTSSVGWAVTNKLYELLKFRSHKMWGSRLFDEAESAVGRRSFRSIRRRLERRKLRLKLLEELFADAMAQVDSTFFIRLHESKYHYEDKTTGHSSKHILFIDKDYTDQDYFKEYPTIYHLRAELMKSGTDDIRKLFLAVHHILKYRGNFLYEGATFDSNASTLDDVLKQALENITFNCFDCNSAISSIGQILMDASKTKSDKAKAIERLVDTYIATDTEDSSSKTQKEQVKEDKKRLKAFANLVLGLSASLTDLFGSVEELDDDLKKLQITGDTYDDKRDELAKVWGDEVHIIDDCKSVYDAIILMSIKEPGLTISESKVKAFNKHKEDLVILKSLLKTDRSIYNTMFKADEKGLHNYVHYIKQGRKEETSCNREDFYKYTKKIVEGLPDSKDKEYILSEIELQTLLPLQRIKDNGVIPYQLHLEELKTIFKTCGAKFPFLNEVADGYSVAEKLIKMLEFRIPYYVGPLNTYHNVEKGGFAWAVRKASGRVTPWNFDDKIDREKSAAAFIKNLTNKCTYLLGEDVLPKSSLLYSEFMLLNELNNIRIDGKPLETAVKEHIIEAVFKQDHKKMTKNRIEQFLKDNNYIHNKHKPDITGIDGEIKNDLTSYRDMVRILGTNFDRSMAEDIIMDITIFGESKKMLRETLRNKFASHLDDETIKKLSKLRYRDWGRLSKKLLNGIEGCDKAGDGTPETIIELMRNFSYNLMELLGDKFSFMERIQEINDKLTEGQVVDPQDIIDELALPPAVKRAVWQALRIVDEVIHIKKALPSRIFVEVTRSNKTEKKKKDSRQKRLSDLYAAIKKDEALLSGLKDTEFEGLKSGLASYDDAALRSKKLYLYYTQMGRCAYTGNIIDLNLLNTDNYDIDHIYPRSLTKDDSFDNLVLCERTANAKKSDTYPIDNTIQTNQKAFWSFLKHQGLISERKYERLTRNTPLTADDLSGFIARQLVETNQSVKAATTLLRRLYPEIDVVFVKAENVTDFRHDNNFIKVRSLNHHHHAKDAYLNIVVGNVYHEKFTRNFRAFFKKNGANRTYNLAKMFNYDVKYTNAKDGKAWDIKTSMDIVKKMMDSNDVRVTKRLLEQSGALADATVYKATVAAKANDGAYIGMKTKSSVFADVTKYGGMTKIKNAYSIIVQYIGKKGEVVKEIVPLPIYLTNRNITDQDLIDYVASITPEAKDISIIYRKLCINQLVKVNGFYYYLGGKTSNSICIDNAIQVLLSNEFLIYAKLLDKVNTLRKSDPSINIQNISTLSPFAKEQISITINDNLKFYDYLVEKLNSNIYIKMKGNKASDLIDIGREKFKGIDVSSQCILLLEILNMLTNMKTTYDIKSLGFSTSRTKIALKVSTLDEFKIINQSITGLYSSEITIV

SEQ ID NO: 22138 - protein, 1398 aa, unidentified
  REGION 1..1398: note = Cas Enzyme sequence
MEMQTSKQLISSHLKEYPIKDYFVGLDIGTSSVGWAVTNKLYELLKFRSHKMWGSRLFDEGESAVGRRSFRSIRRRLERRKLRLKLLEELFADAMAQVDPTFFMRLRESKYHYEDKTTGHSSKHILFIDKDYTDQDYFKEYPTIYHLRAELMKSGTDDIRKLFLAVHHILKYRGNFLYEGATFDSNASTLDDVLKQALENITFNCFDCNSAISSIGQILMDAGKTKSDKAKAIERLVDTYIATDTEDISSKTQKEQVKEDKKRLKAFANLVLGLSASLTDLFGSVEELDDDLKKLQITGDTYDDKRDELAKAWGDEVHIIDDCKSVYDAIILMSIKEPGLTISESKVKAFNKHKEDLVILKSLLKTDRSIYNAMFKADEKGLHNYVHYIKQGRKEETSCNREDFYKYTKKVVEGLPDSKDKEYILSEIELQTLLPLQRIKDNGVIPYQLHLAELKAILKTCGPKFPFLNEVADGYSVAEKLIKMLEFRIPYYVGPLNTHHNVNNGGFAWAVRKASGRVTPWNFDDKIDREKSAAAFIKNLTNKCTYLLGEDVLPKSSLLYSEFMLLNELNNIRIDGKPLEMAVKEHLIEAVFKQDHKKMTKNRIEQFLKDNNYIPNKHKPDITGLDGEIKNDLTSYRDMVRILGTNFDRSMAEDIIMDITIFGESKKMLRETLRNKFASHLDDETIKKLSKLRYRDWGRLSKKLLNGVEGCDKAGDGTPETIIELMRNFSYNLMELLGDKFSFMERIQEINDKLTEDQVVDPQDIIDELALSPAVKRAVWQALRIVDEVIHIKKALPSRIFVEVTRSNKTEKKKKDSRQKRLSDLYAAIKKDEALLSGLKDTEFEGLKSGLANYDDAALRSKKLYLYYTQMGRCAYTGEVIELSQLNTDNYDIDHIYPRSLTKDDSFDNLVLCKRIANAQKSDTYPIAEKIQKAQKPFWTFLKQQGLISERKYERLTRNTPLTADDLSGFIARQLVETNQSVKAATTLLRRLYPEIDVVFVKAENVTDFRHDNNFIKVRSLNHHHHAKDAYLNIVVGNVYHEKFTRNFRAFFKKNGANRTYNLAKMFNYDVKCTNAKDGKAWDIKTSMDIVKKMMDSNDVRVTKRLLEQSGALADATVYKATVAGKAKDSAYIGMKTKSSVFADVAKYGGMTKIKNAYSIIVQYVGKKGEIVKEIVPLPIYLTNRNTTDQDLIDYVVSIIPQAKNISIIYRKLCINQLVKVNGFYYYLGGKTNNNIYIDNAIELVVPTNIAAYIKVLEKFDLLRKDNKQSKASTVTTRIYNEGSTAIVSITDKDGLILYDYLMSKLRTPLYMKMKGNKVDELSTIGRSKFTNMTLEEQSIYLLEVLNLLTNSKTTFDVKPLGITASRSTIGVKIHTLDEFKIINESVTGLYSNEITIV

SEQ ID NO: 22139 - protein, 1281 aa, unidentified
  REGION 1..1281: note = Cas Enzyme sequence
MISFVNHSFEGLLNEADPLFLSRLKKSGLYEEDGGYNAGLFLSKDEAAKFYAKYPTIFHLKDAVISGKEKDIRFIYLTVLHCFKHRGHFNLGDIKPEQATDFDFTYNKFRQLLSTTCNLNLTLQDKQVIRDLLLASGNVRERVSQGMESLSLGNNSVLKVILTLLFGGKGQMANVFPDLKTLQENSDMAKPANASVLCFDTEDFDLMIEPFTPYLSQDEYLFILAAKAMYDWSLLYKVLNGESSIRQAMMRRYDKHKEDLSLLKDIYYYMDSHGFEGAYHTMFRKTDENVNNYACYVGSVVDESKLGRFGLHRSTESFLKELASQLSEMQGSLDKSNPYYEKISSCLIDIEADNFLPKQKDKRNASIPNVLVSDELAKILDVAISLYPALAEPGVSGIYSVKEELLMMCRFRIPYWMGPLNESKKFAWAVHKEEGVVYPWNLEDKIDFSKTRKNFIRSIVNECSLCLGETVLCENSYYINRMKVLDELNGIRIDGKKLPVEIKQAVFEDLSMHYSKVTLSSVKSLLYKHNIIQPGDEPDISGFVKKKLNRSMGCYITAEACCEGLDLEVYEMLAEYVAIFKGDVNAILDALQDEPYDPAMLKKLLNVIKDSGWSIYSKKALTEIYSSVNGTDMNLLEALYNTDKRLSELLGSEFGFMDAFSKDNDRSYGKKNSRNMIDDAHTTPMVKRSLGQMMNVLYELKSFTKSAPDKVFLNIYAPNSFKAIRENVPKLLNKVFSQKVADKEKKAENKRFLEMLSQIKGPLSVRQTLWFLQRGKCLYTGVDIPYSSLFSSTPDFTIDHIYPKSKVYNNILTANLCLVSSKVNKAKDAAYPLDENIRKNMTPFWDSLLQEGLMTQAKYDALTSAFSIPLDIKVASVDKLLVEKRKTALLAEKLIHKVFPDSKVVFVSDTILNDFINNYDLQEVSVINYFPEARKSYYTQVVGMVWNGIFTANPKKYILENPNYSLNVWNYNSEFWNVKTSIGTVKEVIAGAHIKETYMKISDEKGAFSDSTIMSAAYARKKDGKGILPLSKEKADVTKYGGKTSIKTAYYSVARLNGELRIVGIPIYQAYRIKTVDDLIDYLRTLAEDVAVIIPRMNRYSVLNMDGFRAVFRSISNGTGGRCCCARTFIEANEEYCQNVFLFNRLNRKSEHMLSRFGITKDRNEAQYQNFLSNYESHYDNRPNNQIKALRLAFESFCNLDIMDQCYTLEQLYGLVRIDSTSADLSMLSYEVTDKKGNTTVKKLSLQTGIVNVSIKLDGFESVILEDISQTGLYRNKTIIK

SEQ ID NO: 22140 - protein, 1022 aa, unidentified
  REGION 1..1022: note = Cas Enzyme sequence
LKNYLENIEFVSRAELSEFFAKNNHDIIDIRVRALDEMVTPVELTAALLHIAKRRGYKAFYELSDENNNAKDKKAKEEEEKDIYKALTNTADVIKNGGYRSIAEAIMKDSEHFSDKISGRYKYRNIKEKDEKGKKESGGKISENDILFPTEMFEDEVRKILGKQKEFYPQLTDESIDKIFDIIFSRRDFEDGPGNTDDENRPYKGFVDSIGNCPYYKNEKRGHRYTVIGDLFALANKLSQYKYVEKNTGEVVKLPRDLMRNIVNQSLQSGSITKTKINELAKEFNIVILNTKTAKNENIADCIKYLKAVKPIFESYGFDWDKLISEEYTDQNSLLNRVGDTISFNITPKRRIDALNKIDELKGKDELIKKLSKQNFSGTAKVSDKYMIDAINAFFDGTLVGEFQANVQQDEFSVSIKTEKLLKLKPFDNNSEYAQNPVVFRAINETRKVVNAIVQKYGAPNAMNIEIASELNKSFDTRQKISTQQNKNEKERKNAIKQISLITGLDEREIRPQYIERYLLGELQGWRCMYSNEEITNKKEAILNKGKQYEIDHIVPFSRILDDTLNNKALVLARENQKKGARTPLMYLSAEKEKEFKQRVNKLFKGNKITEKKYRYFMLESLVGEDAEKTLGDWKTRNLNDTRYIAKFLVKYFNDNLYFAREKGDDKRPVVYAVKGAITSSLRRQWLNKETWGRYDKGELKKITYFDHAVDAIVIANCLPAYVIIAAENHKLRDIYYSAGKIKTEEYRKSLDNCVDTLMKYYGMSPAVSRKLLEKVKETPSLLKNIRFEVEYRVRDYELMKYFFNYDTKVGEDTLDQIFRNDLYKIYDHQFADSIEMPIVSIKPERKYSGQMVKDGFIKKKDAISGKNSVKTIGENNSTVLNDSRFYCVDVYRTCNDETNLNFIKYTDLLKRNNHLYLRSDYRYPDDYAMHEMYLFYGDYIEITKKNKICCGYYFSLKNSSRNELYMSKGNTRRKLNNVKENEVCSITKKDTVKKFEIDILGKKLGEVKKYGEPLSLLPEKN

SEQ ID NO: 22141 - protein, 1200 aa, unidentified
  REGION 1..1200: note = Cas Enzyme sequence
MKYILGLDPGIASIGWALIQEAENADEKSRIIASNVVKVDFDNFTFINGKGKISDGNAIKMYQKGYTVSPNLVRRQKRGAHRNLQHFKLRRSALIALLRENGFIDDDTLLCEDGKGTTYETLTLRSKAASEEVSLSELARVLLMINKKRGYKSSRKGEVDADEENMGEYLAAITGRSKLLADNHQTVGQYLMSQIALHPLQGIKRQTFYRKDYEDEFEQIWKTQIQYHPELTRKLKKEIKNRIIFYQRPIASKKDELSICELECKEIEIEKDGKKKTIKTGSKVCPVSSPLFQEFRMWQKLNDVILTNINTLEKRYLTFEEKELLASELSIRSRLTKRDVIKILVGKQAKYFDLNFDELIGNETQSRLVNAYLKILELTGHDKIDVKKSKAVDVVEAIRQVFAGLGYHTDAIDGQVTFQTDIYLQPYYRLWHLLYSFPGDNSRSGSDKLVQRVKEFFGFDNDEYAKVIADIKFADGYGNLSAKAIQKILPKMKEGYQYYDACEMVGYKHSKRSLTKEENDNRTLQKHLDFIPHNSLRNPLVERILNQMISLVNSLVDEYGPTYGTFDEIRIELARDLSKNAESRKRMTQDIENNKNERETCRKELIEALNERGYKVNYVSENDILKYRLYKELAPLGYKTLYSKTKVDLVDLIINRKFDKEHIIPKAKSPSNAFSVLTIELSSINEEKGDMTALEYVKWKYGEEEAQQYIARVNDLFKLKAISKAKKDNLLRTAAEIPDEPLNRDLVLTQYINRKAYEILSAITRKVVPTTGSITSRLRDDWQLVDVLQELVWDKYDKLGLIDSYTDKDGRTVRKIKEEAWTKRNDHRNHAMDAITVAFTKQAYINYLNSLNAEGEKREQLMKMRQKNLHRDKQGNWRFNPPMPLGDLRAEVKRQLESIIVYQKPASSAVSPNQNVTKTKKKKEGNRQIQLTPRGKLHDDTYYGSIKEIKPGVGEVITFTKRVEVNESLNVDDVVNKNAQDILKERLRECNNDPKKAFANLDENPIWFNREKGICIKKVTIRINKDLKPIHKKKNHKGELLLDKDKQVQSADYVLTNNNHHVAIYEDEHHELHEVVVSFFDAVDRGIHNKPVIERTLNADKGWRFLFSLQQNDCFVFPDVGFNPSEIDLTARENYALVSPHIFKVQTMSKGDYRFRHHHDATKDYNSSLKNLTWKRIRTLNDLRGLVKIRITKTGHIEYV

SEQ ID NO: 22142 - protein, 1100 aa, unidentified
  REGION 1..1100: note = Cas Enzyme sequence
MSEFHYALGLDIGIGSVGWAVLRNQPNGEPDRIQDLGVRIFDKAEQPKTGASLAAPRRDARSARRRLRRHRHRLERIRYLMEQRGMMSVSDIQAMYAAGGFQKSPYQLRAEALDRPLSKEEAVQVLIHLAQRRGYKSNSTAEAAKDEKETGKVKTAIEENRRCMAEHGYRTVGEMMYRDERFWQSNPDGTRYQQTRNKTDDYRFTVERSAIVDEAKQIFAAQRKLGADWSSEDLEAAYLSILEGQRSFDEGPGGESPFRGGIGDKVGFCTFEPDQQRAAKATYTFEYFKLLQDLNRMRLTGMGMPPEPLDDEQREVLKSAALRSASLSYGQIRKKLNLDDDVFFNDLYYGEKTKEEAEKRKWPQMQSYHKMRTALDKVGKDTIGTLTEEQLNAIATILTECKSDAKRIAALRMAGIPVQFDEALLPLSFSKYGSLSVQAMQKLIPLLEQGMRYDEACTQIYGDHRGLHSEQRKNRLSLTDMDEITNPVVRRAVSQTIKVINAIVRTYGPPDVVRIELAREMSRNFDERRKAEKRQDENRAANERAKEQIAEYKGDHATGLDIVKFKLYQEQDGVCLYSGKNLDPSRLFEPGYADVDHIVPYSRCFDDSYQNKVLVLASENRQKGNRLPYEYFGYDEVRWHEYEVRVENLIRNYRKRQKLLKRQLSEEESAGFIDRNLKDTQYITRSIYNLIRNNLVFAESNYKKRPVQTVNGAVTSMLRNRWGVQKIREDGDLHHCLDAAVIAATTPGLVQRLTEHSKRRETLEKAPAGYVDPATGELLELPQEARRDQFPKPWERFRQELEARLDPIDPRHQIDLLKLETYESDEEIKPVFVSRMPNHKVTGAAHAETIRSSKGGDGFTVTKTPLTNLKLNKFGEIEGYYNPASDTLLYDALLARLKDFGGDGAKAFAQPFYKPKKDGTPGPRVDKVKICEKATIGLPVRNGIAANGSMIRIDVFYVEDDGYYFVPIYVADTKKESLPNKAVVAYKAYSEWKEMKDENFIFSLYPGDLVCIQSRKGIKLNLAKGGTGEKEIVRQEGMYYYRAAGITVGAIQIETHDRRYLQPSLGIKTLQSIEKYQVDVLGNYQKVDLPEKRMTFSKEG

SEQ ID NO: 22143 - protein, 1447 aa, unidentified
  REGION 1..1447: note = Cas Enzyme sequence
MKKNILGLDLGVTSIGFAQVIEGDKPEESEIKQIGVRINSLTVDEQTNFEKGKPFSINKDRTLKRGARRNLDRYQDRRKNLIEVLQKANIINQSTILAENGKNTTFQTWELRAKSAVERIEKEELARVFLAINKKRGYKSSRKAKNEDEGQAIDGMAVAKRLYDENLTPGQLAYQLLKAGKKSIPDFYRSDLQAEFDKVWNFQKQFYPEILTDEFYLELKGKGQRATSALFWTKYEFNTAENKGTREEKKLQAYRWRSEAISKQLEKEEVAYVLTEINNNLNNSSGYLGAISDRSKELYFNKQTVGQYLYQQLQENRHTRLKNQVFYRQDYLDEFETIWNTQSKFHPELTNELKEEIRDIIIFYQRKLKSQKGLVSFCEFESKEVLIDGKKKTIGFKVAPKSSLLFQEFKIWQRLNDIEVRSKNDKKDKRYLEQEEKELLFEELNLKGNFSASNALSLLFEKPKELEINFKDLEGNRTNKALYNAYLKILDIEGYDVKDLLKVKSNKDEVELDDLNVPATEIKNMVRDIFKVLEIDTEILDFNAELDGKDFEQQKSYQLWHLLYSYEGDNSQSGNEKLYELLENKFGFKREHSKILANVTLSDDYGNLSSKAMRRIYPFIKENNYSTACELAGYRHSKHSLTKEEIENRQLDDKLELLKKNSLRQPVVEKILNQMVNVVNSLLEKNRKENPDFKFDEIRIELARELKKNAAERAEMTVGINKAKTAYEKIFKILQTEFGIKNPTRNDIIRYRLYEELKNNGYKDLYTNTYIPREIIFSKQVDIEHIIPQSRLFDDSFSNKTIVYRSINLEKGNQTAYDFIASKYGDTKDYEERIKALYDLNSKNKDEGISKAKYQKLLKRETEIGDGFIERDLRESQYIAKKAKEMLFKITKSVVSTSGSITDRLRDDWDLINVMKELNWDKYNKSKLTETVALIRFKDGVKKEIDITGYCETTTDEKLAKIKEIKEQYKGQYDNIRIIKRIKDWTKRNDHRHHAMDALTVAFTKHNHIQYLNYLNARKNENHKLHSNIIAIENLETEIKVDNDGNKKRVFKEPIPNFRQVAKEHLENVLISHKAKNKVVTINKNKIKSKNGEKVKTELTPRGQLHKETVYGKYHYYESKEEKVGPKFDLETIEKVANPAYKAALLKRFSENGNDPKKAFGGKNALSKNPIYINLEQNIKVPEKIKLVWLEEDYSIRKDITPENFKDEKLIEKVLDEGVKRILKNRLKESGNDAKKAFADLDKNPIWLNEAKGISIKRVTISGVKNAEPLHYKKDHLGNDILDEKGNKIPADYVSTGNNHHVAVYRDEKGNLQENVVSFFEAVIRVNQGLPIIDKTYNQHLGWQFLFTMKQNEMFVFPNENAGFNPNEIDLLDPKNKKEISANLFRVQKFGSLLSGFWFRHHLETTVETNSSLKGITYKVIQSANNLKDIVKVRINHLGDIVEVGEY

SEQ ID NO: 22144 - protein, 1345 aa, unidentified
  REGION 1..1345: note = Cas Enzyme sequence
MGNKLRNVDDYYLGLDIGTESVGWAVTDKDYVIPKFKGNAMWGVHLFDEGETSVKRRGFRSARRRTQRKRERLALLEALFDEEISKKDCTFFRRLHESNLWPEDKSGDDKYAVFADENYTDKDFHKEYPTIYHLRYELIKNKEPHDVRLVFLALHHIIKNRGHFLFDSLSSAEDFNSAYETMCSYLSDNEIQLNCSDIEQFKAILKDRRQGKIEKTKNLASLFGITKKSDPVSYAVMAVLSGSTVKMCDLFGDDELKTVEKNNISFASGYEENEEIYASVLGDRFELVNILKAVYDWAVLADILDGKKYISEAKVAVYEKHKNDLKTLKKYVKTYLPEKYNEIFKISDGKKDNYVAYSGHIKESGKTGELKKTCDSENFCAYLKKTLGKNADLSYKEMFDEIENKTFMPKQVTKSNGVVPMQVNEEELKAILDNAKDYLPFLNSCDENGVSVYDKIIKIFEYRIPYYVGPLNTHTEKSWLKRKDGVKIYPWNFDDVVDIDSSAEKFINNLTSKCTYLPECDVIPKCSLLYSKFTVLNEINNLKLNGEDIPVELKQGIYNDLFMTRRKVTVKQIKDYLKARGCYDNNDVLSGIDTTVKSSLKSYFDFKDFESLTFDDKESIIASSVIFGDDKKLLKKRLKKLFPEKLTDEDIKKICKLKYTGWSRLSKEFLCDVEFTYKKTGEVMNVITALWETNYNLMQILYSEDFCCDGDEKKNLNDKLDELSYTGDQHSLRKAVDALYVSPKVKRPILRALLIAKEIEKIQERPPKKIFVEVARGIDNREERHRDSRKSRLMELYKNCKKEAEKFCPYFDALSKKLSDEDESKLRSDKLYFYYIQLGHCMYTGEEISLGELMNGNGRFDIDHIYPQSKIKDDSLTNRVLVNRTVNADKTNVYPIDSAVQAKMSPYWQMLRSSGLISEETYKRLTRKTPLTDDELSAFVSRQLTETQQSTKAVAHILEQLYPKPKTEIVYVKAALAHAFRQSNDMLKCREVNDLHHAKDAYLNIVVGNAYNVKVTHNKVNFIKGLQNNDKGYTVNPEKFFSHDIPGAWSVKDSMNTVRRFMNKNNIRYTRFPRKKQGGLFKINPLKKGNGQVPLKASGARSCIEKYGGYDKATSAYFSYVEYTDKKGKAVRQMFPVNLYEVKEYEADMQGFVTSRIAEASNVKILIPCVKYDACISFDGCRMFISNKNGNQIGYKPGMQLVLGYKYEKYIRNITNYLTKHKDREIIPRDNISAEENVELYDILTGKMLNTVLSVRFSGIGKKLEKRREKFVLCSPEEQCCVLNEILKILHANVLSGDLSLIEESHNTGTMKTNAKFSEIKDVHSIKLINQSVTGLFEQEIDLLK

SEQ ID NO: 22145 - protein, 1526 aa, unidentified
  REGION 1..1526: note = Cas Enzyme sequence
MKKILGLDLGTNSVGWALVENNFEEKTGNIIGIGSRIIPIDQGSLGEFDRGNSVSQTADRTGFRGVRRLRERYLLRRERLHSVLNILGFLPVHYSQHIDFEKHFGQFLDEAEPKLAYKPNPESGKSDFIFKSSFEEMLADFAKHQPQMLTKKNGEPALIPYDWTIYYLRKKALTQRIEKEELAWLLLHFNQKRGYYQLRGEEEEENDNKLVEFHSLKVVGVDSGDKKSKDEIWYNVILENGWIYRRTSNVPLDWTGKIKEFIVTTDLNEDGTIKKDKYGKEKRSFRSPKDDDWTLVKKKTEFEIDKSGKTVGAYIYDTLLQNPNQKIKGKLVRTIERKFYKEELQIILEKQKIFHPELLDKQLYTACLEELYKSNENYRSSVAQMDFTYLFLNDIIFYQRPLKSKKSLISNCRYETLSYKDKEGNIISVPLKCIAKSHPLYQEFRLWQFLQNLKIYQRGKEVEGKLQFDVDVTSDFLKTEEDWISLYEWLNDRKEIDQKVFLKYPAFNLKKNAEQYRWNYVEEKIYPANETRAQILTRLSKVANVPLGFLTKEIEEHLWHILYSVEDKKEIEKALKTFACKHQLGEDFVDHFIKFPPFKKDYGAYSAKAIKKLLTVMRRGKYWKQEAISQETTAHINAINERLESVAFDRKKIEEITDDEIPKQVLKSFIDCESPYKGLNTYQACYAVYGRHSEEGEVIRWESNTDIENFLKEFKQHSLRNPIVEQVITETLRVVNDIWKQYGKGEKNFFDEIHIELGREMKNTAEQRKKMTEQVSENENTNLRIKALLAEMKNDDSIENVRPHSPSQQEILKIYEEGALNSPIEIPEDILKISKNAQPTSSELTRYKLWLQQKYRSPYTGSPIPLTKLFTTAYEIEHIIPQSRYFDDSMSNKVICESEVNKDKDNDTAYEYIRNNQGKIIELSYGKTVKLFTVESYEDFVKNNFGKNKGKMKRLLMDDIPESFVQRQLNDTRYISKYIKNLLSNIVREDGEQETTSKNVAASNGAITSILKQEWGLNDIWNDIISPRFERLNILTHSNHFGEWTNKDGKQVFQTQMPLDLQKGFSKKRIDHRHHALDALVIACATRNHINYLNNVSANSGKRYDLRSTLCFKHKTDINGNYKWMFYKPWETFTQDAKNKLLTTLISFKQNLRIINKTTNWYQKWQQDENGQLKKVFTKQEKGENWAIRKPMHKDTVAGLVNLRFKKTVSLSVALDQWEMIVDKPLKKQIKTLIKEGYDKKQLLKFFKTNENTFNGSNIAKVEIYYWATDNVASRTTLNETYSSSAIKSITDTGIQKILLKHLEKYNEEKDGKIIEHPELAFSPDGIDRLNENITDLNDGKFHQPIFKVRTYEPRGNKFSIGYIGNKKDKYVEAAKGTNLFFAIYQDKTGKRSYESIPLNIVIERQKQGLQSVPETNEKEEQLLSYLSPNDLVYVPTEEEIENHQSIDFKNLTKEQVKNIYKMVSSSSTDCFFVRNDIAATIWNKIEFSALNKMEKSIDGIMIKKVCWKLETDRLGRIIKVNGSHI

SEQ ID NO: 22146 - protein, 1433 aa, unidentified
  REGION 1..1433: note = Cas Enzyme sequence
MKKILGLDLGCNSIGWALVNEAENTEEISSIIKLGVRVNPLTVDEMQNFEKGKSITTNADRTLKRSMRRNLQRYKLRRDTLIEVLKEHGFITDSTLLSEHGNKTTFETYRLRAKAAVEEISLEKFARVLLMINKKRGYKSSRKAKGSEDGVLIDGMDVARKLYEEGLTPGELCLQILEAGKKNLPDFYRSDLQNEFDRIWNFQKQFNPELFCDAVKEEVRGKNRSQTWAILAKFFVWSEKESVWNEKEARTEERVKEYKLVGLKRDTKGNELKLENYRWRVQALSEQLNPEIVAIVLQEINGQISASSGYLGAISDRSKQLYFNRQTVGQYLMSELEKDPNVSLRNRVFYRQDYLDEFDRIWEKQAEFHEELTVELKKEIRDIIIFYQRRLKSQKGLISFCEFEKREVVVEEDGRKKNKTVGCRVIPRSHPLFQEFKIWQTLNDIEVFAWDKQSKRKKADKSSILFDNSEDALLVEGKRFLYQEEKELLAKELFVKENMKKAEVLKLLFENYQELDLNFKQIDGNHTGFALFSAYSKMIEKYGYEPVDFKKSADEIIEKLETIFTNLGWNTELLSIDLSKEDKELERQSYFRLWHLLYSFEGDNTPTGNGKLLEKIMQLCDVEKEYAVELANVSFQEDYGSLSAKAIKKILPYLKEGNQYDVACDYAGYRHSKSSLTKDEIENKILKDKLEILPKNSLRNPVVEKILNQMVNLINTLIDTYGKPDEIRVELARELKKNAKEREELTKSIARNTREHDEIRQLLRTEFGMMNVSRNDIIRYKLYEELKDNGYKTLYSNEYIPREKIFSKEIDIEHVIPQARLFDDSLSNKTLEYRAINIEKGNKTAYDFVKEKYGNDGLEKFLNRCETLFKDKRTKLRKLKMEEKDIPEGFIDRDLRNTQYISKKAFAMLNEISRRVVATTGSITDKLREDWQLVDLMKELNLPKYEKLGMVEMFEDKDGRKIKKITDWTKRNDHRHHAVDALTVAFTKDVFIQFYNNKNAAWMPASKEHANITGIKARYFENGKALAPMPLAQFRAEAKRHLENLLVSIKAKNKVITSNVNHTKKKNGENRKLQQTPRGQLHLETVYGSHRQYATKIEKVNAAFDAAKIATVSKLAYRNALLKRLEAFGNDPKKAFTGKNTLEKNPLYLDENQTEMVPEKVQTVEFETVYTIRKPIDPNLSIDKVIDVKIRSVLEKRLKEYGGDAKKAFVNLDENPIWLNEAKGISIKRVSIRGISNAQSLHEKKDKDGNLILGKEGRKIPVDFVNTGNNHHVAIYKKSVLDKVGQIVLDEEGNPKYELDEVVVSFFDAVTRANLGQPIIDKDYRRSEGWQFLFSMKQNEYFVFPNEKTGFNPKEVDLLNPENYALISPNLFRVQKFAYKNYVFRHHLETTIRDTSSTLKGITWTDFRSSKGLDKIVKVRVDHIGQIVSIGEY

SEQ ID NO: 22147 - protein, 1433 aa, unidentified; identical to SEQ ID NO: 22146
  REGION 1..1433: note = Cas Enzyme sequence

SEQ ID NO: 22148 - protein, 1396 aa, unidentified
  REGION 1..1396: note = Cas Enzyme sequence
MEMQTAKQLISSHLKGYPIKDYFVGLDIGAGSVGWAVTNKLYELLKFRSHKMWGSRLFDEGESAVGRRSFRSIRRRLERRKLRLKLLEELFADAMAQVDSTFFMRLRESKYHYEDKTTGHSSKHILFIDKDYTDQDYFKEYPTIYHLRAELMKSGTDDIRKLFLAVHHILKYRGNFLYEGATFDSNASTLDDVLKQALENITFNCFDCNSAISSIGQILMDAGKTKSDKAKAIERLVDTYIATDTEGISSKTQKEQVKEDKKRLKAFASLVLGLSASLTDLFGSVEELEDDLKKLQITGDTYDDKRDELAKAWGDKIHIIDDCKSVYDAIILMSIKEPGLTISESKVKAFNKHKEDLVILKSLLKTDRSIYNAMFKADEKGLHNYVHYIKRGRTEETSCNREDFYKYTKKVVEGLPDSKNKEYILSEIELQTLLPLQRIKDNGVIPYQLHLEELKTILKTCVAKFPFLNEVADGYSVAEKLIKMLEFRIPYYVGPLNTYHNVDKGGFAWAVRKASGRITPWNFDDKIDREKSAAAFIKNLTNKCTYLLGEDVLPKSSLLYSEFMLLNELNNIRIDGKPLETAVKEHLIEAVFKQDHKKMTKNRIEQFLKDNNYIHNMHKPDITGLDGEIKNDLTSYRDMVRILGTKFDRSMAEDIIMDITIFGESKKMLRETLRNKFASHLDDETIKKLSKLRYRDWGRLSKKLLNGIQGCDKAGDGTPETIIELMRNFSYNLMELLGDKFSFMERIQEINDKLTEGQVVDPQDIIDELALSPAVKRAVWQALRIVDEVIHIKKALPSRIFVEVTRSNKTEKKKKDSRQKRLSDLYAAIKKEDALMNGLKETEFSGLKSGLANYDDAALRSKKLYLYYTQMGRCAYTGNIIDLNLLNTDNYDIDHIYPRSLTKDDSFDNLVLCERTANAKKSDTYPIDNTIQTNQKVFWSFLKHQGLISERKYARLTRTAPLTEDDLSGFIARQLVETNQSVKAATTLLRRLYPGVDVVFVKAENVTDFRHDNNFIKVRSLNHHHHAKDAYLNIVVGNVYHEKFTRNFRAFFKKNGANRTYNLAKMFNYDVKCTNAKDGKAWDVKTSMGIVKKMMDSNDVRVTKRLLEQSGALADATVYKATVAGKAKDGAYIGMKTKSSVFADVSKYGGMTKIKNAYSIIVQYVGKKGEVIKEIVPLPIYLTNRNITDQDLIDYVTSITPEAKDISIIYRKLCINQLVKVNGFYYYLGGKTSNSICIDNAIQVLLSNEFLIYAKLLDKVNTLRKSDPSINVQKLSTFSPIAKEQISITINDNLKFYDYLVEKLNSNIYKKMKGNKASDLIDIGREKFKGIDVSSQCILLLEILNMLTNMKTTYDIKLLGFSTSRTKIALKVSTLDEFKIINQSITGLYSSEITIV

SEQ ID NO: 22149 - protein, 1408 aa, unidentified
  REGION 1..1408: note = Cas Enzyme sequence
MNRNKQVLMDRANVCDSTNKTMEQLYNIALDIGTSSVGWCVTDMNGKLMKFKRRNMWGARLFDKGQTAETRRLKRSLRRRYARRRQRIILLQNLLGDMVNQKDKNFFVRLNESFLWKCDKTEKSDYLLFADKDYTDKEYYKKYPTIYHLRKHLIESNEKADPRMVYLAIHNIIKHRGHFLYQGQKFEEVSDLSDIINELSDCLKCNFEGAEFKIEKEVIEKVEEIFNEKTKEGVNNEHKKSKAEKCEDLEKILVDNKWDKKISKEIAKACLGYKFNVGTVIGESELKGEDGKSIKIQFDDSKYEEKILELAEKINDKIEIINILQNVYSWIVMEDILSGYKYISDAMVDKYERHNKQLNMLKRLFRKYLSRDDYLEFFRKEKGKEKDENKEKYIINYVNYIKRNKRCANTKGTARENLYKEIKGKFKGMAENDAEYQLILKEMDNDEFLLKQKDVNNSNIPYQINLIELEKIIDNQGKYYPVLLENREKIIKLLTFRIPYYIGPVNPRKNDNKFAWVKKKEGHETETVNPWNLEEIVDIDVTAERFIDNMTGFCTYLPEEKVLPKNSLIYQEYKVLNELNKIKVNDKGLDIKTRNDIIEGVFKKQKNINEKTLKTYLLSINYLGAKIIEEYKIEGYQGDKQFANSMGSYIDFKKILGSVDVRNLDMIEEIVYWLTVFEEKSIVKRKMIQKYSDKLSEKQLSRILDLKYDGWGRFSKKFLTGIYGDYYGEKKTIMDVLKEDNKLPNLMQIINKKEFGFNEIIEKNRIKLDEGEVLKDAIDKIHCSPEVRRGIWQSMKLVEEVIEIENGVLPQNIYIEFARSEEDKKRTKKRKNKLEAAYKVLKKEIDVYNEKVLKELGEYKEKLDDEKVYLYFLQNGQCMYTKQELNLNGYLKDCEIDHIIPQSVYDEDSLDNKVLVLKGANQEKGNRIPYDYIKEKNKVNWESMKIWWEKLYKCGLMSEKKYKRLTTQNIGEIINSGFIKRQLTVTSQMIKNVANLITDYYGGKVNVMAVRAAFSTKIRKTYSELVKGSDGNYIEKNDGDCFIKNRFLNDFHHAHDAYLASIIGKYLNTVYPKMADEINYNKYIKYYNEQCKKNRKQKFNFILSKFDKIFERDGEIVWNGVEQIKYLKNILNYRDCIITHKLEENTGSFYDENRLPKNDKSEKLIPIKEGLPVERYGGYQGGEAAYCCLVSYVKKKKQQLELVKIPVMTAKKIYDGKTTLENYLKEKMGLDDIHIIRKKIMKYQLIEEDGCRYYLVSAEELANAKQLVLGSKNVRFNRILNIIEDNRYNGYSPEYIQRGLDDFYEFLIGKIQKEFGRSSSVAQEIYDTKVFYELESAKDKGDFIMEILKLTNIGSDYPYLKKYKKYNKISSSLIDRKGRSKYQGYKIKPGTILIDQSVTGLYERRLEL

SEQ ID NO: 22150 - protein, 1098 aa, unidentified
  REGION 1..1098: note = Cas Enzyme sequence
VGADVGLNSLGFSAIQLDANGNPITLLKTLSYIHDGGVDPTQNKSGTTRKAMAGIARRTRNMRKRRRHRLNQLDRQLYQLGYPVDEVPESEHGLYEYWNVRSALATAYVPDKDKRDRMMVMAIRHIARHRGWRNSYSRVETLFEDVEPSDQYKDLKQRVETRLGMKLDEDMTPAQLVALTLSDRDENFMRVRTSTKYGEGVLPSRLMQSDNARELRRIFTVQQVPEDVWKPILRTVFHCASPKGSAEKHVGTDPLDQTQKRALKASIAFQKYRILNVITNLRIRRKGEASRPLTVNEKQDVYELLTTAKEDLEWLDVCAVLDIERNELKGVGTLTHDGEERIGNKPPVLDTVIRLHGIKNTKLRKMMDAWWNTATETEQAAMIRLLSNTVDLDKVRDLIEYASPIEFIDGLDEDLLTPLDSISLPVGRAAYSEKTLTRLSKRMLETEDDLHYAIRHEFNVPADWKPPVPPVQEPTGNPAVDRVLKAFNRFLSQCEQQYGIPESIAIETTKESFSSIAFGRTLDYERRQRRDKDNQTRAAIREDMRKQLSNGGSFKVHDYDIRRWEIVQSQNNTCLYCGATSPRFSFDKSELDHIVPRRGVGSDSKRTNMAAVCPECNANKSNIPFAVWVHSDYAKAHGITMNDVIARVNQLMFPPSMNRKQVSQVKKAIISRLKQTEQDEPLDNRSIESVGWMADELHRRLDGRYANKTVKVSTFPGSITYEARRASGIDGQIHFIGAQWKTRLDRRHHAVDASVIAMMNQSVALRLAERHYLRESQRLCGTPFGQADWKQYPNENTPGYDQYQQWSGQMKNLLHLLNKGLDEDTIPVVRSRRLRLGNSTAHDATVKPLQYVRLGDAMPTSLIDHALTPQVWKALTGLSDYDPQNGLPANPKRVITALGEVCHAKDEIGFLPGNNAQLFVNGGAADIGGTIHHARIYRCEQVLKNGKRKTFYGMVRVFQCDLMKRRKNTDLFRTPLHPADVSIRYADGKVRDAIRQGHATCIARLTVNDEIKLTPEMMRDMCPEYANMFHTDSGVERRFIVAGFPSPIQFRLVPSVIAEEGLSKMVEQGLEVPPKVEKMFKLHTFVPVVNKIGHVLEQ

SEQ ID NO: 22151 - protein, 1355 aa, unidentified
  REGION 1..1355: note = Cas Enzyme sequence
MKSIRKESQEPYYIGLNVGPTYAAYAVTNTSYNLSRFKGKDMWGVYKYDEAETAEDRRRFRQGRNSNLKEKERIRLLRSYFFDEIQKVDENFFVRLDNSFYYSEDKDIRLNGDRNVLFADKDYSDRQYMSEYPTIYHLRSELAHGSKKPDIRCLYLAVSHMMKNRGNFYTKNLEDTDKSLGEVYENICTKAAEYDIVLKMEVPAEKIMDIMINPGISGKVKATLVTQLVDATSKPALSIIKLMCGLKAKIADIFPELAESLEEDEKKLSFSFKDEDYFERADSIEKLIGENEYSLIESVKEMYDAAIIKNIIQDYRYVSDAKIASYEKHANDLEILKSELKTILSKNEYKRFFSKEEPGTYSAYVHFSNHNNQITRRKSDKGRTQEDLYHTIKKYLAEADDEQAEYILDEIDKGTFLPKQRIKDNSLIPNQLYSVELKAILENASKYYDFLNSRDESGLTVSERILSLFTFTMPYFIGPVSPYNSRGWAVRKEPGKVYPWNLKDKVDMGQSAKQFIEKIIGKCNYLSGEKVLPNASLLYEKYRVLNEINSISVDGEKISVEMKQAIVNELLAGGKTVSKKKILSFLVKKGSATSDSIITGIDDKLNNSMASHRFFADIFGSLNKDNEAVAEDIILWSTIYGSSKDFVTEQILNKYPDMFDEEQLRKIHNLNCKDWGRLSRGFLNMKGLDKDNNELISVIDAMWSNNLNLMELMYDTRFDFSARVKDKTENAVKNLFSFDYDDLNDLYATTAQRRTIWASVKIVREIVKIKGYAPESIFLDTVKSRPNDIPKESRKGKLTALYKGMKGVSADWKKKMISLIDQCDADGSLKAKNVYLYFLQMGKDMYTGEDISLEELKSPDKRKKHNIDHIYPKHFVKDESIDNLVLTNTDLNRDLSDRYPVPQDIYDNMHEFWQQLRRSGLISAEKLARLSDRNTLSDEKRASFIGKLYNQAGSSTRMMADIFKNILPKDTKVIYAKTSETNEFRHKFDFPRTTIINDDYLAKDAYLNIVVGNVWYTKFTASPIWYIKEEYRKKKSEYNLNRMYDFNVIRDDRIAWITDKTNPEAATIHTVNKVMNRNTVITITRTIQGHGGLTNATITRADKAKEGVYLPLKTSNERMSVTKYGGKTSITSAYMFLAEHTLKKSRVRTIYSLPLHLVSQIKGKKDLEKYCTDVLHLIEPVIKIAKLMLYSELIIDGYSYLLGGKAGVQYYLRNNVPMKVNAEWQKYVSKIEKYINFKSLDKDMSADKNIELYDELVDKHTNSIYSKRRNTAGDMLKKGRDTFIKLSVKEQLEVLNQIFTLTRMGTNIANLSGIGAGQHVGSITMGCNISTFDSVKLVNRSVTGLFSNEVDLLHI

SEQ ID NO: 22152 - protein, 1106 aa, unidentified
  REGION 1..1106: note = Cas Enzyme sequence
MNNTILNIDLAFDVGHDSIGWSVLSHEGDAPDIKGCGAVIFQKDGCLAVKRRGYRRQRRHIRSTRQRVARMKNLLQSLGVLDGKALDQVCSSSPWFLAAGVLAGGRKLTWPELWDVLRWYAHNRGYDGNRGWSANDSLDEDDDTQKVENARGLFGKHGTTTMAETLCAELELDPKKGKASSRKRFKGLDAAFPRENVTEEIRRILVAHKGVLPRVDDLLIRTLIGENPDDHEAWKTIHVGGMKVPLRYRGSLLMGQMIPRFENRIISRCPVLYQRILQKRLDEGWAREEAESDAEKGAKVPSKSAVEFLRFRWAMLLANILISESGGKARPLSVEERVKLDQMMRAAGSMTATEFKKALLEVTGPVPSNAEALLTHPDADKSLVLDAATKETRKGTLSVIWSLLDEPNRKRAMGRIRAGREICIGDLVVDNKPAIEALKSSIKAVGGKPGKSDKVSKSLEDLLDEKVLVRPLAGRAPFSRKVMMEAVVEVMEKGIHPTAEGGVLYRGEEIRKAQVERRLDVQTNNHLVRHRLLILERLHRDIIDSYAEGDPGKIRRITIEVNSDLRSMSGRTAKEIAQEEGMKLADFKDVSKDLEKRLEGTGVTITAGLIRKARIAKDQGWKCAYTGRDFDLMDLVHGKVDKDHVIPRSLRPSDSLDSLVITFAEVNRMKKQRTAMAFIEEFGGKAVEGRPELSIMSAASYVENVKRLDERKGHEDDKRRKKNRKRLLLMRDYVEREFTPGDLTRTSQLVRLGAQLLERPYMDQERKPVITSLPGSVTGAVRKSWRVLGCLQRANPAVTDGMTKTDVRSVTHLHHALDASVLALASHFLPRDGGIWELLVKRKLSPSEQDHLLRRGRQFARDNEGRVSLLDLPSYLKNQLGERLAEQRVVQHIASDMSGLAAEETVYRVFNPKDIHPSAKKIAKWCASRGIKIPDPREEQVLLICRKRRSEQESGEVLHETPTWRWIYKIEKRSKLLGLDPVNGAVGKLKAQKAVKIIGENFGLALDPEPEVLQLSSVWKRLEELRKQFGRKVRILRNGDLITLTSPSIPENRRGFWRVMSVKNNSSGLALDLARPDEIKASWINTLVKSHLKNGLKVVNASMIGT

SEQ ID NO: 22153 - protein, 1442 aa, unidentified
  REGION 1..1442: note = Cas Enzyme sequence
MKNILGLDLGTNSIGWAYVKQAQNDSEKSEIVELGVRVNPLTVDEKTNFEKGKPISTNADRTLKRGARRNLQRYKLRRQELIELLKEYQVISDKTILAEDGKGTTFETLRLRAKSAKEQVSLEELARILLMINKKRGYKSSRKAKNEDEGQLIDGMEIVRRLYDENLTTGQLSLQLLKEGKKSLPDYYRSDLQHELDKVWNFQKQFHPDILTDEFYTSIQGKGQKATRESFSSKYGIDTAENKGSREEKRLQAYQWRADATHKKLTKEELAFVITEINNNINNSSGYLGAISDRSKELIFANETVGEYLWKQIQNDPHTSLKNQVFYRQDYFDEFERIWEIQSEFYPQILTESLKNELRDILIFYQRKLKSQKALVSICEFESKEIPLKDKQGNPISKNGIPVTKLVGPKVAPKSSPLFQEFKIWQNLNNVLVRPKGSRKRKVTTDQQSTLLEGQEPVFELNLEQKELLFEELNIKGNLKTDYCLEIIGYSAKEWEMNYPTLEGNKTNKALYEAYLEIIDSEGYDAKKLLKVKTDKDDINLDDIKVSASEIKTMISDIFNELGINTKILDFDAELERKQFEAQASYRLWHLLYSYEGDDSKSGNELLYRLLEDKFGFKREHSKTLANVSLLSDYGNLSTKAIRKIYPYIKENKFSTACESAGYRHSKLSITKEENENRTLKDTLDVLKKNSLRQPVVEKILNQMINLINELIEKHSEKDEKGNIVKYFKFDEIHIELARELKKNAEERRELDSKVREGKARNEKIMTILKSEFGLPYPTKNDIIRYRLYEELKDNGYKDLYTNTYIPREKLFSKEIDIEHIIPKSRLFDDSFSNKTICYRQDNLNKGERTAYDYIEGLGKTQLDEYLNRIENLYANKIITKAKYRNLLKKESEIGDGFIERDLRETQYIAKKAKEMLLQITRHVVSTTGSITDRLRDDWELVNVMRELNLPKYKALGLTEIQERKNGQTVEVITDWTKRNDHRHHAMDALTVAFTKHSHIQYLNFLNARKDEKHKEYSNIMGIQQLETEKTTDKDGKDRRVFKAPIPNFRQVAKEHLESILISHKTKNKVVTRATNKIAGSKKQQETLSPRGQLHKETVYGKYLRYVQKEEKIGSKFDLQTIERVASPLYKRLLTKRLEENGGDPKKAFTGKNALAKTPIYLDEAQTQQLPEKVKLVWLETYFSIRKDITPDNFKDEKSIDKVLDEGIKRILKDRLKSFDGDAKRAFTDLEQNPIWLNKEKGIAIKRVTISGVSNAEPLHTKKDHLGNEIFDDTGKPIPVDYVSTGNNHHIAIYRDENGDLHDEVVSFLEAVTRANQGLPIVYKIYNRHLGWQFLFTMKQNEMFVFPNKETGFDPQEVDLLDPKNKKLISPNLFRVQKLSKLMYDNSSVKEYVFRHHLETTVEDKKELQQITYQQIKSLSPLNNIVKVRINHLGDIVHIGEY

SEQ ID NO: 22154 - protein, 1115 aa, unidentified
  REGION 1..1115: note = Cas Enzyme sequence
VNYTEKEKLFMKYILALDIGIASVGWAVLDKESETVIEAGSNIFPEASAADNQLRRDMRGAKRNNRRLKTRINDFIKLWENNNLSIPQFKSTEIVGLKVRAITEEITLDELYLILYSYLKHRGISYLEDALDDTVSGSSAYANGLKLNAKELETHYPCEIQQERLNTIGKYRGQSQIINENGEVLDLSNVFTIGAYRKEIQRVFEIQKKYHPELTDEFCDGYMLIFNRKRKYYEGPGNEKSRTDYGIFTTQLDANGDYIKKANIFEKLIGKCSVYPDELRAAAASYTAQEYNLLNDLNNLTINGRKLEENEKHEIVERIKNSNTINMRKIISDCMGENIDDFNGARIDESIFHKFEVYNKMRKALLKIGIDITDYSREELDKIGYIMTINTDKEALMEAFQESSIGLPEEVKQCLINMRKTNGALFNKWQSFSLKIMNKLIPEMYAQPKEQMTLLTEMGVTKGTREEFAGLKYIPVDVVSEDIFNPVVRRSVRISFKIFNAVLKKYKALDTIVIEMPRDRNLEEQKKRINDSQKLNEKEMEYIEKKLAVTYGIKLSPADFSSQKQLSLKLKLWNEQDGICLYSGKTIDPNDIINNPQLFEIDHIIPRSISFDDARSNKVLVYRSENQKKGNQTPYYYLNHSHGEWSFEQYKATVMNLSKKKEYAISRKKIQNLLYSDDITKMDVLKGFINRNINDTSYASRLVLNTIQNFFMANDADTKVKVIKGSYTHQMRCNLKLDKNRDESYSHHAVDAMLIGYSELGYEAYHKLQGEFIDFETGEILRKDMWDENMSDEVYADYLYGKKWANIRNEVVKAEKNVKYWHYVMRKSNRGLCNQTIRGTREYDGKQYKINKLDIRTKDGIKVFAKLAFSKKDSDRERLLVYLNDRRTFDDLCKIYEDYSDAANPFVQYEKDTGDIVRKYSKKHNGPRIDKLKYKDGEVGACIDISHKYGFEKGSKKVILESLVPYRMDVYYKEENHSYYLVGVKQSDIKFEKGRNVIDEEAYARILVNEKMIQPGQSRADLENLGFKFKLSFYKNDIIEYEKDGKIYIERLVSRTKPKQRNCIETKPIDRDKHENSKDGRKTIGLSKTKLVKKIRTDILGNKYSCSEEKFTGFC

SEQ ID NO: 22155 - protein, 1104 aa, unidentified
  REGION 1..1104: note = Cas Enzyme sequence
MKYILALDIGIASVGWAVLDKESENVIEAGSNIFPEASAADNQLRRDMRGAKRNNRRLKTRINDFIKLWENNNLSIPQFKSTEIVGLKVRAITEEITLDELYLILYSYLKHRGISYLEDALDDTVSGSNAYANGLKLNAKELETHYPCEIQQERLNTIGKYRGQSQIINDNGEVLDLSNVFTIGAYRKEIQRVFEIQKKYHPELTDEFCDGYMLIFKRKRKYYEGPGNEKSRTDYGIFTTQLDANGDYIKKDNIFEKLIGKCSVYPEELRAAAASYTAQEYNLLNDLNNLTINGRKLEENEKHEIVERIKSSNTINMRKIISDCMGENIDDFAGARIDKSGKEIFHKFEVYNKMRKALLEIGIDISNYSREELDKIGYIMTINTDKEALMEAFQESWIGLPEEVKQCFIDMRKSNGALFNKWQSFSLKIMNELIPEMYAQPKEQMTLLTEMGVTKGTQEEFAGLKYIPVDVVSEDIFNPVVRRSVRISFKILNAVLKKYKALDTIVIEMPRDRNSEEQKKRINDSQKLNEKEMEYIEKKLAVTYGIKLSPSDFSSQKQLSLKLKLWNEQDGICLYSGKTIDPNDIINNPQLFEIDHIIPRSISFDDARSNKVLVYRSENQKKGNQTPYYYLTHSHSEWSFEQYKATVMNLSKKKEYAISRKKIQNLLYSEDITKMDVLKGFINRNINDTSYASRLVLNTIQNFFMANDADTKVKVIKGSYTHQMRSNLKLDKNRDESYSHHAVDAMLIGYSELGYEAYHKLQGEFIDFETGEILRKDMWDENMSDEVYADYLYGKKWANIRNEVVKAEKNVKYWHYVMRKSNRGLCNQTIRGTREYDGKQYKINKLDIRTKEGIKVFAKLAFSKKDSDRERLLVYLNDRRTFDDLCKIYEDYSDAANPFVQYEKETGDIVRKYSKKHNGPRIDKLKYKDGEVGACIDISHKYGFEKGSKKVILESLVPYRMDVYYKEENHSYYLVGVKQSDIKFEKGRNVIDEEAYARILVNEKMIQPGQSRIDLENHGFKFKLSFYKNDVIEYEKDGKIYTERLVSRTMPKQRNYIETKPIDKAKFEKQNLVGLGKTKFIKKYRYDILGNKYSCSEEKFTSFC

SEQ ID NO: 22156 - protein, 1332 aa, unidentified
  REGION 1..1332: note = Cas Enzyme sequence
MKNFNDDYYAGFDIGTDSVGYAVADTDYNLCKFKGNAMWGVDLFEESNSAAERRTLRSARRRGLRKRNRIEWLQMLFDEEISKVDNAFYQRLKESCLYLDDKSSNVPYAVFADGNYTDKEFHTDYPTIYHLRKELIKSSQPHDIRLVYLALHHIIKHRGHFLFDNMGSDFESESSFETLFDDLKLYLKEEYEIEFECNDSLRFSEILKDKTLKKTAKSSESYKLFGYSKRNNPYETALIDLMCGRNVGFSDMFGDKSFDSEEVNGITFESGYDDNENTYRDLLQEKFEPIEKAKAVYDWAILADILNGEKYNGKKYISFAKVKIYEEHSSDLKMLKDFVKERCKSLYGEIFRITKDKLDNYTAYCGKYKENGRNGVIQYRTNQADFCKYLKKKFEKLDKTGYEEMFDKIENGTFMPKIVVKDNGIIPMQVNRSELKAILKNASTYLEFLNKKDENGISVSDKIVKIFEFRIPYYVGPLNNHSLKSWLVRSDEKIYPWNFDSVVDIEQSAENFINNLTSKCTYLPTKDVIPKNSILYSAFTVLNELNNLRLDGKKPDVSLKQAIFNDLFMTHKKVRRKDLLNYLKSEKGITPDITGIDGDFKSSMRSAIEMSQFNLTDSEKEDAIKAITVFGDDKKLLRKRLKRQLGSKLSDEDIMRISKLKYKDWGRLSKEFLTEVYNVDKNTGELQFNIIHALWQTNDNLMELLGSKYGFEQSRQNYLDGIQTGQSLEKMVENLYISPAVKRPVYQSLKIMHEINKIQGHAPKKIFVEMTRKDGVKGDKGRKESRKTKLVDLYKKCGEDSGELWESLEKTPDDEFKRDRLYFYYTQFGKCMYTGEPITLSELYNKNIYEVDHIFPRSKVKDDSLDNRVLVKKQVNAHKDNTYPLDSSIREKMKGFWHLLMDKGLISKKKYERLTRATELSDSELSDFIARQIVETSQSTKAVASLFKELYPDTEIVYVKASTVSEFRHEYDFLKCREVNDFHHAKDAYLNIVVGNVYNERCTHNKSIFIKGLQTKTYSLNKMFSFNTPNAWSIDDNKSIKIVRKTMNKNNIRFTRYALTRNGGLFMMNPLKKGSGQVSLKQNSPLSDISKYGGYDRPTSSYFSFVKYEGKKGKEMRRLVAIDSYIKARYEANPEKYLSENLGLKNPVVLIPVVKYNACIEIDGFRMHISSKSSGGKQIVYKPAMQLTVSYDTEKYIRNVVKLNSKPENYNITELDKVSADENLKLFDILTSKMTDTVLKVKFGDMGAKIISHRDAFEKLDIRKQCFVLAEILKIIHCNISEGNLRFIGGAKQSGSIKMSSVISGIKGVKSIYLVHQSVTGLFEKKIDLLHM

SEQ ID NO: 22157 - protein, 1332 aa, unidentified
  REGION 1..1332: note = Cas Enzyme sequence
MKNFNDDYYAGFDIGTDSVGYAVADTDYNLCKFKGNAMWGVDLFEESNSAAERRTLRSARRRGLRKRNRIEWLQMLFDEEISKVDNAFYQRLKESCLYLDDKSSNVPYAVFADGNYTDKEFHTDYPTIYHLRKELIKSSQPHDIRLVYLALHHIIKHRGHFLFDNMGSDFESESSFETLFDDLKLYLKEEYEIEFECNDSLRFSEILKDKTLKKTAKSSESYKLFGYSKRNNPYETALIDLMCGRNVGFSDMFGDKSFDSEEVNGITFESGYDDNENTYRDLLQEKFEPIEKAKAVYDWAILADILNGEKYNGKKYISFAKVKIYEEHSSDLKMLKDFVKERCKSLYGEIFRITKDKLDNYTAYCGKYKENGRNGVIQYRTNQADFCKYLKKKFEKLDKTGYEEMFDKIENGTFMPKIVVKDNGIIPMQVNRSELKAILKNASTYLEFLNKKDENGISVSDKIVKIFEFRIPYYVGPLNNHSLKSWLVRSDEKIYPWNFDSVVDIEQSAENFINNLTSKCTYLPTKDVIPKNSILYSAFTVLNELNNLRLDGKKPDVSLKQAIFNDLFMTHKKVRRKDLLNYLKSEKGITPDITGIDGDFKSSMRSAIEMSQFNLTDSEKEDAIKAITVFGDDKKLLRKRLKRQLGSKLSDEDIMRISKLKYKDWGRLSKEFLTEVYNVDKNTGELQFNIIHALWQTNDNLMELLGSKYGFEQSRQNYLDGIQTGQSLEKMVENLYISPAVKRPVYQSLKIMHEINKIQGHAPKKIFVEMTRKDGVKGDKGRKESRKTKLVDLYKKCGEDSGELWESLEKTPDDEFKRDRLYFYYTQFGKCMYTGESITLSELYNKNIYEVDHIFPRSKVKDDSLDNRVLVKKQVNAHKDNTYPLDSSIREKMKGFWHLLMDKGLISKKKYERLTRATELSDSELSDFIARQIVETSQSTKAVASLFKELYPDTEIVYVKASTVSEFRHEYDFLKCREVNDFHHAKDAYLNIVVGNVYNERCTHNKSIFIKGLQTKTYSLNKMFSFNTPNAWSIDDNKSIKIVRKTMNKNNIRFTRYALTRNGGLFKMNPLKKGSGQVSLKQNSPLSDISKYGGYDRPTSSYFSFVKYEGKKGKEMRRLVAIDSYIKARYEANPEKYLSENLGLKNPVVLIPVVKYNACIEIDGFRMHISSKSSGGKQIVYKPAMQLTVSYDTEKYIRNVVKLNSKPENYNITELDKVSADENLKLFDILTSKMTDTVLKVKFGDMGAKIISHRDAFEKLDIRKQCFVLAEILKIIHCNISEGNLRFIGGAKQSGSIKMSSVISGIKGVKSIYLVHQSVTGLFEKKIDLLHM

SEQ ID NO: 22158 - protein, 1473 aa, unidentified
  REGION 1..1473: note = Cas Enzyme sequence
MTTKTILGLDLGTNSIGWALIKQDFDNKQGEILGMGSRIIPMGQDIKDEFGKGNSISKTADRTRFRSIRRLRERGLLRRERLHRVLNVLGFLPEHYKNDIDFDKRLGQFLDEKEPKIAWMKNSDNQFEFLFQKSFLEMAAEFKGLKVPYDWTIYYLRKKALEQLVTKEELAWLILNFNQKRGYYQARGEETDENLFVKEFVIALKVVKVEKGEVDKKNSTRTWYKILLSNGWEYSATFTAEPKWQNTEKEFLVTEEYDEDGNIKVVKDKKTDSIGKEKRRISILPTFDEINLMPKKDQDKIYGKIKARTEATIQNSQTTVGAYIYESLKQNPTQKINGKLVRTIERKFYKDELKQILEKQIALQPQLFIEDKYNDCVKELYRTNHAHEQTLLKRDFVHLILNDIIFYQRPLRSQKSTISNCPLEFRQYIKSENNEEVRFKAPIKVIPKSNPYYQEFRIWQWIKNLNIYTRDNDVNVTNEFLSDIAEYEALFDFLDNKREVEQKAVVEFLLKQQSGLKKIPKTEVDRYRWNYVEDKKYPCNETKAQIKSRLDKVVGVSDSFLTDDLLHQIWHIIYSITDKTEFEKALGTFAIKNNLDKDTFVSSFKNIPPFRSDYGAYSEKAIKKMLPLMRIGKYWKLEAIDKKTLNRIDKILTGEFDEEINNRVREKAINLTDTKHFQGLPEWLAKYIVYGRHSESIDGTKWKSVLELEEYLKSFKQHSLRNPIVEQVVTETLRVVKDIWVHFGKGAENYFDEVHIELGREMKNTADERKKITQQVTENENTNIRIKALLMEMMSDSSVENVRPHSPMHQEILKLYEEYAINSEEKYAGKDANGNDLFVPEITPDDIVKISKSAQPTKSELVRYKLWLEQKYRSPYTGQMIPLGKLFTSAYEIEHIIPQSRYFDDSFSNKVICEAAVNKLKDKQLALEFIRNHHGEIVTTGNGKEQVRIFTEEEYVTFVKEHYAKLRGKKTKLLLDEIPDQMIERQLNDTRYISKFVNSILSNIVRSENNDDGVNSKNLIPGNGKITSTLRQDWGLNDVWNEIILPRFVRMNSLTQSTAFTTKNREGHTIPTIPLELSKGFQKKRIDHRHHALDALIIACATRDHVNLLNNQSAKSENTRYDLQHKLRNKDKWLDNNGKERLKFTSFQLPWPNLAKDVKNSLEGIVVSFKQNTRVINKTKFASLTYKESKEKSNNMNWAIRKPMHKDTVSGQVDLPWVKVPKGKLLTATRKNIDTSFDEKTIKSITDTGIQKILLNYLKVKGSPEIAFTPEGLDELNRNIPTYNDGKPHQPIYKARVFELGSKFSLGYTGNKKHKFVEAAKGTNLFFAVYIDSNGKRSFDTIPLNEVIERQKQGLLPVPDANEKGHKLLFHLSPNDLVYIPSLDENKDVLKYDLMRLTQAEIDNIYKMVSSTGNECHFVRANIASLIKQYDAKSKVGELGSLNKLETNMENNQRVKEVCIKLKIDRIGNFQFC

SEQ ID NO: 22159 - protein, 1373 aa, unidentified
  REGION 1..1373: note = Cas Enzyme sequence
MKKILGLDLGTTSIGWALVNEAENNEEKSSIIKLGVRVNPLTVDEQQNFEKGKSITTNADRTLKRSMRRNLQRYKLRRENLIEILKENGFITDETILSENGNDTTFETYRLRAKAAIEEISLEELARVLLMINKKRGYKSSRKVKSNEEGQLIDGMEVVKQMYENNLTPGQYSLSLLKKGGKNLPDFYRSDLEAEFDKVFDKQMKFYPDILSLDLKEELRGKKRDAVWAICAKHFKENGFELVGVKRQGKIAEQKEENYEWRTKALSEKMELEQFVIVIQQINIQLNNSSGYLGAISDRSKELYFNKQTVGQYQMAELDKNPNYSFKNQVFYRQDYLDEFEKIWETQSKFHKELSADLKKEIRDVVIFYQRPLKSQKGLISFCEFENKQVEVEVDGKKKIKTIGLRVCPKSSPLFQEFKIWQVLNNLSVNGEDLEQEEKEALFAELSIKEKLTKTEVLKLLFENHKDLDLNYKEVEGNRTQAALFKAYQQIIELSGHGEYDFSKMSYSEVMEIVEPVFKGLGYNTEILHFDSSLEGKEFEKQPAYQLWHLLYSFEGDNSKVGNEKLVNKISTLYGFEKEYAKLIASVTFQSDYGNLSTKAMRKILPYMKEGSEYSVACEYAGYRHSKKSLTKEELDNKVYKEKLELLPRNSLRNPVVEKILNQMINVVNCIVDTYGKPDEIRIELARELKKSAKEREEMTKAISQVKAEHDKYRAILQNEFGITNVSRNDIIRYKLYLELKDNGYKTLYSNIYIPQEKLFSKEFDIEHIIPQAKLFDDSFSNKTIESRSINIEKGNLTAFDYVKEKYGIQGLSDYQTRVEDLCKKGLISKTKRNKLLMQEADIPSGFIERDLRDSQYIAKKAREILEDLVKFVVPTTGAVTDRLREDWQLINVMQELNWDKYDKLGLTEYYQDKDGRQISRIKDWTKRNDHRHHAMDALTIAFTKRSIIQYLNNLNARSDKSGSIYGIEQKELYRDSHGKLKFNPPIPLDEFRAEVKHHLENTLISIKAKNKVTTQNINITKRKGGVNKTEQQTPRGQLHNETIYGSIKQYVTKFEKVGSDFNAEKIVTVSKPAYREALLRRLQEFNNDPKKAFTGKNSLEKNPIFLDKACSKQLPERVKTVSLETVYTIRKDVSPNLKLDKVIDANIRKILEARLKEYDGDAKKAFSNLDENPIWLNKEKGIAIKSVTITGVSNAIALHEKRDKDGKLILDTDGKVQPSDFVSTSNNHHVAIYRDANGDLQENVVSFFEAVTRVNLGLPIIDKDYKRDEGWNFLFTMKQNEYFVFPNKETGFDPNEIDLLNPENYALISPNLFRVQKTTIKDYFFRHHLETTVDDKKELKDITWKRCGLSAINGIIKVRVNHTGQIVSVGEY

SEQ ID NO: 22160 - protein, 1390 aa, unidentified
  REGION 1..1390: note = Cas Enzyme sequence
MFAENFSEKSKNGYYLGVDIGTDSVGYAVTDRDYSLCRFKGEPMTGVALFDKADQCADRRAHRTSRRRYARRQMRVNLIQDLFCVEMAKVDPNFFIQMNESRLWQCDKKPETLVGCEWLDREYNRRFPTVHHLIMELINEENSNTDVRHLYLAVAWLVAHRGHFLSDISCDKIRELYDIKPLYSAFIGWFGENGYSAPWECDADALMAAMSRRCGVRAKEAELKKLIYGGKKPVEDENCPLYQEAIIKLLAGGSIEIKKTLKWEEYKGVEGSICLDDAEKLEAVLAELGDDGEVIRLMSQVYDCAALSKMLSGHTYISEAKIEQYETHKADLRELKRLAKKYCSDDEYKNFFVSETGTYSAYSAYFKCSEKRKGKKITREDFYKGVKKLIAKIKERIGEGDDADLVIANGVLSRIDAGTYMPKQVNPENRLIPYQLYYAELDVILSNAEKRFAFLSGRDSDGLSVSDKIRSVFTFRIPYFVGPLEKSPGNKFAWIERKAEGRILPWNFDEKVDLDASEDGFIKRMTNKCTYLPGENVLPKQSLLYCKFTILDEINKINIDGVPISVELKQQIFHELFEKEKKVTKKKLIDFLVSVKAISKGEEVRISGLGAEIKSSYKPYIDFRRLLAAGTLTAEDVDCIIERITCTEDTARLKKWLLKWSKENGKDLSDDDIKYISQRKYDDFGRLSGKLLNGIEAACTETGEVGTVMHFMWNTNDNLMQIIKGQKYRFEDRISEISKEYFSEHPTTLVERLDELGISNAVKRPVMRTLDIIADIVKAKKCPPEKIFVEMTRGEDKRIDSDKLNRGKRLRELYSKLDSEDAVRPRKELDDLGDEADRKLQREALFLYFCQMAKCAYCGKPLDIPTIGTNEYNVDHIWPRAYIKDDSILNNKVLVHSEENGRKTDTYPIESKIRSEMRGFWENLRNAKLINEEKFRRLTREHAFSTDERLGFINRQIVETGQSAKVVTELLKDRYPETEIVFVKAGNVSEFRHEYGEICNYALFGRTLTDAEKKSKCLVKSRTASDIHHAHDAYLNIVVGNLFHEKFTKRYYLDTLNDYSPKMHILFGRKCVIDGNVIWNPEKHLPTVDRTMANVHIHLTKYQTKQKGLLFDQQPLRAGSSDSLVPLKKNLDTAKYGGYNSPKISFCVLVRYRIRKKYELTIVPVERLVANKYLSEQGYPAKHVREKLPVNAEDISFPLENRIIKVNTVFSLDGFEACVSGTSNRGSTILMRSLMTPRYTAEQIAYIKNLDNISEKRKKNPQYVIDETFSGISREKNVALFADLVNMMNGSVYSKQPGAKLGISADDQKKFEGLTIDMQYECLKNMILYLKTNRSDDCNMSAMGGKSQIGAVRLSANISNWKKNYSDVRIIDRSSSGLFEHRTGNLLNLI

SEQ ID NO: 22161 - protein, 907 aa, unidentified
  REGION 1..907: note = Cas Enzyme sequence
PQYHGILRRLFAGQLRLELKDELEAATVPHYVVIETVGDVPRNEKERQEYQAEQKRKREYKQGLFAGKQLTDKQRKQIILFEQQKGLCPYTGRKLNNALGDDLQIDHIFPKTKGGISELRNLVLTHNTTNHGKGERLPFEAANAPDNPFRDESGRTRTWKEIVADLPKMEGWRRGGQEGVLEKRDIFLREDSSEVPDWGNTTRVAQLARQLREEVIRWLGIRRQFDHVADPIVRDNQIANKIVEKIGTPTGFMTACCRDSWLDQDNLPRGFKLVEVEEDGKRKKRIVKDRDDMRHHMIDAAIISHIPPGKGMNYVPTGIFRLKPNSKEGDISMEALPGLGPEFASFEAAHKHECLVSESRRTKSKAKRFEETIYGLPDKDGNMTARVELSKLVARLMKKTKDASPEKIFEIFKNAGLTGKIRLGKVCKKEGKPDKTEKEGFSFETVKEWWEKCQKEYFTVEEVTEFLRKKEISKETLPDAVIKDWKWSRKNSKQRVTMESLRWFLSSKIKSWLGEFKKQAMTLPQLKEFLRTKELNGEPLTDEAVEKWWGGKPERKIGAKDLSKLFRSTDVSLCPLPDERLLELFDGAMPADNKLFLPDGTPVESIPELANNEAVTTLMPHYNREKQIIGYKQARESYVRCEIWSVERRNENGEGIKDGNGKPVLNYYKRLIPHPRGVAALNKRFLKSGRRLNWHLNLTDDELKELGLSGIATAIRSEREADDADVSSAKLKDYEKRLKVFNKAAKTVKGQDNLFAAEKPPEPPLQPPRREHKLSLRKIISGELPPNATYIGSLSRGDLLRVPIKRLTESTKGHGEMCARGEAINDDWHHWYRVTVIGGNTLNRNGRIQNGQIKLELAERKKPSDKELKAKKEWHHRIFRKQPSEPDFLAYLLELNAGHDQPPDPAK

SEQ ID NO: 22162 - protein, 1114 aa, unidentified
  REGION 1..1114: note = Cas Enzyme sequence
LASYSTKKNGAIIRAAEQENSFIFEVPYERAVFKFEPLILSLIPFKINDNNLRMSTTNLSNFNLSFDIGYSSIGWSISSKPANAVFPNWLGAGVVVFDDDSCMAKSRAEFRRMRRNIASKRNRIKRMREVLSGLGVMGKDELDNAKTEHPWFWAAETLASGKILSWSELWSVLRYYAHNRGYDGNSMWAKFGDDSDGDSEREANAEKLMADLGTSTQAETICAYLGVDAKSPKPLRFKKYFKGQNLAFPREIVFKEVERIIDAHIGILPKCDENFKKLMIGNWREVPSNIKLPRRFTSDRGLLFGQYMPRFSNRIITKCPLSGEKTPNCHSREFLDFRWKSLLANMAFPDGTDLMETRRKIDDFMLLYGALSKNALKKILKEVIGELPSNYNGMFLASEMEKALEVDPVRALILRTVYPNISFSLPNAELVEKLWKLIPKFVFTRMFRLKEYSFADICALLSPEKSAELAEFVRVIFDSSPASKKSPKPDFETAFNFKMRVQKISGRSPYSRQLMKSASEEIMRGVDPRSEGGSLYPRSESTKKEVLSNIDTWTNNHLVRHRLKIFKRLYMDIVREYCGADKSLVKSVAIEVVKDITAFSGLDSKKKAAKLNDLVAHHKSVSAYLKKEYPELSPNGSILRKARIADDLGWVCPYTGCHFSPRQLFESGNMEREHIIPRSLRPSDSLESLVITWKEVNDMKGQRTAYEFIKECQGMKVPGRQNLSIVTPERFEAFVRRLKKPMHPAGKADIERIKIRNKLLLTEHYKKREGGFLPSDLTQTSHLNKLAFKVVKSLYADAEKAPELIHVPGIVTSVVRKNWDLLPCMGDACPEIYETLENGDKVLRLKDEIRSITHLHHAVDAVAMGLAASVFPRTRNFYEAVSKRRLNQADRQELLKTGLVLFSGDKWKLVELEKSYLKEISGRISENRVVKFLPRKMSGMDVEQTLWGVVKENENGTVTIRQYGAGKGESRRSIKKVYEPKLKLLGYESKNTAKSKLARNKAVIIIKGNFGVALANPPQIIPHHNVWQRLSELAEKNGGRFPKILRRNQIIEIPSGRYKGIWRITSIKNNSNYIGVDMIHPIYARIKEKSKINVNLNTIIKDGMKIIDTRLIGA

SEQ ID NO: 22163 - protein, 1332 aa, unidentified
  REGION 1..1332: note = Cas Enzyme sequence
MTKYYLGLDIGTNSVGWSVTDTEYNVINKNKKRLMGVELFEEANTAEERRLFRSQRRRLNRRNWRLQLLKDEFEKEIEKVDPDFLLSLQESKYHLEDKKINKKYILFNDKNYTDKKFHKDYPTHYHLREAMKTQKNPDIRKVYLALHHIYKSRGHHLFEEQSFSNGTIETTLNELLTTLNINLDTKKVTEICLSKDNTTNKVKAFKEITNDKQIQEIFRLIFGGSVSLDKLYNMDEYKELDSNVKRISFKNKNYDEVRHEYETVLNDNIELLDKIKLVYDAIILANIKKDGLSLSKSKIEIYNKHKRDRKNLKKLIMQEKSLTVKERKALYYNIMLKDEKAGTNYVNYTRNSDITKSCDYESFKKFLKKELSILKDTKQKELILNDIDQDTFLPLLRTKDNSVIPYQIHNEELLEIINNAKKYHKFLTEEVIDRLIKIFEFKIPYFIGPLNNNIENSFAWSVRKTGHEHTPITPWNYYEVIDETESAKKFIDNLINNCTYLENEKVIPKESLLYSEYMLLNELNAIKIDNVKITTDIRNIIIDELFIKTKTTVTKNKIKQLLVKKQLIDKTAEITGIDNIVKGNLKAKHEFSKILGDNFNKEHVENMIYWLTIYGNTKKLVKENIETHYPNIYTKEQIDQILKLKFKDWSSLSKKFLTEIHSKSLINTETGEILNIIEALRQTNYILMELLSNKFDYTEQIDKLNIKKEIKELTPDILNNLYVSPSTKRAIWQTLKINDRLKKELGTEPTKIFIETTRTNQAPKIVKDTRHQNLINLYSKIKESDIKGLDINLKELKESLEKELPSNLKSKKLYLYYLQLGKCLYTGKNIDKNEINSILEYDIDHIYPQSKVKDDSFDNTVLVYRTANANKSDIYPLSESTQEKNKSLWSTLKSLKLMNDEKYNRLVRTEEFSNNELSGFITRQLVETSQTIKVVSKLLKQLNPKTRICYSKAENVNTFKQNYGKIKECNRKSQNKEQIIKVRELNDLHHAVDAYLNIVVGNVYDTKFTSNPRTFIDSSKDNRKYSLNTLFYYNIKDAWIIDKTINTVDREINNTNIQVNKRASRKTGKLFDATIYKANVAKEGVYYPIKTKDERMLDVTKYGGYTSITISHYTLASYTVTTPKESYDAKYLVPVPIYKVNSIKTDDELLKHIESVILHKPNETISNIKIIKKELYTHSKVILNGLPVYLGGKTNNNITYRSALQITFDYDTTRYLKTMFNYINWQKANKGKGDLWYSITQDDNLKTYDAIIKKMTDKLINKINPTKFDMLQDKTYRKTFEKLTLDEQVQVLAELLNLITTKLTPNAKVLKLINMSASVKSIPFSLNGYELF

SEQ ID NO: 22164 - protein, 1056 aa, unidentified
  REGION 1..1056: note = Cas Enzyme sequence
NPGEISEVEKNAQMEEQASLERALTMQGIVEGLSAEERFQHPCFWEAWRMGLWDPATPGMIRPRQNHLARSCKWADQEDPANRHKKGAERDPNARLPAIFPRRMVEAELLALCEGAARLIPALHRTASEIPYGPTGIPYPNIPRRDPAEASDEAKRLEALNALSPDLRRRFVRGKEAEWMGALTQKAPTFDNRGPGSCALIPRLNVAKCDLRYRNGEPTPESILPSEVSFLLQAKNFRFVPEILDSDAPAGFRDRFTASEVKKLYEDHFMPTVLPRIQEGRRDHAMMHNRKNLLTVWLEKNIGPKTTAKPGTEGKGKAAIDTPKATGRSRFSRPALRLVKELVLSGLDPAQFRAELLDRSNSRWEPLRAAIKLTSGDSPNFNQDPMRGLMPADLGFLDNIGASWDKLSIRDERLETIAEKTQAEEAVRQAAITNMIALEINPKIRHRLQMLDRLLSEVVTEFGAPDRVVLEFAREEWLGPKRRQELLAFQNERKNQNISARLELGGDRSAKSVLKHQLLKEQGGLCLFCGKNYSSPNTVNVAQGELSFDNAHLAHIVADAKGGPRAYVNLVLACDGCNRAQDTLYHADAFAQARFPTGWDSFLERVRHCQGMRPFKKKLLSTRSQEDATGLIQNKTALQETAWIAKLTRVLISLKFGWRLDSAGEERRIVVVTGSVTNRVATKYGLYALLGGPKRVADLEKDKSAIETALRELETAPDDEVHRIGDELAKAWKFKKRKNDPHWERDHLIRLLRRLQLEKEDTLNEKDRRDARHHALDAMILSFLPHWAGNPGKSLFFGLPPGKNWKEEFRIYLEKLYPEVLISARPELEASLYGARRVGLGSAATKRFALRDLAYTGINPSFSETTLKKQAKNIYDGPTRTAVLRFVATQPTEADWLDYCARLASHGLRPGGPTVTKVRCVVSEQLTEYADFSKDGTGAWRRGDKNQGWFICELKKSPGKYAIKPVYVHQSKGALEQRIRGEGLYQRIVGYFVRDEVVVLDRDITGILDPLPAGKFLIRSMRLNGQVELSNNSGTKYNPVQIDRLMDAGFRKSAHA

SEQ ID NO: 22165 - protein, 1435 aa, unidentified
  REGION 1..1435: note = Cas Enzyme sequence
MKNILGLDLGTTSIGFAHIVEDENKEKSEIKELGVRIVPLTTDEQSDFEKGKSITTNANRTLKHGARLNLDRYQQRRKYLIDLLQKANLITSSSILAENGKNTTHSTWQLRAKAVTERIEKEEFARVLLAINKKRGYKSSRKAKTEDEGQAIDGMAIAKRLYDENLTTGQLSLQLLQQNKKLLPDFYRSDLQKEFDLVWNFQKQFYPDILTDSFYKELQGKGKDATSKAFSKRYHFDTAENKGSKESVRLQAYQWRVEAISKQLSKEEVAYVLTEINNNLNNASGYLGAISDRSKELYFNRQTVGQYLYAQLQENRHNSLKNKVFYRQDYLDEFERIWETQASFHKELTEELKKQIRDVVIFYQRKPKSQKGLISFCEFESKEIEIEKDGKTITKTIGARVVPKSSPLFQEFKIWQILNNVICKRKGIRKKKVSAKTTQLDLLNESSQTIFSLDMECKQLLFEELNLKGDLKSDKVLKLLGYSPQEWEINYNQLEGNRTQKALYEAYLKIVEMEAHDVKDILQIKSAKDDWSLDESPLSASEIRESVKAIFQALGICTKILYFDPLLPVKEFEKQDSYQLWHLLYSYESDDSTSGNETLYRILEKKYAFKREHVRILANVALQDDYGSLSTKAIRKIYPNIKENQYSIACEMAGYKHSKLSLTTEELEARELKNIIPLLKKNALRNPVVEKILNQMINVVNALIEKNSERDAEGKITKYFHFDEIRIELARELKKNAQKRYEMTQNINKAKLEHQKISEILQKQFGIKNPTKSDIIRYRLYQELEHNGYKELYTNAYIAPDVLFSKNIDIEHIVPKARVFDDSFSNKTLAFREFNIKKGESTAFDYITSLNSEEELNQYLTRVENAYKTKSISPTKYKNLLKKASEIGDDFINRDLRDTQYIAKKAKEILFQVTKNVLSTSGSITDRLREDWGLVDVMKELNMPKYQSLGLTEVEERKDGNKVTVIKNWTKRNDHRHHAMDALTVAFTKPSYIQYLNHLNARKDENNKNYSVILAIEEKETIKVRTNNGKNKRVFIEPIPNFRQVAKKHLEEIFISHKTKNKVVTKNVNKPAGTDKQQITLTPRGQLHKETIYGKYQYYVNKEEKIGVKFDKETIAKVSNPLYREALLKRLQANDNDPKKAFTGKNALSKKPIYLDESKTKTLPEKVNLTYLEEDFSIRKDISPDNFKDLKSIEKVIDQGVKRILIKRLQAYDNDPKKAFVDLEKNPIWLNKEKGIAIKRVTISGVNNAQPLHIGKDHLGKTTLNKEGKEIPVDYVSTGNNHHVAIYRDKEGNLQEQIVSFFDAVVRAQQGLPIIDKTYKQAEGWQFMFTMKQNEMFVFPNETTGFNPAEIDLLDPKNKKLISPNLFRVQTISVVKYGNSVVRDFKFRHHLETTLQDDKILQGITFQQIKSLEPLRNIVKVRINHLGDIVSIGEY

SEQ ID NO: 22166 - protein, 1442 aa, unidentified
  REGION 1..1442: note = Cas Enzyme sequence
YFSFLFVIFASPKYKTMKNILGLDLGTTSISFAHIVEDENKEKSEIKELGVRIVSLTTDEQSDFEKGKSITTNANRTLKHGARLNLDRYQQRRKYLIDLLQKANLITSSSILAENGKNTTHSTWQLRAKAVTERVEKEEFARVLLAINKKRGYKSSRKAKTEDEGQAIDGMAIAKRLYDENLTPGQLSLQLLQQNKKLLSDFYRSDLQKEFDLVWNFQKQFYPDILTDTFYKELQGKGKDATSKAFSKRYHFDTAENKGSKESVRLQAYQWRAEAISKQLSKEEVAYVLTEINNNLNNASGYLGAISDRSKELYFNRQTVGQYLYAQLQENRHNSLKNKVFYRQDYLDEFERIWETQASFHKELTDELKKQIRDVVIFYQRKLKSQKGLISFCEFESKEIEIEKDGKTITKTIGARVVPKSSPLFQEFKIWQILNNVICKRKGIRKKKSSAKTTQLDLLNESSQTIFSLDMECKQLLFEELNLKGDLKSDKVLKLLGYSPQEWEINYNQLEGNRTQKALYEAYLKIVEMEAHDVKDILQIKSTKDDWSLDESPLSASEIKEKVKDIFQALGICTKILYFDPLLPVKEFEEQDSYQLWHLLYSYESDDSTSGNETLYRILEKKYAFKREHARILANVALQDDYGSLSTKAIRKIYPYIKENQYSKACELVGYKHSKLSLTTEELEARELKNIIPLLKKNALRNPVVEKILNQMINVVNALIEKNSERDAEGKITKYFHFDEIRIELARELKKNAQKRYEMTQNINKAKLEHQKISEILQKQFGIKNPTKSDIIRYRLYQELEHNGYKELYTNAPIARDMLFSKNIEIEHIVPKARVFDDSFSNKTLAFREFNIKKGESTAFDYITSLNSEEELNQYLTRVENAYKTKSISPTKYKNLLKKASEIGDGFINRDLRDTQYIAKKAKEILFQVTKNVLSTSGSITDRLREDWGLVDVMKELNMPKYQSLGLTEVEERKEGNKVTVIKNWTKRNDHRHHAMDALTVAFTKPSYIQYLNHLNARKDENNKNYSVILAIEEKETIKVPTNNGKNKRVFIEPIPNFRQVAKKHLEEIFISHKAKNKVVTKNVNKPAGTDKQQITLTPRGQLHKETIYGKYQYYVNKEEKIGVKFDKETIAKVSNPLYREALLKRLQANDNDPKKAFTGKNALSKNPIYLDEAKTKTLPERVNLTYLEEDFSIRKDISPDNFKDLKSIEKVIDQGVKRILIKRLQAYGNDPKKAFVDLEKNPIWLNKEKGIAIKRVTISGVNNAQPLHIGKDHLGKTTLNKEGKEIPVDYVSTGNNHHVAIYRDKEGNLQEQIVSFFEAVVRAQQGLPIVDKTYKQAEGWQFLFTMKQNEMFVFPNEATGFNPTEIDLLDPKNKKQISPNLFRVQKIATKDYFFRHHLETNVETDNILKNVTWKREGLSGLKDIVKVRMNHLGDIVSIGEY

SEQ ID NO: 22167 - protein, 1351 aa, unidentified
  REGION 1..1351: note = Cas Enzyme sequence
MVNKPYYIGLTVGPEYAAYAVTNESYNLEKFKGQDMWGIYKFKEAETSADRTVFRSSRKNIKKEKKRINLLKAYFYDEIMKVDKNFFIRLDNSSFFPEDKEKALNGSRNILFDDDNYKDVDYYNQFPTIYHLRSFLANSKEKADIRLVYLAVSNIMKHRGNFYTKNLEDTSNSVKDIYLNICQLASQSDIHLDEKADIDKLMEILLNPAINNKTKAILAAQTVKALTKQETALIKLMCGLKIKLVDMFPELADSLEESDKKASISFSDNNYLENVDSIEKLAGEDNFALVSAVKELYDAVIIQNIIQGHKFISDAKIASYEKHMNDLKLLKSVLRNNVTSKEFNKFFRSEEPGTYAAYVKSNNSDGKRTRRGSDKGRTQDDLYSSIKKLLSKADENDSDAEYILDEISKGTFLPKQRITDNKLIPNQLYATELKAILDNAAQYYDFLNEKDESGLTVSERILSVFTFTMPYFVGPTSEYNSRGWAVRKEAGAVMPWNLEEKVDIKESAKNFIENMVGKCTYLSGERVLPKASLLYEKYAVLNEVNNIRVDGEKLPVEVKQEIVNGKLMAGKKLTKKQIHSFLVKKGIADMDSLITGIDEKLNNTMSSHKFFTEVFDTLDKDTEIMAEDIILWSTIYGTSKTYVKEQIENKYPSKLTAEQMKKVLNFKSNDWGRLSAEFLNMRGSNKETDERISVIDLMWNENISLMELINDERYDFMSVIKEKSKKEVKSIFTFEYDDLNELYATAAQKRSIWAAVKIVREIIKIKGYAPESIFLDTRKMRPKDKKDRKSRLIDLYKGLKDVSKEWKETMINRIDECDKDGSLKSKRVYLYFLQMGKDIYTWEDINFNVVKTTGDNIYNIDHIYPKHFVKDESLDNIVLTNSEFNKEEKKDIYPVPDKIYEAMHENWLILRKNGFMSAEKLARLSDRHPMSDEKRASFIEKSYIQATSSTKMLAEVFNSIFNKDTKIIYAKTQEIADFRKQYGFAKATIYNDHYLAKDAYLNIVVGNVWYTKFTLSPIWFIEKEYRTGKSEYNLNRMYDFDVVRNDRVAWIAERNKKDIPGTIAIVNKIMARNTPLTVTKTTEGHGGLTNATISKASKAKPGIYLPLKSNIRYSDVTKYGGKTSIKTAYAFLVEHTDKKKGRVRTLYTIPLYLAFNVKNREDIEKYCIEELGLIEPNVRISKIMANSELEIDGYSYLLGGKSVSQFHVANNVPMIFNQEWQTYISKIEKYINAKVVDRAVTVEKNLELYNEILSKHKTDIFLKKKLPVYNMLLTDREKFEKLVLEEQMQILCQILMLTRMGTNLANLSLLGEGSSIGTMNISCNISNYKSAVLVERSITGLYKKRIDLLEV

SEQ ID NO: 22168 - protein, 1115 aa, unidentified
  REGION 1..1115: note = Cas Enzyme sequence
MCGLKIKLVDMFPELADSLEESDKKASISFSDNNYLENVDSIEKLAGEDNFALVSAVKELYDAVIIQNIIQGHKFISDAKIASYEKHMNDLKLLKSVLRNNVTSKEFNKFFRSEEPGTYAAYVKSNNSDGKRTRRGSDKGRTQDDLYSSIKKLLSKADENDSDAEYILDEISKGTFLPKQRITDNKLIPNQLYATELKAILDNAAQYYDFLNEKDESGLTVSEKILSVFTFTMPYFVGPTSEYNSRGWAVRKEAGAVMPWNLEEKVDIKESAKNFIENMVGKCTYLSGERVLPKASLLYEKYAVLNEVNNIRVDGEKLPVEVKQEIVNGKLMAGKKLTKKQIHSFLVKKGIADMDSLITGIDEKLNNTMSSHKFFTEVFGTLDKDTEIMAEDIILWSTIYGTSKTYVKEQIENKYPSKLTAEQMKKVLNFKSNDWGRLSAEFLNMRGNNKETDERISAIDLMWNENISLMELINDERYDFMSVIKEKSKKEVKSIFTFAYDDLNELYATAAQKRSIWAAVKIVREIIKIKGYAPESIFLDTRKMRPKDKKDRKSRLIDLYKGLKDVSKEWKETMINRIDECDKDGSLKSKRVYLYFLQMGKDIYTWEDINFNVVKTTGDNIYNIDHIYPKHFVKDESLDNIVLTNSEFNKEEKKDIYPVPDKIYEAMHENWLILRKNGFMSAEKLARLSDRHPMSDEKRASFIEKSYIQATSSTKMLAEVFNSIFNKDTKIIYAKTQEIADFRKQYGFAKATIYNDHYLAKDAYLNIVVGNVWYTKFTLSPIWFIEKEYRTGKSEYNLNRMYDFDVVRNDRVAWIAERNKKNIPGTIAIVNKIMARNTPLTVTKTTEGHGGLTNATISKASKAKPGIYFPLKSNIRYSNVTKYGGKTSIKTAYAFLVEHTDKKKGRVRTLYTIPLYLAFNVKNREDIEKYCIEELGLIEPNVRISKIMANSELEIDGYSYLLGGKSVSQFHVANNVPMIFNQEWQTYISKIEKYINAKVVDRAVTVEKNLELYNEILSKHKTDIFLKKKLPVYNMLLTDREKFEKLVLEEQMQILCQILMLTRMGTNLANLSLLGEGSSIGTMNISCNISNYKSAVLVERSITGLYKKRIDLLEV

SEQ ID NO: 22169 - protein, 1438 aa, unidentified
  REGION 1..1438: note = Cas Enzyme sequence
MDFNRKCSENYCLGLDVGTASVGYCVIDENGKLFKINRKGDTGNNKRNSLWGVRTFKSGETAKGCRINRSARRRYSRTHTRILELRKIMSDMVCKVDENFFARLDESFLWKEDKSDKAKSDYILFADKDYTDKEYYKKYQTIYHLRKHLLGTTEKADARFIYLALHHMLKYRGNFLYEGQKFMELDDFKIIYEQFLTSLKEYLEIECNYDQISCEEIEEKLKEKKSKKEKNNEVSEILKKLGLDKKYAEAVANAIIGYKFNVATIMNDKNLCDENGKEMSVSFASADYEEEEQKLSDELGEKFSVIENLKRLYSWYVIKQIMQGSDKNRVNYLSQAMVAKYEKHHAELKELKELFRDYKTQKEYSEFFHKELKAEQKDGKMSPAFLKSFGKIKKGEYVPNYANYIKGMKRCGDTQSKARENLYKCIKALLGDVAKDDERYIRICAEMENDSYLEKINDVSNSVIPYQLNEMEMEKILDIQGEFYPELKKNKELILKMLTSKIPYFVGPLNPGSRFAWMSKKAGMENKSVYPWNVEEVVDVDKTAEKFITRMTNYCTYLPCEKVLPKHSIIYQWYEVLTELSQISIDKIKFGKEIRDDIIQNLFLKKVSVSGNNLKEHLKKSGTYNDIDNRVIKGYQGGDNFASSMSSYITFKKIFGEINMSNIDMIEQIIYWLTIFDDKKIIKRKIEQNYKDKINDSQLKRILKIKYTGWGQLSKKFLTGIKGDTGHTIIEMLEEGDLRWKEIPNLIQIINRDENIKTVIEENRLRYNGEDDLPDIIDKLHTSPANKRGIKQCMKVIEEIIEYMGRKPEQIFIEFAREEGEKVETKKVKDKLDKAIGKLKQEFKDYYNDDIKQELKDNEKRLDEEKVRLYFSQNGKSLYSAPSASNQLSLDNLNQYDVDHIIPYSISQDDSMDNKVLVKKIENQNKGNRIVSDAFGNKADYKEMQNYWEMLYKAGLISEKKYNNLNKSLDEVFSKGFINRQLVETRQIVKNVANLISDYYDDKIEVIEVKAQLSSYIRNKFTQEKKDDDGFWIENTENAMFFKNRGLNDYHHAHDAYLACIIGLYIQKVYPGWKNELNFKKYRREFEKYYEEQKKYNTKSKKEIYISMLSRFTKNYEKAGWNGEEIIEYMRKIFCYRDVMISKKTEENTGSFYNQTRYPKEKLDGNKKETKLIPLKSGNNLRGKEELKELSVEKYGGYQGGECAYFVLVKYYTVKKKKKTEEKQWKMEFVGIPTYISYEINKGNINLKQYVCDKLKNDTVEILRGKICKYQELMDEEGNRYFLVGPTEVANAKQFVLGSRYQKFNRLYSYINSENWHYIRTDELEKEIDEFFKMLQNKIHNEFKGYIKDIDKVIGANTSKLDIDKKIDYFNEIYKIVQANSSRPAVSKFNIAGISDGLGRKRSLPFKDKIIIVDKSVTGIYERRTCFELENGGNTKSC

SEQ ID NO: 22170 - protein, 1438 aa, unidentified
  REGION 1..1438: note = Cas Enzyme sequence
MNFNRKCSENYCLGLDVGTASVGYCVIDENGKLFKINRKGDNGNNKRNSLWGVRTFKSGEPAKGCRINRSTRRRYSRTHTRILELRKIMSDMVCKVDENFFARLDESFLWKEDKSDKAKSDYILFADKDCTDKDYYEKYQTIYHLRKHLLGTTEKADARFIYLALHHMLKYRGNFLYEGQKFTELDDFKIIYEQFVTSLKEYLEIECNYDEISCEEIEEKLKEKKSKKEKNNEVSEILKKLGLDKKYAEAVANAIIGYKFNVATIMNDKNLCDENGKEMSVSFASADYEEEEQKLSDELGEKFSVIENLKRLYSWYVIKQIMQGSDKKRVNYLSEAMVAKYEKHHAELKELKELFRDYKTQKEYSEFFHKELKAEQKDGKMSPAFLKSFGKIKKGEYVPNYANYIKGMKRCGDTQSKARENLYKCIKALLGDVAKDDERYIRICAEMENDSYLEKINDVSNSVIPYQLNEMEMEKILDIQGEFYPELKKNKELILKMLTSKIPYFVGPLNSGSRFAWMSKKAGMENISVYPWNVEEVVDVDKTAEKFITRMTNYCTYLPCEKVLPKHSIIYQWYEVLTELSQISIDKIKFGKEIRDDIIQNLFLKKVSVSGNNLKEHLKKSGTYNDIDNRVIKGYQGGDNFASSMSSYITFKKIFGEINMSNIDMIEQIIYWLTIFDDKKIIKRKIEQNYKDKINDSQLKRILKIKYTGWGQLSKKFLTGIKGDTGHTIIEMLEEGDLRWKEIPNLIQIINRDEKIKTVIEENRLRYNGEDDLSDIIDKLHTSPANKRGIKQCMKVIEEIIEYMGRKPEQIFIEFAREEGEKVETKKVKDRLDKAIGKLKQEFKDYYNDDIKQELKDNEKRLDEEKVRLYFSQNGKSLYSAPSASNQLSLDNLNQYDVDHIIPYSISQDDSMDNKVLVKKIENQNKGNRIVSDAFGNKADYKEMQNYWEMLYKAGLISEKKYNNLNKSLDEVFSKGFINRQLVETRQIVKNVANLISDYYDDKIEVIEVKAQLSSYIRNKFTQEKKDDDGFWIENTENAMFFKNRGLNDYHHAHDAYLACIIGLYIQKVYPGWKNELNFKKYRREFEKYYEKQKKYNTKSKKEIYISMLNRFTKNYEKAGWNGEEIIEYMRKIFCYRDVMISKKTEENTGSFYNQTRYPKEKLDGNKKETKLIPLKSGNNLRGKEGLKELSVEKYGGYQGGECAYFVLVKYYTVKNKKKTEEKQWKMEFVGIPTYISYEINKGNINLKQYICDKLKNNTVEILRNKICKYQELMDEEGNRYFLVGPTEVANAKQFVLGSRYQKFNRLYSYINSENWHYIRTDELEKEIDEFFKLLQNKIHNEFKGYIKDIDKVIGANTSKLDIDKKIDYFNEIYKIVQANSSRPAVSKFNIAGISDGLGRKRSLPFKDKIIIVDKSVTGIYERRTCFELENGGNTKSC

SEQ ID NO: 22171 - protein, 1341 aa, unidentified
  REGION 1..1341: note = Cas Enzyme sequence
MEKDYYLGLDMGSGSVGWAVTDDQYHILRAHGKALWGTRLFEAANTAEDRRINRTARRRLKRRNQRIEWLQEIFAEEINTKDSGFFRRMKESRYWAEDKQDENGNCLEMPYSLFIDKDFTDKEYHEKFPTIYHLRKYLMATEETPDIRLVYLAFQHMMKHRGHFLLNGSIEEIREFRTTFDQFLEVIRNEEMGFDGEITEETYNDIENTLKNVNLTRSAKKSTLVKLLKGTRVEEKELLALISGCTVKLSNIYNDKSLDETERPKISFADAGFDDYEIEIQNNLNERYCIIESAKAVYDWAALADILGKCSSISEAKVALYEKHHNDLQRLKELVKKNISTEAYKEIFTDTSGKYKNYCAYIGTANIDGKKKDFEGKKCTKEDFYAYLKKSVIERINDPEKTEWLKKELETGNFLPKQSTGANSVIPYQIHLYELNAIITNLQERIPLLKREGDKIRQIFTFRVPYYVGPLNGISVDGKTTNWVKRKEGKIYPWNFKEMVDEEVSAERFIRRMTNKCTYLIHEDVLPKYSLLYSKFEVLNELNNVRLNGELLSVELKQKIYEDVFQRYRKVTQKKLKRYLLTEGKINENTIITGIDGDFKSSLTAYHDFKEKVTGLNLSEKEKEEIILNVTLFGDARTLLRKRIGKICPQLTDKQKEGLSSLSYQGWGRLSRKFLNGIVISAQGGEMWTIIRALWETQDNLSQLLGAKYEFRKEVEKENGELENREISYETIKELCISPSVKRQVWQALLIVKEICKIQKTPPKRVFVEVAKEKTNSGRTESRKKRLLDLYKYCSKYEKELYDENLQSKLEKCQEADLRSDRLFLYYTQMGRCMYTGLPIDLDELWNNQKYDIDHIYPQSKTMDDSIDNRVLVKRILNLEKTDLYPIQADIREKCRGFWKALKNAGFISEEKYKRLTRATEFEPAELAGFISRQLVENRQTTKVVASILKQAMPDTEIVYVKARTVSEFRHKFNFIKVRDMNDLHHAKDAYLNVVVGNTYLIKFTKSPVNFIENHSNRSYNLKKLFTYGEVERNGEIAWISGENGTIGTVRNIMKKNNILVTRRVHEATGGLFDQQLMKKGKGQVPVKGSDERLCDIEKYGGYNKEAGAYFVLVESDEKKGKKKRTIEYVPIRLKKQLENNREALENYLQEQRKLINPIVLLDKIKIDSLFRVDGFFMWLSGRTGNQLLFKCANQLILSTEDEATLKKVVKFVNRRKENKEIKIYESDKLNEEMLDKLYNTFLYKLQNSVYGNRLGEQAKTLSSKKVKFDELRIEEKCLVLYEILHMFQCQSVASDLKLIEGPGKAGILVLNSNITKCKNICMINQSPTGIYEQVIDLQKL

SEQ ID NO: 22172 - protein, 1425 aa, unidentified
  REGION 1..1425: note = Cas Enzyme sequence
MYNIGLDIGTGSVGWCLTDENGYLLKVNRKGNNGNTYRNSAWGVRLFESADTAADCRIKRSTRRRYKRRRTRIIELRKIMSDMIMPIDPNFYARLDEAFLWNEDKSDKAKAPFLLFNDNGYDDVKYYTDYPTIYHLRKHLLETKEKADPRFIYLALHHMMKYRGHFLFEGQSFEAIDNIEDTFIELEHLVNVYVKEKEDTDNNAENNALYQEIKNYLADNKVKNKDKKEYITDTFIKADYDNKYSKELAAAVLGYEFNVGIIVNDNSLTDEDGKALKAKFADAKYEEKEEKLSDTLGERYYIIETLKKIYSWKVLHSILGDNKYLSYAMVDKYEKHSEQLKALKYLFHKYTSQDEYSEFFHQEKNKEGKYIVNYANYIKGIKRLSNETNKKYNTKQQLYQSIKEKLGERAADDEVYKKILVEMEQETFLEKINNVDNSAIPYQLNLMEMDKILTQQGVYYKELRDNKELLLKMLTSKIPYYVGPLNNNNKGNRNFAWMTKKAGKENEKVYPWNVKDVVDIDVTAEDFITRMTNYCTYLPDEKVLPKESLLYQRYMLLEELSQIRIDGRKLSKEDRKAIIDDLFIGKGRVKVSDKDFKEYLDKVNYVKVNSKGYDVTGYQSDDGFACALSSYNKFRRILGHIDEQNEKMIEDIIYWITVFEDKDIVKRKINKQYADRLSAEQLKKILKLKFKGWGRYSSKLLNGIKGDMGTTIIEMLEDADERFAYCDYCPNFMQIINKDEKIKQIIDDNRPRYDGTKDLLDVIQDMHTSPANRRGIWQTMKAIEEIIEYMGEKPQQIYIEFAREDDPKAKNKRADSRKRAIDKALKKLKEDMVDEYNENVYKELKQYEKRLDEEKVYLYFMQNGKSLYTGKELNLNEPENLEIDHIIPYSLSDDNSLDNKALVLKKENQNKGNKIVKEAFPQSFSDSKMIDYWKNLKKAGLISEKKFNNLQKNNVEDILTKGFINRQLVETRQIVKSVANLILDYYNEQIDVIEVKASLSTSVRKMLTYEKKDNNGFWEENKDNCMFYKNRDMNDYHHAHDAYLANIIGMYIQKNYPHLQKELNYSQYRRVWRKYYENTKNNNGVNWFATLGKFSSNNEEADWYGQDIIAYMRKIFCYRDVLISKKVEENTGAFYSETKYPREDKAGSKLVPLKQGDNMRGANNLKELDTRKYGGYKGGEKAYFVLVKYCIEKALKKSVKKEYHMEFVEIPVYIARGIKNNDINLYDYVCDILNEANKNSVADVEILRNKVPKYQMIIGENGEEYYLVSATEVINSKQFVLGGANQQYNRLLNYIKYGKNDKWQYIQTELLDEQLIGLYNLLIAKIKDEYKGFSKEAVRIQENNSFDKLDVKDKKEFIAEMIKLVQPDSDYPYLGKYATGLSNRMGRKTGEKVGKKITLVDKSVTGLYERRTIFELEDNSSTKSC

SEQ ID NO: 22173 - protein, 1726 aa, unidentified
  REGION 1..1726: note = Cas Enzyme sequence
MNETAKLALFVALVMLVLSGAIYTSSYFKKTGTEGQMLSLVPDRVVVTDPVTGALISSSLKTKDLAECCPQKIINDTTASLINTFSSSFTDKNFLRRTKLEPGAILVADAVGNVSSSQIGIPFITSCCESIKALIDDVAPKSDGIYSSLKTDATYVKKPETSVSQRPVTYNAYTGALEMVSLPANSILSTDTNGDIVTTPYSLPSCCDKIKDTIVDYTTTFSSNYIDTNYQRRAVAGSQHLVMMDDYGNLVDSGLTPTIVNTCCETARNALSPSNIIDGGGNALYSAPKIDATFQKKTTAPANALLMPDANGNLVDSGLTPAAIQACCTQAANAATDSLLKSDIVDTSLSATKLYSSLKIDDTFQKKAIAPANAIVVVDAKGDLVDSGFTPQFLQNCCAQAATGSANGLMKADIVDTSTATDKLYSSSKIDTTYQKKTTAPANAILMPDANGNLVDSGLTPLAITTCCTAAMKAANESLKIVDIVDTSTATDKLYSSSKIDMTYQKKTTAPANSLLMPDANGNLVDSGLTPSAIQACCTQAVGAATNSLLKTDIVDTSTSTDKLYSSSKIDTTYQKKTTAPANSLLMPDANGNLVDSGLTPTAIQACCTQAVSAATNSLLKTDIVDTSTSTDKLYSSSKIEATFTKKTTAPANVLLMPDANGNLVDSGITPAFISACCQETADAKIGVANALLKSDIVDTSTAATKLYSSSKIDATYQKKTTAPANSLLMPDANGNLVDSGLTPTAIQACCTQAVSAATNSLLKTDIVDTSTSTNKLYSSSKIDATYSKKTTAPANSLLMPDANGNLVDSGLTPAGIQACCTQAVSAATNSLLKTDIIDTTTSTDKLYSSSKIDATYQKKTTAPANVLLMPDASGNLVDSGITPAFISACCQQTTNATTAVANALLKSDIVDTSTSTSKLYSSSKIDATYAKKPTAPANAILVPDANGNLVDSGLTPTAIQACCTQAVNAATNSLLKTDIVDTSTSATKLYSSAKIDATYTKKTTAPANALLMPDASGNLVDSGLTPAGIQACCTQAASAASNSLLKTDIIDTSTSTTKLYSSSKIDATYQKKTTAPANALLMPDASGNLVDSGITPAFINACCQQTTSATTAVANALLKSDIVDTSTSATKLYSSSKIDATYAKKPTAPANALLMPDANGNLVDSGLTPAGIQACCTQAASAAANSLLKTDIIDTSTSATKLYSSAKIDATYTKKTTAPANALLMPDANGNLVDSGLTPTAIQACCTQAVNAATNSLLKTDIIDTSTSTSKLYSSSKIDATYTKKTTAPANAILVPDANGNLVDSGLTPAGIQACCTQAATAASNSLLKTDIVDTSTSATKLYSSSKIDATYQKKTTAPANALLMPDASGNLVDSGITPAFISACCQQTTNATTAVANALLKSDIVDTSTSASKLYSSSKIDATYAKKPTAPANALLMPDANGNLVDSGLTPAGIQACCTQAATAATNSLLKTDIIDTSTSTSKLYSSSKIDATYTKKTTAPANALLMPDASGNLVDSGLTPTFINACCTQASNALAAATNSIVKTDIVDTSISATKLYSSSKIDATYTKKTTAPANALLMPDASGNLVDSGLTPTSIQACCTQASNALAASNNSLLKTDIVDTSTATTKLYSSSKIDATYQKKTTAPANALLMPDANGNLVDSGLTPTFINACCTQASNALTAATNSLLKTDIVDTSTSTTKLYSSSKIDATYQKKRQHQPMLY

SEQ ID NO: 22174 - protein, 1135 aa, unidentified
  REGION 1..1135: note = Cas Enzyme sequence
MSKILGLDLGTNSIGWALIENTTILGMGSRVFPEGVINLGEGEGREISKNASRTDSRGKRRQFFRKRLRKRYLLKELAKHSLCPIPASLIRDWNGIEIFKNELLQEWLRRNPYELRAKAVSEKITLLELGRIFYHMIQRRGFLSNSRSAGSEVKESSTLFKGDTKIGKIGINKTLQSIEKKKTLGSYLHSIFPKENEPFSGELERIRNRYTTRQMYIDEFEAIWEFQKNHHSELTNNLKTIIGGRKKDGYKEDGVLFHQRPLRSQKHLVGHCSFETKKTKCQLSAIPFEMFRVYQWVNTVSYDLNGERQKITPQEKEKIVALLLSKEKIKFKEIRQKINRLEAYYQFNYKDNDQIIGTHTISKLSNKMFFGKEWFNFSDTEQENIWHILSFFDDRDKLKEYAIKNWNFDEERAIKISRFNLKEGYANLSRKAINNILPFLKLGFMYDIAVGLAGVKNVLGNSYKEHEQFVFDNVPEIVRSNLKGGYIEPLKQMMKNEFNCTEIQLKKLYHHSSSITTNDVLDRLPLGPEADKEIQKIKNPVVITALFEIRKLVNEIIDAYGKPNEIKVELARDLKASKKNRNDTRRKQQVLEKENDRVKGEIEKLGMLLNHKNILKYKLWEECNHTCPYTGKKITLSQLFTSEIEIDHIFHWSRSLNDSFNNKTLCFTNENRAKENRTPYEFYSSQGDKKWEIIKLQALNCFKTKAKYPNCYTKFKHFVKKKHDEDFISRQLNDTRYISKEAKNYLSKICTKVLVAPGQMTATLRRYWGLNSILNKEDNTKTRNDHRHHAIDALVMACSTRSHLHELTKRNRYRKNHELKDFPDPWFNFRRDVEKAVEQILVSHKKTKNILTIRTRTTIKKGVKHRNTGVAARGQLHKESVYGKRKDVFTKELNYHIRKPLISLSAAEIPKIVDLEIKKIIYKAIEEIGLNIDDNRKPIVKTREDKKLFEQLLSKPFFLPNKNGNPVPIKKIRIQKKFSNAKPLKESKNQWVDLGKNHHVLIYKDFNGNFNQDVVTFWTAVNRKRKGKEVFQLPKDGKEMVTTLQKNELFLLGLKDDDIDWENLNYNLLKKHLFKVQTLSSFYYEFRLSTDSTQNKDTKSKVFRRITSFSDGKAGWKTHSPIKVKVNSIGKIEKR

SEQ ID NO: 22175 - protein, 1084 aa, unidentified
  REGION 1..1084: note = Cas Enzyme sequence
LNLLNNAIGFALVELEGSNNPTKINRLGVHCFSDGREDKSKASLCKARRLARSARKNRDRRIQRKHSIVYKFIKYGLVSSDEPTTHTLKKMGHPLGYRTKALDEPLTKKELARAIYGLSQKRGFSLLEREDDTDTEAGIRKKSHEIMISDMVGFRTVGEYLLHRLNNNKNIKTILDNNICPSRDMLEFEFDAIKENQIKHHADIDTHFWDDIKQTIFYQRPLKEPELGSCIVLKEEKRTFIATPSFKRVTCLEILADLNIRKGSRILPISIETKLSLYEELKRKGSIDKKELTARLCKGTEKLTLRNKKELIGDTTSSELAQPKYFGEAWFDFALEKQDEIAIYLVTKDPKTIYNMAKDAWGLKEENAKNLAIRPLSKREASTQPFSRKFLGMLLADMEQNFQNVQVTRKNLGYPEIKYNGGFENLKYYGEVIPHTVTNFRSGKPIEERNDEELYGTNNNPTLHIVFNRLRKLVNQLITTYGKPEQIIIRVQSSLKHSMAIQKKRELNKNARKGDTTEIRKKLVTVFNIPNPTWEHVLKYRLWVELNPSEPEMRFCPYTGIKITKYNLFTLEFVIDHIIPFSITYDDTIHNKTLMSATIKDRKFDKCPYDAFGVSEQYYKHILARVEKLPKEKIKLFNENAAAIARKRVIQQFIDANYISKSIAEYFTTICKDVCITNEKLMTLLKNSWNVQHILQRDFSDVEKLKNEETKKRTKNKKQKDDGDEDNSTDKDLRIIAADAAILGTVDSSLSILTKYALLKKSEREDFKVDAPWQGFMGDVVEKLNSIVVSQRSSHSKTGSFLKDTIYGTVHPITAEGANLCIRKSIFEAHPDKITDIKTKEKLMHHLSMVPSEKEKIRERLSFLLNHKLERIKDDKLKKSLVKFLETMDKGTKKETELAKRLLKEEIVLFSEITGIKTVNTYLKIGKPITIYHYDGTGQKHTKVQLSEENYSVTIWVLPQQTLLRNEETYKVYCPKGFDAKFVVTHQTLFEANQKEESRPHPAAQKLMVLHKNDMLLLSGQIYKVAGLDPCNARIIIRAHYKDKEKIVKSYQQLIETKIQKLAINEVGVIQKGQNLFEKFLKIV

SEQ ID NO: 22176 - protein, 1120 aa, unidentified
  REGION 1..1120: note = Cas Enzyme sequence
NLRIYQRERTVTDGQLDLFTNTTTNKLQTDVDVTSEILKTEEDYVKLFNWLNDRSSIKQDTLLSSYFKAKKEKGKDKYPYRWNYVEDKDYPCNETRATILSGLAKCNISADFLTHENEMSLWHILYSIEDKAELYKALKKFAHRHQLEENFPEVLSKTKPFKKDYGSYSEKAIKKLLPLMRMGNYWNEEQIDAKTRERIEKIIDGEYDENIKNRVREKAISLTDIQHFRGLPVWLACYIVYDRHSEAKVVEKWEKPEDIDYYLKNFKQHSLRNPIVEQVITETLRTVRDIWKQEGQIDEIHVELGREMKNPADKRRQMTERIQQNENTNLRIKAMLMEFMNPDMGIENVRPHSPSQQDILRIYEENALDNLSKEDKDYDFVSKISKVAQPSKSDIIRYKCWLEQKYQSPYTGKMIPLSKLFTPAYEIEHVIPQSRYFDDSFSNKVICEAEVNKLKDRQLGFEFIKNHAGEIVQLSQGGTVTIMSVEAYERFVKDYYSNNRTKMKKLLMDDIPDGFIERQMNDSRYISKVVKGLLSNIVREKQEDGEYQSSREYEQEAVSKNVISCTGSITDRLKKDWGMNDVWNNIVLPRFKRLNEVTGKDCFTTYSREGHEIPNMPLELQKGFNKKRIDHRHHAMDAIVIACATRDHVNLLNNEAAHSKHNVNRYQLQHKLRRFATIKINGKEREIAQEFLKPWESFTTDAWQVLSNIIVSFKQNLRIINKTTNRYQHCEDGGKKGFEKQHKGESWAVRKSMHKDTVFGEVNLRLKKTVSLNEAIKKPENIVNKEFKKKVIELLDHGRDAKFIKKYIDDNKDVWSDINPAKIEIFYFSKDEKKRNGEPKERYFATRKSLDTTFDEKKIKESVTDTGIQKILLAHLTTKENNPEQAFSPDGIEEMNRNITALNNGKFHQPILKVRVYEKADKFAVGQTGNKTKKFVEAAKGTNLFFAFFGTEKEIKSNGRKEIVRSFMTIPLNVMIDCQKKYGIQWRNNIEDYLRGKDMIDADAKLLFILSPNDLVYLPRENDRKEDIMPLDKQRIYKFIDPAQDKGNFVQYSVAKAIFSAKFTDQKKQGISYPIQDEFGLGSQQTKSPRAITGEMIKETCIPIKVDRLGNVIEINGSPL

SEQ ID NO: 22177 - protein, 954 aa, unidentified
  REGION 1..954: note = Cas Enzyme sequence
SHFQGLPIWLTSYIVYDRHSEADIAGKWNSVDDLEKYLKDFKQHSLRNPIVEQIITETLRVVKDIWIQYGKGVKDFFDEIHVELGREMKNTAEDRKWLTEQVTNNENTNLRIKALLMELKDNSDGKLFAEDVRPHSPMQQDALKIFEEYALQSNERYDEKENKFIYDPIEDDILKISKSAQPTKSELQRYKLWLEQRYRSPYTGQMIPLGRLFTEDYQIEHIIPKSRYFDDSFNNKVICESAVNQLKDKQLGLEFIQNHYGEEVELGMGKTARVFTEDAYKSFVKEHYTKNNSKRRNLLLDEIPEQMIARQMNDTRYISKFISALLSNIVRAEKEDDGINSKNLIPVTGKITTALKQDWGLNDVWNDLILPRFERMNELTNSKDFTTWNDNYQKYLPTVPLDLSKNFQKKRIDHRHHAMDALVIACATRDHVNLLNNQSAKSEISRYDLQNKLRHKEKKSWIDKKSNEKIERDVFKEFKKPWDNFAVDAKNELKKIIVSFKQNLRIINKTTNKYEKIVDGKKVKVSQQGTNWAIRKPLHKDTVSGIVNLRLKKTVRLSVAIDEWKNIVDKNLKTKIKQLINEGLDKTKIQKFFTQQKNKWQEKDISKVEVYYFSNDKEILVASRTALDVSFNSKKIESITDTGIQKILFNRLKQFDTVELPFEEALQYYDAVLEKQEIEAIINDKETTFQTIQDFANFMRLNDHKYGKKNYSKLNVFVEQVFNRNLREEFSDSIKEYPEIAFSPEGIEDMNKNIIQLNKEKTQDEGKPHQPILKVRTYEPKGNKFNVGNFGNKKDKFVEAAKGTNLFFAIYIDDEGKRSYETIPLNIVVERLKQGLKEVPEVNEKGNKFLFHLSPNDLVYVPTEEENITNINFDNFLNEEQITRIYKVEKFSETECYFTQQSIASLIKKYDAKTKIGELESQNKLQTTMTKDRIKIVEYCKKLTVGRLGNIKKR

SEQ ID NO: 22178 - protein, 1877 aa, unidentified
  REGION 1..1877: note = Cas Enzyme sequence
MKRILGLDLGTNSIGWALVEIDHEKGIVKILGLGSRILPMDAGEINDFESKGKIKSSTSQRTDYRGARRNIERFLLRRDRLHIILNLLNTLPEHYKIEIDFERNGKRCGQFKNYKEPKIQYIQNKVDKKKYDFLFEDTYKEMLCELNIEHKKKNLIPRDWTLYYLRKKALSKKISLEELAWVLLSYNQKRGYEKIEVENKVTKENEIIEELDLRVKDVTGEIDIKGEKYFKVELDGNDRLTYNEYSSLQMTFKNDLKEVKIISQIDDSGNIIGKELTIVDIYPLMIKDVTYERDGEKHNYSLTYQNGWQEIKSPKKYTSRYTNVINKPFEYIVETIYDEKGNIKTQLGKDRKLREPDFSDNSNDWTLLKKKTEKDALTFNWDNNYINEKNEPQRFISPKIYDVLKNDSLSGNRTKIIGGMFQVVERDFYREELAQIISTQKQFHITLEDKKIFEECVNVLYPNNESHARTLLSNKDAIQHLLIEDILLYQRPLKTKKSEIANCKYEVSQLKDVIDKNTGKPIEIVDTETGEIFTKKIPIYHKVVSASHPYFQEFRIWDKLHNLRLIQIEKEVNGKIKTNVDVTEDYFSTETYQKLFLLLNNKNSLNQAGLLKFLDDKFKEKKESSKNFIWNFPEDEELKRNETRVSFAVRFKRCGFTNYANFLTQEKEIALWHYLYSVSYKERNADDYKSIKSFLSKFFEGANIQDNIKEKLVKDFAYYPKFASKYCAYSEKALKKLITFIRMGESQFNSQFDITEFKSDLELINYDKSKILSHIGFNSDNRATLTIVEKQDLELKRQKLYEAIWKHSINERIQEILNRLKTINYSADEIDFSKAINNDNRNRNIPFPKGLFNTFISFDKQEDFTNLNLTQASYLVYGRHSELAEAKYWTSPKEIRDELHQELKQHSLNNPVAEKVILEMMQIVADIWDYYGEGKEKYYSEIHLEVGRELKKSAKEKQSISSNQSDNKAQNKRLRQTLEDFLSKSPYNAISQNSDHFERLKIVEDGASHTKNLDKTFFNDKPYTKKEIEDILKKPFISKEDFEKYKLWIEQGYKSPYTNRMIKISDLFDGKKYNVDHVFPQASVTNDSLSNKVVCEFEVNKLKSSQTGREFINSPKQRSIYCLSHKSEVDIVNDDTYVAIVKSQFSGNKRQILLSKEIPSNFTNSQLNNSQHIARKAMELLSHIVRELGEIEFRSKNLLPVTGEITSKLKRTWKLDEVWRELVSPRFVRMNELTKSNLFGQEQISKSGEKYFDCNIDNTIREKDPSYNIKRIDHRHHALDALVVALCTEEHVNYINNINANATSDNYGKQKQIEKYRETLKRKIMFSKPNKENPNDKDWFFMYPGQVRKSGVDKFGIETVLKKSYFYKDLEFNENYKEMVLSAIQHTIITFKQNLRVVNKTVNLYNSTSNKNKLEKQKDKEVGNKYNWAIRRSLGKNTYYGKVYLGETENKQLHKTLREIYNSNERIIDNKLREKVIAIKNTSNGFDEFEKQVKSTFKNIMIELKVYKVASREFLSGEFNKEKILKITDTGIQKLLLNHLKQFDTVKLPFEDALIYYDYLLEKPEIEAIINNKDSKFETVNDFVAHLRLNGYKYNKVEYKTLNVFIAKITERDFRSEFKEAIDEHPEIAFTIDEIDIMNQPENLKKLNEGKNHTPIIKVRCSTGYGKQRQVSDEPQSVKSKQYIVNDAGSNLYLGFYERHYIDKIGDKKTERKFQDIGLIDLVEKLKQDNDNRKNPLPEKFYDDKKNEYNLKFTISPLDLVFIPNEDEIVNPSLVDFNNLSKDQINRIYKYIDGNANFLPYSVAQPIWKFHDDKKKKEIYNQINEKHSIQVSEKELIKDEFGFGSQQTKNQNMIDGETQIKKICIKLKVDRLGNISI

SEQ ID NO: 22179 - protein, 1455 aa, unidentified
  REGION 1..1455: note = Cas Enzyme sequence
MKRILGLDLGTTSIGWAYVLEGETQAETEIKQIGVRVNPLTVDEQTNFEKGKPLSTNADRTLKRGARRNLDRYQLRRENLIDVLTKGNIINTATKLNEDGKQTTFQTWELRAKAAKERIELDEFARVLLAINKKRGYKSSRKAKNEEEGQAIDGMGIAKKLYEENLTPGQYVFHSMLSGKKAISDFYRSDLQNEFDKVWNFQKQFYPEILTDEFYKELKGKGQKATSAIFWTKYKFNTADIKGLEDKLKNVNTIKFDARTQKKLQAYKWRNDAISEQLDKEQVAYVLTEINNNLNNSSGYLGDISNRSKELYFNQLTVGQYLYNQLIENRHTSLRNQVFYRQDYTDEFEKIWITQAQFHPELTEKFKEEVHDIVIFYQRKLKSQKGLISFCELESNEIEVNGKKKTIGMHVAPKSSPLFQEFKIWQNLNNLLIKKAGSKRRTVKKDDQTYLFEEEKEIFELNIDAKQHIFDELNIKGNLTSKSVIEILGYKPQEWQMNYSQLEGNRTNQALYNAFLKILEIEGYNEDLLKLSDADEINIKDLKTPALEIKEMVKRIFDVLGINTAILEFDAKLEGKEFENQASYQLWHLLYSAEDDTKKYSEDDKLLYGNENIGLKKQLCSKFDFKPEHARILVNITFQDDYGNLSTKAMRKIYPFIKEHKYSEACEYAGYRHSKHSLTKEDIDNRELKPRLELLKKNSLRNPVVEKILNQMINVVNTLIDKENKLLQEQGKKPDFHFDEIRIELARELKKNAVERAELTTNINVAKIAHEKILKLLQTEFGLKNPTRNDIIRYKLYEELKNNNYKDLYTNKYITREILFSKQIDIEHIIPQSKMFDDSFSNKTVVYREINLEKANKTAYDYIESKFGEEKLNEFVKRAENLFESGKKNKEEGISKAKYQKLLKRESEIGDGFIDRDLRDSQYIAKKAKEMLFEITRAVVSTSGQITDRLREDWGLINVLKELNLPKYRALGLTEMEERKFGQKVEVIKDWTKRNDHRHHAMDALTVAFTKHNHIQYLNYLNARKNEKHKEHKNIIGIEAIETEVKMDDNGDKKRVFIEPIANFRQIAKKHLENVIISHKAKNKVVTKNKNKITGKEKPQEVLTPRGQLHKETVYGKYKYYEQKEEKVGAKFDKITIEIVANPLFRQLLVQRLNAYGNDPKKAFTGKNTLDKNPIYLNEEKSEKLPEKVKLVWFEEDFSIRKDVTPDNFKNQKSIDKIIDLGIRRIMEARLKEFGGDSKKAFSDLEKNPIRLNKEKGISIKRVTISGVKNAEALHYKKDHFGKPFLDKESNKIPVDFVSTGNNHHVAIYRDENENLQEKVVSLFEAVARVNQNLPIIDKTFNQQLGWQFLFTMKQNEYFVFPNEKAGFNPVEIDLLDPKNKKEISPNLFRVQKISTKNYVFTNHLETKAVDGDMLKSKKELSSITYNFIQTPSKLEGIIKVRTNHLGDIVDVGEY

SEQ ID NO: 22180 - protein, 1512 aa, unidentified
  REGION 1..1512: note = Cas Enzyme sequence
MKKILGLDLGTNSIGWAVVCHSDTDGQTERKWIEMAGSRIIPMDAAILGDFDKGNSKSQTSERTGFRGIRRLRERVLLRRERLHKVLKLIGFLPQHYIDSLDFSNHSGKFQLGTEVKLPWRKNEIGKYEFLFQNSFNEMLADFAKKQPELVAMGRKVPYDWTIYYLRKKALSEKITKEELAWILLNFNQKRGYYQLRGEEEEEKKNRLEDFYALKVVEVEQTDDKKGKDIWYNVHLENGWIYRRSSNVPLDWKDKIKEFIVTTELNEDGTPKVDKDGCVKRSFRMPKEDDWKLLKKKTEADIERSHKTIGCYIYDTLLQSPQQKIKGKLVRTIERKFYKDELKLILDKQQAFHPELQDRELYKACLDVLYPMNVAHKNNVANRGFVYLFMEDILFYQRPLKSKKSLIDNCPYEENQYIDVTTGEIKKAPIKCIAKSHPLYQEFRLWQFIANIRIYQKEKKVDGKLLTDIDVTTEYLSSKDDYVALYEWLCVRKEIEQKTFLKYPAFGLKKEIENYRWNYVEGKSYPCNETRSLILHYLEKAGISSTFLSTKIEESLWHILYSVEDRIELETALRTFASKYQLSCNFVEVFKKFPPFKKEYGAYSAKAIKRLLPLMRMGKYWKVDAIDGNTAERIEKILSGECDEKILNKVREKTIHLSETSDFQGLPLWLACYVVYNRHSEGKEVAKWKSPEDIDIYLKSFKQHSLRNPIVEQVITETLRVVRDIWKRVEQIDEIHVELGREMKNPSEKRRQMTERMLENENANIRIKALLTEFMNPEYEMENVRPYSPSQQEILRIYEDTVLNGAGDIPEDIEIILKKFKENDTKKRPGKSDFLRYKLWLEQQYCSPYTGEIIPLGKLFTTAYEIEHVIPQSRYFDDSFSNKVICESEVNKLKNNMLGYEFIKKHAGEIVELGFGKSVKIFSVEEYEQFISKNYYKAGSKKSKLLMDDIPEKFIERQLNDSRYISRVVKGLLSNVVREEDANGEYESEAISKNVIVCSGSVTDRLKKDWGVNDVWNNIVYSRFERLNRLTESQQFGHWENREGKRFFQTELPLEYQKGFSKKRIDHRHHAMDAIIIACATRNHVNYLSNESASKHARIARYDLQRMLCDKSKADGGGNYKWIIQKPWATFTQDVYRTLLDIIVSFKQNLRVINKMTNYYQAYDDAGKKVFKKQKKGDSWAIRKSMHKDTVFGQVNLRKIKEVRLSVALESPEKIVDKKIKEKVLQLFAYQYDKKKIEKYFKENASLWKEVNLAKIPVYYFTDESSELLVAVRKNLDTGFTEKKIRESVTDTGIQKILLNHLSNKGDKPELAFSPDGIDEMNRNLVILNGGKPHQPIYKVRVCEPLGNKFKVGTNGNKSAKYVEAAKGTNLFFAIYVTDDGKRTYETIPLNVVIEREKLGWLPVPEKNDKGKNLLFWLSPNDLVYLPTEEELMNGIISDSIDRNRIYKMVSCTGNEGHFIPENISNPIIPTLELGSNNKAQRAWTDEMIKEKCIPIKVDRLGQITEIINKIR

SEQ ID NO: 22181 - protein, 1512 aa, unidentified
  REGION 1..1512: note = Cas Enzyme sequence
MKKILGLDLGTNSIGWAVVCHSDTDGQTERKWIEMAGSRIIPMDAAILGDFDKGNSKSQTSERTGFRGIRRLRERVLLRRERLHKVLKLIGFLPQHYIDSLDFSNHSGKFQLGTEVKLPWRKNEIGKYEFLFQNSFNEMLADFAKKQPELVAMGRKVPYDWTIYYLRKKALSEKITKEELAWILLNFNQKRGYYQLRGEEEEEKKNRLEDFYALKVVEVEQTDDKKGKDIWYNVHLENGWIYRRSSNVPLDWKDKIKEFIVTTELNEDGTPKVDKDGCVKRSFRMPKEDDWKLLKKKTEADIERSHKTIGCYIYDTLLQSPQQKIKGKLVRTIERKFYKDELRLILDKQQAFHPELQDRELYKACLDVLYPMNVAHKNNVANRGFVYLFMEDILFYQRPLKSKKSLIDNCPYEENQYIDVTTGEIKKAPIKCIAKSHPLYQEFRLWQFIDNIRIYQKEKKVDGKLLTDIDVTTEYLSSKDDYVALYEWLCVRKEIEQKTFLKYPAFGLKKEIENYRWNYIEGKSYPCNETRSLILHYLEKAGISSTFLSTKIEESLWHILYSVEDRIELETALRTFASKYQLSCNFVEVFKKFPPFKKEYGAYSAKAIKRLLPLMRMGKYWKVDAIDGNTAERIEKILSGECDEKILNKVWEKTIHLSETSDFQGLPLWLACYVVYNRHSEVKEVAKWKSPEDIDIYLKSFKQHSLRNPIVEQVITETLRVVRDIWKRVEQIDEIHVELGREMKNPSEKRRQMTERMLENENANIRIKALLTEFMNPEYEMENVRPYSPSQQEILRIYEDTVLNGAGDIPEDIEIILKKFKENDIKKRPGKSDFLRYKLWLEQQYRSPYTGEIIPLGKLFTTAYEIEHVIPQSRYFDDSFSNKVICESEVNKLKDNMLGYEFIKKHAGEIVELGFGKSVKIFSVEAYERFVGENYYKAGSKKSKLLMDDIPEKFIERQLNDSRYISRVVKGLLSNVVREEDANGEYESEAISKNVIVCSGSVTDRLKKDWGVNDVWNNIVYSRFERLNRLTESQQFGHWENREGKRFFQTELPLEYQKGFSKKRIDHRHHAMDAIIIACATRNHVNYLSNESASKHARIARYDLQRMLCDKSKADRGGNYKWIIQKPWATFTQDVYRTLLDIIVSFKQNLRVINKMTNYYQAYDDAGKKVFKKQKKGDSWAIRKSMHKDTVFGQVNLRKIKEVRLSVALESPEKIVDKKIKEKVLQLFAYQYDKKKIEKYFKENASLWKEVNLAKIPVYYFTDESSELLVAVRKNLDTGFTEKKIRESVTDTGIQKILLNHLSNKGDKPELAFSPDGIDEMNRNLVILNGGKPHQPIYKVRVCEPLGNKFKVGTNGNKSAKYVEAAKGTNLFFAIYVTDDGKRTYETIPLNVVIEREKLGWLPVPEKNDKGGNLLFWLSPNDLVYLPTEEELMNGIISDSIDRNRIYKMVSCTGNEGHFIPENISNPIIPTLELGSNNKAQRAWTDEMIKETCIPIKVDRLGQITEIINKIR

SEQ ID NO: 22182 - protein, 1063 aa, unidentified
  REGION 1..1063: note = Cas Enzyme sequence
LFIENIRIYQKEKKVDGKLLTDIDVTTEYLSSKDDYVALYEWLCVRKEIEQKTFLKYPAFGLKKEIENYRWNYVEGKSYPCNETRSLILHYLEKAGISSTFLSTKIEESLWHILYSVEDRIELETALRTFASKYQLSCNFVEVFKKFPPFKKEYGAYSAKAIKRLLPLMRMGKYWKVDAIDGNTAERIEKILSGECDEKILNKVREKTIHLSETSDFQGLPLWLACYVVYNRHSEGKEVAKWKSPEDIDIYLKSFKQHSLRNPIVEQVITETLRVVRDIWKRVEQIDEIHVELGREMKNPSEKRRQMTERMLENENANIRIKALLTEFMNPEYEMENVRPYSPSQQEILRIYEDTVLNGAGDIPEDIEIILKKFKENDIKKRPGKSDFLRYKLWLEQQYRSPYTGEIIPLGKLFTTAYEIEHVIPQSRYFDDSFSNKVICESEVNKLKDNMLGYEFIKKHAGEIVELGFGKSVKIFSVEAYERFVGENYYKAGSKKSKLLMDDIPEKFIERQLNDSRYISRVVKGLLSNVVREEDANGEYESEAISKNVIVCSGSVTDRLKKDWGVNDVWNNIVYSRFERLNRLTESQQFGHWENREGKRFFQTELPLEYQKGFSKKRIDHRHHAMDAIIIACATRNHVNYLSNESASKHARIARYDLQRMLCDKSKTDGGGNYKWIIQKPWTTFTQDVYRTLLDIIVSFKQNLRVINKMTNYYQSYDDGKKVFKKQKKGDSWAIRKSMHKDTVFGQVNLRKIKEVRLSVALESPEKIVDKKIKEKVLQLFAYQYDKKKIEKYFKENASLWKEVNLAKIPVYYFTDESSELLVAVRKNLDTGFTEKKIRESVTDTGIQKILLNHLSNKGDKPELAFSPDGIDEMNRSLVILNGGKPHQPIYKVRVCEPLGNKFKVGTNGNKAAKYVEAAKGTNLFFAIYETDAGKRTYETIPLNVVIEREKMGWLPVPEKNNKGEKLLFWLSPNDLVYLPTEEELMSRILSDKLDRSRIYKIVSFTGNRLYAIPYNVSNMIWDKNEYTQLNKVESTDMKESIKEICMPINVDRLGHITEIIIK

SEQ ID NO: 22183 - protein, 1513 aa, unidentified
  REGION 1..1513: note = Cas Enzyme sequence
MEQKYVLGLDIGTNSIGWAVINALKDESTMNQLNGIYLAGVRIIPMDAAILGDFDRGNSKSQTADRTRSRGIRRLYERSQLRRERLHRVLNVLGFLPIHYARQLDRYGKYLAGTEPKLSWYKDGQGHWTFLFQESFNEMLADFCQKHPELLSGRQKIPYDWTIYYLRKKALTQKIRKEELAWILLNFNQKRGYYQLRGEEEQERSSKTRQYFDSQIVTDIIDTDQQYKGMKVLSVVLESGIKGKIFRKEIPDWIGQKKDVIVIIDIDKDGNDKYDEKGDLSCRFKVPTEQEWDEQWELIKAKTQKDLDNSGETVGAYIYDTLLQMPKQKIRGKLVRTIERRYYKDELRQILEKQKEFHPEFCDRALYEACIEELYSQNDAHRNLISNRDLVYLLADDILFYQRPLKSKKSLIADCPYEAYTHTDKDTGVIQHFGIKCIAKSHPLFQEFRLWQFLSNLRIYQKEKTMDGKLCFDVDVTSEFLKNEKDYTDLFDWLNRQKSIKQDTFLKCPLFRLKKNDIGRYRWNYVEDKTYPGNETHALILERLEKAGIPTDFLTREKEEALWHILYSVSDKEELGKALDSFAEKQGLDRNFTDAFLKTPPFPKEYGSYSAKAIKKLLPLMRMGKYWNEAYIDKQTRNRIDKIVAGEYDENIRTRVREKAIHLEDVSSFKGLPLWLACYVVYDRHSEAKDIQKWEKPADIDDYLKKFKQHSLHNPIVEQIILETLRTVRDIWQQVGHIDEIHVELGREMKNPKDKRAKMTQQIQENENTNLRIKALLTEFMNPEFEIENVHPYSPSQQDLLRIYEEGAWSSVDEVPDDIAVIVKKFNESDAKKRPTTSEVLRYKLWLEQKYRSPYTGEMIPLGKLFTPAYEIEHIIPQARYFDDSFSNKVICESEVNKLKSNMLGHEFISKHHGEKVQLPGGKHVEIFSVGSYEQFVKDNYSRNVAKMKKLLLDDIPEQFIARQLNDSRYISKLVKSLLSNIVREEGEQEETSKHVIVCTGSVTDRLKKDWGINEVWNKIILPRFLRLNELTGYNRFTSVNTSGNVIPAMPLELQKGFSKKRIDHRHHAMDAIVIACASRNMVNYLSNESASKNAKISRYDLQRLLCDKQKTDDKGNYRWFIKKPWDTFTQDVYLILQNVIVSFKQNLRVINKTTNYYQHYVDGKKKEIPQKKGDSWAIRKPMHKETVFGEVNLRGIKVVPLKEALKNPKAVVEKDLKKKLKELLAQNLNEKQIKKYFETNKDTWQDVDLKKIKVYYFSKETKDRFFAVRKSLDSSFDKKKILGSVTDTGIQKILLRHLEANGNNAELAFSPEGIETLNKNIIELNDGKWHQPIYKVRVYGKADKFAVGQTGNKSLKYVETAKGTNLFFAVYETEQEEPNTGELIKKRSYATIPLNVVIERQKRGLPPAPEDENGNLPKFVLSPNDLVYVPTKEEVLRKKINFPLNRERIYKVVSFSENRLFTIPNHIAKVVVDGEEYNKKNIIELTDENQSIKEICIPIQVDRLGNIIKKLL

SEQ ID NO: 22184 - protein, 1506 aa, unidentified
  REGION 1..1506: note = Cas Enzyme sequence
MKVVVGIDVGTNSIGWAILINDEKGVCFIDQAGSRIIPMDATVLGNFDKGNSTSQTSERTRFRIIRRLYERCILRRERLHRVLNILGFLPEHYARQIDFVHNSGKFIKGTEPKLAWTKDPMGNNVFLFQESFHEMLADFARHHPGFLSNGRKVPYDWTLYYLRKKALTQSISKEELAWILLNFNQKRGYYQLRGAEEVEEKNKQIEYRSLKVIKVEATEDKKGKGIWYNIYLENGWLYRRSSSVSLKSWEGMTKDFIVTTELNDDGTPKMDKQGAVKRSFRAPNEDDWMLLKVKTENDINASHKTIGEYIYDTLLERPQQKIRGKLVRTVERKFYKDELRRILEVQATFHPELQDRALLVQCIQELYPHNEGHRNLITGRDFIHLFIDDILFYQRPLKSKKSLVGNCPYESHKGIDKETGEIKEYGVKCIAKSHPLYQEFRLWQFLSYLRIYQKEKYVDGKLKTDVDVTNEFITSEEEMAALFEWLNERKNIDQKSFLKYPPFGLKKNAQNEYRWNYVEDKTYPCNETHAAISTRLAMANISVRLSPQVEEHLWHLLYSISDKEELRKALTTFANKQQWETDSFVESFIKMPPFEKDYGAYSAKAIKKLLPLMRLGKYWLEEAIDTNTRMRIEKLIHGEADESIGQRTREKTIHLKTPEQFKGLPPWLACYIVYDRHSEAQEITRWESPADIDRYLNNFHQHSLHNPIVEQIVLETLRVVRDIWKKTGQIDEIHIELGRNMKETASKRAQQTARTIENENTNLRIKALLAEFVNSEFGIENVRPHSLSQQNLLRIYEEAVLQENADQLPDDITDFLKKLRENKQPTRNEFIRYKCWLEQKYCSPYTGEIIPLSKLFTPAYEIEHIIPKARFFDDSFSNKVICEAAVNKLKDKQLGYEFIKNHHGQRVETGFGGTVQVFTEEAYEAFVKDHYRNNRTKMKKLLMEDIPDKFIERQLNDSRYISTIVKCLLSNIVREKDEQGDLEQEAISKNVIVCTGGITDRLKKDWGLNDVWNDLVAPRFERLNRLSGKTCFGHWEQTEGKRFFRTELPLEYQRGFSKKRIDHRHHAMDAIVIACATRNHINYLNNESARKDAKISRGDLQRLLCDKRGTDDKGNYNWIIRKPWKTFTQDVRQTLENIIISFKQNLRVINKCTNHYTHYDANGEKIVDKQRKGDSWAIRKPLHKDTVFGRVNLRKVREVRLSLALEMPQMIVDKKLKTKILQLIAYKYDKKRIERYFKENTFDWKGYNLSKIPVYYYTDTIEPLVASRKPLDTSFTEKKIREKVTDTGIQKILLAHLANKNNETELAFSPEGIEEMNRNILILNDGNPHQPIYKVRICESLGKKFPVGISGNKASKYVEAAEGTNLFFAIYTAADGKRTYATFPLNIVIEREKQGLKPVPEQDEAGNQLLFWLSPNDLVYLPTPEEIETGRIGEIDKRRIYKMVSSTGNQCFFIPASVSNGIIQTLELGANNKAEKSWEGEMIKSICLPLKVDRLGNIIQVGKPTL

SEQ ID NO: 22185 - protein, 1396 aa, unidentified
  REGION 1..1396: note = Cas Enzyme sequence
MKKILGLDLGTNSIGWAVVNEKEDDREKSSITKVGTRKVSLTSEEQNNFNKGKSAGTNVKRTLKHGARINLQRYKLRRDALIRVLKENNFITDDTLLSENGNNTTFETYRFRAQAADSEVTLEQLARVLLMINKKRGYKSNRKAKSKDESGQLIDGMDIARQLYDENLTPGQYTLSLIKQGKKKVPDFYTSDLNNEFERIWSFQKQFYPDLLTDDLKTELNGKDEKGVGTICSDKFGIVGIKRNTKGWEQKKEDYVWRAESLEKKMDLERLTIVFQKICGQIKNAGGYLGSISDRSKELYFSGQTVGQYKMSELINNPNRSIKNQVFYRQDYLDEFERIWETQATFHKDLTPELKHEIRDIIIFYQRPLKSQKKLVAYCELESKQVEVEVNGKKKKVTIGQRVCPKSSPLFQEFRIWQQINNIQVSGYIIPESQTDLFGNTTANKKGRRFLLQDEKEILFKELNLKEKMSKTEILKLLFDNYKELDLNYKEVKGNTTLAKLFQAYKTIIEQSGHELNNLSNKSAGDIIDIIHKIFDGLGFNTDILAFDSSIQGKAFEKQPLYRLWHLLYSFEGDKSKTGNEKLIKKISDLYGFDKEYASILAGIVFEPEYGNLSAKAIRKILPFMKDGLEYSDACLYAGYRHSKRSLTKEEINSKQLADHIELLPRNSLRNPVVEKILNQMINVVNAVIVEYGRPDEIRVEMARELKLNNVRREECIRTINKSTSENESYRKKLQTELEGMEYVSRKDIIKYRLYLELESNGFHTLYSNTFIPLEKLFTREFDVEHILPQAKLFDNSFANKTIEKRSVNQEKGDRTAYDYVYSKYHEKGLEDYKKRVEDLYKKGKISKTKRNRLLTQEQDIPKDFLNRDLSNTQYIARKACEILESVVKTVTTTTGSITSRLREDWQLVDVLKELNWDKYDKLGLTEIIKGRDGQRIRHIKDWTKRNDHRNHAMDALTIAFTKPSFIQYLNNCSARSDKNSIISKIEQKELYRTADGKTKFLPPMPIDEFRAEAKRHLENILVSTKAKNKVVTRNVNVTKTKRTETNKREQVQLTPRGELHNDTIYGRRKFYDTDNEKVNASFDVSKIMTVADKRYREALLKRLEQFDGDAEKAFTGKNSLEQNPLYVDELHTKKVPDMVKTVKFKTIYTQRKGISDELKIDKVLDKRIRTILEERLAEFNGDAKKAFSNLDENPIWLNKEKGISIKRVTINSGLKDLIALHDKHDNNGRLILDKAGRKQPSDFIYTDGNHHVAIFCDSEGNIQEHLVSFYEAVARAVQHLPVIDKNYNKDKGWQFMFTMKQNEYFVFPNKETGFDPKEIDLFNPDNYEVISRNLYRVQKLSSKDYVFRHHLETTVNYKKELRGITWKRIRSLEHIRNIVKVRINHLGQIVDVGEY

SEQ ID NO: 22186 - protein, 1506 aa, unidentified
  REGION 1..1506: note = Cas Enzyme sequence
MKVVVGIDVGTNSIGWAILINDEKGVCFIDQAGSRIIPMDATVLGNFDKGNSTSQTSERTRFRIIRRLYERCILRRERLHRVLNILGFLPEHYARQIDFVHNSGKFIKGTEPKLAWTKDPMGNSVFLFQESFHEMLADFARHHPGFLSNGRKVPYDWTLYYLRKKALTQSISKEELAWILLNFNQKRGYYQLRGAEEVEEKNKQIEYRSLKVIKVEATEDKKGKGIWYNIYLENGWLYRRSSSVSLKSWEGMTKDFIVTTELNDDGSPKMDKQGAVKRSFRAPNEDDWMLLKVKTENDINASHKTIGEYIYDTLLERPQQKIRGKLVRTVERKFYKDELRRILEVQVTFHPELQDRALLVQCIQELYPHNEGHRNLITGRDFIHLFIDDILFYQRPLKSKKSLVGNCPYESHKGIDKETGEIKEYGVKCIAKSHPLYQEFRLWQFLSYLRIYQKEKYVDGKLKTDVDVTNEFITSEEEMTALFEWLNERKNIDQKSFLKYPPFGLKKNAPNEYRWNYVEDKTYPCNETHAAISTRLAMANISVRLSPQVEEHLWHLLYSISDKEELRKALTTFANKQQWETDSFVESFIKMPPFEKDYGAYSAKAIKKLLPLMRLGKYWSEEAIDTNTRMRIEKLIHGEADESIGQRTREKTIHLKTPEQFKGLPPWLACYIVYDRHSEAQEITRWESPADIDRYLNNFHQHSLHNPIVEQIVLETLRVVRDIWKKTGQIDEIHIELGRNMKETASKRAQQTARTIENENTNLRIKALLAEFVNSEFGIENVRPHSLSQQNLLRIYEEAVLQENADQLPDDITDFLKKLRENKQPTRNEFIRYKCWLEQKYCSPYTGEIIPLSKLFTPAYEIEHIIPKARFFDDSFSNKVICEAAVNKLKDKQLGYEFIKNHHGQRVETGFGGTVQVFTEEAYEAFVKDHYRNNRTKMKKLLMEDIPDKFIERQLNDSRYISTIVKCLLSNIVREKDGQGDLEQEAISKNVIVCTGGITDRLKKDWGLNDVWNDLVAPRFERLNRLSGKTCFGHWEQTEGKRFFRTELPLEYQRGFSKKRIDHRHHAMDAIVIACATRNHINYLNNESARKDAKISRGDLQRLLCDKRGTDDKGNYNWIIRKPWKTFTQDVRQTLENIIISFKQNLRVINKCTNHYTHYDANGEKIVDKQRKGDSWAIRKPLHKDTVFGRVNLRKVREVRLSLALEMPQMIVDKKLKTKILQLIAYKYDKKRIERYFKENTFDWKGYNLSKIPVYYYTDTIEPLVASRKPLDTSFTEKKIREKVTDTGIQKILLAHLANKNNETELAFSPEGIEEMNRNILILNDGNPHQPIYKVRICESLGKKFPVGISGNKASKYVEAAEGTNLFFAIYTAADGKRTYATFPLHIVIEREKQGLKPVPEQDEAGNQLLFWLSPNDLVYLPTPEEIETGRIGEIDKRRIYKMVSSTGNQCFFIPASVSNYIIQTLELGANNKAEKSWEGEMIKSICLPLKVDRLGNIIQVGKPTL

SEQ ID NO: 22187 - protein, 1163 aa, unidentified
  REGION 1..1163: note = Cas Enzyme sequence
QYYPEILNDELLKQLKGRNKKSTIEVFRTCGIDIADIKGKDKRKVSFSLRADALSKQLSIEEVAFVLVEINGAISGASGYLGAISDRSKELYFEHLTVGQYLMKQLAANPNYSFKNKVFYRQDYLNEFEAIWENQAKFHKELTPELKHEIRDIIIFYQRRLKSKKSLVAYCELESFDIEINDSISGKIKIKRVGSKVCPKSSPLFQEFRIWQTLQNVKVIDRESYDETVLTLEEREMLWRELSVKSKLSKKEALDLLRGKGANRRFDLNHEELTGNTTQAKLVDKFREILVMSGHDVDFSKMRGDEVRITLVTLFKALGWNIGILDFNSSLPGGELEKQDSYKLWHLLYSYDDSMSKSGIDGLKTKIAELCNFDKEYAAVLAKVTFTPDYGNLSARAIRKILPYLREGNVYSKACELAGFRHSKRSLTREEIDAKQLADRLEILPRNSLRNPVVEKILNQMVNVVNALIERYGHPDEIRVEMARELKNDAKRREIISKNNKKAETDNRNFREVLQAEFGIANPSKNDIIRYRLYKELENRGFRTLYSDVEISRQDLFSNKYDIEHIIPQALLFDDSFSNKTLELRDVNIAKGNNTAMDFVAMRYDAEQYKARVLDLFKCGAISLAKKNKLLMRRQDIPTDFLNRDLVNTQYVARKAVEMLEKITKSVVCTNGAITAVLREDWQIVDVIKELNWDKYDKLGLTEVVENRTGQKIKKIKDWTKRNDHRHHAMDAIAIAFTTRGIIKYLNDLSSMGEGKKNIRLKYQYCDSHGKWLFLPPIAPIGAFRAEVKKALQCILVSIKSKNKVMTRNINKIKTKGGVKSVVQLTPRGQLHKEYIYGRIWQYVTKEELIGSAFDEAKIMTVANAAYRTALLDRLLQYDDDPCKAFTGKNSVSKNPVYIDARHLQKVPERVKTVLLAPQFVIRKPIDPNLKINKVIDRGIRRILQARLTEYGGDAAMAFSNLDANPIYLNKEKGIIINKVRVYENVPGVAIHFKRGRNGEILITDEQPVDYVNLRNNHHSAVYCDDKGALHVNTIPFLEVVERVGQGQSAIDKEFNHDKGWKFLFSMKINEYFVFPNVETGFNPNEIDLTDPDNYMIISPNLYRVQKLSEGYYVFRHHLETTVDESKVLKDYTFKRIQSDNNLKGIVKVRLNHLGEIVAVGEY

SEQ ID NO: 22188 - protein, 1379 aa, unidentified
  REGION 1..1379: note = Cas Enzyme sequence
MKRILGIDLGTTSIGWAYVLEAEAANEQSEIVRLGVRVVPLSVDEETNFEKGKSITTNADRAARKSMRRNIDRYQMRRDELIAVMREEGWITEETTLSEHGTRSTFESLRLRAEAVEKEVTLAQLARILLQINKKRGYKSNRKADSQEEGPVIDGMDVSKQLCERSMTPGQWVYERMQRGKMTVPAFFRSDLQQELDHIWTLQHACHSAWMTDELRVALTQADSRRAQQLMDAHGVIPETVKGKERRQILYGWRSAAAMGGLPAAQLAAVLIQIVRDINASSGYLGQIGDRSKELYFRNETVGQYMWRHIQANPHESLKTLVFYRKDYQNEFDALWASQARFHPELTERLRKRLRHILFFQRPLKSKKGLVNRCELVHYSIPENAADGRGRRRDVGPKVCPKSSPLFQEFRMWQVLNNLMLIHVPTQEVRPLADEEKEMLAAELCYRVRMKKNDVLKLLCDHWREWDLNYKELEGNRTLAAFYKVYEQVIAQTGHGEYDFEKMRAAKVRELVGGVFGGLGFEVGLLSFDAELDGLAYEQQPLYRLWHLLYSYEGDSSATGDKCLLKRLCALTKMDEDVARLFLTVHFEDDYGSLSTKAMRRILPFLKKGYMYDVACEQAGYCHSVRSRTREELDKRTYKDRLDLLPSKSLHNPVVEKILNQMIHVVNGVTSAYGKPDEIRIEMARELKSCAAERERRTASIAKATKENAEIEKILRQEFGLSYVSRNDIVRYKLYEELKENGYKTLYSNTYIPKEELFSKAFDIEHIIPQARLFDDSFSNKTLEARQVNIEKKDRTAWDFVNDCYGSEGAALYRCRVDELFNKGIISKDKHKYLLMPGDKIPEDFINRDLRNTQYIVRKALELFEDFVPGVLATSGAITSRLREDWGLVNVMKEMNLPKYERQGVVETCSDREGHVFKRIQDWTKRNDHRHHAMDALTIAFTKRAYIQYLNHLNARKDVTSQAYAIQQKEMECDGDHRWRFKCPFGDRSRFRREAMRQLDQILVSIKSKNKVLTPSLNRSKKRGGYNRKIEWTPRGPLHKETVYGRIRRYVTKNVRVGSSFTQAEIEKVANTCFRRALLARLAEFGGDPKKAFTGKNSLEKNPLYCDEAHTQTVPLLVKLVELEEVGTIRKEITPDLKVEKVVDRRIRTLLEERLALYGQDAKKAFSNLGENPIWLNQEKGISVKRVTIIDKSDVVSIHEKRDVDGRLMHDEHGRTIPCDYVQTQNNHHVAIFCDAEGNLQEHIETFFDVVERVRQQRIEGRTVEVIDKNYKRDEGWQFLFSMKINEYFVFPDEKTGFDPRSVDLTDPANYALVSPHLFRVQKLSSKDYYFRHHLETTVEDTKALKDVTWKRVRTLEKLKNIVKVRVNHIGQIVAVGEY

SEQ ID NO: 22189 - protein, 1393 aa, unidentified
  REGION 1..1393: note = Cas Enzyme sequence
VENVKHTSMKKILGLDLGTNSTGWALVNEAENTAEKSSITKLGVRIIKYDNFVNTETGSESKEPEKDFCGGKGISPNAGRTKGRSARRNLQRYKLRRANLIEYLKKCGLITDSAVLCENGNRTTFQTYRLRAMAVTEEISLEELSRVFLMINKKRGYKSSRKAKLPDEGQLIDGMAVAEQLYENDLTPGQFVFSILQQGKKSIPEFYRSDLQNELNRIWDHQKQFYPEILTDEFRKQIEGEGRPNTAKMFLGKYKIYTADIKGKDKRLQAYQWRSNALTSQLSIDEVAFVVSELNGAINNASSYLGAIGDRSKELRFNKLTVGQYLMKQLDKDPNYSLKNQVFYRQDYLDEFEAIWEKQAQYHPELTPELKKDIRDIIIFYQRPLKSQKGLVSFCEFESRQIEVNVDGKQKLRTIGCKVCPKSSPLFQEFKIWHTLHSLIVKEKKTNAERFLYQEEKETLFAELNIKETLSKLDALKLLYKNYKDLDLNYDKIEGNRTQAALFKAYQTIISMTGHGEYDFSKMMSDEVMEIVEGVFSGLGYNTNILHFDAENELFDKQPMYMLWHLLYSYEGDKSSTGNKSLIDKIFKLCGFEKEYASIIANIIFQPDYGSLSTKAIRKILPRMKEGNEYSLACEYAGYRHSQRSLTKDELDNKVYKDHLDLLPRNSLRNPVVEKILNQMINVVNFVVDAYGKPDEIRIELARELKKSSKERKEMTMAINKTTADHEKYRQILQKEFGLTNVTRNDIIRYKLYLELKSNGYKTLYSNTYIPQEKLFSKEFDIEHIIPKAKLFDDSFSNKTLESRRVNIEKSNLTAYDYVLGVYDEKGINDYEIRIENLYKSGIISKAKRDKLMMKEVDIPSGFIERDLRDSQYIAKKAREILEELVKFVVPTTGTITDRLREDWQLIDVMQELNWEKYDKLGLTEIVKDKDGREIRRIKDWTKRNDHRHHAMDALTVAFTKRSYIQYLNNLNARSDKSGSIYAIEQKELYRDKHGKLRFNPPMPLDVFRAEAKRQLENTLISIKARNKVLTQNVNITKTKKTESGYRKKVQLTPRGQLHNETFYGAIKWYVPKLESVGSGFNVEQIALVANKRYREALLTRLAACGNDPKKAFTGKNSLEKNPLYLDELHTQQVPTKVKTVTLETVYTTRKDISSDLKIEKVIDRKVRSILKERLKEFGGDPKKAFSNLDANPIWLNKEKGISIKRVTITAVSKAEPLHAKRDHFGKYILDANGAKQPVDYVNTGNNHHVAIYRDEKGVLQERVVSFYEATASASVGLPVVDKEYRKSEGWTFLFSMKQNEYFVFPNEKNGFNPNEIDLMDPDNYALISPNLFRVQKITSKDYVFRHHLETTVEDRKELQNITWKRFQSLTNLDKLVKVRVNHIGQIVSVGEY

SEQ ID NO: 22190 - protein, 1455 aa, unidentified
  REGION 1..1455: note = Cas Enzyme sequence
MARVLGLDLGTASIGYSLRDTDKGTNITEQLVRFGSIIFQKGVGNSKTGEFSYAAERTKHRASRRLYQARRYRIWETLATLIEFGFCPLSIEDLDRWRVYDKARNLKRRYPVDAANFEQWVRLDFDGDGKSDYSSPYQLREELAIVQLDFSQEINRFKLGRALYHIAQRRGFKSSKGETLKEQEDAVKDDIANEMSLESVSLKKSEEKKSKDLASYMEENALHTVGCAFAQLEREGVRVRASKYQAVRSQYKEEIKYIFEFQNSLDIDGDFFKRIYSDRKDGCIFYKRPLRSQKGLVGKCTLEPAKSRCPISHPEFEKFRAFAFINNIQYRRATEDEWLNLTAEQKLKLYNDKFLQAKPSFKFEVIRKWIEKEIGLLQDYHLSKEKRTINYSDRTNITGCPISGRMKALLGEKWEEYKQQSDKIRKNRNGKEHVVSYMMEDIWHVCFSYDDEEAVSEFAKSLKFDDKQVKQFLNLWIAIPQGYAMLSLKAIRNINRFLVPKRNNPLYKGYIYTEAALLGKMPEILGEKQWADNEKSILGAINGWINQNREEKRILNIVNNLISAYKSLEYAEQFAYKNVEYQLDDSDKKDIEKYTIEAFGQKSWEKETQEMKDKVLKDVGRMYQQFFFTSKRDYFRLPKLGDTIKLYLSNNFPEFYCANGFVESQTGLQCRCAACKKLNKLYHPSMVEFYKPANEQEFEYGGVMLSKKLLANPVIGAFKNPMAMRTLHQLRNLINYFIKEGLVEEDTRIVVETARDLNDANMRWAIEEYQREREKENKAILEAIKGLKGEEKNNDDIDKARLLIEQNPEYLFNKDRYEVESGDDTNNKKKKAMGKATDFLYKKDVAKYRLWLEQGMQCIYTGKTISVSELFDENKTDFEHTIPRSKSFDSSLANLTVCDAYYNRHIKKNCIPTELPNYEEIEHRLQPWKKKVEQLKNNVEFWRQKSKQAQTKDAKDKAIRQKHLWQMELDYWQDKLSRFTMTEVTSGFKHSQLNDTRLITKYAYHYLKSVFSKVEVQKGLVTADFRKMLGVQSADEKKDRDKHSHHAIDATILSLIPVAAKRDKILELFYKIQEEKKLYFNTEYWEKELQKEIRSCQIGNISSLPDYIEENILINHISKDQTLVPAKRKMRTRGKVIWQRDEDGHFCMDRDGCKMPKYWIKGDCIRGKLHGDSFYGAIKQSKKKGEKDYLTSYEDISYVIRRELKYKKTPTDKGFKDLDDLHMSIVDEGLFNIIKQQCDGKSFKEACDDGFYMLNRDGDKVNKIRHIRCYTSVKKPLAIKRQSYLSDKEYKQSYYAEVGDLYAMCKYCNADKTKVRYEVINLFDITENRRYGYSIAEVLEDDKKKEKYYLVAVLQAGKQVILYKNDDELESIIEMSNDKLSDRLYVISGFESPYRIILKKHICAKSDSELGKGESIKSFNELPDKIRQSVNAINYFLEDIDFYISPDGLITFKND

SEQ ID NO: 22191 - protein, 954 aa, unidentified
  REGION 1..954: note = Cas Enzyme sequence
LINENREEKRILNIVNNLISAYKSLEHEEQFAYKNNEYQLDELDLKDIEMYTRDSFGENSWEKETQENKNKILEQVADKYQQFFSTSRRDYFHLPKSGETLKTYLSNNFQTLHCDNNFVNPQNEDLPCRCDACKKLNKLYHPSMVEFYKPAKTDKDVGLKLLESPVIGAFKNPMAMRTLHQLRKLVNHFINEGIIDEETRIVVETARDLNDANMRWAIDKYQREREIENKEIAKAIKELRGEERNDDDIDKARLLIDQNPDYLFDKVRYDAEKEEEDSGNKKKKKFIGKTKDFQYKKDITKYKLWLEQGMECLYTGKIINISNLFDENATDFEHTIPRSQTFDNSLANLTICDYYYNRHIKKNRIPTQLENYDKEVVINGQSYSAIKPRLEKWEQKVEQLKNNVEFWRYKSKQAQTKENKDDAIRQKNVWQMELDYWRDKLSRFTMTEVTSGFKHSQLNDTRLITKYAYHYLKSVFNKVEVQKGSVTADFRKMLGVQSVEEKKSRDKHSHHAIDAAVLSLIPVAAKRDKMLELFYKIQEENKLNRNTDVLEQELQKEIRTCQIKNVSNLAQYIEENILINHIAKDQTLTPAKRKARKRGKVIGIKDENGKYLLDDKGEKIPKYWIKGDCIRGQLHGDTFYGAITQGKKDENGCLLRDENGKIISDEQIFYVVRRELKFKKNDQDKGFKTLDELKISIVDKSLFEIIEKQCEGKTFKDACEEGFWMIDKKGNRVNRIRHIRCYTSIKNPLSIKKQTYLSDKEYKQTYYSENAENTLYALYWDGKNKEKGFECRNLFDVALILKTNNPKTVNDFFEPNKQIGRGRNKIDIPLYAILKPETKVIFFGKDKEELKELSNNELSKRIYKMNRIFSSEDGRIQFYHHLDARDDKKLLADFPEKTIWFDGKPTGKRQKNGFAKFSPDFVAPRLLLAPSNFNFIIEGKDFEMNLDGTMTFKY

SEQ ID NO: 22192 - protein, 1479 aa, unidentified
  REGION 1..1479: note = Cas Enzyme sequence
MAKNILGLDLGTNSIGWAHVMEGENSENSSIVQIGVRVNPLTTDEQTNFEKGKPITTNADRTLKRGMRRNLDRYQLRREHLLNALRKANIITAESKLAEDGKNTTHETWRLRAKAVTEKIEKDELARVLLAINKKRGYKSSRKAKNEEEGHAIDGMAIAKRLYEENLTPGQLSFQLLLEGKKKLPDFYRSDLQAEFDKVWNKQRTYYPDFLTEELYIALKGQGKENTRKRILAIANVYTADIKDMEDGLKNEKTIKLPTREKKKLQAYKWRNDAVTQQLSQEQVAFVLTEINNNINQSSGYLGEISDRSKELFFNKLTVGQYLYNQLLQNRHIRLKNQVFYRQDYMDEFEAIWEEQRKHHPELTDELKEEIRDIIIFYQRKLKSQKGLISFCEFESKEVVINGKKSTIGARVAPKSSPLFQEFKIWQNLNNVLVRKKGSKKRKAQDTLTNFSEDAEVLELSLEAKETLFEELNLKGNLSSARIIEILGHKPADWEVNHSQLEGNRTNQALYNAYLKILEIEGYNEDLLKLSDKDDINVADLKTPAREIKAMVKSIFEVLGIDTEILEFNAELDGKDFEQQKSYQLWHLLYSAEDDDKKYSEEDILTYGQEHIGLKKKLCEKFGFQPEHAKILVNVSFQDDYGSLSTKAMRKIYPYIKENKYSTACAYVASDYKKLSQKEGDYFDVLSKKYRHSNWETKEENEQRLLKDRLDLLPKNSLRNPVVEKILNQMINVVNALLDKKRKTEPNFKFDEIRIELARELKKNAKERAEMTKEINQAKGKNEKIVETIRKDFGILNPTRNDIVKYKLYQELAFNGYKDLYTNTKIDYHKLFSKEYDVDHIIPQSRLFDDSFSNKVLVPRQANLDKGNRTAYDYMATKSKEAFERYLAAIESLYKEDKISKAKYQKLLKQESKIGDGFIERDLRDSQYIAKKAKEILSQITRHIVSTSGSITDRLREDWGLINVMKEINLPKYRALGMTEFEERKDGNKVEVIKDWTKRNDHRHHAMDALTVAFTKRQYISYFNYLNARYNTTHKEHQNIKGIEEKFIEWKYDEQGNKKRVFKLPIPNFRQLAKEHLESVLVSHKAKNKVVTRNKNITKSKKGELVKIELTPRGQLHKETIYGKYHYYESKEVKIDGKFDEATIATVTHPLYKKLLLERLQANDNDPKKAFTGKNALSKNPIYLDEARTETMPEKVKLTWLESDYAIRKDITPENFKDEKSLEKIIDHEVREILRQRLKEYGDAKKAFSDLDKNPIYHTNGYVIKRVRISGVKNAEPLHFKKDHLGNYLLDERGERIPVDFVSTGNNHHVAIYRDANGNLQEKVVSFMEAVLRKNYGLPLIFKNPIEDIDLVLNKGIKEELILSNLPEKDWEFLFTMKQNEMFVFPNDQTGFNSQGIDLLDPKNKKLISPYLFRVQKISTKNYVFNSHLETKSVDGDMLKNKKQLSGVSYYFIQTPAYLKDIIKVRINHLGDIVQVGEY

SEQ ID NO: 22193 - protein, 1434 aa, unidentified
  REGION 1..1434: note = Cas Enzyme sequence
MNKILGIDLGTNSIGWALRNPKISGNQIEKFGVVTFNKGVGIGKTGEYSFAAERTQKRSTRRLYQARKYRLWKTLEELINQGYCPLSIEDLNKWRHYNKEEALEHNNGGRVYPVNNTSFNNWIKLDFNKDGIPDYTSPYQLRKELAEVKLDFSLEENRFKLGRALYHIAQRRGFKSSRKEVDDVKEKENEEGGEIELQASEKKKSKLLKELYPDFDPSIPIGVFLANKENEGKRVRLDITQYLVRENYKDEIKYIFDFQGLSTEHSLYLKLVESGKNRNDGWIFYKRPLRSQKGLVGKCSLERNKYRAPISHPSFEIFRAWAFLNNIKYKEGSEWNPLPLELKQDIYKDKFFRKSKAYFQFSEIADFIKAKGKNWELNYKPKTTVTACPVSARLKDIFGENYLKIKIPKAQAVKSDKAYYDIKDIWHVLFSFEDQESVAEFAEQKLHLSPDKVKQFVAAWNTLPVGYGMLSINALDKINAFLQKGLIYTEAVLLANVPKIIGQDLYEKNESEIIQGISNVIEENRRQKSILTIVNSLISKHKNLEADETFGYKDSTYTLKDSDIKELYGAIEEQFGTSKWNALSEDKRQDIFNTVRDCYQAYFTSRGLPLRYINDERHAVVQSGGKHYYKTDSGYSGYYRLPKLADSLGEFLQSHFTIEDNLLSKIYHPSELSVYQPAQTDSNGVLKLGSPKTGSFKNPMAMRALHELRKLLNYMIESGQIDSETRVVVEVARELNDANRRWAIEAWQRQRESENQEFECAIQQIKGGDTTAQVKVQESDIDKMRLWYEQNEEEAIPPIASGKRDVKGIKWSDNKKDSFKKIAAQKSLIEKYRLWKEQECQCIYTGKIINLSDLFDENIIDIEHTIPRSQSFDNSLSNLTVCYASYNRTIKKNQIPTQLNNYEEDFGGYTAIKPRLKRWEDKVERIKQQIDFWKTKSKRAVDKSSKDDAIRQRLLWEMELDYWQNKLSRFTIKEVTSGFKNSQKVDTQLISKYAFHYLKTYFEKVDIQKGLITAEFRKIYGLSMENEKKDRSKHSHHAKDAAILTLIPVAAKRDAILEKYYDSIERRIKFTDYLPYKGFDRAHIMDIDAKILINNITNNQALTPAKKKVRKRGKEQFIPGTNKVKWATGDCIRGQLHQETFYGAIRPAKRGENGSLLKDDTGQFIQEEKVKYVVRVPFQYKKDSNSPGFKTLEEIQKCIVDEGLKKDIEQQVKEAGGLKEAFEKGIYLLDKYGNPHGNKIRHIRVWANVTEPLPIKKQTNLSRAEYKQYYWAANATNSFFAIYEGEGKKDFDYRNLYETAQLLSRNGVTTPEELFEKSIQVIKGKKTSELYLKYVLKAGVKILFKKDEEENLKSLSLMELQKRLYVLTNFEKDGRLNLRFHMEARNKIEEKYLESELDLISPKPTLRFGYAKYDFIVEGYEFVVKPDGKIDWRI

SEQ ID NO: 22194 - protein, 1272 aa, unidentified
  REGION 1..1272: note = Cas Enzyme sequence
GKGTTHETLRLRAKAAQEKISLLQLARVLLSINGKRGYKSSRKVDTGEEGQLIDGMSIAKELQLLQITPSEYRQRHILDGKPKRFDFYRSDLENEYEKIWTFQQHFYPDILTEELHKQLQRQGKQGTSSIFLAKHGIYTADNKGKDKDKTAVTWRVAALTEKLEPDVLAYVISDIRKDIQNSSGYLGQISDRSKELFFNNETVGQYLFRHLQEDPLYSTRNKVFYRQDYIDEFNRIWTVQAGYYPELNDSLRRKIADQILFYQRPLKSQKGLVSFCEFESHPIEVLVDGKKQVKTTGSRCAPKASLLFQEFKIWQILNNLRIKDRVNDGERILSLDEKNLLSQELSIKRSMRQTEVLKHLGLAPRRYELNYSEIEGNTTLSALFSAYLSIVDLSGHGEHDINKLNYNQVLSVVQTVLPILGCTNDIFHFQPDLPKQEYEQQPLFKLWHLLYSYEGDNSHTGKESLFRRISDLTGLDREYAKVLGAITFKDDYASLSHKAISKILPYLKEGDTYDKACTRAGYNHSHFETAEERGQKQLLDHLEQLPKGCLRNPVVEKILNQMVNVVNASTQAYGKPDEIHIELARELKQSAREREKATSDIEGNKKRNLEIVKILQEDFHITNVRKTDILRYRLYEELKENGFKTLYSDKYVPRDKLFSKEIDIEHIIPQARLFDDSFSNKTIEYKDINIEKGRRTAADFVKEKYGEEGYTRFRLRVDDLRNRGALSDKKRKNLLMTESDIPSGFVDRDIRNSQYISKKAQELLKDYVRIVLPTSGSVTARLREEWQLVDVMKELNFAKYEKAGKTAITEDIDGRIIRKIQDWTKRNDHRHHAMDAITIALTKPEHIQILNNLNARSDKDSVFFQMLQKETVVIGNKRIFTPPMPLDILRGEVKRSLNDTLISIKAKNKVVTNNINKTKTKNGYQRTTELTPRGPLHKEQVYGQRFRYETFEVTVNAKMTKEVIANVASKRLREALFIRLNEFDGDPKKAFTGRNALDKNPIYLDSLHTEKVPQKVKCTRLAPYYCIRKDIGPDLSIDKIIDTKVRSRIEERISEYGGNAKAALSNLDTNPIWLNDAKTIPIKRVTIGENFDLCAIHNKRDKNGQIILDADGNTIPSDFVNLRNNHHVALYLDAEGKVQESIVPFFEALNRVNQGLPVVDRMFHSDLGWEFLYSMKVNEMFVFPDEANGFYPQEIDLLNPANASLISPHLYRVQKLSSKDYYFRLHQETSIEDDKALRDITWKRVQSIQAMKDVVKVRIDHLGRIVTIGEYD

SEQ ID NO: 22195 - protein, 1485 aa, unidentified
  REGION 1..1485: note = Cas Enzyme sequence
MKNILGLDLGTNSIGWAVVSKSDDGKYTQDIKLGSRIIPMSQDVLGKFDSGVTESQTAVRTSYRGMRRLRERCLLRRERLHRVLHVMNFLPEHYDNALGWNKNQNSTYGKFLNHGEPKLAWRKDETGKMQFLFMDSFNEMLADFAKHQPGLLAGDKKIPLDWTLYYLRKKALTQPISKQELAWIILNFNQKRGYYQLRGEEEEQEKKNKLEEYYKLKVVKVEATDEQRGDSRWYNIHLENGWIYRRASKMFLDEWVGKEREFIVTTDIDENGNPKLDKEGNVKRSFRAPGADDWALQKKRTENSIDSSHVTVGEYIYDNLLKNPSEKVRGKLVRTVERKFYKEELKRIISKQTEFIPELRDKALLEDCIRELYARNIPHQDSLKKKDFVYLIVDDLLFYQRPLKSKKSLISDCPYESYPYVDKSTGEIKTQHIKVVAKSNPYFQEFRLWQFIQNLRLLDRESLNEDDVTAKYLQTPEDYTKLYQFLNDRKAITQEQLLKDFFGLKKPKGKDTKYSLRWNYVEDKEYPCNETRYLILSALKKAEIEPSFLTREMEQRLWHLLYSVEDKNELIHALEKLQKELELPNSFVEELKKIPSFKKEYGAYSEKAVKKLLSVMRMGTCWSEDGIPASVKERISTIIKGEAQDVALEKAANQHISLAELKDFQGLPVWLACYVVYGRHSESSEITRWETPEDLMIFIRNFKQYSMRNPIVEQCVLESLRTVHDIWVKYGHIDEIHLELGRNMKSTAEERARISERNLANENTNQRIKYLLMELKNDGNISDVRPYSPMQQEILRIYEEGALTELSREDPDFAEISRISKLAQPTSSELTKYKLWLEQRYRSPYTGKPIPLSRLFTPAYQIEHVIPQSRFFNDSLVNKVICEAEVNGLKSNMLGLEFIKAHGGEVVHCPTLGNVTVFTEEQYTKFVKDHYSANRAKLKNLMMEDIPEEFIQRQMNDSRYISRVVKQLLSNVVREENEAEATSKNLIPCTGGITDRLKQDWGLNDIWNKIVSPRFQRMNDLTQSDAFGHWEDKDGKKVFQTTMPLELQRGFSKKRIDHRHHAMDALVIALASRNIVNYLNNESANDEKLRHDLKRLLCGKGGVILKPWETFTQDAYKALQDIVVSFKHYIRVINKASNYYEHYDENGKKVTVAQKGESMWAIRKPLHKETVFAHVNLRRVKAIPFNKALENPSTIVNKDLKHLIKTLMEDGMDKKKVLNFFKKEDGLKFHGQDISKVEVYYFTDDVEKMVAVRKPLDDSFDAKKIQSITDTGIQKILLNYLATKYNDPKVAFSPEGIMEMNEHIEEFNGGKPHQPILKVRVSETLGEKYPVGYGSNKDKKFVEAQSGTNLYFAIYENKAGDRNYQTIPLNIVAERMKQNLPPVPGVNENDKLKFFLSPNDLVYVPEESEQNAGIDELYKERIYKFVSSTKTQAFFIPSNVASVLMNKVEFQSLNKAERAIDGQMIKAVCWKLEVDRLGNIVKIIK

SEQ ID NO: 22196 - protein, 1407 aa, unidentified
  REGION 1..1407: note = Cas Enzyme sequence
MKKILGLDLGTNSIGWAVVSADENGNPTHIEGMGSRIIPMGSDKIDYEKGATITKNADRRTKRSARRMGKRYKMRRNKLLFILSRLNMLPEQIQFKTDFPEATKIQNLELLPISKNTMQLDSLQHYELREKALHGKIALQELGKILYQYNRLRGYSGGGDDNDSKIEKTEDDDNKKYEVRVQKFILKDVAKSDSTYIAKSGKDKGKELPIYNVIVLDEDEEIEGTTKLQTLSEKIGEEIELEIRIKKIKKGASIAFALPQKTNWRKQMEETEHFLKAKNYYPCQLFAEDLRNNKWTKIRNRVILREQYKREFDAVWDEQAKHYPILEKCPNDVLNEIVSYIFPGPSDSQKKLRELGLRNGLKYIIKEQIIYYQRPLKSQSNLIGTCQFEKEEKVIPVTHPLFQEFRCWDQINRLYIRSKQQIWNEKKGKFVLQYQNRYLTDEQKYSIYNRLQEQKQLGFKEVAKIVNLGDDKSEFLYGLHVKAKLSGCDTKISIKKILKGYFEPDTTLIEKIWEAVYNNVHEGSEYNESSKRVLSIIDILPETLGDERRTELALKIAQNIKFIRKYASLSKKAIENILPIMRPNPDVIPEKVKKNFEDIKWLIDTGEVIDESILQDYIIEFVKDNPQALEHGGLMYAFASSLVYGRHTKEDVKPQLKDYHDIKYVERNLRNPIVEQIANETMQVVKSLWKQFHLNPDGLEIRVELARDLKNSAKERENIFKAQNKNRSGNERIKERLKQENVPVTDLNILKYKLYEQQSYISPYTKNTIAFSKLFDDNFYNIDHIIPKSRYFDDSISNKVICESNINEEKDNRTAWEYICQQSSQYTILTPEAYLNHINSSFYGQKKKNLLAEKIPSNPVTRQMKDTQYISIAVKDELAKIVGSEHVKTTTGGVTDYLRSLWGLRKLFMELTEARFKQMELWNINEDGTPKESWVKKGYDKITHKNVYEIKGWSKRYDHRHHSIDALVVALCNEKFIKRLNDLNKYFQEELAKHKSSIPILDEDSLEIAFFNLPKEKRNKIMQEIESSRKFDAPFDNLVAEAKCQLESMIVSQKSKDKLSIKEDFNGKKQLKIRAALHQETYYGKTNGRDTKTIAISMLKAKDIPQIVDEVLKKEIDAHRKKYESMKEAFTGEGLIAFNESRFQTKNKSALKPPVYKVRLWYSNKEKETGNLQPLYGKAAKKTVVTGDNYMFIVMEKSGNRVFDIASLFDSVALAKEYVKQGIVDIDYIKKKICDDLRYNSSDSKGNKADKVIFYLQQNDLVYMPKEDDEILRFNELEFKNWLSNTKNKIDFAKRVYKVVKFTGKDCFFIPNNVAKEIIIPKDMSKEELDELKSKYKDKAIPKQEQNYIEYGTYSNCTPLEMNKLFTMSMREGKKYKGDRPRKIQDYCIKIKTDWLGNVIEFNDMKL

SEQ ID NO: 22197 - protein, 941 aa, unidentified
  REGION 1..941: note = Cas Enzyme sequence
HFEQKGTKTRDTHTKRQERERHTVVYHTMDLWNFCFDTDEKEDVTAFAHNSLGWNEQATDKLCKLWNAMDQGYATLSLKALRNINRMLVYGLKTSDAVFLAKVPDITGMSEEGVKDLIDIYLGRVKGQVNQKVRDCRIVNTLIANYKSMPVRDRFADHNYDYQLGIDDREAVVKCIVDNDKDFSLLDATAQKEMIDRVTNLYQSFFADIHRDFVKAPRTVDALKEELCKRYSGIDDSKWERLYHPSMLSDFPRDKDNANHLGSPNIGAIRNPTVMRTLNVLRSVINKMIDEGLIDPQETRLVVETTRVNNDINKRWAIQKYNEERRDENKAIKDILQEYYPEKDINDDDVDAARYVLEQSGEDLYGENDRFQHLIKKYKLWLEQGCQCLYTGHIISLSNLLNGEMFDAEHTVPRSISFDSSDKNLTMCDSYYNRHVKKNMIPSQLPNYEHDVVIDGHTYTAIKPRLQMWEEKVERLSKNVTFWKNKAKRAQTESYKNTCIRQKLLWLMEFDYWRSKLDRFKMKTSDLTDGFRNSQLVDTGIITKYALLYLKTLFKSVEVQNGQSTSAFRKIFGIPEKDRSTHYHHAVDAAILTLIPTSAQRSRMLKLFYEIDEMKRGGHEYSGLQFQLNKEIESCGIGKGVAAVDQYIEDHVFVNYYKQDRTLQDANNIRGKLHAETFLGAITQWNGEEKKYVKRVELKYKKSSLDSGFKSWEDLECAIVNKQLVQMMKSQFPKGTTFQEACEQGIYMLNKRGEKVNRIRHIRIEVKEKHPLAIKKQTNLSVKDYKQYYYAGMGDLYVTCEYQNQQEREFIVYSLFSIAENRKMGVEDIPTTIIGKKGIRLTLDRIIKKGDMILIYKNSPEELYGLDTNSLSKRLYMVCNPESDGRLNLCHHLCAKQEKGQSIKDYDHLPQNIRCGAKTIKFLQMGKDFSIVKGKIEFKQS

SEQ ID NO: 22198 - protein, 1483 aa, unidentified
  REGION 1..1483: note = Cas Enzyme sequence
MRNILGLDIGTNSIGWALIDGDNNRIIKVGSRIIPMDAATLGSFEAGNLQSQASVRTGFRGTRRLYERAELRRERLLRVLNVLGFLPEHFKNQIDFVEHLGQFKNHAEPLLAYRKNQEGKNEFIFHDSFCEMLADFSAHHPSLVSGGKKIPYDWTIYYLRKKALSKPIRREELAWIILNFNTKRGYYQLRGEENELETPVNEEYRVLEVRSVEPTGEDKKRHGIYWFDITYDNGAVQRKSGPVAPRKVGDKVELIVTTSTDKKGNVTAKLRDPKPDDWTLMKKRSENAILQSGKQVGEFIYDSMLSQPDTKVRGKLVRVIERDLYKKELEAILNKQREFIPELSNRKLYNECIRELYRSNVAHVQSIQDKDFTSLFVDDIIFYQRPLKSKKSEIADCPYEHYQYIDKSTGEHFYKPIKCISKSHPLYQEFRLWQFVQNLRIFQKEKDVDGKLKLNVDVTHVFLKTEAEIVELFDWLYEHKEISQEQLLKYKPFGIGKSLSNYRWNYVEDKSYPCNETHYYICKCLQKVEGTPVLDKQQELALWHILYSVDDIVELRKALGSFAEANQLEPTSFVESFIKMKPFPSDYGAYSEKAIKKLLALMRAGKYWDAQSIDANTCSRIANIIDGVADESIANRVREKSIRLHQTEDFRYLPLWLACYIVYNRHSESNDAQRWESPDDIDNYLRNIFKQHSLRNPIVEMVLREMLRVVRDIWKTYGKIAEVHVEMGRDMKANANERKRRSESISRSERTNQRIRLLLQEFANPEYAIEDVRPYSPSQQEILKIYEETALNNGEDVPDDILLIADNLGNSSKSVSKSDMQRYRLWLEQKYKSPYTGQTIPLSKLFTPSYEIEHVIPQSRYFDDSLSNKVICESEVNKLKDRMLGYEFILKEGGRIIDGNLGGQIKIFTKSQYEEFVKQNYAHNRPKMQKLLMEDIPDKFIERQLNDSRYIARKTIEILSKMVREENETEATSKNVIATNGSITDRLKKDWGLNDVWNDIVAPRFERLNRITGTNDYGQWVNQYGKRYFQANVPVGMAQGFSKKRIDHRHHAMDAIVIACATRDHVNYLNNKSALSSERETRYDLQHKLCEKVKTDAYGNYVWQFSKPWDGFTKDAKDQLLSVIVSFKQNLRVVTKMTNRYWHYVGGQKVLEQQQAADGWAIRKSLHKATVSGAVRLQQVKKVRLAEALKDWHHIKDKGVRKAIQQVLDMYGHYDEKTILRYFKDRKYLVDGKDISRVEVYYLPEKADLSATRVTLDIGFDKKKIEKVTDSGIRTILLRHLQEYNGDPKIAFTPDGIAEMNRNIRRLNNGHDHKPILKVRVAEAFGMKFPVGYTGNKAKKFVEADKGTNLFFAIYADADGNRTYRSIPFNEAVERMKNRMPVAPVEDENGNNLLFTLSPGDLVYIPEEGEHVDGIKDLSRIYKMVSSSGNQCFFIPASLAAPIVDTKELGANNKAEKAWTGRMIKQCCLKLSVDRLGTITKIY

SEQ ID NO: 22199 - protein, 1533 aa, unidentified
  REGION 1..1533: note = Cas Enzyme sequence
MKKVLGLDLGTNSIGWAIVERDDNKGRIIKSGSRIIPMDAATLGDFASGNTKSQTKERTSKRTARRMRERFLLRRERLHRLLHLLGFLPKHYEERIGWDIENDRKHYGTFLAGEEPKIAWIKEDDKKYVFFFQSSFKEMLEDFRKYHSDIITDGKKIPYDWTLYYLRQKALTQPISKEELAWIILNFNQKRGYNQQRDEVLEASDDKKEEYMCLTVSSVTPDEDAKGRDIWYNIRFENSDIVYRRKSKYPLNWVGKKRNIIVTTKLDGEGNPKLKKDGSIDYSVKSPNDDDWTLLKIKTEQDLKTSHQTVGQYIYTALLANPSEKIRGGLVRTIERDFYRDELERILQKQCEFHNELHDRILYEKCINELYRNNETHRNNIAKNDFTFLILEDVLFYQRPLKSKKSLIDDCPYESHQGIDKETGEIRTYPLKCIAKSNPYFQEYRVWKFMSDLRIIANTKEINGHIHTDVDITNELLPENDSWSNLFVWLNDKGHITQSDLLTYLGIKKKEQSKFRWNYVPDKHYPMNATRHAILNRMKEGETLSRELEQAIWHLLYSTTSKAEIDKSLSPSNNSNGIYKKMIEAGISHESIEKIKTIKLPDEGYGAYSEKAIKKLLPLMRCGKFWDEGKIPPITLERINEFRKGNNMGDFSERVKMLISSMIDIHSYQRLPEWLACYVVFGKHSEANDIVKWKSPEDINIYLNNFKQHSLRNPIVESVVLETLRVVRDIWKRFGDIDEIHIEMGRDLKNPSDKRAQITQRVLQNENTNLRIKALLAEFLAEEYKIDNVRPHSPSQQELLRIYEEDVLAHNEPDEDIQDIINNLSNPTKQPTRTQVLRYKCWLDQKYCSPYTGQPIPLSRLFTSDYEIEHIIPQSRYFDDSFSNKVICESEVNKLKDNQLGYEFIKQHHGQTVQLASGRMVRVLEIDQYEQLVKDNFVHNKRRKLLMDDIPAEFIQRQLNDSRYISKVVKGLLSNIVRTTDEDGNLEREAISKNVITCNGSVTTRLKRDWGLGEVWNAIVLPRFQRLNEITERNCFTTLNSHGQEIPAMPLELQKGFSIKRIDHRHHALDAIVIACTTRDHVNLLNNESALPENQANKHALSHKLRQCEEIVINGKKRTVYKEFLMPWNSFKYDTFSSLQEIVVSFKQNLRVLTQATNLYTKYKDGEKKQETQHSTDHYAIRKSLHKDTIYGHVNLQRITTVKLKDALKDVNRIVDKHLKKRIKELMSQHYNEKQLLVHFKDYGYEWKGYDFNKVKVFYYTDEKEMMVATRFCNDLVSVFSGKTKKQDVEKTIEQITDTGIQRILTNYLNANLEQIEYAFSAEGLEKMNENIAIYNNGKQHKPIYKVRLYQPKGNKFQIGQTGNNYKKYVVADAGTNLFFAIYQTTDGVRKYKTIPLEEVIARMKQKLHPVNDTDENGNRLLFYISPNDLVYLPTPDEIVDGHINLEKIDANRIYRFVDSSSTIANFVPSKIANVIYHLKKEQAERFCKSDTIQDELGKGSPQSKNQKAFTGEMVKDYCVPLIVNRIGEIKFK

SEQ ID NO: 22200 - protein, 1236 aa, unidentified
  REGION 1..1236: note = Cas Enzyme sequence
MKRVLGLDLGTSSIGWALVNEAENCNEESSIVRLGVRVNPLTVDELQNFDKGKSITTNADRTLKRCMRRNLQRYKLRRENLIDILKENCFISEESILSENGNKTTFETYKLRAKSASQEISLEEFARVLLMINKKRGYKSSRKTKGNDEGQTIDGMEVALKLYNESLTPGQLCLHLIKSGKKHLPEFYRSDLQAEFERIWTKQKGFYPDILTDDLKEKLKGKNEKVTWAICRDNFKWSETVRVWNNDEAKNQDIIIEKTLTGIKREGNVQEQKIENFYWRSKAISEKLHPEEIAVVLSKVNSQINGSSNYLGAISDRSKELYFNKQTVGQYQMSVLEQNPNASLRNMIFYRLDYLNEFNTIWETQAKYHKKLNEELKQEIRDIIIFYQRNLKSQKGLISFCEFEKKQIEVEIEGKKKTKTIGSRVIPRSSPLFQEFKIWQILNNMIVSGKGKNSNKDKDDTNLHFMDNENRLSINGARELYQEEKELLASELSIKEELKKDEILNLLFNNPNGLDLNFKSVQGNLTQAKLFETYKTIIELSGHSLDLKKPATEIVKNVEEIFSGLGYQSNFLCFDSSKPLEEQPMFKLWHLLYSYEGDNSVTGNEGLINKINEICGFEKEYATILSNVVFQNDYGSLSTKAIRKILPYLKEGNKYDLACEYAGYKHSASSLTKEEIENKVLKEKLEILPKNSLRNPVVEKILNQMVNVINTITDIYGKPEEIRIELARDLKKNAKEREELTKSIAEATRAHEEYKRILTKPLSEGGQFGLTYVNRNDIIRYKLYEELRENGYKTLYSNTYISPGNVFSGDFDIEHIIPQSRLFDDSFSNKTLELKSVNLEKGNRTAIDFVKDKYGETGNDNSLENYLNRIESQFKKGVLSRGKYNKLKMQEKDIPEDFINRDLGDTRYIAKYAKTMLGDFVKRVVTTTGSITDALREDWQLVDVMKELNWDKYNALGLTYYEENREGKKLKRIVNWTKRNDHRHHAMDALTVAFTKDAFVQYFNNKNASFNPTSNEYALRTKYFFNNKAIPPMPLEVFRSQAKRHLENTLISIKAKNKVVTQNVNVTKKKEGNNKKIQLTPRGQLHLETVYGSQKQYVVKEEKIDSTFDQEKILTVAKPVYRDVLLKHLKIFDGDPKKAFSGKNSLAQNPIYIDEKQTISIPERIKTVSFETIYTIRKEITPDLKLEKVIDIRIRRILETRLKEFDNDSKKAFSNLDENPIWLNRQKQILIKTRYN

SEQ ID NO: 22201 - protein, 948 aa, unidentified
  REGION 1..948: note = Cas Enzyme sequence
MKKILGLDLGTNSIGWALIDSDDKKILGMGSRIIPMTQDVLDIFSGGKPLETQTAARTHFRGVRRIRERQLLRRQRLHRVLNVLGFLPEHFAHGIDFKKHLGQFIDGTEPKLAYKNKEFIFKDSFEEMLQEFKQAQPQLFYTKTNGDKTKIPFDWTLYYLRNKALNRKIYKEELAWIILNFNQKRGYYQLRGEEEVENLNKLVEYHSLKIVDVVADEKPNSKGDIWYSLYLENGWIYRRSSKTPLNDWKDKVRDFIVTTDLNDDGTVKVDKEGNEKRSFRAPGENDWTLLKKKTEQEILLSNKTIGSFIYESLLAKPNQKIRGKLVRTVERKFYKTELKAILQKQVELQPELFSTELYNDCVRELYRNNEMHQLSLSQRDFVHLFVDDIIFYQRPLRSQKSAIGNCTLEKRPTTDVNGNILRDEKGKPVLIPIKVIPKSHPLYQEFRLWQWISNLRIYRKADDNDVTADFIKGSEDIVNLFEFLMTQKEAGHKDILNHLLTPILKEKYPNVKPSVFNRELEKEVSKYRWNYVFDDSKEKEDEKSKKYPCNITGYEIRRRLEKVINVPSNFLTDQAEQHLWHIIYSVTDKNEFKSALGKYALKHSLDVDSFVSNFEKFPPFESEYGAYSEKAIKKFLPLLRMGKYWSWQAIDPKTKSRIDKILTGEYDETIKHRVREKAILLTEHNHFQGLPIWLASYIIYDRHSEADIAGKWNSAADLDQYLKDFKQHSLRNPIVEQVITETLRVVRDIWQFYGHSAMDYFSEIHVELGREMKNTAQDRKSMTDYINNNEATNLRIKALLLELKENSDGKLQVADVRPYSPIQQDALRIYEEGVLNSKIELPEDILKISKTAQPSKAELQRYKLWLEQKYRSPYTGQSIPLSRLFTEDYQIEHIIPKSRYFDDSFNNKVICESAVNQLKDKQLGLEFIQAHHGEKVECSMGGVVVNFY

SEQ ID NO: 22202 - protein, 1343 aa, unidentified
  REGION 1..1343: note = Cas Enzyme sequence
MSSLNLYEHKLFLMKKVLGLDLGTTSIGWALVNQAESETEKSSIISTGVRVNPLSTDEIGSFERGKAITTNAVRTLKRGARRNLQRYKLRREQLIEILKREKWISDETVLSETGSKSTFQTYLLRAKAVEKEITLTELSKVLLMINKKRGYKSNRKCVGKDEGHLIDGMSVARRLYEEDITPAQLCLILIGEGKKKLPEFYRSDLNAELMKIWNIQKDNYPDVLTDEFKEQIENKSKTAVSKIFFAKYGIYTAANKGKEKRIQALKWRVSALTEKMSIEEVAYVISDISGEISNSSGYLGAISDRSKELVFNQKTVGQYLYEHLQSDSSFTTKNKVFYRQDYMDEFEKIWEVQAQYHPSMTAELKKEIRDIVIFYQRRLKSQKGLISFCEFENRCRVAPRSSMIFQEFKIWQILNNLEISGPGIEGSRKLSVEEMNILASELSVKEKMPVTEAFNVLFGSGKGYSANYKSLEGNHTICAFYRKFLEIVDASGHGEYSLDKLSFSKTTGLIRSVFDALGINLRILEFNSCLKKDEYEKQPLFLLWHLLYSYEGDNSKTGDHSLIEKIGSICGTSEEYSRLISGIVFKDDYASVSHKAISKILPFLKEGNTYDMACLLAGYRHSKSSLTREEIENKVLKERLDVLKKNSLRNPVVEKILNQMINVVNSVADAFGKPDEIHIELARSLKQTAKQRETASQAIADNTKENERVTEILQKEFGLSYVRKTDIIRYRLYQELKRNGYKTLYSNQYVSREILFSDEIDIEHIIPQALLFNDSYANKTIEFKDINREKGKETARDFVESKYGAEGYKNFVLRVDDLFKNGAISRSKRANLLMAKSEIPEDFLERELTCSQYIAKYAKEMLESYVRFVIPTSGGITERLRREWQLVDVMKELNLPKYRTAGKTFTTQDESGNITERIQDWTKRNDHRHHAMDALTIAFTTPAHIHCLNTLSSRGVENTSVKLPSPMPLNELRAQFKSHIESTLVSIKAKNKVVTRNINRTRGRNGITETLTLTPRGELHKEQVYGMRKVYETYYISVGSKLTVEAAESISSPSEKRRVLERLAAFANDPKKAFVKKDVKDLFPEKIKCTRFKIVFSIRKGVDQSLSVEKVMDVKIRKLLQDRISRFGGDQTKAFANLDENPIWFSEEKRIPLKRVTIAESFDLCALHDKIDKDGNLILDDEGRNVPTDFVNLRNNHHIAIYEDSLGNLQECVVSFFEALNRIICGQSAVDRYYRQSEGWHFLFSMKINEMFIFPDPQEGFYPEEIDLMNPDNYAAISKHLFRVQKLASSYYCFRHHLETTLNDDKALKETTWKRITAIKNMKGVVKVRINHIGRIVSVGEYD

SEQ ID NO: 22203 - protein, 970 aa, unidentified
  REGION 1..970: note = Cas Enzyme sequence
EGYSNLSLKAINNINRVLREGMIYTDAVLWAKVADIVGESVWESERVVMLDSYEGIKFETEKHRRCAKLANEMIARYKVLSDEERDIYREGDYTLDDNDRKSIREAASEMLTKEGWKRLDDNERNEMLEGAAEQYQQFLRSREKEYVKVPKLTDGIASFLEEQYGKCIKPNYKGKIADALYHPSAIAIYAPQKERNIKYNGVLLSKKLLGSPATDVFKNPMVMRVLHTLRRNINKLILDNKIDEDTRVVVEMARELNDANARWAIETYQREREAENIALRKRMEELFPNRVINEVDIQQCRLLLEQAMLDRDCENLKALQKQVKELKSKDAQYGKDITKYSLWLEQNCISIYTGKPIRLSELFDSNKYDIEHTVPRSLCFDDSLANKTICEADYNRNKKKNRVPSELSDFEAIKMRIQPWIDRRNAMKELIDFWRGESKKAVAGSDRKNQCIRQQHLWKMEFEYWNNKVERFLIERDRVGEGFRNSQLVDTRIISKYAFHFLKTVFSKVEVQRGDMTADFRKAFGIQSVEEKKSRDKHSHHAIDATMLTLIPTNKKRDRMLELFYEIEDKKRINEDTSKQEKEFAVLRKQCNIHGVDEVAEFIENNILIRHDSKDQTLAETRKKIRVRGKIKKDANGKAMYMTGDAIRGRLHKETYFGAIKYPLTDENGEIQLRDGQYVYEKDKEGNEVITMVVRVPLNSLSKYEEIDIIVDPNVRRSVRMTIDKRLVEGMKFADAINGEIYMLDQTGNEVKEDKNGRILRPIRHVRCKVKSGMGFFTMQKALSIRRQTYKSAIPYKNNVYAQNDGNYLCLLYEGEKKGKIKRRMVFVNYFEIAQMGIRSIAELRNKVNYATMVYNGVDYKLKSILKTGTNVLMLDGSVDDIRELNPDQLNKRLFVVFKFNNSGSDYLYLQNAIEARSNDKMTKDGLKGDGETVYDPSRYQHRLKLNADNCNFLIEGVDFEITTKGIEFK

SEQ ID NO: 22204 - protein, 1538 aa, unidentified
  REGION 1..1538: note = Cas Enzyme sequence
GTNSIGWALVDNDFERKQGEIIDIGSRIIPMSQDVLGKFDTGQSISQTAERTGYRGVRRLYQRDNLRRERLHRVLKILGFLPKHYQQEIDFKNKLGQFKNEVKLNYRINKEGKYEFIFIDAFNEMLAEFNALNKEIKIPYDWTLYYLRKKALTEKISKEELAWVILNFNQKRGYYQLRGEEEETQEGKIKTFETLVVKELIDSGEKIKKTENILYDVYFENGWKYDKQIVKTENWKNKTKEFIVTTSATKDGKTKRTYKAVDSEKDWIAIKEKAQQNIDEFNKQNNTVGTALYIYDTLLNNPTQKIRGKLIKTIERKYYREELAQILNTQIKLHSELQDRNLYQACINELYPRNEAHQNNIKNKGFDYLFIYDIIFYQRPLKSKKSTISGCQFETRIFKKTVVDKDTKEKKEIFITEPIKAISKSHPLYQEFRLWQFLKNLKIYQKEDEDGNIIADKNADITTKLLQTEEDWVDLFNFLNIKKTIEQHQILKYFSDKKLIPKQKKDKGMYKWNYVEDKKYPANETKAQFLSRLSKVTNINDAKSFLTNETEIKLWQIIYSVKDLAEYEKALKTFAKKNNLNEDSFVSSFVKFPPFKNDYGAFSEKAIKKILPLMRRGHYFDENNISSTVKERVQAIMERVNSLNLKQNYTKEDLEKAMLNVVDDDIPTRLVKSFIPFIDKNPLTGLNTYQASYAIYNRHSESGNVQYWKTPQDIDKYLSNFKQHSLRNPIVEQVVTETLRTVRDIWRYHGNGVENFFNEIHIELGREMKNPADKRKQISEKNINNLNTNIRIKAILQELVNSGVSNIKPYSPSQQEILKIYEESVFENAPDNYKNIKLEDIEKIRKKASPTPTEIERYKIWLEQGYVSPYTGKTIPLTKLFTSDYQIEHIIPQSRYFDNSMNNKVICESEVNQLKDNQTAFEFIKNHGGQIVDLGQGNIAEVYKLAQYESHCNAYFKKNRAKLKNLLSEDIPEGFINRQLTDSRYISKLIKSLLSNIVREEGEQEAIAKNIVPVTGAITSKLKKDWGLHNKWNELIAPRFIRLNKLTGTEDFGYWDNKINAFRIQVPDDILNKGFNKKRIDHRHHALDALVIACCTKDHINYITSINTNRKNHSLVSKLRNVEEIEVTNKKTGNKEKRKVAKAYKLPWQSFPVDAKKSLDKTVVSFKQNLRVINKTNNKTMQWVEKKGKYVKQLVSQTKGDNWAIRKPMHKETVSGQVLIDENKEVSFNKAIEDTSLIIDKTIRIIVENSNIENLKERIEHFKKNPIIIDGNKVRKVRVFTRATAVRTSLVDIKTIKHLKKITDKGIQQILKNHLSNYIDEKGNENYEQAFNAVGVEDLNKNIKKLNNGKNHQPIYKVRLYEAGSKFAVGYTRNNNTKYVEAAKGTNLFFAVYWDEKTQKRTYETVPFNEVVEHQKQVAHLPKTERTPIPINAKKGAFLFALSPNDLVYVPTDEEIENPNLVDFKNLTKEQIERIYKMVSTSQGKLECIPNTYSSPIKNNEMGSNNKSQNMIDGKTQIKPRCWKLEINRTGKIINIIS

SEQ ID NO: 22205 - protein, 1309 aa, unidentified
  REGION 1..1309: note = Cas Enzyme sequence
MAKIEKEELAWLILNFNQKRGYYQLRGEDDETPSNIKEYVELLTVVKIEKGETDKKNNKKHWYNVTLNNGWVYSATFSSEPQWLNAEKEFLVTEELDENGDIKIVKDRKQDKEGKEKRKITPLPTFDEIDLMSKADQDKIYKKIKAKTEITISNSGKTVGTYIYDTLLQKPQQKIRGKLIRTIERKFYKEELKDILQKQIELQPELFSNDLYNESVRELYRNNDSQQLQLSKKDFVHLFLEDIIFFQRPLHSQKSSIGNCTLEYRKYKDETGIEQTQWLKVIPKSNPYYQEYRLWQWIYNLSIYKKEDDSNVTAEFLNGLEDWESLFEFLNDRKEVEQKTLIKYFLDQKGFKGKVLAAELEKYRWNYVEDKKYPCNETKMQISTRLEKVQGISTGFLTREIEQQLWHIIYSVTDKIDYEKALKTFAAKHQLHEISFVDAFKKIPPFKNDYGSFSEKAIKKLLPLLRLGKYWSWDAIDKNSKNRIEKIVSGEYDETIKDKIRDKALHLKQEHHFQGLQLWLAQYIVYGRHSEAAEIGKWNSVDDLEQYLQDFKQHSLRNPIVEQVVTETLRVVKDIWSKYGNGAKDFFDEIHIELGREMKLPAEERDRMTRQITENENTNLRIKALLSELMNDANVENVRPYSPMQQEILKIYEDGVLNSDIEIQEDILKISKTAQPSSSDLKRYKLWLEQKYRSPYTGEIIPLNKLFTTEYEIEHIIPQSRYFDNSLSNKVICEAAVNKLKDNQVGLAFIKNFHGQIVECGLGKKVKIFEVTGYEEFVKQHYGKNRSKRNKLLMEEIPEKMIERQMNDTRYISKFISGLLSNIVRADINDDGVNSKNVLPGNGKITSELKQDWGLNDVWNELILPRFERMNKLTNSTYFTTWNENHQKFLPTVPLEFSKGFSKKRIDHRHHAMDALVIACATRDHINLLNNQSARSDTKRYDLKRKLMRFEKIAYNHPQTGERIEKEVPKGFLKPWENFTIDTKNSLENIIVSFKQNLRVINKATNRYEKWIKKDGVNTKETVEQKGVNWAIRKPMHKDTVSGKVDLPRIKVPKGKILTATRKSLDATYDLKSIEAITDTGIQKILKNYLASKGNNHELAFSPEGIEEMNKNIQNYNDGKFHQPIYKVRVFELGSKFQLGELGNKKTKYVEAAKGTNLFFAIYQDNSGKRSFETIPLNEVIERQKQGLRPVPQENEKGGQLLFHLSPNDLVYVPTEDERENSSRIDFENLTKEQMKRLYNVNDFSSTCYFTPNRIAKAIAAKEVDLSFDKEKNKVTGSFDSKTASFEGVQIKDICIKLKIDRLGNISQV

SEQ ID NO: 22206 - protein, 1325 aa, unidentified
  REGION 1..1325: note = Cas Enzyme sequence
EMIEDFKSSGQEIKIPYDWTIYYLRKKALMAKIEKEELAWLILNFNQKRGYYQLRGEDDEIPSNIKEYVELLTVVKIEKGEPDKKNNKKYWYNITLNNGWVYSATFSSEPQWLNAEKEFLVTEELDENGDIKIVKDRKQDKEGKEKRKITPLPTFDEIDLMSKADQDKIYKKIKAKTEVTISNSGKTVGAYIYDTLLQKPQQKIRGKLIRTIERKFYKEELKDILQKQIELQPELFSNDLYNESVRELYRNNDAHQLQLSKKDFVHLFLEDIIFFQRPLRSQKSSIGNCTLEYRKYKDETGTEHTQWLKIIPKSNPYYQEYRLWQWIYNLSIYKKDDDSNVTTEFLNGPEDWEALFELLNNRKEVEQKTLIKYFLEQKGFKGKMLAAEVEKYRWNYVEDKKYPCNETKTQISSRLEKVQGISTGFLTREIEQQLWHIIYSVTDKIDYEKALKSFAFKHQLDEKSFIEVFKKFPPFKSDYGSYSEKAIKKLLPLLRLGKYWSWDAIDKNSKDRIQKILSGEYDETIRDKIRDKAFHLKQEDHFQGLQLWLAQYIVYGRHSEAAEIGKWNSVDDLEQYLQDFKQHSLRNPIVEQVVTETIRVVKDIWAKYGKGAKDFFNEIHIELGREMKLPAEERDRMTRQITENENTNLRIKALLAELMNDANVENVRPYSPMQQEILKIYEDGVLNSDIEIQEDILKISKTAQPSSSDLKRYKLWLEQKYRSPYTGEIIPLNKLFTAEYEIEHIIPQSRYFDDSLSNKVICEAAVNKLKDNHVGLAFIKNFHGQIVECGLGKKVKILEVNVYEEFVKQHYAKNRSKRNKLLLEDIPEKMIERQMNDTRYISKFISGILSNIVRAEVNDDGVNSKNLLPGNGKITSELKQDWGLNDVWNELIIPRFERMNQLTNSTHFTVWNEHHQKFLPTVPLELSKGFSKKRIDHRHHALDALVIACATRNHINLLNNQSARSDTKRYDLKRKLMRFEKVAYNHPKTGERIEREVPKGFLKPWENFTIDTKNSLENIIVSFKQNLRVINKATNRYEKWVKKDGVKTKEIVEQKGVNWAIRKPMHKDTVYGKIDLARIKVPKGKILTATRKSLDATYDLKSIEAITDTGIQKILKNYLASKGNNHELAFSPEGIEEMNKNIRSYNDGKPHQPIYKVRFFELGSKFTLGQSGNKKTKYVEAAKGTNLFFAIYENDMGKCSYETIPLNIVIERQKQGLTPVPEKNEKNEKLRFQLSPNDIVFVPTDDEIENAHNIDFANWTKKQKEQIYKIVSFTGSRLSAIPINVATTIVNKVEFTQLNKIELIKEKDVLIKLYSDRLGNISFHK

SEQ ID NO: 22207 - protein, 1526 aa, unidentified
  REGION 1..1526: note = Cas Enzyme sequence
LGLDLGTNSIGWALVNIDDKRIEGLGSRIIPMSQDILGKFDSGNSISQTAERTGFRGTRRLRERHILRRERLHRVLHIMGFLPKHYEQYIDFENRLGKFLTDAEPKLAWREIENKKFDFIFKNSFNEMVQEFKTCQPQLFVNNNQIPYDWTIYYLRKKALQHKIEKEELAWLLLNFNQKRGYYQLRGEDEEKTDTREYCALLKIVAVEKGEKDKKNDKKTWYRLTFENAWEYSATFTSEPNWLNTEKEFLITEELDEDGNIKIVKDKKSDTTGKEKRRITPLPSFDEINLMSKEDQNKIYKKIKARTEITIKNSASTVGTYIYDTLLQNPKQKINGKLVRTIERNFYKAELKAILEKQKEFHPELNDGVILAACIQELYPNNEVHQNSLLSSDFTKLLVDDIIFYQRPLKSKKSLISNCKYEYRTYKDADGVIQKEPIKCVPKSHPLYQELRLWKLVNDLKIYEREKTIDGKLYTDYNVTNEFIKSEDELVNLFDWLNERKEIKQDTLLSSFFKIKKKRGEEKLAFRWNYVEDKEYPCNETHAQILSRLSKLKDIPANFLTTSKELELWHILYSVTDKLEIEKALKTFASKNDLPMEFVDVFKNFPPFKSEYGSYSEKALKKLLPLMRMGKYWNFESINDKTKIRIDKIITGEVDETIQTQVREKVIHLTQIDDFRGLPEWLASSVVYGRLSETKWKTYHDLENYLEEFKQHSLRNPIVEQVITETLRVVRDIWKKYGDISEIHVELGREMKNPADKRAEITKRVSENENTNLRIKALLAELANDKEVENVRPYSLNQQEILKIYEDGILKSGIELPDDISKISKLSQPTKSELIRYKLWLEQKYRSPYTGEMIPLGKLFTSAFQIEHIIPQSRFFDDSLSNKVICESVVNGNPYKDNQLAYEFIFKNEGRIVPELSTAYKTVKIFTLSEYETFVKEHYANNQTKKKKLLMEDIPEAFIERQLNDTRYISKVVKGILSNIVREEGEEEPTSKNVISTSGNITDTLKKDWGLNDVWNRIITPRFQRMNELTKSNLFGQWENKDGKQVFQTQVPLELQKGFNKKRIDHRHHAMDALVIACATRSHVNYLNNENARKKDEPTRYELRNKLRRIEEIEVDKIVDGIKIRKKIEVAKEFLKPWDTFTVDAQSALENIVVSFKQNLRVINKSVNYYQHIVDGEKVIDKQVKGDNWAIRKPLHKDTVAGQVNLRFKKQVTLSAAIDQWEMLVDKSLKTKIKQLINEGLDKKKVQKFFADNKNKWQGKDISKPELYYFSNDKDILVASRTALNDSFNSKTIDSITDTGIQKILRNHLAKYHEEKNGETIDHPELAFSVEGIEGMNRNIHELNNGKPHQPITRVRTYEPKGNKFNVGENGNKKHKFVEAAKGTNLFFAIYMGENGSRNYETIPLNIVIERLKQGLSEVPETNAKGDRLLDYLSPNDLVYVPTEEEKVTSSLIDFKNINKEQKQRIYKMVSSSGVQAFFIKSEVATSIVNKIEYSPLNKMEKTIDGVMIKGSFIKLKIDRLGNISL

SEQ ID NO: 22208 - protein, 1416 aa, unidentified
  REGION 1..1416: note = Cas Enzyme sequence
MTKILGLDLGTNSIGWALIDSKEKSIVDLDSRIIPMSQAILGKFDSGVTESQTAKRTEFRGTRRLLERHILRRERLHRVLHVMGFLPEHFDKSIDFENRLGKYINESEPKLAWKEIEPNCFEFVFKTSFNEMIKDFKISKPDLFELNNKGEERKIPYDWTIYYLRKKALQAKIEKEELAWLLLNFNQKRGYYQLRGEEDEETPNKLVEYHTLKVKEVTADDLQKGKTDRWYSVILENGWIYRRSSKTPLFDWKDNIKEFIVTTELNDDGTVKVDKEGIEKRSFRAPSDEDWTLVKKKTESVIDDSNKTVGCYIYDTLLQNPAQKINGKLVRTIERKYYKQELKAILEKQKEFHVELQNMELYKTCLEELYKNNESHRKSIATKDFTHLLLNDIIFYQRPLKSKKSLISNCKYEFRSFKDETTGEIIKEQIKCVAKSHPLYQELRLWKFVKDLRIIEREKLVDGKLKTDIDVTVEFLKSEDDYVALFDWLNDRNIIKQDTLLSSYFKIKKKKGNDKLSFRWNYVEDKEYPCNETRSQILSRLSKISNISVGFLDKEKELALWHLLFSVEDKLEIAKALKSFAIKYHLGDDFVEVFRKIPPFKKEYGAYSAKAINKLLPLMRMGKYWEEKSIDQKTKQRIDKILTGEYDERMRNRVREKSINLTELEHFKGLPEWLACYIVYDRHSEAGDVEKWKTPQDLNDFIREFKQNSLRNPIVEQVITETLRTVRDIWKKYGEFSEIHVELGREMKNPADKRKSMTEKISENENTNLRIKALLAELVNHNDVENVRPYSPNQQEILKIYEEGVINSGIDIPEDIAKIVKTSQPSKSDLTRYKLWLEQKYRSPYTGEMIPLGKLFTSAFEIEHVIPQKRYFDDSLSNKVICEAEVNNEKGQALGYEFIKNNEGRIIELSYGKTVKLFSITQYEEFVKQHYSKSRGKMKKLLMEDIPDLFIDRQLNDSRYISKVVMSLLSNIVREDGELETISKNVIPCTGLITDTLKQNWGLNDVWNRIVTPRFERMNELTKSNDFGHWTNKEGKRVFQTEMPLVLQKGFNKKRIDHRHHAMDALVIACATRSHVNYLNNESAKSSAKESRFDLRNTLCQKKYDDNKNYKWEIIKPWNTFTQDAQAALENIVVSFKQNLRVINKTVNKYQCYKDGKKRIETQVKGDSWAIRKPLHKETYYGIVNLRLKKSVRLSSCLDQWGNLVDKNLKTKIKQLINEGFDKKKIQKYFTNLENKWMGKDITNVEVYYFSNEDEVLVASREKLDDTFNTKKIESITDTGIKQILLNHLEQSKFQDQKDVNGKTIAPEILAFSAEGIEEMNQNITILNKGKFHQPIYKVRTYSRKGNKFNVGNKGNKNDKFVVAAPDTNLYFAIYIDGDGNRNFETIPLNIVIEHLKQRESPVLISKIDDKGNEYT

SEQ ID NO: 22209 - protein, 1106 aa, unidentified
  REGION 1..1106: note = Cas Enzyme sequence
SSSGYLGAISDRSKELYFNKQTVGQYFMQLLDEDPNTSLTNRVFYRQDYMDEFETIWEKQSEFHPELTQNLKREIRDIIIFYQRRLKSQKGLISYCELESWEIDVVRNGKVEKKTIGQRVIPRSSPLFQEFKIWQMLNDVEVFVKDARTKKRRQVKNPSLFEESNPSEILQIHGRRRLTEDEMILVASELSIRSEMKKEDVLKLLFDDWRSLDLNFKKLDGNKTGNALFEAYSKIIEMSGHFIDWKQSADDIIADAKKVFDALGWNSNILSFDSSKDLQSQDYYMLWHILYSYESDNSNTGNESLINKLVSFCGFEKEYAVVLSNVSFLDDYGSLSAKAIGKILPHLKDGNDYYLACELAGYKHSKSSITKEENEARILKDSLDLLPKNSLRNPVVEKILNQMVNVVNALMDEYGRPDEFRVELARELKKNQREREEMTRAINESTRVNKEIREVLMMEFGLPNVTRNDIVRYKLYQELKENGYHTLYSNTYISKEKLFSKDFDIEHIIPRSRLFDDSYSNKTLELRSINEEKGNQTAYDFVLSKYGETGLEEYINRCQALFPKDSAKLKKLLMQEADIPEGFVERDLRNTQYIAKKALSMLKNVCRNVVATTGSITDELRSDWQLIDVMKELNWDKYEEQGLVDYYKDKDGRSIGRIKDWSKRNDHRHHAMDALTVSFTNPALIQYYNNMNASSDKTGAIYQIKNKYFKEGRAISPIPLNEFRAEAKRHLENILVSIKAKNKVVTKNINVTKTGKGGTNKKIQLTPRGQLHNDTIYGSHKRVFYVEEKVGSSFDKEKISRVSNAKYRHALMERLEANAMNPKKAFTGANALSKKPIWIDQERGLQLPERVKVRNEEVVYTTRKLVDENLNVGKVIDPKVRAILENRLKEYGTAKKAFSNLDENPIYLNKEKGITIKRVTISGINNAYALREKDGKNGEKAPKDFVSTSNNHHVALFKRAIIDKDGVEGYEFCEVVVPFIEAVARVNFGDPIINFDYGKNEGWEFMFTMKQNEYFVFPNAKTGFDPHAIDLLDPKNYALISPNLFRVQKFSTKYYVFRHHLETSVKDVEELRDITWKRIQSLDSRLLGMVKVRIDHIGRIVSVGEY

SEQ ID NO: 22210 - protein, 1519 aa, unidentified
  REGION 1..1519: note = Cas Enzyme sequence
  SITE 155: note = misc_feature - Xaa can be any naturally occurring amino acid
  SITE 168: note = misc_feature - Xaa can be any naturally occurring amino acid
MKKILGLDLGTSSIGWALVNEAENENEKSSIIKLGVRVNPLTVNEQQNFEKGKSITTNAERTSKRSMRRNLQRYKLRRENLIEILKENGFITDETILSENGNYTTFETYRLRAKAVTEEITLEQFARVLLMINKKRGYKSNRKAKGAEEEGVLIXGMEVAKLLYEKDXTPGQYCLQLMEQGKKQLPDFYRSDLQEEFNRIWAKQQEFYPEILTDKLKENLREKSEKATWTICKEPFNIVGIPRTTKGEELKKENFAWRTKALSEKLDLESLAVVLQKINGQINNSSGYLGAISDRSKELYFNKQTVGQYQMTVLAQNPNASLRNMVFYRQDYLDEFNTIWEKQAEFHKKELTEELKKEIRDVIIFYQRRLKSQKGLIGFCEFESRQIEVEIDGKKKIKTVGSRVIPRSSPLFQEFKIWQTLNDIEIFPSNEKNKKRKPNARRLEQDEKELLFKELSIKEKLSKNQTLNLLDLQEFDMNFKNIDGNKTQYELFKAYKKIIEMSDYEIDDDFSIETVDEFFKQLGINTDILYFDSQSPLDEQPMYRLYHLLYSFEGDNSNSGVEKLIAILKKNYGFEERFAKILIGVEFQEDYGNLSAKAIGKILPLMKMGQDYATACSNIYERHSASSLTKEELENKIYKDRLEILPKNSLRNPVVEKILNQMVHVVNAIIADPQLGKPDEIRIELARELKKSADERFLLTDSVSSNTESAEKIRKRLKEEFSIFKTHEPSRNDIIRYRLWEELAPNGYKPLYGSKENLQKGISSEILFTKEIEVEHILPKARLFDDSFSNKTLVYSSDNKEKKEQTAIDYVMKKEGDLNDYLDRIISVYGTKTTKKVITNKKTRNKTIKTETKTFDTLYKEHEKGLKKQKEKIEKWNKATEKERKKLVKPWGLMSDIEKKIEIINKYYSNKLKKLVITESELPEGFINRDLANTQYITKKARKMLSDLVKSVVTTTGSITDRLREDWQLVDVMKEINFPKYKQLGLVENVERIDYETGEVLYTNKKIKDWTKRNDHRHHAMDALTVAFTKRQFIQYLNNLNARRTDKNQSISNTEEEEYDNFAITTEDMLLNTRDVLGIEKNYLYRDHRNKLRFYPPIPLNDFRAEAKYHLENTLISIKAKNKVTTQNINFTKRKGGVNKKTQQTPRGQLHLETVYGSQKQYVVKEESVNAKFDAEKIATVSKPAYREALLRRLQEFDNDPKKAFTGKNSLTKNPIWLNKLQTAQVPEKVKTISFETAYTIRKEISPDLKLDKVIDLGIRRILENRLKEFRNDAKKAFSNLDENPIRPNKEKGIAIKRVTISGISNAEALHDKRDKEGNLILDKNGKPQPVDFVNTGNNHHVAVYRKPVLDKNWNHAEDENGNKKYELEENVVSFYEAVSRKNLGLPVIDKTYKASEGWQFLFSMKQNEYFVFPRTEKVEKIDEETGEITEEEIVVFDPNDIDLLNPDNYKLISPNLFRVQKFSFKNYVFRHHLETTIKDTSSVLKGITWTDFRSSKGLDKIVKVRVNHIGKIVSVGEY

SEQ ID NO: 22211 - protein, 1379 aa, unidentified
  REGION 1..1379: note = Cas Enzyme sequence
  SITE 944: note = misc_feature - Xaa can be any naturally occurring amino acid
  SITE 955: note = misc_feature - Xaa can be any naturally occurring amino acid
  SITE 1145: note = misc_feature - Xaa can be any naturally occurring amino acid
MKRILGLDLGTTSIGWALVNEAENNEEQSTIIRLGVRVNPLSVDERSNFEKGKSITTNADRTLKRSMRRNLQRYKLRRAQLRKVLIENGFISEDTLLSENGKNTTYESYRLRAKAAKEEITLEQLARVLLMINKKRGYKSSRKLKGQDEGQIIDGMTIAKKLYDENLTPGEYLLSLHKEGKKYSPDFYRSDLLDELDKIWSEQSKYYPEILTEDFRKQIEGKGKLNTSKIFLAKYQIYTADNKAPDKKGQALEWRVKATKEKLPIEEMAFVIADVNGSISNSSGYLGEISDRSKELYFKKQTVGQNLYEKLISDRNFSLRNKTFYRQDYLDEFEKIWETQAKYHKELTPKLKKEIRDIIIFYQRRLKSQKGLINICEFEGKEIEYIVDGKAKKKLVGPRVCPKSSPLFQEFKIWQILNNVKVISKKDNADRFLYPEEMDTLAQELAIRESLKSDDALKILFNNYKDFKLNYEKLEGNRTISSLFDAYKKIVELSGHDISGFTKQRAPEVINAIKEVFTALGFNTGILWFDSLAKGKDLENQPLYILWHLLYSFEGDNSRTGNEALINKIMALTSFPKEFAAIISSISFQPDYGSLSTKAICKIIPHLKDGIAFAGRKERPEEPSACEYAGYRHSKHSLTKEEIENKKLLDRLEIIKKNSLRNPVVEKILNQMVNVVNAVIEKYGRPDEIRLELARELKNSAEERKSLTDTINKNTIENEQIRKILRTEFGLQYISRNDIIRYKLYKELEYRGYKTLYTNTYIPKEKLFSEEFDIEHIIPRSRLFDDSFSNKTLETREANIEKGNDTAYDYVLRKYGQEGLDSFLACIKDLEEKRIITGSKYKKLKTSINEIPDDFIDRDLRDTQYIARKAKEILETISKHVVTTTGSITARLREDWQLVDVMKDLNWDKYKALGLTEEIEGKNGQRVRVVKDWTKRNDHRHHAXDALVIAFTKRXYIQYLNNLNARSDKGSEIFAIEAKELERDNKGKLRFKAPIEIKAFRTIAKEHLENVLVSIKAKNKVVTRNINITKKKNGLNKKIQLTPRGQLHNETIYGSALRYVSKEEKVGAAFNEELINKVANKKYREALLNRLHTNGGDPKKAFTGKNSLAKQPIYLDKQRGIVVPDKVKIVNKELIYTIRKEVAPXLNVEKVLDKKVRLCLEARLKEYNNDPKKAFSNIDEYPIWLNKEKGIKIRRVTITGVANAQALHDKNDKDGKPVLDEYGNPIPVDFVNTGNNHHVAIYRDSKGILQERVVSFLEATTRAVLGLTIIDKEYNSELGWEFLFSMKQNEYFVFPDKDFKPNEIDLMKSENYSDVSPHLFRVQKLSTKDYWFRHHLDTTVDVHNALKGIAWLRIGPSGLEGAVKVRINHIGEIVFVGEE

SEQ ID NO: 22212 - protein, 1379 aa, unidentified
  REGION 1..1379: note = Cas Enzyme sequence
  SITE 386: note = misc_feature - Xaa can be any naturally occurring amino acid
  SITE 432: note = misc_feature - Xaa can be any naturally occurring amino acid
  SITE 544: note = misc_feature - Xaa can be any naturally occurring amino acid
  SITE 752: note = misc_feature - Xaa can be any naturally occurring amino acid
  SITE 761: note = misc_feature - Xaa can be any naturally occurring amino acid
MKRILGLDLGTTSIGWALVNEAENNEEQSTIIRLGVRVNPLSVDERSNFEKGKSITTNADRTLKRSMRRNLQRYKLRRAQLRKVLIENGFISEDTLLSENGENTTYESYRLRAKAAKEEITLEQLARVLLMINKKRGYKSSRKLKGQDEGQIIDGMTIAKKLYDENLTPGEYLLSLHKEGKKYSPDFYRSDLLDELDKIWSEQSKYYPEILTEDFRKQIEGKGKLNTSKIFLAKYQIYTADNKAPDKKGQALEWRVKATKEKLPIEEMAFVIADVNGSISNSSGYLGEISDRSKELYFKKQTVGQNLYEKLISDRNFSLRNKTFYRQDYLDEFEKIWETQAKYHKELTPKLKKEIRDIIIFYQRRLKSQKGLINICEFEGKEIEYXVDGKAKKKLVGPRVCPKSSPLFQEFKIWQILNNVKVISKKDNADRXLYPEEMDTLAQELAIRESLKSDDALKILFNNYKDFKLNYEKLEGNRTISSLFDAYKKIVELSGHDISGFTKQRAPEVINAIKEVFTALGFNTGILWFDSLAKGKDLENQPLXILWHLLYSFEGDNSRTGNEALINKIMALTSFPKEFAAIISSISFQPDYGSLSTKAICKIIPHLKDGIAFAGRKERPEEPSACEYAGYRHSKHSLTKEEIENKKLLDRLEIIKKNSLRNPVVEKILNQMVNVVNAVIEKYGRPDEIRLELARELKNSAEERKSLTDTINKNTIENEQIRKILRTEFGLQYISRNDIIRYKLYKELEYRXYKTLYTNTXIPKEKLFSEEFDIEHIIPRSRLFDDSFSNKTLETREANIEKGNDTAYDYVLRKYGQEGLDSFLACIKDLEEKRIITGSKYKKLKTSINEIPDDFIDRDLRDTQYIARKAKEILETISKHVVTTTGSITAKLREDWQLVDVMKDLNWDKYKALGLTEEIEGKNGQRVRVVKDWTKRNDHRHHAVDALVIAFTKRSYIQYLNNLNARSDKGSEIFAIEAKELERDNKGKLRFKAPIEIKAFRTIAKEHLENVLVSIKAKNKVVTRNINITKKKNGLNKKIQLTPRGQLHNETIYGSALRYVSKEEKVGAAFNEELINKVANKKYREALLNRLHTNGGDPKKAFTGKNSLAKQPIYLDKQRGIVVPDKVKIVNKELIYTIRKEVAPGLNVEKVLDKKVRLCLEARLKEYNNDPKKAFSNIDEYPIWLNKEKGIKIRRVTITGVANAQALHDKNDKDGKPVLDEYGNPIPVDFVNTGNNHHVAIYRDSKGILQERVVSFLEATTRAVLGLTIIDKEYNSELGWEFLFSMKQNEYFVFPDKDFKPNEIDLMKSENYSDVSPHLFRVQKLSTKDYWFRHHLDTTVDVHNALKGIAWLRIGPSGLEGAVKVRINHIGEIVFVGEE

SEQ ID NO: 22213 - protein, 1379 aa, unidentified
  REGION 1..1379: note = Cas Enzyme sequence
  SITE 386: note = misc_feature - Xaa can be any naturally occurring amino acid
  SITE 544: note = misc_feature - Xaa can be any naturally occurring amino acid
  SITE 709: note = misc_feature - Xaa can be any naturally occurring amino acid
  SITE 752: note = misc_feature - Xaa can be any naturally occurring amino acid
  SITE 761: note = misc_feature - Xaa can be any naturally occurring amino acid
  SITE 891: note = misc_feature - Xaa can be any naturally occurring amino acid
  SITE 1145: note = misc_feature - Xaa can be any naturally occurring amino acid
MKRILGLDLGTTSIGWALVNEAENNEEQSTIIRLGVRVNPLSVDERSNFEKGKSITTNADRTLKRSMRRNLQRYKLRRAQLRKVLIENGFISEDTLLSENGENTTYESYRLRAKAAKEEITLEQLARVLLMINKKRGYKSSRKLKGQDEGQIIDGMTIAKKLYDENLTPGEYLLSLHKEGKKYSPDFYRSDLLDELDKIWSEQSKYYPEILTEDFRKQIEGKGKLNTSKIFLAKYQIYTADNKAPDKKGQALEWRVKATKEKLPIEEMAFVIADVNGSISNSSGYLGEISDRSKELYFKKQTVGQNLYEKLISDRNFSLRNKTFYRQDYLDEFEKIWETQAKYHKELTPKLKKEIRDIIIFYQRRLKSQKGLINICEFEGKEIEYXVDGKAKKKLVGPRVCPKSSPLFQEFKIWQILNNVKVISKKDNADRFLYPEEMDTLAQELAIRESLKSDDALKILFNNYKDFKLNYEKLEGNRTISSLFDAYKKIVELSGHDISGFTKQRAPEVINAIKEVFTALGFNTGILWFDSLAKGKDLENQPLXILWHLLYSFEGDNSRTGNEALINKIMALTSFPKEFAAIISSISFQPDYGSLSTKAICKIIPHLKDGIAFAGRKERPEEPSACEYAGYRHSKHSLTKEEIENKKLLDRLEIIKKNSLRNPVVEKILNQMVNVVNAVIEKYGRPDEIRLELARELKNSAEERKSLTXTINKNTIENEQIRKILRTEFGLQYISRNDIIRYKLYKELEYRXYKTLYTNTXIPKEKLFSEEFDIEHIIPRSRLFDDSFSNKTLETREANIEKGNDTAYDYVLRKYGQEGLDSFLACIKDLEEKRIITGSKYKKLKTSINEIPDDFIDRDLRDTQYIARKAKEILETISKHVVTTTGSITAXLREDWQLVDVMKDLNWDKYKALGLTEEIEGKNGQRVRVVKDWTKRNDHRHHAVDALVIAFTKRSYIQYLNNLNARSDKGSEIFAIEAKELERDNKGKLRFKAPIEIKAFRTIAKEHLENVLVSIKAKNKVVTRNINITKKKNGLNKKIQLTPRGQLHNETIYGSALRYVSKEEKVGAAFNEELINKVANKKYREALLNRLHTNGGDPKKAFTGKNSLAKQPIYLDKQRGIVVPDKVKIVNKELIYTIRKEVAPXLNVEKVLDKKVRLCLEARLKEYNNDPKKAFSNIDEYPIWLNKEKGIKIRRVTITGVANAQALHDKNDKDGKPVLDEYGNPIPVDFVNTGNNHHVAIYRDSKGILQERVVSFLEATTRAVLGLTIIDKEYNSELGWEFLFSMKQNEYFVFPDKDFKPNEIDLMKSENYSDVSPHLFRVQKLSTKDYWFRHHLDTTVDVHNALKGIAWLRIGPSGLEGAVKVRINHIGEIVFVGEE

SEQ ID NO: 22214 - protein, 1119 aa, unidentified
  REGION 1..1119: note = Cas Enzyme sequence
  SITE 36: note = misc_feature - Xaa can be any naturally occurring amino acid
MPVLKHLKYSIMKKILGLDLGTNSIGWALIQQDFDXKKGEILGMGSRIIPMTQDVLDTFSGGKPLETQTAARTSYRGIRRIRERHLLRRERLHRVLNILGFLPDHYANQIDFEKRLGQFLDEKEPKLVYKNKEFIFKESFEEMLNDFKQSQPSLFYKKSNGKETRIPYDWTIYYLRKKALNQKIAKEELAWIILNFNQKRGYYQLRGEEEEENLNKLVEFHSLKIVDVKADEKPNNKGDLWYSLYLENGWIYRRSSKIPLYDWKDKVRDFIVTTDLNDDGTIKKDKEGNERRSFRAPSEDDWTLLKKKTEQEIEKSNKTVGTYIYENILQNPSQKIRGKLVRTIERKFYKEELIAILKKQIELQPELFTDDLYNDCVRELYRNNEAQQLVLSKRDFVHLFVDDIIFYQRPLRSQKSSIGNCSLEYRVYKDKDGNQVKEYLKAIPKSHPLYQEFRVWQWLSNLKIYRKEDDSDVTNHFIKNDEDKVALFEFLMEQKEVGHKDILKHLLTPVLKEQYPGAKTAAFNKEVDKEIAKYRWNYVFDDSKEKEEDKSKKYPCNTTGYEIRRRLVKVSNVPINFLTPQIEQHLWHIIYSVTDKKEYEAALKSFANKYHLEENSFVEEFRHFPPFKSEYGAYSEKAIKKLLPLMRLGKYWCWDAIDSKTQGRIDKIISGEYDETIKNRVREKAINLTDNTHFQGLPIWLASYIVYDRHSEADIAGKWNSVTDLEQYLEDFKQHSLHNPIVEQIVTETLRVVRDIWKHYGQGAKDFFNEIHVELGRDMKNTSEERQRLTNIVSSNEATNLRIKALLNELKENSDGKLAVENVRPYSLMQQDALRIYEDGVLNSKIELPEDIIKISKSAQPSKTELQRYKLWLEQKYRSPYTGQMIPLGRLFTEDYQIEHIIPKSRYFDDSFSNKVICESAVNQLKDKQLGLEFIKNHQGEKVECGMGKVVEILTEEAYQTFVKEHYSKNKTKRQNLLLDEIPEGMISRQMNDTRYISKFISGLLSNLVRAEKDDDGINSKNLIPGNGNITTVLKKDWGMDAVWNDLILPRFERMNQLTNTNTFTYWNEQFQKYLPVDYSPIDSKRIEKKRIDHRHHAMDALVIACMTRDHVNLLNNQS

SEQ ID NO: 22215 - protein, 1078 aa, unidentified
  REGION 1..1078: note = Cas Enzyme sequence
LGMYSGQTLRLSTLGLWELRAKAVTEQVSLPELGRVLCHINQKRGYRTVKSDFEDKKQGKYVEAVVGRYRELHAQGLTVGQYLYKELSSDPAFRCKDRVYPRAAYVEEYDAIMDCQKRFYPEVLTGEVIAHLRDYIIFHQRPLKSCKHLVARCELERREALIGGRIRNCGPRVAPRSSPLFQVCKLWEMINNLRIENKEGDPLVLTLEQKQALFAFMNTHAKFTAAKLTSVLGLKSREWKIANAIGTGLQGNTTYCALSAALEKCPDRGKLLAFELHAVDGDKVHADTGEIVQVIDTSFEKQPLYRLWHALYSISDIDTLREVLGQNFGIADPETLDRLCRIDFVKSGYGNKSSRALRKILPYLQQGMQYYQAKCMAGYDDAPWNKEQNQARELAERLLPVPKGELRQPVVEKVLNQLVNLVNALMAEYGPFDEIRVELARELQQSREERESASRSMAENNKRNEQVAQKIQQEYGLTPTRSRIQKYRLWTESDHQCMYCGQLVNVAEFLRGVDVEVEHIIPRSMLFDDSYSNKVCACRKCNKDKDNRTAFDFMKTKPEGEFAAYLERVNSLAEAYKPNRGLDVGISETKKRKLLMRKQDIPTDFIARQMRETQYISKKAKEMLQTVCRNVYSTSGSITDYIRHVWGWDDVLHEINFEGYRAAGLVQTCEREVDGRKQQVERIVDWSKRLDHRHHALDALVIACTKQGYIQRINNLASLGEITFRSDAGKAPSGASRERHTRLERYIRMQPHFSRAEVIRAVKGIAVSFKADKRTVTPGKRYVYRKGKRICVQRGILVPRGPLSEESVYGRIHDEGKEKYVLRYEVDTIDLKKLGSVVDQGIREILRQRLEQFGGNPKKAYATPVYDHQGRAIRSVRCFTNLKVAVPLRYDEQGQPIAFVKTGNNHHVAIYEDEKGRWHEHMVTFWHAVDRKRYGLPILITDPGDVWDRVTDRMPEDFQRQLPPSATWRFVFSMQRNEMFVLGMEEEAYRKALSEQDTATLCQYLYRVQNITAGAYVFRKHTETQSDDRYPDEHGEKIFSLPKSKARGAVHWIKSFGALQALNPHKVHVSITGKISEV

SEQ ID NO: 22216 - protein, 1087 aa, unidentified
  REGION 1..1087: note = Cas Enzyme sequence
MLLGESVMKTSFAFDIGTNSIGWCVLALDNANLPYRILDAGVRIFSDGREPKSGTSLAEGRRLARGMSRRRDRYKRRRKAVIRTLIEYGLMPDDPAARRALVAETNDKAPGKIASDVYALRARALDDKLPLHHIGRALFHINQRRGFKSNRKTDKRDNDQGKIASGISRLRDKLASEGMRTLGEYLNHRHQAGNWVRVRPSRVPGKDDKEEDGYGFYPERALLQDEFNAIWTAQAAHYPDVLTEERRTHLETIIFFQRPLKPVQVGKCSFNPGEERLPRAHPLFQEFRLYKEVNELELVDRNQDHHKLSLDQRDALIAQLKTQREAAYSALRKTARAPLGTRFNKETESRTKMKGDEVAAELSAKTRFGQAWISMPLEERWIIVDTLRRVEDPLELTAWLEQHYGLDGEHIDAILAARLPEGYGRLGETALTEILVELKAAVISEAEAARRAGYDHALLQRGAGLEALPKYQEVIARRIPPGTGNPDDPYDVEKGRITNPTVHIGLNQLQKVLNALIRRYGKPEQIAIELARELKLNDEQKREKNIEIARNTRAAEQRSAKLVELGVPDTGYNRVLLKLWEELNLRAPENRVCIYCGEPINIETLFSSAVDIDHILPWSKTLDDSQANRLVCHVACNRQKANYAPAEVPQWQGRYDDILARANTLPLNKRWRFGRDAMKKFADEETFLARQLTDTQYLSRLAHAYMAALYPDEEPDAQGVLARKNHVRVITGRMTEMLRRQWGLNSLLADHNQKNRNDHRHHAIDAAVVGVTTRALLQRIATVAGGREAQALEETIGKIEPPWPGFRDELQAVIKRIVVSHKPDHGTLPKPGQGGQTAGQLHNDTAYGLTGETDSRGTPIVVRRKPFTSLTEKDLPSIRDRQLAQALGSAIAGRSGKELQAALEQFRDRDDYKSIRHVRVVEPLNVIPIRDGTGRAYKAYKGDANYRYDVWELPNGKWMHEVVSMFDAHDRSWTSAVHIHHPAARRVLSLKQNDMVAYDHPQDGPTIGRVVKFSQSGQMTFAPHKEAGALKARDADPEDRFRYFYKSGSAMKDIGLRQVRVDEIGRVFDPGPRDKEARNARKKKSTD
